United States Patent Application Publication US 2014/0004565 A1 - sequence listing, part 23

SEQ ID NO: 461063 - RNA, 19 nt, Artificial Sequence
  Description of Artificial Sequence: Synthetic oligonucleotide
aacaccacuauuuuauuug

SEQ ID NO: 461064 - RNA, 19 nt, Artificial Sequence
  Description of Artificial Sequence: Synthetic oligonucleotide
ucuuggaacaugaacauga

SEQ ID NO: 461065 - RNA, 19 nt, Artificial Sequence
  Description of Artificial Sequence: Synthetic oligonucleotide
aauaacaggacugacguga

SEQ ID NO: 461066 - RNA, 19 nt, Artificial Sequence
  Description of Artificial Sequence: Synthetic oligonucleotide
cuuuauauaguucacagca

SEQ ID NO: 461067 - RNA, 19 nt, Artificial Sequence
  Description of Artificial Sequence: Synthetic oligonucleotide
aauaucaacccacgucccc

SEQ ID NO: 461068 - RNA, 19 nt, Artificial Sequence
  Description of Artificial Sequence: Synthetic oligonucleotide
ugaucugugguacacaucu

SEQ ID NO: 461069 - RNA, 19 nt, Artificial Sequence
  Description of Artificial Sequence: Synthetic oligonucleotide
ucaacugacaaagaacugg

SEQ ID NO: 461070 - RNA, 19 nt, Artificial Sequence
  Description of Artificial Sequence: Synthetic oligonucleotide
ugagauaguuacuugacca

SEQ ID NO: 461071 - RNA, 19 nt, Artificial Sequence
  Description of Artificial Sequence: Synthetic oligonucleotide
aguuguguguucuuauacc

SEQ ID NO: 461072 - RNA, 19 nt, Artificial Sequence
  Description of Artificial Sequence: Synthetic oligonucleotide
auuaagagguuuuauuaag

SEQ ID NO: 461073 - RNA, 19 nt, Artificial Sequence
  Description of Artificial Sequence: Synthetic oligonucleotide
gauaguucggcccagucgc

SEQ ID NO: 461074 - RNA, 19 nt, Artificial Sequence
  Description of Artificial Sequence: Synthetic oligonucleotide
cauaggauuauguaagaag

SEQ ID NO: 461075 - RNA, 19 nt, Artificial Sequence
  Description of Artificial Sequence: Synthetic oligonucleotide
uuauuaagagguuuuauua

SEQ ID NO: 461076 - RNA, 19 nt, Artificial Sequence
  Description of Artificial Sequence: Synthetic oligonucleotide
uggagaacugaaauaacag

SEQ ID NO: 461077 - RNA, 19 nt, Artificial Sequence
  Description of Artificial Sequence: Synthetic oligonucleotide
gaaaggaagucuucuaugc

SEQ ID NO: 461078 - RNA, 19 nt, Artificial Sequence
  Description of Artificial Sequence: Synthetic oligonucleotide
uagauuugcaucuaaugca

SEQ ID NO: 461079 - RNA, 19 nt, Artificial Sequence
  Description of Artificial Sequence: Synthetic oligonucleotide
ucaacuuguaaaauuuucu

SEQ ID NO: 461080 - RNA, 19 nt, Artificial Sequence
  Description of Artificial Sequence: Synthetic oligonucleotide
acuaguaauggcugcaggg

SEQ ID NO: 461081 - RNA, 19 nt, Artificial Sequence
  Description of Artificial Sequence: Synthetic oligonucleotide
uugugaucacucuuaaggg

SEQ ID NO: 461082 - RNA, 19 nt, Artificial Sequence
  Description of Artificial Sequence: Synthetic oligonucleotide
uaaagacuauagcugaagc

SEQ ID NO: 461083 - RNA, 19 nt, Artificial Sequence
  Description of Artificial Sequence: Synthetic oligonucleotide
uguaggccugguaauagcg

SEQ ID NO: 461084 - RNA, 19 nt, Artificial Sequence
  Description of Artificial Sequence: Synthetic oligonucleotide
gaugcgugcuuuuauggcg

SEQ ID NO: 461085 - RNA, 19 nt, Artificial Sequence
  Description of Artificial Sequence: Synthetic oligonucleotide
aaaccuugguacuuuacca

SEQ ID NO: 461086 - RNA, 19 nt, Artificial Sequence
  Description of Artificial Sequence: Synthetic oligonucleotide
auagcugaagcuugcuugc

SEQ ID NO: 461087 - RNA, 19 nt, Artificial Sequence
  Description of Artificial Sequence: Synthetic oligonucleotide
ugagugacuaacuuuguga

SEQ ID NO: 461088 - RNA, 19 nt, Artificial Sequence
  Description of Artificial Sequence: Synthetic oligonucleotide
uuaaguauucugcaaguuc

SEQ ID NO: 461089 - RNA, 19 nt, Artificial Sequence
  Description of Artificial Sequence: Synthetic oligonucleotide
uaucauuuaccucuucuga

SEQ ID NO: 461090 - RNA, 19 nt, Artificial Sequence
  Description of Artificial Sequence: Synthetic oligonucleotide
uuauauaguucacagcauc

SEQ ID NO: 461091 - RNA, 19 nt, Artificial Sequence
  Description of Artificial Sequence: Synthetic oligonucleotide
aauccguauuuugaaauuc

SEQ ID NO: 461092 - RNA, 19 nt, Artificial Sequence
  Description of Artificial Sequence: Synthetic oligonucleotide
uugacuaacugcuuuacaa

SEQ ID NO: 461093 - RNA, 19 nt, Artificial Sequence
  Description of Artificial Sequence: Synthetic oligonucleotide
uuuaccucuucugauaacc

SEQ ID NO: 461094 - RNA, 19 nt, Artificial Sequence
  Description of Artificial Sequence: Synthetic oligonucleotide
uauguaagaagaaaauguu

SEQ ID NO: 461095 - RNA, 19 nt, Artificial Sequence
  Description of Artificial Sequence: Synthetic oligonucleotide
ucggaaauaaacuccucag

SEQ ID NO: 461096 - RNA, 19 nt, Artificial Sequence
  Description of Artificial Sequence: Synthetic oligonucleotide
aacaagauccuuaacagau

SEQ ID NO: 461097 - RNA, 19 nt, Artificial Sequence
  Description of Artificial Sequence: Synthetic oligonucleotide
gaaauaacaggacugacgu

SEQ ID NO: 461098 - RNA, 19 nt, Artificial Sequence
  Description of Artificial Sequence: Synthetic oligonucleotide
aaggguauuacuccucugu

SEQ ID NO: 461099 - RNA, 19 nt, Artificial Sequence
  Description of Artificial Sequence: Synthetic oligonucleotide
uauuaagagguuuuauuaa

SEQ ID NO: 461100 - RNA, 19 nt, Artificial Sequence
  Description of Artificial Sequence: Synthetic oligonucleotide
ugucuaacucaucaguuga

SEQ ID NO: 461101 - RNA, 19 nt, Artificial Sequence
  Description of Artificial Sequence: Synthetic oligonucleotide
uacgcuuucugccaguccc

SEQ ID NO: 461102 - RNA, 19 nt, Artificial Sequence
  Description of Artificial Sequence: Synthetic oligonucleotide
ugauuguacgcuuucugcc

SEQ ID NO: 461103 - RNA, 19 nt, Artificial Sequence
  Description of Artificial Sequence: Synthetic oligonucleotide
uaaugcaacaccacuauuu

SEQ ID NO: 461104 - RNA, 19 nt, Artificial Sequence
  Description of Artificial Sequence: Synthetic oligonucleotide
ugaacguaccaccucaaga

SEQ ID NO: 461105 - RNA, 19 nt, Artificial Sequence
  Description of Artificial Sequence: Synthetic oligonucleotide
uugauuguacgcuuucugc

SEQ ID NO: 461106 - RNA, 19 nt, Artificial Sequence
  Description of Artificial Sequence: Synthetic oligonucleotide
aauucacugcuguaggccu

SEQ ID NO: 461107 - RNA, 19 nt, Artificial Sequence
  Description of Artificial Sequence: Synthetic oligonucleotide
uguuuuaugggguacucaa

SEQ ID NO: 461108 - RNA, 19 nt, Artificial Sequence
  Description of Artificial Sequence: Synthetic oligonucleotide
uauuaaguauucugcaagu

SEQ ID NO: 461109 - RNA, 19 nt, Artificial Sequence
  Description of Artificial Sequence: Synthetic oligonucleotide
uagacaaggcaucaaacuc

SEQ ID NO: 461110 - RNA, 19 nt, Artificial Sequence
  Description of Artificial Sequence: Synthetic oligonucleotide
auaggauuauguaagaaga

SEQ ID NO: 461111 - RNA, 19 nt, Artificial Sequence
  Description of Artificial Sequence: Synthetic oligonucleotide
ucugagauaguuacuugac

SEQ ID NO: 461112 - RNA, 19 nt, Artificial Sequence
  Description of Artificial Sequence: Synthetic oligonucleotide
aagacuauagcugaagcuu

SEQ ID NO: 461113 - RNA, 19 nt, Artificial Sequence
  Description of Artificial Sequence: Synthetic oligonucleotide
ugggauuuuguugugaaga

SEQ ID NO: 461114 - RNA, 19 nt, Artificial Sequence
  Description of Artificial Sequence: Synthetic oligonucleotide
aaugcaacaccacuauuuu

SEQ ID NO: 461115 - RNA, 19 nt, Artificial Sequence
  Description of Artificial Sequence: Synthetic oligonucleotide
ucuaaugcaacaccacuau

SEQ ID NO: 461116 - RNA, 19 nt, Artificial Sequence
  Description of Artificial Sequence: Synthetic oligonucleotide
cucuuaaggguauuacucc

SEQ ID NO: 461117 - RNA, 19 nt, Artificial Sequence
  Description of Artificial Sequence: Synthetic oligonucleotide
caaaccuugguacuuuacc

SEQ ID NO: 461118 - RNA, 19 nt, Artificial Sequence
  Description of Artificial Sequence: Synthetic oligonucleotide
ugacugagauuccucauca

SEQ ID NO: 461119 - RNA, 19 nt, Artificial Sequence
  Description of Artificial Sequence: Synthetic oligonucleotide
ucaauuuacuuaaaaucuu

SEQ ID NO: 461120 - RNA, 19 nt, Artificial Sequence
  Description of Artificial Sequence: Synthetic oligonucleotide
guaauagcgcugaagagcc

SEQ ID NO: 461121 - RNA, 19 nt, Artificial Sequence
  Description of Artificial Sequence: Synthetic oligonucleotide
cuagauucagaacucuuug

SEQ ID NO: 461122 - RNA, 19 nt, Artificial Sequence
  Description of Artificial Sequence: Synthetic oligonucleotide
uuuaccaggagagaaugcu

SEQ ID NO: 461123 - RNA, 19 nt, Artificial Sequence
  Description of Artificial Sequence: Synthetic oligonucleotide
ggagaacugaaauaacagg

SEQ ID NO: 461124 - RNA, 19 nt, Artificial Sequence
  Description of Artificial Sequence: Synthetic oligonucleotide
uauccugucgcccaccaac

SEQ ID NO: 461125 - RNA, 19 nt, Artificial Sequence
  Description of Artificial Sequence: Synthetic oligonucleotide
caaguucggaaauaaacuc

SEQ ID NO: 461126 - RNA, 19 nt, Artificial Sequence
  Description of Artificial Sequence: Synthetic oligonucleotide
uugucuaacucaucaguug

SEQ ID NO: 461127 - RNA, 19 nt, Artificial Sequence
  Description of Artificial Sequence: Synthetic oligonucleotide
ucuagauucagaacucuuu

SEQ ID NO: 461128 - RNA, 19 nt, Artificial Sequence
  Description of Artificial Sequence: Synthetic oligonucleotide
ugugaucacucuuaagggu

SEQ ID NO: 461129 - RNA, 19 nt, Artificial Sequence
  Description of Artificial Sequence: Synthetic oligonucleotide
uuauggcgagcuacaaagg

SEQ ID NO: 461130 - RNA, 19 nt, Artificial Sequence
  Description of Artificial Sequence: Synthetic oligonucleotide
accaccucaagauacauuu

SEQ ID NO: 461131 - RNA, 19 nt, Artificial Sequence
  Description of Artificial Sequence: Synthetic oligonucleotide
accaacacaagcugccuuc

SEQ ID NO: 461132 - RNA, 19 nt, Artificial Sequence
  Description of Artificial Sequence: Synthetic oligonucleotide
ugacuaacugcuuuacaac

SEQ ID NO: 461133 - RNA, 19 nt, Artificial Sequence
  Description of Artificial Sequence: Synthetic oligonucleotide
ucuuaaggguauuacuccu

SEQ ID NO: 461134 - RNA, 19 nt, Artificial Sequence
  Description of Artificial Sequence: Synthetic oligonucleotide
uaucaguacacacugucuu

SEQ ID NO: 461135 - RNA, 19 nt, Artificial Sequence
  Description of Artificial Sequence: Synthetic oligonucleotide
ucuuauaccuuuucuuuau

SEQ ID NO: 461136 - RNA, 19 nt, Artificial Sequence
  Description of Artificial Sequence: Synthetic oligonucleotide
gugacuaacuuugugauca

SEQ ID NO: 461137 - RNA, 19 nt, Artificial Sequence
  Description of Artificial Sequence: Synthetic oligonucleotide
caccccuuuguuaucaagg

SEQ ID NO: 461138 - RNA, 19 nt, Artificial Sequence
  Description of Artificial Sequence: Synthetic oligonucleotide
uugcaucuaaugcaacacc

SEQ ID NO: 461139 - RNA, 19 nt, Artificial Sequence
  Description of Artificial Sequence: Synthetic oligonucleotide
aucaguacacacugucuuc

SEQ ID NO: 461140 - RNA, 19 nt, Artificial Sequence
  Description of Artificial Sequence: Synthetic oligonucleotide
aaauccguauuuugaaauu

SEQ ID NO: 461141 - RNA, 19 nt, Artificial Sequence
  Description of Artificial Sequence: Synthetic oligonucleotide
cucguaaacggccacugcc

SEQ ID NO: 461142 - RNA, 19 nt, Artificial Sequence
  Description of Artificial Sequence: Synthetic oligonucleotide
aaauaacaggacugacgug

SEQ ID NO: 461143 - RNA, 19 nt, Artificial Sequence
  Description of Artificial Sequence: Synthetic oligonucleotide
uauguucuagauucagaac

SEQ ID NO: 461144 - RNA, 19 nt, Artificial Sequence
  Description of Artificial Sequence: Synthetic oligonucleotide
aaguugaacaugagguuag

SEQ ID NO: 461145 - RNA, 19 nt, Artificial Sequence
  Description of Artificial Sequence: Synthetic oligonucleotide
ucauagguuuuacacaguu

SEQ ID NO: 461146 - RNA, 19 nt, Artificial Sequence
  Description of Artificial Sequence: Synthetic oligonucleotide
gagauaguuacuugaccac

SEQ ID NO: 461147 - RNA, 19 nt, Artificial Sequence
  Description of Artificial Sequence: Synthetic oligonucleotide
uccuuaacagauagagaca

SEQ ID NO: 461148 - RNA, 19 nt, Artificial Sequence
  Description of Artificial Sequence: Synthetic oligonucleotide
agggccaucauuaaaucag

SEQ ID NO: 461149 - RNA, 19 nt, Artificial Sequence
  Description of Artificial Sequence: Synthetic oligonucleotide
gguaauagcgcugaagagc

SEQ ID NO: 461150 - RNA, 19 nt, Artificial Sequence
  Description of Artificial Sequence: Synthetic oligonucleotide
uccucucacacuuccagug

SEQ ID NO: 461151 - RNA, 19 nt, Artificial Sequence
  Description of Artificial Sequence: Synthetic oligonucleotide
uuaccaggagagaaugcug

SEQ ID NO: 461152 - RNA, 19 nt, Artificial Sequence
  Description of Artificial Sequence: Synthetic oligonucleotide
uucaacugacaaagaacug

SEQ ID NO: 461153 - RNA, 19 nt, Artificial Sequence
  Description of Artificial Sequence: Synthetic oligonucleotide
aauagcgcugaagagccca

SEQ ID NO: 461154 - RNA, 19 nt, Artificial Sequence
  Description of Artificial Sequence: Synthetic oligonucleotide
uugauugacuaacugcuuu

SEQ ID NO: 461155 - RNA, 19 nt, Artificial Sequence
  Description of Artificial Sequence: Synthetic oligonucleotide
uaaucugauguuguuguac

SEQ ID NO: 461156 - RNA, 19 nt, Artificial Sequence
  Description of Artificial Sequence: Synthetic oligonucleotide
ugguaauagcgcugaagag

SEQ ID NO: 461157 - RNA, 19 nt, Artificial Sequence
  Description of Artificial Sequence: Synthetic oligonucleotide
aggguauuacuccucuguc

SEQ ID NO: 461158 - RNA, 19 nt, Artificial Sequence
  Description of Artificial Sequence: Synthetic oligonucleotide
agaaauuuuauuacauuaa

SEQ ID NO: 461159 - RNA, 19 nt, Artificial Sequence
  Description of Artificial Sequence: Synthetic oligonucleotide
uuuuauggcgagcuacaaa

SEQ ID NO: 461160 - RNA, 19 nt, Artificial Sequence
  Description of Artificial Sequence: Synthetic oligonucleotide
uguguugagugacuaacuu

SEQ ID NO: 461161 - RNA, 19 nt, Artificial Sequence
  Description of Artificial Sequence: Synthetic oligonucleotide
auaucaacccacguccccg

SEQ ID NO: 461162 - RNA, 19 nt, Artificial Sequence
  Description of Artificial Sequence: Synthetic oligonucleotide
uuccgaguaguguugguga

SEQ ID NO: 461163 - RNA, 19 nt, Artificial Sequence
  Description of Artificial Sequence: Synthetic oligonucleotide
cugagauaguuacuugacc

SEQ ID NO: 461164 - RNA, 19 nt, Artificial Sequence
  Description of Artificial Sequence: Synthetic oligonucleotide
auuaacagggguggguggg

SEQ ID NO: 461165 - RNA, 19 nt, Artificial Sequence
  Description of Artificial Sequence: Synthetic oligonucleotide
guuguacagguuugaaacc

SEQ ID NO: 461166 - RNA, 19 nt, Artificial Sequence
  Description of Artificial Sequence: Synthetic oligonucleotide
gauuguacgcuuucugcca

SEQ ID NO: 461167 - RNA, 19 nt, Artificial Sequence
  Description of Artificial Sequence: Synthetic oligonucleotide
ggugacgucaugcuguucc

SEQ ID NO: 461168 - RNA, 19 nt, Artificial Sequence
  Description of Artificial Sequence: Synthetic oligonucleotide
ucguaaacggccacugcca

SEQ ID NO: 461169 - RNA, 19 nt, Artificial Sequence
  Description of Artificial Sequence: Synthetic oligonucleotide
ucugggauuccaagucuag

SEQ ID NO: 461170 - RNA, 19 nt, Artificial Sequence
  Description of Artificial Sequence: Synthetic oligonucleotide
cucacugaccacuacugug

SEQ ID NO: 461171 - RNA, 19 nt, Artificial Sequence
  Description of Artificial Sequence: Synthetic oligonucleotide
agugaaaaucaccccuuug

SEQ ID NO: 461172 - RNA, 19 nt, Artificial Sequence
  Description of Artificial Sequence: Synthetic oligonucleotide
acugaaauaacaggacuga

SEQ ID NO: 461173 - RNA, 19 nt, Artificial Sequence
  Description of Artificial Sequence: Synthetic oligonucleotide
agcaugagaugacugagau

SEQ ID NO: 461174 - RNA, 19 nt, Artificial Sequence
  Description of Artificial Sequence: Synthetic oligonucleotide
acugccaacgaguuccuca

SEQ ID NO: 461175 - RNA, 19 nt, Artificial Sequence
  Description of Artificial Sequence: Synthetic oligonucleotide
aacuacagugccucguaaa

SEQ ID NO: 461176 - RNA, 19 nt, Artificial Sequence
  Description of Artificial Sequence: Synthetic oligonucleotide
guguagggaggauuaacag

SEQ ID NO: 461177 - RNA, 19 nt, Artificial Sequence
  Description of Artificial Sequence: Synthetic oligonucleotide
gguauuacuccucugucac

SEQ ID NO: 461178 - RNA, 19 nt, Artificial Sequence
  Description of Artificial Sequence: Synthetic oligonucleotide
ugaauggucucaucaccug

SEQ ID NO: 461179 - RNA, 19 nt, Artificial Sequence
  Description of Artificial Sequence: Synthetic oligonucleotide
auuguacgcuuucugccag

SEQ ID NO: 461180 - RNA, 19 nt, Artificial Sequence
  Description of Artificial Sequence: Synthetic oligonucleotide
uugaauuguguagggagga

SEQ ID NO: 461181 - RNA, 19 nt, Artificial Sequence
  Description of Artificial Sequence: Synthetic oligonucleotide
uuacaaccaaaccuuggua

SEQ ID NO: 461182 - RNA, 19 nt, Artificial Sequence
  Description of Artificial Sequence: Synthetic oligonucleotide
gaacaagauccuuaacaga

SEQ ID NO: 461183 - RNA, 19 nt, Artificial Sequence
  Description of Artificial Sequence: Synthetic oligonucleotide
uuuauccugucgcccacca

SEQ ID NO: 461184 - RNA, 19 nt, Artificial Sequence
  Description of Artificial Sequence: Synthetic oligonucleotide
ugcuuuuauggcgagcuac

SEQ ID NO: 461185 - RNA, 19 nt, Artificial Sequence
  Description of Artificial Sequence: Synthetic oligonucleotide
acugacgugaggugcagga

SEQ ID NO: 461186 - RNA, 19 nt, Artificial Sequence
  Description of Artificial Sequence: Synthetic oligonucleotide
ugaacacugaacguaccac

SEQ ID NO: 461187 - RNA, 19 nt, Artificial Sequence
  Description of Artificial Sequence: Synthetic oligonucleotide
uggaauaguauuugccuuu

SEQ ID NO: 461188 - RNA, 19 nt, Artificial Sequence
  Description of Artificial Sequence: Synthetic oligonucleotide
acguaccaccucaagauac

SEQ ID NO: 461189 - RNA, 19 nt, Artificial Sequence
  Description of Artificial Sequence: Synthetic oligonucleotide
aauaaacuccucaggcgca

SEQ ID NO: 461190 - RNA, 19 nt, Artificial Sequence
  Description of Artificial Sequence: Synthetic oligonucleotide
uuacuccucugucacagau

SEQ ID NO: 461191 - RNA, 19 nt, Artificial Sequence
  Description of Artificial Sequence: Synthetic oligonucleotide
auugacuaacugcuuuaca

SEQ ID NO: 461192 - RNA, 19 nt, Artificial Sequence
  Description of Artificial Sequence: Synthetic oligonucleotide
ugauugacuaacugcuuua

SEQ ID NO: 461193 - RNA, 19 nt, Artificial Sequence
  Description of Artificial Sequence: Synthetic oligonucleotide
ucagugaaaaucaccccuu

SEQ ID NO: 461194 - RNA, 19 nt, Artificial Sequence
  Description of Artificial Sequence: Synthetic oligonucleotide
gaacguaccaccucaagau

SEQ ID NO: 461195 - RNA, 19 nt, Artificial Sequence
  Description of Artificial Sequence: Synthetic oligonucleotide
ugcauccguucacugaaca

SEQ ID NO: 461196 - RNA, 19 nt, Artificial Sequence
  Description of Artificial Sequence: Synthetic oligonucleotide
cuuaaggguauuacuccuc

SEQ ID NO: 461197 - RNA, 19 nt, Artificial Sequence
  Description of Artificial Sequence: Synthetic oligonucleotide
agacaugaacacugaacgu

SEQ ID NO: 461198 - RNA, 19 nt, Artificial Sequence
  Description of Artificial Sequence: Synthetic oligonucleotide
uuugauugacuaacugcuu

SEQ ID NO: 461199 - RNA, 19 nt, Artificial Sequence
  Description of Artificial Sequence: Synthetic oligonucleotide
uagggaggauuaacagggg

SEQ ID NO: 461200 - RNA, 19 nt, Artificial Sequence
  Description of Artificial Sequence: Synthetic oligonucleotide
auguaauauguucuagauu

SEQ ID NO: 461201 - RNA, 19 nt, Artificial Sequence
  Description of Artificial Sequence: Synthetic oligonucleotide
ugggguacucaacuuguaa

SEQ ID NO: 461202 - RNA, 19 nt, Artificial Sequence
  Description of Artificial Sequence: Synthetic oligonucleotide
uacacaucuuccgggagca

SEQ ID NO: 461203 - RNA, 19 nt, Artificial Sequence
  Description of Artificial Sequence: Synthetic oligonucleotide
cucuacugaugcuuccacc

SEQ ID NO: 461204 - RNA, 19 nt, Artificial Sequence
  Description of Artificial Sequence: Synthetic oligonucleotide
agagcccacggaugcgugc

SEQ ID NO: 461205 - RNA, 19 nt, Artificial Sequence
  Description of Artificial Sequence: Synthetic oligonucleotide
uucuugcaauuuaucauuu

SEQ ID NO: 461206 - RNA, 19 nt, Artificial Sequence
  Description of Artificial Sequence: Synthetic oligonucleotide
cacuaguaauggcugcagg

SEQ ID NO: 461207 - RNA, 19 nt, Artificial Sequence
  Description of Artificial Sequence: Synthetic oligonucleotide
ucugugaccuucagcugcu

SEQ ID NO: 461208 - RNA, 19 nt, Artificial Sequence
  Description of Artificial Sequence: Synthetic oligonucleotide
aggcgcaucuugcacaugu

SEQ ID NO: 461209 - RNA, 19 nt, Artificial Sequence
  Description of Artificial Sequence: Synthetic oligonucleotide
guuguguguucuuauaccu

SEQ ID NO: 461210 - RNA, 19 nt, Artificial Sequence
  Description of Artificial Sequence: Synthetic oligonucleotide
guuagugccugugugagaa

SEQ ID NO: 461211 - RNA, 19 nt, Artificial Sequence
  Description of Artificial Sequence: Synthetic oligonucleotide
gagguuagugauaucagua

SEQ ID NO: 461212 - RNA, 19 nt, Artificial Sequence
  Description of Artificial Sequence: Synthetic oligonucleotide
ugaucacucuuaaggguau

SEQ ID NO: 461213 - RNA, 19 nt, Artificial Sequence
  Description of Artificial Sequence: Synthetic oligonucleotide
aacggccacugccaacgag

SEQ ID NO: 461214 - RNA, 19 nt, Artificial Sequence
  Description of Artificial Sequence: Synthetic oligonucleotide
guuccucaagcacagagua

SEQ ID NO: 461215 - RNA, 19 nt, Artificial Sequence
  Description of Artificial Sequence: Synthetic oligonucleotide
gccauugauaguucggccc

SEQ ID NO: 461216 - RNA, 19 nt, Artificial Sequence
  Description of Artificial Sequence: Synthetic oligonucleotide
agauuugcaucuaaugcaa

SEQ ID NO: 461217 - RNA, 19 nt, Artificial Sequence
  Description of Artificial Sequence: Synthetic oligonucleotide
caacgaguuccucaagcac

SEQ ID NO: 461218 - RNA, 19 nt, Artificial Sequence
  Description of Artificial Sequence: Synthetic oligonucleotide
cagauagagacaguuccug

SEQ ID NO: 461219 - RNA, 19 nt, Artificial Sequence
  Description of Artificial Sequence: Synthetic oligonucleotide
gggagcaugcagcauagug

SEQ ID NO: 461220 - RNA, 19 nt, Artificial Sequence
  Description of Artificial Sequence: Synthetic oligonucleotide
ucaacccacguccccgagc

SEQ ID NO: 461221 - RNA, 19 nt, Artificial Sequence
  Description of Artificial Sequence: Synthetic oligonucleotide
uccacccaaguacucugug

SEQ ID NO: 461222 - RNA, 19 nt, Artificial Sequence
  Description of Artificial Sequence: Synthetic oligonucleotide
gacuauagcugaagcuugc

SEQ ID NO: 461223 - RNA, 19 nt, Artificial Sequence
  Description of Artificial Sequence: Synthetic oligonucleotide
guccacgaguccuugacca

SEQ ID NO: 461224 - RNA, 19 nt, Artificial Sequence
  Description of Artificial Sequence: Synthetic oligonucleotide
gccacugccaacgaguucc

SEQ ID NO: 461225 - RNA, 19 nt, Artificial Sequence
  Description of Artificial Sequence: Synthetic oligonucleotide
uggguggagaacugaaaua

SEQ ID NO: 461226 - RNA, 19 nt, Artificial Sequence
  Description of Artificial Sequence: Synthetic oligonucleotide
gagugacuaacuuugugau

SEQ ID NO: 461227 - RNA, 19 nt, Artificial Sequence
  Description of Artificial Sequence: Synthetic oligonucleotide
gaggauuaacagggguggg

SEQ ID NO: 461228 - RNA, 19 nt, Artificial Sequence
  Description of Artificial Sequence: Synthetic oligonucleotide
auuaaguauucugcaaguu

SEQ ID NO: 461229 - RNA, 19 nt, Artificial Sequence
  Description of Artificial Sequence: Synthetic oligonucleotide
uccuuccgaguaguguugg

SEQ ID NO: 461230 - RNA, 19 nt, Artificial Sequence
  Description of Artificial Sequence: Synthetic oligonucleotide
cucagugaaaaucaccccu

SEQ ID NO: 461231 - RNA, 19 nt, Artificial Sequence
  Description of Artificial Sequence: Synthetic oligonucleotide
cugaacguaccaccucaag

SEQ ID NO: 461232 - RNA, 19 nt, Artificial Sequence
  Description of Artificial Sequence: Synthetic oligonucleotide
uggaguuuggugagagcua

SEQ ID NO: 461233 - RNA, 19 nt, Artificial Sequence
  Description of Artificial Sequence: Synthetic oligonucleotide
uccgaguaguguuggugac

SEQ ID NO: 461234 - RNA, 19 nt, Artificial Sequence
  Description of Artificial Sequence: Synthetic oligonucleotide
aggucaauauggccauuga

SEQ ID NO: 461235 - RNA, 19 nt, Artificial Sequence
  Description of Artificial Sequence: Synthetic oligonucleotide
auaacaggacugacgugag

SEQ ID NO: 461236 - RNA, 19 nt, Artificial Sequence
  Description of Artificial Sequence: Synthetic oligonucleotide
cacugaacguaccaccuca

SEQ ID NO: 461237 - RNA, 19 nt, Artificial Sequence
  Description of Artificial Sequence: Synthetic oligonucleotide
acagauagagacaguuccu

SEQ ID NO: 461238 - RNA, 19 nt, Artificial Sequence
  Description of Artificial Sequence: Synthetic oligonucleotide
uuccucaagcacagaguaa

SEQ ID NO: 461239 - RNA, 19 nt, Artificial Sequence
  Description of Artificial Sequence: Synthetic oligonucleotide
ugcuuggucagagcagucu

SEQ ID NO: 461240 - RNA, 19 nt, Artificial Sequence
  Description of Artificial Sequence: Synthetic oligonucleotide
uacacaguucugagauagu

SEQ ID NO: 461241 - RNA, 19 nt, Artificial Sequence
  Description of Artificial Sequence: Synthetic oligonucleotide
uaauagcgcugaagagccc

SEQ ID NO: 461242 - RNA, 19 nt, Artificial Sequence
  Description of Artificial Sequence: Synthetic oligonucleotide
uucauccccuuuucaaaua

SEQ ID NO: 461243 - RNA, 19 nt, Artificial Sequence
  Description of Artificial Sequence: Synthetic oligonucleotide
uaguguggguggagaacug

SEQ ID NO: 461244 - RNA, 19 nt, Artificial Sequence
  Description of Artificial Sequence: Synthetic oligonucleotide
aggauuaacaggggugggu

SEQ ID NO: 461245 - RNA, 19 nt, Artificial Sequence
  Description of Artificial Sequence: Synthetic oligonucleotide
acguccccgagcugauggc

SEQ ID NO: 461246 - RNA, 19 nt, Artificial Sequence
  Description of Artificial Sequence: Synthetic oligonucleotide
gccaacgaguuccucaagc

SEQ ID NO: 461247 - RNA, 19 nt, Artificial Sequence
  Description of Artificial Sequence: Synthetic oligonucleotide
guuuuaugggguacucaac

SEQ ID NO: 461248 - RNA, 19 nt, Artificial Sequence
  Description of Artificial Sequence: Synthetic oligonucleotide
auaaugucacaagcuucug

SEQ ID NO: 461249 - RNA, 19 nt, Artificial Sequence
  Description of Artificial Sequence: Synthetic oligonucleotide
aucuuggaacaugaacaug

SEQ ID NO: 461250 - RNA, 19 nt, Artificial Sequence
  Description of Artificial Sequence: Synthetic oligonucleotide
ugacagguccucccuuggu

SEQ ID NO: 461251 - RNA, 19 nt, Artificial Sequence
  Description of Artificial Sequence: Synthetic oligonucleotide
acagugccucguaaacggc

SEQ ID NO: 461252 - RNA, 19 nt, Artificial Sequence
  Description of Artificial Sequence: Synthetic oligonucleotide
guuggugacgucaugcugu

SEQ ID NO: 461253 - RNA, 19 nt, Artificial Sequence
  Description of Artificial Sequence: Synthetic oligonucleotide
ggugcauccguucacugaa

SEQ ID NO: 461254 - RNA, 19 nt, Artificial Sequence
  Description of Artificial Sequence: Synthetic oligonucleotide
cggaaauaaacuccucagg

SEQ ID NO: 461255 - RNA, 19 nt, Artificial Sequence
  Description of Artificial Sequence: Synthetic oligonucleotide
gucagggacaaacacugcu

SEQ ID NO: 461256 - RNA, 19 nt, Artificial Sequence
  Description of Artificial Sequence: Synthetic oligonucleotide
ggcccagucgcugaguuag

SEQ ID NO: 461257 - RNA, 19 nt, Artificial Sequence
  Description of Artificial Sequence: Synthetic oligonucleotide
aguucggcccagucgcuga

SEQ ID NO: 461258 - RNA, 19 nt, Artificial Sequence
  Description of Artificial Sequence: Synthetic oligonucleotide
gugaucacucuuaagggua

SEQ ID NO: 461259 - RNA, 19 nt, Artificial Sequence
  Description of Artificial Sequence: Synthetic oligonucleotide
auauggccauugauaguuc

SEQ ID NO: 461260 - RNA, 19 nt, Artificial Sequence
  Description of Artificial Sequence: Synthetic oligonucleotide
ugaauuguguagggaggau

SEQ ID NO: 461261 - RNA, 19 nt, Artificial Sequence
  Description of Artificial Sequence: Synthetic oligonucleotide
guaaacggccacugccaac

SEQ ID NO: 461262 - RNA, 19 nt, Artificial Sequence
  Description of Artificial Sequence: Synthetic oligonucleotide
cugaauggucucaucaccu

SEQ ID NO: 461263 - RNA, 19 nt, Artificial Sequence
  Description of Artificial Sequence: Synthetic oligonucleotide
uguacgcuuucugccaguc

SEQ ID NO: 461264 - RNA, 19 nt, Artificial Sequence
  Description of Artificial Sequence: Synthetic oligonucleotide
augaucugugguacacauc

SEQ ID NO: 461265 - RNA, 19 nt, Artificial Sequence
  Description of Artificial Sequence: Synthetic oligonucleotide
uaccaccucaagauacauu

SEQ ID NO: 461266 - RNA, 19 nt, Artificial Sequence
  Description of Artificial Sequence: Synthetic oligonucleotide
ggguggagaacugaaauaa

SEQ ID NO: 461267 - RNA, 19 nt, Artificial Sequence
  Description of Artificial Sequence: Synthetic oligonucleotide
cuugucuaacucaucaguu

SEQ ID NO: 461268 - RNA, 19 nt, Artificial Sequence
  Description of Artificial Sequence: Synthetic oligonucleotide
accaacuacagugccucgu

SEQ ID NO: 461269 - RNA, 19 nt, Artificial Sequence
  Description of Artificial Sequence: Synthetic oligonucleotide
auagcgcugaagagcccac

SEQ ID NO: 461270 - RNA, 19 nt, Artificial Sequence
  Description of Artificial Sequence: Synthetic oligonucleotide
gucuaacucaucaguugac

SEQ ID NO: 461271 - RNA, 19 nt, Artificial Sequence
  Description of Artificial Sequence: Synthetic oligonucleotide
gugccugugugagaaaauc

SEQ ID NO: 461272 - RNA, 19 nt, Artificial Sequence
  Description of Artificial Sequence: Synthetic oligonucleotide
gggguacucaacuuguaaa

SEQ ID NO: 461273 - RNA, 19 nt, Artificial Sequence
  Description of Artificial Sequence: Synthetic oligonucleotide
cagggccaucauuaaauca

SEQ ID NO: 461274 - RNA, 19 nt, Artificial Sequence
  Description of Artificial Sequence: Synthetic oligonucleotide
cuuuauccugucgcccacc

SEQ ID NO: 461275 - RNA, 19 nt, Artificial Sequence
  Description of Artificial Sequence: Synthetic oligonucleotide
augcaacaccacuauuuua

SEQ ID NO: 461276 - RNA, 19 nt, Artificial Sequence
  Description of Artificial Sequence: Synthetic oligonucleotide
guauuacuccucugucaca

SEQ ID NO: 461277 - RNA, 19 nt, Artificial Sequence
  Description of Artificial Sequence: Synthetic oligonucleotide
ggccauugauaguucggcc

SEQ ID NO: 461278 - RNA, 19 nt, Artificial Sequence
  Description of Artificial Sequence: Synthetic oligonucleotide
aguguggguggagaacuga

SEQ ID NO: 461279 - RNA, 19 nt, Artificial Sequence
  Description of Artificial Sequence: Synthetic oligonucleotide
aaacggccacugccaacga

SEQ ID NO: 461280 - RNA, 19 nt, Artificial Sequence
  Description of Artificial Sequence: Synthetic oligonucleotide
uuauccugucgcccaccaa

SEQ ID NO: 461281 - RNA, 19 nt, Artificial Sequence
  Description of Artificial Sequence: Synthetic oligonucleotide
aguccuugaccaacacaag

SEQ ID NO: 461282 - RNA, 19 nt, Artificial Sequence
  Description of Artificial Sequence: Synthetic oligonucleotide
agugccucguaaacggcca

SEQ ID NO: 461283 - RNA, 19 nt, Artificial Sequence
  Description of Artificial Sequence: Synthetic oligonucleotide
aucaacccacguccccgag

SEQ ID NO: 461284 - RNA, 19 nt, Artificial Sequence
  Description of Artificial Sequence: Synthetic oligonucleotide
auugauaguucggcccagu

SEQ ID NO: 461285 - RNA, 19 nt, Artificial Sequence
  Description of Artificial Sequence: Synthetic oligonucleotide
gcaaugaucugugguacac

SEQ ID NO: 461286 - RNA, 19 nt, Artificial Sequence
  Description of Artificial Sequence: Synthetic oligonucleotide
gggauuuuguugugaagaa

SEQ ID NO: 461287 - RNA, 19 nt, Artificial Sequence
  Description of Artificial Sequence: Synthetic oligonucleotide
cauugauaguucggcccag

SEQ ID NO: 461288 - RNA, 19 nt, Artificial Sequence
  Description of Artificial Sequence: Synthetic oligonucleotide
gacugacgugaggugcagg

SEQ ID NO: 461289 - RNA, 19 nt, Artificial Sequence
  Description of Artificial Sequence: Synthetic oligonucleotide
aguugaacaugagguuagu

SEQ ID NO: 461290 - RNA, 19 nt, Artificial Sequence
  Description of Artificial Sequence: Synthetic oligonucleotide
uuguacgcuuucugccagu

SEQ ID NO: 461291 - RNA, 19 nt, Artificial Sequence
  Description of Artificial Sequence: Synthetic oligonucleotide
guuacuugaccacuuucuu

SEQ ID NO: 461292 - RNA, 19 nt, Artificial Sequence
  Description of Artificial Sequence: Synthetic oligonucleotide
ccagucgcugaguuagugc

SEQ ID NO: 461293 - RNA, 19 nt, Artificial Sequence
  Description of Artificial Sequence: Synthetic oligonucleotide
caccaacuacagugccucg

SEQ ID NO: 461294 - RNA, 19 nt, Artificial Sequence
  Description of Artificial Sequence: Synthetic oligonucleotide
ugcuguaggccugguaaua

SEQ ID NO: 461295 - RNA, 19 nt, Artificial Sequence
  Description of Artificial Sequence: Synthetic oligonucleotide
uaguucggcccagucgcug

SEQ ID NO: 461296 - RNA, 19 nt, Artificial Sequence
  Description of Artificial Sequence: Synthetic oligonucleotide
uggguguguugagugacua

SEQ ID NO: 461297 - RNA, 19 nt, Artificial Sequence
  Description of Artificial Sequence: Synthetic oligonucleotide
ggaauaguauuugccuuuc

SEQ ID NO: 461298 - RNA, 19 nt, Artificial Sequence
  Description of Artificial Sequence: Synthetic oligonucleotide
uucuguagauuugcaucua

SEQ ID NO: 461299 - RNA, 19 nt, Artificial Sequence
  Description of Artificial Sequence: Synthetic oligonucleotide
cuucauccccuuuucaaau

SEQ ID NO: 461300 - RNA, 19 nt, Artificial Sequence
  Description of Artificial Sequence: Synthetic oligonucleotide
aggaaggucauagguuuua

SEQ ID NO: 461301 - RNA, 19 nt, Artificial Sequence
  Description of Artificial Sequence: Synthetic oligonucleotide
gaauuguguagggaggauu

SEQ ID NO: 461302 - RNA, 19 nt, Artificial Sequence
  Description of Artificial Sequence: Synthetic oligonucleotide
gguggagaacugaaauaac

SEQ ID NO: 461303 - RNA, 19 nt, Artificial Sequence
  Description of Artificial Sequence: Synthetic oligonucleotide
guguugagugacuaacuuu

SEQ ID NO: 461304 - RNA, 19 nt, Artificial Sequence
  Description of Artificial Sequence: Synthetic oligonucleotide
cugacgugaggugcaggac

SEQ ID NO: 461305 - RNA, 19 nt, Artificial Sequence
  Description of Artificial Sequence: Synthetic oligonucleotide
cugaagcuccuuccgagua

SEQ ID NO: 461306 - RNA, 19 nt, Artificial Sequence
  Description of Artificial Sequence: Synthetic oligonucleotide
caaugaucugugguacaca

SEQ ID NO: 461307 - RNA, 19 nt, Artificial Sequence
  Description of Artificial Sequence: Synthetic oligonucleotide
ccaacgaguuccucaagca

SEQ ID NO: 461308 - RNA, 19 nt, Artificial Sequence
  Description of Artificial Sequence: Synthetic oligonucleotide
gcuuuuauggcgagcuaca

SEQ ID NO: 461309 - RNA, 19 nt, Artificial Sequence
  Description of Artificial Sequence: Synthetic oligonucleotide
gaagcuccuuccgaguagu

SEQ ID NO: 461310 - RNA, 19 nt, Artificial Sequence
  Description of Artificial Sequence: Synthetic oligonucleotide
cuuuuauggcgagcuacaa

SEQ ID NO: 461311 - RNA, 19 nt, Artificial Sequence
  Description of Artificial Sequence: Synthetic oligonucleotide
uccugucgcccaccaacua

SEQ ID NO: 461312 - RNA, 19 nt, Artificial Sequence
  Description of Artificial Sequence: Synthetic oligonucleotide
ccauugauaguucggccca

SEQ ID NO: 461313 - RNA, 19 nt, Artificial Sequence
  Description of Artificial Sequence: Synthetic oligonucleotide
caacccacguccccgagcu

SEQ ID NO: 461314 - RNA, 19 nt, Artificial Sequence
  Description of Artificial Sequence: Synthetic oligonucleotide
ccugucgcccaccaacuac

SEQ ID NO: 461315 - RNA, 19 nt, Artificial Sequence
  Description of Artificial Sequence: Synthetic oligonucleotide
auccugucgcccaccaacu

SEQ ID NO: 461316 - RNA, 19 nt, Artificial Sequence
  Description of Artificial Sequence: Synthetic oligonucleotide
acaaggcaucaaacucuag

SEQ ID NO: 461317 - RNA, 19 nt, Artificial Sequence
  Description of Artificial Sequence: Synthetic oligonucleotide
cuuggaacaugaacaugau

SEQ ID NO: 461318 - RNA, 19 nt, Artificial Sequence
  Description of Artificial Sequence: Synthetic oligonucleotide
cuguugcagaguccagaca

SEQ ID NO: 461319 - RNA, 19 nt, Artificial Sequence
  Description of Artificial Sequence: Synthetic oligonucleotide
ggucaauauggccauugau

SEQ ID NO: 461320 - RNA, 19 nt, Artificial Sequence
  Description of Artificial Sequence: Synthetic oligonucleotide
acugaacguaccaccucaa

SEQ ID NO: 461321 - RNA, 19 nt, Artificial Sequence
  Description of Artificial Sequence: Synthetic oligonucleotide
cagcauaguguggguggag

SEQ ID NO: 461322 - RNA, 19 nt, Artificial Sequence
  Description of Artificial Sequence: Synthetic oligonucleotide
gaguaguguuggugacguc

SEQ ID NO: 461323 - RNA, 19 nt, Artificial Sequence
  Description of Artificial Sequence: Synthetic oligonucleotide
caacuacagugccucguaa

SEQ ID NO: 461324 - RNA, 19 nt, Artificial Sequence
  Description of Artificial Sequence: Synthetic oligonucleotide
ccaagucuagacaaggcau

SEQ ID NO: 461325 - RNA, 19 nt, Artificial Sequence
  Description of Artificial Sequence: Synthetic oligonucleotide
ucgcugaguuagugccugu

SEQ ID NO: 461326 - RNA, 19 nt, Artificial Sequence
  Description of Artificial Sequence: Synthetic oligonucleotide
ccgaguaguguuggugacg

SEQ ID NO: 461327 - RNA, 19 nt, Artificial Sequence
  Description of Artificial Sequence: Synthetic oligonucleotide
gugccucguaaacggccac

SEQ ID NO: 461328 - RNA, 19 nt, Artificial Sequence
  Description of Artificial Sequence: Synthetic oligonucleotide
guugagugacuaacuuugu

SEQ ID NO: 461329 - RNA, 19 nt, Artificial Sequence
  Description of Artificial Sequence: Synthetic oligonucleotide
auaguucggcccagucgcu

SEQ ID NO: 461330 - RNA, 19 nt, Artificial Sequence
  Description of Artificial Sequence: Synthetic oligonucleotide
ccucguaaacggccacugc

SEQ ID NO: 461331 - RNA, 19 nt, Artificial Sequence
  Description of Artificial Sequence: Synthetic oligonucleotide
ccccuuuguuaucaagguc

SEQ ID NO: 461332 - RNA, 19 nt, Artificial Sequence
  Description of Artificial Sequence: Synthetic oligonucleotide
gcugauggcuuccucuacu

SEQ ID NO: 461333 - RNA, 19 nt, Artificial Sequence
  Description of Artificial Sequence: Synthetic oligonucleotide
ggaauccacccaaguacuc

SEQ ID NO: 461334 - RNA, 19 nt, Artificial Sequence
  Description of Artificial Sequence: Synthetic oligonucleotide
acgugaggugcaggacaag

SEQ ID NO: 461335 - RNA, 19 nt, Artificial Sequence
  Description of Artificial Sequence: Synthetic oligonucleotide
gugacgucaugcuguuccu

SEQ ID NO: 461336 - RNA, 19 nt, Artificial Sequence
  Description of Artificial Sequence: Synthetic oligonucleotide
aguagaugucagggacaaa

SEQ ID NO: 461337 - RNA, 19 nt, Artificial Sequence
  Description of Artificial Sequence: Synthetic oligonucleotide
gugcauccguucacugaac

SEQ ID NO: 461338 - RNA, 19 nt, Artificial Sequence
  Description of Artificial Sequence: Synthetic oligonucleotide
ggacugacgugaggugcag

SEQ ID NO: 461339 - RNA, 19 nt, Artificial Sequence
  Description of Artificial Sequence: Synthetic oligonucleotide
gagcccacggaugcgugcu

SEQ ID NO: 461340 - RNA, 19 nt, Artificial Sequence
  Description of Artificial Sequence: Synthetic oligonucleotide
gugcuuuuauggcgagcua

SEQ ID NO: 461341 - RNA, 19 nt, Artificial Sequence
  Description of Artificial Sequence: Synthetic oligonucleotide
ggguguguugagugacuaa

SEQ ID NO: 461342 - RNA, 19 nt, Artificial Sequence
  Description of Artificial Sequence: Synthetic oligonucleotide
cauccccuuuucaaauaau

SEQ ID NO: 461343 - RNA, 19 nt, Artificial Sequence
  Description of Artificial Sequence: Synthetic oligonucleotide
augggguacucaacuugua

SEQ ID NO: 461344 - RNA, 19 nt, Artificial Sequence
  Description of Artificial Sequence: Synthetic oligonucleotide
gagcuacaaaggccucagu

SEQ ID NO: 461345 - RNA, 19 nt, Artificial Sequence
  Description of Artificial Sequence: Synthetic oligonucleotide
ccaacuacagugccucgua

SEQ ID NO: 461346 - RNA, 19 nt, Artificial Sequence
  Description of Artificial Sequence: Synthetic oligonucleotide
cacggaugcgugcuuuuau

SEQ ID NO: 461347 - RNA, 19 nt, Artificial Sequence
  Description of Artificial Sequence: Synthetic oligonucleotide
ccguucacugaacaguacu

SEQ ID NO: 461348 - RNA, 19 nt, Artificial Sequence
  Description of Artificial Sequence: Synthetic oligonucleotide
gaguuuggugagagcuacu

SEQ ID NO: 461349 - RNA, 19 nt, Artificial Sequence
  Description of Artificial Sequence: Synthetic oligonucleotide
cugcuguaggccugguaau

SEQ ID NO: 461350 - RNA, 19 nt, Artificial Sequence
  Description of Artificial Sequence: Synthetic oligonucleotide
cagugaaaaucaccccuuu

SEQ ID NO: 461351 - RNA, 19 nt, Artificial Sequence
  Description of Artificial Sequence: Synthetic oligonucleotide
cgugaggugcaggacaaga

SEQ ID NO: 461352 - RNA, 19 nt, Artificial Sequence
  Description of Artificial Sequence: Synthetic oligonucleotide
acacaucuuccgggagcau

SEQ ID NO: 461353 - RNA, 19 nt, Artificial Sequence
  Description of Artificial Sequence: Synthetic oligonucleotide
gccgaugcuggaauaguau

SEQ ID NO: 461354 - RNA, 19 nt, Artificial Sequence
  Description of Artificial Sequence: Synthetic oligonucleotide
gcgcaucuugcacauguuu

SEQ ID NO: 461355 - RNA, 19 nt, Artificial Sequence
  Description of Artificial Sequence: Synthetic oligonucleotide
cguaaacggccacugccaa

SEQ ID NO: 461356 - RNA, 19 nt, Artificial Sequence
  Description of Artificial Sequence: Synthetic oligonucleotide
ccgaugcuggaauaguauu

SEQ ID NO: 461357 - RNA, 19 nt, Artificial Sequence
  Description of Artificial Sequence: Synthetic oligonucleotide
cgcugaguuagugccugug

SEQ ID NO: 461358 - RNA, 19 nt, Artificial Sequence
  Description of Artificial Sequence: Synthetic oligonucleotide
ccgagcugauggcuuccuc

SEQ ID NO: 461359 - RNA, 19 nt, Artificial Sequence
  Description of Artificial Sequence: Synthetic oligonucleotide
ggcgcaucuugcacauguu

SEQ ID NO: 461360 - RNA, 19 nt, Artificial Sequence
  Description of Artificial Sequence: Synthetic oligonucleotide
cccacggaugcgugcuuuu

SEQ ID NO: 461361 - RNA, 19 nt, Artificial Sequence
  Description of Artificial Sequence: Synthetic oligonucleotide
gcccacggaugcgugcuuu

SEQ ID NO: 461362 - RNA, 19 nt, Artificial Sequence
  Description of Artificial Sequence: Synthetic oligonucleotide
ccagggaguuguggaguuu

SEQ ID NO: 461363 - RNA, 19 nt, Artificial Sequence
  Description of Artificial Sequence: Synthetic oligonucleotide
cgggagcaugcagcauagu

SEQ ID NO: 461364 - RNA, 19 nt, Artificial Sequence
  Description of Artificial Sequence: Synthetic oligonucleotide
uauaugacaaagaugacgu

SEQ ID NO: 461365 - RNA, 19 nt, Artificial Sequence
  Description of Artificial Sequence: Synthetic oligonucleotide
aaagauuauacaguccacc

SEQ ID NO: 461366 - RNA, 19 nt, Artificial Sequence
  Description of Artificial Sequence: Synthetic oligonucleotide
aauuguacaagaaucgaac

SEQ ID NO: 461367 - RNA, 19 nt, Artificial Sequence
  Description of Artificial Sequence: Synthetic oligonucleotide
agagacaugcuuuaugagc

SEQ ID NO: 461368 - RNA, 19 nt, Artificial Sequence
  Description of Artificial Sequence: Synthetic oligonucleotide
uguacaagaaucgaacugg

SEQ ID NO: 461369 - RNA, 19 nt, Artificial Sequence
  Description of Artificial Sequence: Synthetic oligonucleotide
uguucguucagcauacagg

SEQ ID NO: 461370 - RNA, 19 nt, Artificial Sequence
  Description of Artificial Sequence: Synthetic oligonucleotide
cuuauaccaaauaugguag

SEQ ID NO: 461371 - RNA, 19 nt, Artificial Sequence
  Description of Artificial Sequence: Synthetic oligonucleotide
auuguuccgacccagggcg

SEQ ID NO: 461372 - RNA, 19 nt, Artificial Sequence
  Description of Artificial Sequence: Synthetic oligonucleotide
guucguucagcauacaggg

SEQ ID NO: 461373 - RNA, 19 nt, Artificial Sequence
  Description of Artificial Sequence: Synthetic oligonucleotide
aaagcagaaugcgaauucc

SEQ ID NO: 461374 - RNA, 19 nt, Artificial Sequence
  Description of Artificial Sequence: Synthetic oligonucleotide
guuauagacaacaugagca

SEQ ID NO: 461375 - RNA, 19 nt, Artificial Sequence
  Description of Artificial Sequence: Synthetic oligonucleotide
uauguaaucucgcugaauu

SEQ ID NO: 461376 - RNA, 19 nt, Artificial Sequence
  Description of Artificial Sequence: Synthetic oligonucleotide
accgagauaacucuugaag

SEQ ID NO: 461377 - RNA, 19 nt, Artificial Sequence
  Description of Artificial Sequence: Synthetic oligonucleotide
acucuaguguaucucagac

SEQ ID NO: 461378 - RNA, 19 nt, Artificial Sequence
  Description of Artificial Sequence: Synthetic oligonucleotide
cucgguuuggccaauuucg

SEQ ID NO: 461379 - RNA, 19 nt, Artificial Sequence
  Description of Artificial Sequence: Synthetic oligonucleotide
uuuuguagacccauguaac

SEQ ID NO: 461380 - RNA, 19 nt, Artificial Sequence
  Description of Artificial Sequence: Synthetic oligonucleotide
acaagguugagucauguga

SEQ ID NO: 461381 - RNA, 19 nt, Artificial Sequence
  Description of Artificial Sequence: Synthetic oligonucleotide
auaucuaggagcuuaucca

SEQ ID NO: 461382 - RNA, 19 nt, Artificial Sequence
  Description of Artificial Sequence: Synthetic oligonucleotide
ucaaguucaccauaucccc

SEQ ID NO: 461383 - RNA, 19 nt, Artificial Sequence
  Description of Artificial Sequence: Synthetic oligonucleotide
uuccauauccguguggucg

SEQ ID NO: 461384 - RNA, 19 nt, Artificial Sequence
  Description of Artificial Sequence: Synthetic oligonucleotide
ugaucuaggguacaaucca

SEQ ID NO: 461385 - RNA, 19 nt, Artificial Sequence
  Description of Artificial Sequence: Synthetic oligonucleotide
acagggagugaucaucugc

SEQ ID NO: 461386 - RNA, 19 nt, Artificial Sequence
  Description of Artificial Sequence: Synthetic oligonucleotide
uaccaaauaugguagaguc

SEQ ID NO: 461387 - RNA, 19 nt, Artificial Sequence
  Description of Artificial Sequence: Synthetic oligonucleotide
ucuaggguacaauccauag

SEQ ID NO: 461388 - RNA, 19 nt, Artificial Sequence
  Description of Artificial Sequence: Synthetic oligonucleotide
ugacguacuaagcuccagg

SEQ ID NO: 461389 - RNA, 19 nt, Artificial Sequence
  Description of Artificial Sequence: Synthetic oligonucleotide
cuccagaaauuauauaagc

SEQ ID NO: 461390 - RNA, 19 nt, Artificial Sequence
  Description of Artificial Sequence: Synthetic oligonucleotide
gacguacuaagcuccaggg

SEQ ID NO: 461391 - RNA, 19 nt, Artificial Sequence
  Description of Artificial Sequence: Synthetic oligonucleotide
ugauugguuauagacaaca

SEQ ID NO: 461392 - RNA, 19 nt, Artificial Sequence
  Description of Artificial Sequence: Synthetic oligonucleotide
ucgagguaagaccaaagga

SEQ ID NO: 461393 - RNA, 19 nt, Artificial Sequence
  Description of Artificial Sequence: Synthetic oligonucleotide
ugcuguauaugacaaagau

SEQ ID NO: 461394 - RNA, 19 nt, Artificial Sequence
  Description of Artificial Sequence: Synthetic oligonucleotide
ucguucagcauacagggac

SEQ ID NO: 461395 - RNA, 19 nt, Artificial Sequence
  Description of Artificial Sequence: Synthetic oligonucleotide
ucuguagagauccccgugc

SEQ ID NO: 461396 - RNA, 19 nt, Artificial Sequence
  Description of Artificial Sequence: Synthetic oligonucleotide
aaacccuccgugaauuugc

SEQ ID NO: 461397 - RNA, 19 nt, Artificial Sequence
  Description of Artificial Sequence: Synthetic oligonucleotide
agauuauacaguccaccuc

SEQ ID NO: 461398 - RNA, 19 nt, Artificial Sequence
  Description of Artificial Sequence: Synthetic oligonucleotide
uaugagcauaagaugaaaa

SEQ ID NO: 461399 - RNA, 19 nt, Artificial Sequence
  Description of Artificial Sequence: Synthetic oligonucleotide
agaugacguacuaagcucc

SEQ ID NO: 461400 - RNA, 19 nt, Artificial Sequence
  Description of Artificial Sequence: Synthetic oligonucleotide
gauacucuaguguaucuca

SEQ ID NO: 461401 - RNA, 19 nt, Artificial Sequence
  Description of Artificial Sequence: Synthetic oligonucleotide
ugguuauagacaacaugag

SEQ ID NO: 461402 - RNA, 19 nt, Artificial Sequence
  Description of Artificial Sequence: Synthetic oligonucleotide
aaucucgcugaauuguaca

SEQ ID NO: 461403 - RNA, 19 nt, Artificial Sequence
  Description of Artificial Sequence: Synthetic oligonucleotide
uggugauugguuauagaca

SEQ ID NO: 461404 - RNA, 19 nt, Artificial Sequence
  Description of Artificial Sequence: Synthetic oligonucleotide
caugcaguaaaauggagca

SEQ ID NO: 461405 - RNA, 19 nt, Artificial Sequence
  Description of Artificial Sequence: Synthetic oligonucleotide
uccccuuauaccaaauaug

SEQ ID NO: 461406 - RNA, 19 nt, Artificial Sequence
  Description of Artificial Sequence: Synthetic oligonucleotide
acaaccuugcuccacacgu

SEQ ID NO: 461407 - RNA, 19 nt, Artificial Sequence
  Description of Artificial Sequence: Synthetic oligonucleotide
aucggauuugaggugaugg

SEQ ID NO: 461408 - RNA, 19 nt, Artificial Sequence
  Description of Artificial Sequence: Synthetic oligonucleotide
uggacauagaacaguugcc

SEQ ID NO: 461409 - RNA, 19 nt, Artificial Sequence
  Description of Artificial Sequence: Synthetic oligonucleotide
aagcagaaugcgaauuccc

SEQ ID NO: 461410 - RNA, 19 nt, Artificial Sequence
  Description of Artificial Sequence: Synthetic oligonucleotide
uguaaucucgcugaauugu

SEQ ID NO: 461411 - RNA, 19 nt, Artificial Sequence
  Description of Artificial Sequence: Synthetic oligonucleotide
uguagacccauguaacuga

SEQ ID NO: 461412 - RNA, 19 nt, Artificial Sequence
  Description of Artificial Sequence: Synthetic oligonucleotide
augaugguuaagcgcgugc

SEQ ID NO: 461413 - RNA, 19 nt, Artificial Sequence
  Description of Artificial Sequence: Synthetic oligonucleotide
agauuguuccgacccaggg

SEQ ID NO: 461414 - RNA, 19 nt, Artificial Sequence
  Description of Artificial Sequence: Synthetic oligonucleotide
gacaguuguaccgagauaa

SEQ ID NO: 461415 - RNA, 19 nt, Artificial Sequence
  Description of Artificial Sequence: Synthetic oligonucleotide
accgugggacguuugaugg

SEQ ID NO: 461416 - RNA, 19 nt, Artificial Sequence
  Description of Artificial Sequence: Synthetic oligonucleotide
ugucacaucuuuuggguac

SEQ ID NO: 461417 - RNA, 19 nt, Artificial Sequence
  Description of Artificial Sequence: Synthetic oligonucleotide
uuuguagacccauguaacu

SEQ ID NO: 461418 - RNA, 19 nt, Artificial Sequence
  Description of Artificial Sequence: Synthetic oligonucleotide
aaagcuagguacuccucga

SEQ ID NO: 461419 - RNA, 19 nt, Artificial Sequence
  Description of Artificial Sequence: Synthetic oligonucleotide
uccucgauuauuccuucag

SEQ ID NO: 461420 - RNA, 19 nt, Artificial Sequence
  Description of Artificial Sequence: Synthetic oligonucleotide
gugacuacgugucaacugc

SEQ ID NO: 461421 - RNA, 19 nt, Artificial Sequence
  Description of Artificial Sequence: Synthetic oligonucleotide
uuuagguaaugacauuuua

SEQ ID NO: 461422 - RNA, 19 nt, Artificial Sequence
  Description of Artificial Sequence: Synthetic oligonucleotide
cucgagguaagaccaaagg

SEQ ID NO: 461423 - RNA, 19 nt, Artificial Sequence
  Description of Artificial Sequence: Synthetic oligonucleotide
uguuaaaacagugcaguuc

SEQ ID NO: 461424 - RNA, 19 nt, Artificial Sequence
  Description of Artificial Sequence: Synthetic oligonucleotide
ugcuucuagagaugggucc

SEQ ID NO: 461425 - RNA, 19 nt, Artificial Sequence
  Description of Artificial Sequence: Synthetic oligonucleotide
guggucgaaagcuagguac

SEQ ID NO: 461426 - RNA, 19 nt, Artificial Sequence
  Description of Artificial Sequence: Synthetic oligonucleotide
ucagcauacagggacuucc

SEQ ID NO: 461427 - RNA, 19 nt, Artificial Sequence
  Description of Artificial Sequence: Synthetic oligonucleotide
gauuguuccgacccagggc

SEQ ID NO: 461428 - RNA, 19 nt, Artificial Sequence
  Description of Artificial Sequence: Synthetic oligonucleotide
agguugagucaugugaagc

SEQ ID NO: 461429 - RNA, 19 nt, Artificial Sequence
  Description of Artificial Sequence: Synthetic oligonucleotide
agcgcuggugcaugaaacc

SEQ ID NO: 461430 - RNA, 19 nt, Artificial Sequence
  Description of Artificial Sequence: Synthetic oligonucleotide
acguacuaagcuccagggc

SEQ ID NO: 461431 - RNA, 19 nt, Artificial Sequence
  Description of Artificial Sequence: Synthetic oligonucleotide
ucgguuuggccaauuucgg

SEQ ID NO: 461432 - RNA, 19 nt, Artificial Sequence
  Description of Artificial Sequence: Synthetic oligonucleotide
auagaacaguugcccacgc

SEQ ID NO: 461433 - RNA, 19 nt, Artificial Sequence
  Description of Artificial Sequence: Synthetic oligonucleotide
gaguggcuugugcugaucg

SEQ ID NO: 461434 - RNA, 19 nt, Artificial Sequence
  Description of Artificial Sequence: Synthetic oligonucleotide
cagggagugaucaucugcc

SEQ ID NO: 461435 - RNA, 19 nt, Artificial Sequence
  Description of Artificial Sequence: Synthetic oligonucleotide
agugacuacgugucaacug

SEQ ID NO: 461436 - RNA, 19 nt, Artificial Sequence
  Description of Artificial Sequence: Synthetic oligonucleotide
uuauaccaaauaugguaga

SEQ ID NO: 461437 - RNA, 19 nt, Artificial Sequence
  Description of Artificial Sequence: Synthetic oligonucleotide
caucugccuaccuagaauc

SEQ ID NO: 461438 - RNA, 19 nt, Artificial Sequence
  Description of Artificial Sequence: Synthetic oligonucleotide
uuguagacccauguaacug

SEQ ID NO: 461439 - RNA, 19 nt, Artificial Sequence
  Description of Artificial Sequence: Synthetic oligonucleotide
ggugaggaaagcucgacgc

SEQ ID NO: 461440 - RNA, 19 nt, Artificial Sequence
  Description of Artificial Sequence: Synthetic oligonucleotide
ucgauuauuccuucagaaa

SEQ ID NO: 461441 - RNA, 19 nt, Artificial Sequence
  Description of Artificial Sequence: Synthetic oligonucleotide
aaggaugcuguucguucag

SEQ ID NO: 461442 - RNA, 19 nt, Artificial Sequence
  Description of Artificial Sequence: Synthetic oligonucleotide
aaacauaagcaaggacauc

SEQ ID NO: 461443 - RNA, 19 nt, Artificial Sequence
  Description of Artificial Sequence: Synthetic oligonucleotide
augcuuuaugagcauaaga

SEQ ID NO: 461444 - RNA, 19 nt, Artificial Sequence
  Description of Artificial Sequence: Synthetic oligonucleotide
gaugaguaucucuagauuu

SEQ ID NO: 461445 - RNA, 19 nt, Artificial Sequence
  Description of Artificial Sequence: Synthetic oligonucleotide
aguuucgguacuguguguc

SEQ ID NO: 461446 - RNA, 19 nt, Artificial Sequence
  Description of Artificial Sequence: Synthetic oligonucleotide
auagacaacaugagcagug

SEQ ID NO: 461447 - RNA, 19 nt, Artificial Sequence
  Description of Artificial Sequence: Synthetic oligonucleotide
ugaggaaagcucgacgccc

SEQ ID NO: 461448 - RNA, 19 nt, Artificial Sequence
  Description of Artificial Sequence: Synthetic oligonucleotide
ugcacaggaguuucgguac

SEQ ID NO: 461449 - RNA, 19 nt, Artificial Sequence
  Description of Artificial Sequence: Synthetic oligonucleotide
uacaagaaucgaacuggug

SEQ ID NO: 461450 - RNA, 19 nt, Artificial Sequence
  Description of Artificial Sequence: Synthetic oligonucleotide
agaaucgaacuggugauug

SEQ ID NO: 461451 - RNA, 19 nt, Artificial Sequence
  Description of Artificial Sequence: Synthetic oligonucleotide
ucuuuuggguacaaucuuu

SEQ ID NO: 461452 - RNA, 19 nt, Artificial Sequence
  Description of Artificial Sequence: Synthetic oligonucleotide
uuaagcgcgugcuuuguuc

SEQ ID NO: 461453 - RNA, 19 nt, Artificial Sequence
  Description of Artificial Sequence: Synthetic oligonucleotide
uuuucguggcugucauugg

SEQ ID NO: 461454 - RNA, 19 nt, Artificial Sequence
  Description of Artificial Sequence: Synthetic oligonucleotide
ggugauugguuauagacaa

SEQ ID NO: 461455 - RNA, 19 nt, Artificial Sequence
  Description of Artificial Sequence: Synthetic oligonucleotide
agguuuuguagacccaugu

SEQ ID NO: 461456 - RNA, 19 nt, Artificial Sequence
  Description of Artificial Sequence: Synthetic oligonucleotide
ugcgaauucccggugucgg

SEQ ID NO: 461457 - RNA, 19 nt, Artificial Sequence
  Description of Artificial Sequence: Synthetic oligonucleotide
ucaauaucuaggagcuuau

SEQ ID NO: 461458 - RNA, 19 nt, Artificial Sequence
  Description of Artificial Sequence: Synthetic oligonucleotide
ugcuguucguucagcauac

SEQ ID NO: 461459 - RNA, 19 nt, Artificial Sequence
  Description of Artificial Sequence: Synthetic oligonucleotide
gugaucuaggguacaaucc

SEQ ID NO: 461460 - RNA, 19 nt, Artificial Sequence
  Description of Artificial Sequence: Synthetic oligonucleotide
aagcucgacgcccacugcu

SEQ ID NO: 461461 - RNA, 19 nt, Artificial Sequence
  Description of Artificial Sequence: Synthetic oligonucleotide
caucauuuggugccugagc

SEQ ID NO: 461462 - RNA, 19 nt, Artificial Sequence
  Description of Artificial Sequence: Synthetic oligonucleotide
ucggauuugaggugaugga

SEQ ID NO: 461463 - RNA, 19 nt, Artificial Sequence
  Description of Artificial Sequence: Synthetic oligonucleotide
ggaguuucgguacugugug

SEQ ID NO: 461464 - RNA, 19 nt, Artificial Sequence
  Description of Artificial Sequence: Synthetic oligonucleotide
ucguggcugucauugguag

SEQ ID NO: 461465 - RNA, 19 nt, Artificial Sequence
  Description of Artificial Sequence: Synthetic oligonucleotide
gacccagggcgauugagug

SEQ ID NO: 461466 - RNA, 19 nt, Artificial Sequence
  Description of Artificial Sequence: Synthetic oligonucleotide
uguauguaaucucgcugaa

SEQ ID NO: 461467 - RNA, 19 nt, Artificial Sequence
  Description of Artificial Sequence: Synthetic oligonucleotide
uggguacaaucuuuacugc

SEQ ID NO: 461468 - RNA, 19 nt, Artificial Sequence
  Description of Artificial Sequence: Synthetic oligonucleotide
uauccguguggucgaaagc

SEQ ID NO: 461469 - RNA, 19 nt, Artificial Sequence
  Description of Artificial Sequence: Synthetic oligonucleotide
uacuccucgauuauuccuu

SEQ ID NO: 461470 - RNA, 19 nt, Artificial Sequence
  Description of Artificial Sequence: Synthetic oligonucleotide
uaagcgcgugcuuuguucu

SEQ ID NO: 461471 - RNA, 19 nt, Artificial Sequence
  Description of Artificial Sequence: Synthetic oligonucleotide
uacucuaguguaucucaga

SEQ ID NO: 461472 - RNA, 19 nt, Artificial Sequence
  Description of Artificial Sequence: Synthetic oligonucleotide
aguggcuugugcugaucgg

SEQ ID NO: 461473 - RNA, 19 nt, Artificial Sequence
  Description of Artificial Sequence: Synthetic oligonucleotide
cucgauuauuccuucagaa

SEQ ID NO: 461474 - RNA, 19 nt, Artificial Sequence
  Description of Artificial Sequence: Synthetic oligonucleotide
ugauuccugggugauguca

SEQ ID NO: 461475 - RNA, 19 nt, Artificial Sequence
  Description of Artificial Sequence: Synthetic oligonucleotide
ugaugguuaagcgcgugcu

SEQ ID NO: 461476 - RNA, 19 nt, Artificial Sequence
  Description of Artificial Sequence: Synthetic oligonucleotide
cuguucguucagcauacag

SEQ ID NO: 461477 - RNA, 19 nt, Artificial Sequence
  Description of Artificial Sequence: Synthetic oligonucleotide
ugaagacucugugugugca

SEQ ID NO: 461478 - RNA, 19 nt, Artificial Sequence
  Description of Artificial Sequence: Synthetic oligonucleotide
ucgaacuggugauugguua

SEQ ID NO: 461479 - RNA, 19 nt, Artificial Sequence
  Description of Artificial Sequence: Synthetic oligonucleotide
uuaugagcauaagaugaaa

SEQ ID NO: 461480 - RNA, 19 nt, Artificial Sequence
  Description of Artificial Sequence: Synthetic oligonucleotide
uccauauccguguggucga

SEQ ID NO: 461481 - RNA, 19 nt, Artificial Sequence
  Description of Artificial Sequence: Synthetic oligonucleotide
cugcauagcuuggaaaagc

SEQ ID NO: 461482 - RNA, 19 nt, Artificial Sequence
  Description of Artificial Sequence: Synthetic oligonucleotide
ccaaauaugguagagucuc

SEQ ID NO: 461483 - RNA, 19 nt, Artificial Sequence
  Description of Artificial Sequence: Synthetic oligonucleotide
uucgguuugaaagcacgga

SEQ ID NO: 461484 - RNA, 19 nt, Artificial Sequence
  Description of Artificial Sequence: Synthetic oligonucleotide
ggugaucuaggguacaauc

SEQ ID NO: 461485 - RNA, 19 nt, Artificial Sequence
  Description of Artificial Sequence: Synthetic oligonucleotide
cuugcggguucucaccugc

SEQ ID NO: 461486 - RNA, 19 nt, Artificial Sequence
  Description of Artificial Sequence: Synthetic oligonucleotide
ugaggugaggaaagcucga

SEQ ID NO: 461487 - RNA, 19 nt, Artificial Sequence
  Description of Artificial Sequence: Synthetic oligonucleotide
gaaacccuccgugaauuug

SEQ ID NO: 461488 - RNA, 19 nt, Artificial Sequence
  Description of Artificial Sequence: Synthetic oligonucleotide
agcaaaucccucccaguga

SEQ ID NO: 461489 - RNA, 19 nt, Artificial Sequence
  Description of Artificial Sequence: Synthetic oligonucleotide
guugagucaugugaagcug

SEQ ID NO: 461490 - RNA, 19 nt, Artificial Sequence
  Description of Artificial Sequence: Synthetic oligonucleotide
aaaucccucccagugacua

SEQ ID NO: 461491 - RNA, 19 nt, Artificial Sequence
  Description of Artificial Sequence: Synthetic oligonucleotide
aucuuuuggguacaaucuu

SEQ ID NO: 461492 - RNA, 19 nt, Artificial Sequence
  Description of Artificial Sequence: Synthetic oligonucleotide
ccuuauaccaaauauggua

SEQ ID NO: 461493 - RNA, 19 nt, Artificial Sequence
  Description of Artificial Sequence: Synthetic oligonucleotide
aggaguucgucaauggcug

SEQ ID NO: 461494 - RNA, 19 nt, Artificial Sequence
  Description of Artificial Sequence: Synthetic oligonucleotide
aguucaccauauccccagg

SEQ ID NO: 461495 - RNA, 19 nt, Artificial Sequence
  Description of Artificial Sequence: Synthetic oligonucleotide
caagguugagucaugugaa

SEQ ID NO: 461496 - RNA, 19 nt, Artificial Sequence
  Description of Artificial Sequence: Synthetic oligonucleotide
aucugccuaccuagaaucc

SEQ ID NO: 461497 - RNA, 19 nt, Artificial Sequence
  Description of Artificial Sequence: Synthetic oligonucleotide
cuuccgaguguaucuggag

SEQ ID NO: 461498 - RNA, 19 nt, Artificial Sequence
  Description of Artificial Sequence: Synthetic oligonucleotide
ugguuaagcgcgugcuuug

SEQ ID NO: 461499 - RNA, 19 nt, Artificial Sequence
  Description of Artificial Sequence: Synthetic oligonucleotide
uggagcaaugggaggguac

SEQ ID NO: 461500 - RNA, 19 nt, Artificial Sequence
  Description of Artificial Sequence: Synthetic oligonucleotide
aucucgcugaauuguacaa

SEQ ID NO: 461501 - RNA, 19 nt, Artificial Sequence
  Description of Artificial Sequence: Synthetic oligonucleotide
gugaggaaagcucgacgcc

SEQ ID NO: 461502 - RNA, 19 nt, Artificial Sequence
  Description of Artificial Sequence: Synthetic oligonucleotide
ugacuacgugucaacugcu

SEQ ID NO: 461503 - RNA, 19 nt, Artificial Sequence
  Description of Artificial Sequence: Synthetic oligonucleotide
uguggucgaaagcuaggua

SEQ ID NO: 461504 - RNA, 19 nt, Artificial Sequence
  Description of Artificial Sequence: Synthetic oligonucleotide
gaagacucugugugugcac

SEQ ID NO: 461505 - RNA, 19 nt, Artificial Sequence
  Description of Artificial Sequence: Synthetic oligonucleotide
auugagugagggagaagag

SEQ ID NO: 461506 - RNA, 19 nt, Artificial Sequence
  Description of Artificial Sequence: Synthetic oligonucleotide
cauauccccaggagaaguc

SEQ ID NO: 461507 - RNA, 19 nt, Artificial Sequence
  Description of Artificial Sequence: Synthetic oligonucleotide
gcuguauaugacaaagaug

SEQ ID NO: 461508 - RNA, 19 nt, Artificial Sequence
  Description of Artificial Sequence: Synthetic oligonucleotide
ucugccuaccuagaauccu

SEQ ID NO: 461509 - RNA, 19 nt, Artificial Sequence
  Description of Artificial Sequence: Synthetic oligonucleotide
cuagaauccugaggugagg

SEQ ID NO: 461510 - RNA, 19 nt, Artificial Sequence
  Description of Artificial Sequence: Synthetic oligonucleotide
cucacuuugaguacucgua

SEQ ID NO: 461511 - RNA, 19 nt, Artificial Sequence
  Description of Artificial Sequence: Synthetic oligonucleotide
uucguucagcauacaggga

SEQ ID NO: 461512 - RNA, 19 nt, Artificial Sequence
  Description of Artificial Sequence: Synthetic oligonucleotide
ugcugaucgggugaagggu

SEQ ID NO: 461513 - RNA, 19 nt, Artificial Sequence
  Description of Artificial Sequence: Synthetic oligonucleotide
ugccuaccuagaauccuga

SEQ ID NO: 461514 - RNA, 19 nt, Artificial Sequence
  Description of Artificial Sequence: Synthetic oligonucleotide
aauucccggugucgguuga

SEQ ID NO: 461515 - RNA, 19 nt, Artificial Sequence
  Description of Artificial Sequence: Synthetic oligonucleotide
cucagacaguuguaccgag

SEQ ID NO: 461516 - RNA, 19 nt, Artificial Sequence
  Description of Artificial Sequence: Synthetic oligonucleotide
auacucuaguguaucucag

SEQ ID NO: 461517 - RNA, 19 nt, Artificial Sequence
  Description of Artificial Sequence: Synthetic oligonucleotide
aagcuagguacuccucgau

SEQ ID NO: 461518 - RNA, 19 nt, Artificial Sequence
  Description of Artificial Sequence: Synthetic oligonucleotide
gccguuguggccccaacgg

SEQ ID NO: 461519 - RNA, 19 nt, Artificial Sequence
  Description of Artificial Sequence: Synthetic oligonucleotide
cuacgugucaacugcucca

SEQ ID NO: 461520 - RNA, 19 nt, Artificial Sequence
  Description of Artificial Sequence: Synthetic oligonucleotide
ucgcugaauuguacaagaa

SEQ ID NO: 461521 - RNA, 19 nt, Artificial Sequence
  Description of Artificial Sequence: Synthetic oligonucleotide
cacaaccuugcuccacacg

SEQ ID NO: 461522 - RNA, 19 nt, Artificial Sequence
  Description of Artificial Sequence: Synthetic oligonucleotide
cugaucgggugaagggugc

SEQ ID NO: 461523 - RNA, 19 nt, Artificial Sequence
  Description of Artificial Sequence: Synthetic oligonucleotide
gguacuccucgauuauucc

SEQ ID NO: 461524 - RNA, 19 nt, Artificial Sequence
  Description of Artificial Sequence: Synthetic oligonucleotide
cugcuucuagagauggguc

SEQ ID NO: 461525 - RNA, 19 nt, Artificial Sequence
  Description of Artificial Sequence: Synthetic oligonucleotide
ugaucgggugaagggugcg

SEQ ID NO: 461526 - RNA, 19 nt, Artificial Sequence
  Description of Artificial Sequence: Synthetic oligonucleotide
agugaucaucugccuaccu

SEQ ID NO: 461527 - RNA, 19 nt, Artificial Sequence
  Description of Artificial Sequence: Synthetic oligonucleotide
gaucgggugaagggugcgg

SEQ ID NO: 461528 - RNA, 19 nt, Artificial Sequence
  Description of Artificial Sequence: Synthetic oligonucleotide
accaaauaugguagagucu

SEQ ID NO: 461529 - RNA, 19 nt, Artificial Sequence
  Description of Artificial Sequence: Synthetic oligonucleotide
ccuagaauccugaggugag

SEQ ID NO: 461530 - RNA, 19 nt, Artificial Sequence
  Description of Artificial Sequence: Synthetic oligonucleotide
cagggcgauugagugaggg

SEQ ID NO: 461531 - RNA, 19 nt, Artificial Sequence
  Description of Artificial Sequence: Synthetic oligonucleotide
augcgaauucccggugucg

SEQ ID NO: 461532 - RNA, 19 nt, Artificial Sequence
  Description of Artificial Sequence: Synthetic oligonucleotide
caacaugagcagugauuug

SEQ ID NO: 461533 - RNA, 19 nt, Artificial Sequence
  Description of Artificial Sequence: Synthetic oligonucleotide
auaugacaaagaugacgua

SEQ ID NO: 461534 - RNA, 19 nt, Artificial Sequence
  Description of Artificial Sequence: Synthetic oligonucleotide
caagaaucgaacuggugau

SEQ ID NO: 461535 - RNA, 19 nt, Artificial Sequence
  Description of Artificial Sequence: Synthetic oligonucleotide
uggucaaguucaccauauc

SEQ ID NO: 461536 - RNA, 19 nt, Artificial Sequence
  Description of Artificial Sequence: Synthetic oligonucleotide
agcaaugggaggguacccu

SEQ ID NO: 461537 - RNA, 19 nt, Artificial Sequence
  Description of Artificial Sequence: Synthetic oligonucleotide
gguacaauccauagccuuc

SEQ ID NO: 461538 - RNA, 19 nt, Artificial Sequence
  Description of Artificial Sequence: Synthetic oligonucleotide
agacucacuuugaguacuc

SEQ ID NO: 461539 - RNA, 19 nt, Artificial Sequence
  Description of Artificial Sequence: Synthetic oligonucleotide
acucagaugcacaggaguu

SEQ ID NO: 461540 - RNA, 19 nt, Artificial Sequence
  Description of Artificial Sequence: Synthetic oligonucleotide
agcgcgugcuuuguucuuc

SEQ ID NO: 461541 - RNA, 19 nt, Artificial Sequence
  Description of Artificial Sequence: Synthetic oligonucleotide
gaugacguacuaagcucca

SEQ ID NO: 461542 - RNA, 19 nt, Artificial Sequence
  Description of Artificial Sequence: Synthetic oligonucleotide
gcuagguacuccucgauua

SEQ ID NO: 461543 - RNA, 19 nt, Artificial Sequence
  Description of Artificial Sequence: Synthetic oligonucleotide
gguugagucaugugaagcu

SEQ ID NO: 461544 - RNA, 19 nt, Artificial Sequence
  Description of Artificial Sequence: Synthetic oligonucleotide
aagcacggaacuggagcca

SEQ ID NO: 461545 - RNA, 19 nt, Artificial Sequence
  Description of Artificial Sequence: Synthetic oligonucleotide
ggcacucgagguaagacca

SEQ ID NO: 461546 - RNA, 19 nt, Artificial Sequence
  Description of Artificial Sequence: Synthetic oligonucleotide
ggcguugcgucuccuggcg

SEQ ID NO: 461547 - RNA, 19 nt, Artificial Sequence
  Description of Artificial Sequence: Synthetic oligonucleotide
uuccgacccagggcgauug

SEQ ID NO: 461548 - RNA, 19 nt, Artificial Sequence
  Description of Artificial Sequence: Synthetic oligonucleotide
agacaugcuuuaugagcau

SEQ ID NO: 461549 - RNA, 19 nt, Artificial Sequence
  Description of Artificial Sequence: Synthetic oligonucleotide
uacgugucaacugcuccau

SEQ ID NO: 461550 - RNA, 19 nt, Artificial Sequence
  Description of Artificial Sequence: Synthetic oligonucleotide
augacguacuaagcuccag

SEQ ID NO: 461551 - RNA, 19 nt, Artificial Sequence
  Description of Artificial Sequence: Synthetic oligonucleotide
gaugcuguucguucagcau

SEQ ID NO: 461552 - RNA, 19 nt, Artificial Sequence
  Description of Artificial Sequence: Synthetic oligonucleotide
ugaaacccuccgugaauuu

SEQ ID NO: 461553 - RNA, 19 nt, Artificial Sequence
  Description of Artificial Sequence: Synthetic oligonucleotide
ugggacguuugauggccgu

SEQ ID NO: 461554 - RNA, 19 nt, Artificial Sequence
  Description of Artificial Sequence: Synthetic oligonucleotide
ugcuccacacguugucaaa

SEQ ID NO: 461555 - RNA, 19 nt, Artificial Sequence
  Description of Artificial Sequence: Synthetic oligonucleotide
auggcgucccggcucguga

SEQ ID NO: 461556 - RNA, 19 nt, Artificial Sequence
  Description of Artificial Sequence: Synthetic oligonucleotide
caauaucuaggagcuuauc

SEQ ID NO: 461557 - RNA, 19 nt, Artificial Sequence
  Description of Artificial Sequence: Synthetic oligonucleotide
uggcgucccggcucgugag

SEQ ID NO: 461558 - RNA, 19 nt, Artificial Sequence
  Description of Artificial Sequence: Synthetic oligonucleotide
uggcggacugugcuguaua

SEQ ID NO: 461559 - RNA, 19 nt, Artificial Sequence
  Description of Artificial Sequence: Synthetic oligonucleotide
gguuugauggagagacaug

SEQ ID NO: 461560 - RNA, 19 nt, Artificial Sequence
  Description of Artificial Sequence: Synthetic oligonucleotide
gucaccgugggacguuuga

SEQ ID NO: 461561 - RNA, 19 nt, Artificial Sequence
  Description of Artificial Sequence: Synthetic oligonucleotide
ucgacgcccacugcuggca

SEQ ID NO: 461562 - RNA, 19 nt, Artificial Sequence
  Description of Artificial Sequence: Synthetic oligonucleotide
aacccuccgugaauuugca

SEQ ID NO: 461563 - RNA, 19 nt, Artificial Sequence
  Description of Artificial Sequence: Synthetic oligonucleotide
acccagggcgauugaguga

SEQ ID NO: 461564 - RNA, 19 nt, Artificial Sequence
  Description of Artificial Sequence: Synthetic oligonucleotide
cauuuggugccugagcgcu

SEQ ID NO: 461565 - RNA, 19 nt, Artificial Sequence
  Description of Artificial Sequence: Synthetic oligonucleotide
gugcuguauaugacaaaga

SEQ ID NO: 461566 - RNA, 19 nt, Artificial Sequence
  Description of Artificial Sequence: Synthetic oligonucleotide
cuaccggccccgucucgcc

SEQ ID NO: 461567 - RNA, 19 nt, Artificial Sequence
  Description of Artificial Sequence: Synthetic oligonucleotide
ucaccgugggacguuugau

SEQ ID NO: 461568 - RNA, 19 nt, Artificial Sequence
  Description of Artificial Sequence: Synthetic oligonucleotide
gccuuccgaguguaucugg

SEQ ID NO: 461569 - RNA, 19 nt, Artificial Sequence
  Description of Artificial Sequence: Synthetic oligonucleotide
acguucggcuggugaccac

SEQ ID NO: 461570 - RNA, 19 nt, Artificial Sequence
  Description of Artificial Sequence: Synthetic oligonucleotide
cccacgcagucuuuggcag

SEQ ID NO: 461571 - RNA, 19 nt, Artificial Sequence
  Description of Artificial Sequence: Synthetic oligonucleotide
agauccccgugccugcaua

SEQ ID NO: 461572 - RNA, 19 nt, Artificial Sequence
  Description of Artificial Sequence: Synthetic oligonucleotide
ccguguggucgaaagcuag

SEQ ID NO: 461573 - RNA, 19 nt, Artificial Sequence
  Description of Artificial Sequence: Synthetic oligonucleotide
caaauaugguagagucucu

SEQ ID NO: 461574 - RNA, 19 nt, Artificial Sequence
  Description of Artificial Sequence: Synthetic oligonucleotide
accuaccggccccgucucg

SEQ ID NO: 461575 - RNA, 19 nt, Artificial Sequence
  Description of Artificial Sequence: Synthetic oligonucleotide
gaugguuaagcgcgugcuu

SEQ ID NO: 461576 - RNA, 19 nt, Artificial Sequence
  Description of Artificial Sequence: Synthetic oligonucleotide
cguguggucgaaagcuagg

SEQ ID NO: 461577 - RNA, 19 nt, Artificial Sequence
  Description of Artificial Sequence: Synthetic oligonucleotide
ccgugaauuugcagucugc

SEQ ID NO: 461578 - RNA, 19 nt, Artificial Sequence
  Description of Artificial Sequence: Synthetic oligonucleotide
agcucgacgcccacugcug

SEQ ID NO: 461579 - RNA, 19 nt, Artificial Sequence
  Description of Artificial Sequence: Synthetic oligonucleotide
guacaagaaucgaacuggu

SEQ ID NO: 461580 - RNA, 19 nt, Artificial Sequence
  Description of Artificial Sequence: Synthetic oligonucleotide
aucgaacuggugauugguu

SEQ ID NO: 461581 - RNA, 19 nt, Artificial Sequence
  Description of Artificial Sequence: Synthetic oligonucleotide
caucggauuugaggugaug

SEQ ID NO: 461582 - RNA, 19 nt, Artificial Sequence
  Description of Artificial Sequence: Synthetic oligonucleotide
uguuccgacccagggcgau

SEQ ID NO: 461583 - RNA, 19 nt, Artificial Sequence
  Description of Artificial Sequence: Synthetic oligonucleotide
cguacuaagcuccagggcu

SEQ ID NO: 461584 - RNA, 19 nt, Artificial Sequence
  Description of Artificial Sequence: Synthetic oligonucleotide
cguuguggccccaacggug

SEQ ID NO: 461585 - RNA, 19 nt, Artificial Sequence
  Description of Artificial Sequence: Synthetic oligonucleotide
gccuaccuagaauccugag

SEQ ID NO: 461586 - RNA, 19 nt, Artificial Sequence
  Description of Artificial Sequence: Synthetic oligonucleotide
gguacccuaauuucuguuu

SEQ ID NO: 461587 - RNA, 19 nt, Artificial Sequence
  Description of Artificial Sequence: Synthetic oligonucleotide
aggugauuccugggugaug

SEQ ID NO: 461588 - RNA, 19 nt, Artificial Sequence
  Description of Artificial Sequence: Synthetic oligonucleotide
caugaaacccuccgugaau

SEQ ID NO: 461589 - RNA, 19 nt, Artificial Sequence
  Description of Artificial Sequence: Synthetic oligonucleotide
uccgacccagggcgauuga

SEQ ID NO: 461590 - RNA, 19 nt, Artificial Sequence
  Description of Artificial Sequence: Synthetic oligonucleotide
cuguggcacucgagguaag

SEQ ID NO: 461591 - RNA, 19 nt, Artificial Sequence
  Description of Artificial Sequence: Synthetic oligonucleotide
cgugggacguuugauggcc

SEQ ID NO: 461592 - RNA, 19 nt, Artificial Sequence
  Description of Artificial Sequence: Synthetic oligonucleotide
ggugcaugaaacccuccgu

SEQ ID NO: 461593 - RNA, 19 nt, Artificial Sequence
  Description of Artificial Sequence: Synthetic oligonucleotide
ggaggguacccuaauuucu

SEQ ID NO: 461594 - RNA, 19 nt, Artificial Sequence
  Description of Artificial Sequence: Synthetic oligonucleotide
guguggucgaaagcuaggu

SEQ ID NO: 461595 - RNA, 19 nt, Artificial Sequence
  Description of Artificial Sequence: Synthetic oligonucleotide
ggccuggugaggaaacuca

SEQ ID NO: 461596 - RNA, 19 nt, Artificial Sequence
  Description of Artificial Sequence: Synthetic oligonucleotide
cagacucacuuugaguacu

SEQ ID NO: 461597 - RNA, 19 nt, Artificial Sequence
  Description of Artificial Sequence: Synthetic oligonucleotide
ccucgauuauuccuucaga

SEQ ID NO: 461598 - RNA, 19 nt, Artificial Sequence
  Description of Artificial Sequence: Synthetic oligonucleotide
ggguuugauggagagacau

SEQ ID NO: 461599 - RNA, 19 nt, Artificial Sequence
  Description of Artificial Sequence: Synthetic oligonucleotide
ggugucgguugauguaaaa

SEQ ID NO: 461600 - RNA, 19 nt, Artificial Sequence
  Description of Artificial Sequence: Synthetic oligonucleotide
guauguaaucucgcugaau

SEQ ID NO: 461601 - RNA, 19 nt, Artificial Sequence
  Description of Artificial Sequence: Synthetic oligonucleotide
uugcgucuccuggcggacu

SEQ ID NO: 461602 - RNA, 19 nt, Artificial Sequence
  Description of Artificial Sequence: Synthetic oligonucleotide
cacguucggcuggugacca

SEQ ID NO: 461603 - RNA, 19 nt, Artificial Sequence
  Description of Artificial Sequence: Synthetic oligonucleotide
cacucgagguaagaccaaa

SEQ ID NO: 461604 - RNA, 19 nt, Artificial Sequence
  Description of Artificial Sequence: Synthetic oligonucleotide
caccuaccggccccgucuc

SEQ ID NO: 461605 - RNA, 19 nt, Artificial Sequence
  Description of Artificial Sequence: Synthetic oligonucleotide
gcaaugggaggguacccua

SEQ ID NO: 461606 - RNA, 19 nt, Artificial Sequence
  Description of Artificial Sequence: Synthetic oligonucleotide
ccuuggacuguggcacucg

SEQ ID NO: 461607 - RNA, 19 nt, Artificial Sequence
  Description of Artificial Sequence: Synthetic oligonucleotide
gguucucaccugccccaug

SEQ ID NO: 461608 - RNA, 19 nt, Artificial Sequence
  Description of Artificial Sequence: Synthetic oligonucleotide
ccgugggacguuugauggc

SEQ ID NO: 461609 - RNA, 19 nt, Artificial Sequence
  Description of Artificial Sequence: Synthetic oligonucleotide
gcggacugugcuguauaug

SEQ ID NO: 461610 - RNA, 19 nt, Artificial Sequence
  Description of Artificial Sequence: Synthetic oligonucleotide
guuaagcgcgugcuuuguu

SEQ ID NO: 461611 - RNA, 19 nt, Artificial Sequence
  Description of Artificial Sequence: Synthetic oligonucleotide
ccuaccggccccgucucgc

SEQ ID NO: 461612 - RNA, 19 nt, Artificial Sequence
  Description of Artificial Sequence: Synthetic oligonucleotide
cagugacuacgugucaacu

SEQ ID NO: 461613 - RNA, 19 nt, Artificial Sequence
  Description of Artificial Sequence: Synthetic oligonucleotide
cuucacagggagugaucau

SEQ ID NO: 461614 - RNA, 19 nt, Artificial Sequence
  Description of Artificial Sequence: Synthetic oligonucleotide
ggccucauaaguagcuugu

SEQ ID NO: 461615 - RNA, 19 nt, Artificial Sequence
  Description of Artificial Sequence: Synthetic oligonucleotide
gucgggccuggugaggaaa

SEQ ID NO: 461616 - RNA, 19 nt, Artificial Sequence
  Description of Artificial Sequence: Synthetic oligonucleotide
cucagaugcacaggaguuu

SEQ ID NO: 461617 - RNA, 19 nt, Artificial Sequence
  Description of Artificial Sequence: Synthetic oligonucleotide
auucccggugucgguugau

SEQ ID NO: 461618 - RNA, 19 nt, Artificial Sequence
  Description of Artificial Sequence: Synthetic oligonucleotide
ccuugcggguucucaccug

SEQ ID NO: 461619 - RNA, 19 nt, Artificial Sequence
  Description of Artificial Sequence: Synthetic oligonucleotide
ccgaguguaucuggagauc

SEQ ID NO: 461620 - RNA, 19 nt, Artificial Sequence
  Description of Artificial Sequence: Synthetic oligonucleotide
ggccccaacgguggcucag

SEQ ID NO: 461621 - RNA, 19 nt, Artificial Sequence
  Description of Artificial Sequence: Synthetic oligonucleotide
ggcagauacucuaguguau

SEQ ID NO: 461622 - RNA, 19 nt, Artificial Sequence
  Description of Artificial Sequence: Synthetic oligonucleotide
ccgacccagggcgauugag

SEQ ID NO: 461623 - RNA, 19 nt, Artificial Sequence
  Description of Artificial Sequence: Synthetic oligonucleotide
gcgucccggcucgugagug

SEQ ID NO: 461624 - RNA, 19 nt, Artificial Sequence
  Description of Artificial Sequence: Synthetic oligonucleotide
gguuaagcgcgugcuuugu

SEQ ID NO: 461625 - RNA, 19 nt, Artificial Sequence
  Description of Artificial Sequence: Synthetic oligonucleotide
gugaguggcuugugcugau

SEQ ID NO: 461626 - RNA, 19 nt, Artificial Sequence
  Description of Artificial Sequence: Synthetic oligonucleotide
cuccgugaauuugcagucu

SEQ ID NO: 461627 - RNA, 19 nt, Artificial Sequence
  Description of Artificial Sequence: Synthetic oligonucleotide
ccggugucgguugauguaa

SEQ ID NO: 461628 - RNA, 19 nt, Artificial Sequence
  Description of Artificial Sequence: Synthetic oligonucleotide
cccagugacuacgugucaa

SEQ ID NO: 461629 - RNA, 19 nt, Artificial Sequence
  Description of Artificial Sequence: Synthetic oligonucleotide
ccagggcgauugagugagg

SEQ ID NO: 461630 - RNA, 19 nt, Artificial Sequence
  Description of Artificial Sequence: Synthetic oligonucleotide
ggaaagcucgacgcccacu

SEQ ID NO: 461631 - RNA, 19 nt, Artificial Sequence
  Description of Artificial Sequence: Synthetic oligonucleotide
ccaccuaccggccccgucu

SEQ ID NO: 461632 - RNA, 19 nt, Artificial Sequence
  Description of Artificial Sequence: Synthetic oligonucleotide
cgaacuggugauugguuau

SEQ ID NO: 461633 - RNA, 19 nt, Artificial Sequence
  Description of Artificial Sequence: Synthetic oligonucleotide
ccggcucgugaguggcuug

SEQ ID NO: 461634 - RNA, 19 nt, Artificial Sequence
  Description of Artificial Sequence: Synthetic oligonucleotide
agggcucgguuuggccaau

SEQ ID NO: 461635 - RNA, 19 nt, Artificial Sequence
  Description of Artificial Sequence: Synthetic oligonucleotide
ccccgucucgccccgucuc

SEQ ID NO: 461636 - RNA, 19 nt, Artificial Sequence
  Description of Artificial Sequence: Synthetic oligonucleotide
gcuguucguucagcauaca

SEQ ID NO: 461637 - RNA, 19 nt, Artificial Sequence
  Description of Artificial Sequence: Synthetic oligonucleotide
acgcagucuuuggcagaua

SEQ ID NO: 461638 - RNA, 19 nt, Artificial Sequence
  Description of Artificial Sequence: Synthetic oligonucleotide
ggucgggccuggugaggaa

SEQ ID NO: 461639 - RNA, 19 nt, Artificial Sequence
  Description of Artificial Sequence: Synthetic oligonucleotide
ccggggcgggcuagccagg

SEQ ID NO: 461640 - RNA, 19 nt, Artificial Sequence
  Description of Artificial Sequence: Synthetic oligonucleotide
ggcucgguuuggccaauuu

SEQ ID NO: 461641 - RNA, 19 nt, Artificial Sequence
  Description of Artificial Sequence: Synthetic oligonucleotide
gcacucgagguaagaccaa

SEQ ID NO: 461642 - RNA, 19 nt, Artificial Sequence
  Description of Artificial Sequence: Synthetic oligonucleotide
cuggcggacugugcuguau

SEQ ID NO: 461643 - RNA, 19 nt, Artificial Sequence
  Description of Artificial Sequence: Synthetic oligonucleotide
gccccaacgguggcucaga

SEQ ID NO: 461644 - RNA, 19 nt, Artificial Sequence
  Description of Artificial Sequence: Synthetic oligonucleotide
cgacccagggcgauugagu

SEQ ID NO: 461645 - RNA, 19 nt, Artificial Sequence
  Description of Artificial Sequence: Synthetic oligonucleotide
ccaagaggccauucacguu

SEQ ID NO: 461646 - RNA, 19 nt, Artificial Sequence
  Description of Artificial Sequence: Synthetic oligonucleotide
ggcgucccggcucgugagu

SEQ ID NO: 461647 - RNA, 19 nt, Artificial Sequence
  Description of Artificial Sequence: Synthetic oligonucleotide
gggacguuugauggccguu

SEQ ID NO: 461648 - RNA, 19 nt, Artificial Sequence
  Description of Artificial Sequence: Synthetic oligonucleotide
cacggccuuccgaguguau

SEQ ID NO: 461649 - RNA, 19 nt, Artificial Sequence
  Description of Artificial Sequence: Synthetic oligonucleotide
ggagucaccgugggacguu

SEQ ID NO: 461650 - RNA, 19 nt, Artificial Sequence
  Description of Artificial Sequence: Synthetic oligonucleotide
gcacggccuuccgagugua

SEQ ID NO: 461651 - RNA, 19 nt, Artificial Sequence
  Description of Artificial Sequence: Synthetic oligonucleotide
cggugucgguugauguaaa

SEQ ID NO: 461652 - RNA, 19 nt, Artificial Sequence
  Description of Artificial Sequence: Synthetic oligonucleotide
ccauauccguguggucgaa

SEQ ID NO: 461653 - RNA, 19 nt, Artificial Sequence
  Description of Artificial Sequence: Synthetic oligonucleotide
cguucggcuggugaccacu

SEQ ID NO: 461654 - RNA, 19 nt, Artificial Sequence
  Description of Artificial Sequence: Synthetic oligonucleotide
gccccgucucgccccgucu

SEQ ID NO: 461655 - RNA, 19 nt, Artificial Sequence
  Description of Artificial Sequence: Synthetic oligonucleotide
cgcgugcuuuguucuuccu

SEQ ID NO: 461656 - RNA, 19 nt, Artificial Sequence
  Description of Artificial Sequence: Synthetic oligonucleotide
gggcucgguuuggccaauu

SEQ ID NO: 461657 - RNA, 19 nt, Artificial Sequence
  Description of Artificial Sequence: Synthetic oligonucleotide
gagaauaucgauuagaggc

SEQ ID NO: 461658 - RNA, 19 nt, Artificial Sequence
  Description of Artificial Sequence: Synthetic oligonucleotide
uuucaaaagacaaaguggc

SEQ ID NO: 461659 - RNA, 19 nt, Artificial Sequence
  Description of Artificial Sequence: Synthetic oligonucleotide
uauaguaauaaacugcaca

SEQ ID NO: 461660 - RNA, 19 nt, Artificial Sequence
  Description of Artificial Sequence: Synthetic oligonucleotide
uuaagauuugcuguaaugg

SEQ ID NO: 461661 - RNA, 19 nt, Artificial Sequence
  Description of Artificial Sequence: Synthetic oligonucleotide
uguguuuuaauuuuaagau

SEQ ID NO: 461662 - RNA, 19 nt, Artificial Sequence
  Description of Artificial Sequence: Synthetic oligonucleotide
uuugauuagacguuggcug

SEQ ID NO: 461663 - RNA, 19 nt, Artificial Sequence
  Description of Artificial Sequence: Synthetic oligonucleotide
uuggugaugaaucagaauc

SEQ ID NO: 461664 - RNA, 19 nt, Artificial Sequence
  Description of Artificial Sequence: Synthetic oligonucleotide
acuaucaacugucauaguc

SEQ ID NO: 461665 - RNA, 19 nt, Artificial Sequence
  Description of Artificial Sequence: Synthetic oligonucleotide
uuucaaaaugacccaaagg

SEQ ID NO: 461666 - RNA, 19 nt, Artificial Sequence
  Description of Artificial Sequence: Synthetic oligonucleotide
aaagcuauuacagagcaga

SEQ ID NO: 461667 - RNA, 19 nt, Artificial Sequence
  Description of Artificial Sequence: Synthetic oligonucleotide
ucuaacuaguucuuggucc

SEQ ID NO: 461668 - RNA, 19 nt, Artificial Sequence
  Description of Artificial Sequence: Synthetic oligonucleotide
uuucagaggagucauagcu

SEQ ID NO: 461669 - RNA, 19 nt, Artificial Sequence
  Description of Artificial Sequence: Synthetic oligonucleotide
uuguuagcauaccugaccg

SEQ ID NO: 461670 - RNA, 19 nt, Artificial Sequence
  Description of Artificial Sequence: Synthetic oligonucleotide
aauaguuggauuuucucau

SEQ ID NO: 461671 - RNA, 19 nt, Artificial Sequence
  Description of Artificial Sequence: Synthetic oligonucleotide
aggaggaguaguuacaaac

SEQ ID NO: 461672 - RNA, 19 nt, Artificial Sequence
  Description of Artificial Sequence: Synthetic oligonucleotide
uuacuaucaacugucauag

SEQ ID NO: 461673 - RNA, 19 nt, Artificial Sequence
  Description of Artificial Sequence: Synthetic oligonucleotide
uuuugaauuacauggugug

SEQ ID NO: 461674 - RNA, 19 nt, Artificial Sequence
  Description of Artificial Sequence: Synthetic oligonucleotide
ucuucuacacacaugucag

SEQ ID NO: 461675 - RNA, 19 nt, Artificial Sequence
  Description of Artificial Sequence: Synthetic oligonucleotide
uaauaguuggauuuucuca

SEQ ID NO: 461676 - RNA, 19 nt, Artificial Sequence
  Description of Artificial Sequence: Synthetic oligonucleotide
aaccuucuuagucugguuc

SEQ ID NO: 461677 - RNA, 19 nt, Artificial Sequence
  Description of Artificial Sequence: Synthetic oligonucleotide
auucagaauaucuaugcug

SEQ ID NO: 461678 - RNA, 19 nt, Artificial Sequence
  Description of Artificial Sequence: Synthetic oligonucleotide
aagauuauucagaauaucu

SEQ ID NO: 461679 - RNA, 19 nt, Artificial Sequence
  Description of Artificial Sequence: Synthetic oligonucleotide
gaugaaccauccuauaacc

SEQ ID NO: 461680 - RNA, 19 nt, Artificial Sequence
  Description of Artificial Sequence: Synthetic oligonucleotide
gaugcgguggaacaguccg

SEQ ID NO: 461681 - RNA, 19 nt, Artificial Sequence
  Description of Artificial Sequence: Synthetic oligonucleotide
cuaucaacugucauagucc

SEQ ID NO: 461682 - RNA, 19 nt, Artificial Sequence
  Description of Artificial Sequence: Synthetic oligonucleotide
aguaguuacaaacuccaug

SEQ ID NO: 461683 - RNA, 19 nt, Artificial Sequence
  Description of Artificial Sequence: Synthetic oligonucleotide
gacuggauggcaaugauag

SEQ ID NO: 461684 - RNA, 19 nt, Artificial Sequence
  Description of Artificial Sequence: Synthetic oligonucleotide
ucgauuagaggccacauaa

SEQ ID NO: 461685 - RNA, 19 nt, Artificial Sequence
  Description of Artificial Sequence: Synthetic oligonucleotide
ccuauuaaaaccaaacccc

SEQ ID NO: 461686 - RNA, 19 nt, Artificial Sequence
  Description of Artificial Sequence: Synthetic oligonucleotide
uguguugucuggcacaucu

SEQ ID NO: 461687 - RNA, 19 nt, Artificial Sequence
  Description of Artificial Sequence: Synthetic oligonucleotide
ugauagcucaacaucauuc

SEQ ID NO: 461688 - RNA, 19 nt, Artificial Sequence
  Description of Artificial Sequence: Synthetic oligonucleotide
agaauaucgauuagaggcc

SEQ ID NO: 461689 - RNA, 19 nt, Artificial Sequence
  Description of Artificial Sequence: Synthetic oligonucleotide
cucuuuagauuucuggugg

SEQ ID NO: 461690 - RNA, 19 nt, Artificial Sequence
  Description of Artificial Sequence: Synthetic oligonucleotide
uucauauugucacacucca

SEQ ID NO: 461691 - RNA, 19 nt, Artificial Sequence
  Description of Artificial Sequence: Synthetic oligonucleotide
ugucugcucggucaaagcg

SEQ ID NO: 461692 - RNA, 19 nt, Artificial Sequence
  Description of Artificial Sequence: Synthetic oligonucleotide
ucugaucauugucuguucg

SEQ ID NO: 461693 - RNA, 19 nt, Artificial Sequence
  Description of Artificial Sequence: Synthetic oligonucleotide
uuuaucuuugguuuaggaa

SEQ ID NO: 461694 - RNA, 19 nt, Artificial Sequence
  Description of Artificial Sequence: Synthetic oligonucleotide
ugaaccauccuauaaccca

SEQ ID NO: 461695 - RNA, 19 nt, Artificial Sequence
  Description of Artificial Sequence: Synthetic oligonucleotide
uuugaucgugcuaauggcc

SEQ ID NO: 461696 - RNA, 19 nt, Artificial Sequence
  Description of Artificial Sequence: Synthetic oligonucleotide
aaugugaucugguuauaga

SEQ ID NO: 461697 - RNA, 19 nt, Artificial Sequence
  Description of Artificial Sequence: Synthetic oligonucleotide
uaagauuugcuguaaugga

SEQ ID NO: 461698 - RNA, 19 nt, Artificial Sequence
  Description of Artificial Sequence: Synthetic oligonucleotide
cacauaauccccagaaugc

SEQ ID NO: 461699 - RNA, 19 nt, Artificial Sequence
  Description of Artificial Sequence: Synthetic oligonucleotide
cuuaccaguagagucaucc

SEQ ID NO: 461700 - RNA, 19 nt, Artificial Sequence
  Description of Artificial Sequence: Synthetic oligonucleotide
gaagguacguccuucacca

SEQ ID NO: 461701 - RNA, 19 nt, Artificial Sequence
  Description of Artificial Sequence: Synthetic oligonucleotide
uuuugaucgugcuaauggc

SEQ ID NO: 461702 - RNA, 19 nt, Artificial Sequence
  Description of Artificial Sequence: Synthetic oligonucleotide
auugaguacuucugacugc

SEQ ID NO: 461703 - RNA, 19 nt, Artificial Sequence
  Description of Artificial Sequence: Synthetic oligonucleotide
ucaacugucauagucccag

SEQ ID NO: 461704 - RNA, 19 nt, Artificial Sequence
  Description of Artificial Sequence: Synthetic oligonucleotide
ucuuagauguggaaguccu

SEQ ID NO: 461705 - RNA, 19 nt, Artificial Sequence
  Description of Artificial Sequence: Synthetic oligonucleotide
gauucuuugccaaaugaug

SEQ ID NO: 461706 - RNA, 19 nt, Artificial Sequence
  Description of Artificial Sequence: Synthetic oligonucleotide
uugauucuuugccaaauga

SEQ ID NO: 461707 - RNA, 19 nt, Artificial Sequence
  Description of Artificial Sequence: Synthetic oligonucleotide
ugcuaagugaauucugcag

SEQ ID NO: 461708 - RNA, 19 nt, Artificial Sequence
  Description of Artificial Sequence: Synthetic oligonucleotide
uguucgauaacuuucuauu

SEQ ID NO: 461709 - RNA, 19 nt, Artificial Sequence
  Description of Artificial Sequence: Synthetic oligonucleotide
uucuuguuagcauaccuga

SEQ ID NO: 461710 - RNA, 19 nt, Artificial Sequence
  Description of Artificial Sequence: Synthetic oligonucleotide
auuacuaucaacugucaua

SEQ ID NO: 461711 - RNA, 19 nt, Artificial Sequence
  Description of Artificial Sequence: Synthetic oligonucleotide
acuuaauuuaucuuugguu

SEQ ID NO: 461712 - RNA, 19 nt, Artificial Sequence
  Description of Artificial Sequence: Synthetic oligonucleotide
aacccaacguggaagacac

SEQ ID NO: 461713 - RNA, 19 nt, Artificial Sequence
  Description of Artificial Sequence: Synthetic oligonucleotide
gauuagaggccacauaauc

SEQ ID NO: 461714 - RNA, 19 nt, Artificial Sequence
  Description of Artificial Sequence: Synthetic oligonucleotide
auaucuaugcuguucauuu

SEQ ID NO: 461715 - RNA, 19 nt, Artificial Sequence
  Description of Artificial Sequence: Synthetic oligonucleotide
uguuuugauuagacguugg

SEQ ID NO: 461716 - RNA, 19 nt, Artificial Sequence
  Description of Artificial Sequence: Synthetic oligonucleotide
cauugaguacuucugacug

SEQ ID NO: 461717 - RNA, 19 nt, Artificial Sequence
  Description of Artificial Sequence: Synthetic oligonucleotide
uaucaacugucauaguccc

SEQ ID NO: 461718 - RNA, 19 nt, Artificial Sequence
  Description of Artificial Sequence: Synthetic oligonucleotide
gugaugauagugaucaggg

SEQ ID NO: 461719 - RNA, 19 nt, Artificial Sequence
  Description of Artificial Sequence: Synthetic oligonucleotide
aguuacaccggguugcaag

SEQ ID NO: 461720 - RNA, 19 nt, Artificial Sequence
  Description of Artificial Sequence: Synthetic oligonucleotide
ugucguacauuucugucug

SEQ ID NO: 461721 - RNA, 19 nt, Artificial Sequence
  Description of Artificial Sequence: Synthetic oligonucleotide
gauucaagauuauucagaa

SEQ ID NO: 461722 - RNA, 19 nt, Artificial Sequence
  Description of Artificial Sequence: Synthetic oligonucleotide
aacggguagcuguugguuc

SEQ ID NO: 461723 - RNA, 19 nt, Artificial Sequence
  Description of Artificial Sequence: Synthetic oligonucleotide
aguaucacuguguugucug

SEQ ID NO: 461724 - RNA, 19 nt, Artificial Sequence
  Description of Artificial Sequence: Synthetic oligonucleotide
aucauugucuguucgauaa

SEQ ID NO: 461725 - RNA, 19 nt, Artificial Sequence
  Description of Artificial Sequence: Synthetic oligonucleotide
cucuugagcauucauaguc

SEQ ID NO: 461726 - RNA, 19 nt, Artificial Sequence
  Description of Artificial Sequence: Synthetic oligonucleotide
uauaacccaacguggaaga

SEQ ID NO: 461727 - RNA, 19 nt, Artificial Sequence
  Description of Artificial Sequence: Synthetic oligonucleotide
auaaggagagccucugcuc

SEQ ID NO: 461728 - RNA, 19 nt, Artificial Sequence
  Description of Artificial Sequence: Synthetic oligonucleotide
aaauugcuaagugaauucu

SEQ ID NO: 461729 - RNA, 19 nt, Artificial Sequence
  Description of Artificial Sequence: Synthetic oligonucleotide
ugucuguucgauaacuuuc

SEQ ID NO: 461730 - RNA, 19 nt, Artificial Sequence
  Description of Artificial Sequence: Synthetic oligonucleotide
ucauucuuauauaucuggu

SEQ ID NO: 461731 - RNA, 19 nt, Artificial Sequence
  Description of Artificial Sequence: Synthetic oligonucleotide
uccuacuuggugaugaauc

SEQ ID NO: 461732 - RNA, 19 nt, Artificial Sequence
  Description of Artificial Sequence: Synthetic oligonucleotide
ugcucuaauaguuggauuu

SEQ ID NO: 461733 - RNA, 19 nt, Artificial Sequence
  Description of Artificial Sequence: Synthetic oligonucleotide
gauagcucaacaucauuca

SEQ ID NO: 461734 - RNA, 19 nt, Artificial Sequence
  Description of Artificial Sequence: Synthetic oligonucleotide
agauuugcuguaauggaac

SEQ ID NO: 461735 - RNA, 19 nt, Artificial Sequence
  Description of Artificial Sequence: Synthetic oligonucleotide
uuuugauuagacguuggcu

SEQ ID NO: 461736 - RNA, 19 nt, Artificial Sequence
  Description of Artificial Sequence: Synthetic oligonucleotide
gaugcaacagacguuugag

SEQ ID NO: 461737 - RNA, 19 nt, Artificial Sequence
  Description of Artificial Sequence: Synthetic oligonucleotide
ucuguugaaggaaugugau

SEQ ID NO: 461738 - RNA, 19 nt, Artificial Sequence
  Description of Artificial Sequence: Synthetic oligonucleotide
ugcucauucccauugagua

SEQ ID NO: 461739 - RNA, 19 nt, Artificial Sequence
  Description of Artificial Sequence: Synthetic oligonucleotide
uguugguucugauaaggcu

SEQ ID NO: 461740 - RNA, 19 nt, Artificial Sequence
  Description of Artificial Sequence: Synthetic oligonucleotide
acugucguacauuucuguc

SEQ ID NO: 461741 - RNA, 19 nt, Artificial Sequence
  Description of Artificial Sequence: Synthetic oligonucleotide
ugauucuuugccaaaugau

SEQ ID NO: 461742 - RNA, 19 nt, Artificial Sequence
  Description of Artificial Sequence: Synthetic oligonucleotide
aacaguccguggcaucccc

SEQ ID NO: 461743 - RNA, 19 nt, Artificial Sequence
  Description of Artificial Sequence: Synthetic oligonucleotide
cuaauuuuaguacucaugu

SEQ ID NO: 461744 - RNA, 19 nt, Artificial Sequence
  Description of Artificial Sequence: Synthetic oligonucleotide
uuggacuguguuuucacug

SEQ ID NO: 461745 - RNA, 19 nt, Artificial Sequence
  Description of Artificial Sequence: Synthetic oligonucleotide
caaauugcuaagugaauuc

SEQ ID NO: 461746 - RNA, 19 nt, Artificial Sequence
  Description of Artificial Sequence: Synthetic oligonucleotide
aggaguaguuacaaacucc

SEQ ID NO: 461747 - RNA, 19 nt, Artificial Sequence
  Description of Artificial Sequence: Synthetic oligonucleotide
ugaugauagugaucagggg

SEQ ID NO: 461748 - RNA, 19 nt, Artificial Sequence
  Description of Artificial Sequence: Synthetic oligonucleotide
cuuuguaaggucuacagcu

SEQ ID NO: 461749 - RNA, 19 nt, Artificial Sequence
  Description of Artificial Sequence: Synthetic oligonucleotide
auuaguuuucccugggcgu

SEQ ID NO: 461750 - RNA, 19 nt, Artificial Sequence
  Description of Artificial Sequence: Synthetic oligonucleotide
uagcauaccugaccggagg

SEQ ID NO: 461751 - RNA, 19 nt, Artificial Sequence
  Description of Artificial Sequence: Synthetic oligonucleotide
uugaucgugcuaauggccu

SEQ ID NO: 461752 - RNA, 19 nt, Artificial Sequence
  Description of Artificial Sequence: Synthetic oligonucleotide
cuaauaguuggauuuucuc

SEQ ID NO: 461753 - RNA, 19 nt, Artificial Sequence
  Description of Artificial Sequence: Synthetic oligonucleotide
ucgauaacuuucuauuuuc

SEQ ID NO: 461754 - RNA, 19 nt, Artificial Sequence
  Description of Artificial Sequence: Synthetic oligonucleotide
cauccuuugccaaaacuac

SEQ ID NO: 461755 - RNA, 19 nt, Artificial Sequence
  Description of Artificial Sequence: Synthetic oligonucleotide
uucagaggagucauagcug

SEQ ID NO: 461756 - RNA, 19 nt, Artificial Sequence
  Description of Artificial Sequence: Synthetic oligonucleotide
uggugaugaaucagaaucu

SEQ ID NO: 461757 - RNA, 19 nt, Artificial Sequence
  Description of Artificial Sequence: Synthetic oligonucleotide
uucgauaacuuucuauuuu

SEQ ID NO: 461758 - RNA, 19 nt, Artificial Sequence
  Description of Artificial Sequence: Synthetic oligonucleotide
aucuaugcuguucauuuca

SEQ ID NO: 461759 - RNA, 19 nt, Artificial Sequence
  Description of Artificial Sequence: Synthetic oligonucleotide
ucaaaccauagcuauuuuc

SEQ ID NO: 461760 - RNA, 19 nt, Artificial Sequence
  Description of Artificial Sequence: Synthetic oligonucleotide
aggccuauuaaaaccaaac

SEQ ID NO: 461761 - RNA, 19 nt, Artificial Sequence
  Description of Artificial Sequence: Synthetic oligonucleotide
uccuauaacccaacgugga

SEQ ID NO: 461762 - RNA, 19 nt, Artificial Sequence
  Description of Artificial Sequence: Synthetic oligonucleotide
ucaaauuauuugcaagauu

SEQ ID NO: 461763 - RNA, 19 nt, Artificial Sequence
  Description of Artificial Sequence: Synthetic oligonucleotide
gcuauuuucuuguugcaag

SEQ ID NO: 461764 - RNA, 19 nt, Artificial Sequence
  Description of Artificial Sequence: Synthetic oligonucleotide
aauugcuaagugaauucug

SEQ ID NO: 461765 - RNA, 19 nt, Artificial Sequence
  Description of Artificial Sequence: Synthetic oligonucleotide
uugaguacuucugacugcc

SEQ ID NO: 461766 - RNA, 19 nt, Artificial Sequence
  Description of Artificial Sequence: Synthetic oligonucleotide
ugaugcaacagacguuuga

SEQ ID NO: 461767 - RNA, 19 nt, Artificial Sequence
  Description of Artificial Sequence: Synthetic oligonucleotide
uaaagcuauuacagagcag

SEQ ID NO: 461768 - RNA, 19 nt, Artificial Sequence
  Description of Artificial Sequence: Synthetic oligonucleotide
uugaauuacauggugugau

SEQ ID NO: 461769 - RNA, 19 nt, Artificial Sequence
  Description of Artificial Sequence: Synthetic oligonucleotide
guuuugauuagacguuggc

SEQ ID NO: 461770 - RNA, 19 nt, Artificial Sequence
  Description of Artificial Sequence: Synthetic oligonucleotide
ucuaaccuucuuagucugg

SEQ ID NO: 461771 - RNA, 19 nt, Artificial Sequence
  Description of Artificial Sequence: Synthetic oligonucleotide
uuucaaaccauagcuauuu

SEQ ID NO: 461772 - RNA, 19 nt, Artificial Sequence
  Description of Artificial Sequence: Synthetic oligonucleotide
uacuugacuuggaaggugu

SEQ ID NO: 461773 - RNA, 19 nt, Artificial Sequence
  Description of Artificial Sequence: Synthetic oligonucleotide
uucuaaccuucuuagucug

SEQ ID NO: 461774 - RNA, 19 nt, Artificial Sequence
  Description of Artificial Sequence: Synthetic oligonucleotide
ucaagaggugcauccuccg

SEQ ID NO: 461775 - RNA, 19 nt, Artificial Sequence
  Description of Artificial Sequence: Synthetic oligonucleotide
uuagcauaccugaccggag

SEQ ID NO: 461776 - RNA, 19 nt, Artificial Sequence
  Description of Artificial Sequence: Synthetic oligonucleotide
ucgaacggguagcuguugg

SEQ ID NO: 461777 - RNA, 19 nt, Artificial Sequence
  Description of Artificial Sequence: Synthetic oligonucleotide
uuagauuucugguggcagu

SEQ ID NO: 461778 - RNA, 19 nt, Artificial Sequence
  Description of Artificial Sequence: Synthetic oligonucleotide
cuauaacccaacguggaag

SEQ ID NO: 461779 - RNA, 19 nt, Artificial Sequence
  Description of Artificial Sequence: Synthetic oligonucleotide
aacuccaugucacuagguu

SEQ ID NO: 461780 - RNA, 19 nt, Artificial Sequence
  Description of Artificial Sequence: Synthetic oligonucleotide
uuugaauuacaugguguga

SEQ ID NO: 461781 - RNA, 19 nt, Artificial Sequence
  Description of Artificial Sequence: Synthetic oligonucleotide
uuauauaucuggucaucau

SEQ ID NO: 461782 - RNA, 19 nt, Artificial Sequence
  Description of Artificial Sequence: Synthetic oligonucleotide
uaauuuuaguacucauguc

SEQ ID NO: 461783 - RNA, 19 nt, Artificial Sequence
  Description of Artificial Sequence: Synthetic oligonucleotide
aaggcuuuguaaggucuac

SEQ ID NO: 461784 - RNA, 19 nt, Artificial Sequence
  Description of Artificial Sequence: Synthetic oligonucleotide
uacaccggguugcaagccg

SEQ ID NO: 461785 - RNA, 19 nt, Artificial Sequence
  Description of Artificial Sequence: Synthetic oligonucleotide
uuggaaauuuugaggcucu

SEQ ID NO: 461786 - RNA, 19 nt, Artificial Sequence
  Description of Artificial Sequence: Synthetic oligonucleotide
ucuauaaggagagccucug

SEQ ID NO: 461787 - RNA, 19 nt, Artificial Sequence
  Description of Artificial Sequence: Synthetic oligonucleotide
uaugcacuuaauuuaucuu

SEQ ID NO: 461788 - RNA, 19 nt, Artificial Sequence
  Description of Artificial Sequence: Synthetic oligonucleotide
cuuggaaggugucugagga

SEQ ID NO: 461789 - RNA, 19 nt, Artificial Sequence
  Description of Artificial Sequence: Synthetic oligonucleotide
uuguuuugauuagacguug

SEQ ID NO: 461790 - RNA, 19 nt, Artificial Sequence
  Description of Artificial Sequence: Synthetic oligonucleotide
ugauaaggcuuuguaaggu

SEQ ID NO: 461791 - RNA, 19 nt, Artificial Sequence
  Description of Artificial Sequence: Synthetic oligonucleotide
cuugggaugcuugucuugg

SEQ ID NO: 461792 - RNA, 19 nt, Artificial Sequence
  Description of Artificial Sequence: Synthetic oligonucleotide
ucggccagauuucaguaga

SEQ ID NO: 461793 - RNA, 19 nt, Artificial Sequence
  Description of Artificial Sequence: Synthetic oligonucleotide
acguuugaguuugaguaac

SEQ ID NO: 461794 - RNA, 19 nt, Artificial Sequence
  Description of Artificial Sequence: Synthetic oligonucleotide
aauaucgauuagaggccac

SEQ ID NO: 461795 - RNA, 19 nt, Artificial Sequence
  Description of Artificial Sequence: Synthetic oligonucleotide
uuaguuuucccugggcgug

SEQ ID NO: 461796 - RNA, 19 nt, Artificial Sequence
  Description of Artificial Sequence: Synthetic oligonucleotide
ggugaugauagugaucagg

SEQ ID NO: 461797 - RNA, 19 nt, Artificial Sequence
  Description of Artificial Sequence: Synthetic oligonucleotide
auccuauaacccaacgugg

SEQ ID NO: 461798 - RNA, 19 nt, Artificial Sequence
  Description of Artificial Sequence: Synthetic oligonucleotide
agcauaccugaccggaggg

SEQ ID NO: 461799 - RNA, 19 nt, Artificial Sequence
  Description of Artificial Sequence: Synthetic oligonucleotide
ucuuguuagcauaccugac

SEQ ID NO: 461800 - RNA, 19 nt, Artificial Sequence
  Description of Artificial Sequence: Synthetic oligonucleotide
uuuuacagcugugcagucc

SEQ ID NO: 461801 - RNA, 19 nt, Artificial Sequence
  Description of Artificial Sequence: Synthetic oligonucleotide
agugcucauucccauugag

SEQ ID NO: 461802 - RNA, 19 nt, Artificial Sequence
  Description of Artificial Sequence: Synthetic oligonucleotide
ugauagugaucaggggugg

SEQ ID NO: 461803 - RNA, 19 nt, Artificial Sequence
  Description of Artificial Sequence: Synthetic oligonucleotide
guuacaccggguugcaagc

SEQ ID NO: 461804 - RNA, 19 nt, Artificial Sequence
  Description of Artificial Sequence: Synthetic oligonucleotide
uuagucugguucacuguac

SEQ ID NO: 461805 - RNA, 19 nt, Artificial Sequence
  Description of Artificial Sequence: Synthetic oligonucleotide
accauccuauaacccaacg

SEQ ID NO: 461806 - RNA, 19 nt, Artificial Sequence
  Description of Artificial Sequence: Synthetic oligonucleotide
auuagacguuggcugaugu

SEQ ID NO: 461807 - RNA, 19 nt, Artificial Sequence
  Description of Artificial Sequence: Synthetic oligonucleotide
cuguugguucugauaaggc

SEQ ID NO: 461808 - RNA, 19 nt, Artificial Sequence
  Description of Artificial Sequence: Synthetic oligonucleotide
ucugcucggucaaagcggu

SEQ ID NO: 461809 - RNA, 19 nt, Artificial Sequence
  Description of Artificial Sequence: Synthetic oligonucleotide
gcaaugauagcucaacauc

SEQ ID NO: 461810 - RNA, 19 nt, Artificial Sequence
  Description of Artificial Sequence: Synthetic oligonucleotide
ggccuauuaaaaccaaacc

SEQ ID NO: 461811 - RNA, 19 nt, Artificial Sequence
  Description of Artificial Sequence: Synthetic oligonucleotide
auauugucacacuccacau

SEQ ID NO: 461812 - RNA, 19 nt, Artificial Sequence
  Description of Artificial Sequence: Synthetic oligonucleotide
ccuaauuuuaguacucaug

SEQ ID NO: 461813 - RNA, 19 nt, Artificial Sequence
  Description of Artificial Sequence: Synthetic oligonucleotide
ugcuaauggccuugggaug

SEQ ID NO: 461814 - RNA, 19 nt, Artificial Sequence
  Description of Artificial Sequence: Synthetic oligonucleotide
agaacucaagauggauggc

SEQ ID NO: 461815 - RNA, 19 nt, Artificial Sequence
  Description of Artificial Sequence: Synthetic oligonucleotide
aaugauagcucaacaucau

SEQ ID NO: 461816 - RNA, 19 nt, Artificial Sequence
  Description of Artificial Sequence: Synthetic oligonucleotide
gacgagaauaucgauuaga

SEQ ID NO: 461817 - RNA, 19 nt, Artificial Sequence
  Description of Artificial Sequence: Synthetic oligonucleotide
uauuacagagcagauuguu

SEQ ID NO: 461818 - RNA, 19 nt, Artificial Sequence
  Description of Artificial Sequence: Synthetic oligonucleotide
caaaguggcaggugauggc

SEQ ID NO: 461819 - RNA, 19 nt, Artificial Sequence
  Description of Artificial Sequence: Synthetic oligonucleotide
ggugguaaugcuccugucc

SEQ ID NO: 461820 - RNA, 19 nt, Artificial Sequence
  Description of Artificial Sequence: Synthetic oligonucleotide
uuguuugaaagagccagaa

SEQ ID NO: 461821 - RNA, 19 nt, Artificial Sequence
  Description of Artificial Sequence: Synthetic oligonucleotide
agcauaagaucaucauccu

SEQ ID NO: 461822 - RNA, 19 nt, Artificial Sequence
  Description of Artificial Sequence: Synthetic oligonucleotide
agauuauucagaauaucua

SEQ ID NO: 461823 - RNA, 19 nt, Artificial Sequence
  Description of Artificial Sequence: Synthetic oligonucleotide
caacagacguuugaguuug

SEQ ID NO: 461824 - RNA, 19 nt, Artificial Sequence
  Description of Artificial Sequence: Synthetic oligonucleotide
uugccaaaugaugaggcuc

SEQ ID NO: 461825 - RNA, 19 nt, Artificial Sequence
  Description of Artificial Sequence: Synthetic oligonucleotide
uaacccaacguggaagaca

SEQ ID NO: 461826 - RNA, 19 nt, Artificial Sequence
  Description of Artificial Sequence: Synthetic oligonucleotide
ugcuguaauggaaccucca

SEQ ID NO: 461827 - RNA, 19 nt, Artificial Sequence
  Description of Artificial Sequence: Synthetic oligonucleotide
gguccuuaccaguagaguc

SEQ ID NO: 461828 - RNA, 19 nt, Artificial Sequence
  Description of Artificial Sequence: Synthetic oligonucleotide
cuuguugcaagccaugugu

SEQ ID NO: 461829 - RNA, 19 nt, Artificial Sequence
  Description of Artificial Sequence: Synthetic oligonucleotide
agauguggaaguccuacuu

SEQ ID NO: 461830 - RNA, 19 nt, Artificial Sequence
  Description of Artificial Sequence: Synthetic oligonucleotide
ggugccuucuuagaugugg

SEQ ID NO: 461831 - RNA, 19 nt, Artificial Sequence
  Description of Artificial Sequence: Synthetic oligonucleotide
uaccuaauuuuaguacuca

SEQ ID NO: 461832 - RNA, 19 nt, Artificial Sequence
  Description of Artificial Sequence: Synthetic oligonucleotide
aguuugaguaacugcguuu

SEQ ID NO: 461833 - RNA, 19 nt, Artificial Sequence
  Description of Artificial Sequence: Synthetic oligonucleotide
cauuggucugaucauuguc

SEQ ID NO: 461834 - RNA, 19 nt, Artificial Sequence
  Description of Artificial Sequence: Synthetic oligonucleotide
auagucaugcucagguuug

SEQ ID NO: 461835 - RNA, 19 nt, Artificial Sequence
  Description of Artificial Sequence: Synthetic oligonucleotide
accggaggggcacucgaac

SEQ ID NO: 461836 - RNA, 19 nt, Artificial Sequence
  Description of Artificial Sequence: Synthetic oligonucleotide
uguugcaagccauguguaa

SEQ ID NO: 461837 - RNA, 19 nt, Artificial Sequence
  Description of Artificial Sequence: Synthetic oligonucleotide
aaccaaaccccaagugcuc

SEQ ID NO: 461838 - RNA, 19 nt, Artificial Sequence
  Description of Artificial Sequence: Synthetic oligonucleotide
aagguacguccuucaccac

SEQ ID NO: 461839 - RNA, 19 nt, Artificial Sequence
  Description of Artificial Sequence: Synthetic oligonucleotide
ugaucauugucuguucgau

SEQ ID NO: 461840 - RNA, 19 nt, Artificial Sequence
  Description of Artificial Sequence: Synthetic oligonucleotide
uccucaaggucacaugauu

SEQ ID NO: 461841 - RNA, 19 nt, Artificial Sequence
  Description of Artificial Sequence: Synthetic oligonucleotide
guuagcauaccugaccgga

SEQ ID NO: 461842 - RNA, 19 nt, Artificial Sequence
  Description of Artificial Sequence: Synthetic oligonucleotide
auaaggcuuuguaaggucu

SEQ ID NO: 461843 - RNA, 19 nt, Artificial Sequence
  Description of Artificial Sequence: Synthetic oligonucleotide
ucacuagguugauucuuug

SEQ ID NO: 461844 - RNA, 19 nt, Artificial Sequence
  Description of Artificial Sequence: Synthetic oligonucleotide
uaaggccuauuaaaaccaa

SEQ ID NO: 461845 - RNA, 19 nt, Artificial Sequence
  Description of Artificial Sequence: Synthetic oligonucleotide
ugaauuacauggugugauu

SEQ ID NO: 461846 - RNA, 19 nt, Artificial Sequence
  Description of Artificial Sequence: Synthetic oligonucleotide
auuucaguagagagggaug

SEQ ID NO: 461847 - RNA, 19 nt, Artificial Sequence
  Description of Artificial Sequence: Synthetic oligonucleotide
ggucaucucauccaguauc

SEQ ID NO: 461848 - RNA, 19 nt, Artificial Sequence
  Description of Artificial Sequence: Synthetic oligonucleotide
cuauaaggagagccucugc

SEQ ID NO: 461849 - RNA, 19 nt, Artificial Sequence
  Description of Artificial Sequence: Synthetic oligonucleotide
cauaccugaccggaggggc

SEQ ID NO: 461850 - RNA, 19 nt, Artificial Sequence
  Description of Artificial Sequence: Synthetic oligonucleotide
ucauugucuguucgauaac

SEQ ID NO: 461851 - RNA, 19 nt, Artificial Sequence
  Description of Artificial Sequence: Synthetic oligonucleotide
ccaaaauccguccugugac

SEQ ID NO: 461852 - RNA, 19 nt, Artificial Sequence
  Description of Artificial Sequence: Synthetic oligonucleotide
cuaugcacuuaauuuaucu

SEQ ID NO: 461853 - RNA, 19 nt, Artificial Sequence
  Description of Artificial Sequence: Synthetic oligonucleotide
caucacucugacacaugcc

SEQ ID NO: 461854 - RNA, 19 nt, Artificial Sequence
  Description of Artificial Sequence: Synthetic oligonucleotide
uuacuggugccuucuuaga

SEQ ID NO: 461855 - RNA, 19 nt, Artificial Sequence
  Description of Artificial Sequence: Synthetic oligonucleotide
accuaauuuuaguacucau

SEQ ID NO: 461856 - RNA, 19 nt, Artificial Sequence
  Description of Artificial Sequence: Synthetic oligonucleotide
agguacguccuucaccaca

SEQ ID NO: 461857 - RNA, 19 nt, Artificial Sequence
  Description of Artificial Sequence: Synthetic oligonucleotide
auagcucaacaucauucaa

SEQ ID NO: 461858 - RNA, 19 nt, Artificial Sequence
  Description of Artificial Sequence: Synthetic oligonucleotide
uaucuaugcuguucauuuc

SEQ ID NO: 461859 - RNA, 19 nt, Artificial Sequence
  Description of Artificial Sequence: Synthetic oligonucleotide
gaauaucgauuagaggcca

SEQ ID NO: 461860 - RNA, 19 nt, Artificial Sequence
  Description of Artificial Sequence: Synthetic oligonucleotide
gugacugucguacauuucu

SEQ ID NO: 461861 - RNA, 19 nt, Artificial Sequence
  Description of Artificial Sequence: Synthetic oligonucleotide
aagugcucauucccauuga

SEQ ID NO: 461862 - RNA, 19 nt, Artificial Sequence
  Description of Artificial Sequence: Synthetic oligonucleotide
gaugcuugucuuggcuugg

SEQ ID NO: 461863 - RNA, 19 nt, Artificial Sequence
  Description of Artificial Sequence: Synthetic oligonucleotide
gcuguugguucugauaagg

SEQ ID NO: 461864 - RNA, 19 nt, Artificial Sequence
  Description of Artificial Sequence: Synthetic oligonucleotide
ggaaauuuugaggcucugg

SEQ ID NO: 461865 - RNA, 19 nt, Artificial Sequence
  Description of Artificial Sequence: Synthetic oligonucleotide
gcaucacucugacacaugc

SEQ ID NO: 461866 - RNA, 19 nt, Artificial Sequence
  Description of Artificial Sequence: Synthetic oligonucleotide
cagcauaaggccuauuaaa

SEQ ID NO: 461867 - RNA, 19 nt, Artificial Sequence
  Description of Artificial Sequence: Synthetic oligonucleotide
gacguuugaguuugaguaa

SEQ ID NO: 461868 - RNA, 19 nt, Artificial Sequence
  Description of Artificial Sequence: Synthetic oligonucleotide
ugacuuggaaggugucuga

SEQ ID NO: 461869 - RNA, 19 nt, Artificial Sequence
  Description of Artificial Sequence: Synthetic oligonucleotide
cuucuaaccuucuuagucu

SEQ ID NO: 461870 - RNA, 19 nt, Artificial Sequence
  Description of Artificial Sequence: Synthetic oligonucleotide
aggucggccagauuucagu

SEQ ID NO: 461871 - RNA, 19 nt, Artificial Sequence
  Description of Artificial Sequence: Synthetic oligonucleotide
uuguugcaagccaugugua

SEQ ID NO: 461872 - RNA, 19 nt, Artificial Sequence
  Description of Artificial Sequence: Synthetic oligonucleotide
auagucccaggaaauggag

SEQ ID NO: 461873 - RNA, 19 nt, Artificial Sequence
  Description of Artificial Sequence: Synthetic oligonucleotide
gcauucauagucaugcuca

SEQ ID NO: 461874 - RNA, 19 nt, Artificial Sequence
  Description of Artificial Sequence: Synthetic oligonucleotide
auagugaucagggguggcu

SEQ ID NO: 461875 - RNA, 19 nt, Artificial Sequence
  Description of Artificial Sequence: Synthetic oligonucleotide
ggaguaguuacaaacucca

SEQ ID NO: 461876 - RNA, 19 nt, Artificial Sequence
  Description of Artificial Sequence: Synthetic oligonucleotide
uuccaaaauccguccugug

SEQ ID NO: 461877 - RNA, 19 nt, Artificial Sequence
  Description of Artificial Sequence: Synthetic oligonucleotide
guucugauaaggcuuugua

SEQ ID NO: 461878 - RNA, 19 nt, Artificial Sequence
  Description of Artificial Sequence: Synthetic oligonucleotide
auaucgauuagaggccaca

SEQ ID NO: 461879 - RNA, 19 nt, Artificial Sequence
  Description of Artificial Sequence: Synthetic oligonucleotide
ugcaucacucugacacaug

SEQ ID NO: 461880 - RNA, 19 nt, Artificial Sequence
  Description of Artificial Sequence: Synthetic oligonucleotide
ugcgguggaacaguccgug

SEQ ID NO: 461881 - RNA, 19 nt, Artificial Sequence
  Description of Artificial Sequence: Synthetic oligonucleotide
gucggccagauuucaguag

SEQ ID NO: 461882 - RNA, 19 nt, Artificial Sequence
  Description of Artificial Sequence: Synthetic oligonucleotide
agcuguugguucugauaag

SEQ ID NO: 461883 - RNA, 19 nt, Artificial Sequence
  Description of Artificial Sequence: Synthetic oligonucleotide
cuuagucugguucacugua

SEQ ID NO: 461884 - RNA, 19 nt, Artificial Sequence
  Description of Artificial Sequence: Synthetic oligonucleotide
gacugccgagaauuucuug

SEQ ID NO: 461885 - RNA, 19 nt, Artificial Sequence
  Description of Artificial Sequence: Synthetic oligonucleotide
augucacuagguugauucu

SEQ ID NO: 461886 - RNA, 19 nt, Artificial Sequence
  Description of Artificial Sequence: Synthetic oligonucleotide
ugcucggucaaagcgguuc

SEQ ID NO: 461887 - RNA, 19 nt, Artificial Sequence
  Description of Artificial Sequence: Synthetic oligonucleotide
gugcuaauggccuugggau

SEQ ID NO: 461888 - RNA, 19 nt, Artificial Sequence
  Description of Artificial Sequence: Synthetic oligonucleotide
ucuguucgauaacuuucua

SEQ ID NO: 461889 - RNA, 19 nt, Artificial Sequence
  Description of Artificial Sequence: Synthetic oligonucleotide
ggugaugaaucagaaucug

SEQ ID NO: 461890 - RNA, 19 nt, Artificial Sequence
  Description of Artificial Sequence: Synthetic oligonucleotide
gaacucaagauggauggcu

SEQ ID NO: 461891 - RNA, 19 nt, Artificial Sequence
  Description of Artificial Sequence: Synthetic oligonucleotide
gauagugaucagggguggc

SEQ ID NO: 461892 - RNA, 19 nt, Artificial Sequence
  Description of Artificial Sequence: Synthetic oligonucleotide
aggugguaaugcuccuguc

SEQ ID NO: 461893 - RNA, 19 nt, Artificial Sequence
  Description of Artificial Sequence: Synthetic oligonucleotide
uuagacguuggcugauguu

SEQ ID NO: 461894 - RNA, 19 nt, Artificial Sequence
  Description of Artificial Sequence: Synthetic oligonucleotide
ugcucagguuuguuucuga

SEQ ID NO: 461895 - RNA, 19 nt, Artificial Sequence
  Description of Artificial Sequence: Synthetic oligonucleotide
cuucuuagauguggaaguc

SEQ ID NO: 461896 - RNA, 19 nt, Artificial Sequence
  Description of Artificial Sequence: Synthetic oligonucleotide
ucgugcuaauggccuuggg

SEQ ID NO: 461897 - RNA, 19 nt, Artificial Sequence
  Description of Artificial Sequence: Synthetic oligonucleotide
caacugucauagucccagg

SEQ ID NO: 461898 - RNA, 19 nt, Artificial Sequence
  Description of Artificial Sequence: Synthetic oligonucleotide
cagaauacccaccagggau

SEQ ID NO: 461899 - RNA, 19 nt, Artificial Sequence
  Description of Artificial Sequence: Synthetic oligonucleotide
ugucacuagguugauucuu

SEQ ID NO: 461900 - RNA, 19 nt, Artificial Sequence
  Description of Artificial Sequence: Synthetic oligonucleotide
ugaccggaggggcacucga

SEQ ID NO: 461901 - RNA, 19 nt, Artificial Sequence
  Description of Artificial Sequence: Synthetic oligonucleotide
guccuuaccaguagaguca

SEQ ID NO: 461902 - RNA, 19 nt, Artificial Sequence
  Description of Artificial Sequence: Synthetic oligonucleotide
gaaggagcccugccaagga

SEQ ID NO: 461903 - RNA, 19 nt, Artificial Sequence
  Description of Artificial Sequence: Synthetic oligonucleotide
gucaucucauccaguauca

SEQ ID NO: 461904 - RNA, 19 nt, Artificial Sequence
  Description of Artificial Sequence: Synthetic oligonucleotide
uugggaugcuugucuuggc

SEQ ID NO: 461905 - RNA, 19 nt, Artificial Sequence
  Description of Artificial Sequence: Synthetic oligonucleotide
aaggccuauuaaaaccaaa

SEQ ID NO: 461906 - RNA, 19 nt, Artificial Sequence
  Description of Artificial Sequence: Synthetic oligonucleotide
ugguccuuaccaguagagu

SEQ ID NO: 461907 - RNA, 19 nt, Artificial Sequence
  Description of Artificial Sequence: Synthetic oligonucleotide
gaucauugucuguucgaua

SEQ ID NO: 461908 - RNA, 19 nt, Artificial Sequence
  Description of Artificial Sequence: Synthetic oligonucleotide
cgagaauaucgauuagagg

SEQ ID NO: 461909 - RNA, 19 nt, Artificial Sequence
  Description of Artificial Sequence: Synthetic oligonucleotide
acaccugggccauuggaua

SEQ ID NO: 461910 - RNA, 19 nt, Artificial Sequence
  Description of Artificial Sequence: Synthetic oligonucleotide
aaaugacccaaagguguuu

SEQ ID NO: 461911 - RNA, 19 nt, Artificial Sequence
  Description of Artificial Sequence: Synthetic oligonucleotide
gcaggugauggcuaugcac

SEQ ID NO: 461912 - RNA, 19 nt, Artificial Sequence
  Description of Artificial Sequence: Synthetic oligonucleotide
uuacaccggguugcaagcc

SEQ ID NO: 461913 - RNA, 19 nt, Artificial Sequence
  Description of Artificial Sequence: Synthetic oligonucleotide
caguauaccuaauuuuagu

SEQ ID NO: 461914 - RNA, 19 nt, Artificial Sequence
  Description of Artificial Sequence: Synthetic oligonucleotide
caacguggaagacacaccu

SEQ ID NO: 461915 - RNA, 19 nt, Artificial Sequence
  Description of Artificial Sequence: Synthetic oligonucleotide
ggggaugugccacagaacu

SEQ ID NO: 461916 - RNA, 19 nt, Artificial Sequence
  Description of Artificial Sequence: Synthetic oligonucleotide
gaugcucuaauaguuggau

SEQ ID NO: 461917 - RNA, 19 nt, Artificial Sequence
  Description of Artificial Sequence: Synthetic oligonucleotide
uccguccugugacugucgu

SEQ ID NO: 461918 - RNA, 19 nt, Artificial Sequence
  Description of Artificial Sequence: Synthetic oligonucleotide
augcucuaauaguuggauu

SEQ ID NO: 461919 - RNA, 19 nt, Artificial Sequence
  Description of Artificial Sequence: Synthetic oligonucleotide
aagcuauuacagagcagau

SEQ ID NO: 461920 - RNA, 19 nt, Artificial Sequence
  Description of Artificial Sequence: Synthetic oligonucleotide
cuaugcuguucauuucaga

SEQ ID NO: 461921 - RNA, 19 nt, Artificial Sequence
  Description of Artificial Sequence: Synthetic oligonucleotide
cuugguccuuaccaguaga

SEQ ID NO: 461922 - RNA, 19 nt, Artificial Sequence
  Description of Artificial Sequence: Synthetic oligonucleotide
gaauacccaccagggauuc

SEQ ID NO: 461923 - RNA, 19 nt, Artificial Sequence
  Description of Artificial Sequence: Synthetic oligonucleotide
cacugugggccucuauaug

SEQ ID NO: 461924 - RNA, 19 nt, Artificial Sequence
  Description of Artificial Sequence: Synthetic oligonucleotide
aucgugcuaauggccuugg

SEQ ID NO: 461925 - RNA, 19 nt, Artificial Sequence
  Description of Artificial Sequence: Synthetic oligonucleotide
uacuaucaacugucauagu

SEQ ID NO: 461926 - RNA, 19 nt, Artificial Sequence
  Description of Artificial Sequence: Synthetic oligonucleotide
gacugucguacauuucugu

SEQ ID NO: 461927 - RNA, 19 nt, Artificial Sequence
  Description of Artificial Sequence: Synthetic oligonucleotide
cugucguacauuucugucu

SEQ ID NO: 461928 - RNA, 19 nt, Artificial Sequence
  Description of Artificial Sequence: Synthetic oligonucleotide
agaauacccaccagggauu

SEQ ID NO: 461929 - RNA, 19 nt, Artificial Sequence
  Description of Artificial Sequence: Synthetic oligonucleotide
ugacugccgagaauuucuu

SEQ ID NO: 461930 - RNA, 19 nt, Artificial Sequence
  Description of Artificial Sequence: Synthetic oligonucleotide
guugguucugauaaggcuu

SEQ ID NO: 461931 - RNA, 19 nt, Artificial Sequence
  Description of Artificial Sequence: Synthetic oligonucleotide
cacuuaauuuaucuuuggu

SEQ ID NO: 461932 - RNA, 19 nt, Artificial Sequence
  Description of Artificial Sequence: Synthetic oligonucleotide
agcuauuacagagcagauu

SEQ ID NO: 461933 - RNA, 19 nt, Artificial Sequence
  Description of Artificial Sequence: Synthetic oligonucleotide
agguugauucuuugccaaa

SEQ ID NO: 461934 - RNA, 19 nt, Artificial Sequence
  Description of Artificial Sequence: Synthetic oligonucleotide
caucucauccaguaucacu

SEQ ID NO: 461935 - RNA, 19 nt, Artificial Sequence
  Description of Artificial Sequence: Synthetic oligonucleotide
gggaugaaccauccuauaa

SEQ ID NO: 461936 - RNA, 19 nt, Artificial Sequence
  Description of Artificial Sequence: Synthetic oligonucleotide
cauagucaugcucagguuu

SEQ ID NO: 461937 - RNA, 19 nt, Artificial Sequence
  Description of Artificial Sequence: Synthetic oligonucleotide
ugaucgugcuaauggccuu

SEQ ID NO: 461938 - RNA, 19 nt, Artificial Sequence
  Description of Artificial Sequence: Synthetic oligonucleotide
ugccggagggucaucucau

SEQ ID NO: 461939 - RNA, 19 nt, Artificial Sequence
  Description of Artificial Sequence: Synthetic oligonucleotide
uagugaucagggguggcua

SEQ ID NO: 461940 - RNA, 19 nt, Artificial Sequence
  Description of Artificial Sequence: Synthetic oligonucleotide
cacucgaacggguagcugu

SEQ ID NO: 461941 - RNA, 19 nt, Artificial Sequence
  Description of Artificial Sequence: Synthetic oligonucleotide
auugucuguucgauaacuu

SEQ ID NO: 461942 - RNA, 19 nt, Artificial Sequence
  Description of Artificial Sequence: Synthetic oligonucleotide
caguccguggcauccccug

SEQ ID NO: 461943 - RNA, 19 nt, Artificial Sequence
  Description of Artificial Sequence: Synthetic oligonucleotide
ugauuacuggugccuucuu

SEQ ID NO: 461944 - RNA, 19 nt, Artificial Sequence
  Description of Artificial Sequence: Synthetic oligonucleotide
cugaugcaacagacguuug

SEQ ID NO: 461945 - RNA, 19 nt, Artificial Sequence
  Description of Artificial Sequence: Synthetic oligonucleotide
cccaacguggaagacacac

SEQ ID NO: 461946 - RNA, 19 nt, Artificial Sequence
  Description of Artificial Sequence: Synthetic oligonucleotide
ccaacguggaagacacacc

SEQ ID NO: 461947 - RNA, 19 nt, Artificial Sequence
  Description of Artificial Sequence: Synthetic oligonucleotide
guucgauaacuuucuauuu

SEQ ID NO: 461948 - RNA, 19 nt, Artificial Sequence
  Description of Artificial Sequence: Synthetic oligonucleotide
cuacagcucuguugaagga

SEQ ID NO: 461949 - RNA, 19 nt, Artificial Sequence
  Description of Artificial Sequence: Synthetic oligonucleotide
acaugccuuggacuguguu

SEQ ID NO: 461950 - RNA, 19 nt, Artificial Sequence
  Description of Artificial Sequence: Synthetic oligonucleotide
ccuacuuggugaugaauca

SEQ ID NO: 461951 - RNA, 19 nt, Artificial Sequence
  Description of Artificial Sequence: Synthetic oligonucleotide
cuggugccuucuuagaugu

SEQ ID NO: 461952 - RNA, 19 nt, Artificial Sequence
  Description of Artificial Sequence: Synthetic oligonucleotide
agggaugaaccauccuaua

SEQ ID NO: 461953 - RNA, 19 nt, Artificial Sequence
  Description of Artificial Sequence: Synthetic oligonucleotide
aguccuacuuggugaugaa

SEQ ID NO: 461954 - RNA, 19 nt, Artificial Sequence
  Description of Artificial Sequence: Synthetic oligonucleotide
gucguacauuucugucugc

SEQ ID NO: 461955 - RNA, 19 nt, Artificial Sequence
  Description of Artificial Sequence: Synthetic oligonucleotide
ggcaaugauagcucaacau

SEQ ID NO: 461956 - RNA, 19 nt, Artificial Sequence
  Description of Artificial Sequence: Synthetic oligonucleotide
aucagcauauguacacuuu

SEQ ID NO: 461957 - RNA, 19 nt, Artificial Sequence
  Description of Artificial Sequence: Synthetic oligonucleotide
cauugucuguucgauaacu

SEQ ID NO: 461958 - RNA, 19 nt, Artificial Sequence
  Description of Artificial Sequence: Synthetic oligonucleotide
gaggucggccagauuucag

SEQ ID NO: 461959 - RNA, 19 nt, Artificial Sequence
  Description of Artificial Sequence: Synthetic oligonucleotide
uagucaugcucagguuugu

SEQ ID NO: 461960 - RNA, 19 nt, Artificial Sequence
  Description of Artificial Sequence: Synthetic oligonucleotide
uugggaacugugggcuuga

SEQ ID NO: 461961 - RNA, 19 nt, Artificial Sequence
  Description of Artificial Sequence: Synthetic oligonucleotide
ccuuggacuguguuuucac

SEQ ID NO: 461962 - RNA, 19 nt, Artificial Sequence
  Description of Artificial Sequence: Synthetic oligonucleotide
uguuuucacugugggccuc

SEQ ID NO: 461963 - RNA, 19 nt, Artificial Sequence
  Description of Artificial Sequence: Synthetic oligonucleotide
acguuggcugauguuuuga

SEQ ID NO: 461964 - RNA, 19 nt, Artificial Sequence
  Description of Artificial Sequence: Synthetic oligonucleotide
aggugauggcuaugcacuu

SEQ ID NO: 461965 - RNA, 19 nt, Artificial Sequence
  Description of Artificial Sequence: Synthetic oligonucleotide
ggggcacucgaacggguag

SEQ ID NO: 461966 - RNA, 19 nt, Artificial Sequence
  Description of Artificial Sequence: Synthetic oligonucleotide
uaccugaccggaggggcac

SEQ ID NO: 461967 - RNA, 19 nt, Artificial Sequence
  Description of Artificial Sequence: Synthetic oligonucleotide
cuuggacuguguuuucacu

SEQ ID NO: 461968 - RNA, 19 nt, Artificial Sequence
  Description of Artificial Sequence: Synthetic oligonucleotide
agggugucuggguguauuu

SEQ ID NO: 461969 - RNA, 19 nt, Artificial Sequence
  Description of Artificial Sequence: Synthetic oligonucleotide
gucuguucgauaacuuucu

SEQ ID NO: 461970 - RNA, 19 nt, Artificial Sequence
  Description of Artificial Sequence: Synthetic oligonucleotide
gucugucugcgaugcggug

SEQ ID NO: 461971 - RNA, 19 nt, Artificial Sequence
  Description of Artificial Sequence: Synthetic oligonucleotide
cguccugugacugucguac

SEQ ID NO: 461972 - RNA, 19 nt, Artificial Sequence
  Description of Artificial Sequence: Synthetic oligonucleotide
gcauaccugaccggagggg

SEQ ID NO: 461973 - RNA, 19 nt, Artificial Sequence
  Description of Artificial Sequence: Synthetic oligonucleotide
cucaagucacuuuucccau

SEQ ID NO: 461974 - RNA, 19 nt, Artificial Sequence
  Description of Artificial Sequence: Synthetic oligonucleotide
guagagagggaugaaccau

SEQ ID NO: 461975 - RNA, 19 nt, Artificial Sequence
  Description of Artificial Sequence: Synthetic oligonucleotide
caaaauccguccugugacu

SEQ ID NO: 461976 - RNA, 19 nt, Artificial Sequence
  Description of Artificial Sequence: Synthetic oligonucleotide
cuuggugaugaaucagaau

SEQ ID NO: 461977 - RNA, 19 nt, Artificial Sequence
  Description of Artificial Sequence: Synthetic oligonucleotide
cuugacuuggaaggugucu

SEQ ID NO: 461978 - RNA, 19 nt, Artificial Sequence
  Description of Artificial Sequence: Synthetic oligonucleotide
auaccugaccggaggggca

SEQ ID NO: 461979 - RNA, 19 nt, Artificial Sequence
  Description of Artificial Sequence: Synthetic oligonucleotide
aaguggcaggugauggcua

SEQ ID NO: 461980 - RNA, 19 nt, Artificial Sequence
  Description of Artificial Sequence: Synthetic oligonucleotide
cugaccggaggggcacucg

SEQ ID NO: 461981 - RNA, 19 nt, Artificial Sequence
  Description of Artificial Sequence: Synthetic oligonucleotide
gggauugcuuauuuguuuu

SEQ ID NO: 461982 - RNA, 19 nt, Artificial Sequence
  Description of Artificial Sequence: Synthetic oligonucleotide
auccguccugugacugucg

SEQ ID NO: 461983 - RNA, 19 nt, Artificial Sequence
  Description of Artificial Sequence: Synthetic oligonucleotide
gcugaugcaacagacguuu

SEQ ID NO: 461984 - RNA, 19 nt, Artificial Sequence
  Description of Artificial Sequence: Synthetic oligonucleotide
ggugugauuacuggugccu

SEQ ID NO: 461985 - RNA, 19 nt, Artificial Sequence
  Description of Artificial Sequence: Synthetic oligonucleotide
cucgaacggguagcuguug

SEQ ID NO: 461986 - RNA, 19 nt, Artificial Sequence
  Description of Artificial Sequence: Synthetic oligonucleotide
gcgguggaacaguccgugg

SEQ ID NO: 461987 - RNA, 19 nt, Artificial Sequence
  Description of Artificial Sequence: Synthetic oligonucleotide
gccucuauauguuguggcu

SEQ ID NO: 461988 - RNA, 19 nt, Artificial Sequence
  Description of Artificial Sequence: Synthetic oligonucleotide
accggguugcaagccgaug

SEQ ID NO: 461989 - RNA, 19 nt, Artificial Sequence
  Description of Artificial Sequence: Synthetic oligonucleotide
cguacauuucugucugcuc

SEQ ID NO: 461990 - RNA, 19 nt, Artificial Sequence
  Description of Artificial Sequence: Synthetic oligonucleotide
gaacggguagcuguugguu

SEQ ID NO: 461991 - RNA, 19 nt, Artificial Sequence
  Description of Artificial Sequence: Synthetic oligonucleotide
cuaaggugguaaugcuccu

SEQ ID NO: 461992 - RNA, 19 nt, Artificial Sequence
  Description of Artificial Sequence: Synthetic oligonucleotide
guccugugacugucguaca

SEQ ID NO: 461993 - RNA, 19 nt, Artificial Sequence
  Description of Artificial Sequence: Synthetic oligonucleotide
augcuugucuuggcuugga

SEQ ID NO: 461994 - RNA, 19 nt, Artificial Sequence
  Description of Artificial Sequence: Synthetic oligonucleotide
gcucggucaaagcgguuca

SEQ ID NO: 461995 - RNA, 19 nt, Artificial Sequence
  Description of Artificial Sequence: Synthetic oligonucleotide
gccaaaacuaccagcuucu

SEQ ID NO: 461996 - RNA, 19 nt, Artificial Sequence
  Description of Artificial Sequence: Synthetic oligonucleotide
agucaugcucagguuuguu

SEQ ID NO: 461997 - RNA, 19 nt, Artificial Sequence
  Description of Artificial Sequence: Synthetic oligonucleotide
gguugcaagccgaugcucu

SEQ ID NO: 461998 - RNA, 19 nt, Artificial Sequence
  Description of Artificial Sequence: Synthetic oligonucleotide
ccugggcguggucuguagg

SEQ ID NO: 461999 - RNA, 19 nt, Artificial Sequence
  Description of Artificial Sequence: Synthetic oligonucleotide
acucgaacggguagcuguu

SEQ ID NO: 462000 - RNA, 19 nt, Artificial Sequence
  Description of Artificial Sequence: Synthetic oligonucleotide
gcuaugcacuuaauuuauc

SEQ ID NO: 462001 - RNA, 19 nt, Artificial Sequence
  Description of Artificial Sequence: Synthetic oligonucleotide
gucacuagguugauucuuu

SEQ ID NO: 462002 - RNA, 19 nt, Artificial Sequence
  Description of Artificial Sequence: Synthetic oligonucleotide
ccuauaacccaacguggaa

SEQ ID NO: 462003 - RNA, 19 nt, Artificial Sequence
  Description of Artificial Sequence: Synthetic oligonucleotide
ccauugaguacuucugacu

SEQ ID NO: 462004 - RNA, 19 nt, Artificial Sequence
  Description of Artificial Sequence: Synthetic oligonucleotide
ggucugaucauugucuguu

SEQ ID NO: 462005 - RNA, 19 nt, Artificial Sequence
  Description of Artificial Sequence: Synthetic oligonucleotide
gaguaguuacaaacuccau

SEQ ID NO: 462006 - RNA, 19 nt, Artificial Sequence
  Description of Artificial Sequence: Synthetic oligonucleotide
gggcacucgaacggguagc

SEQ ID NO: 462007 - RNA, 19 nt, Artificial Sequence
  Description of Artificial Sequence: Synthetic oligonucleotide
acggaguuuuagauuccuu

SEQ ID NO: 462008 - RNA, 19 nt, Artificial Sequence
  Description of Artificial Sequence: Synthetic oligonucleotide
guacguccuucaccacauc

SEQ ID NO: 462009 - RNA, 19 nt, Artificial Sequence
  Description of Artificial Sequence: Synthetic oligonucleotide
ggcguggucuguaggucug

SEQ ID NO: 462010 - RNA, 19 nt, Artificial Sequence
  Description of Artificial Sequence: Synthetic oligonucleotide
cugcaguucuuuugaucgu

SEQ ID NO: 462011 - RNA, 19 nt, Artificial Sequence
  Description of Artificial Sequence: Synthetic oligonucleotide
caguaucacuguguugucu

SEQ ID NO: 462012 - RNA, 19 nt, Artificial Sequence
  Description of Artificial Sequence: Synthetic oligonucleotide
gguacguccuucaccacau

SEQ ID NO: 462013 - RNA, 19 nt, Artificial Sequence
  Description of Artificial Sequence: Synthetic oligonucleotide
ggaggucggccagauuuca

SEQ ID NO: 462014 - RNA, 19 nt, Artificial Sequence
  Description of Artificial Sequence: Synthetic oligonucleotide
gggguggcuaaggugguaa

SEQ ID NO: 462015 - RNA, 19 nt, Artificial Sequence
  Description of Artificial Sequence: Synthetic oligonucleotide
gguucugauaaggcuuugu

SEQ ID NO: 462016 - RNA, 19 nt, Artificial Sequence
  Description of Artificial Sequence: Synthetic oligonucleotide
ggacuggauggcaaugaua

SEQ ID NO: 462017 - RNA, 19 nt, Artificial Sequence
  Description of Artificial Sequence: Synthetic oligonucleotide
ggguugcaagccgaugcuc

SEQ ID NO: 462018 - RNA, 19 nt, Artificial Sequence
  Description of Artificial Sequence: Synthetic oligonucleotide
ccauguguaaagcuuccau

SEQ ID NO: 462019 - RNA, 19 nt, Artificial Sequence
  Description of Artificial Sequence: Synthetic oligonucleotide
gaccggaggggcacucgaa

SEQ ID NO: 462020 - RNA, 19 nt, Artificial Sequence
  Description of Artificial Sequence: Synthetic oligonucleotide
ggugauggcuaugcacuua

SEQ ID NO: 462021 - RNA, 19 nt, Artificial Sequence
  Description of Artificial Sequence: Synthetic oligonucleotide
gccauguguaaagcuucca

SEQ ID NO: 462022 - RNA, 19 nt, Artificial Sequence
  Description of Artificial Sequence: Synthetic oligonucleotide
cggagggucaucucaucca

SEQ ID NO: 462023 - RNA, 19 nt, Artificial Sequence
  Description of Artificial Sequence: Synthetic oligonucleotide
gcguggucuguaggucugg

SEQ ID NO: 462024 - RNA, 19 nt, Artificial Sequence
  Description of Artificial Sequence: Synthetic oligonucleotide
cgauaacuuucuauuuucu

SEQ ID NO: 462025 - RNA, 19 nt, Artificial Sequence
  Description of Artificial Sequence: Synthetic oligonucleotide
guccuacuuggugaugaau

SEQ ID NO: 462026 - RNA, 19 nt, Artificial Sequence
  Description of Artificial Sequence: Synthetic oligonucleotide
gcaagccgaugcucuaaua

SEQ ID NO: 462027 - RNA, 19 nt, Artificial Sequence
  Description of Artificial Sequence: Synthetic oligonucleotide
ggucugucugcgaugcggu

SEQ ID NO: 462028 - RNA, 19 nt, Artificial Sequence
  Description of Artificial Sequence: Synthetic oligonucleotide
gagcccugccaaggagaga

SEQ ID NO: 462029 - RNA, 19 nt, Artificial Sequence
  Description of Artificial Sequence: Synthetic oligonucleotide
accugaccggaggggcacu

SEQ ID NO: 462030 - RNA, 19 nt, Artificial Sequence
  Description of Artificial Sequence: Synthetic oligonucleotide
gcgaugcgguggaacaguc

SEQ ID NO: 462031 - RNA, 19 nt, Artificial Sequence
  Description of Artificial Sequence: Synthetic oligonucleotide
gccggagggucaucucauc

SEQ ID NO: 462032 - RNA, 19 nt, Artificial Sequence
  Description of Artificial Sequence: Synthetic oligonucleotide
caguuacaccggguugcaa

SEQ ID NO: 462033 - RNA, 19 nt, Artificial Sequence
  Description of Artificial Sequence: Synthetic oligonucleotide
cuuuucccauggugaugau

SEQ ID NO: 462034 - RNA, 19 nt, Artificial Sequence
  Description of Artificial Sequence: Synthetic oligonucleotide
gggucccuccauagcuuuc

SEQ ID NO: 462035 - RNA, 19 nt, Artificial Sequence
  Description of Artificial Sequence: Synthetic oligonucleotide
cguuugaguuugaguaacu

SEQ ID NO: 462036 - RNA, 19 nt, Artificial Sequence
  Description of Artificial Sequence: Synthetic oligonucleotide
cgauuagaggccacauaau

SEQ ID NO: 462037 - RNA, 19 nt, Artificial Sequence
  Description of Artificial Sequence: Synthetic oligonucleotide
ccugaccggaggggcacuc

SEQ ID NO: 462038 - RNA, 19 nt, Artificial Sequence
  Description of Artificial Sequence: Synthetic oligonucleotide
caccggguugcaagccgau

SEQ ID NO: 462039 - RNA, 19 nt, Artificial Sequence
  Description of Artificial Sequence: Synthetic oligonucleotide
cucggucaaagcgguucau

SEQ ID NO: 462040 - RNA, 19 nt, Artificial Sequence
  Description of Artificial Sequence: Synthetic oligonucleotide
cgguucauauugucacacu

SEQ ID NO: 462041 - RNA, 19 nt, Artificial Sequence
  Description of Artificial Sequence: Synthetic oligonucleotide
ccguccugugacugucgua

SEQ ID NO: 462042 - RNA, 19 nt, Artificial Sequence
  Description of Artificial Sequence: Synthetic oligonucleotide
cugcucggucaaagcgguu

SEQ ID NO: 462043 - RNA, 19 nt, Artificial Sequence
  Description of Artificial Sequence: Synthetic oligonucleotide
ccaaaacuaccagcuucuu

SEQ ID NO: 462044 - RNA, 19 nt, Artificial Sequence
  Description of Artificial Sequence: Synthetic oligonucleotide
ccaugugccggagggucau

SEQ ID NO: 462045 - RNA, 19 nt, Artificial Sequence
  Description of Artificial Sequence: Synthetic oligonucleotide
cuuacauuuauaauuagag

SEQ ID NO: 462046 - RNA, 19 nt, Artificial Sequence
  Description of Artificial Sequence: Synthetic oligonucleotide
gaagcugauguccagaagg

SEQ ID NO: 462047 - RNA, 19 nt, Artificial Sequence
  Description of Artificial Sequence: Synthetic oligonucleotide
ugugcuuaaaauaagggaa

SEQ ID NO: 462048 - RNA, 19 nt, Artificial Sequence
  Description of Artificial Sequence: Synthetic oligonucleotide
auauucaguagguaguuac

SEQ ID NO: 462049 - RNA, 19 nt, Artificial Sequence
  Description of Artificial Sequence: Synthetic oligonucleotide
uguauuggagccuagggug

SEQ ID NO: 462050 - RNA, 19 nt, Artificial Sequence
  Description of Artificial Sequence: Synthetic oligonucleotide
ugcuaaaggggucagaggc

SEQ ID NO: 462051 - RNA, 19 nt, Artificial Sequence
  Description of Artificial Sequence: Synthetic oligonucleotide
uugauugcaaacuggauca

SEQ ID NO: 462052 - RNA, 19 nt, Artificial Sequence
  Description of Artificial Sequence: Synthetic oligonucleotide
auggguaccagguacgagc

SEQ ID NO: 462053 - RNA, 19 nt, Artificial Sequence
  Description of Artificial Sequence: Synthetic oligonucleotide
ucaucuuucgccgugagcc

SEQ ID NO: 462054 - RNA, 19 nt, Artificial Sequence
  Description of Artificial Sequence: Synthetic oligonucleotide
agagagugggcucagacuc

SEQ ID NO: 462055 - RNA, 19 nt, Artificial Sequence
  Description of Artificial Sequence: Synthetic oligonucleotide
agggaaaugauccucgauc

SEQ ID NO: 462056 - RNA, 19 nt, Artificial Sequence
  Description of Artificial Sequence: Synthetic oligonucleotide
uaauaggaggacuucuugg

SEQ ID NO: 462057 - RNA, 19 nt, Artificial Sequence
  Description of Artificial Sequence: Synthetic oligonucleotide
cuagauaaugacccuaagg

SEQ ID NO: 462058 - RNA, 19 nt, Artificial Sequence
  Description of Artificial Sequence: Synthetic oligonucleotide
uauaauuagaggacaauuu

SEQ ID NO: 462059 - RNA, 19 nt, Artificial Sequence
  Description of Artificial Sequence: Synthetic oligonucleotide
auuuggggaacuuacacca

SEQ ID NO: 462060 - RNA, 19 nt, Artificial Sequence
  Description of Artificial Sequence: Synthetic oligonucleotide
gacuuaagcccauaauagg

SEQ ID NO: 462061 - RNA, 19 nt, Artificial Sequence
  Description of Artificial Sequence: Synthetic oligonucleotide
uacgcuuucucucagugcu

SEQ ID NO: 462062 - RNA, 19 nt, Artificial Sequence
  Description of Artificial Sequence: Synthetic oligonucleotide
guugucggggcccagaggg

SEQ ID NO: 462063 - RNA, 19 nt, Artificial Sequence
  Description of Artificial Sequence: Synthetic oligonucleotide
uuuacggagcucaggauug

SEQ ID NO: 462064 - RNA, 19 nt, Artificial Sequence
  Description of Artificial Sequence: Synthetic oligonucleotide
cuaggaguggaagagauag

SEQ ID NO: 462065 - RNA, 19 nt, Artificial Sequence
  Description of Artificial Sequence: Synthetic oligonucleotide
ggcauaauuagguaagggg

SEQ ID NO: 462066 - RNA, 19 nt, Artificial Sequence
  Description of Artificial Sequence: Synthetic oligonucleotide
gaggcugucauucauugug

SEQ ID NO: 462067 - RNA, 19 nt, Artificial Sequence
  Description of Artificial Sequence: Synthetic oligonucleotide
gaccaguugauguugucgg

SEQ ID NO: 462068 - RNA, 19 nt, Artificial Sequence
  Description of Artificial Sequence: Synthetic oligonucleotide
uuacaguagugucagcuug

SEQ ID NO: 462069 - RNA, 19 nt, Artificial Sequence
  Description of Artificial Sequence: Synthetic oligonucleotide
ugguccaacgucaaguagc

SEQ ID NO: 462070 - RNA, 19 nt, Artificial Sequence
  Description of Artificial Sequence: Synthetic oligonucleotide
aaauaagggaaaugauccu

SEQ ID NO: 462071 - RNA, 19 nt, Artificial Sequence
  Description of Artificial Sequence: Synthetic oligonucleotide
ugacgaauagaguucuucc

SEQ ID NO: 462072 - RNA, 19 nt, Artificial Sequence
  Description of Artificial Sequence: Synthetic oligonucleotide
agugcaaccccuugucacc

SEQ ID NO: 462073 - RNA, 19 nt, Artificial Sequence
  Description of Artificial Sequence: Synthetic oligonucleotide
gcuagcuucccucagaggg

SEQ ID NO: 462074 - RNA, 19 nt, Artificial Sequence
  Description of Artificial Sequence: Synthetic oligonucleotide
ucugcuaggccucucuaag

SEQ ID NO: 462075 - RNA, 19 nt, Artificial Sequence
  Description of Artificial Sequence: Synthetic oligonucleotide
aaacaccugguccaacguc

SEQ ID NO: 462076 - RNA, 19 nt, Artificial Sequence
  Description of Artificial Sequence: Synthetic oligonucleotide
cuuaagcccauaauaggag

SEQ ID NO: 462077 - RNA, 19 nt, Artificial Sequence
  Description of Artificial Sequence: Synthetic oligonucleotide
uucugugagagaacgguug

SEQ ID NO: 462078 - RNA, 19 nt, Artificial Sequence
  Description of Artificial Sequence: Synthetic oligonucleotide
ugauagacugaauggggag

SEQ ID NO: 462079 - RNA, 19 nt, Artificial Sequence
  Description of Artificial Sequence: Synthetic oligonucleotide
uuugguugggguguaagcc

SEQ ID NO: 462080 - RNA, 19 nt, Artificial Sequence
  Description of Artificial Sequence: Synthetic oligonucleotide
cauaucguggagagaaagg

SEQ ID NO: 462081 - RNA, 19 nt, Artificial Sequence
  Description of Artificial Sequence: Synthetic oligonucleotide
uguagauauccuucaaggu

SEQ ID NO: 462082 - RNA, 19 nt, Artificial Sequence
  Description of Artificial Sequence: Synthetic oligonucleotide
auaauaggaggacuucuug

SEQ ID NO: 462083 - RNA, 19 nt, Artificial Sequence
  Description of Artificial Sequence: Synthetic oligonucleotide
agaugugacuaucauuuug

SEQ ID NO: 462084 - RNA, 19 nt, Artificial Sequence
  Description of Artificial Sequence: Synthetic oligonucleotide
ucaaguagcgauuggcacu

SEQ ID NO: 462085 - RNA, 19 nt, Artificial Sequence
  Description of Artificial Sequence: Synthetic oligonucleotide
gacccuaccgcaugcauag

SEQ ID NO: 462086 - RNA, 19 nt, Artificial Sequence
  Description of Artificial Sequence: Synthetic oligonucleotide
aggauugggucguuucugc

SEQ ID NO: 462087 - RNA, 19 nt, Artificial Sequence
  Description of Artificial Sequence: Synthetic oligonucleotide
guaguuacaguagugucag

SEQ ID NO: 462088 - RNA, 19 nt, Artificial Sequence
  Description of Artificial Sequence: Synthetic oligonucleotide
uauucaguagguaguuaca

SEQ ID NO: 462089 - RNA, 19 nt, Artificial Sequence
  Description of Artificial Sequence: Synthetic oligonucleotide
uccaacgucaaguagcgau

SEQ ID NO: 462090 - RNA, 19 nt, Artificial Sequence
  Description of Artificial Sequence: Synthetic oligonucleotide
auaauuagguaaggggcac

SEQ ID NO: 462091 - RNA, 19 nt, Artificial Sequence
  Description of Artificial Sequence: Synthetic oligonucleotide
cucuaagugugccaagucc

SEQ ID NO: 462092 - RNA, 19 nt, Artificial Sequence
  Description of Artificial Sequence: Synthetic oligonucleotide
gaaucuucccaggaauugg

SEQ ID NO: 462093 - RNA, 19 nt, Artificial Sequence
  Description of Artificial Sequence: Synthetic oligonucleotide
uaagcccauaauaggagga

SEQ ID NO: 462094 - RNA, 19 nt, Artificial Sequence
  Description of Artificial Sequence: Synthetic oligonucleotide
ucuucgcuuagucaccagc

SEQ ID NO: 462095 - RNA, 19 nt, Artificial Sequence
  Description of Artificial Sequence: Synthetic oligonucleotide
gaacaaacauaucguggag

SEQ ID NO: 462096 - RNA, 19 nt, Artificial Sequence
  Description of Artificial Sequence: Synthetic oligonucleotide
uugggguacacugagccag

SEQ ID NO: 462097 - RNA, 19 nt, Artificial Sequence
  Description of Artificial Sequence: Synthetic oligonucleotide
gacucgcuugcuaugacgg

SEQ ID NO: 462098 - RNA, 19 nt, Artificial Sequence
  Description of Artificial Sequence: Synthetic oligonucleotide
guaccuugggugcaauucg

SEQ ID NO: 462099 - RNA, 19 nt, Artificial Sequence
  Description of Artificial Sequence: Synthetic oligonucleotide
uagacacggggaccgaagg

SEQ ID NO: 462100 - RNA, 19 nt, Artificial Sequence
  Description of Artificial Sequence: Synthetic oligonucleotide
cuugcuaggaguggaagag

SEQ ID NO: 462101 - RNA, 19 nt, Artificial Sequence
  Description of Artificial Sequence: Synthetic oligonucleotide
ucagggguucuggagagcg

SEQ ID NO: 462102 - RNA, 19 nt, Artificial Sequence
  Description of Artificial Sequence: Synthetic oligonucleotide
agcucucaaugcuagcuuc

SEQ ID NO: 462103 - RNA, 19 nt, Artificial Sequence
  Description of Artificial Sequence: Synthetic oligonucleotide
aaagugcaaccccuuguca

SEQ ID NO: 462104 - RNA, 19 nt, Artificial Sequence
  Description of Artificial Sequence: Synthetic oligonucleotide
uuacaccauuuacacgggg

SEQ ID NO: 462105 - RNA, 19 nt, Artificial Sequence
  Description of Artificial Sequence: Synthetic oligonucleotide
gauugggucguuucugcug

SEQ ID NO: 462106 - RNA, 19 nt, Artificial Sequence
  Description of Artificial Sequence: Synthetic oligonucleotide
ucccgaacaaacauaucgu

SEQ ID NO: 462107 - RNA, 19 nt, Artificial Sequence
  Description of Artificial Sequence: Synthetic oligonucleotide
gauagacugaauggggagc

SEQ ID NO: 462108 - RNA, 19 nt, Artificial Sequence
  Description of Artificial Sequence: Synthetic oligonucleotide
uccuucaaggucauacgcu

SEQ ID NO: 462109 - RNA, 19 nt, Artificial Sequence
  Description of Artificial Sequence: Synthetic oligonucleotide
gaacgguuggcugaaagac

SEQ ID NO: 462110 - RNA, 19 nt, Artificial Sequence
  Description of Artificial Sequence: Synthetic oligonucleotide
acuuaagcccauaauagga

SEQ ID NO: 462111 - RNA, 19 nt, Artificial Sequence
  Description of Artificial Sequence: Synthetic oligonucleotide
uaccuugggugcaauucgg

SEQ ID NO: 462112 - RNA, 19 nt, Artificial Sequence
  Description of Artificial Sequence: Synthetic oligonucleotide
aaauauucaguagguaguu

SEQ ID NO: 462113 - RNA, 19 nt, Artificial Sequence
  Description of Artificial Sequence: Synthetic oligonucleotide
accuguaugucuaggugcc

SEQ ID NO: 462114 - RNA, 19 nt, Artificial Sequence
  Description of Artificial Sequence: Synthetic oligonucleotide
aagggagggcucuccacuc

SEQ ID NO: 462115 - RNA, 19 nt, Artificial Sequence
  Description of Artificial Sequence: Synthetic oligonucleotide
aguagcgauuggcacuugg

SEQ ID NO: 462116 - RNA, 19 nt, Artificial Sequence
  Description of Artificial Sequence: Synthetic oligonucleotide
gggaaaugauccucgaucc

SEQ ID NO: 462117 - RNA, 19 nt, Artificial Sequence
  Description of Artificial Sequence: Synthetic oligonucleotide
aagaaacugcaccgcaggu

SEQ ID NO: 462118 - RNA, 19 nt, Artificial Sequence
  Description of Artificial Sequence: Synthetic oligonucleotide
ucgcuugcuaugacgggcg

SEQ ID NO: 462119 - RNA, 19 nt, Artificial Sequence
  Description of Artificial Sequence: Synthetic oligonucleotide
auugggucguuucugcugu

SEQ ID NO: 462120 - RNA, 19 nt, Artificial Sequence
  Description of Artificial Sequence: Synthetic oligonucleotide
gacgaauagaguucuucca

SEQ ID NO: 462121 - RNA, 19 nt, Artificial Sequence
  Description of Artificial Sequence: Synthetic oligonucleotide
ucgauccaaguguagauau

SEQ ID NO: 462122 - RNA, 19 nt, Artificial Sequence
  Description of Artificial Sequence: Synthetic oligonucleotide
ugugcuauucagcuccauc

SEQ ID NO: 462123 - RNA, 19 nt, Artificial Sequence
  Description of Artificial Sequence: Synthetic oligonucleotide
cuaccgcaugcauaggucc

SEQ ID NO: 462124 - RNA, 19 nt, Artificial Sequence
  Description of Artificial Sequence: Synthetic oligonucleotide
ggacuuaagcccauaauag

SEQ ID NO: 462125 - RNA, 19 nt, Artificial Sequence
  Description of Artificial Sequence: Synthetic oligonucleotide
ucgccgugagcccaguggg

SEQ ID NO: 462126 - RNA, 19 nt, Artificial Sequence
  Description of Artificial Sequence: Synthetic oligonucleotide
augucuaggugcccacagc

SEQ ID NO: 462127 - RNA, 19 nt, Artificial Sequence
  Description of Artificial Sequence: Synthetic oligonucleotide
ucugggagacccuaccgca

SEQ ID NO: 462128 - RNA, 19 nt, Artificial Sequence
  Description of Artificial Sequence: Synthetic oligonucleotide
acauaucguggagagaaag

SEQ ID NO: 462129 - RNA, 19 nt, Artificial Sequence
  Description of Artificial Sequence: Synthetic oligonucleotide
guaagugggauccuggcaa

SEQ ID NO: 462130 - RNA, 19 nt, Artificial Sequence
  Description of Artificial Sequence: Synthetic oligonucleotide
gagcucauaagcgaagcug

SEQ ID NO: 462131 - RNA, 19 nt, Artificial Sequence
  Description of Artificial Sequence: Synthetic oligonucleotide
uuggcauaauuagguaagg

SEQ ID NO: 462132 - RNA, 19 nt, Artificial Sequence
  Description of Artificial Sequence: Synthetic oligonucleotide
agaacgguuggcugaaaga

SEQ ID NO: 462133 - RNA, 19 nt, Artificial Sequence
  Description of Artificial Sequence: Synthetic oligonucleotide
agaaacugcaccgcagguc

SEQ ID NO: 462134 - RNA, 19 nt, Artificial Sequence
  Description of Artificial Sequence: Synthetic oligonucleotide
uaaacaccugguccaacgu

SEQ ID NO: 462135 - RNA, 19 nt, Artificial Sequence
  Description of Artificial Sequence: Synthetic oligonucleotide
uucaccgagggcuguaaca

SEQ ID NO: 462136 - RNA, 19 nt, Artificial Sequence
  Description of Artificial Sequence: Synthetic oligonucleotide
cuuacaccauuuacacggg

SEQ ID NO: 462137 - RNA, 19 nt, Artificial Sequence
  Description of Artificial Sequence: Synthetic oligonucleotide
cauacgcuuucucucagug

SEQ ID NO: 462138 - RNA, 19 nt, Artificial Sequence
  Description of Artificial Sequence: Synthetic oligonucleotide
uagcgauuggcacuugggu

SEQ ID NO: 462139 - RNA, 19 nt, Artificial Sequence
  Description of Artificial Sequence: Synthetic oligonucleotide
cucaucuagacacggggac

SEQ ID NO: 462140 - RNA, 19 nt, Artificial Sequence
  Description of Artificial Sequence: Synthetic oligonucleotide
uggcaagccgaccuguaug

SEQ ID NO: 462141 - RNA, 19 nt, Artificial Sequence
  Description of Artificial Sequence: Synthetic oligonucleotide
gucaaguagcgauuggcac

SEQ ID NO: 462142 - RNA, 19 nt, Artificial Sequence
  Description of Artificial Sequence: Synthetic oligonucleotide
ucuuucagugaugcacacg

SEQ ID NO: 462143 - RNA, 19 nt, Artificial Sequence
  Description of Artificial Sequence: Synthetic oligonucleotide
gcgauuggcacuugggugg

SEQ ID NO: 462144 - RNA, 19 nt, Artificial Sequence
  Description of Artificial Sequence: Synthetic oligonucleotide
uucucucuucgcuuaguca

SEQ ID NO: 462145 - RNA, 19 nt, Artificial Sequence
  Description of Artificial Sequence: Synthetic oligonucleotide
agcagaugacuacugggca

SEQ ID NO: 462146 - RNA, 19 nt, Artificial Sequence
  Description of Artificial Sequence: Synthetic oligonucleotide
caaauauucaguagguagu

SEQ ID NO: 462147 - RNA, 19 nt, Artificial Sequence
  Description of Artificial Sequence: Synthetic oligonucleotide
ggaacuuacaccauuuaca

SEQ ID NO: 462148 - RNA, 19 nt, Artificial Sequence
  Description of Artificial Sequence: Synthetic oligonucleotide
cuucaccggcccuucagcg

SEQ ID NO: 462149 - RNA, 19 nt, Artificial Sequence
  Description of Artificial Sequence: Synthetic oligonucleotide
aagggaaaugauccucgau

SEQ ID NO: 462150 - RNA, 19 nt, Artificial Sequence
  Description of Artificial Sequence: Synthetic oligonucleotide
uucaccggcccuucagcgg

SEQ ID NO: 462151 - RNA, 19 nt, Artificial Sequence
  Description of Artificial Sequence: Synthetic oligonucleotide
ugggaugcgggcucugaag

SEQ ID NO: 462152 - RNA, 19 nt, Artificial Sequence
  Description of Artificial Sequence: Synthetic oligonucleotide
ccgaacaaacauaucgugg

SEQ ID NO: 462153 - RNA, 19 nt, Artificial Sequence
  Description of Artificial Sequence: Synthetic oligonucleotide
auuagguaaggggcacagc

SEQ ID NO: 462154 - RNA, 19 nt, Artificial Sequence
  Description of Artificial Sequence: Synthetic oligonucleotide
gacuacugggcacuuccug

SEQ ID NO: 462155 - RNA, 19 nt, Artificial Sequence
  Description of Artificial Sequence: Synthetic oligonucleotide
guauuggagccuagggugg

SEQ ID NO: 462156 - RNA, 19 nt, Artificial Sequence
  Description of Artificial Sequence: Synthetic oligonucleotide
aauucggacucgcuugcua

SEQ ID NO: 462157 - RNA, 19 nt, Artificial Sequence
  Description of Artificial Sequence: Synthetic oligonucleotide
uggguaccagguacgagcu

SEQ ID NO: 462158 - RNA, 19 nt, Artificial Sequence
  Description of Artificial Sequence: Synthetic oligonucleotide
guagcgauuggcacuuggg

SEQ ID NO: 462159 - RNA, 19 nt, Artificial Sequence
  Description of Artificial Sequence: Synthetic oligonucleotide
gcuagcuucuugcaggacc

SEQ ID NO: 462160 - RNA, 19 nt, Artificial Sequence
  Description of Artificial Sequence: Synthetic oligonucleotide
gacacggggaccgaaggug

SEQ ID NO: 462161 - RNA, 19 nt, Artificial Sequence
  Description of Artificial Sequence: Synthetic oligonucleotide
auaaugacccuaaggaaau

SEQ ID NO: 462162 - RNA, 19 nt, Artificial Sequence
  Description of Artificial Sequence: Synthetic oligonucleotide
caaguguagauauccuuca

SEQ ID NO: 462163 - RNA, 19 nt, Artificial Sequence
  Description of Artificial Sequence: Synthetic oligonucleotide
cuagacacggggaccgaag

SEQ ID NO: 462164 - RNA, 19 nt, Artificial Sequence
  Description of Artificial Sequence: Synthetic oligonucleotide
uguugucggggcccagagg

SEQ ID NO: 462165 - RNA, 19 nt, Artificial Sequence
  Description of Artificial Sequence: Synthetic oligonucleotide
auuccaagugcucgggcga

SEQ ID NO: 462166 - RNA, 19 nt, Artificial Sequence
  Description of Artificial Sequence: Synthetic oligonucleotide
caguaagugggauccuggc

SEQ ID NO: 462167 - RNA, 19 nt, Artificial Sequence
  Description of Artificial Sequence: Synthetic oligonucleotide
uaccgcaugcauagguccc

SEQ ID NO: 462168 - RNA, 19 nt, Artificial Sequence
  Description of Artificial Sequence: Synthetic oligonucleotide
uugugacgaauagaguucu

SEQ ID NO: 462169 - RNA, 19 nt, Artificial Sequence
  Description of Artificial Sequence: Synthetic oligonucleotide
gaauggggagcaaagguaa

SEQ ID NO: 462170 - RNA, 19 nt, Artificial Sequence
  Description of Artificial Sequence: Synthetic oligonucleotide
aagugcucgggcgauugug

SEQ ID NO: 462171 - RNA, 19 nt, Artificial Sequence
  Description of Artificial Sequence: Synthetic oligonucleotide
cuucgcuuagucaccagca

SEQ ID NO: 462172 - RNA, 19 nt, Artificial Sequence
  Description of Artificial Sequence: Synthetic oligonucleotide
ccaaguguagauauccuuc

SEQ ID NO: 462173 - RNA, 19 nt, Artificial Sequence
  Description of Artificial Sequence: Synthetic oligonucleotide
gggaacuuacaccauuuac

SEQ ID NO: 462174 - RNA, 19 nt, Artificial Sequence
  Description of Artificial Sequence: Synthetic oligonucleotide
auucggacucgcuugcuau

SEQ ID NO: 462175 - RNA, 19 nt, Artificial Sequence
  Description of Artificial Sequence: Synthetic oligonucleotide
gacccuaaggaaauaagcu

SEQ ID NO: 462176 - RNA, 19 nt, Artificial Sequence
  Description of Artificial Sequence: Synthetic oligonucleotide
ugggagacccuaccgcaug

SEQ ID NO: 462177 - RNA, 19 nt, Artificial Sequence
  Description of Artificial Sequence: Synthetic oligonucleotide
agaacccacaaagugugga

SEQ ID NO: 462178 - RNA, 19 nt, Artificial Sequence
  Description of Artificial Sequence: Synthetic oligonucleotide
cucucuucgcuuagucacc

SEQ ID NO: 462179 - RNA, 19 nt, Artificial Sequence
  Description of Artificial Sequence: Synthetic oligonucleotide
gacuugcuaggaguggaag

SEQ ID NO: 462180 - RNA, 19 nt, Artificial Sequence
  Description of Artificial Sequence: Synthetic oligonucleotide
auguugucggggcccagag

SEQ ID NO: 462181 - RNA, 19 nt, Artificial Sequence
  Description of Artificial Sequence: Synthetic oligonucleotide
uaucgcagcucagggauga

SEQ ID NO: 462182 - RNA, 19 nt, Artificial Sequence
  Description of Artificial Sequence: Synthetic oligonucleotide
ggaagagauaggcaguguc

SEQ ID NO: 462183 - RNA, 19 nt, Artificial Sequence
  Description of Artificial Sequence: Synthetic oligonucleotide
uacugggcugaaaucuaac

SEQ ID NO: 462184 - RNA, 19 nt, Artificial Sequence
  Description of Artificial Sequence: Synthetic oligonucleotide
agcgcagacuugcuaggag

SEQ ID NO: 462185 - RNA, 19 nt, Artificial Sequence
  Description of Artificial Sequence: Synthetic oligonucleotide
augacccuaaggaaauaag

SEQ ID NO: 462186 - RNA, 19 nt, Artificial Sequence
  Description of Artificial Sequence: Synthetic oligonucleotide
uucagcgggaaguggggcu

SEQ ID NO: 462187 - RNA, 19 nt, Artificial Sequence
  Description of Artificial Sequence: Synthetic oligonucleotide
guacgagcugacccguggg

SEQ ID NO: 462188 - RNA, 19 nt, Artificial Sequence
  Description of Artificial Sequence: Synthetic oligonucleotide
aaagacugguucacuggga

SEQ ID NO: 462189 - RNA, 19 nt, Artificial Sequence
  Description of Artificial Sequence: Synthetic oligonucleotide
acucgcuugcuaugacggg

SEQ ID NO: 462190 - RNA, 19 nt, Artificial Sequence
  Description of Artificial Sequence: Synthetic oligonucleotide
aacgguuggcugaaagacu

SEQ ID NO: 462191 - RNA, 19 nt, Artificial Sequence
  Description of Artificial Sequence: Synthetic oligonucleotide
ugacgggcgagcucugagc

SEQ ID NO: 462192 - RNA, 19 nt, Artificial Sequence
  Description of Artificial Sequence: Synthetic oligonucleotide
ucuuucgccgugagcccag

SEQ ID NO: 462193 - RNA, 19 nt, Artificial Sequence
  Description of Artificial Sequence: Synthetic oligonucleotide
agacacgccggguugggga

SEQ ID NO: 462194 - RNA, 19 nt, Artificial Sequence
  Description of Artificial Sequence: Synthetic oligonucleotide
uucgcuuagucaccagcau

SEQ ID NO: 462195 - RNA, 19 nt, Artificial Sequence
  Description of Artificial Sequence: Synthetic oligonucleotide
uggcagaugucucccgaac

SEQ ID NO: 462196 - RNA, 19 nt, Artificial Sequence
  Description of Artificial Sequence: Synthetic oligonucleotide
gguacgagcugacccgugg

SEQ ID NO: 462197 - RNA, 19 nt, Artificial Sequence
  Description of Artificial Sequence: Synthetic oligonucleotide
aagaaucuucccaggaauu

SEQ ID NO: 462198 - RNA, 19 nt, Artificial Sequence
  Description of Artificial Sequence: Synthetic oligonucleotide
accugguccaacgucaagu

SEQ ID NO: 462199 - RNA, 19 nt, Artificial Sequence
  Description of Artificial Sequence: Synthetic oligonucleotide
gguccaacgucaaguagcg

SEQ ID NO: 462200 - RNA, 19 nt, Artificial Sequence
  Description of Artificial Sequence: Synthetic oligonucleotide
uuucagugaugcacacggu

SEQ ID NO: 462201 - RNA, 19 nt, Artificial Sequence
  Description of Artificial Sequence: Synthetic oligonucleotide
cuucucucuucgcuuaguc

SEQ ID NO: 462202 - RNA, 19 nt, Artificial Sequence
  Description of Artificial Sequence: Synthetic oligonucleotide
acacggggaccgaaggugc

SEQ ID NO: 462203 - RNA, 19 nt, Artificial Sequence
  Description of Artificial Sequence: Synthetic oligonucleotide
agugcucgggcgauugugg

SEQ ID NO: 462204 - RNA, 19 nt, Artificial Sequence
  Description of Artificial Sequence: Synthetic oligonucleotide
caucuuucgccgugagccc

SEQ ID NO: 462205 - RNA, 19 nt, Artificial Sequence
  Description of Artificial Sequence: Synthetic oligonucleotide
uucggacucgcuugcuaug

SEQ ID NO: 462206 - RNA, 19 nt, Artificial Sequence
  Description of Artificial Sequence: Synthetic oligonucleotide
ggacucgcuugcuaugacg

SEQ ID NO: 462207 - RNA, 19 nt, Artificial Sequence
  Description of Artificial Sequence: Synthetic oligonucleotide
ugacccgugggagcagugg

SEQ ID NO: 462208 - RNA, 19 nt, Artificial Sequence
  Description of Artificial Sequence: Synthetic oligonucleotide
ucgcuuagucaccagcauu

SEQ ID NO: 462209 - RNA, 19 nt, Artificial Sequence
  Description of Artificial Sequence: Synthetic oligonucleotide
ugcucgggcgauuguggag

SEQ ID NO: 462210 - RNA, 19 nt, Artificial Sequence
  Description of Artificial Sequence: Synthetic oligonucleotide
uggguuagaugugacuauc

SEQ ID NO: 462211 - RNA, 19 nt, Artificial Sequence
  Description of Artificial Sequence: Synthetic oligonucleotide
uuacggagcucaggauugg

SEQ ID NO: 462212 - RNA, 19 nt, Artificial Sequence
  Description of Artificial Sequence: Synthetic oligonucleotide
ccuaaggaaauaagcuuac

SEQ ID NO: 462213 - RNA, 19 nt, Artificial Sequence
  Description of Artificial Sequence: Synthetic oligonucleotide
uggaaacauggggauguca

SEQ ID NO: 462214 - RNA, 19 nt, Artificial Sequence
  Description of Artificial Sequence: Synthetic oligonucleotide
gguuggcugaaagacuggg

SEQ ID NO: 462215 - RNA, 19 nt, Artificial Sequence
  Description of Artificial Sequence: Synthetic oligonucleotide
ugacuacugggcacuuccu

SEQ ID NO: 462216 - RNA, 19 nt, Artificial Sequence
  Description of Artificial Sequence: Synthetic oligonucleotide
guggaagaaacugcaccgc

SEQ ID NO: 462217 - RNA, 19 nt, Artificial Sequence
  Description of Artificial Sequence: Synthetic oligonucleotide
guguauuggagccuagggu

SEQ ID NO: 462218 - RNA, 19 nt, Artificial Sequence
  Description of Artificial Sequence: Synthetic oligonucleotide
ugaggcugucauucauugu

SEQ ID NO: 462219 - RNA, 19 nt, Artificial Sequence
  Description of Artificial Sequence: Synthetic oligonucleotide
ugagacacgccggguuggg

SEQ ID NO: 462220 - RNA, 19 nt, Artificial Sequence
  Description of Artificial Sequence: Synthetic oligonucleotide
gcuuacauuuauaauuaga

SEQ ID NO: 462221 - RNA, 19 nt, Artificial Sequence
  Description of Artificial Sequence: Synthetic oligonucleotide
ucggacucgcuugcuauga

SEQ ID NO: 462222 - RNA, 19 nt, Artificial Sequence
  Description of Artificial Sequence: Synthetic oligonucleotide
caacgucaaguagcgauug

SEQ ID NO: 462223 - RNA, 19 nt, Artificial Sequence
  Description of Artificial Sequence: Synthetic oligonucleotide
agacacggggaccgaaggu

SEQ ID NO: 462224 - RNA, 19 nt, Artificial Sequence
  Description of Artificial Sequence: Synthetic oligonucleotide
gcaugcauaggucccagca

SEQ ID NO: 462225 - RNA, 19 nt, Artificial Sequence
  Description of Artificial Sequence: Synthetic oligonucleotide
cgaacaaacauaucgugga

SEQ ID NO: 462226 - RNA, 19 nt, Artificial Sequence
  Description of Artificial Sequence: Synthetic oligonucleotide
ucgcagugugccgggaucc

SEQ ID NO: 462227 - RNA, 19 nt, Artificial Sequence
  Description of Artificial Sequence: Synthetic oligonucleotide
acgagcugacccgugggag

SEQ ID NO: 462228 - RNA, 19 nt, Artificial Sequence
  Description of Artificial Sequence: Synthetic oligonucleotide
gcaguaagugggauccugg

SEQ ID NO: 462229 - RNA, 19 nt, Artificial Sequence
  Description of Artificial Sequence: Synthetic oligonucleotide
uagaugugacuaucauuuu

SEQ ID NO: 462230 - RNA, 19 nt, Artificial Sequence
  Description of Artificial Sequence: Synthetic oligonucleotide
caggggucuugaagggucc

SEQ ID NO: 462231 - RNA, 19 nt, Artificial Sequence
  Description of Artificial Sequence: Synthetic oligonucleotide
ggcuguaacaccaaagacu

SEQ ID NO: 462232 - RNA, 19 nt, Artificial Sequence
  Description of Artificial Sequence: Synthetic oligonucleotide
gguaccagguacgagcuga

SEQ ID NO: 462233 - RNA, 19 nt, Artificial Sequence
  Description of Artificial Sequence: Synthetic oligonucleotide
guaaggggcacagcucggc

SEQ ID NO: 462234 - RNA, 19 nt, Artificial Sequence
  Description of Artificial Sequence: Synthetic oligonucleotide
cccgaacaaacauaucgug

SEQ ID NO: 462235 - RNA, 19 nt, Artificial Sequence
  Description of Artificial Sequence: Synthetic oligonucleotide
gggcuguaacaccaaagac

SEQ ID NO: 462236 - RNA, 19 nt, Artificial Sequence
  Description of Artificial Sequence: Synthetic oligonucleotide
cucugagcucauaagcgaa

SEQ ID NO: 462237 - RNA, 19 nt, Artificial Sequence
  Description of Artificial Sequence: Synthetic oligonucleotide
aacugcaccgcaggucccu

SEQ ID NO: 462238 - RNA, 19 nt, Artificial Sequence
  Description of Artificial Sequence: Synthetic oligonucleotide
gcaauucggacucgcuugc

SEQ ID NO: 462239 - RNA, 19 nt, Artificial Sequence
  Description of Artificial Sequence: Synthetic oligonucleotide
aacauaucguggagagaaa

SEQ ID NO: 462240 - RNA, 19 nt, Artificial Sequence
  Description of Artificial Sequence: Synthetic oligonucleotide
accgagggcuguaacacca

SEQ ID NO: 462241 - RNA, 19 nt, Artificial Sequence
  Description of Artificial Sequence: Synthetic oligonucleotide
aauggggagcaaagguaau

SEQ ID NO: 462242 - RNA, 19 nt, Artificial Sequence
  Description of Artificial Sequence: Synthetic oligonucleotide
ugccugcuagcuucccuca

SEQ ID NO: 462243 - RNA, 19 nt, Artificial Sequence
  Description of Artificial Sequence: Synthetic oligonucleotide
aagccgaccuguaugucua

SEQ ID NO: 462244 - RNA, 19 nt, Artificial Sequence
  Description of Artificial Sequence: Synthetic oligonucleotide
cuucagcgggaaguggggc

SEQ ID NO: 462245 - RNA, 19 nt, Artificial Sequence
  Description of Artificial Sequence: Synthetic oligonucleotide
uggagagcgcagacuugcu

SEQ ID NO: 462246 - RNA, 19 nt, Artificial Sequence
  Description of Artificial Sequence: Synthetic oligonucleotide
ucuagacacggggaccgaa

SEQ ID NO: 462247 - RNA, 19 nt, Artificial Sequence
  Description of Artificial Sequence: Synthetic oligonucleotide
cuaucauuuuggcauaauu

SEQ ID NO: 462248 - RNA, 19 nt, Artificial Sequence
  Description of Artificial Sequence: Synthetic oligonucleotide
cucuaucgcagcucaggga

SEQ ID NO: 462249 - RNA, 19 nt, Artificial Sequence
  Description of Artificial Sequence: Synthetic oligonucleotide
caccgagggcuguaacacc

SEQ ID NO: 462250 - RNA, 19 nt, Artificial Sequence
  Description of Artificial Sequence: Synthetic oligonucleotide
gauguugucggggcccaga

SEQ ID NO: 462251 - RNA, 19 nt, Artificial Sequence
  Description of Artificial Sequence: Synthetic oligonucleotide
gccucuaucgcagcucagg

SEQ ID NO: 462252 - RNA, 19 nt, Artificial Sequence
  Description of Artificial Sequence: Synthetic oligonucleotide
uuucgccgugagcccagug

SEQ ID NO: 462253 - RNA, 19 nt, Artificial Sequence
  Description of Artificial Sequence: Synthetic oligonucleotide
cauaauaggaggacuucuu

SEQ ID NO: 462254 - RNA, 19 nt, Artificial Sequence
  Description of Artificial Sequence: Synthetic oligonucleotide
cauaagcgaagcugccaga

SEQ ID NO: 462255 - RNA, 19 nt, Artificial Sequence
  Description of Artificial Sequence: Synthetic oligonucleotide
agugugccgggauccucug

SEQ ID NO: 462256 - RNA, 19 nt, Artificial Sequence
  Description of Artificial Sequence: Synthetic oligonucleotide
cuggucgcagugugccggg

SEQ ID NO: 462257 - RNA, 19 nt, Artificial Sequence
  Description of Artificial Sequence: Synthetic oligonucleotide
guacacugagccaggccug

SEQ ID NO: 462258 - RNA, 19 nt, Artificial Sequence
  Description of Artificial Sequence: Synthetic oligonucleotide
cccaacuuugguuggggug

SEQ ID NO: 462259 - RNA, 19 nt, Artificial Sequence
  Description of Artificial Sequence: Synthetic oligonucleotide
ugugacgaauagaguucuu

SEQ ID NO: 462260 - RNA, 19 nt, Artificial Sequence
  Description of Artificial Sequence: Synthetic oligonucleotide
gggagcagcagaugacuac

SEQ ID NO: 462261 - RNA, 19 nt, Artificial Sequence
  Description of Artificial Sequence: Synthetic oligonucleotide
auccaaguguagauauccu

SEQ ID NO: 462262 - RNA, 19 nt, Artificial Sequence
  Description of Artificial Sequence: Synthetic oligonucleotide
guagugucagcuuguguau

SEQ ID NO: 462263 - RNA, 19 nt, Artificial Sequence
  Description of Artificial Sequence: Synthetic oligonucleotide
ggcaaggggccaaaggcgc

SEQ ID NO: 462264 - RNA, 19 nt, Artificial Sequence
  Description of Artificial Sequence: Synthetic oligonucleotide
gacgggcgagcucugagcu

SEQ ID NO: 462265 - RNA, 19 nt, Artificial Sequence
  Description of Artificial Sequence: Synthetic oligonucleotide
ggaaaugauccucgaucca

SEQ ID NO: 462266 - RNA, 19 nt, Artificial Sequence
  Description of Artificial Sequence: Synthetic oligonucleotide
cuucaccgagggcuguaac

SEQ ID NO: 462267 - RNA, 19 nt, Artificial Sequence
  Description of Artificial Sequence: Synthetic oligonucleotide
uugcuaugacgggcgagcu

SEQ ID NO: 462268 - RNA, 19 nt, Artificial Sequence
  Description of Artificial Sequence: Synthetic oligonucleotide
ugggucguuucugcuguga

SEQ ID NO: 462269 - RNA, 19 nt, Artificial Sequence
  Description of Artificial Sequence: Synthetic oligonucleotide
gauccucgauccaagugua

SEQ ID NO: 462270 - RNA, 19 nt, Artificial Sequence
  Description of Artificial Sequence: Synthetic oligonucleotide
ggagacccugguuccagug

SEQ ID NO: 462271 - RNA, 19 nt, Artificial Sequence
  Description of Artificial Sequence: Synthetic oligonucleotide
gcuggucgcagugugccgg

SEQ ID NO: 462272 - RNA, 19 nt, Artificial Sequence
  Description of Artificial Sequence: Synthetic oligonucleotide
gagacacgccggguugggg

SEQ ID NO: 462273 - RNA, 19 nt, Artificial Sequence
  Description of Artificial Sequence: Synthetic oligonucleotide
cagacuugcuaggagugga

SEQ ID NO: 462274 - RNA, 19 nt, Artificial Sequence
  Description of Artificial Sequence: Synthetic oligonucleotide
aucuuucgccgugagccca

SEQ ID NO: 462275 - RNA, 19 nt, Artificial Sequence
  Description of Artificial Sequence: Synthetic oligonucleotide
gagagcugcuaaagggguc

SEQ ID NO: 462276 - RNA, 19 nt, Artificial Sequence
  Description of Artificial Sequence: Synthetic oligonucleotide
gugcaaccccuugucaccc

SEQ ID NO: 462277 - RNA, 19 nt, Artificial Sequence
  Description of Artificial Sequence: Synthetic oligonucleotide
gucgcagugugccgggauc

SEQ ID NO: 462278 - RNA, 19 nt, Artificial Sequence
  Description of Artificial Sequence: Synthetic oligonucleotide
aggaucuuacugaggcugu

SEQ ID NO: 462279 - RNA, 19 nt, Artificial Sequence
  Description of Artificial Sequence: Synthetic oligonucleotide
gagagaacgguuggcugaa

SEQ ID NO: 462280 - RNA, 19 nt, Artificial Sequence
  Description of Artificial Sequence: Synthetic oligonucleotide
agccuaggguggcucuuug

SEQ ID NO: 462281 - RNA, 19 nt, Artificial Sequence
  Description of Artificial Sequence: Synthetic oligonucleotide
caagccgaccuguaugucu

SEQ ID NO: 462282 - RNA, 19 nt, Artificial Sequence
  Description of Artificial Sequence: Synthetic oligonucleotide
aggcugucauucauugugu

SEQ ID NO: 462283 - RNA, 19 nt, Artificial Sequence
  Description of Artificial Sequence: Synthetic oligonucleotide
ugucggggcccagaggguc

SEQ ID NO: 462284 - RNA, 19 nt, Artificial Sequence
  Description of Artificial Sequence: Synthetic oligonucleotide
gcaagcuaaggaagccagg

SEQ ID NO: 462285 - RNA, 19 nt, Artificial Sequence
  Description of Artificial Sequence: Synthetic oligonucleotide
uaaugacccuaaggaaaua

SEQ ID NO: 462286 - RNA, 19 nt, Artificial Sequence
  Description of Artificial Sequence: Synthetic oligonucleotide
ccuaccgcaugcauagguc

SEQ ID NO: 462287 - RNA, 19 nt, Artificial Sequence
  Description of Artificial Sequence: Synthetic oligonucleotide
ggcaguaagugggauccug

SEQ ID NO: 462288 - RNA, 19 nt, Artificial Sequence
  Description of Artificial Sequence: Synthetic oligonucleotide
ucggcccuugccugcuagc

SEQ ID NO: 462289 - RNA, 19 nt, Artificial Sequence
  Description of Artificial Sequence: Synthetic oligonucleotide
agcuuguguauuggagccu

SEQ ID NO: 462290 - RNA, 19 nt, Artificial Sequence
  Description of Artificial Sequence: Synthetic oligonucleotide
ccucuuucagugaugcaca

SEQ ID NO: 462291 - RNA, 19 nt, Artificial Sequence
  Description of Artificial Sequence: Synthetic oligonucleotide
aggcaaggucaaaggguuc

SEQ ID NO: 462292 - RNA, 19 nt, Artificial Sequence
  Description of Artificial Sequence: Synthetic oligonucleotide
cuugaaggguccucccucu

SEQ ID NO: 462293 - RNA, 19 nt, Artificial Sequence
  Description of Artificial Sequence: Synthetic oligonucleotide
cucggcccuugccugcuag

SEQ ID NO: 462294 - RNA, 19 nt, Artificial Sequence
  Description of Artificial Sequence: Synthetic oligonucleotide
ggccucagggguucuggag

SEQ ID NO: 462295 - RNA, 19 nt, Artificial Sequence
  Description of Artificial Sequence: Synthetic oligonucleotide
agcgggaaguggggcuacc

SEQ ID NO: 462296 - RNA, 19 nt, Artificial Sequence
  Description of Artificial Sequence: Synthetic oligonucleotide
acucugcuaggccucucua

SEQ ID NO: 462297 - RNA, 19 nt, Artificial Sequence
  Description of Artificial Sequence: Synthetic oligonucleotide
ugggugcaauucggacucg

SEQ ID NO: 462298 - RNA, 19 nt, Artificial Sequence
  Description of Artificial Sequence: Synthetic oligonucleotide
uugggucguuucugcugug

SEQ ID NO: 462299 - RNA, 19 nt, Artificial Sequence
  Description of Artificial Sequence: Synthetic oligonucleotide
gagcugcuaaaggggucag

SEQ ID NO: 462300 - RNA, 19 nt, Artificial Sequence
  Description of Artificial Sequence: Synthetic oligonucleotide
ccuaggguggcucuuugca

SEQ ID NO: 462301 - RNA, 19 nt, Artificial Sequence
  Description of Artificial Sequence: Synthetic oligonucleotide
gguuagaugugacuaucau

SEQ ID NO: 462302 - RNA, 19 nt, Artificial Sequence
  Description of Artificial Sequence: Synthetic oligonucleotide
gcccuugccugcuagcuuc

SEQ ID NO: 462303 - RNA, 19 nt, Artificial Sequence
  Description of Artificial Sequence: Synthetic oligonucleotide
gguaaggggcacagcucgg

SEQ ID NO: 462304 - RNA, 19 nt, Artificial Sequence
  Description of Artificial Sequence: Synthetic oligonucleotide
ggaguggaagagauaggca

SEQ ID NO: 462305 - RNA, 19 nt, Artificial Sequence
  Description of Artificial Sequence: Synthetic oligonucleotide
gggagacccuaccgcaugc

SEQ ID NO: 462306 - RNA, 19 nt, Artificial Sequence
  Description of Artificial Sequence: Synthetic oligonucleotide
ugcgggcucugaagacucu

SEQ ID NO: 462307 - RNA, 19 nt, Artificial Sequence
  Description of Artificial Sequence: Synthetic oligonucleotide
uuccaagugcucgggcgau

SEQ ID NO: 462308 - RNA, 19 nt, Artificial Sequence
  Description of Artificial Sequence: Synthetic oligonucleotide
guaugucuaggugcccaca

SEQ ID NO: 462309 - RNA, 19 nt, Artificial Sequence
  Description of Artificial Sequence: Synthetic oligonucleotide
cgggcgauuguggagaccc

SEQ ID NO: 462310 - RNA, 19 nt, Artificial Sequence
  Description of Artificial Sequence: Synthetic oligonucleotide
cucgggcgauuguggagac

SEQ ID NO: 462311 - RNA, 19 nt, Artificial Sequence
  Description of Artificial Sequence: Synthetic oligonucleotide
gcucauaagcgaagcugcc

SEQ ID NO: 462312 - RNA, 19 nt, Artificial Sequence
  Description of Artificial Sequence: Synthetic oligonucleotide
accuugggugcaauucgga

SEQ ID NO: 462313 - RNA, 19 nt, Artificial Sequence
  Description of Artificial Sequence: Synthetic oligonucleotide
agacccuaccgcaugcaua

SEQ ID NO: 462314 - RNA, 19 nt, Artificial Sequence
  Description of Artificial Sequence: Synthetic oligonucleotide
gugcucgggcgauugugga

SEQ ID NO: 462315 - RNA, 19 nt, Artificial Sequence
  Description of Artificial Sequence: Synthetic oligonucleotide
guggguuagaugugacuau

SEQ ID NO: 462316 - RNA, 19 nt, Artificial Sequence
  Description of Artificial Sequence: Synthetic oligonucleotide
agauauccuucaaggucau

SEQ ID NO: 462317 - RNA, 19 nt, Artificial Sequence
  Description of Artificial Sequence: Synthetic oligonucleotide
aaguagcgauuggcacuug

SEQ ID NO: 462318 - RNA, 19 nt, Artificial Sequence
  Description of Artificial Sequence: Synthetic oligonucleotide
ggguuagaugugacuauca

SEQ ID NO: 462319 - RNA, 19 nt, Artificial Sequence
  Description of Artificial Sequence: Synthetic oligonucleotide
gcuaaaggggucagaggca

SEQ ID NO: 462320 - RNA, 19 nt, Artificial Sequence
  Description of Artificial Sequence: Synthetic oligonucleotide
guaccagguacgagcugac

SEQ ID NO: 462321 - RNA, 19 nt, Artificial Sequence
  Description of Artificial Sequence: Synthetic oligonucleotide
gugcaauucggacucgcuu

SEQ ID NO: 462322 - RNA, 19 nt, Artificial Sequence
  Description of Artificial Sequence: Synthetic oligonucleotide
cgaccuguaugucuaggug

SEQ ID NO: 462323 - RNA, 19 nt, Artificial Sequence
  Description of Artificial Sequence: Synthetic oligonucleotide
cgucaaguagcgauuggca

SEQ ID NO: 462324 - RNA, 19 nt, Artificial Sequence
  Description of Artificial Sequence: Synthetic oligonucleotide
gagacccuaccgcaugcau

SEQ ID NO: 462325 - RNA, 19 nt, Artificial Sequence
  Description of Artificial Sequence: Synthetic oligonucleotide
caccgcaggucccucccuc

SEQ ID NO: 462326 - RNA, 19 nt, Artificial Sequence
  Description of Artificial Sequence: Synthetic oligonucleotide
agcugcuaaaggggucaga

SEQ ID NO: 462327 - RNA, 19 nt, Artificial Sequence
  Description of Artificial Sequence: Synthetic oligonucleotide
gcucgggcgauuguggaga

SEQ ID NO: 462328 - RNA, 19 nt, Artificial Sequence
  Description of Artificial Sequence: Synthetic oligonucleotide
cccuucauuggcuagcagu

SEQ ID NO: 462329 - RNA, 19 nt, Artificial Sequence
  Description of Artificial Sequence: Synthetic oligonucleotide
ucgggcgauuguggagacc

SEQ ID NO: 462330 - RNA, 19 nt, Artificial Sequence
  Description of Artificial Sequence: Synthetic oligonucleotide
ccucucuaagugugccaag

SEQ ID NO: 462331 - RNA, 19 nt, Artificial Sequence
  Description of Artificial Sequence: Synthetic oligonucleotide
cagugugccgggauccucu

SEQ ID NO: 462332 - RNA, 19 nt, Artificial Sequence
  Description of Artificial Sequence: Synthetic oligonucleotide
ggacaauuuggggaacuua

SEQ ID NO: 462333 - RNA, 19 nt, Artificial Sequence
  Description of Artificial Sequence: Synthetic oligonucleotide
gcuuggggaccuccagaug

SEQ ID NO: 462334 - RNA, 19 nt, Artificial Sequence
  Description of Artificial Sequence: Synthetic oligonucleotide
gucggggcccagagggucc

SEQ ID NO: 462335 - RNA, 19 nt, Artificial Sequence
  Description of Artificial Sequence: Synthetic oligonucleotide
acgcuuucucucagugcug

SEQ ID NO: 462336 - RNA, 19 nt, Artificial Sequence
  Description of Artificial Sequence: Synthetic oligonucleotide
gccgaccuguaugucuagg

SEQ ID NO: 462337 - RNA, 19 nt, Artificial Sequence
  Description of Artificial Sequence: Synthetic oligonucleotide
caaguagcgauuggcacuu

SEQ ID NO: 462338 - RNA, 19 nt, Artificial Sequence
  Description of Artificial Sequence: Synthetic oligonucleotide
ccaagugcucgggcgauug

SEQ ID NO: 462339 - RNA, 19 nt, Artificial Sequence
  Description of Artificial Sequence: Synthetic oligonucleotide
gggugcaauucggacucgc

SEQ ID NO: 462340 - RNA, 19 nt, Artificial Sequence
  Description of Artificial Sequence: Synthetic oligonucleotide
gcuaccccuucauuggcua

SEQ ID NO: 462341 - RNA, 19 nt, Artificial Sequence
  Description of Artificial Sequence: Synthetic oligonucleotide
ggagagcgcagacuugcua

SEQ ID NO: 462342 - RNA, 19 nt, Artificial Sequence
  Description of Artificial Sequence: Synthetic oligonucleotide
acccuaccgcaugcauagg

SEQ ID NO: 462343 - RNA, 19 nt, Artificial Sequence
  Description of Artificial Sequence: Synthetic oligonucleotide
gcuuguguauuggagccua

SEQ ID NO: 462344 - RNA, 19 nt, Artificial Sequence
  Description of Artificial Sequence: Synthetic oligonucleotide
ggggaacuuacaccauuua

SEQ ID NO: 462345 - RNA, 19 nt, Artificial Sequence
  Description of Artificial Sequence: Synthetic oligonucleotide
gccucucuaagugugccaa

SEQ ID NO: 462346 - RNA, 19 nt, Artificial Sequence
  Description of Artificial Sequence: Synthetic oligonucleotide
gauauccuucaaggucaua

SEQ ID NO: 462347 - RNA, 19 nt, Artificial Sequence
  Description of Artificial Sequence: Synthetic oligonucleotide
ggauccuggcaagccgacc

SEQ ID NO: 462348 - RNA, 19 nt, Artificial Sequence
  Description of Artificial Sequence: Synthetic oligonucleotide
gagaccggcucaccucccu

SEQ ID NO: 462349 - RNA, 19 nt, Artificial Sequence
  Description of Artificial Sequence: Synthetic oligonucleotide
ccaacuuugguuggggugu

SEQ ID NO: 462350 - RNA, 19 nt, Artificial Sequence
  Description of Artificial Sequence: Synthetic oligonucleotide
agaugacuacugggcacuu

SEQ ID NO: 462351 - RNA, 19 nt, Artificial Sequence
  Description of Artificial Sequence: Synthetic oligonucleotide
ugcacacggugagggccac

SEQ ID NO: 462352 - RNA, 19 nt, Artificial Sequence
  Description of Artificial Sequence: Synthetic oligonucleotide
gcgcagacuugcuaggagu

SEQ ID NO: 462353 - RNA, 19 nt, Artificial Sequence
  Description of Artificial Sequence: Synthetic oligonucleotide
gcaguggguuagaugugac

SEQ ID NO: 462354 - RNA, 19 nt, Artificial Sequence
  Description of Artificial Sequence: Synthetic oligonucleotide
agguacgagcugacccgug

SEQ ID NO: 462355 - RNA, 19 nt, Artificial Sequence
  Description of Artificial Sequence: Synthetic oligonucleotide
gcuuaaacaccugguccaa

SEQ ID NO: 462356 - RNA, 19 nt, Artificial Sequence
  Description of Artificial Sequence: Synthetic oligonucleotide
ggggacuuaagcccauaau

SEQ ID NO: 462357 - RNA, 19 nt, Artificial Sequence
  Description of Artificial Sequence: Synthetic oligonucleotide
ccugcuagcuucccucaga

SEQ ID NO: 462358 - RNA, 19 nt, Artificial Sequence
  Description of Artificial Sequence: Synthetic oligonucleotide
ucggggcccagaggguccu

SEQ ID NO: 462359 - RNA, 19 nt, Artificial Sequence
  Description of Artificial Sequence: Synthetic oligonucleotide
uccaagugcucgggcgauu

SEQ ID NO: 462360 - RNA, 19 nt, Artificial Sequence
  Description of Artificial Sequence: Synthetic oligonucleotide
ggguaccagguacgagcug

SEQ ID NO: 462361 - RNA, 19 nt, Artificial Sequence
  Description of Artificial Sequence: Synthetic oligonucleotide
agacucucugggagacccu

SEQ ID NO: 462362 - RNA, 19 nt, Artificial Sequence
  Description of Artificial Sequence: Synthetic oligonucleotide
ccauaauaggaggacuucu

SEQ ID NO: 462363 - RNA, 19 nt, Artificial Sequence
  Description of Artificial Sequence: Synthetic oligonucleotide
agagaacgguuggcugaaa

SEQ ID NO: 462364 - RNA, 19 nt, Artificial Sequence
  Description of Artificial Sequence: Synthetic oligonucleotide
ggguucuggagagcgcaga

SEQ ID NO: 462365 - RNA, 19 nt, Artificial Sequence
  Description of Artificial Sequence: Synthetic oligonucleotide
cacggugagggccacucuu

SEQ ID NO: 462366 - RNA, 19 nt, Artificial Sequence
  Description of Artificial Sequence: Synthetic oligonucleotide
gcgggaaguggggcuaccc

SEQ ID NO: 462367 - RNA, 19 nt, Artificial Sequence
  Description of Artificial Sequence: Synthetic oligonucleotide
ggagacccuaccgcaugca

SEQ ID NO: 462368 - RNA, 19 nt, Artificial Sequence
  Description of Artificial Sequence: Synthetic oligonucleotide
cagcgggaaguggggcuac

SEQ ID NO: 462369 - RNA, 19 nt, Artificial Sequence
  Description of Artificial Sequence: Synthetic oligonucleotide
acacgccggguuggggacu

SEQ ID NO: 462370 - RNA, 19 nt, Artificial Sequence
  Description of Artificial Sequence: Synthetic oligonucleotide
cugggagacccuaccgcau

SEQ ID NO: 462371 - RNA, 19 nt, Artificial Sequence
  Description of Artificial Sequence: Synthetic oligonucleotide
ggugcaauucggacucgcu

SEQ ID NO: 462372 - RNA, 19 nt, Artificial Sequence
  Description of Artificial Sequence: Synthetic oligonucleotide
guccaacgucaaguagcga

SEQ ID NO: 462373 - RNA, 19 nt, Artificial Sequence
  Description of Artificial Sequence: Synthetic oligonucleotide
gacccugguuccaguggcu

SEQ ID NO: 462374 - RNA, 19 nt, Artificial Sequence
  Description of Artificial Sequence: Synthetic oligonucleotide
ccgaccuguaugucuaggu

SEQ ID NO: 462375 - RNA, 19 nt, Artificial Sequence
  Description of Artificial Sequence: Synthetic oligonucleotide
cgcuuagucaccagcauuu

SEQ ID NO: 462376 - RNA, 19 nt, Artificial Sequence
  Description of Artificial Sequence: Synthetic oligonucleotide
gcuaggaguggaagagaua

SEQ ID NO: 462377 - RNA, 19 nt, Artificial Sequence
  Description of Artificial Sequence: Synthetic oligonucleotide
ccaacgucaaguagcgauu

SEQ ID NO: 462378 - RNA, 19 nt, Artificial Sequence
  Description of Artificial Sequence: Synthetic oligonucleotide
gcccauaauaggaggacuu

SEQ ID NO: 462379 - RNA, 19 nt, Artificial Sequence
  Description of Artificial Sequence: Synthetic oligonucleotide
cgcaugcauaggucccagc

SEQ ID NO: 462380 - RNA, 19 nt, Artificial Sequence
  Description of Artificial Sequence: Synthetic oligonucleotide
caagugcucgggcgauugu

SEQ ID NO: 462381 - RNA, 19 nt, Artificial Sequence
  Description of Artificial Sequence: Synthetic oligonucleotide
gugagcccagugggaguuc

SEQ ID NO: 462382 - RNA, 19 nt, Artificial Sequence
  Description of Artificial Sequence: Synthetic oligonucleotide
cacggggaccgaaggugcu

SEQ ID NO: 462383 - RNA, 19 nt, Artificial Sequence
  Description of Artificial Sequence: Synthetic oligonucleotide
gcaagccgaccuguauguc

SEQ ID NO: 462384 - RNA, 19 nt, Artificial Sequence
  Description of Artificial Sequence: Synthetic oligonucleotide
gguucguacugggcugaaa

SEQ ID NO: 462385 - RNA, 19 nt, Artificial Sequence
  Description of Artificial Sequence: Synthetic oligonucleotide
gcagugugccgggauccuc

SEQ ID NO: 462386 - RNA, 19 nt, Artificial Sequence
  Description of Artificial Sequence: Synthetic oligonucleotide
ggccucuaucgcagcucag

SEQ ID NO: 462387 - RNA, 19 nt, Artificial Sequence
  Description of Artificial Sequence: Synthetic oligonucleotide
gccugagcucucaaugcua

SEQ ID NO: 462388 - RNA, 19 nt, Artificial Sequence
  Description of Artificial Sequence: Synthetic oligonucleotide
cccuaccgcaugcauaggu

SEQ ID NO: 462389 - RNA, 19 nt, Artificial Sequence
  Description of Artificial Sequence: Synthetic oligonucleotide
caauucggacucgcuugcu

SEQ ID NO: 462390 - RNA, 19 nt, Artificial Sequence
  Description of Artificial Sequence: Synthetic oligonucleotide
ccagugggaguucacuuuu

SEQ ID NO: 462391 - RNA, 19 nt, Artificial Sequence
  Description of Artificial Sequence: Synthetic oligonucleotide
gcccagugggaguucacuu

SEQ ID NO: 462392 - RNA, 19 nt, Artificial Sequence
  Description of Artificial Sequence: Synthetic oligonucleotide
ggucagaggcaaggucaaa

SEQ ID NO: 462393 - RNA, 19 nt, Artificial Sequence
  Description of Artificial Sequence: Synthetic oligonucleotide
ggucgcagugugccgggau

SEQ ID NO: 462394 - RNA, 19 nt, Artificial Sequence
  Description of Artificial Sequence: Synthetic oligonucleotide
gccucagccugagcucuca

SEQ ID NO: 462395 - RNA, 19 nt, Artificial Sequence
  Description of Artificial Sequence: Synthetic oligonucleotide
cccagugggaguucacuuu

SEQ ID NO: 462396 - RNA, 19 nt, Artificial Sequence
  Description of Artificial Sequence: Synthetic oligonucleotide
gauuggcacuuggguggau

SEQ ID NO: 462397 - RNA, 19 nt, Artificial Sequence
  Description of Artificial Sequence: Synthetic oligonucleotide
gugugcuauucagcuccau

SEQ ID NO: 462398 - RNA, 19 nt, Artificial Sequence
  Description of Artificial Sequence: Synthetic oligonucleotide
ccggcccuucagcgggaag

SEQ ID NO: 462399 - RNA, 19 nt, Artificial Sequence
  Description of Artificial Sequence: Synthetic oligonucleotide
ccuucaccgagggcuguaa

SEQ ID NO: 462400 - RNA, 19 nt, Artificial Sequence
  Description of Artificial Sequence: Synthetic oligonucleotide
ccccaacuuugguuggggu

SEQ ID NO: 462401 - RNA, 19 nt, Artificial Sequence
  Description of Artificial Sequence: Synthetic oligonucleotide
cuuucgccgugagcccagu

SEQ ID NO: 462402 - RNA, 19 nt, Artificial Sequence
  Description of Artificial Sequence: Synthetic oligonucleotide
ggcgagcucugagcucaua

SEQ ID NO: 462403 - RNA, 19 nt, Artificial Sequence
  Description of Artificial Sequence: Synthetic oligonucleotide
cacgccggguuggggacuu

SEQ ID NO: 462404 - RNA, 19 nt, Artificial Sequence
  Description of Artificial Sequence: Synthetic oligonucleotide
ccuggucaucacugcuuuu

SEQ ID NO: 462405 - RNA, 19 nt, Artificial Sequence
  Description of Artificial Sequence: Synthetic oligonucleotide
aaacuuaugcauuugggcc

SEQ ID NO: 462406 - RNA, 19 nt, Artificial Sequence
  Description of Artificial Sequence: Synthetic oligonucleotide
aaaccaauuacacucuacc

SEQ ID NO: 462407 - RNA, 19 nt, Artificial Sequence
  Description of Artificial Sequence: Synthetic oligonucleotide
auuuguauuaaguaggagg

SEQ ID NO: 462408 - RNA, 19 nt, Artificial Sequence
  Description of Artificial Sequence: Synthetic oligonucleotide
uuuaauaaguuccaggucu

SEQ ID NO: 462409 - RNA, 19 nt, Artificial Sequence
  Description of Artificial Sequence: Synthetic oligonucleotide
aauauuaugacuguagugu

SEQ ID NO: 462410 - RNA, 19 nt, Artificial Sequence
  Description of Artificial Sequence: Synthetic oligonucleotide
uuaguauagaacaagauua

SEQ ID NO: 462411 - RNA, 19 nt, Artificial Sequence
  Description of Artificial Sequence: Synthetic oligonucleotide
uuagaagcaaaccagauaa

SEQ ID NO: 462412 - RNA, 19 nt, Artificial Sequence
  Description of Artificial Sequence: Synthetic oligonucleotide
aacuuaugcauuugggccc

SEQ ID NO: 462413 - RNA, 19 nt, Artificial Sequence
  Description of Artificial Sequence: Synthetic oligonucleotide
aaaugagacgagcugcucc

SEQ ID NO: 462414 - RNA, 19 nt, Artificial Sequence
  Description of Artificial Sequence: Synthetic oligonucleotide
ucuauaaacgauaccagca

SEQ ID NO: 462415 - RNA, 19 nt, Artificial Sequence
  Description of Artificial Sequence: Synthetic oligonucleotide
uauagaacaagauuaagua

SEQ ID NO: 462416 - RNA, 19 nt, Artificial Sequence
  Description of Artificial Sequence: Synthetic oligonucleotide
aagucaguuuaacuuaaac

SEQ ID NO: 462417 - RNA, 19 nt, Artificial Sequence
  Description of Artificial Sequence: Synthetic oligonucleotide
aucgacaacgagcagagac

SEQ ID NO: 462418 - RNA, 19 nt, Artificial Sequence
  Description of Artificial Sequence: Synthetic oligonucleotide
gaaacuuaugcauuugggc

SEQ ID NO: 462419 - RNA, 19 nt, Artificial Sequence
  Description of Artificial Sequence: Synthetic oligonucleotide
acagaccuaaguuucaaac

SEQ ID NO: 462420 - RNA, 19 nt, Artificial Sequence
  Description of Artificial Sequence: Synthetic oligonucleotide
aacguuuauauuacaagac

SEQ ID NO: 462421 - RNA, 19 nt, Artificial Sequence
  Description of Artificial Sequence: Synthetic oligonucleotide
aaaguuagaguuuguauau

SEQ ID NO: 462422 - RNA, 19 nt, Artificial Sequence
  Description of Artificial Sequence: Synthetic oligonucleotide
acuuauaaggcucgggaac

SEQ ID NO: 462423 - RNA, 19 nt, Artificial Sequence
  Description of Artificial Sequence: Synthetic oligonucleotide
aacccagacuuucauacac

SEQ ID NO: 462424 - RNA, 19 nt, Artificial Sequence
  Description of Artificial Sequence: Synthetic oligonucleotide
uauuaaguaggagggaugg

SEQ ID NO: 462425 - RNA, 19 nt, Artificial Sequence
  Description of Artificial Sequence: Synthetic oligonucleotide
uuguucauaaauuaggcua

SEQ ID NO: 462426 - RNA, 19 nt, Artificial Sequence
  Description of Artificial Sequence: Synthetic oligonucleotide
uugucuaacacuacgcuga

SEQ ID NO: 462427 - RNA, 19 nt, Artificial Sequence
  Description of Artificial Sequence: Synthetic oligonucleotide
gauaauaagcagcucuuug

SEQ ID NO: 462428 - RNA, 19 nt, Artificial Sequence
  Description of Artificial Sequence: Synthetic oligonucleotide
aauuaggcuaagucuaaca

SEQ ID NO: 462429 - RNA, 19 nt, Artificial Sequence
  Description of Artificial Sequence: Synthetic oligonucleotide
uacacauaaguuaauuccu

SEQ ID NO: 462430 - RNA, 19 nt, Artificial Sequence
  Description of Artificial Sequence: Synthetic oligonucleotide
auacacaucuucuugcgag

SEQ ID NO: 462431 - RNA, 19 nt, Artificial Sequence
  Description of Artificial Sequence: Synthetic oligonucleotide
auugcuggcauauuguaca

SEQ ID NO: 462432 - RNA, 19 nt, Artificial Sequence
  Description of Artificial Sequence: Synthetic oligonucleotide
agaacauccgcaauggaac

SEQ ID NO: 462433 - RNA, 19 nt, Artificial Sequence
  Description of Artificial Sequence: Synthetic oligonucleotide
aaugccuaaaccaauuaca

SEQ ID NO: 462434 - RNA, 19 nt, Artificial Sequence
  Description of Artificial Sequence: Synthetic oligonucleotide
aacuuaaacccagacuuuc

SEQ ID NO: 462435 - RNA, 19 nt, Artificial Sequence
  Description of Artificial Sequence: Synthetic oligonucleotide
uaucuaucaggucaccuug

SEQ ID NO: 462436 - RNA, 19 nt, Artificial Sequence
  Description of Artificial Sequence: Synthetic oligonucleotide
uggauguugccacugcacg

SEQ ID NO: 462437 - RNA, 19 nt, Artificial Sequence
  Description of Artificial Sequence: Synthetic oligonucleotide
uaaauggauaaauacuguc

SEQ ID NO: 462438 - RNA, 19 nt, Artificial Sequence
  Description of Artificial Sequence: Synthetic oligonucleotide
uuuugucuaacacuacgcu

SEQ ID NO: 462439 - RNA, 19 nt, Artificial Sequence
  Description of Artificial Sequence: Synthetic oligonucleotide
ucagccucgauucacauuu

SEQ ID NO: 462440 - RNA, 19 nt, Artificial Sequence
  Description of Artificial Sequence: Synthetic oligonucleotide
uuaaguaggagggauggug

SEQ ID NO: 462441 - RNA, 19 nt, Artificial Sequence
  Description of Artificial Sequence: Synthetic oligonucleotide
ucuaugcuaucuaucaggu

SEQ ID NO: 462442 - RNA, 19 nt, Artificial Sequence
  Description of Artificial Sequence: Synthetic oligonucleotide
agugccaaaaucuugcaaa

SEQ ID NO: 462443 - RNA, 19 nt, Artificial Sequence
  Description of Artificial Sequence: Synthetic oligonucleotide
cuauaaacgauaccagcag

SEQ ID NO: 462444 - RNA, 19 nt, Artificial Sequence
  Description of Artificial Sequence: Synthetic oligonucleotide
acaauauuaugacuguagu

SEQ ID NO: 462445 - RNA, 19 nt, Artificial Sequence
  Description of Artificial Sequence: Synthetic oligonucleotide
uucccuaccgaucacauua

SEQ ID NO: 462446 - RNA, 19 nt, Artificial Sequence
  Description of Artificial Sequence: Synthetic oligonucleotide
cucuauaaacgauaccagc

SEQ ID NO: 462447 - RNA, 19 nt, Artificial Sequence
  Description of Artificial Sequence: Synthetic oligonucleotide
auaaacgauaccagcagac

SEQ ID NO: 462448 - RNA, 19 nt, Artificial Sequence
  Description of Artificial Sequence: Synthetic oligonucleotide
uauaaacgauaccagcaga

SEQ ID NO: 462449 - RNA, 19 nt, Artificial Sequence
  Description of Artificial Sequence: Synthetic oligonucleotide
aggacuaguuaguaguuag

SEQ ID NO: 462450 - RNA, 19 nt, Artificial Sequence
  Description of Artificial Sequence: Synthetic oligonucleotide
agauuaaguaacauuaaga

SEQ ID NO: 462451 - RNA, 19 nt, Artificial Sequence
  Description of Artificial Sequence: Synthetic oligonucleotide
uggacaacguuuauauuac

SEQ ID NO: 462452 - RNA, 19 nt, Artificial Sequence
  Description of Artificial Sequence: Synthetic oligonucleotide
aaauuaggcuaagucuaac

SEQ ID NO: 462453 - RNA, 19 nt, Artificial Sequence
  Description of Artificial Sequence: Synthetic oligonucleotide
aguuucaaaccccacuuca

SEQ ID NO: 462454 - RNA, 19 nt, Artificial Sequence
  Description of Artificial Sequence: Synthetic oligonucleotide
ucgacaacgagcagagacc

SEQ ID NO: 462455 - RNA, 19 nt, Artificial Sequence
  Description of Artificial Sequence: Synthetic oligonucleotide
auaaggcucgggaacagcc

SEQ ID NO: 462456 - RNA, 19 nt, Artificial Sequence
  Description of Artificial Sequence: Synthetic oligonucleotide
ugggucgcuaauuccaagg

SEQ ID NO: 462457 - RNA, 19 nt, Artificial Sequence
  Description of Artificial Sequence: Synthetic oligonucleotide
acacuuauaaggcucggga

SEQ ID NO: 462458 - RNA, 19 nt, Artificial Sequence
  Description of Artificial Sequence: Synthetic oligonucleotide
cagaccuaaguuucaaacc

SEQ ID NO: 462459 - RNA, 19 nt, Artificial Sequence
  Description of Artificial Sequence: Synthetic oligonucleotide
auaaauuaggcuaagucua

SEQ ID NO: 462460 - RNA, 19 nt, Artificial Sequence
  Description of Artificial Sequence: Synthetic oligonucleotide
agaaguaaauuuaucucag

SEQ ID NO: 462461 - RNA, 19 nt, Artificial Sequence
  Description of Artificial Sequence: Synthetic oligonucleotide
uaguauagaacaagauuaa

SEQ ID NO: 462462 - RNA, 19 nt, Artificial Sequence
  Description of Artificial Sequence: Synthetic oligonucleotide
uguauuaaguaggagggau

SEQ ID NO: 462463 - RNA, 19 nt, Artificial Sequence
  Description of Artificial Sequence: Synthetic oligonucleotide
aguuguucaaggccgacga

SEQ ID NO: 462464 - RNA, 19 nt, Artificial Sequence
  Description of Artificial Sequence: Synthetic oligonucleotide
uucaaggccgacgagaagu

SEQ ID NO: 462465 - RNA, 19 nt, Artificial Sequence
  Description of Artificial Sequence: Synthetic oligonucleotide
aguuagaguuuguauauau

SEQ ID NO: 462466 - RNA, 19 nt, Artificial Sequence
  Description of Artificial Sequence: Synthetic oligonucleotide
aacacuuauaaggcucggg

SEQ ID NO: 462467 - RNA, 19 nt, Artificial Sequence
  Description of Artificial Sequence: Synthetic oligonucleotide
uuuguucuggcaagacucc

SEQ ID NO: 462468 - RNA, 19 nt, Artificial Sequence
  Description of Artificial Sequence: Synthetic oligonucleotide
uggacucuauaaacgauac

SEQ ID NO: 462469 - RNA, 19 nt, Artificial Sequence
  Description of Artificial Sequence: Synthetic oligonucleotide
cuuauuucccuaccgauca

SEQ ID NO: 462470 - RNA, 19 nt, Artificial Sequence
  Description of Artificial Sequence: Synthetic oligonucleotide
uccgcaauggaacugucaa

SEQ ID NO: 462471 - RNA, 19 nt, Artificial Sequence
  Description of Artificial Sequence: Synthetic oligonucleotide
uaugacuguagugucaccu

SEQ ID NO: 462472 - RNA, 19 nt, Artificial Sequence
  Description of Artificial Sequence: Synthetic oligonucleotide
uggcuaaaucuuuaaauau

SEQ ID NO: 462473 - RNA, 19 nt, Artificial Sequence
  Description of Artificial Sequence: Synthetic oligonucleotide
gacccuaauuccuuuagca

SEQ ID NO: 462474 - RNA, 19 nt, Artificial Sequence
  Description of Artificial Sequence: Synthetic oligonucleotide
gccuaaaccaauuacacuc

SEQ ID NO: 462475 - RNA, 19 nt, Artificial Sequence
  Description of Artificial Sequence: Synthetic oligonucleotide
ugacugauccgcuggaugu

SEQ ID NO: 462476 - RNA, 19 nt, Artificial Sequence
  Description of Artificial Sequence: Synthetic oligonucleotide
aguauagaacaagauuaag

SEQ ID NO: 462477 - RNA, 19 nt, Artificial Sequence
  Description of Artificial Sequence: Synthetic oligonucleotide
uggcugucaaaugagacga

SEQ ID NO: 462478 - RNA, 19 nt, Artificial Sequence
  Description of Artificial Sequence: Synthetic oligonucleotide
uucuuauuccccacuuaca

SEQ ID NO: 462479 - RNA, 19 nt, Artificial Sequence
  Description of Artificial Sequence: Synthetic oligonucleotide
uauuuguauuaaguaggag

SEQ ID NO: 462480 - RNA, 19 nt, Artificial Sequence
  Description of Artificial Sequence: Synthetic oligonucleotide
aggacaagcgcgaggauac

SEQ ID NO: 462481 - RNA, 19 nt, Artificial Sequence
  Description of Artificial Sequence: Synthetic oligonucleotide
ugggauaaagggcaaucaa

SEQ ID NO: 462482 - RNA, 19 nt, Artificial Sequence
  Description of Artificial Sequence: Synthetic oligonucleotide
cugcacgucuggaugaugc

SEQ ID NO: 462483 - RNA, 19 nt, Artificial Sequence
  Description of Artificial Sequence: Synthetic oligonucleotide
uuaauaaguuccaggucuu

SEQ ID NO: 462484 - RNA, 19 nt, Artificial Sequence
  Description of Artificial Sequence: Synthetic oligonucleotide
acauuaguauagaacaaga

SEQ ID NO: 462485 - RNA, 19 nt, Artificial Sequence
  Description of Artificial Sequence: Synthetic oligonucleotide
ggggcaaagacccuaauuc

SEQ ID NO: 462486 - RNA, 19 nt, Artificial Sequence
  Description of Artificial Sequence: Synthetic oligonucleotide
ggauacacaucuucuugcg

SEQ ID NO: 462487 - RNA, 19 nt, Artificial Sequence
  Description of Artificial Sequence: Synthetic oligonucleotide
uuguucaaggccgacgaga

SEQ ID NO: 462488 - RNA, 19 nt, Artificial Sequence
  Description of Artificial Sequence: Synthetic oligonucleotide
caaaccagauaaccacucc

SEQ ID NO: 462489 - RNA, 19 nt, Artificial Sequence
  Description of Artificial Sequence: Synthetic oligonucleotide
acucuauaaacgauaccag

SEQ ID NO: 462490 - RNA, 19 nt, Artificial Sequence
  Description of Artificial Sequence: Synthetic oligonucleotide
aauuaucacaggacacucu

SEQ ID NO: 462491 - RNA, 19 nt, Artificial Sequence
  Description of Artificial Sequence: Synthetic oligonucleotide
uccaaacgaucccuauuug

SEQ ID NO: 462492 - RNA, 19 nt, Artificial Sequence
  Description of Artificial Sequence: Synthetic oligonucleotide
uuaaacccagacuuucaua

SEQ ID NO: 462493 - RNA, 19 nt, Artificial Sequence
  Description of Artificial Sequence: Synthetic oligonucleotide
acaucgacaacgagcagag

SEQ ID NO: 462494 - RNA, 19 nt, Artificial Sequence
  Description of Artificial Sequence: Synthetic oligonucleotide
auuccgauacaugucuaag

SEQ ID NO: 462495 - RNA, 19 nt, Artificial Sequence
  Description of Artificial Sequence: Synthetic oligonucleotide
aaagacccuaauuccuuua

SEQ ID NO: 462496 - RNA, 19 nt, Artificial Sequence
  Description of Artificial Sequence: Synthetic oligonucleotide
cucgggaacagccuuugac

SEQ ID NO: 462497 - RNA, 19 nt, Artificial Sequence
  Description of Artificial Sequence: Synthetic oligonucleotide
caugucuaagggaccguag

SEQ ID NO: 462498 - RNA, 19 nt, Artificial Sequence
  Description of Artificial Sequence: Synthetic oligonucleotide
gacaacguuuauauuacaa

SEQ ID NO: 462499 - RNA, 19 nt, Artificial Sequence
  Description of Artificial Sequence: Synthetic oligonucleotide
acuuagugugcggggaugg

SEQ ID NO: 462500 - RNA, 19 nt, Artificial Sequence
  Description of Artificial Sequence: Synthetic oligonucleotide
caggaugacuuagugugcg

SEQ ID NO: 462501 - RNA, 19 nt, Artificial Sequence
  Description of Artificial Sequence: Synthetic oligonucleotide
gggauggacucuauaaacg

SEQ ID NO: 462502 - RNA, 19 nt, Artificial Sequence
  Description of Artificial Sequence: Synthetic oligonucleotide
uauuucccuaccgaucaca

SEQ ID NO: 462503 - RNA, 19 nt, Artificial Sequence
  Description of Artificial Sequence: Synthetic oligonucleotide
ucugguacacgcucucuuc

SEQ ID NO: 462504 - RNA, 19 nt, Artificial Sequence
  Description of Artificial Sequence: Synthetic oligonucleotide
uguucuuauuccccacuua

SEQ ID NO: 462505 - RNA, 19 nt, Artificial Sequence
  Description of Artificial Sequence: Synthetic oligonucleotide
uugcuggcauauuguacag

SEQ ID NO: 462506 - RNA, 19 nt, Artificial Sequence
  Description of Artificial Sequence: Synthetic oligonucleotide
agugugcggggauggacuc

SEQ ID NO: 462507 - RNA, 19 nt, Artificial Sequence
  Description of Artificial Sequence: Synthetic oligonucleotide
cuaagucuaacaucacuaa

SEQ ID NO: 462508 - RNA, 19 nt, Artificial Sequence
  Description of Artificial Sequence: Synthetic oligonucleotide
aacauccgcaauggaacug

SEQ ID NO: 462509 - RNA, 19 nt, Artificial Sequence
  Description of Artificial Sequence: Synthetic oligonucleotide
aagugcaaagaaacuuaug

SEQ ID NO: 462510 - RNA, 19 nt, Artificial Sequence
  Description of Artificial Sequence: Synthetic oligonucleotide
agggaaauacacauaaguu

SEQ ID NO: 462511 - RNA, 19 nt, Artificial Sequence
  Description of Artificial Sequence: Synthetic oligonucleotide
ucgcuaauuccaaggacua

SEQ ID NO: 462512 - RNA, 19 nt, Artificial Sequence
  Description of Artificial Sequence: Synthetic oligonucleotide
ugccgaaucgccguuuccc

SEQ ID NO: 462513 - RNA, 19 nt, Artificial Sequence
  Description of Artificial Sequence: Synthetic oligonucleotide
uuguauuaaguaggaggga

SEQ ID NO: 462514 - RNA, 19 nt, Artificial Sequence
  Description of Artificial Sequence: Synthetic oligonucleotide
gauuccgauacaugucuaa

SEQ ID NO: 462515 - RNA, 19 nt, Artificial Sequence
  Description of Artificial Sequence: Synthetic oligonucleotide
ccgcaccucauuuagaagc

SEQ ID NO: 462516 - RNA, 19 nt, Artificial Sequence
  Description of Artificial Sequence: Synthetic oligonucleotide
caucacuaaaccaguauua

SEQ ID NO: 462517 - RNA, 19 nt, Artificial Sequence
  Description of Artificial Sequence: Synthetic oligonucleotide
uaauaaguuccaggucuug

SEQ ID NO: 462518 - RNA, 19 nt, Artificial Sequence
  Description of Artificial Sequence: Synthetic oligonucleotide
cuuauaaggcucgggaaca

SEQ ID NO: 462519 - RNA, 19 nt, Artificial Sequence
  Description of Artificial Sequence: Synthetic oligonucleotide
cuaccgaucacauuaguau

SEQ ID NO: 462520 - RNA, 19 nt, Artificial Sequence
  Description of Artificial Sequence: Synthetic oligonucleotide
caaacgaucccuauuugcu

SEQ ID NO: 462521 - RNA, 19 nt, Artificial Sequence
  Description of Artificial Sequence: Synthetic oligonucleotide
ugccuaauucucccuuucu

SEQ ID NO: 462522 - RNA, 19 nt, Artificial Sequence
  Description of Artificial Sequence: Synthetic oligonucleotide
ucccuaccgaucacauuag

SEQ ID NO: 462523 - RNA, 19 nt, Artificial Sequence
  Description of Artificial Sequence: Synthetic oligonucleotide
augcuaucuaucaggucac

SEQ ID NO: 462524 - RNA, 19 nt, Artificial Sequence
  Description of Artificial Sequence: Synthetic oligonucleotide
uccuuggcgagcugauuug

SEQ ID NO: 462525 - RNA, 19 nt, Artificial Sequence
  Description of Artificial Sequence: Synthetic oligonucleotide
uauaaggcucgggaacagc

SEQ ID NO: 462526 - RNA, 19 nt, Artificial Sequence
  Description of Artificial Sequence: Synthetic oligonucleotide
ggggauggacucuauaaac

SEQ ID NO: 462527 - RNA, 19 nt, Artificial Sequence
  Description of Artificial Sequence: Synthetic oligonucleotide
ccaaacgaucccuauuugc

SEQ ID NO: 462528 - RNA, 19 nt, Artificial Sequence
  Description of Artificial Sequence: Synthetic oligonucleotide
acgaucccuauuugcuuuc

SEQ ID NO: 462529 - RNA, 19 nt, Artificial Sequence
  Description of Artificial Sequence: Synthetic oligonucleotide
auuccaaacgaucccuauu

SEQ ID NO: 462530 - RNA, 19 nt, Artificial Sequence
  Description of Artificial Sequence: Synthetic oligonucleotide
aacacuacgcugaguuuga

SEQ ID NO: 462531 - RNA, 19 nt, Artificial Sequence
  Description of Artificial Sequence: Synthetic oligonucleotide
uuaugacuguagugucacc

SEQ ID NO: 462532 - RNA, 19 nt, Artificial Sequence
  Description of Artificial Sequence: Synthetic oligonucleotide
uuagugugcggggauggac

SEQ ID NO: 462533 - RNA, 19 nt, Artificial Sequence
  Description of Artificial Sequence: Synthetic oligonucleotide
uuauuucccuaccgaucac

SEQ ID NO: 462534 - RNA, 19 nt, Artificial Sequence
  Description of Artificial Sequence: Synthetic oligonucleotide
uuuaucucagaugcucaua

SEQ ID NO: 462535 - RNA, 19 nt, Artificial Sequence
  Description of Artificial Sequence: Synthetic oligonucleotide
cuaacaucacuaaaccagu

SEQ ID NO: 462536 - RNA, 19 nt, Artificial Sequence
  Description of Artificial Sequence: Synthetic oligonucleotide
ugauuguaacauugucaau

SEQ ID NO: 462537 - RNA, 19 nt, Artificial Sequence
  Description of Artificial Sequence: Synthetic oligonucleotide
cuaugcagacagguggaag

SEQ ID NO: 462538 - RNA, 19 nt, Artificial Sequence
  Description of Artificial Sequence: Synthetic oligonucleotide
gucuaagggaccguaggac

SEQ ID NO: 462539 - RNA, 19 nt, Artificial Sequence
  Description of Artificial Sequence: Synthetic oligonucleotide
aaggacuaguuaguaguua

SEQ ID NO: 462540 - RNA, 19 nt, Artificial Sequence
  Description of Artificial Sequence: Synthetic oligonucleotide
agcugauuuguggagugcu

SEQ ID NO: 462541 - RNA, 19 nt, Artificial Sequence
  Description of Artificial Sequence: Synthetic oligonucleotide
ccguaggacaucgacaacg

SEQ ID NO: 462542 - RNA, 19 nt, Artificial Sequence
  Description of Artificial Sequence: Synthetic oligonucleotide
agcaaaccagauaaccacu

SEQ ID NO: 462543 - RNA, 19 nt, Artificial Sequence
  Description of Artificial Sequence: Synthetic oligonucleotide
guuguucaaggccgacgag

SEQ ID NO: 462544 - RNA, 19 nt, Artificial Sequence
  Description of Artificial Sequence: Synthetic oligonucleotide
accagauaaccacucccaa

SEQ ID NO: 462545 - RNA, 19 nt, Artificial Sequence
  Description of Artificial Sequence: Synthetic oligonucleotide
augggucgcuaauuccaag

SEQ ID NO: 462546 - RNA, 19 nt, Artificial Sequence
  Description of Artificial Sequence: Synthetic oligonucleotide
cuuggcgagcugauuugug

SEQ ID NO: 462547 - RNA, 19 nt, Artificial Sequence
  Description of Artificial Sequence: Synthetic oligonucleotide
aaguuagaguuuguauaua

SEQ ID NO: 462548 - RNA, 19 nt, Artificial Sequence
  Description of Artificial Sequence: Synthetic oligonucleotide
uuucagccucgauucacau

SEQ ID NO: 462549 - RNA, 19 nt, Artificial Sequence
  Description of Artificial Sequence: Synthetic oligonucleotide
ggaucaucauggcuaaauc

SEQ ID NO: 462550 - RNA, 19 nt, Artificial Sequence
  Description of Artificial Sequence: Synthetic oligonucleotide
cuaugcuaucuaucagguc

SEQ ID NO: 462551 - RNA, 19 nt, Artificial Sequence
  Description of Artificial Sequence: Synthetic oligonucleotide
cauuaguauagaacaagau

SEQ ID NO: 462552 - RNA, 19 nt, Artificial Sequence
  Description of Artificial Sequence: Synthetic oligonucleotide
aaggccgacgagaagucau

SEQ ID NO: 462553 - RNA, 19 nt, Artificial Sequence
  Description of Artificial Sequence: Synthetic oligonucleotide
aguuaguuucuagcuaaau

SEQ ID NO: 462554 - RNA, 19 nt, Artificial Sequence
  Description of Artificial Sequence: Synthetic oligonucleotide
aaaucaugcugugccuaau

SEQ ID NO: 462555 - RNA, 19 nt, Artificial Sequence
  Description of Artificial Sequence: Synthetic oligonucleotide
aggggcaaagacccuaauu

SEQ ID NO: 462556 - RNA, 19 nt, Artificial Sequence
  Description of Artificial Sequence: Synthetic oligonucleotide
aguuuaacuuaaacccaga

SEQ ID NO: 462557 - RNA, 19 nt, Artificial Sequence
  Description of Artificial Sequence: Synthetic oligonucleotide
auggacucuauaaacgaua

SEQ ID NO: 462558 - RNA, 19 nt, Artificial Sequence
  Description of Artificial Sequence: Synthetic oligonucleotide
gacaagcgcgaggauacac

SEQ ID NO: 462559 - RNA, 19 nt, Artificial Sequence
  Description of Artificial Sequence: Synthetic oligonucleotide
acuuaugcauuugggcccu

SEQ ID NO: 462560 - RNA, 19 nt, Artificial Sequence
  Description of Artificial Sequence: Synthetic oligonucleotide
ggcccuuauuucccuaccg

SEQ ID NO: 462561 - RNA, 19 nt, Artificial Sequence
  Description of Artificial Sequence: Synthetic oligonucleotide
ucacagaccuaaguuucaa

SEQ ID NO: 462562 - RNA, 19 nt, Artificial Sequence
  Description of Artificial Sequence: Synthetic oligonucleotide
ugcacgucuggaugaugcu

SEQ ID NO: 462563 - RNA, 19 nt, Artificial Sequence
  Description of Artificial Sequence: Synthetic oligonucleotide
auuaaguaggagggauggu

SEQ ID NO: 462564 - RNA, 19 nt, Artificial Sequence
  Description of Artificial Sequence: Synthetic oligonucleotide
gacaacgagcagagacccg

SEQ ID NO: 462565 - RNA, 19 nt, Artificial Sequence
  Description of Artificial Sequence: Synthetic oligonucleotide
gaacauccgcaauggaacu

SEQ ID NO: 462566 - RNA, 19 nt, Artificial Sequence
  Description of Artificial Sequence: Synthetic oligonucleotide
acaagcgcgaggauacaca

SEQ ID NO: 462567 - RNA, 19 nt, Artificial Sequence
  Description of Artificial Sequence: Synthetic oligonucleotide
aagcgcgaggauacacauc

SEQ ID NO: 462568 - RNA, 19 nt, Artificial Sequence
  Description of Artificial Sequence: Synthetic oligonucleotide
acacauaaguuaauuccuu

SEQ ID NO: 462569 - RNA, 19 nt, Artificial Sequence
  Description of Artificial Sequence: Synthetic oligonucleotide
gagacgagcugcuccucuc

SEQ ID NO: 462570 - RNA, 19 nt, Artificial Sequence
  Description of Artificial Sequence: Synthetic oligonucleotide
gggaccguaggacaucgac

SEQ ID NO: 462571 - RNA, 19 nt, Artificial Sequence
  Description of Artificial Sequence: Synthetic oligonucleotide
augagacgcuccuucugaa

SEQ ID NO: 462572 - RNA, 19 nt, Artificial Sequence
  Description of Artificial Sequence: Synthetic oligonucleotide
auuucccuaccgaucacau

SEQ ID NO: 462573 - RNA, 19 nt, Artificial Sequence
  Description of Artificial Sequence: Synthetic oligonucleotide
cuuaaacccagacuuucau

SEQ ID NO: 462574 - RNA, 19 nt, Artificial Sequence
  Description of Artificial Sequence: Synthetic oligonucleotide
ccaauuacacucuaccugu

SEQ ID NO: 462575 - RNA, 19 nt, Artificial Sequence
  Description of Artificial Sequence: Synthetic oligonucleotide
caguggcuugacugauccg

SEQ ID NO: 462576 - RNA, 19 nt, Artificial Sequence
  Description of Artificial Sequence: Synthetic oligonucleotide
uuucccuaccgaucacauu

SEQ ID NO: 462577 - RNA, 19 nt, Artificial Sequence
  Description of Artificial Sequence: Synthetic oligonucleotide
gggauuccgauacaugucu

SEQ ID NO: 462578 - RNA, 19 nt, Artificial Sequence
  Description of Artificial Sequence: Synthetic oligonucleotide
caaaugagacgagcugcuc

SEQ ID NO: 462579 - RNA, 19 nt, Artificial Sequence
  Description of Artificial Sequence: Synthetic oligonucleotide
gauggacucuauaaacgau

SEQ ID NO: 462580 - RNA, 19 nt, Artificial Sequence
  Description of Artificial Sequence: Synthetic oligonucleotide
gcuaauuccaaggacuagu

SEQ ID NO: 462581 - RNA, 19 nt, Artificial Sequence
  Description of Artificial Sequence: Synthetic oligonucleotide
caugggucgcuaauuccaa

SEQ ID NO: 462582 - RNA, 19 nt, Artificial Sequence
  Description of Artificial Sequence: Synthetic oligonucleotide
aucgccguuucccucucuu

SEQ ID NO: 462583 - RNA, 19 nt, Artificial Sequence
  Description of Artificial Sequence: Synthetic oligonucleotide
ugcggggauggacucuaua

SEQ ID NO: 462584 - RNA, 19 nt, Artificial Sequence
  Description of Artificial Sequence: Synthetic oligonucleotide
gggcccgggauuccgauac

SEQ ID NO: 462585 - RNA, 19 nt, Artificial Sequence
  Description of Artificial Sequence: Synthetic oligonucleotide
uuaugcauuugggcccuua

SEQ ID NO: 462586 - RNA, 19 nt, Artificial Sequence
  Description of Artificial Sequence: Synthetic oligonucleotide
gggucgcuaauuccaagga

SEQ ID NO: 462587 - RNA, 19 nt, Artificial Sequence
  Description of Artificial Sequence: Synthetic oligonucleotide
cacagaccuaaguuucaaa

SEQ ID NO: 462588 - RNA, 19 nt, Artificial Sequence
  Description of Artificial Sequence: Synthetic oligonucleotide
cugccgaaucgccguuucc

SEQ ID NO: 462589 - RNA, 19 nt, Artificial Sequence
  Description of Artificial Sequence: Synthetic oligonucleotide
ggcccaucugauuguaaca

SEQ ID NO: 462590 - RNA, 19 nt, Artificial Sequence
  Description of Artificial Sequence: Synthetic oligonucleotide
cacucccaagacuguaaga

SEQ ID NO: 462591 - RNA, 19 nt, Artificial Sequence
  Description of Artificial Sequence: Synthetic oligonucleotide
ggcuaagucuaacaucacu

SEQ ID NO: 462592 - RNA, 19 nt, Artificial Sequence
  Description of Artificial Sequence: Synthetic oligonucleotide
cuaagggaccguaggacau

SEQ ID NO: 462593 - RNA, 19 nt, Artificial Sequence
  Description of Artificial Sequence: Synthetic oligonucleotide
cugaaugccuaaaccaauu

SEQ ID NO: 462594 - RNA, 19 nt, Artificial Sequence
  Description of Artificial Sequence: Synthetic oligonucleotide
cauccgcaauggaacuguc

SEQ ID NO: 462595 - RNA, 19 nt, Artificial Sequence
  Description of Artificial Sequence: Synthetic oligonucleotide
agcagagacccgggucgcg

SEQ ID NO: 462596 - RNA, 19 nt, Artificial Sequence
  Description of Artificial Sequence: Synthetic oligonucleotide
gagcagagacccgggucgc

SEQ ID NO: 462597 - RNA, 19 nt, Artificial Sequence
  Description of Artificial Sequence: Synthetic oligonucleotide
cugauuuguggagugcugu

SEQ ID NO: 462598 - RNA, 19 nt, Artificial Sequence
  Description of Artificial Sequence: Synthetic oligonucleotide
agacgagacccagcucuug

SEQ ID NO: 462599 - RNA, 19 nt, Artificial Sequence
  Description of Artificial Sequence: Synthetic oligonucleotide
gcugauuuguggagugcug

SEQ ID NO: 462600 - RNA, 19 nt, Artificial Sequence
  Description of Artificial Sequence: Synthetic oligonucleotide
gcccuuauuucccuaccga

SEQ ID NO: 462601 - RNA, 19 nt, Artificial Sequence
  Description of Artificial Sequence: Synthetic oligonucleotide
ggacaacguuuauauuaca

SEQ ID NO: 462602 - RNA, 19 nt, Artificial Sequence
  Description of Artificial Sequence: Synthetic oligonucleotide
ggaccguaggacaucgaca

SEQ ID NO: 462603 - RNA, 19 nt, Artificial Sequence
  Description of Artificial Sequence: Synthetic oligonucleotide
gccuaauucucccuuucua

SEQ ID NO: 462604 - RNA, 19 nt, Artificial Sequence
  Description of Artificial Sequence: Synthetic oligonucleotide
uugggcccuuauuucccua

SEQ ID NO: 462605 - RNA, 19 nt, Artificial Sequence
  Description of Artificial Sequence: Synthetic oligonucleotide
cgagcugauuuguggagug

SEQ ID NO: 462606 - RNA, 19 nt, Artificial Sequence
  Description of Artificial Sequence: Synthetic oligonucleotide
ccuaccgaucacauuagua

SEQ ID NO: 462607 - RNA, 19 nt, Artificial Sequence
  Description of Artificial Sequence: Synthetic oligonucleotide
caagcgcgaggauacacau

SEQ ID NO: 462608 - RNA, 19 nt, Artificial Sequence
  Description of Artificial Sequence: Synthetic oligonucleotide
ucgccguuucccucucuuu

SEQ ID NO: 462609 - RNA, 19 nt, Artificial Sequence
  Description of Artificial Sequence: Synthetic oligonucleotide
caaggacuaguuaguaguu

SEQ ID NO: 462610 - RNA, 19 nt, Artificial Sequence
  Description of Artificial Sequence: Synthetic oligonucleotide
gaccccuuggaaacucaaa

SEQ ID NO: 462611 - RNA, 19 nt, Artificial Sequence
  Description of Artificial Sequence: Synthetic oligonucleotide
gaggcaaccgcaccucauu

SEQ ID NO: 462612 - RNA, 19 nt, Artificial Sequence
  Description of Artificial Sequence: Synthetic oligonucleotide
guaggggcaaagacccuaa

SEQ ID NO: 462613 - RNA, 19 nt, Artificial Sequence
  Description of Artificial Sequence: Synthetic oligonucleotide
ggauguugccacugcacgu

SEQ ID NO: 462614 - RNA, 19 nt, Artificial Sequence
  Description of Artificial Sequence: Synthetic oligonucleotide
aaaccccacuucagucuaa

SEQ ID NO: 462615 - RNA, 19 nt, Artificial Sequence
  Description of Artificial Sequence: Synthetic oligonucleotide
gccgacgagaagucauuca

SEQ ID NO: 462616 - RNA, 19 nt, Artificial Sequence
  Description of Artificial Sequence: Synthetic oligonucleotide
gcuugacugauccgcugga

SEQ ID NO: 462617 - RNA, 19 nt, Artificial Sequence
  Description of Artificial Sequence: Synthetic oligonucleotide
cuuagugugcggggaugga

SEQ ID NO: 462618 - RNA, 19 nt, Artificial Sequence
  Description of Artificial Sequence: Synthetic oligonucleotide
ccgggauuccgauacaugu

SEQ ID NO: 462619 - RNA, 19 nt, Artificial Sequence
  Description of Artificial Sequence: Synthetic oligonucleotide
agaccccuuggaaacucaa

SEQ ID NO: 462620 - RNA, 19 nt, Artificial Sequence
  Description of Artificial Sequence: Synthetic oligonucleotide
cccgggauuccgauacaug

SEQ ID NO: 462621 - RNA, 19 nt, Artificial Sequence
  Description of Artificial Sequence: Synthetic oligonucleotide
cgggauuccgauacauguc

SEQ ID NO: 462622 - RNA, 19 nt, Artificial Sequence
  Description of Artificial Sequence: Synthetic oligonucleotide
gcgaggauacacaucuucu

SEQ ID NO: 462623 - RNA, 19 nt, Artificial Sequence
  Description of Artificial Sequence: Synthetic oligonucleotide
caaggccgacgagaaguca

SEQ ID NO: 462624 - RNA, 19 nt, Artificial Sequence
  Description of Artificial Sequence: Synthetic oligonucleotide
ccgaaucgccguuucccuc

SEQ ID NO: 462625 - RNA, 19 nt, Artificial Sequence
  Description of Artificial Sequence: Synthetic oligonucleotide
caauuacacucuaccuguu

SEQ ID NO: 462626 - RNA, 19 nt, Artificial Sequence
  Description of Artificial Sequence: Synthetic oligonucleotide
aggccgacgagaagucauu

SEQ ID NO: 462627 - RNA, 19 nt, Artificial Sequence
  Description of Artificial Sequence: Synthetic oligonucleotide
gcccaucugauuguaacau

SEQ ID NO: 462628 - RNA, 19 nt, Artificial Sequence
  Description of Artificial Sequence: Synthetic oligonucleotide
cgcuaauuccaaggacuag

SEQ ID NO: 462629 - RNA, 19 nt, Artificial Sequence
  Description of Artificial Sequence: Synthetic oligonucleotide
ggccgacgagaagucauuc

SEQ ID NO: 462630 - RNA, 19 nt, Artificial Sequence
  Description of Artificial Sequence: Synthetic oligonucleotide
gacugauccgcuggauguu

SEQ ID NO: 462631 - RNA, 19 nt, Artificial Sequence
  Description of Artificial Sequence: Synthetic oligonucleotide
gccgaaucgccguuucccu

SEQ ID NO: 462632 - RNA, 19 nt, Artificial Sequence
  Description of Artificial Sequence: Synthetic oligonucleotide
gcagcugaucaguggcucu

SEQ ID NO: 462633 - RNA, 19 nt, Artificial Sequence
  Description of Artificial Sequence: Synthetic oligonucleotide
cuugacugauccgcuggau

SEQ ID NO: 462634 - RNA, 19 nt, Artificial Sequence
  Description of Artificial Sequence: Synthetic oligonucleotide
ggauuccgauacaugucua

SEQ ID NO: 462635 - RNA, 19 nt, Artificial Sequence
  Description of Artificial Sequence: Synthetic oligonucleotide
cgaucccuauuugcuuucc

SEQ ID NO: 462636 - RNA, 19 nt, Artificial Sequence
  Description of Artificial Sequence: Synthetic oligonucleotide
gacccgggucgcgcuucgc

SEQ ID NO: 462637 - RNA, 19 nt, Artificial Sequence
  Description of Artificial Sequence: Synthetic oligonucleotide
caucgacaacgagcagaga

SEQ ID NO: 462638 - RNA, 19 nt, Artificial Sequence
  Description of Artificial Sequence: Synthetic oligonucleotide
cuaccuguucuaggccugu

SEQ ID NO: 462639 - RNA, 19 nt, Artificial Sequence
  Description of Artificial Sequence: Synthetic oligonucleotide
gcgagcugauuuguggagu

SEQ ID NO: 462640 - RNA, 19 nt, Artificial Sequence
  Description of Artificial Sequence: Synthetic oligonucleotide
cagacgagacccagcucuu

SEQ ID NO: 462641 - RNA, 19 nt, Artificial Sequence
  Description of Artificial Sequence: Synthetic oligonucleotide
cgaaucgccguuucccucu

SEQ ID NO: 462642 - RNA, 19 nt, Artificial Sequence
  Description of Artificial Sequence: Synthetic oligonucleotide
ggacaagcgcgaggauaca

SEQ ID NO: 462643 - RNA, 19 nt, Artificial Sequence
  Description of Artificial Sequence: Synthetic oligonucleotide
gggucgcgcuucgcggcgc

SEQ ID NO: 462644 - RNA, 19 nt, Artificial Sequence
  Description of Artificial Sequence: Synthetic oligonucleotide
ccuuggcgagcugauuugu

SEQ ID NO: 462645 - RNA, 19 nt, Artificial Sequence
  Description of Artificial Sequence: Synthetic oligonucleotide
ccguuucccucucuuuaau

SEQ ID NO: 462646 - RNA, 19 nt, Artificial Sequence
  Description of Artificial Sequence: Synthetic oligonucleotide
ggucgcgcuucgcggcgcu

SEQ ID NO: 462647 - RNA, 19 nt, Artificial Sequence
  Description of Artificial Sequence: Synthetic oligonucleotide
gugcggggauggacucuau

SEQ ID NO: 462648 - RNA, 19 nt, Artificial Sequence
  Description of Artificial Sequence: Synthetic oligonucleotide
aagucuaaaauacaggcgc

SEQ ID NO: 462649 - RNA, 19 nt, Artificial Sequence
  Description of Artificial Sequence: Synthetic oligonucleotide
aaugucacgugacagacac

SEQ ID NO: 462650 - RNA, 19 nt, Artificial Sequence
  Description of Artificial Sequence: Synthetic oligonucleotide
ugcagugugauucagacgc

SEQ ID NO: 462651 - RNA, 19 nt, Artificial Sequence
  Description of Artificial Sequence: Synthetic oligonucleotide
aguaaaucaauaaaagcac

SEQ ID NO: 462652 - RNA, 19 nt, Artificial Sequence
  Description of Artificial Sequence: Synthetic oligonucleotide
uaauguaggauacuuggca

SEQ ID NO: 462653 - RNA, 19 nt, Artificial Sequence
  Description of Artificial Sequence: Synthetic oligonucleotide
uaaggauucguguagaaau

SEQ ID NO: 462654 - RNA, 19 nt, Artificial Sequence
  Description of Artificial Sequence: Synthetic oligonucleotide
accgacauuaacucgcgcc

SEQ ID NO: 462655 - RNA, 19 nt, Artificial Sequence
  Description of Artificial Sequence: Synthetic oligonucleotide
ucugacucccgaaauauca

SEQ ID NO: 462656 - RNA, 19 nt, Artificial Sequence
  Description of Artificial Sequence: Synthetic oligonucleotide
uuggcaauaggacuguggc

SEQ ID NO: 462657 - RNA, 19 nt, Artificial Sequence
  Description of Artificial Sequence: Synthetic oligonucleotide
ucaaauuccaagagcgcag

SEQ ID NO: 462658 - RNA, 19 nt, Artificial Sequence
  Description of Artificial Sequence: Synthetic oligonucleotide
auuaacucgcgccuccgcc

SEQ ID NO: 462659 - RNA, 19 nt, Artificial Sequence
  Description of Artificial Sequence: Synthetic oligonucleotide
ucuaaaauacaggcgcucg

SEQ ID NO: 462660 - RNA, 19 nt, Artificial Sequence
  Description of Artificial Sequence: Synthetic oligonucleotide
ucuccuuacuccagcaugg

SEQ ID NO: 462661 - RNA, 19 nt, Artificial Sequence
  Description of Artificial Sequence: Synthetic oligonucleotide
aaacugugaagucuaaaau

SEQ ID NO: 462662 - RNA, 19 nt, Artificial Sequence
  Description of Artificial Sequence: Synthetic oligonucleotide
gaaaccgacauuaacucgc

SEQ ID NO: 462663 - RNA, 19 nt, Artificial Sequence
  Description of Artificial Sequence: Synthetic oligonucleotide
uucagaaguaaaucaauaa

SEQ ID NO: 462664 - RNA, 19 nt, Artificial Sequence
  Description of Artificial Sequence: Synthetic oligonucleotide
ugaccauuugcacucagga

SEQ ID NO: 462665 - RNA, 19 nt, Artificial Sequence
  Description of Artificial Sequence: Synthetic oligonucleotide
gugaauucuagggaaaccg

SEQ ID NO: 462666 - RNA, 19 nt, Artificial Sequence
  Description of Artificial Sequence: Synthetic oligonucleotide
guaugugaggcuuuuccgg

SEQ ID NO: 462667 - RNA, 19 nt, Artificial Sequence
  Description of Artificial Sequence: Synthetic oligonucleotide
agugacaagcugcuaguac

SEQ ID NO: 462668 - RNA, 19 nt, Artificial Sequence
  Description of Artificial Sequence: Synthetic oligonucleotide
ucuacaaugucacgugaca

SEQ ID NO: 462669 - RNA, 19 nt, Artificial Sequence
  Description of Artificial Sequence: Synthetic oligonucleotide
augguuuuaauguaggaua

SEQ ID NO: 462670 - RNA, 19 nt, Artificial Sequence
  Description of Artificial Sequence: Synthetic oligonucleotide
gauuaaacccaauaugucu

SEQ ID NO: 462671 - RNA, 19 nt, Artificial Sequence
  Description of Artificial Sequence: Synthetic oligonucleotide
ugauuaaacccaauauguc

SEQ ID NO: 462672 - RNA, 19 nt, Artificial Sequence
  Description of Artificial Sequence: Synthetic oligonucleotide
uuauugcuuaggaaccgag

SEQ ID NO: 462673 - RNA, 19 nt, Artificial Sequence
  Description of Artificial Sequence: Synthetic oligonucleotide
acagacacgacagugaggu

SEQ ID NO: 462674 - RNA, 19 nt, Artificial Sequence
  Description of Artificial Sequence: Synthetic oligonucleotide
uucucccacgagauuaugg

SEQ ID NO: 462675 - RNA, 19 nt, Artificial Sequence
  Description of Artificial Sequence: Synthetic oligonucleotide
uucugucgagcacauagcc

SEQ ID NO: 462676 - RNA, 19 nt, Artificial Sequence
  Description of Artificial Sequence: Synthetic oligonucleotide
uuuuccggagguccggagg

SEQ ID NO: 462677 - RNA, 19 nt, Artificial Sequence
  Description of Artificial Sequence: Synthetic oligonucleotide
guagagucagaccucgggg

SEQ ID NO: 462678 - RNA, 19 nt, Artificial Sequence
  Description of Artificial Sequence: Synthetic oligonucleotide
cuagcuauaaacuucacau

SEQ ID NO: 462679 - RNA, 19 nt, Artificial Sequence
  Description of Artificial Sequence: Synthetic oligonucleotide
ugucacgugacagacacga

SEQ ID NO: 462680 - RNA, 19 nt, Artificial Sequence
  Description of Artificial Sequence: Synthetic oligonucleotide
ugaauucuagggaaaccga

SEQ ID NO: 462681 - RNA, 19 nt, Artificial Sequence
  Description of Artificial Sequence: Synthetic oligonucleotide
uaugguuuuaauguaggau

SEQ ID NO: 462682 - RNA, 19 nt, Artificial Sequence
  Description of Artificial Sequence: Synthetic oligonucleotide
cuaaaauacaggcgcucgg

SEQ ID NO: 462683 - RNA, 19 nt, Artificial Sequence
  Description of Artificial Sequence: Synthetic oligonucleotide
uaaaauacaggcgcucggc

SEQ ID NO: 462684 - RNA, 19 nt, Artificial Sequence
  Description of Artificial Sequence: Synthetic oligonucleotide
cacccgaguacacugaggg

SEQ ID NO: 462685 - RNA, 19 nt, Artificial Sequence
  Description of Artificial Sequence: Synthetic oligonucleotide
gcuagaagcgaucuguggg

SEQ ID NO: 462686 - RNA, 19 nt, Artificial Sequence
  Description of Artificial Sequence: Synthetic oligonucleotide
ugucuguuagaguuuuggc

SEQ ID NO: 462687 - RNA, 19 nt, Artificial Sequence
  Description of Artificial Sequence: Synthetic oligonucleotide
cacgugacagacacgacag

SEQ ID NO: 462688 - RNA, 19 nt, Artificial Sequence
  Description of Artificial Sequence: Synthetic oligonucleotide
ucgaugauucugucgagca

SEQ ID NO: 462689 - RNA, 19 nt, Artificial Sequence
  Description of Artificial Sequence: Synthetic oligonucleotide
uaauucucccacgagauua

SEQ ID NO: 462690 - RNA, 19 nt, Artificial Sequence
  Description of Artificial Sequence: Synthetic oligonucleotide
ugugauucagacgccaugu

SEQ ID NO: 462691 - RNA, 19 nt, Artificial Sequence
  Description of Artificial Sequence: Synthetic oligonucleotide
uuuucaaaucgcuggucga

SEQ ID NO: 462692 - RNA, 19 nt, Artificial Sequence
  Description of Artificial Sequence: Synthetic oligonucleotide
gaugauucugucgagcaca

SEQ ID NO: 462693 - RNA, 19 nt, Artificial Sequence
  Description of Artificial Sequence: Synthetic oligonucleotide
ccuuacuccagcaugggcg

SEQ ID NO: 462694 - RNA, 19 nt, Artificial Sequence
  Description of Artificial Sequence: Synthetic oligonucleotide
ucucccacgagauuauggu

SEQ ID NO: 462695 - RNA, 19 nt, Artificial Sequence
  Description of Artificial Sequence: Synthetic oligonucleotide
cuuaagaaccagcuccuug

SEQ ID NO: 462696 - RNA, 19 nt, Artificial Sequence
  Description of Artificial Sequence: Synthetic oligonucleotide
aacccaauaugucuacaau

SEQ ID NO: 462697 - RNA, 19 nt, Artificial Sequence
  Description of Artificial Sequence: Synthetic oligonucleotide
gccacguuuacacacagcc

SEQ ID NO: 462698 - RNA, 19 nt, Artificial Sequence
  Description of Artificial Sequence: Synthetic oligonucleotide
ggaugaguuggauacacug

SEQ ID NO: 462699 - RNA, 19 nt, Artificial Sequence
  Description of Artificial Sequence: Synthetic oligonucleotide
uguacgaggcuacuucuaa

SEQ ID NO: 462700 - RNA, 19 nt, Artificial Sequence
  Description of Artificial Sequence: Synthetic oligonucleotide
ucaaaucgcuggucgauga

SEQ ID NO: 462701 - RNA, 19 nt, Artificial Sequence
  Description of Artificial Sequence: Synthetic oligonucleotide
acgaggcuacuucuaauuc

SEQ ID NO: 462702 - RNA, 19 nt, Artificial Sequence
  Description of Artificial Sequence: Synthetic oligonucleotide
aaccgacauuaacucgcgc

SEQ ID NO: 462703 - RNA, 19 nt, Artificial Sequence
  Description of Artificial Sequence: Synthetic oligonucleotide
acagacaaccgcugcggac

SEQ ID NO: 462704 - RNA, 19 nt, Artificial Sequence
  Description of Artificial Sequence: Synthetic oligonucleotide
guggccuuugugcagagug

SEQ ID NO: 462705 - RNA, 19 nt, Artificial Sequence
  Description of Artificial Sequence: Synthetic oligonucleotide
uagggaaaccgacauuaac

SEQ ID NO: 462706 - RNA, 19 nt, Artificial Sequence
  Description of Artificial Sequence: Synthetic oligonucleotide
gacauuaacucgcgccucc

SEQ ID NO: 462707 - RNA, 19 nt, Artificial Sequence
  Description of Artificial Sequence: Synthetic oligonucleotide
aaauuccaagagcgcagug

SEQ ID NO: 462708 - RNA, 19 nt, Artificial Sequence
  Description of Artificial Sequence: Synthetic oligonucleotide
cucccaugcagacauuagg

SEQ ID NO: 462709 - RNA, 19 nt, Artificial Sequence
  Description of Artificial Sequence: Synthetic oligonucleotide
auucagacgccauguaaca

SEQ ID NO: 462710 - RNA, 19 nt, Artificial Sequence
  Description of Artificial Sequence: Synthetic oligonucleotide
gaauucuagggaaaccgac

SEQ ID NO: 462711 - RNA, 19 nt, Artificial Sequence
  Description of Artificial Sequence: Synthetic oligonucleotide
uuaacucgcgccuccgccc

SEQ ID NO: 462712 - RNA, 19 nt, Artificial Sequence
  Description of Artificial Sequence: Synthetic oligonucleotide
accgcguccugaugaagcc

SEQ ID NO: 462713 - RNA, 19 nt, Artificial Sequence
  Description of Artificial Sequence: Synthetic oligonucleotide
ucccacgagauuaugguuu

SEQ ID NO: 462714 - RNA, 19 nt, Artificial Sequence
  Description of Artificial Sequence: Synthetic oligonucleotide
agagugacaagcugcuagu

SEQ ID NO: 462715 - RNA, 19 nt, Artificial Sequence
  Description of Artificial Sequence: Synthetic oligonucleotide
ucucccaugcagacauuag

SEQ ID NO: 462716 - RNA, 19 nt, Artificial Sequence
  Description of Artificial Sequence: Synthetic oligonucleotide
aguguacgaggcuacuucu

SEQ ID NO: 462717 - RNA, 19 nt, Artificial Sequence
  Description of Artificial Sequence: Synthetic oligonucleotide
ugcuuaggaaccgagcagu

SEQ ID NO: 462718 - RNA, 19 nt, Artificial Sequence
  Description of Artificial Sequence: Synthetic oligonucleotide
cugugggaaguguacgagg

SEQ ID NO: 462719 - RNA, 19 nt, Artificial Sequence
  Description of Artificial Sequence: Synthetic oligonucleotide
ggaaaccgacauuaacucg

SEQ ID NO: 462720 - RNA, 19 nt, Artificial Sequence
  Description of Artificial Sequence: Synthetic oligonucleotide
ugugggaacuucuccuuac

SEQ ID NO: 462721 - RNA, 19 nt, Artificial Sequence
  Description of Artificial Sequence: Synthetic oligonucleotide
ggaacuguaguguucagaa

SEQ ID NO: 462722 - RNA, 19 nt, Artificial Sequence
  Description of Artificial Sequence: Synthetic oligonucleotide
aacaccggcuuguggucuc

SEQ ID NO: 462723 - RNA, 19 nt, Artificial Sequence
  Description of Artificial Sequence: Synthetic oligonucleotide
uguggggccagccgucuag

SEQ ID NO: 462724 - RNA, 19 nt, Artificial Sequence
  Description of Artificial Sequence: Synthetic oligonucleotide
gucaaauuccaagagcgca

SEQ ID NO: 462725 - RNA, 19 nt, Artificial Sequence
  Description of Artificial Sequence: Synthetic oligonucleotide
guuagaguuuuggcaauag

SEQ ID NO: 462726 - RNA, 19 nt, Artificial Sequence
  Description of Artificial Sequence: Synthetic oligonucleotide
ugacucccgaaauaucaac

SEQ ID NO: 462727 - RNA, 19 nt, Artificial Sequence
  Description of Artificial Sequence: Synthetic oligonucleotide
uacgaggcuacuucuaauu

SEQ ID NO: 462728 - RNA, 19 nt, Artificial Sequence
  Description of Artificial Sequence: Synthetic oligonucleotide
uccuuacuccagcaugggc

SEQ ID NO: 462729 - RNA, 19 nt, Artificial Sequence
  Description of Artificial Sequence: Synthetic oligonucleotide
aaccgcugcggacauggca

SEQ ID NO: 462730 - RNA, 19 nt, Artificial Sequence
  Description of Artificial Sequence: Synthetic oligonucleotide
agacacgacagugagguau

SEQ ID NO: 462731 - RNA, 19 nt, Artificial Sequence
  Description of Artificial Sequence: Synthetic oligonucleotide
aagagcgcagugccguugu

SEQ ID NO: 462732 - RNA, 19 nt, Artificial Sequence
  Description of Artificial Sequence: Synthetic oligonucleotide
cuagaagcgaucuguggga

SEQ ID NO: 462733 - RNA, 19 nt, Artificial Sequence
  Description of Artificial Sequence: Synthetic oligonucleotide
agguccggaggcugaagcg

SEQ ID NO: 462734 - RNA, 19 nt, Artificial Sequence
  Description of Artificial Sequence: Synthetic oligonucleotide
agcgcagugccguuguugu

SEQ ID NO: 462735 - RNA, 19 nt, Artificial Sequence
  Description of Artificial Sequence: Synthetic oligonucleotide
ucauauagucuguccuuaa

SEQ ID NO: 462736 - RNA, 19 nt, Artificial Sequence
  Description of Artificial Sequence: Synthetic oligonucleotide
cgagauuaugguuuuaaug

SEQ ID NO: 462737 - RNA, 19 nt, Artificial Sequence
  Description of Artificial Sequence: Synthetic oligonucleotide
uuccuagugccgugaagug

SEQ ID NO: 462738 - RNA, 19 nt, Artificial Sequence
  Description of Artificial Sequence: Synthetic oligonucleotide
auuaggcccgaugugguca

SEQ ID NO: 462739 - RNA, 19 nt, Artificial Sequence
  Description of Artificial Sequence: Synthetic oligonucleotide
aaguguccgaauagaucuc

SEQ ID NO: 462740 - RNA, 19 nt, Artificial Sequence
  Description of Artificial Sequence: Synthetic oligonucleotide
caccgcguccugaugaagc

SEQ ID NO: 462741 - RNA, 19 nt, Artificial Sequence
  Description of Artificial Sequence: Synthetic oligonucleotide
uuaggggccccucuccccu

SEQ ID NO: 462742 - RNA, 19 nt, Artificial Sequence
  Description of Artificial Sequence: Synthetic oligonucleotide
aguaagggcaacaggcugu

SEQ ID NO: 462743 - RNA, 19 nt, Artificial Sequence
  Description of Artificial Sequence: Synthetic oligonucleotide
aaguuggaugcaucaugaa

SEQ ID NO: 462744 - RNA, 19 nt, Artificial Sequence
  Description of Artificial Sequence: Synthetic oligonucleotide
acucccgaaauaucaacuu

SEQ ID NO: 462745 - RNA, 19 nt, Artificial Sequence
  Description of Artificial Sequence: Synthetic oligonucleotide
ugggcgugagguuuaccug

SEQ ID NO: 462746 - RNA, 19 nt, Artificial Sequence
  Description of Artificial Sequence: Synthetic oligonucleotide
agaagcgaucugugggaag

SEQ ID NO: 462747 - RNA, 19 nt, Artificial Sequence
  Description of Artificial Sequence: Synthetic oligonucleotide
aggauucgaucacaccaug

SEQ ID NO: 462748 - RNA, 19 nt, Artificial Sequence
  Description of Artificial Sequence: Synthetic oligonucleotide
cuuccgugguacucagugc

SEQ ID NO: 462749 - RNA, 19 nt, Artificial Sequence
  Description of Artificial Sequence: Synthetic oligonucleotide
cugaagcgaaguguggggc

SEQ ID NO: 462750 - RNA, 19 nt, Artificial Sequence
  Description of Artificial Sequence: Synthetic oligonucleotide
gcugaagcgaagugugggg

SEQ ID NO: 462751 - RNA, 19 nt, Artificial Sequence
  Description of Artificial Sequence: Synthetic oligonucleotide
uucaagcagacugcgguuc

SEQ ID NO: 462752 - RNA, 19 nt, Artificial Sequence
  Description of Artificial Sequence: Synthetic oligonucleotide
acgagauuaugguuuuaau

SEQ ID NO: 462753 - RNA, 19 nt, Artificial Sequence
  Description of Artificial Sequence: Synthetic oligonucleotide
ugcgauucggaaggccagg

SEQ ID NO: 462754 - RNA, 19 nt, Artificial Sequence
  Description of Artificial Sequence: Synthetic oligonucleotide
acgccauguaacauggcag

SEQ ID NO: 462755 - RNA, 19 nt, Artificial Sequence
  Description of Artificial Sequence: Synthetic oligonucleotide
gacacgacagugagguaug

SEQ ID NO: 462756 - RNA, 19 nt, Artificial Sequence
  Description of Artificial Sequence: Synthetic oligonucleotide
ugggaaguguacgaggcua

SEQ ID NO: 462757 - RNA, 19 nt, Artificial Sequence
  Description of Artificial Sequence: Synthetic oligonucleotide
cuuaggggccccucucccc

SEQ ID NO: 462758 - RNA, 19 nt, Artificial Sequence
  Description of Artificial Sequence: Synthetic oligonucleotide
acauuaacucgcgccuccg

SEQ ID NO: 462759 - RNA, 19 nt, Artificial Sequence
  Description of Artificial Sequence: Synthetic oligonucleotide
cauuaacucgcgccuccgc

SEQ ID NO: 462760 - RNA, 19 nt, Artificial Sequence
  Description of Artificial Sequence: Synthetic oligonucleotide
acgguuuacaaaauucuua

SEQ ID NO: 462761 - RNA, 19 nt, Artificial Sequence
  Description of Artificial Sequence: Synthetic oligonucleotide
ugccugacacccgaguaca

SEQ ID NO: 462762 - RNA, 19 nt, Artificial Sequence
  Description of Artificial Sequence: Synthetic oligonucleotide
ugggcgugcucuccaaagu

SEQ ID NO: 462763 - RNA, 19 nt, Artificial Sequence
  Description of Artificial Sequence: Synthetic oligonucleotide
aauucucccacgagauuau

SEQ ID NO: 462764 - RNA, 19 nt, Artificial Sequence
  Description of Artificial Sequence: Synthetic oligonucleotide
aagguacacccaggcuagc

SEQ ID NO: 462765 - RNA, 19 nt, Artificial Sequence
  Description of Artificial Sequence: Synthetic oligonucleotide
acccgaguacacugagggg

SEQ ID NO: 462766 - RNA, 19 nt, Artificial Sequence
  Description of Artificial Sequence: Synthetic oligonucleotide
ugccugcuuaggacacucg

SEQ ID NO: 462767 - RNA, 19 nt, Artificial Sequence
  Description of Artificial Sequence: Synthetic oligonucleotide
gucgaugauucugucgagc

SEQ ID NO: 462768 - RNA, 19 nt, Artificial Sequence
  Description of Artificial Sequence: Synthetic oligonucleotide
agucuaaaauacaggcgcu

SEQ ID NO: 462769 - RNA, 19 nt, Artificial Sequence
  Description of Artificial Sequence: Synthetic oligonucleotide
gcgaccauggcagucacag

SEQ ID NO: 462770 - RNA, 19 nt, Artificial Sequence
  Description of Artificial Sequence: Synthetic oligonucleotide
gggcucuaaauggagaagc

SEQ ID NO: 462771 - RNA, 19 nt, Artificial Sequence
  Description of Artificial Sequence: Synthetic oligonucleotide
cacgcugugucuccucagc

SEQ ID NO: 462772 - RNA, 19 nt, Artificial Sequence
  Description of Artificial Sequence: Synthetic oligonucleotide
uguccgaauagaucuccuu

SEQ ID NO: 462773 - RNA, 19 nt, Artificial Sequence
  Description of Artificial Sequence: Synthetic oligonucleotide
gcaguagagucagaccucg

SEQ ID NO: 462774 - RNA, 19 nt, Artificial Sequence
  Description of Artificial Sequence: Synthetic oligonucleotide
cacccaucgcuucucugcc

SEQ ID NO: 462775 - RNA, 19 nt, Artificial Sequence
  Description of Artificial Sequence: Synthetic oligonucleotide
ucgcuggucgaugauucug

SEQ ID NO: 462776 - RNA, 19 nt, Artificial Sequence
  Description of Artificial Sequence: Synthetic oligonucleotide
ucucaaggcgcuggcaccu

SEQ ID NO: 462777 - RNA, 19 nt, Artificial Sequence
  Description of Artificial Sequence: Synthetic oligonucleotide
cuagugcccggcacacucc

SEQ ID NO: 462778 - RNA, 19 nt, Artificial Sequence
  Description of Artificial Sequence: Synthetic oligonucleotide
aggugcgauucggaaggcc

SEQ ID NO: 462779 - RNA, 19 nt, Artificial Sequence
  Description of Artificial Sequence: Synthetic oligonucleotide
ccuuccgugguacucagug

SEQ ID NO: 462780 - RNA, 19 nt, Artificial Sequence
  Description of Artificial Sequence: Synthetic oligonucleotide
cuuuuccggagguccggag

SEQ ID NO: 462781 - RNA, 19 nt, Artificial Sequence
  Description of Artificial Sequence: Synthetic oligonucleotide
gcaagcagcgaccauggca

SEQ ID NO: 462782 - RNA, 19 nt, Artificial Sequence
  Description of Artificial Sequence: Synthetic oligonucleotide
acgcuggacaccuggggcu

SEQ ID NO: 462783 - RNA, 19 nt, Artificial Sequence
  Description of Artificial Sequence: Synthetic oligonucleotide
gaagcgaucugugggaagu

SEQ ID NO: 462784 - RNA, 19 nt, Artificial Sequence
  Description of Artificial Sequence: Synthetic oligonucleotide
cccgaguacacugaggggc

SEQ ID NO: 462785 - RNA, 19 nt, Artificial Sequence
  Description of Artificial Sequence: Synthetic oligonucleotide
gugccugacacccgaguac

SEQ ID NO: 462786 - RNA, 19 nt, Artificial Sequence
  Description of Artificial Sequence: Synthetic oligonucleotide
gauuuggaauccaggcgga

SEQ ID NO: 462787 - RNA, 19 nt, Artificial Sequence
  Description of Artificial Sequence: Synthetic oligonucleotide
gggcgugagguuuaccugc

SEQ ID NO: 462788 - RNA, 19 nt, Artificial Sequence
  Description of Artificial Sequence: Synthetic oligonucleotide
ucucugccacguuuacaca

SEQ ID NO: 462789 - RNA, 19 nt, Artificial Sequence
  Description of Artificial Sequence: Synthetic oligonucleotide
caucguggccuuugugcag

SEQ ID NO: 462790 - RNA, 19 nt, Artificial Sequence
  Description of Artificial Sequence: Synthetic oligonucleotide
uagugcccggcacacuccu

SEQ ID NO: 462791 - RNA, 19 nt, Artificial Sequence
  Description of Artificial Sequence: Synthetic oligonucleotide
ugccccaggugcgauucgg

SEQ ID NO: 462792 - RNA, 19 nt, Artificial Sequence
  Description of Artificial Sequence: Synthetic oligonucleotide
agacugcgguucugccugc

SEQ ID NO: 462793 - RNA, 19 nt, Artificial Sequence
  Description of Artificial Sequence: Synthetic oligonucleotide
agacaacuccuugucaaau

SEQ ID NO: 462794 - RNA, 19 nt, Artificial Sequence
  Description of Artificial Sequence: Synthetic oligonucleotide
aguuuugguaagauuuaua

SEQ ID NO: 462795 - RNA, 19 nt, Artificial Sequence
  Description of Artificial Sequence: Synthetic oligonucleotide
ucgugcacucauacuggaa

SEQ ID NO: 462796 - RNA, 19 nt, Artificial Sequence
  Description of Artificial Sequence: Synthetic oligonucleotide
cauugucugacucccgaaa

SEQ ID NO: 462797 - RNA, 19 nt, Artificial Sequence
  Description of Artificial Sequence: Synthetic oligonucleotide
gaagcgaaguguggggcca

SEQ ID NO: 462798 - RNA, 19 nt, Artificial Sequence
  Description of Artificial Sequence: Synthetic oligonucleotide
cccgaaauaucaacuuuac

SEQ ID NO: 462799 - RNA, 19 nt, Artificial Sequence
  Description of Artificial Sequence: Synthetic oligonucleotide
cagacaaccgcugcggaca

SEQ ID NO: 462800 - RNA, 19 nt, Artificial Sequence
  Description of Artificial Sequence: Synthetic oligonucleotide
agucagcaaugcaccaccg

SEQ ID NO: 462801 - RNA, 19 nt, Artificial Sequence
  Description of Artificial Sequence: Synthetic oligonucleotide
uucagacgccauguaacau

SEQ ID NO: 462802 - RNA, 19 nt, Artificial Sequence
  Description of Artificial Sequence: Synthetic oligonucleotide
cuugugccugacacccgag

SEQ ID NO: 462803 - RNA, 19 nt, Artificial Sequence
  Description of Artificial Sequence: Synthetic oligonucleotide
uagaagcgaucugugggaa

SEQ ID NO: 462804 - RNA, 19 nt, Artificial Sequence
  Description of Artificial Sequence: Synthetic oligonucleotide
caguagagucagaccucgg

SEQ ID NO: 462805 - RNA, 19 nt, Artificial Sequence
  Description of Artificial Sequence: Synthetic oligonucleotide
ccgaauagaucuccuugcc

SEQ ID NO: 462806 - RNA, 19 nt, Artificial Sequence
  Description of Artificial Sequence: Synthetic oligonucleotide
gcuugagcgcacauggcag

SEQ ID NO: 462807 - RNA, 19 nt, Artificial Sequence
  Description of Artificial Sequence: Synthetic oligonucleotide
gacucccgaaauaucaacu

SEQ ID NO: 462808 - RNA, 19 nt, Artificial Sequence
  Description of Artificial Sequence: Synthetic oligonucleotide
gagcgcagugccguuguug

SEQ ID NO: 462809 - RNA, 19 nt, Artificial Sequence
  Description of Artificial Sequence: Synthetic oligonucleotide
ggacugucugcaucguggc

SEQ ID NO: 462810 - RNA, 19 nt, Artificial Sequence
  Description of Artificial Sequence: Synthetic oligonucleotide
ucgggcuugagcgcacaug

SEQ ID NO: 462811 - RNA, 19 nt, Artificial Sequence
  Description of Artificial Sequence: Synthetic oligonucleotide
aagcuuccuagugccguga

SEQ ID NO: 462812 - RNA, 19 nt, Artificial Sequence
  Description of Artificial Sequence: Synthetic oligonucleotide
gcuagugcccggcacacuc

SEQ ID NO: 462813 - RNA, 19 nt, Artificial Sequence
  Description of Artificial Sequence: Synthetic oligonucleotide
uuaggcccgauguggucau

SEQ ID NO: 462814 - RNA, 19 nt, Artificial Sequence
  Description of Artificial Sequence: Synthetic oligonucleotide
ugccuuaggggccccucuc

SEQ ID NO: 462815 - RNA, 19 nt, Artificial Sequence
  Description of Artificial Sequence: Synthetic oligonucleotide
cccaauaugucuacaaugu

SEQ ID NO: 462816 - RNA, 19 nt, Artificial Sequence
  Description of Artificial Sequence: Synthetic oligonucleotide
cuccuuacuccagcauggg

SEQ ID NO: 462817 - RNA, 19 nt, Artificial Sequence
  Description of Artificial Sequence: Synthetic oligonucleotide
cacgagauuaugguuuuaa

SEQ ID NO: 462818 - RNA, 19 nt, Artificial Sequence
  Description of Artificial Sequence: Synthetic oligonucleotide
aagcgaaguguggggccag

SEQ ID NO: 462819 - RNA, 19 nt, Artificial Sequence
  Description of Artificial Sequence: Synthetic oligonucleotide
cugacucccgaaauaucaa

SEQ ID NO: 462820 - RNA, 19 nt, Artificial Sequence
  Description of Artificial Sequence: Synthetic oligonucleotide
ccugcuuaggacacucgug

SEQ ID NO: 462821 - RNA, 19 nt, Artificial Sequence
  Description of Artificial Sequence: Synthetic oligonucleotide
aucgcuggucgaugauucu

SEQ ID NO: 462822 - RNA, 19 nt, Artificial Sequence
  Description of Artificial Sequence: Synthetic oligonucleotide
gugcacaugggcgugaggu

SEQ ID NO: 462823 - RNA, 19 nt, Artificial Sequence
  Description of Artificial Sequence: Synthetic oligonucleotide
ccaauaugucuacaauguc

SEQ ID NO: 462824 - RNA, 19 nt, Artificial Sequence
  Description of Artificial Sequence: Synthetic oligonucleotide
gugcgauucggaaggccag

SEQ ID NO: 462825 - RNA, 19 nt, Artificial Sequence
  Description of Artificial Sequence: Synthetic oligonucleotide
ggugcgauucggaaggcca

SEQ ID NO: 462826 - RNA, 19 nt, Artificial Sequence
  Description of Artificial Sequence: Synthetic oligonucleotide
uuaccugccccaggugcga

SEQ ID NO: 462827 - RNA, 19 nt, Artificial Sequence
  Description of Artificial Sequence: Synthetic oligonucleotide
acaugggcgugagguuuac

SEQ ID NO: 462828 - RNA, 19 nt, Artificial Sequence
  Description of Artificial Sequence: Synthetic oligonucleotide
ccggucauugucugacucc

SEQ ID NO: 462829 - RNA, 19 nt, Artificial Sequence
  Description of Artificial Sequence: Synthetic oligonucleotide
caccaccgcguccugauga

SEQ ID NO: 462830 - RNA, 19 nt, Artificial Sequence
  Description of Artificial Sequence: Synthetic oligonucleotide
acgucacugcacgacacaa

SEQ ID NO: 462831 - RNA, 19 nt, Artificial Sequence
  Description of Artificial Sequence: Synthetic oligonucleotide
acaccggcuuguggucucc

SEQ ID NO: 462832 - RNA, 19 nt, Artificial Sequence
  Description of Artificial Sequence: Synthetic oligonucleotide
caagagcgcagugccguug

SEQ ID NO: 462833 - RNA, 19 nt, Artificial Sequence
  Description of Artificial Sequence: Synthetic oligonucleotide
gaggauucgaucacaccau

SEQ ID NO: 462834 - RNA, 19 nt, Artificial Sequence
  Description of Artificial Sequence: Synthetic oligonucleotide
gcuuuaaagucaaacuggu

SEQ ID NO: 462835 - RNA, 19 nt, Artificial Sequence
  Description of Artificial Sequence: Synthetic oligonucleotide
auucucccacgagauuaug

SEQ ID NO: 462836 - RNA, 19 nt, Artificial Sequence
  Description of Artificial Sequence: Synthetic oligonucleotide
ggcaauaggacuguggcuu

SEQ ID NO: 462837 - RNA, 19 nt, Artificial Sequence
  Description of Artificial Sequence: Synthetic oligonucleotide
uugggcggguuccgaugca

SEQ ID NO: 462838 - RNA, 19 nt, Artificial Sequence
  Description of Artificial Sequence: Synthetic oligonucleotide
uccucucaaggcgcuggca

SEQ ID NO: 462839 - RNA, 19 nt, Artificial Sequence
  Description of Artificial Sequence: Synthetic oligonucleotide
agacaaccgcugcggacau

SEQ ID NO: 462840 - RNA, 19 nt, Artificial Sequence
  Description of Artificial Sequence: Synthetic oligonucleotide
cauuggcaagcagcgacca

SEQ ID NO: 462841 - RNA, 19 nt, Artificial Sequence
  Description of Artificial Sequence: Synthetic oligonucleotide
uggggccagccgucuagca

SEQ ID NO: 462842 - RNA, 19 nt, Artificial Sequence
  Description of Artificial Sequence: Synthetic oligonucleotide
accaccgcguccugaugaa

SEQ ID NO: 462843 - RNA, 19 nt, Artificial Sequence
  Description of Artificial Sequence: Synthetic oligonucleotide
aggaaccgagcagucacuu

SEQ ID NO: 462844 - RNA, 19 nt, Artificial Sequence
  Description of Artificial Sequence: Synthetic oligonucleotide
cagugacuuucuuauacuu

SEQ ID NO: 462845 - RNA, 19 nt, Artificial Sequence
  Description of Artificial Sequence: Synthetic oligonucleotide
gggaaguguacgaggcuac

SEQ ID NO: 462846 - RNA, 19 nt, Artificial Sequence
  Description of Artificial Sequence: Synthetic oligonucleotide
ccuuaggggccccucuccc

SEQ ID NO: 462847 - RNA, 19 nt, Artificial Sequence
  Description of Artificial Sequence: Synthetic oligonucleotide
cugcuaguacaggcaugcc

SEQ ID NO: 462848 - RNA, 19 nt, Artificial Sequence
  Description of Artificial Sequence: Synthetic oligonucleotide
agcccaugcuagaagcgau

SEQ ID NO: 462849 - RNA, 19 nt, Artificial Sequence
  Description of Artificial Sequence: Synthetic oligonucleotide
ccagccgucuagcagguga

SEQ ID NO: 462850 - RNA, 19 nt, Artificial Sequence
  Description of Artificial Sequence: Synthetic oligonucleotide
caaauuccaagagcgcagu

SEQ ID NO: 462851 - RNA, 19 nt, Artificial Sequence
  Description of Artificial Sequence: Synthetic oligonucleotide
cagcaaugcaccaccgcgu

SEQ ID NO: 462852 - RNA, 19 nt, Artificial Sequence
  Description of Artificial Sequence: Synthetic oligonucleotide
ccgaaauaucaacuuuaca

SEQ ID NO: 462853 - RNA, 19 nt, Artificial Sequence
  Description of Artificial Sequence: Synthetic oligonucleotide
caugggcgugagguuuacc

SEQ ID NO: 462854 - RNA, 19 nt, Artificial Sequence
  Description of Artificial Sequence: Synthetic oligonucleotide
cccaucgcuucucugccac

SEQ ID NO: 462855 - RNA, 19 nt, Artificial Sequence
  Description of Artificial Sequence: Synthetic oligonucleotide
gaaguguacgaggcuacuu

SEQ ID NO: 462856 - RNA, 19 nt, Artificial Sequence
  Description of Artificial Sequence: Synthetic oligonucleotide
cagcgaccauggcagucac

SEQ ID NO: 462857 - RNA, 19 nt, Artificial Sequence
  Description of Artificial Sequence: Synthetic oligonucleotide
acacgacagugagguaugu

SEQ ID NO: 462858 - RNA, 19 nt, Artificial Sequence
  Description of Artificial Sequence: Synthetic oligonucleotide
cgugguacucagugcuggg

SEQ ID NO: 462859 - RNA, 19 nt, Artificial Sequence
  Description of Artificial Sequence: Synthetic oligonucleotide
ggcgugagguuuaccugcc

SEQ ID NO: 462860 - RNA, 19 nt, Artificial Sequence
  Description of Artificial Sequence: Synthetic oligonucleotide
agccgucuagcaggugaug

SEQ ID NO: 462861 - RNA, 19 nt, Artificial Sequence
  Description of Artificial Sequence: Synthetic oligonucleotide
cacaugggcgugagguuua

SEQ ID NO: 462862 - RNA, 19 nt, Artificial Sequence
  Description of Artificial Sequence: Synthetic oligonucleotide
cugccccaggugcgauucg

SEQ ID NO: 462863 - RNA, 19 nt, Artificial Sequence
  Description of Artificial Sequence: Synthetic oligonucleotide
augcagacauuaggcccga

SEQ ID NO: 462864 - RNA, 19 nt, Artificial Sequence
  Description of Artificial Sequence: Synthetic oligonucleotide
cgaugauucugucgagcac

SEQ ID NO: 462865 - RNA, 19 nt, Artificial Sequence
  Description of Artificial Sequence: Synthetic oligonucleotide
ggcagaagagugacaagcu

SEQ ID NO: 462866 - RNA, 19 nt, Artificial Sequence
  Description of Artificial Sequence: Synthetic oligonucleotide
ucacaccaugcagggcauc

SEQ ID NO: 462867 - RNA, 19 nt, Artificial Sequence
  Description of Artificial Sequence: Synthetic oligonucleotide
guguacgaggcuacuucua

SEQ ID NO: 462868 - RNA, 19 nt, Artificial Sequence
  Description of Artificial Sequence: Synthetic oligonucleotide
cuaauucucccacgagauu

SEQ ID NO: 462869 - RNA, 19 nt, Artificial Sequence
  Description of Artificial Sequence: Synthetic oligonucleotide
ggaggaugaguuggauaca

SEQ ID NO: 462870 - RNA, 19 nt, Artificial Sequence
  Description of Artificial Sequence: Synthetic oligonucleotide
ccuugugccugacacccga

SEQ ID NO: 462871 - RNA, 19 nt, Artificial Sequence
  Description of Artificial Sequence: Synthetic oligonucleotide
gacaaccgcugcggacaug

SEQ ID NO: 462872 - RNA, 19 nt, Artificial Sequence
  Description of Artificial Sequence: Synthetic oligonucleotide
ccgacauuaacucgcgccu

SEQ ID NO: 462873 - RNA, 19 nt, Artificial Sequence
  Description of Artificial Sequence: Synthetic oligonucleotide
ggcucuaaauggagaagcu

SEQ ID NO: 462874 - RNA, 19 nt, Artificial Sequence
  Description of Artificial Sequence: Synthetic oligonucleotide
cccacagacaaucguuaaa

SEQ ID NO: 462875 - RNA, 19 nt, Artificial Sequence
  Description of Artificial Sequence: Synthetic oligonucleotide
cagugagguaugugaggcu

SEQ ID NO: 462876 - RNA, 19 nt, Artificial Sequence
  Description of Artificial Sequence: Synthetic oligonucleotide
caaaucgcuggucgaugau

SEQ ID NO: 462877 - RNA, 19 nt, Artificial Sequence
  Description of Artificial Sequence: Synthetic oligonucleotide
gcgugagguuuaccugccc

SEQ ID NO: 462878 - RNA, 19 nt, Artificial Sequence
  Description of Artificial Sequence: Synthetic oligonucleotide
cagacccgaccccggcauc

SEQ ID NO: 462879 - RNA, 19 nt, Artificial Sequence
  Description of Artificial Sequence: Synthetic oligonucleotide
guguccgaauagaucuccu

SEQ ID NO: 462880 - RNA, 19 nt, Artificial Sequence
  Description of Artificial Sequence: Synthetic oligonucleotide
agcgaccauggcagucaca

SEQ ID NO: 462881 - RNA, 19 nt, Artificial Sequence
  Description of Artificial Sequence: Synthetic oligonucleotide
gccuugugccugacacccg

SEQ ID NO: 462882 - RNA, 19 nt, Artificial Sequence
  Description of Artificial Sequence: Synthetic oligonucleotide
ggcgugcucuccaaagugu

SEQ ID NO: 462883 - RNA, 19 nt, Artificial Sequence
  Description of Artificial Sequence: Synthetic oligonucleotide
gguuccgaugcagcuguua

SEQ ID NO: 462884 - RNA, 19 nt, Artificial Sequence
  Description of Artificial Sequence: Synthetic oligonucleotide
ccggacugucugcaucgug

SEQ ID NO: 462885 - RNA, 19 nt, Artificial Sequence
  Description of Artificial Sequence: Synthetic oligonucleotide
gcccaugcuagaagcgauc

SEQ ID NO: 462886 - RNA, 19 nt, Artificial Sequence
  Description of Artificial Sequence: Synthetic oligonucleotide
ggaaguguacgaggcuacu

SEQ ID NO: 462887 - RNA, 19 nt, Artificial Sequence
  Description of Artificial Sequence: Synthetic oligonucleotide
ccgcgggcgccuuccgugg

SEQ ID NO: 462888 - RNA, 19 nt, Artificial Sequence
  Description of Artificial Sequence: Synthetic oligonucleotide
ccgaccccggcaucaagga

SEQ ID NO: 462889 - RNA, 19 nt, Artificial Sequence
  Description of Artificial Sequence: Synthetic oligonucleotide
cagccgucuagcaggugau

SEQ ID NO: 462890 - RNA, 19 nt, Artificial Sequence
  Description of Artificial Sequence: Synthetic oligonucleotide
gcgccuuccgugguacuca

SEQ ID NO: 462891 - RNA, 19 nt, Artificial Sequence
  Description of Artificial Sequence: Synthetic oligonucleotide
cgacauuaacucgcgccuc

SEQ ID NO: 462892 - RNA, 19 nt, Artificial Sequence
  Description of Artificial Sequence: Synthetic oligonucleotide
ccgaguacacugaggggcu

SEQ ID NO: 462893 - RNA, 19 nt, Artificial Sequence
  Description of Artificial Sequence: Synthetic oligonucleotide
ccccaggugcgauucggaa

SEQ ID NO: 462894 - RNA, 19 nt, Artificial Sequence
  Description of Artificial Sequence: Synthetic oligonucleotide
ccaccgcguccugaugaag

SEQ ID NO: 462895 - RNA, 19 nt, Artificial Sequence
  Description of Artificial Sequence: Synthetic oligonucleotide
ccggccuucggugaauucu

SEQ ID NO: 462896 - RNA, 19 nt, Artificial Sequence
  Description of Artificial Sequence: Synthetic oligonucleotide
caaggcgcuggcaccucuu

SEQ ID NO: 462897 - RNA, 19 nt, Artificial Sequence
  Description of Artificial Sequence: Synthetic oligonucleotide
gccggccuucggugaauuc

SEQ ID NO: 462898 - RNA, 19 nt, Artificial Sequence
  Description of Artificial Sequence: Synthetic oligonucleotide
uaggcccgauguggucaua

SEQ ID NO: 462899 - RNA, 19 nt, Artificial Sequence
  Description of Artificial Sequence: Synthetic oligonucleotide
gccuuugugcagagugucu

SEQ ID NO: 462900 - RNA, 19 nt, Artificial Sequence
  Description of Artificial Sequence: Synthetic oligonucleotide
cccacgagauuaugguuuu

SEQ ID NO: 462901 - RNA, 19 nt, Artificial Sequence
  Description of Artificial Sequence: Synthetic oligonucleotide
gccccaggugcgauucgga

SEQ ID NO: 462902 - RNA, 19 nt, Artificial Sequence
  Description of Artificial Sequence: Synthetic oligonucleotide
cggccuucggugaauucua

SEQ ID NO: 462903 - RNA, 19 nt, Artificial Sequence
  Description of Artificial Sequence: Synthetic oligonucleotide
ggugaugcuugggcggguu

SEQ ID NO: 462904 - RNA, 19 nt, Artificial Sequence
  Description of Artificial Sequence: Synthetic oligonucleotide
gccagccgucuagcaggug

SEQ ID NO: 462905 - RNA, 19 nt, Artificial Sequence
  Description of Artificial Sequence: Synthetic oligonucleotide
ccacgagauuaugguuuua

SEQ ID NO: 462906 - RNA, 19 nt, Artificial Sequence
  Description of Artificial Sequence: Synthetic oligonucleotide
ccgccccauccaggaacug

SEQ ID NO: 462907 - RNA, 19 nt, Artificial Sequence
  Description of Artificial Sequence: Synthetic oligonucleotide
gccuuccgugguacucagu

SEQ ID NO: 462908 - RNA, 19 nt, Artificial Sequence
  Description of Artificial Sequence: Synthetic oligonucleotide
ggccggccuucggugaauu

SEQ ID NO: 462909 - RNA, 19 nt, Artificial Sequence
  Description of Artificial Sequence: Synthetic oligonucleotide
cgcugcggacauggcacau

SEQ ID NO: 462910 - RNA, 19 nt, Artificial Sequence
  Description of Artificial Sequence: Synthetic oligonucleotide
cgcgggcgccuuccguggu

SEQ ID NO: 462911 - RNA, 19 nt, Artificial Sequence
  Description of Artificial Sequence: Synthetic oligonucleotide
auaguuaucaagcugggcc

SEQ ID NO: 462912 - RNA, 19 nt, Artificial Sequence
  Description of Artificial Sequence: Synthetic oligonucleotide
aauuaaaagguaccggagg

SEQ ID NO: 462913 - RNA, 19 nt, Artificial Sequence
  Description of Artificial Sequence: Synthetic oligonucleotide
ugaguuguuaaucacaccc

SEQ ID NO: 462914 - RNA, 19 nt, Artificial Sequence
  Description of Artificial Sequence: Synthetic oligonucleotide
acaugauucauucauuagc

SEQ ID NO: 462915 - RNA, 19 nt, Artificial Sequence
  Description of Artificial Sequence: Synthetic oligonucleotide
aauacugaguuguuaauca

SEQ ID NO: 462916 - RNA, 19 nt, Artificial Sequence
  Description of Artificial Sequence: Synthetic oligonucleotide
aacauuaacuauuuugggu

SEQ ID NO: 462917 - RNA, 19 nt, Artificial Sequence
  Description of Artificial Sequence: Synthetic oligonucleotide
agaguuuccaauuugggca

SEQ ID NO: 462918 - RNA, 19 nt, Artificial Sequence
  Description of Artificial Sequence: Synthetic oligonucleotide
ucucaauccagccauagga

SEQ ID NO: 462919 - RNA, 19 nt, Artificial Sequence
  Description of Artificial Sequence: Synthetic oligonucleotide
cucggaucaauccagaccg

SEQ ID NO: 462920 - RNA, 19 nt, Artificial Sequence
  Description of Artificial Sequence: Synthetic oligonucleotide
aaaauacagucccuggaag

SEQ ID NO: 462921 - RNA, 19 nt, Artificial Sequence
  Description of Artificial Sequence: Synthetic oligonucleotide
aauugugaggguaaaauca

SEQ ID NO: 462922 - RNA, 19 nt, Artificial Sequence
  Description of Artificial Sequence: Synthetic oligonucleotide
aauagccuaauacugaguu

SEQ ID NO: 462923 - RNA, 19 nt, Artificial Sequence
  Description of Artificial Sequence: Synthetic oligonucleotide
aauucccugacucggauca

SEQ ID NO: 462924 - RNA, 19 nt, Artificial Sequence
  Description of Artificial Sequence: Synthetic oligonucleotide
gaaauagccuaauacugag

SEQ ID NO: 462925 - RNA, 19 nt, Artificial Sequence
  Description of Artificial Sequence: Synthetic oligonucleotide
uuuagaacuggcucagggg

SEQ ID NO: 462926 - RNA, 19 nt, Artificial Sequence
  Description of Artificial Sequence: Synthetic oligonucleotide
ucuacuuuaugagacacgc

SEQ ID NO: 462927 - RNA, 19 nt, Artificial Sequence
  Description of Artificial Sequence: Synthetic oligonucleotide
ucuacgaugucaucuuugg

SEQ ID NO: 462928 - RNA, 19 nt, Artificial Sequence
  Description of Artificial Sequence: Synthetic oligonucleotide
ugauucauucauuagcaca

SEQ ID NO: 462929 - RNA, 19 nt, Artificial Sequence
  Description of Artificial Sequence: Synthetic oligonucleotide
gaugcggccaaugaaauag

SEQ ID NO: 462930 - RNA, 19 nt, Artificial Sequence
  Description of Artificial Sequence: Synthetic oligonucleotide
aaagaggggauaccuggac

SEQ ID NO: 462931 - RNA, 19 nt, Artificial Sequence
  Description of Artificial Sequence: Synthetic oligonucleotide
aagugaugcugccauuggc

SEQ ID NO: 462932 - RNA, 19 nt, Artificial Sequence
  Description of Artificial Sequence: Synthetic oligonucleotide
aguuuaucaggagauauuc

SEQ ID NO: 462933 - RNA, 19 nt, Artificial Sequence
  Description of Artificial Sequence: Synthetic oligonucleotide
uucguuaacugaaaugucu

SEQ ID NO: 462934 - RNA, 19 nt, Artificial Sequence
  Description of Artificial Sequence: Synthetic oligonucleotide
acucggaucaauccagacc

SEQ ID NO: 462935 - RNA, 19 nt, Artificial Sequence
  Description of Artificial Sequence: Synthetic oligonucleotide
uuagaacuggcucaggggu

SEQ ID NO: 462936 - RNA, 19 nt, Artificial Sequence
  Description of Artificial Sequence: Synthetic oligonucleotide
ucaauccagccauaggacg

SEQ ID NO: 462937 - RNA, 19 nt, Artificial Sequence
  Description of Artificial Sequence: Synthetic oligonucleotide
uuaucugucgcauggaguc

SEQ ID NO: 462938 - RNA, 19 nt, Artificial Sequence
  Description of Artificial Sequence: Synthetic oligonucleotide
ugugaauucccugacucgg

SEQ ID NO: 462939 - RNA, 19 nt, Artificial Sequence
  Description of Artificial Sequence: Synthetic oligonucleotide
acauuaacuauuuuggguu

SEQ ID NO: 462940 - RNA, 19 nt, Artificial Sequence
  Description of Artificial Sequence: Synthetic oligonucleotide
ucuuucguuaacugaaaug

SEQ ID NO: 462941 - RNA, 19 nt, Artificial Sequence
  Description of Artificial Sequence: Synthetic oligonucleotide
aggaacgauccgcacaucc

SEQ ID NO: 462942 - RNA, 19 nt, Artificial Sequence
  Description of Artificial Sequence: Synthetic oligonucleotide
acaucagcccaagugaugc

SEQ ID NO: 462943 - RNA, 19 nt, Artificial Sequence
  Description of Artificial Sequence: Synthetic oligonucleotide
agucgcuugaaauucagga

SEQ ID NO: 462944 - RNA, 19 nt, Artificial Sequence
  Description of Artificial Sequence: Synthetic oligonucleotide
agucucuugcccuucaaag

SEQ ID NO: 462945 - RNA, 19 nt, Artificial Sequence
  Description of Artificial Sequence: Synthetic oligonucleotide
guugaauuccaaaagucgc

SEQ ID NO: 462946 - RNA, 19 nt, Artificial Sequence
  Description of Artificial Sequence: Synthetic oligonucleotide
uucccuucgguuucaauag

SEQ ID NO: 462947 - RNA, 19 nt, Artificial Sequence
  Description of Artificial Sequence: Synthetic oligonucleotide
uucagauaauuccuugaca

SEQ ID NO: 462948 - RNA, 19 nt, Artificial Sequence
  Description of Artificial Sequence: Synthetic oligonucleotide
guuucaauagugaauuccc

SEQ ID NO: 462949 - RNA, 19 nt, Artificial Sequence
  Description of Artificial Sequence: Synthetic oligonucleotide
gaucaauccagaccgagga

SEQ ID NO: 462950 - RNA, 19 nt, Artificial Sequence
  Description of Artificial Sequence: Synthetic oligonucleotide
caaauuugucuacauggcc

SEQ ID NO: 462951 - RNA, 19 nt, Artificial Sequence
  Description of Artificial Sequence: Synthetic oligonucleotide
uccagaacccucuuccggg

SEQ ID NO: 462952 - RNA, 19 nt, Artificial Sequence
  Description of Artificial Sequence: Synthetic oligonucleotide
uuaugagacacgccauucc

SEQ ID NO: 462953 - RNA, 19 nt, Artificial Sequence
  Description of Artificial Sequence: Synthetic oligonucleotide
ucuuaucugacaucaauuu

SEQ ID NO: 462954 - RNA, 19 nt, Artificial Sequence
  Description of Artificial Sequence: Synthetic oligonucleotide
auaaagugcugccuccagg

SEQ ID NO: 462955 - RNA, 19 nt, Artificial Sequence
  Description of Artificial Sequence: Synthetic oligonucleotide
auacugaguuguuaaucac

SEQ ID NO: 462956 - RNA, 19 nt, Artificial Sequence
  Description of Artificial Sequence: Synthetic oligonucleotide
uaugagacacgccauuccu

SEQ ID NO: 462957 - RNA, 19 nt, Artificial Sequence
  Description of Artificial Sequence: Synthetic oligonucleotide
ugacaaauggcaugaacuc

SEQ ID NO: 462958 - RNA, 19 nt, Artificial Sequence
  Description of Artificial Sequence: Synthetic oligonucleotide
agagaucucauuucuaaaa

SEQ ID NO: 462959 - RNA, 19 nt, Artificial Sequence
  Description of Artificial Sequence: Synthetic oligonucleotide
uucauuagcacaaguuguc

SEQ ID NO: 462960 - RNA, 19 nt, Artificial Sequence
  Description of Artificial Sequence: Synthetic oligonucleotide
auugccaguagugggagac

SEQ ID NO: 462961 - RNA, 19 nt, Artificial Sequence
  Description of Artificial Sequence: Synthetic oligonucleotide
auuagcacaaguugucaca

SEQ ID NO: 462962 - RNA, 19 nt, Artificial Sequence
  Description of Artificial Sequence: Synthetic oligonucleotide
ucuuggauaaagugcugcc

SEQ ID NO: 462963 - RNA, 19 nt, Artificial Sequence
  Description of Artificial Sequence: Synthetic oligonucleotide
augauucauucauuagcac

SEQ ID NO: 462964 - RNA, 19 nt, Artificial Sequence
  Description of Artificial Sequence: Synthetic oligonucleotide
uagccuaauacugaguugu

SEQ ID NO: 462965 - RNA, 19 nt, Artificial Sequence
  Description of Artificial Sequence: Synthetic oligonucleotide
uuccaauuugggcagcagc

SEQ ID NO: 462966 - RNA, 19 nt, Artificial Sequence
  Description of Artificial Sequence: Synthetic oligonucleotide
ucguagagaccacugacac

SEQ ID NO: 462967 - RNA, 19 nt, Artificial Sequence
  Description of Artificial Sequence: Synthetic oligonucleotide
aguagugggagacuuuaca

SEQ ID NO: 462968 - RNA, 19 nt, Artificial Sequence
  Description of Artificial Sequence: Synthetic oligonucleotide
agaucucauuucuaaaaga

SEQ ID NO: 462969 - RNA, 19 nt, Artificial Sequence
  Description of Artificial Sequence: Synthetic oligonucleotide
auaccuggacuccacauca

SEQ ID NO: 462970 - RNA, 19 nt, Artificial Sequence
  Description of Artificial Sequence: Synthetic oligonucleotide
auagcaaaagcuugaucgu

SEQ ID NO: 462971 - RNA, 19 nt, Artificial Sequence
  Description of Artificial Sequence: Synthetic oligonucleotide
ggaagcgaaguuuaucagg

SEQ ID NO: 462972 - RNA, 19 nt, Artificial Sequence
  Description of Artificial Sequence: Synthetic oligonucleotide
uucgguuucaauagugaau

SEQ ID NO: 462973 - RNA, 19 nt, Artificial Sequence
  Description of Artificial Sequence: Synthetic oligonucleotide
uuacacucggaacaacuuc

SEQ ID NO: 462974 - RNA, 19 nt, Artificial Sequence
  Description of Artificial Sequence: Synthetic oligonucleotide
cauaggacguuuuggacuc

SEQ ID NO: 462975 - RNA, 19 nt, Artificial Sequence
  Description of Artificial Sequence: Synthetic oligonucleotide
ucccuuauugggcucaaac

SEQ ID NO: 462976 - RNA, 19 nt, Artificial Sequence
  Description of Artificial Sequence: Synthetic oligonucleotide
gcaaucacgauucugugug

SEQ ID NO: 462977 - RNA, 19 nt, Artificial Sequence
  Description of Artificial Sequence: Synthetic oligonucleotide
ggugacucgagcaugacag

SEQ ID NO: 462978 - RNA, 19 nt, Artificial Sequence
  Description of Artificial Sequence: Synthetic oligonucleotide
agcgaaguuuaucaggaga

SEQ ID NO: 462979 - RNA, 19 nt, Artificial Sequence
  Description of Artificial Sequence: Synthetic oligonucleotide
uacuagugggacuuuggug

SEQ ID NO: 462980 - RNA, 19 nt, Artificial Sequence
  Description of Artificial Sequence: Synthetic oligonucleotide
aacacuccccguucuucac

SEQ ID NO: 462981 - RNA, 19 nt, Artificial Sequence
  Description of Artificial Sequence: Synthetic oligonucleotide
aaauuuguucagaauuccu

SEQ ID NO: 462982 - RNA, 19 nt, Artificial Sequence
  Description of Artificial Sequence: Synthetic oligonucleotide
caaaagucgcuugaaauuc

SEQ ID NO: 462983 - RNA, 19 nt, Artificial Sequence
  Description of Artificial Sequence: Synthetic oligonucleotide
cacaucuuuuaccaugaag

SEQ ID NO: 462984 - RNA, 19 nt, Artificial Sequence
  Description of Artificial Sequence: Synthetic oligonucleotide
gauaaagugcugccuccag

SEQ ID NO: 462985 - RNA, 19 nt, Artificial Sequence
  Description of Artificial Sequence: Synthetic oligonucleotide
uucagaauuccuucaacuu

SEQ ID NO: 462986 - RNA, 19 nt, Artificial Sequence
  Description of Artificial Sequence: Synthetic oligonucleotide
auucauuagcacaaguugu

SEQ ID NO: 462987 - RNA, 19 nt, Artificial Sequence
  Description of Artificial Sequence: Synthetic oligonucleotide
uguagcgccagcuccuuug

SEQ ID NO: 462988 - RNA, 19 nt, Artificial Sequence
  Description of Artificial Sequence: Synthetic oligonucleotide
ugcauagcgccuuccaaug

SEQ ID NO: 462989 - RNA, 19 nt, Artificial Sequence
  Description of Artificial Sequence: Synthetic oligonucleotide
uguccauaguuaucaagcu

SEQ ID NO: 462990 - RNA, 19 nt, Artificial Sequence
  Description of Artificial Sequence: Synthetic oligonucleotide
gacaaaggcagagaucggc

SEQ ID NO: 462991 - RNA, 19 nt, Artificial Sequence
  Description of Artificial Sequence: Synthetic oligonucleotide
agcacauccuacuggcccg

SEQ ID NO: 462992 - RNA, 19 nt, Artificial Sequence
  Description of Artificial Sequence: Synthetic oligonucleotide
agucagcaaauuugucuac

SEQ ID NO: 462993 - RNA, 19 nt, Artificial Sequence
  Description of Artificial Sequence: Synthetic oligonucleotide
ucgguuucaauagugaauu

SEQ ID NO: 462994 - RNA, 19 nt, Artificial Sequence
  Description of Artificial Sequence: Synthetic oligonucleotide
aacguucucugcucaucuc

SEQ ID NO: 462995 - RNA, 19 nt, Artificial Sequence
  Description of Artificial Sequence: Synthetic oligonucleotide
aaucacacccugcuccaca

SEQ ID NO: 462996 - RNA, 19 nt, Artificial Sequence
  Description of Artificial Sequence: Synthetic oligonucleotide
ugcgcgggaacgcugagga

SEQ ID NO: 462997 - RNA, 19 nt, Artificial Sequence
  Description of Artificial Sequence: Synthetic oligonucleotide
aagguaccggaggagacag

SEQ ID NO: 462998 - RNA, 19 nt, Artificial Sequence
  Description of Artificial Sequence: Synthetic oligonucleotide
uuucguuaacugaaauguc

SEQ ID NO: 462999 - RNA, 19 nt, Artificial Sequence
  Description of Artificial Sequence: Synthetic oligonucleotide
ugguauacaugauccugcc

SEQ ID NO: 463000 - RNA, 19 nt, Artificial Sequence
  Description of Artificial Sequence: Synthetic oligonucleotide
cugacucggaucaauccag

SEQ ID NO: 463001 - RNA, 19 nt, Artificial Sequence
  Description of Artificial Sequence: Synthetic oligonucleotide
cacguguaguguuuucugg

SEQ ID NO: 463002 - RNA, 19 nt, Artificial Sequence
  Description of Artificial Sequence: Synthetic oligonucleotide
cuuucguuaacugaaaugu

SEQ ID NO: 463003 - RNA, 19 nt, Artificial Sequence
  Description of Artificial Sequence: Synthetic oligonucleotide
cucaauccagccauaggac

SEQ ID NO: 463004 - RNA, 19 nt, Artificial Sequence
  Description of Artificial Sequence: Synthetic oligonucleotide
ugacaccuccauaaauagc

SEQ ID NO: 463005 - RNA, 19 nt, Artificial Sequence
  Description of Artificial Sequence: Synthetic oligonucleotide
cuggacuccacaucagccc

SEQ ID NO: 463006 - RNA, 19 nt, Artificial Sequence
  Description of Artificial Sequence: Synthetic oligonucleotide
cacgaggucucccugcugg

SEQ ID NO: 463007 - RNA, 19 nt, Artificial Sequence
  Description of Artificial Sequence: Synthetic oligonucleotide
agacacgccauuccugguc

SEQ ID NO: 463008 - RNA, 19 nt, Artificial Sequence
  Description of Artificial Sequence: Synthetic oligonucleotide
auagccuaauacugaguug

SEQ ID NO: 463009 - RNA, 19 nt, Artificial Sequence
  Description of Artificial Sequence: Synthetic oligonucleotide
gauaccuggacuccacauc

SEQ ID NO: 463010 - RNA, 19 nt, Artificial Sequence
  Description of Artificial Sequence: Synthetic oligonucleotide
acauuugaauggagcaacc

SEQ ID NO: 463011 - RNA, 19 nt, Artificial Sequence
  Description of Artificial Sequence: Synthetic oligonucleotide
uuuaugagacacgccauuc

SEQ ID NO: 463012 - RNA, 19 nt, Artificial Sequence
  Description of Artificial Sequence: Synthetic oligonucleotide
ccaacaaucucaauccagc

SEQ ID NO: 463013 - RNA, 19 nt, Artificial Sequence
  Description of Artificial Sequence: Synthetic oligonucleotide
uuuuaccaugaagucagca

SEQ ID NO: 463014 - RNA, 19 nt, Artificial Sequence
  Description of Artificial Sequence: Synthetic oligonucleotide
cauuaacuauuuuggguuc

SEQ ID NO: 463015 - RNA, 19 nt, Artificial Sequence
  Description of Artificial Sequence: Synthetic oligonucleotide
cucaucuguucuugcauag

SEQ ID NO: 463016 - RNA, 19 nt, Artificial Sequence
  Description of Artificial Sequence: Synthetic oligonucleotide
agucgcaggcauaaugggc

SEQ ID NO: 463017 - RNA, 19 nt, Artificial Sequence
  Description of Artificial Sequence: Synthetic oligonucleotide
ucguuaacugaaaugucuu

SEQ ID NO: 463018 - RNA, 19 nt, Artificial Sequence
  Description of Artificial Sequence: Synthetic oligonucleotide
acacucuggaacuugggau

SEQ ID NO: 463019 - RNA, 19 nt, Artificial Sequence
  Description of Artificial Sequence: Synthetic oligonucleotide
gagggcucaauuacacucg

SEQ ID NO: 463020 - RNA, 19 nt, Artificial Sequence
  Description of Artificial Sequence: Synthetic oligonucleotide
aagcgaaguuuaucaggag

SEQ ID NO: 463021 - RNA, 19 nt, Artificial Sequence
  Description of Artificial Sequence: Synthetic oligonucleotide
ucgagcaugacaggacagg

SEQ ID NO: 463022 - RNA, 19 nt, Artificial Sequence
  Description of Artificial Sequence: Synthetic oligonucleotide
aaaccuccucuucaaagua

SEQ ID NO: 463023 - RNA, 19 nt, Artificial Sequence
  Description of Artificial Sequence: Synthetic oligonucleotide
ucacggaccacaccaggca

SEQ ID NO: 463024 - RNA, 19 nt, Artificial Sequence
  Description of Artificial Sequence: Synthetic oligonucleotide
auaugguauacaugauccu

SEQ ID NO: 463025 - RNA, 19 nt, Artificial Sequence
  Description of Artificial Sequence: Synthetic oligonucleotide
aucacgauucuguguguag

SEQ ID NO: 463026 - RNA, 19 nt, Artificial Sequence
  Description of Artificial Sequence: Synthetic oligonucleotide
uccuacuggcccgaagucg

SEQ ID NO: 463027 - RNA, 19 nt, Artificial Sequence
  Description of Artificial Sequence: Synthetic oligonucleotide
ucauuagcacaaguuguca

SEQ ID NO: 463028 - RNA, 19 nt, Artificial Sequence
  Description of Artificial Sequence: Synthetic oligonucleotide
ucucggacauggaaugugu

SEQ ID NO: 463029 - RNA, 19 nt, Artificial Sequence
  Description of Artificial Sequence: Synthetic oligonucleotide
agugggacuuuggugacuc

SEQ ID NO: 463030 - RNA, 19 nt, Artificial Sequence
  Description of Artificial Sequence: Synthetic oligonucleotide
uugggcucaaacuguacaa

SEQ ID NO: 463031 - RNA, 19 nt, Artificial Sequence
  Description of Artificial Sequence: Synthetic oligonucleotide
acugcucccuuauugggcu

SEQ ID NO: 463032 - RNA, 19 nt, Artificial Sequence
  Description of Artificial Sequence: Synthetic oligonucleotide
ugcggccaaugaaauagcc

SEQ ID NO: 463033 - RNA, 19 nt, Artificial Sequence
  Description of Artificial Sequence: Synthetic oligonucleotide
uuuaauugugaggguaaaa

SEQ ID NO: 463034 - RNA, 19 nt, Artificial Sequence
  Description of Artificial Sequence: Synthetic oligonucleotide
aucuuucucagugggaucu

SEQ ID NO: 463035 - RNA, 19 nt, Artificial Sequence
  Description of Artificial Sequence: Synthetic oligonucleotide
agcaaaagcuugaucguag

SEQ ID NO: 463036 - RNA, 19 nt, Artificial Sequence
  Description of Artificial Sequence: Synthetic oligonucleotide
uugcauagcgccuuccaau

SEQ ID NO: 463037 - RNA, 19 nt, Artificial Sequence
  Description of Artificial Sequence: Synthetic oligonucleotide
gucgcaggcauaaugggcc

SEQ ID NO: 463038 - RNA, 19 nt, Artificial Sequence
  Description of Artificial Sequence: Synthetic oligonucleotide
ucagcuacuagugggacuu

SEQ ID NO: 463039 - RNA, 19 nt, Artificial Sequence
  Description of Artificial Sequence: Synthetic oligonucleotide
agcaaucacgauucugugu

SEQ ID NO: 463040 - RNA, 19 nt, Artificial Sequence
  Description of Artificial Sequence: Synthetic oligonucleotide
ugaauggagcaaccacagc

SEQ ID NO: 463041 - RNA, 19 nt, Artificial Sequence
  Description of Artificial Sequence: Synthetic oligonucleotide
aguucagcuaccgcccucg

SEQ ID NO: 463042 - RNA, 19 nt, Artificial Sequence
  Description of Artificial Sequence: Synthetic oligonucleotide
gauccccaaguucuuguug

SEQ ID NO: 463043 - RNA, 19 nt, Artificial Sequence
  Description of Artificial Sequence: Synthetic oligonucleotide
ggcauaaugggccaucuca

SEQ ID NO: 463044 - RNA, 19 nt, Artificial Sequence
  Description of Artificial Sequence: Synthetic oligonucleotide
gaagucguagagaccacug

SEQ ID NO: 463045 - RNA, 19 nt, Artificial Sequence
  Description of Artificial Sequence: Synthetic oligonucleotide
cugaaaugucuucccuucg

SEQ ID NO: 463046 - RNA, 19 nt, Artificial Sequence
  Description of Artificial Sequence: Synthetic oligonucleotide
cucuuggauaaagugcugc

SEQ ID NO: 463047 - RNA, 19 nt, Artificial Sequence
  Description of Artificial Sequence: Synthetic oligonucleotide
aacgauccgcacauccaac

SEQ ID NO: 463048 - RNA, 19 nt, Artificial Sequence
  Description of Artificial Sequence: Synthetic oligonucleotide
gaacacuucuuaucugaca

SEQ ID NO: 463049 - RNA, 19 nt, Artificial Sequence
  Description of Artificial Sequence: Synthetic oligonucleotide
gucguagcaggaacgaucc

SEQ ID NO: 463050 - RNA, 19 nt, Artificial Sequence
  Description of Artificial Sequence: Synthetic oligonucleotide
cuacuuuaugagacacgcc

SEQ ID NO: 463051 - RNA, 19 nt, Artificial Sequence
  Description of Artificial Sequence: Synthetic oligonucleotide
aucaauccagaccgaggag

SEQ ID NO: 463052 - RNA, 19 nt, Artificial Sequence
  Description of Artificial Sequence: Synthetic oligonucleotide
cuccaauaugguauacaug

SEQ ID NO: 463053 - RNA, 19 nt, Artificial Sequence
  Description of Artificial Sequence: Synthetic oligonucleotide
ugucuuucguuaacugaaa

SEQ ID NO: 463054 - RNA, 19 nt, Artificial Sequence
  Description of Artificial Sequence: Synthetic oligonucleotide
augucuuucguuaacugaa

SEQ ID NO: 463055 - RNA, 19 nt, Artificial Sequence
  Description of Artificial Sequence: Synthetic oligonucleotide
cuacgaugucaucuuuggg

SEQ ID NO: 463056 - RNA, 19 nt, Artificial Sequence
  Description of Artificial Sequence: Synthetic oligonucleotide
uuuuggcucaguggaagga

SEQ ID NO: 463057 - RNA, 19 nt, Artificial Sequence
  Description of Artificial Sequence: Synthetic oligonucleotide
uagaugcggccaaugaaau

SEQ ID NO: 463058 - RNA, 19 nt, Artificial Sequence
  Description of Artificial Sequence: Synthetic oligonucleotide
gauucuguguguaguggac

SEQ ID NO: 463059 - RNA, 19 nt, Artificial Sequence
  Description of Artificial Sequence: Synthetic oligonucleotide
agaacguucucugcucauc

SEQ ID NO: 463060 - RNA, 19 nt, Artificial Sequence
  Description of Artificial Sequence: Synthetic oligonucleotide
uuuggcucaguggaaggac

SEQ ID NO: 463061 - RNA, 19 nt, Artificial Sequence
  Description of Artificial Sequence: Synthetic oligonucleotide
aaauagccuaauacugagu

SEQ ID NO: 463062 - RNA, 19 nt, Artificial Sequence
  Description of Artificial Sequence: Synthetic oligonucleotide
uacgcuuugcccacugcuc

SEQ ID NO: 463063 - RNA, 19 nt, Artificial Sequence
  Description of Artificial Sequence: Synthetic oligonucleotide
ucgcauggagucucugucc

SEQ ID NO: 463064 - RNA, 19 nt, Artificial Sequence
  Description of Artificial Sequence: Synthetic oligonucleotide
ugacucgagcaugacagga

SEQ ID NO: 463065 - RNA, 19 nt, Artificial Sequence
  Description of Artificial Sequence: Synthetic oligonucleotide
cacgauucuguguguagug

SEQ ID NO: 463066 - RNA, 19 nt, Artificial Sequence
  Description of Artificial Sequence: Synthetic oligonucleotide
cucggaacaacuucuucca

SEQ ID NO: 463067 - RNA, 19 nt, Artificial Sequence
  Description of Artificial Sequence: Synthetic oligonucleotide
gugaggguaaaaucaggca

SEQ ID NO: 463068 - RNA, 19 nt, Artificial Sequence
  Description of Artificial Sequence: Synthetic oligonucleotide
cagucgcaggcauaauggg

SEQ ID NO: 463069 - RNA, 19 nt, Artificial Sequence
  Description of Artificial Sequence: Synthetic oligonucleotide
aucuacuuuaugagacacg

SEQ ID NO: 463070 - RNA, 19 nt, Artificial Sequence
  Description of Artificial Sequence: Synthetic oligonucleotide
uggcaugaacucuugguuu

SEQ ID NO: 463071 - RNA, 19 nt, Artificial Sequence
  Description of Artificial Sequence: Synthetic oligonucleotide
ucacgauucuguguguagu

SEQ ID NO: 463072 - RNA, 19 nt, Artificial Sequence
  Description of Artificial Sequence: Synthetic oligonucleotide
uagugggagacuuuacauu

SEQ ID NO: 463073 - RNA, 19 nt, Artificial Sequence
  Description of Artificial Sequence: Synthetic oligonucleotide
ggucuuuagaacuggcuca

SEQ ID NO: 463074 - RNA, 19 nt, Artificial Sequence
  Description of Artificial Sequence: Synthetic oligonucleotide
acaggucguagcaggaacg

SEQ ID NO: 463075 - RNA, 19 nt, Artificial Sequence
  Description of Artificial Sequence: Synthetic oligonucleotide
cagcagaacacuucuuauc

SEQ ID NO: 463076 - RNA, 19 nt, Artificial Sequence
  Description of Artificial Sequence: Synthetic oligonucleotide
cugugauguagcauucguc

SEQ ID NO: 463077 - RNA, 19 nt, Artificial Sequence
  Description of Artificial Sequence: Synthetic oligonucleotide
guagaugcggccaaugaaa

SEQ ID NO: 463078 - RNA, 19 nt, Artificial Sequence
  Description of Artificial Sequence: Synthetic oligonucleotide
gcagucgcaggcauaaugg

SEQ ID NO: 463079 - RNA, 19 nt, Artificial Sequence
  Description of Artificial Sequence: Synthetic oligonucleotide
aaguugucacaaguugcca

SEQ ID NO: 463080 - RNA, 19 nt, Artificial Sequence
  Description of Artificial Sequence: Synthetic oligonucleotide
ugucgcauggagucucugu

SEQ ID NO: 463081 - RNA, 19 nt, Artificial Sequence
  Description of Artificial Sequence: Synthetic oligonucleotide
ggcuuuaucuuccuucaac

SEQ ID NO: 463082 - RNA, 19 nt, Artificial Sequence
  Description of Artificial Sequence: Synthetic oligonucleotide
uccacguguaguguuuucu

SEQ ID NO: 463083 - RNA, 19 nt, Artificial Sequence
  Description of Artificial Sequence: Synthetic oligonucleotide
ucccucucggacauggaau

SEQ ID NO: 463084 - RNA, 19 nt, Artificial Sequence
  Description of Artificial Sequence: Synthetic oligonucleotide
uggacaugauucauucauu

SEQ ID NO: 463085 - RNA, 19 nt, Artificial Sequence
  Description of Artificial Sequence: Synthetic oligonucleotide
gaauuccccuuucucguuc

SEQ ID NO: 463086 - RNA, 19 nt, Artificial Sequence
  Description of Artificial Sequence: Synthetic oligonucleotide
caggaaaauucccugugca

SEQ ID NO: 463087 - RNA, 19 nt, Artificial Sequence
  Description of Artificial Sequence: Synthetic oligonucleotide
ugcuccaauaugguauaca

SEQ ID NO: 463088 - RNA, 19 nt, Artificial Sequence
  Description of Artificial Sequence: Synthetic oligonucleotide
ugggagacuuuacauuaua

SEQ ID NO: 463089 - RNA, 19 nt, Artificial Sequence
  Description of Artificial Sequence: Synthetic oligonucleotide
uguacgcuuugcccacugc

SEQ ID NO: 463090 - RNA, 19 nt, Artificial Sequence
  Description of Artificial Sequence: Synthetic oligonucleotide
ucugcccuuaucugucgca

SEQ ID NO: 463091 - RNA, 19 nt, Artificial Sequence
  Description of Artificial Sequence: Synthetic oligonucleotide
ugacucggaucaauccaga

SEQ ID NO: 463092 - RNA, 19 nt, Artificial Sequence
  Description of Artificial Sequence: Synthetic oligonucleotide
gcccuuaucugucgcaugg

SEQ ID NO: 463093 - RNA, 19 nt, Artificial Sequence
  Description of Artificial Sequence: Synthetic oligonucleotide
cucagcguugcaguauggg

SEQ ID NO: 463094 - RNA, 19 nt, Artificial Sequence
  Description of Artificial Sequence: Synthetic oligonucleotide
aagccacaccaaucucauc

SEQ ID NO: 463095 - RNA, 19 nt, Artificial Sequence
  Description of Artificial Sequence: Synthetic oligonucleotide
auagcgccuuccaauggac

SEQ ID NO: 463096 - RNA, 19 nt, Artificial Sequence
  Description of Artificial Sequence: Synthetic oligonucleotide
gacucggaucaauccagac

SEQ ID NO: 463097 - RNA, 19 nt, Artificial Sequence
  Description of Artificial Sequence: Synthetic oligonucleotide
gacacgccauuccugguca

SEQ ID NO: 463098 - RNA, 19 nt, Artificial Sequence
  Description of Artificial Sequence: Synthetic oligonucleotide
gagcugagguacuccauca

SEQ ID NO: 463099 - RNA, 19 nt, Artificial Sequence
  Description of Artificial Sequence: Synthetic oligonucleotide
auauccaggcauauuuccu

SEQ ID NO: 463100 - RNA, 19 nt, Artificial Sequence
  Description of Artificial Sequence: Synthetic oligonucleotide
gucgcauggagucucuguc

SEQ ID NO: 463101 - RNA, 19 nt, Artificial Sequence
  Description of Artificial Sequence: Synthetic oligonucleotide
uuguacgcuuugcccacug

SEQ ID NO: 463102 - RNA, 19 nt, Artificial Sequence
  Description of Artificial Sequence: Synthetic oligonucleotide
cacggcuagccgcaguggg

SEQ ID NO: 463103 - RNA, 19 nt, Artificial Sequence
  Description of Artificial Sequence: Synthetic oligonucleotide
cucguucagcagcuguucc

SEQ ID NO: 463104 - RNA, 19 nt, Artificial Sequence
  Description of Artificial Sequence: Synthetic oligonucleotide
cuguguguaguggacauga

SEQ ID NO: 463105 - RNA, 19 nt, Artificial Sequence
  Description of Artificial Sequence: Synthetic oligonucleotide
cuuuuaccaugaagucagc

SEQ ID NO: 463106 - RNA, 19 nt, Artificial Sequence
  Description of Artificial Sequence: Synthetic oligonucleotide
ucggaacaacuucuuccac

SEQ ID NO: 463107 - RNA, 19 nt, Artificial Sequence
  Description of Artificial Sequence: Synthetic oligonucleotide
gugacucgagcaugacagg

SEQ ID NO: 463108 - RNA, 19 nt, Artificial Sequence
  Description of Artificial Sequence: Synthetic oligonucleotide
ucauuccucuacugucucu

SEQ ID NO: 463109 - RNA, 19 nt, Artificial Sequence
  Description of Artificial Sequence: Synthetic oligonucleotide
gacucugcaucccagcagu

SEQ ID NO: 463110 - RNA, 19 nt, Artificial Sequence
  Description of Artificial Sequence: Synthetic oligonucleotide
ggaucaauccagaccgagg

SEQ ID NO: 463111 - RNA, 19 nt, Artificial Sequence
  Description of Artificial Sequence: Synthetic oligonucleotide
ugggcucaaacuguacaac

SEQ ID NO: 463112 - RNA, 19 nt, Artificial Sequence
  Description of Artificial Sequence: Synthetic oligonucleotide
ucguagcaggaacgauccg

SEQ ID NO: 463113 - RNA, 19 nt, Artificial Sequence
  Description of Artificial Sequence: Synthetic oligonucleotide
gaaaauucccugugcaguu

SEQ ID NO: 463114 - RNA, 19 nt, Artificial Sequence
  Description of Artificial Sequence: Synthetic oligonucleotide
gugaauuccccuuucucgu

SEQ ID NO: 463115 - RNA, 19 nt, Artificial Sequence
  Description of Artificial Sequence: Synthetic oligonucleotide
uaucuacgaugucaucuuu

SEQ ID NO: 463116 - RNA, 19 nt, Artificial Sequence
  Description of Artificial Sequence: Synthetic oligonucleotide
ggagacuuuacauuauagu

SEQ ID NO: 463117 - RNA, 19 nt, Artificial Sequence
  Description of Artificial Sequence: Synthetic oligonucleotide
uggucagcgcggaaacacu

SEQ ID NO: 463118 - RNA, 19 nt, Artificial Sequence
  Description of Artificial Sequence: Synthetic oligonucleotide
gaacguucucugcucaucu

SEQ ID NO: 463119 - RNA, 19 nt, Artificial Sequence
  Description of Artificial Sequence: Synthetic oligonucleotide
acauccuacuggcccgaag

SEQ ID NO: 463120 - RNA, 19 nt, Artificial Sequence
  Description of Artificial Sequence: Synthetic oligonucleotide
cauagcgccuuccaaugga

SEQ ID NO: 463121 - RNA, 19 nt, Artificial Sequence
  Description of Artificial Sequence: Synthetic oligonucleotide
gggagacuuuacauuauag

SEQ ID NO: 463122 - RNA, 19 nt, Artificial Sequence
  Description of Artificial Sequence: Synthetic oligonucleotide
gacaucaauuucuguaaau

SEQ ID NO: 463123 - RNA, 19 nt, Artificial Sequence
  Description of Artificial Sequence: Synthetic oligonucleotide
ugggaaacugaagaacguu

SEQ ID NO: 463124 - RNA, 19 nt, Artificial Sequence
  Description of Artificial Sequence: Synthetic oligonucleotide
gguauacaugauccugccc

SEQ ID NO: 463125 - RNA, 19 nt, Artificial Sequence
  Description of Artificial Sequence: Synthetic oligonucleotide
cucggacauggaaugugug

SEQ ID NO: 463126 - RNA, 19 nt, Artificial Sequence
  Description of Artificial Sequence: Synthetic oligonucleotide
cagauauccaggcauauuu

SEQ ID NO: 463127 - RNA, 19 nt, Artificial Sequence
  Description of Artificial Sequence: Synthetic oligonucleotide
ucccugacucggaucaauc

SEQ ID NO: 463128 - RNA, 19 nt, Artificial Sequence
  Description of Artificial Sequence: Synthetic oligonucleotide
guggucagcgcggaaacac

SEQ ID NO: 463129 - RNA, 19 nt, Artificial Sequence
  Description of Artificial Sequence: Synthetic oligonucleotide
guagcaggaacgauccgca

SEQ ID NO: 463130 - RNA, 19 nt, Artificial Sequence
  Description of Artificial Sequence: Synthetic oligonucleotide
gggaucuacaaagugcuca

SEQ ID NO: 463131 - RNA, 19 nt, Artificial Sequence
  Description of Artificial Sequence: Synthetic oligonucleotide
guagugggagacuuuacau

SEQ ID NO: 463132 - RNA, 19 nt, Artificial Sequence
  Description of Artificial Sequence: Synthetic oligonucleotide
cacacugaccaugucuuuc

SEQ ID NO: 463133 - RNA, 19 nt, Artificial Sequence
  Description of Artificial Sequence: Synthetic oligonucleotide
ucucagcuacuagugggac

SEQ ID NO: 463134 - RNA, 19 nt, Artificial Sequence
  Description of Artificial Sequence: Synthetic oligonucleotide
gaggguaaaaucaggcagu

SEQ ID NO: 463135 - RNA, 19 nt, Artificial Sequence
  Description of Artificial Sequence: Synthetic oligonucleotide
cccaaugaaggucuugaac

SEQ ID NO: 463136 - RNA, 19 nt, Artificial Sequence
  Description of Artificial Sequence: Synthetic oligonucleotide
ggccaagacacuuuccauc

SEQ ID NO: 463137 - RNA, 19 nt, Artificial Sequence
  Description of Artificial Sequence: Synthetic oligonucleotide
cauuugaauggagcaacca

SEQ ID NO: 463138 - RNA, 19 nt, Artificial Sequence
  Description of Artificial Sequence: Synthetic oligonucleotide
cuuaucugucgcauggagu

SEQ ID NO: 463139 - RNA, 19 nt, Artificial Sequence
  Description of Artificial Sequence: Synthetic oligonucleotide
gguagaugcggccaaugaa

SEQ ID NO: 463140 - RNA, 19 nt, Artificial Sequence
  Description of Artificial Sequence: Synthetic oligonucleotide
ucccuucgguuucaauagu

SEQ ID NO: 463141 - RNA, 19 nt, Artificial Sequence
  Description of Artificial Sequence: Synthetic oligonucleotide
uacuggcccgaagucguag

SEQ ID NO: 463142 - RNA, 19 nt, Artificial Sequence
  Description of Artificial Sequence: Synthetic oligonucleotide
ggacuuuggugacucgagc

SEQ ID NO: 463143 - RNA, 19 nt, Artificial Sequence
  Description of Artificial Sequence: Synthetic oligonucleotide
guuaucaagcugggccaag

SEQ ID NO: 463144 - RNA, 19 nt, Artificial Sequence
  Description of Artificial Sequence: Synthetic oligonucleotide
ugucggaagcgaaguuuau

SEQ ID NO: 463145 - RNA, 19 nt, Artificial Sequence
  Description of Artificial Sequence: Synthetic oligonucleotide
agcgccagcuccuuugcuu

SEQ ID NO: 463146 - RNA, 19 nt, Artificial Sequence
  Description of Artificial Sequence: Synthetic oligonucleotide
ccuuaucugucgcauggag

SEQ ID NO: 463147 - RNA, 19 nt, Artificial Sequence
  Description of Artificial Sequence: Synthetic oligonucleotide
ucccaggcgcaucuuccga

SEQ ID NO: 463148 - RNA, 19 nt, Artificial Sequence
  Description of Artificial Sequence: Synthetic oligonucleotide
caguagugggagacuuuac

SEQ ID NO: 463149 - RNA, 19 nt, Artificial Sequence
  Description of Artificial Sequence: Synthetic oligonucleotide
ugaggggcuuuaucuuccu

SEQ ID NO: 463150 - RNA, 19 nt, Artificial Sequence
  Description of Artificial Sequence: Synthetic oligonucleotide
agcuacuagugggacuuug

SEQ ID NO: 463151 - RNA, 19 nt, Artificial Sequence
  Description of Artificial Sequence: Synthetic oligonucleotide
ucgcaggcauaaugggcca

SEQ ID NO: 463152 - RNA, 19 nt, Artificial Sequence
  Description of Artificial Sequence: Synthetic oligonucleotide
acacuccccguucuucaca

SEQ ID NO: 463153 - RNA, 19 nt, Artificial Sequence
  Description of Artificial Sequence: Synthetic oligonucleotide
gaguuguuaaucacacccu

SEQ ID NO: 463154 - RNA, 19 nt, Artificial Sequence
  Description of Artificial Sequence: Synthetic oligonucleotide
cauccuacuggcccgaagu

SEQ ID NO: 463155 - RNA, 19 nt, Artificial Sequence
  Description of Artificial Sequence: Synthetic oligonucleotide
cugucggaagcgaaguuua

SEQ ID NO: 463156 - RNA, 19 nt, Artificial Sequence
  Description of Artificial Sequence: Synthetic oligonucleotide
gcauagcgccuuccaaugg

SEQ ID NO: 463157 - RNA, 19 nt, Artificial Sequence
  Description of Artificial Sequence: Synthetic oligonucleotide
ggucguagcaggaacgauc

SEQ ID NO: 463158 - RNA, 19 nt, Artificial Sequence
  Description of Artificial Sequence: Synthetic oligonucleotide
agauccccaaguucuuguu

SEQ ID NO: 463159 - RNA, 19 nt, Artificial Sequence
  Description of Artificial Sequence: Synthetic oligonucleotide
cagaacccucuuccgggcc

SEQ ID NO: 463160 - RNA, 19 nt, Artificial Sequence
  Description of Artificial Sequence: Synthetic oligonucleotide
cauucgucacaggagcuga

SEQ ID NO: 463161 - RNA, 19 nt, Artificial Sequence
  Description of Artificial Sequence: Synthetic oligonucleotide
ggacguuuuggacucugca

SEQ ID NO: 463162 - RNA, 19 nt, Artificial Sequence
  Description of Artificial Sequence: Synthetic oligonucleotide
cucuaucuacgaugucauc

SEQ ID NO: 463163 - RNA, 19 nt, Artificial Sequence
  Description of Artificial Sequence: Synthetic oligonucleotide
cuuuaauugugaggguaaa

SEQ ID NO: 463164 - RNA, 19 nt, Artificial Sequence
  Description of Artificial Sequence: Synthetic oligonucleotide
agaugcggccaaugaaaua

SEQ ID NO: 463165 - RNA, 19 nt, Artificial Sequence
  Description of Artificial Sequence: Synthetic oligonucleotide
guacgcuuugcccacugcu

SEQ ID NO: 463166 - RNA, 19 nt, Artificial Sequence
  Description of Artificial Sequence: Synthetic oligonucleotide
gccauaggacguuuuggac

SEQ ID NO: 463167 - RNA, 19 nt, Artificial Sequence
  Description of Artificial Sequence: Synthetic oligonucleotide
gucagcgcggaaacacucc

SEQ ID NO: 463168 - RNA, 19 nt, Artificial Sequence
  Description of Artificial Sequence: Synthetic oligonucleotide
aguuaucaagcugggccaa

SEQ ID NO: 463169 - RNA, 19 nt, Artificial Sequence
  Description of Artificial Sequence: Synthetic oligonucleotide
cagacugcccgcugaccug

SEQ ID NO: 463170 - RNA, 19 nt, Artificial Sequence
  Description of Artificial Sequence: Synthetic oligonucleotide
ugcagucgaucuccaggau

SEQ ID NO: 463171 - RNA, 19 nt, Artificial Sequence
  Description of Artificial Sequence: Synthetic oligonucleotide
accaggcaauucagagacc

SEQ ID NO: 463172 - RNA, 19 nt, Artificial Sequence
  Description of Artificial Sequence: Synthetic oligonucleotide
gggacuuuggugacucgag

SEQ ID NO: 463173 - RNA, 19 nt, Artificial Sequence
  Description of Artificial Sequence: Synthetic oligonucleotide
accgaggagagaucucauu

SEQ ID NO: 463174 - RNA, 19 nt, Artificial Sequence
  Description of Artificial Sequence: Synthetic oligonucleotide
uuccacguguaguguuuuc

SEQ ID NO: 463175 - RNA, 19 nt, Artificial Sequence
  Description of Artificial Sequence: Synthetic oligonucleotide
cuaucuacgaugucaucuu

SEQ ID NO: 463176 - RNA, 19 nt, Artificial Sequence
  Description of Artificial Sequence: Synthetic oligonucleotide
ugcauccuucuuguacgcu

SEQ ID NO: 463177 - RNA, 19 nt, Artificial Sequence
  Description of Artificial Sequence: Synthetic oligonucleotide
cguagcaggaacgauccgc

SEQ ID NO: 463178 - RNA, 19 nt, Artificial Sequence
  Description of Artificial Sequence: Synthetic oligonucleotide
agcuuucagcaggugguca

SEQ ID NO: 463179 - RNA, 19 nt, Artificial Sequence
  Description of Artificial Sequence: Synthetic oligonucleotide
gcuccaauaugguauacau

SEQ ID NO: 463180 - RNA, 19 nt, Artificial Sequence
  Description of Artificial Sequence: Synthetic oligonucleotide
augugugcuccaauauggu

SEQ ID NO: 463181 - RNA, 19 nt, Artificial Sequence
  Description of Artificial Sequence: Synthetic oligonucleotide
uggcccgaagucguagaga

SEQ ID NO: 463182 - RNA, 19 nt, Artificial Sequence
  Description of Artificial Sequence: Synthetic oligonucleotide
ugcugucggaagcgaaguu

SEQ ID NO: 463183 - RNA, 19 nt, Artificial Sequence
  Description of Artificial Sequence: Synthetic oligonucleotide
cugagacgcggacgcggcg

SEQ ID NO: 463184 - RNA, 19 nt, Artificial Sequence
  Description of Artificial Sequence: Synthetic oligonucleotide
gaguucagcuaccgcccuc

SEQ ID NO: 463185 - RNA, 19 nt, Artificial Sequence
  Description of Artificial Sequence: Synthetic oligonucleotide
cuugcgcacgaggucuccc

SEQ ID NO: 463186 - RNA, 19 nt, Artificial Sequence
  Description of Artificial Sequence: Synthetic oligonucleotide
uccagccauaggacguuuu

SEQ ID NO: 463187 - RNA, 19 nt, Artificial Sequence
  Description of Artificial Sequence: Synthetic oligonucleotide
ccugaggggcuuuaucuuc

SEQ ID NO: 463188 - RNA, 19 nt, Artificial Sequence
  Description of Artificial Sequence: Synthetic oligonucleotide
agccgcugagacgcggacg

SEQ ID NO: 463189 - RNA, 19 nt, Artificial Sequence
  Description of Artificial Sequence: Synthetic oligonucleotide
cccuucgguuucaauagug

SEQ ID NO: 463190 - RNA, 19 nt, Artificial Sequence
  Description of Artificial Sequence: Synthetic oligonucleotide
auucgucacaggagcugag

SEQ ID NO: 463191 - RNA, 19 nt, Artificial Sequence
  Description of Artificial Sequence: Synthetic oligonucleotide
uucccugacucggaucaau

SEQ ID NO: 463192 - RNA, 19 nt, Artificial Sequence
  Description of Artificial Sequence: Synthetic oligonucleotide
cccucucggacauggaaug

SEQ ID NO: 463193 - RNA, 19 nt, Artificial Sequence
  Description of Artificial Sequence: Synthetic oligonucleotide
ccugacucggaucaaucca

SEQ ID NO: 463194 - RNA, 19 nt, Artificial Sequence
  Description of Artificial Sequence: Synthetic oligonucleotide
agcuaccgcccucguccac

SEQ ID NO: 463195 - RNA, 19 nt, Artificial Sequence
  Description of Artificial Sequence: Synthetic oligonucleotide
cugggaaacugaagaacgu

SEQ ID NO: 463196 - RNA, 19 nt, Artificial Sequence
  Description of Artificial Sequence: Synthetic oligonucleotide
gugaauucccugacucgga

SEQ ID NO: 463197 - RNA, 19 nt, Artificial Sequence
  Description of Artificial Sequence: Synthetic oligonucleotide
gcauucgucacaggagcug

SEQ ID NO: 463198 - RNA, 19 nt, Artificial Sequence
  Description of Artificial Sequence: Synthetic oligonucleotide
aggggauaccuggacucca

SEQ ID NO: 463199 - RNA, 19 nt, Artificial Sequence
  Description of Artificial Sequence: Synthetic oligonucleotide
gacccagaggaaucaucua

SEQ ID NO: 463200 - RNA, 19 nt, Artificial Sequence
  Description of Artificial Sequence: Synthetic oligonucleotide
caccaaucucaucuguucu

SEQ ID NO: 463201 - RNA, 19 nt, Artificial Sequence
  Description of Artificial Sequence: Synthetic oligonucleotide
gucuuucguuaacugaaau

SEQ ID NO: 463202 - RNA, 19 nt, Artificial Sequence
  Description of Artificial Sequence: Synthetic oligonucleotide
ggaacgauccgcacaucca

SEQ ID NO: 463203 - RNA, 19 nt, Artificial Sequence
  Description of Artificial Sequence: Synthetic oligonucleotide
cuagccgcaguggggcgag

SEQ ID NO: 463204 - RNA, 19 nt, Artificial Sequence
  Description of Artificial Sequence: Synthetic oligonucleotide
cagaccgaggagagaucuc

SEQ ID NO: 463205 - RNA, 19 nt, Artificial Sequence
  Description of Artificial Sequence: Synthetic oligonucleotide
guguguaguggacaugauu

SEQ ID NO: 463206 - RNA, 19 nt, Artificial Sequence
  Description of Artificial Sequence: Synthetic oligonucleotide
ggucucagauauccaggca

SEQ ID NO: 463207 - RNA, 19 nt, Artificial Sequence
  Description of Artificial Sequence: Synthetic oligonucleotide
aggagccgcugagacgcgg

SEQ ID NO: 463208 - RNA, 19 nt, Artificial Sequence
  Description of Artificial Sequence: Synthetic oligonucleotide
ggauaaagugcugccucca

SEQ ID NO: 463209 - RNA, 19 nt, Artificial Sequence
  Description of Artificial Sequence: Synthetic oligonucleotide
gggcuuuugcugaguacag

SEQ ID NO: 463210 - RNA, 19 nt, Artificial Sequence
  Description of Artificial Sequence: Synthetic oligonucleotide
cguagagaccacugacacc

SEQ ID NO: 463211 - RNA, 19 nt, Artificial Sequence
  Description of Artificial Sequence: Synthetic oligonucleotide
gggaacgcugaggagccgc

SEQ ID NO: 463212 - RNA, 19 nt, Artificial Sequence
  Description of Artificial Sequence: Synthetic oligonucleotide
caauagugaauuccccuuu

SEQ ID NO: 463213 - RNA, 19 nt, Artificial Sequence
  Description of Artificial Sequence: Synthetic oligonucleotide
cugcgcgggaacgcugagg

SEQ ID NO: 463214 - RNA, 19 nt, Artificial Sequence
  Description of Artificial Sequence: Synthetic oligonucleotide
acaccuccauaaauagcaa

SEQ ID NO: 463215 - RNA, 19 nt, Artificial Sequence
  Description of Artificial Sequence: Synthetic oligonucleotide
ccaaaagucgcuugaaauu

SEQ ID NO: 463216 - RNA, 19 nt, Artificial Sequence
  Description of Artificial Sequence: Synthetic oligonucleotide
caggucguagcaggaacga

SEQ ID NO: 463217 - RNA, 19 nt, Artificial Sequence
  Description of Artificial Sequence: Synthetic oligonucleotide
cggaagcgaaguuuaucag

SEQ ID NO: 463218 - RNA, 19 nt, Artificial Sequence
  Description of Artificial Sequence: Synthetic oligonucleotide
gcaggaacgauccgcacau

SEQ ID NO: 463219 - RNA, 19 nt, Artificial Sequence
  Description of Artificial Sequence: Synthetic oligonucleotide
aggagagaucucauuucua

SEQ ID NO: 463220 - RNA, 19 nt, Artificial Sequence
  Description of Artificial Sequence: Synthetic oligonucleotide
cggccaaugaaauagccua

SEQ ID NO: 463221 - RNA, 19 nt, Artificial Sequence
  Description of Artificial Sequence: Synthetic oligonucleotide
gcgaaguuuaucaggagau

SEQ ID NO: 463222 - RNA, 19 nt, Artificial Sequence
  Description of Artificial Sequence: Synthetic oligonucleotide
cacggaccacaccaggcaa

SEQ ID NO: 463223 - RNA, 19 nt, Artificial Sequence
  Description of Artificial Sequence: Synthetic oligonucleotide
gucagagcuucagauaauu

SEQ ID NO: 463224 - RNA, 19 nt, Artificial Sequence
  Description of Artificial Sequence: Synthetic oligonucleotide
cucagcuacuagugggacu

SEQ ID NO: 463225 - RNA, 19 nt, Artificial Sequence
  Description of Artificial Sequence: Synthetic oligonucleotide
ccgcacauccaacaaucuc

SEQ ID NO: 463226 - RNA, 19 nt, Artificial Sequence
  Description of Artificial Sequence: Synthetic oligonucleotide
cccucagcguugcaguaug

SEQ ID NO: 463227 - RNA, 19 nt, Artificial Sequence
  Description of Artificial Sequence: Synthetic oligonucleotide
gcgggaacgcugaggagcc

SEQ ID NO: 463228 - RNA, 19 nt, Artificial Sequence
  Description of Artificial Sequence: Synthetic oligonucleotide
ggucagcgcggaaacacuc

SEQ ID NO: 463229 - RNA, 19 nt, Artificial Sequence
  Description of Artificial Sequence: Synthetic oligonucleotide
aggucguagcaggaacgau

SEQ ID NO: 463230 - RNA, 19 nt, Artificial Sequence
  Description of Artificial Sequence: Synthetic oligonucleotide
ggcuagccgcaguggggcg

SEQ ID NO: 463231 - RNA, 19 nt, Artificial Sequence
  Description of Artificial Sequence: Synthetic oligonucleotide
gggauaccuggacuccaca

SEQ ID NO: 463232 - RNA, 19 nt, Artificial Sequence
  Description of Artificial Sequence: Synthetic oligonucleotide
agguaccggaggagacagg

SEQ ID NO: 463233 - RNA, 19 nt, Artificial Sequence
  Description of Artificial Sequence: Synthetic oligonucleotide
ccaaugaaauagccuaaua

SEQ ID NO: 463234 - RNA, 19 nt, Artificial Sequence
  Description of Artificial Sequence: Synthetic oligonucleotide
auaggacguuuuggacucu

SEQ ID NO: 463235 - RNA, 19 nt, Artificial Sequence
  Description of Artificial Sequence: Synthetic oligonucleotide
ccucagcguugcaguaugg

SEQ ID NO: 463236 - RNA, 19 nt, Artificial Sequence
  Description of Artificial Sequence: Synthetic oligonucleotide
cgauucuguguguagugga

SEQ ID NO: 463237 - RNA, 19 nt, Artificial Sequence
  Description of Artificial Sequence: Synthetic oligonucleotide
gcugagacgcggacgcggc

SEQ ID NO: 463238 - RNA, 19 nt, Artificial Sequence
  Description of Artificial Sequence: Synthetic oligonucleotide
guaccggaggagacagguc

SEQ ID NO: 463239 - RNA, 19 nt, Artificial Sequence
  Description of Artificial Sequence: Synthetic oligonucleotide
agccgcaguggggcgagca

SEQ ID NO: 463240 - RNA, 19 nt, Artificial Sequence
  Description of Artificial Sequence: Synthetic oligonucleotide
gugcuccaauaugguauac

SEQ ID NO: 463241 - RNA, 19 nt, Artificial Sequence
  Description of Artificial Sequence: Synthetic oligonucleotide
cugcucccuuauugggcuc

SEQ ID NO: 463242 - RNA, 19 nt, Artificial Sequence
  Description of Artificial Sequence: Synthetic oligonucleotide
acggaccacaccaggcaau

SEQ ID NO: 463243 - RNA, 19 nt, Artificial Sequence
  Description of Artificial Sequence: Synthetic oligonucleotide
ggccaaugaaauagccuaa

SEQ ID NO: 463244 - RNA, 19 nt, Artificial Sequence
  Description of Artificial Sequence: Synthetic oligonucleotide
cggaucaauccagaccgag

SEQ ID NO: 463245 - RNA, 19 nt, Artificial Sequence
  Description of Artificial Sequence: Synthetic oligonucleotide
agccuaauacugaguuguu

SEQ ID NO: 463246 - RNA, 19 nt, Artificial Sequence
  Description of Artificial Sequence: Synthetic oligonucleotide
ggggauaccuggacuccac

SEQ ID NO: 463247 - RNA, 19 nt, Artificial Sequence
  Description of Artificial Sequence: Synthetic oligonucleotide
gcaggcauaaugggccauc

SEQ ID NO: 463248 - RNA, 19 nt, Artificial Sequence
  Description of Artificial Sequence: Synthetic oligonucleotide
gccuaauacugaguuguua

SEQ ID NO: 463249 - RNA, 19 nt, Artificial Sequence
  Description of Artificial Sequence: Synthetic oligonucleotide
auucccugacucggaucaa

SEQ ID NO: 463250 - RNA, 19 nt, Artificial Sequence
  Description of Artificial Sequence: Synthetic oligonucleotide
cacgccauuccuggucaga

SEQ ID NO: 463251 - RNA, 19 nt, Artificial Sequence
  Description of Artificial Sequence: Synthetic oligonucleotide
cacuccccguucuucacau

SEQ ID NO: 463252 - RNA, 19 nt, Artificial Sequence
  Description of Artificial Sequence: Synthetic oligonucleotide
gcuaccgcccucguccaca

SEQ ID NO: 463253 - RNA, 19 nt, Artificial Sequence
  Description of Artificial Sequence: Synthetic oligonucleotide
ccaguagugggagacuuua

SEQ ID NO: 463254 - RNA, 19 nt, Artificial Sequence
  Description of Artificial Sequence: Synthetic oligonucleotide
caucagcccaagugaugcu

SEQ ID NO: 463255 - RNA, 19 nt, Artificial Sequence
  Description of Artificial Sequence: Synthetic oligonucleotide
cgcacggcuagccgcagug

SEQ ID NO: 463256 - RNA, 19 nt, Artificial Sequence
  Description of Artificial Sequence: Synthetic oligonucleotide
caggcauaaugggccaucu

SEQ ID NO: 463257 - RNA, 19 nt, Artificial Sequence
  Description of Artificial Sequence: Synthetic oligonucleotide
ccgaggagagaucucauuu

SEQ ID NO: 463258 - RNA, 19 nt, Artificial Sequence
  Description of Artificial Sequence: Synthetic oligonucleotide
gcugcgcgggaacgcugag

SEQ ID NO: 463259 - RNA, 19 nt, Artificial Sequence
  Description of Artificial Sequence: Synthetic oligonucleotide
caggaacgauccgcacauc

SEQ ID NO: 463260 - RNA, 19 nt, Artificial Sequence
  Description of Artificial Sequence: Synthetic oligonucleotide
gcacgaggucucccugcug

SEQ ID NO: 463261 - RNA, 19 nt, Artificial Sequence
  Description of Artificial Sequence: Synthetic oligonucleotide
gcugucggaagcgaaguuu

SEQ ID NO: 463262 - RNA, 19 nt, Artificial Sequence
  Description of Artificial Sequence: Synthetic oligonucleotide
gcggccaaugaaauagccu

SEQ ID NO: 463263 - RNA, 19 nt, Artificial Sequence
  Description of Artificial Sequence: Synthetic oligonucleotide
cggcuagccgcaguggggc

SEQ ID NO: 463264 - RNA, 19 nt, Artificial Sequence
  Description of Artificial Sequence: Synthetic oligonucleotide
gccaaugaaauagccuaau

SEQ ID NO: 463265 - RNA, 19 nt, Artificial Sequence
  Description of Artificial Sequence: Synthetic oligonucleotide
ccagaccgaggagagaucu

SEQ ID NO: 463266 - RNA, 19 nt, Artificial Sequence
  Description of Artificial Sequence: Synthetic oligonucleotide
gcgccuuccaauggaccca

SEQ ID NO: 463267 - RNA, 19 nt, Artificial Sequence
  Description of Artificial Sequence: Synthetic oligonucleotide
gcgcgggaacgcugaggag

SEQ ID NO: 463268 - RNA, 19 nt, Artificial Sequence
  Description of Artificial Sequence: Synthetic oligonucleotide
guucagcuaccgcccucgu

SEQ ID NO: 463269 - RNA, 19 nt, Artificial Sequence
  Description of Artificial Sequence: Synthetic oligonucleotide
ccgagcagacugcccgcug

SEQ ID NO: 463270 - RNA, 19 nt, Artificial Sequence
  Description of Artificial Sequence: Synthetic oligonucleotide
uagccgcaguggggcgagc

SEQ ID NO: 463271 - RNA, 19 nt, Artificial Sequence
  Description of Artificial Sequence: Synthetic oligonucleotide
cuaccgcccucguccacau

SEQ ID NO: 463272 - RNA, 19 nt, Artificial Sequence
  Description of Artificial Sequence: Synthetic oligonucleotide
ggaacgcugaggagccgcu

SEQ ID NO: 463273 - RNA, 19 nt, Artificial Sequence
  Description of Artificial Sequence: Synthetic oligonucleotide
cgaaguuuaucaggagaua

SEQ ID NO: 463274 - RNA, 19 nt, Artificial Sequence
  Description of Artificial Sequence: Synthetic oligonucleotide
cucccuuauugggcucaaa

SEQ ID NO: 463275 - RNA, 19 nt, Artificial Sequence
  Description of Artificial Sequence: Synthetic oligonucleotide
gcaugacaggacaggucgu

SEQ ID NO: 463276 - RNA, 19 nt, Artificial Sequence
  Description of Artificial Sequence: Synthetic oligonucleotide
cacauccuacuggcccgaa

SEQ ID NO: 463277 - RNA, 19 nt, Artificial Sequence
  Description of Artificial Sequence: Synthetic oligonucleotide
gcucccuuauugggcucaa

SEQ ID NO: 463278 - RNA, 19 nt, Artificial Sequence
  Description of Artificial Sequence: Synthetic oligonucleotide
gccaguagugggagacuuu

SEQ ID NO: 463279 - RNA, 19 nt, Artificial Sequence
  Description of Artificial Sequence: Synthetic oligonucleotide
cgggaacgcugaggagccg

SEQ ID NO: 463280 - RNA, 19 nt, Artificial Sequence
  Description of Artificial Sequence: Synthetic oligonucleotide
cgcacgaggucucccugcu

SEQ ID NO: 463281 - RNA, 19 nt, Artificial Sequence
  Description of Artificial Sequence: Synthetic oligonucleotide
cagcagucgcaggcauaau

SEQ ID NO: 463282 - RNA, 19 nt, Artificial Sequence
  Description of Artificial Sequence: Synthetic oligonucleotide
cagcuacuagugggacuuu

SEQ ID NO: 463283 - RNA, 19 nt, Artificial Sequence
  Description of Artificial Sequence: Synthetic oligonucleotide
cggaccacaccaggcaauu

SEQ ID NO: 463284 - RNA, 19 nt, Artificial Sequence
  Description of Artificial Sequence: Synthetic oligonucleotide
ccggaggagacaggucauu

SEQ ID NO: 463285 - RNA, 19 nt, Artificial Sequence
  Description of Artificial Sequence: Synthetic oligonucleotide
cgcaggcauaaugggccau

SEQ ID NO: 463286 - RNA, 19 nt, Artificial Sequence
  Description of Artificial Sequence: Synthetic oligonucleotide
cggcgcuguccaugcugcu

SEQ ID NO: 463287 - RNA, 19 nt, Artificial Sequence
  Description of Artificial Sequence: Synthetic oligonucleotide
aaaacguuuauauagcucu

SEQ ID NO: 463288 - RNA, 19 nt, Artificial Sequence
  Description of Artificial Sequence: Synthetic oligonucleotide
aagauaaggguuuccaacc

SEQ ID NO: 463289 - RNA, 19 nt, Artificial Sequence
  Description of Artificial Sequence: Synthetic oligonucleotide
agaaccaucaucaauaggc

SEQ ID NO: 463290 - RNA, 19 nt, Artificial Sequence
  Description of Artificial Sequence: Synthetic oligonucleotide
aauagaucaacucccaaag

SEQ ID NO: 463291 - RNA, 19 nt, Artificial Sequence
  Description of Artificial Sequence: Synthetic oligonucleotide
gaugauacgaauaaccugg

SEQ ID NO: 463292 - RNA, 19 nt, Artificial Sequence
  Description of Artificial Sequence: Synthetic oligonucleotide
aguggguacaaauaugggc

SEQ ID NO: 463293 - RNA, 19 nt, Artificial Sequence
  Description of Artificial Sequence: Synthetic oligonucleotide
uacguuuucucaaagaaca

SEQ ID NO: 463294 - RNA, 19 nt, Artificial Sequence
  Description of Artificial Sequence: Synthetic oligonucleotide
aagaggauacuacccaacc

SEQ ID NO: 463295 - RNA, 19 nt, Artificial Sequence
  Description of Artificial Sequence: Synthetic oligonucleotide
acuacacacacacacacac

SEQ ID NO: 463296 - RNA, 19 nt, Artificial Sequence
  Description of Artificial Sequence: Synthetic oligonucleotide
cuugauacgguuaauaguc

SEQ ID NO: 463297 - RNA, 19 nt, Artificial Sequence
  Description of Artificial Sequence: Synthetic oligonucleotide
uggucagugaaucaaauca

SEQ ID NO: 463298 - RNA, 19 nt, Artificial Sequence
  Description of Artificial Sequence: Synthetic oligonucleotide
acauuaaaaguucucuuac

SEQ ID NO: 463299 - RNA, 19 nt, Artificial Sequence
  Description of Artificial Sequence: Synthetic oligonucleotide
agugaaucaaaucaacaag

SEQ ID NO: 463300 - RNA, 19 nt, Artificial Sequence
  Description of Artificial Sequence: Synthetic oligonucleotide
uauacacacacacacacac

SEQ ID NO: 463301 - RNA, 19 nt, Artificial Sequence
  Description of Artificial Sequence: Synthetic oligonucleotide
acacacuacacacacacac

SEQ ID NO: 463302 - RNA, 19 nt, Artificial Sequence
  Description of Artificial Sequence: Synthetic oligonucleotide
uuaggaguaagaacagugg

SEQ ID NO: 463303 - RNA, 19 nt, Artificial Sequence
  Description of Artificial Sequence: Synthetic oligonucleotide
acacacacuacacacacac

SEQ ID NO: 463304 - RNA, 19 nt, Artificial Sequence
  Description of Artificial Sequence: Synthetic oligonucleotide
uguauacacacacacacac

SEQ ID NO: 463305 - RNA, 19 nt, Artificial Sequence
  Description of Artificial Sequence: Synthetic oligonucleotide
ucacuguacaacuugauac

SEQ ID NO: 463306 - RNA, 19 nt, Artificial Sequence
  Description of Artificial Sequence: Synthetic oligonucleotide
ugaaauacacuagagguug

SEQ ID NO: 463307 - RNA, 19 nt, Artificial Sequence
  Description of Artificial Sequence: Synthetic oligonucleotide
cauguucucaaaaucaaag

SEQ ID NO: 463308 - RNA, 19 nt, Artificial Sequence
  Description of Artificial Sequence: Synthetic oligonucleotide
uaggaguaagaacaguggg

SEQ ID NO: 463309 - RNA, 19 nt, Artificial Sequence
  Description of Artificial Sequence: Synthetic oligonucleotide
ugagggaugauaauuuggc

SEQ ID NO: 463310 - RNA, 19 nt, Artificial Sequence
  Description of Artificial Sequence: Synthetic oligonucleotide
agaauuaggguguacacgu

SEQ ID NO: 463311 - RNA, 19 nt, Artificial Sequence
  Description of Artificial Sequence: Synthetic oligonucleotide
aaauagaucaacucccaaa

SEQ ID NO: 463312 - RNA, 19 nt, Artificial Sequence
  Description of Artificial Sequence: Synthetic oligonucleotide
ucagauuagaagccaaggc

SEQ ID NO: 463313 - RNA, 19 nt, Artificial Sequence
  Description of Artificial Sequence: Synthetic oligonucleotide
acacacacacacuacacac

SEQ ID NO: 463314 - RNA, 19 nt, Artificial Sequence
  Description of Artificial Sequence: Synthetic oligonucleotide
ugcaaguagucucaaagug

SEQ ID NO: 463315 - RNA, 19 nt, Artificial Sequence
  Description of Artificial Sequence: Synthetic oligonucleotide
aaugcaauuuugugcuggg

SEQ ID NO: 463316 - RNA, 19 nt, Artificial Sequence
  Description of Artificial Sequence: Synthetic oligonucleotide
cagauuagaagccaaggcc

SEQ ID NO: 463317 - RNA, 19 nt, Artificial Sequence
  Description of Artificial Sequence: Synthetic oligonucleotide
gaggauacuacccaacccc

SEQ ID NO: 463318 - RNA, 19 nt, Artificial Sequence
  Description of Artificial Sequence: Synthetic oligonucleotide
acacuacacacacacacac

SEQ ID NO: 463319 - RNA, 19 nt, Artificial Sequence
  Description of Artificial Sequence: Synthetic oligonucleotide
auucgguaagaccuguccc

SEQ ID NO: 463320 - RNA, 19 nt, Artificial Sequence
  Description of Artificial Sequence: Synthetic oligonucleotide
uuuggauccacuuucccac

SEQ ID NO: 463321 - RNA, 19 nt, Artificial Sequence
  Description of Artificial Sequence: Synthetic oligonucleotide
auacgaauaaccuggccag

SEQ ID NO: 463322 - RNA, 19 nt, Artificial Sequence
  Description of Artificial Sequence: Synthetic oligonucleotide
agaggauacuacccaaccc

SEQ ID NO: 463323 - RNA, 19 nt, Artificial Sequence
  Description of Artificial Sequence: Synthetic oligonucleotide
gauaggucaaaguuaauaa

SEQ ID NO: 463324 - RNA, 19 nt, Artificial Sequence
  Description of Artificial Sequence: Synthetic oligonucleotide
agggguuuuauuuugaaau

SEQ ID NO: 463325 - RNA, 19 nt, Artificial Sequence
  Description of Artificial Sequence: Synthetic oligonucleotide
acacacacacuacacacac

SEQ ID NO: 463326 - RNA, 19 nt, Artificial Sequence
  Description of Artificial Sequence: Synthetic oligonucleotide
uacacacacacacacacac

SEQ ID NO: 463327 - RNA, 19 nt, Artificial Sequence
  Description of Artificial Sequence: Synthetic oligonucleotide
aggagcacgaacaaaacac

SEQ ID NO: 463328 - RNA, 19 nt, Artificial Sequence
  Description of Artificial Sequence: Synthetic oligonucleotide
uauuccucguccaugguca

SEQ ID NO: 463329 - RNA, 19 nt, Artificial Sequence
  Description of Artificial Sequence: Synthetic oligonucleotide
ugaaucaaaucaacaaggu

SEQ ID NO: 463330 - RNA, 19 nt, Artificial Sequence
  Description of Artificial Sequence: Synthetic oligonucleotide
aauuaggguguacacgugu

SEQ ID NO: 463331 - RNA, 19 nt, Artificial Sequence
  Description of Artificial Sequence: Synthetic oligonucleotide
uauauagcucuuccagggg

SEQ ID NO: 463332 - RNA, 19 nt, Artificial Sequence
  Description of Artificial Sequence: Synthetic oligonucleotide
cacacacacacauuaaaag

SEQ ID NO: 463333 - RNA, 19 nt, Artificial Sequence
  Description of Artificial Sequence: Synthetic oligonucleotide
auaccaucuucccugcccc

SEQ ID NO: 463334 - RNA, 19 nt, Artificial Sequence
  Description of Artificial Sequence: Synthetic oligonucleotide
cugaggauacagaugauac

SEQ ID NO: 463335 - RNA, 19 nt, Artificial Sequence
  Description of Artificial Sequence: Synthetic oligonucleotide
acuaagguuaaggauuugg

SEQ ID NO: 463336 - RNA, 19 nt, Artificial Sequence
  Description of Artificial Sequence: Synthetic oligonucleotide
agaaagaggauacuaccca

SEQ ID NO: 463337 - RNA, 19 nt, Artificial Sequence
  Description of Artificial Sequence: Synthetic oligonucleotide
aaauaugggcucuugccau

SEQ ID NO: 463338 - RNA, 19 nt, Artificial Sequence
  Description of Artificial Sequence: Synthetic oligonucleotide
gaugguacuuuguagaucu

SEQ ID NO: 463339 - RNA, 19 nt, Artificial Sequence
  Description of Artificial Sequence: Synthetic oligonucleotide
ugccccaaaggacauacag

SEQ ID NO: 463340 - RNA, 19 nt, Artificial Sequence
  Description of Artificial Sequence: Synthetic oligonucleotide
uuacguuuucucaaagaac

SEQ ID NO: 463341 - RNA, 19 nt, Artificial Sequence
  Description of Artificial Sequence: Synthetic oligonucleotide
aaagaggauacuacccaac

SEQ ID NO: 463342 - RNA, 19 nt, Artificial Sequence
  Description of Artificial Sequence: Synthetic oligonucleotide
auagaguggguacaaauau

SEQ ID NO: 463343 - RNA, 19 nt, Artificial Sequence
  Description of Artificial Sequence: Synthetic oligonucleotide
gaaugcaauuuugugcugg

SEQ ID NO: 463344 - RNA, 19 nt, Artificial Sequence
  Description of Artificial Sequence: Synthetic oligonucleotide
aucagugcgguagagcgcc

SEQ ID NO: 463345 - RNA, 19 nt, Artificial Sequence
  Description of Artificial Sequence: Synthetic oligonucleotide
auacagaugauacgaauaa

SEQ ID NO: 463346 - RNA, 19 nt, Artificial Sequence
  Description of Artificial Sequence: Synthetic oligonucleotide
aacucuacagccccaggcu

SEQ ID NO: 463347 - RNA, 19 nt, Artificial Sequence
  Description of Artificial Sequence: Synthetic oligonucleotide
aguggaugguacuuuguag

SEQ ID NO: 463348 - RNA, 19 nt, Artificial Sequence
  Description of Artificial Sequence: Synthetic oligonucleotide
acuugauacgguuaauagu

SEQ ID NO: 463349 - RNA, 19 nt, Artificial Sequence
  Description of Artificial Sequence: Synthetic oligonucleotide
ugggauguagcuaggguca

SEQ ID NO: 463350 - RNA, 19 nt, Artificial Sequence
  Description of Artificial Sequence: Synthetic oligonucleotide
cuacauuaggaguaagaac

SEQ ID NO: 463351 - RNA, 19 nt, Artificial Sequence
  Description of Artificial Sequence: Synthetic oligonucleotide
auagaucaacucccaaagg

SEQ ID NO: 463352 - RNA, 19 nt, Artificial Sequence
  Description of Artificial Sequence: Synthetic oligonucleotide
agacagauaggucaaaguu

SEQ ID NO: 463353 - RNA, 19 nt, Artificial Sequence
  Description of Artificial Sequence: Synthetic oligonucleotide
uucgguaagaccugucccc

SEQ ID NO: 463354 - RNA, 19 nt, Artificial Sequence
  Description of Artificial Sequence: Synthetic oligonucleotide
ucagaaccaucaucaauag

SEQ ID NO: 463355 - RNA, 19 nt, Artificial Sequence
  Description of Artificial Sequence: Synthetic oligonucleotide
acaucacgcaugcuggugg

SEQ ID NO: 463356 - RNA, 19 nt, Artificial Sequence
  Description of Artificial Sequence: Synthetic oligonucleotide
accaucacuaagguuaagg

SEQ ID NO: 463357 - RNA, 19 nt, Artificial Sequence
  Description of Artificial Sequence: Synthetic oligonucleotide
aaaauagaucaacucccaa

SEQ ID NO: 463358 - RNA, 19 nt, Artificial Sequence
  Description of Artificial Sequence: Synthetic oligonucleotide
uugaaauacacuagagguu

SEQ ID NO: 463359 - RNA, 19 nt, Artificial Sequence
  Description of Artificial Sequence: Synthetic oligonucleotide
aaggcagacccagccaugc

SEQ ID NO: 463360 - RNA, 19 nt, Artificial Sequence
  Description of Artificial Sequence: Synthetic oligonucleotide
ucccucagauuucacaccc

SEQ ID NO: 463361 - RNA, 19 nt, Artificial Sequence
  Description of Artificial Sequence: Synthetic oligonucleotide
agggaugauaauuuggcaa

SEQ ID NO: 463362 - RNA, 19 nt, Artificial Sequence
  Description of Artificial Sequence: Synthetic oligonucleotide
uguacaacuugauacgguu

SEQ ID NO: 463363 - RNA, 19 nt, Artificial Sequence
  Description of Artificial Sequence: Synthetic oligonucleotide
cacacacacacacacacac

SEQ ID NO: 463364 - RNA, 19 nt, Artificial Sequence
  Description of Artificial Sequence: Synthetic oligonucleotide
cauaguaaggguuccgguc

SEQ ID NO: 463365 - RNA, 19 nt, Artificial Sequence
  Description of Artificial Sequence: Synthetic oligonucleotide
agagcgccaaggcauggcc

SEQ ID NO: 463366 - RNA, 19 nt, Artificial Sequence
  Description of Artificial Sequence: Synthetic oligonucleotide
cauaggagcacgaacaaaa

SEQ ID NO: 463367 - RNA, 19 nt, Artificial Sequence
  Description of Artificial Sequence: Synthetic oligonucleotide
uagaguggguacaaauaug

SEQ ID NO: 463368 - RNA, 19 nt, Artificial Sequence
  Description of Artificial Sequence: Synthetic oligonucleotide
cauucgguaagaccugucc

SEQ ID NO: 463369 - RNA, 19 nt, Artificial Sequence
  Description of Artificial Sequence: Synthetic oligonucleotide
uaggagcacgaacaaaaca

SEQ ID NO: 463370 - RNA, 19 nt, Artificial Sequence
  Description of Artificial Sequence: Synthetic oligonucleotide
cauaccaucuucccugccc

SEQ ID NO: 463371 - RNA, 19 nt, Artificial Sequence
  Description of Artificial Sequence: Synthetic oligonucleotide
acuacauuaggaguaagaa

SEQ ID NO: 463372 - RNA, 19 nt, Artificial Sequence
  Description of Artificial Sequence: Synthetic oligonucleotide
ucacagaucagcugcuuac

SEQ ID NO: 463373 - RNA, 19 nt, Artificial Sequence
  Description of Artificial Sequence: Synthetic oligonucleotide
agauuagaagccaaggccu

SEQ ID NO: 463374 - RNA, 19 nt, Artificial Sequence
  Description of Artificial Sequence: Synthetic oligonucleotide
acgaacaaaacaccugacu

SEQ ID NO: 463375 - RNA, 19 nt, Artificial Sequence
  Description of Artificial Sequence: Synthetic oligonucleotide
agaauuuccggaagcgucg

SEQ ID NO: 463376 - RNA, 19 nt, Artificial Sequence
  Description of Artificial Sequence: Synthetic oligonucleotide
uugcaaguagucucaaagu

SEQ ID NO: 463377 - RNA, 19 nt, Artificial Sequence
  Description of Artificial Sequence: Synthetic oligonucleotide
agucacuucuguauacagc

SEQ ID NO: 463378 - RNA, 19 nt, Artificial Sequence
  Description of Artificial Sequence: Synthetic oligonucleotide
acuguacaacuugauacgg

SEQ ID NO: 463379 - RNA, 19 nt, Artificial Sequence
  Description of Artificial Sequence: Synthetic oligonucleotide
ucaggccuugguaccaacg

SEQ ID NO: 463380 - RNA, 19 nt, Artificial Sequence
  Description of Artificial Sequence: Synthetic oligonucleotide
cagaauuaggguguacacg

SEQ ID NO: 463381 - RNA, 19 nt, Artificial Sequence
  Description of Artificial Sequence: Synthetic oligonucleotide
ugcaagauaaggguuucca

SEQ ID NO: 463382 - RNA, 19 nt, Artificial Sequence
  Description of Artificial Sequence: Synthetic oligonucleotide
ugauacgaauaaccuggcc

SEQ ID NO: 463383 - RNA, 19 nt, Artificial Sequence
  Description of Artificial Sequence: Synthetic oligonucleotide
ugguucugagggaugauaa

SEQ ID NO: 463384 - RNA, 19 nt, Artificial Sequence
  Description of Artificial Sequence: Synthetic oligonucleotide
acgagucacuucuguauac

SEQ ID NO: 463385 - RNA, 19 nt, Artificial Sequence
  Description of Artificial Sequence: Synthetic oligonucleotide
ucucagaaccaucaucaau

SEQ ID NO: 463386 - RNA, 19 nt, Artificial Sequence
  Description of Artificial Sequence: Synthetic oligonucleotide
gaaaacguuuauauagcuc

SEQ ID NO: 463387 - RNA, 19 nt, Artificial Sequence
  Description of Artificial Sequence: Synthetic oligonucleotide
caucaauaggcucauacaa

SEQ ID NO: 463388 - RNA, 19 nt, Artificial Sequence
  Description of Artificial Sequence: Synthetic oligonucleotide
ccaaaggacauacagguug

SEQ ID NO: 463389 - RNA, 19 nt, Artificial Sequence
  Description of Artificial Sequence: Synthetic oligonucleotide
guggaugguacuuuguaga

SEQ ID NO: 463390 - RNA, 19 nt, Artificial Sequence
  Description of Artificial Sequence: Synthetic oligonucleotide
agauaggucaaaguuaaua

SEQ ID NO: 463391 - RNA, 19 nt, Artificial Sequence
  Description of Artificial Sequence: Synthetic oligonucleotide
aagaugcauucgguaagac

SEQ ID NO: 463392 - RNA, 19 nt, Artificial Sequence
  Description of Artificial Sequence: Synthetic oligonucleotide
acaguuuuauuggaggggu

SEQ ID NO: 463393 - RNA, 19 nt, Artificial Sequence
  Description of Artificial Sequence: Synthetic oligonucleotide
gauacagaugauacgaaua

SEQ ID NO: 463394 - RNA, 19 nt, Artificial Sequence
  Description of Artificial Sequence: Synthetic oligonucleotide
cagugaaucaaaucaacaa

SEQ ID NO: 463395 - RNA, 19 nt, Artificial Sequence
  Description of Artificial Sequence: Synthetic oligonucleotide
acagauaggucaaaguuaa

SEQ ID NO: 463396 - RNA, 19 nt, Artificial Sequence
  Description of Artificial Sequence: Synthetic oligonucleotide
agauaaggguuuccaacca

SEQ ID NO: 463397 - RNA, 19 nt, Artificial Sequence
  Description of Artificial Sequence: Synthetic oligonucleotide
caaauaugggcucuugcca

SEQ ID NO: 463398 - RNA, 19 nt, Artificial Sequence
  Description of Artificial Sequence: Synthetic oligonucleotide
ugauacgguuaauagucuc

SEQ ID NO: 463399 - RNA, 19 nt, Artificial Sequence
  Description of Artificial Sequence: Synthetic oligonucleotide
gauacgguuaauagucuca

SEQ ID NO: 463400 - RNA, 19 nt, Artificial Sequence
  Description of Artificial Sequence: Synthetic oligonucleotide
acacauaaaccuucaccca

SEQ ID NO: 463401 - RNA, 19 nt, Artificial Sequence
  Description of Artificial Sequence: Synthetic oligonucleotide
uauacaaagcugcccucaa

SEQ ID NO: 463402 - RNA, 19 nt, Artificial Sequence
  Description of Artificial Sequence: Synthetic oligonucleotide
gguuaauagucucaagaca

SEQ ID NO: 463403 - RNA, 19 nt, Artificial Sequence
  Description of Artificial Sequence: Synthetic oligonucleotide
agcagaauuaggguguaca

SEQ ID NO: 463404 - RNA, 19 nt, Artificial Sequence
  Description of Artificial Sequence: Synthetic oligonucleotide
cagaucaaacuuccuguag

SEQ ID NO: 463405 - RNA, 19 nt, Artificial Sequence
  Description of Artificial Sequence: Synthetic oligonucleotide
acauuuacguuuucucaaa

SEQ ID NO: 463406 - RNA, 19 nt, Artificial Sequence
  Description of Artificial Sequence: Synthetic oligonucleotide
cguguauacacacacacac

SEQ ID NO: 463407 - RNA, 19 nt, Artificial Sequence
  Description of Artificial Sequence: Synthetic oligonucleotide
aaggcauggccagugaaau

SEQ ID NO: 463408 - RNA, 19 nt, Artificial Sequence
  Description of Artificial Sequence: Synthetic oligonucleotide
uuccuguagacaucacgca

SEQ ID NO: 463409 - RNA, 19 nt, Artificial Sequence
  Description of Artificial Sequence: Synthetic oligonucleotide
acacacacacacacuacac

SEQ ID NO: 463410 - RNA, 19 nt, Artificial Sequence
  Description of Artificial Sequence: Synthetic oligonucleotide
auauggcacucaaucuugc

SEQ ID NO: 463411 - RNA, 19 nt, Artificial Sequence
  Description of Artificial Sequence: Synthetic oligonucleotide
uauggcacucaaucuugca

SEQ ID NO: 463412 - RNA, 19 nt, Artificial Sequence
  Description of Artificial Sequence: Synthetic oligonucleotide
uguauacaaagcugcccuc

SEQ ID NO: 463413 - RNA, 19 nt, Artificial Sequence
  Description of Artificial Sequence: Synthetic oligonucleotide
ccagacaagaugcauucgg

SEQ ID NO: 463414 - RNA, 19 nt, Artificial Sequence
  Description of Artificial Sequence: Synthetic oligonucleotide
gguacuuuguagaucuugc

SEQ ID NO: 463415 - RNA, 19 nt, Artificial Sequence
  Description of Artificial Sequence: Synthetic oligonucleotide
augauacgaauaaccuggc

SEQ ID NO: 463416 - RNA, 19 nt, Artificial Sequence
  Description of Artificial Sequence: Synthetic oligonucleotide
acauuccagucucggcccc

SEQ ID NO: 463417 - RNA, 19 nt, Artificial Sequence
  Description of Artificial Sequence: Synthetic oligonucleotide
cagcuaacucuacagcccc

SEQ ID NO: 463418 - RNA, 19 nt, Artificial Sequence
  Description of Artificial Sequence: Synthetic oligonucleotide
gacagauaggucaaaguua

SEQ ID NO: 463419 - RNA, 19 nt, Artificial Sequence
  Description of Artificial Sequence: Synthetic oligonucleotide
cagauaacgagucacuucu

SEQ ID NO: 463420 - RNA, 19 nt, Artificial Sequence
  Description of Artificial Sequence: Synthetic oligonucleotide
gagggaugauaauuuggca

SEQ ID NO: 463421 - RNA, 19 nt, Artificial Sequence
  Description of Artificial Sequence: Synthetic oligonucleotide
aauaugggcucuugccaua

SEQ ID NO: 463422 - RNA, 19 nt, Artificial Sequence
  Description of Artificial Sequence: Synthetic oligonucleotide
uggaugguacuuuguagau

SEQ ID NO: 463423 - RNA, 19 nt, Artificial Sequence
  Description of Artificial Sequence: Synthetic oligonucleotide
guuaaggauuuggucagug

SEQ ID NO: 463424 - RNA, 19 nt, Artificial Sequence
  Description of Artificial Sequence: Synthetic oligonucleotide
gauaacgagucacuucugu

SEQ ID NO: 463425 - RNA, 19 nt, Artificial Sequence
  Description of Artificial Sequence: Synthetic oligonucleotide
caaaggccacuacauuagg

SEQ ID NO: 463426 - RNA, 19 nt, Artificial Sequence
  Description of Artificial Sequence: Synthetic oligonucleotide
auaacgagucacuucugua

SEQ ID NO: 463427 - RNA, 19 nt, Artificial Sequence
  Description of Artificial Sequence: Synthetic oligonucleotide
ucaguggaugguacuuugu

SEQ ID NO: 463428 - RNA, 19 nt, Artificial Sequence
  Description of Artificial Sequence: Synthetic oligonucleotide
ucacccaacccagacuuug

SEQ ID NO: 463429 - RNA, 19 nt, Artificial Sequence
  Description of Artificial Sequence: Synthetic oligonucleotide
ugggaaggggacacauuca

SEQ ID NO: 463430 - RNA, 19 nt, Artificial Sequence
  Description of Artificial Sequence: Synthetic oligonucleotide
uuugcaagauaaggguuuc

SEQ ID NO: 463431 - RNA, 19 nt, Artificial Sequence
  Description of Artificial Sequence: Synthetic oligonucleotide
cacacacacacacacauua

SEQ ID NO: 463432 - RNA, 19 nt, Artificial Sequence
  Description of Artificial Sequence: Synthetic oligonucleotide
guggguacaaauaugggcu

SEQ ID NO: 463433 - RNA, 19 nt, Artificial Sequence
  Description of Artificial Sequence: Synthetic oligonucleotide
cagaaccaucaucaauagg

SEQ ID NO: 463434 - RNA, 19 nt, Artificial Sequence
  Description of Artificial Sequence: Synthetic oligonucleotide
gguaccaacgcccgcucgg

SEQ ID NO: 463435 - RNA, 19 nt, Artificial Sequence
  Description of Artificial Sequence: Synthetic oligonucleotide
aggccacuacauuaggagu

SEQ ID NO: 463436 - RNA, 19 nt, Artificial Sequence
  Description of Artificial Sequence: Synthetic oligonucleotide
gaugauaauuuggcaagaa

SEQ ID NO: 463437 - RNA, 19 nt, Artificial Sequence
  Description of Artificial Sequence: Synthetic oligonucleotide
ccaaaggccacuacauuag

SEQ ID NO: 463438 - RNA, 19 nt, Artificial Sequence
  Description of Artificial Sequence: Synthetic oligonucleotide
cauaccgggccaaggacuc

SEQ ID NO: 463439 - RNA, 19 nt, Artificial Sequence
  Description of Artificial Sequence: Synthetic oligonucleotide
cagaugauacgaauaaccu

SEQ ID NO: 463440 - RNA, 19 nt, Artificial Sequence
  Description of Artificial Sequence: Synthetic oligonucleotide
uuauuggagggguuuuauu

SEQ ID NO: 463441 - RNA, 19 nt, Artificial Sequence
  Description of Artificial Sequence: Synthetic oligonucleotide
cgaacaaaacaccugacuc

SEQ ID NO: 463442 - RNA, 19 nt, Artificial Sequence
  Description of Artificial Sequence: Synthetic oligonucleotide
acguuuucucaaagaacac

SEQ ID NO: 463443 - RNA, 19 nt, Artificial Sequence
  Description of Artificial Sequence: Synthetic oligonucleotide
cuaagguuaaggauuuggu

SEQ ID NO: 463444 - RNA, 19 nt, Artificial Sequence
  Description of Artificial Sequence: Synthetic oligonucleotide
uccguacacggucugggau

SEQ ID NO: 463445 - RNA, 19 nt, Artificial Sequence
  Description of Artificial Sequence: Synthetic oligonucleotide
agcacgaacaaaacaccug

SEQ ID NO: 463446 - RNA, 19 nt, Artificial Sequence
  Description of Artificial Sequence: Synthetic oligonucleotide
uuccagcaacugaaaacgu

SEQ ID NO: 463447 - RNA, 19 nt, Artificial Sequence
  Description of Artificial Sequence: Synthetic oligonucleotide
ugguaccaacgcccgcucg

SEQ ID NO: 463448 - RNA, 19 nt, Artificial Sequence
  Description of Artificial Sequence: Synthetic oligonucleotide
cacauaaaccuucacccaa

SEQ ID NO: 463449 - RNA, 19 nt, Artificial Sequence
  Description of Artificial Sequence: Synthetic oligonucleotide
guauacagcagcaucuuua

SEQ ID NO: 463450 - RNA, 19 nt, Artificial Sequence
  Description of Artificial Sequence: Synthetic oligonucleotide
cacuuugcaagauaagggu

SEQ ID NO: 463451 - RNA, 19 nt, Artificial Sequence
  Description of Artificial Sequence: Synthetic oligonucleotide
uggguacaaauaugggcuc

SEQ ID NO: 463452 - RNA, 19 nt, Artificial Sequence
  Description of Artificial Sequence: Synthetic oligonucleotide
ugcaggcucaaccuccuuu

SEQ ID NO: 463453 - RNA, 19 nt, Artificial Sequence
  Description of Artificial Sequence: Synthetic oligonucleotide
cacacacacacacacuaca

SEQ ID NO: 463454 - RNA, 19 nt, Artificial Sequence
  Description of Artificial Sequence: Synthetic oligonucleotide
acacacacacacacacuac

SEQ ID NO: 463455 - RNA, 19 nt, Artificial Sequence
  Description of Artificial Sequence: Synthetic oligonucleotide
gcuagggucacagaucagc

SEQ ID NO: 463456 - RNA, 19 nt, Artificial Sequence
  Description of Artificial Sequence: Synthetic oligonucleotide
caucagugcgguagagcgc

SEQ ID NO: 463457 - RNA, 19 nt, Artificial Sequence
  Description of Artificial Sequence: Synthetic oligonucleotide
acacacacacacauuaaaa

SEQ ID NO: 463458 - RNA, 19 nt, Artificial Sequence
  Description of Artificial Sequence: Synthetic oligonucleotide
ucaagacagggcugaucca

SEQ ID NO: 463459 - RNA, 19 nt, Artificial Sequence
  Description of Artificial Sequence: Synthetic oligonucleotide
cacacacacacacacacua

SEQ ID NO: 463460 - RNA, 19 nt, Artificial Sequence
  Description of Artificial Sequence: Synthetic oligonucleotide
caacaagguaagugaucag

SEQ ID NO: 463461 - RNA, 19 nt, Artificial Sequence
  Description of Artificial Sequence: Synthetic oligonucleotide
gcagaauuaggguguacac

SEQ ID NO: 463462 - RNA, 19 nt, Artificial Sequence
  Description of Artificial Sequence: Synthetic oligonucleotide
agucucaguggaugguacu

SEQ ID NO: 463463 - RNA, 19 nt, Artificial Sequence
  Description of Artificial Sequence: Synthetic oligonucleotide
caacccagacuuugccagg

SEQ ID NO: 463464 - RNA, 19 nt, Artificial Sequence
  Description of Artificial Sequence: Synthetic oligonucleotide
aaaccaucacuaagguuaa

SEQ ID NO: 463465 - RNA, 19 nt, Artificial Sequence
  Description of Artificial Sequence: Synthetic oligonucleotide
gaauuaggguguacacgug

SEQ ID NO: 463466 - RNA, 19 nt, Artificial Sequence
  Description of Artificial Sequence: Synthetic oligonucleotide
agugcgguagagcgccaag

SEQ ID NO: 463467 - RNA, 19 nt, Artificial Sequence
  Description of Artificial Sequence: Synthetic oligonucleotide
ugauagccacaaacuucug

SEQ ID NO: 463468 - RNA, 19 nt, Artificial Sequence
  Description of Artificial Sequence: Synthetic oligonucleotide
auacgguuaauagucucaa

SEQ ID NO: 463469 - RNA, 19 nt, Artificial Sequence
  Description of Artificial Sequence: Synthetic oligonucleotide
cacacuacacacacacaca

SEQ ID NO: 463470 - RNA, 19 nt, Artificial Sequence
  Description of Artificial Sequence: Synthetic oligonucleotide
cagccuuccguacacgguc

SEQ ID NO: 463471 - RNA, 19 nt, Artificial Sequence
  Description of Artificial Sequence: Synthetic oligonucleotide
cagauuucacacccaccac

SEQ ID NO: 463472 - RNA, 19 nt, Artificial Sequence
  Description of Artificial Sequence: Synthetic oligonucleotide
caugcguuuguagauaucu

SEQ ID NO: 463473 - RNA, 19 nt, Artificial Sequence
  Description of Artificial Sequence: Synthetic oligonucleotide
cagucucaguggaugguac

SEQ ID NO: 463474 - RNA, 19 nt, Artificial Sequence
  Description of Artificial Sequence: Synthetic oligonucleotide
gcaucauaggagcacgaac

SEQ ID NO: 463475 - RNA, 19 nt, Artificial Sequence
  Description of Artificial Sequence: Synthetic oligonucleotide
aaaggcagacccagccaug

SEQ ID NO: 463476 - RNA, 19 nt, Artificial Sequence
  Description of Artificial Sequence: Synthetic oligonucleotide
gacucacuguacaacuuga

SEQ ID NO: 463477 - RNA, 19 nt, Artificial Sequence
  Description of Artificial Sequence: Synthetic oligonucleotide
cacacacacacacuacaca

SEQ ID NO: 463478 - RNA, 19 nt, Artificial Sequence
  Description of Artificial Sequence: Synthetic oligonucleotide
uacagcgggccaccucucc

SEQ ID NO: 463479 - RNA, 19 nt, Artificial Sequence
  Description of Artificial Sequence: Synthetic oligonucleotide
gggcucuugccauaccggg

SEQ ID NO: 463480 - RNA, 19 nt, Artificial Sequence
  Description of Artificial Sequence: Synthetic oligonucleotide
cgguuaauagucucaagac

SEQ ID NO: 463481 - RNA, 19 nt, Artificial Sequence
  Description of Artificial Sequence: Synthetic oligonucleotide
cacacacacacacauuaaa

SEQ ID NO: 463482 - RNA, 19 nt, Artificial Sequence
  Description of Artificial Sequence: Synthetic oligonucleotide
ggagcacgaacaaaacacc

SEQ ID NO: 463483 - RNA, 19 nt, Artificial Sequence
  Description of Artificial Sequence: Synthetic oligonucleotide
aaacguuuauauagcucuu

SEQ ID NO: 463484 - RNA, 19 nt, Artificial Sequence
  Description of Artificial Sequence: Synthetic oligonucleotide
gcguuuguagauaucuuug

SEQ ID NO: 463485 - RNA, 19 nt, Artificial Sequence
  Description of Artificial Sequence: Synthetic oligonucleotide
uaggguguacacguguaua

SEQ ID NO: 463486 - RNA, 19 nt, Artificial Sequence
  Description of Artificial Sequence: Synthetic oligonucleotide
ggaucaagucaacauucca

SEQ ID NO: 463487 - RNA, 19 nt, Artificial Sequence
  Description of Artificial Sequence: Synthetic oligonucleotide
cacacacacacuacacaca

SEQ ID NO: 463488 - RNA, 19 nt, Artificial Sequence
  Description of Artificial Sequence: Synthetic oligonucleotide
aaguagucucaaagugugu

SEQ ID NO: 463489 - RNA, 19 nt, Artificial Sequence
  Description of Artificial Sequence: Synthetic oligonucleotide
cuuugcaagauaaggguuu

SEQ ID NO: 463490 - RNA, 19 nt, Artificial Sequence
  Description of Artificial Sequence: Synthetic oligonucleotide
gugcgguagagcgccaagg

SEQ ID NO: 463491 - RNA, 19 nt, Artificial Sequence
  Description of Artificial Sequence: Synthetic oligonucleotide
gcagcuaacucuacagccc

SEQ ID NO: 463492 - RNA, 19 nt, Artificial Sequence
  Description of Artificial Sequence: Synthetic oligonucleotide
guauacacacacacacaca

SEQ ID NO: 463493 - RNA, 19 nt, Artificial Sequence
  Description of Artificial Sequence: Synthetic oligonucleotide
gcauaggagaucaugcaca

SEQ ID NO: 463494 - RNA, 19 nt, Artificial Sequence
  Description of Artificial Sequence: Synthetic oligonucleotide
uaccaagaaagaggauacu

SEQ ID NO: 463495 - RNA, 19 nt, Artificial Sequence
  Description of Artificial Sequence: Synthetic oligonucleotide
gcuuugcucacauuuacgu

SEQ ID NO: 463496 - RNA, 19 nt, Artificial Sequence
  Description of Artificial Sequence: Synthetic oligonucleotide
cuacacacacacacacaca

SEQ ID NO: 463497 - RNA, 19 nt, Artificial Sequence
  Description of Artificial Sequence: Synthetic oligonucleotide
ccagauaacgagucacuuc

SEQ ID NO: 463498 - RNA, 19 nt, Artificial Sequence
  Description of Artificial Sequence: Synthetic oligonucleotide
uugguaccaacgcccgcuc

SEQ ID NO: 463499 - RNA, 19 nt, Artificial Sequence
  Description of Artificial Sequence: Synthetic oligonucleotide
aauuuccggaagcgucguu

SEQ ID NO: 463500 - RNA, 19 nt, Artificial Sequence
  Description of Artificial Sequence: Synthetic oligonucleotide
cacacacacacacacacau

SEQ ID NO: 463501 - RNA, 19 nt, Artificial Sequence
  Description of Artificial Sequence: Synthetic oligonucleotide
ccaucacuaagguuaagga

SEQ ID NO: 463502 - RNA, 19 nt, Artificial Sequence
  Description of Artificial Sequence: Synthetic oligonucleotide
guguauacacacacacaca

SEQ ID NO: 463503 - RNA, 19 nt, Artificial Sequence
  Description of Artificial Sequence: Synthetic oligonucleotide
uacccagccauaccaucuu

SEQ ID NO: 463504 - RNA, 19 nt, Artificial Sequence
  Description of Artificial Sequence: Synthetic oligonucleotide
ugagaaauuuggggaucaa

SEQ ID NO: 463505 - RNA, 19 nt, Artificial Sequence
  Description of Artificial Sequence: Synthetic oligonucleotide
acgguggugcuggcaaugg

SEQ ID NO: 463506 - RNA, 19 nt, Artificial Sequence
  Description of Artificial Sequence: Synthetic oligonucleotide
ggacacauucacuuugcaa

SEQ ID NO: 463507 - RNA, 19 nt, Artificial Sequence
  Description of Artificial Sequence: Synthetic oligonucleotide
cagggauacccagccauac

SEQ ID NO: 463508 - RNA, 19 nt, Artificial Sequence
  Description of Artificial Sequence: Synthetic oligonucleotide
auacacacacacacacaca

SEQ ID NO: 463509 - RNA, 19 nt, Artificial Sequence
  Description of Artificial Sequence: Synthetic oligonucleotide
auuaggguguacacgugua

SEQ ID NO: 463510 - RNA, 19 nt, Artificial Sequence
  Description of Artificial Sequence: Synthetic oligonucleotide
gggaucaagucaacauucc

SEQ ID NO: 463511 - RNA, 19 nt, Artificial Sequence
  Description of Artificial Sequence: Synthetic oligonucleotide
cacuacacacacacacaca

SEQ ID NO: 463512 - RNA, 19 nt, Artificial Sequence
  Description of Artificial Sequence: Synthetic oligonucleotide
ggccuugguaccaacgccc

SEQ ID NO: 463513 - RNA, 19 nt, Artificial Sequence
  Description of Artificial Sequence: Synthetic oligonucleotide
ucauugcaaguagucucaa

SEQ ID NO: 463514 - RNA, 19 nt, Artificial Sequence
  Description of Artificial Sequence: Synthetic oligonucleotide
guagagcgccaaggcaugg

SEQ ID NO: 463515 - RNA, 19 nt, Artificial Sequence
  Description of Artificial Sequence: Synthetic oligonucleotide
cuugccauaccgggccaag

SEQ ID NO: 463516 - RNA, 19 nt, Artificial Sequence
  Description of Artificial Sequence: Synthetic oligonucleotide
agacccagccaugcguuug

SEQ ID NO: 463517 - RNA, 19 nt, Artificial Sequence
  Description of Artificial Sequence: Synthetic oligonucleotide
ggaaugcaauuuugugcug

SEQ ID NO: 463518 - RNA, 19 nt, Artificial Sequence
  Description of Artificial Sequence: Synthetic oligonucleotide
cccaaacagcagaauuagg

SEQ ID NO: 463519 - RNA, 19 nt, Artificial Sequence
  Description of Artificial Sequence: Synthetic oligonucleotide
gagcacgaacaaaacaccu

SEQ ID NO: 463520 - RNA, 19 nt, Artificial Sequence
  Description of Artificial Sequence: Synthetic oligonucleotide
ggauuuggucagugaauca

SEQ ID NO: 463521 - RNA, 19 nt, Artificial Sequence
  Description of Artificial Sequence: Synthetic oligonucleotide
agauaacgagucacuucug

SEQ ID NO: 463522 - RNA, 19 nt, Artificial Sequence
  Description of Artificial Sequence: Synthetic oligonucleotide
ccaacacauaagaguuggg

SEQ ID NO: 463523 - RNA, 19 nt, Artificial Sequence
  Description of Artificial Sequence: Synthetic oligonucleotide
gcaagauaaggguuuccaa

SEQ ID NO: 463524 - RNA, 19 nt, Artificial Sequence
  Description of Artificial Sequence: Synthetic oligonucleotide
auguagcuagggucacaga

SEQ ID NO: 463525 - RNA, 19 nt, Artificial Sequence
  Description of Artificial Sequence: Synthetic oligonucleotide
guaagaccuguccccagua

SEQ ID NO: 463526 - RNA, 19 nt, Artificial Sequence
  Description of Artificial Sequence: Synthetic oligonucleotide
cuggcaauggcgauguauu

SEQ ID NO: 463527 - RNA, 19 nt, Artificial Sequence
  Description of Artificial Sequence: Synthetic oligonucleotide
caaccuccuuuuccgguuc

SEQ ID NO: 463528 - RNA, 19 nt, Artificial Sequence
  Description of Artificial Sequence: Synthetic oligonucleotide
gcucgcccaggccauagag

SEQ ID NO: 463529 - RNA, 19 nt, Artificial Sequence
  Description of Artificial Sequence: Synthetic oligonucleotide
caguggaugguacuuugua

SEQ ID NO: 463530 - RNA, 19 nt, Artificial Sequence
  Description of Artificial Sequence: Synthetic oligonucleotide
gcccucaaccaccuugaag

SEQ ID NO: 463531 - RNA, 19 nt, Artificial Sequence
  Description of Artificial Sequence: Synthetic oligonucleotide
cauuccagucucggccccg

SEQ ID NO: 463532 - RNA, 19 nt, Artificial Sequence
  Description of Artificial Sequence: Synthetic oligonucleotide
augcauucgguaagaccug

SEQ ID NO: 463533 - RNA, 19 nt, Artificial Sequence
  Description of Artificial Sequence: Synthetic oligonucleotide
agacuuugccagggauggg

SEQ ID NO: 463534 - RNA, 19 nt, Artificial Sequence
  Description of Artificial Sequence: Synthetic oligonucleotide
gaugccagacaagaugcau

SEQ ID NO: 463535 - RNA, 19 nt, Artificial Sequence
  Description of Artificial Sequence: Synthetic oligonucleotide
guaccaacgcccgcucggc

SEQ ID NO: 463536 - RNA, 19 nt, Artificial Sequence
  Description of Artificial Sequence: Synthetic oligonucleotide
augcaauuuugugcuggga

SEQ ID NO: 463537 - RNA, 19 nt, Artificial Sequence
  Description of Artificial Sequence: Synthetic oligonucleotide
uaccgggccaaggacucac

SEQ ID NO: 463538 - RNA, 19 nt, Artificial Sequence
  Description of Artificial Sequence: Synthetic oligonucleotide
uuacagcgggccaccucuc

SEQ ID NO: 463539 - RNA, 19 nt, Artificial Sequence
  Description of Artificial Sequence: Synthetic oligonucleotide
cauugcaaguagucucaaa

SEQ ID NO: 463540 - RNA, 19 nt, Artificial Sequence
  Description of Artificial Sequence: Synthetic oligonucleotide
acacacacacacacacaca

SEQ ID NO: 463541 - RNA, 19 nt, Artificial Sequence
  Description of Artificial Sequence: Synthetic oligonucleotide
acacacacacacacacacu

SEQ ID NO: 463542 - RNA, 19 nt, Artificial Sequence
  Description of Artificial Sequence: Synthetic oligonucleotide
aucacgcaugcuggugguc

SEQ ID NO: 463543 - RNA, 19 nt, Artificial Sequence
  Description of Artificial Sequence: Synthetic oligonucleotide
cacacacuacacacacaca

SEQ ID NO: 463544 - RNA, 19 nt, Artificial Sequence
  Description of Artificial Sequence: Synthetic oligonucleotide
cacgcaugcugguggucug

SEQ ID NO: 463545 - RNA, 19 nt, Artificial Sequence
  Description of Artificial Sequence: Synthetic oligonucleotide
cuugguaccaacgcccgcu

SEQ ID NO: 463546 - RNA, 19 nt, Artificial Sequence
  Description of Artificial Sequence: Synthetic oligonucleotide
ggaugauaauuuggcaaga

SEQ ID NO: 463547 - RNA, 19 nt, Artificial Sequence
  Description of Artificial Sequence: Synthetic oligonucleotide
cacuaaaggaaaaggcauu

SEQ ID NO: 463548 - RNA, 19 nt, Artificial Sequence
  Description of Artificial Sequence: Synthetic oligonucleotide
cuguacaacuugauacggu

SEQ ID NO: 463549 - RNA, 19 nt, Artificial Sequence
  Description of Artificial Sequence: Synthetic oligonucleotide
caagguaagugaucagaau

SEQ ID NO: 463550 - RNA, 19 nt, Artificial Sequence
  Description of Artificial Sequence: Synthetic oligonucleotide
ccguacacggucugggaug

SEQ ID NO: 463551 - RNA, 19 nt, Artificial Sequence
  Description of Artificial Sequence: Synthetic oligonucleotide
acucacuguacaacuugau

SEQ ID NO: 463552 - RNA, 19 nt, Artificial Sequence
  Description of Artificial Sequence: Synthetic oligonucleotide
caccugacucucagaacca

SEQ ID NO: 463553 - RNA, 19 nt, Artificial Sequence
  Description of Artificial Sequence: Synthetic oligonucleotide
gguagagcgccaaggcaug

SEQ ID NO: 463554 - RNA, 19 nt, Artificial Sequence
  Description of Artificial Sequence: Synthetic oligonucleotide
acacacacacacacauuaa

SEQ ID NO: 463555 - RNA, 19 nt, Artificial Sequence
  Description of Artificial Sequence: Synthetic oligonucleotide
gccauaccgggccaaggac

SEQ ID NO: 463556 - RNA, 19 nt, Artificial Sequence
  Description of Artificial Sequence: Synthetic oligonucleotide
cacgguggugcuggcaaug

SEQ ID NO: 463557 - RNA, 19 nt, Artificial Sequence
  Description of Artificial Sequence: Synthetic oligonucleotide
ggaugguacuuuguagauc

SEQ ID NO: 463558 - RNA, 19 nt, Artificial Sequence
  Description of Artificial Sequence: Synthetic oligonucleotide
cacacacacuacacacaca

SEQ ID NO: 463559 - RNA, 19 nt, Artificial Sequence
  Description of Artificial Sequence: Synthetic oligonucleotide
ccugccccaaaggacauac

SEQ ID NO: 463560 - RNA, 19 nt, Artificial Sequence
  Description of Artificial Sequence: Synthetic oligonucleotide
ucagugcgguagagcgcca

SEQ ID NO: 463561 - RNA, 19 nt, Artificial Sequence
  Description of Artificial Sequence: Synthetic oligonucleotide
cucaaccuccuuuuccggu

SEQ ID NO: 463562 - RNA, 19 nt, Artificial Sequence
  Description of Artificial Sequence: Synthetic oligonucleotide
ucccugccccaaaggacau

SEQ ID NO: 463563 - RNA, 19 nt, Artificial Sequence
  Description of Artificial Sequence: Synthetic oligonucleotide
cguuuauauagcucuucca

SEQ ID NO: 463564 - RNA, 19 nt, Artificial Sequence
  Description of Artificial Sequence: Synthetic oligonucleotide
gaauuuccggaagcgucgu

SEQ ID NO: 463565 - RNA, 19 nt, Artificial Sequence
  Description of Artificial Sequence: Synthetic oligonucleotide
caguacuaucacaucguau

SEQ ID NO: 463566 - RNA, 19 nt, Artificial Sequence
  Description of Artificial Sequence: Synthetic oligonucleotide
agccaugcguuuguagaua

SEQ ID NO: 463567 - RNA, 19 nt, Artificial Sequence
  Description of Artificial Sequence: Synthetic oligonucleotide
ugcccucaaccaccuugaa

SEQ ID NO: 463568 - RNA, 19 nt, Artificial Sequence
  Description of Artificial Sequence: Synthetic oligonucleotide
gccagacaagaugcauucg

SEQ ID NO: 463569 - RNA, 19 nt, Artificial Sequence
  Description of Artificial Sequence: Synthetic oligonucleotide
ggccacuacauuaggagua

SEQ ID NO: 463570 - RNA, 19 nt, Artificial Sequence
  Description of Artificial Sequence: Synthetic oligonucleotide
cacuaagguuaaggauuug

SEQ ID NO: 463571 - RNA, 19 nt, Artificial Sequence
  Description of Artificial Sequence: Synthetic oligonucleotide
aggacucacuguacaacuu

SEQ ID NO: 463572 - RNA, 19 nt, Artificial Sequence
  Description of Artificial Sequence: Synthetic oligonucleotide
gcgguagagcgccaaggca

SEQ ID NO: 463573 - RNA, 19 nt, Artificial Sequence
  Description of Artificial Sequence: Synthetic oligonucleotide
gacccagccaugcguuugu

SEQ ID NO: 463574 - RNA, 19 nt, Artificial Sequence
  Description of Artificial Sequence: Synthetic oligonucleotide
acggucugggauguagcua

SEQ ID NO: 463575 - RNA, 19 nt, Artificial Sequence
  Description of Artificial Sequence: Synthetic oligonucleotide
agccuuccguacacggucu

SEQ ID NO: 463576 - RNA, 19 nt, Artificial Sequence
  Description of Artificial Sequence: Synthetic oligonucleotide
agcuaacucuacagcccca

SEQ ID NO: 463577 - RNA, 19 nt, Artificial Sequence
  Description of Artificial Sequence: Synthetic oligonucleotide
agcucgcccaggccauaga

SEQ ID NO: 463578 - RNA, 19 nt, Artificial Sequence
  Description of Artificial Sequence: Synthetic oligonucleotide
caucauucuguuugcgcuu

SEQ ID NO: 463579 - RNA, 19 nt, Artificial Sequence
  Description of Artificial Sequence: Synthetic oligonucleotide
gucgacacccucaaagguu

SEQ ID NO: 463580 - RNA, 19 nt, Artificial Sequence
  Description of Artificial Sequence: Synthetic oligonucleotide
acacacacacacacacauu

SEQ ID NO: 463581 - RNA, 19 nt, Artificial Sequence
  Description of Artificial Sequence: Synthetic oligonucleotide
ccaaggacucacuguacaa

SEQ ID NO: 463582 - RNA, 19 nt, Artificial Sequence
  Description of Artificial Sequence: Synthetic oligonucleotide
ccauagaguggguacaaau

SEQ ID NO: 463583 - RNA, 19 nt, Artificial Sequence
  Description of Artificial Sequence: Synthetic oligonucleotide
cagcucgcccaggccauag

SEQ ID NO: 463584 - RNA, 19 nt, Artificial Sequence
  Description of Artificial Sequence: Synthetic oligonucleotide
aacgcccgcucggcuccuc

SEQ ID NO: 463585 - RNA, 19 nt, Artificial Sequence
  Description of Artificial Sequence: Synthetic oligonucleotide
cagccauaccaucuucccu

SEQ ID NO: 463586 - RNA, 19 nt, Artificial Sequence
  Description of Artificial Sequence: Synthetic oligonucleotide
gggagucagcaaucacuga

SEQ ID NO: 463587 - RNA, 19 nt, Artificial Sequence
  Description of Artificial Sequence: Synthetic oligonucleotide
ggcaucauaggagcacgaa

SEQ ID NO: 463588 - RNA, 19 nt, Artificial Sequence
  Description of Artificial Sequence: Synthetic oligonucleotide
auaccgggccaaggacuca

SEQ ID NO: 463589 - RNA, 19 nt, Artificial Sequence
  Description of Artificial Sequence: Synthetic oligonucleotide
gucucaguggaugguacuu

SEQ ID NO: 463590 - RNA, 19 nt, Artificial Sequence
  Description of Artificial Sequence: Synthetic oligonucleotide
gcgauguauuugcccugug

SEQ ID NO: 463591 - RNA, 19 nt, Artificial Sequence
  Description of Artificial Sequence: Synthetic oligonucleotide
ccauaccaucuucccugcc

SEQ ID NO: 463592 - RNA, 19 nt, Artificial Sequence
  Description of Artificial Sequence: Synthetic oligonucleotide
ccaugcguuuguagauauc

SEQ ID NO: 463593 - RNA, 19 nt, Artificial Sequence
  Description of Artificial Sequence: Synthetic oligonucleotide
ccccauauauggcacucaa

SEQ ID NO: 463594 - RNA, 19 nt, Artificial Sequence
  Description of Artificial Sequence: Synthetic oligonucleotide
ccaguacuaucacaucgua

SEQ ID NO: 463595 - RNA, 19 nt, Artificial Sequence
  Description of Artificial Sequence: Synthetic oligonucleotide
gcuggcaauggcgauguau

SEQ ID NO: 463596 - RNA, 19 nt, Artificial Sequence
  Description of Artificial Sequence: Synthetic oligonucleotide
gccaugcguuuguagauau

SEQ ID NO: 463597 - RNA, 19 nt, Artificial Sequence
  Description of Artificial Sequence: Synthetic oligonucleotide
ggguacaaauaugggcucu

SEQ ID NO: 463598 - RNA, 19 nt, Artificial Sequence
  Description of Artificial Sequence: Synthetic oligonucleotide
gcauucgguaagaccuguc

SEQ ID NO: 463599 - RNA, 19 nt, Artificial Sequence
  Description of Artificial Sequence: Synthetic oligonucleotide
gguacaaauaugggcucuu

SEQ ID NO: 463600 - RNA, 19 nt, Artificial Sequence
  Description of Artificial Sequence: Synthetic oligonucleotide
augguacuuuguagaucuu

SEQ ID NO: 463601 - RNA, 19 nt, Artificial Sequence
  Description of Artificial Sequence: Synthetic oligonucleotide
ggccagccuuccguacacg

SEQ ID NO: 463602 - RNA, 19 nt, Artificial Sequence
  Description of Artificial Sequence: Synthetic oligonucleotide
gggugugauggaagagcuc

SEQ ID NO: 463603 - RNA, 19 nt, Artificial Sequence
  Description of Artificial Sequence: Synthetic oligonucleotide
cuacagccccaggcugcac

SEQ ID NO: 463604 - RNA, 19 nt, Artificial Sequence
  Description of Artificial Sequence: Synthetic oligonucleotide
ggcgauguauuugcccugu

SEQ ID NO: 463605 - RNA, 19 nt, Artificial Sequence
  Description of Artificial Sequence: Synthetic oligonucleotide
cagauaggucaaaguuaau

SEQ ID NO: 463606 - RNA, 19 nt, Artificial Sequence
  Description of Artificial Sequence: Synthetic oligonucleotide
cgguaagaccuguccccag

SEQ ID NO: 463607 - RNA, 19 nt, Artificial Sequence
  Description of Artificial Sequence: Synthetic oligonucleotide
accgggccaaggacucacu

SEQ ID NO: 463608 - RNA, 19 nt, Artificial Sequence
  Description of Artificial Sequence: Synthetic oligonucleotide
gguuaaggauuuggucagu

SEQ ID NO: 463609 - RNA, 19 nt, Artificial Sequence
  Description of Artificial Sequence: Synthetic oligonucleotide
ggauacccagccauaccau

SEQ ID NO: 463610 - RNA, 19 nt, Artificial Sequence
  Description of Artificial Sequence: Synthetic oligonucleotide
cagugcgguagagcgccaa

SEQ ID NO: 463611 - RNA, 19 nt, Artificial Sequence
  Description of Artificial Sequence: Synthetic oligonucleotide
cgaauaaccuggccagccu

SEQ ID NO: 463612 - RNA, 19 nt, Artificial Sequence
  Description of Artificial Sequence: Synthetic oligonucleotide
cccagacuuugccagggau

SEQ ID NO: 463613 - RNA, 19 nt, Artificial Sequence
  Description of Artificial Sequence: Synthetic oligonucleotide
gucucaagacagggcugau

SEQ ID NO: 463614 - RNA, 19 nt, Artificial Sequence
  Description of Artificial Sequence: Synthetic oligonucleotide
cugccacguugugugcaua

SEQ ID NO: 463615 - RNA, 19 nt, Artificial Sequence
  Description of Artificial Sequence: Synthetic oligonucleotide
guacacggucugggaugua

SEQ ID NO: 463616 - RNA, 19 nt, Artificial Sequence
  Description of Artificial Sequence: Synthetic oligonucleotide
caacgcccgcucggcuccu

SEQ ID NO: 463617 - RNA, 19 nt, Artificial Sequence
  Description of Artificial Sequence: Synthetic oligonucleotide
cccugccccaaaggacaua

SEQ ID NO: 463618 - RNA, 19 nt, Artificial Sequence
  Description of Artificial Sequence: Synthetic oligonucleotide
cgacacccucaaagguuuu

SEQ ID NO: 463619 - RNA, 19 nt, Artificial Sequence
  Description of Artificial Sequence: Synthetic oligonucleotide
gaauuaacagccugaaggg

SEQ ID NO: 463620 - RNA, 19 nt, Artificial Sequence
  Description of Artificial Sequence: Synthetic oligonucleotide
  modified_base (5)..(5): a, c, u, g, unknown or other
uuucncaggaacuucgagg

SEQ ID NO: 463621 - RNA, 19 nt, Artificial Sequence
  Description of Artificial Sequence: Synthetic oligonucleotide
uuaaucuucagccgaaagc

SEQ ID NO: 463622 - RNA, 19 nt, Artificial Sequence
  Description of Artificial Sequence: Synthetic oligonucleotide
uuagacuuuucgcugaagc

SEQ ID NO: 463623 - RNA, 19 nt, Artificial Sequence
  Description of Artificial Sequence: Synthetic oligonucleotide
  modified_base (4)..(4): a, c, u, g, unknown or other
uucncaggaacuucgagga

SEQ ID NO: 463624 - RNA, 19 nt, Artificial Sequence
  Description of Artificial Sequence: Synthetic oligonucleotide
cuugauuuguggcugaagc

SEQ ID NO: 463625 - RNA, 19 nt, Artificial Sequence
  Description of Artificial Sequence: Synthetic oligonucleotide
aucacgauccccucugugc

SEQ ID NO: 463626 - RNA, 19 nt, Artificial Sequence
  Description of Artificial Sequence: Synthetic oligonucleotide
ugggaguaaaggcugagcc

SEQ ID NO: 463627 - RNA, 19 nt, Artificial Sequence
  Description of Artificial Sequence: Synthetic oligonucleotide
auacuggccucauaucucc

SEQ ID NO: 463628 - RNA, 19 nt, Artificial Sequence
  Description of Artificial Sequence: Synthetic oligonucleotide
uauugucaaggaauuaaca

SEQ ID NO: 463629 - RNA, 19 nt, Artificial Sequence
  Description of Artificial Sequence: Synthetic oligonucleotide
cauccauuuauugucaagg

SEQ ID NO: 463630 - RNA, 19 nt, Artificial Sequence
  Description of Artificial Sequence: Synthetic oligonucleotide
ucaaggaauuaacagccug

SEQ ID NO: 463631 - RNA, 19 nt, Artificial Sequence
  Description of Artificial Sequence: Synthetic oligonucleotide
ugagguuaaucuucagccg

SEQ ID NO: 463632 - RNA, 19 nt, Artificial Sequence
  Description of Artificial Sequence: Synthetic oligonucleotide
acucggcacauucauaggg

SEQ ID NO: 463633 - RNA, 19 nt, Artificial Sequence
  Description of Artificial Sequence: Synthetic oligonucleotide
ugauuuguggcugaagcug

SEQ ID NO: 463634 - RNA, 19 nt, Artificial Sequence
  Description of Artificial Sequence: Synthetic oligonucleotide
gaaaggaguguccuuuugc

SEQ ID NO: 463635 - RNA, 19 nt, Artificial Sequence
  Description of Artificial Sequence: Synthetic oligonucleotide
uguagugugaguugcugcu

SEQ ID NO: 463636 - RNA, 19 nt, Artificial Sequence
  Description of Artificial Sequence: Synthetic oligonucleotide
gauacgcugguguagugug

SEQ ID NO: 463637 - RNA, 19 nt, Artificial Sequence
  Description of Artificial Sequence: Synthetic oligonucleotide
uucucauugguccccgucc

SEQ ID NO: 463638 - RNA, 19 nt, Artificial Sequence
  Description of Artificial Sequence: Synthetic oligonucleotide
uuacauuccgggcacgugu

SEQ ID NO: 463639 - RNA, 19 nt, Artificial Sequence
  Description of Artificial Sequence: Synthetic oligonucleotide
agcacaacccacuugcucu

SEQ ID NO: 463640 - RNA, 19 nt, Artificial Sequence
  Description of Artificial Sequence: Synthetic oligonucleotide
uggguugccuaacugcagg

SEQ ID NO: 463641 - RNA, 19 nt, Artificial Sequence
  Description of Artificial Sequence: Synthetic oligonucleotide
ucguuggugcuccagcagg

SEQ ID NO: 463642 - RNA, 19 nt, Artificial Sequence
  Description of Artificial Sequence: Synthetic oligonucleotide
uugagcgaguguuugggag

SEQ ID NO: 463643 - RNA, 19 nt, Artificial Sequence
  Description of Artificial Sequence: Synthetic oligonucleotide
ugcaaagugggacucugga

SEQ ID NO: 463644 - RNA, 19 nt, Artificial Sequence
  Description of Artificial Sequence: Synthetic oligonucleotide
guagcggaagcacuuggcg

SEQ ID NO: 463645 - RNA, 19 nt, Artificial Sequence
  Description of Artificial Sequence: Synthetic oligonucleotide
aaagccguguuccuccacu

SEQ ID NO: 463646 - RNA, 19 nt, Artificial Sequence
  Description of Artificial Sequence: Synthetic oligonucleotide
  modified_base (16)..(16): a, c, u, g, unknown or other
gucagcgagucuuucncag

SEQ ID NO: 463647 - RNA, 19 nt, Artificial Sequence
  Description of Artificial Sequence: Synthetic oligonucleotide
guuaaucuucagccgaaag

SEQ ID NO: 463648 - RNA, 19 nt, Artificial Sequence
  Description of Artificial Sequence: Synthetic oligonucleotide
cacuccaugcaagugaagg

SEQ ID NO: 463649 - RNA, 19 nt, Artificial Sequence
  Description of Artificial Sequence: Synthetic oligonucleotide
uaaaggcugagccacgcuc

SEQ ID NO: 463650 - RNA, 19 nt, Artificial Sequence
  Description of Artificial Sequence: Synthetic oligonucleotide
ucugauacauacuggccuc

SEQ ID NO: 463651 - RNA, 19 nt, Artificial Sequence
  Description of Artificial Sequence: Synthetic oligonucleotide
gugagcuuagacuuuucgc

SEQ ID NO: 463652 - RNA, 19 nt, Artificial Sequence
  Description of Artificial Sequence: Synthetic oligonucleotide
cuugaucacgaugccaucg

SEQ ID NO: 463653 - RNA, 19 nt, Artificial Sequence
  Description of Artificial Sequence: Synthetic oligonucleotide
  modified_base (7)..(7): a, c, u, g, unknown or other
ucuuucncaggaacuucga

SEQ ID NO: 463654 - RNA, 19 nt, Artificial Sequence
  Description of Artificial Sequence: Synthetic oligonucleotide
uccaugcaagugaagggcc

SEQ ID NO: 463655 - RNA, 19 nt, Artificial Sequence
  Description of Artificial Sequence: Synthetic oligonucleotide
uccuuuugcaaagugggac

SEQ ID NO: 463656 - RNA, 19 nt, Artificial Sequence
  Description of Artificial Sequence: Synthetic oligonucleotide
gaagagguauggaaaggag

SEQ ID NO: 463657 - RNA, 19 nt, Artificial Sequence
  Description of Artificial Sequence: Synthetic oligonucleotide
aagagguauggaaaggagu

SEQ ID NO: 463658 - RNA, 19 nt, Artificial Sequence
  Description of Artificial Sequence: Synthetic oligonucleotide
aggaacuucgaggagaggu

SEQ ID NO: 463659 - RNA, 19 nt, Artificial Sequence
  Description of Artificial Sequence: Synthetic oligonucleotide
caagcgagugaucucugcg

SEQ ID NO: 463660 - RNA, 19 nt, Artificial Sequence
  Description of Artificial Sequence: Synthetic oligonucleotide
ucacgauccccucugugca

SEQ ID NO: 463661 - RNA, 19 nt, Artificial Sequence
  Description of Artificial Sequence: Synthetic oligonucleotide
gaacuucgaggagaggugg

SEQ ID NO: 463662 - RNA, 19 nt, Artificial Sequence
  Description of Artificial Sequence: Synthetic oligonucleotide
ucagccgaaagcucuugcc

SEQ ID NO: 463663 - RNA, 19 nt, Artificial Sequence
  Description of Artificial Sequence: Synthetic oligonucleotide
aagcaggcaacaagcgacc

SEQ ID NO: 463664 - RNA, 19 nt, Artificial Sequence
  Description of Artificial Sequence: Synthetic oligonucleotide
ugggaaugcccaugaaugc

SEQ ID NO: 463665 - RNA, 19 nt, Artificial Sequence
  Description of Artificial Sequence: Synthetic oligonucleotide
agguauggaaaggaguguc

SEQ ID NO: 463666 - RNA, 19 nt, Artificial Sequence
  Description of Artificial Sequence: Synthetic oligonucleotide
gacccuugcaccuggcugc

SEQ ID NO: 463667 - RNA, 19 nt, Artificial Sequence
  Description of Artificial Sequence: Synthetic oligonucleotide
ucucacuaccguccugggg

SEQ ID NO: 463668 - RNA, 19 nt, Artificial Sequence
  Description of Artificial Sequence: Synthetic oligonucleotide
gauuuguggcugaagcugc

SEQ ID NO: 463669 - RNA, 19 nt, Artificial Sequence
  Description of Artificial Sequence: Synthetic oligonucleotide
cucacuaccguccugggga

SEQ ID NO: 463670 - RNA, 19 nt, Artificial Sequence
  Description of Artificial Sequence: Synthetic oligonucleotide
gugaguugcugcuuguggc

SEQ ID NO: 463671 - RNA, 19 nt, Artificial Sequence
  Description of Artificial Sequence: Synthetic oligonucleotide
  modified_base (15)..(15): a, c, u, g, unknown or other
ucagcgagucuuucncagg

SEQ ID NO: 463672 - RNA, 19 nt, Artificial Sequence
  Description of Artificial Sequence: Synthetic oligonucleotide
uuucggguggaccuccucu

SEQ ID NO: 463673 - RNA, 19 nt, Artificial Sequence
  Description of Artificial Sequence: Synthetic oligonucleotide
  modified_base (8)..(8): a, c, u, g, unknown or other
gucuuucncaggaacuucg

SEQ ID NO: 463674 - RNA, 19 nt, Artificial Sequence
  Description of Artificial Sequence: Synthetic oligonucleotide
ucgcugaauucacuggagc

SEQ ID NO: 463675 - RNA, 19 nt, Artificial Sequence
  Description of Artificial Sequence: Synthetic oligonucleotide
uuugcaaagugggacucug

SEQ ID NO: 463676 - RNA, 19 nt, Artificial Sequence
  Description of Artificial Sequence: Synthetic oligonucleotide
agcucgcugaauucacugg

SEQ ID NO: 463677 - RNA, 19 nt, Artificial Sequence
  Description of Artificial Sequence: Synthetic oligonucleotide
aggaguguccuuuugcaaa

SEQ ID NO: 463678 - RNA, 19 nt, Artificial Sequence
  Description of Artificial Sequence: Synthetic oligonucleotide
uugaucacgaugccaucgu

SEQ ID NO: 463679 - RNA, 19 nt, Artificial Sequence
  Description of Artificial Sequence: Synthetic oligonucleotide
aaggaauuaacagccugaa

SEQ ID NO: 463680 - RNA, 19 nt, Artificial Sequence
  Description of Artificial Sequence: Synthetic oligonucleotide
uugccuaacugcaggggug

SEQ ID NO: 463681 - RNA, 19 nt, Artificial Sequence
  Description of Artificial Sequence: Synthetic oligonucleotide
cucggcacauucauagggc

SEQ ID NO: 463682 - RNA, 19 nt, Artificial Sequence
  Description of Artificial Sequence: Synthetic oligonucleotide
gcaaaugaaggagaccucg

SEQ ID NO: 463683 - RNA, 19 nt, Artificial Sequence
  Description of Artificial Sequence: Synthetic oligonucleotide
aguccauacuccugcagca

SEQ ID NO: 463684 - RNA, 19 nt, Artificial Sequence
  Description of Artificial Sequence: Synthetic oligonucleotide
  modified_base (6)..(6): a, c, u, g, unknown or other
cuuucncaggaacuucgag

SEQ ID NO: 463685 - RNA, 19 nt, Artificial Sequence
  Description of Artificial Sequence: Synthetic oligonucleotide
ggugagcuuagacuuuucg

SEQ ID NO: 463686 - RNA, 19 nt, Artificial Sequence
  Description of Artificial Sequence: Synthetic oligonucleotide
aggaauuaacagccugaag

SEQ ID NO: 463687 - RNA, 19 nt, Artificial Sequence
  Description of Artificial Sequence: Synthetic oligonucleotide
uugcaaagugggacucugg

SEQ ID NO: 463688 - RNA, 19 nt, Artificial Sequence
  Description of Artificial Sequence: Synthetic oligonucleotide
uagcggaagcacuuggcgc

SEQ ID NO: 463689 - RNA, 19 nt, Artificial Sequence
  Description of Artificial Sequence: Synthetic oligonucleotide
acucagcgcagugauaggg

SEQ ID NO: 463690 - RNA, 19 nt, Artificial Sequence
  Description of Artificial Sequence: Synthetic oligonucleotide
ucgucgguguuccagcaga

SEQ ID NO: 463691 - RNA, 19 nt, Artificial Sequence
  Description of Artificial Sequence: Synthetic oligonucleotide
ucggcacauucauagggcc

SEQ ID NO: 463692 - RNA, 19 nt, Artificial Sequence
  Description of Artificial Sequence: Synthetic oligonucleotide
cagccgaaagcucuugccg

SEQ ID NO: 463693 - RNA, 19 nt, Artificial Sequence
  Description of Artificial Sequence: Synthetic oligonucleotide
agacccuugcaccuggcug

SEQ ID NO: 463694 - RNA, 19 nt, Artificial Sequence
  Description of Artificial Sequence: Synthetic oligonucleotide
aggcggaagcucuucuuac

SEQ ID NO: 463695 - RNA, 19 nt, Artificial Sequence
  Description of Artificial Sequence: Synthetic oligonucleotide
caaggaauuaacagccuga

SEQ ID NO: 463696 - RNA, 19 nt, Artificial Sequence
  Description of Artificial Sequence: Synthetic oligonucleotide
gauugcaagugcuggggca

SEQ ID NO: 463697 - RNA, 19 nt, Artificial Sequence
  Description of Artificial Sequence: Synthetic oligonucleotide
acgccgguuccucugcugc

SEQ ID NO: 463698 - RNA, 19 nt, Artificial Sequence
  Description of Artificial Sequence: Synthetic oligonucleotide
ugcaucgcgccuaccugcg

SEQ ID NO: 463699 - RNA, 19 nt, Artificial Sequence
  Description of Artificial Sequence: Synthetic oligonucleotide
uaucacgauccccucugug

SEQ ID NO: 463700 - RNA, 19 nt, Artificial Sequence
  Description of Artificial Sequence: Synthetic oligonucleotide
ugagcgaguguuugggagu

SEQ ID NO: 463701 - RNA, 19 nt, Artificial Sequence
  Description of Artificial Sequence: Synthetic oligonucleotide
gggucugauacauacuggc

SEQ ID NO: 463702 - RNA, 19 nt, Artificial Sequence
  Description of Artificial Sequence: Synthetic oligonucleotide
uggugcuuggucaggcuug

SEQ ID NO: 463703 - RNA, 19 nt, Artificial Sequence
  Description of Artificial Sequence: Synthetic oligonucleotide
cugcccaagggauugcaag

SEQ ID NO: 463704 - RNA, 19 nt, Artificial Sequence
  Description of Artificial Sequence: Synthetic oligonucleotide
  modified_base (9)..(9): a, c, u, g, unknown or other
agucuuucncaggaacuuc

SEQ ID NO: 463705 - RNA, 19 nt, Artificial Sequence
  Description of Artificial Sequence: Synthetic oligonucleotide
gaaugcccaugaaugcugg

SEQ ID NO: 463706 - RNA, 19 nt, Artificial Sequence
  Description of Artificial Sequence: Synthetic oligonucleotide
ucucauugguccccguccu

SEQ ID NO: 463707 - RNA, 19 nt, Artificial Sequence
  Description of Artificial Sequence: Synthetic oligonucleotide
ugaucacgaugccaucgug

SEQ ID NO: 463708 - RNA, 19 nt, Artificial Sequence
  Description of Artificial Sequence: Synthetic oligonucleotide
  modified_base (3)..(3): a, c, u, g, unknown or other
ucncaggaacuucgaggag

SEQ ID NO: 463709 - RNA, 19 nt, Artificial Sequence
  Description of Artificial Sequence: Synthetic oligonucleotide
uagggccccuccuugaugu

SEQ ID NO: 463710 - RNA, 19 nt, Artificial Sequence
  Description of Artificial Sequence: Synthetic oligonucleotide
ugccuaacugcaggggugg

SEQ ID NO: 463711 - RNA, 19 nt, Artificial Sequence
  Description of Artificial Sequence: Synthetic oligonucleotide
ucauugguccccguccugc

SEQ ID NO: 463712 - RNA, 19 nt, Artificial Sequence
  Description of Artificial Sequence: Synthetic oligonucleotide
ugauuugggccguggcuug

SEQ ID NO: 463713 - RNA, 19 nt, Artificial Sequence
  Description of Artificial Sequence: Synthetic oligonucleotide
aacccacuugcucuccaga

SEQ ID NO: 463714 - RNA, 19 nt, Artificial Sequence
  Description of Artificial Sequence: Synthetic oligonucleotide
cuaguguguucucuuguuc

SEQ ID NO: 463715 - RNA, 19 nt, Artificial Sequence
  Description of Artificial Sequence: Synthetic oligonucleotide
ugcgacgggcggcugaagc

SEQ ID NO: 463716 - RNA, 19 nt, Artificial Sequence
  Description of Artificial Sequence: Synthetic oligonucleotide
agcccuuucggguggaccu

SEQ ID NO: 463717 - RNA, 19 nt, Artificial Sequence
  Description of Artificial Sequence: Synthetic oligonucleotide
aacuucgaggagagguggg

SEQ ID NO: 463718 - RNA, 19 nt, Artificial Sequence
  Description of Artificial Sequence: Synthetic oligonucleotide
gucugauacauacuggccu

SEQ ID NO: 463719 - RNA, 19 nt, Artificial Sequence
  Description of Artificial Sequence: Synthetic oligonucleotide
acuucgaggagaggugggg

SEQ ID NO: 463720 - RNA, 19 nt, Artificial Sequence
  Description of Artificial Sequence: Synthetic oligonucleotide
agugggacucuggagcagg

SEQ ID NO: 463721 - RNA, 19 nt, Artificial Sequence
  Description of Artificial Sequence: Synthetic oligonucleotide
agaugguuugcaaacucca

SEQ ID NO: 463722 - RNA, 19 nt, Artificial Sequence
  Description of Artificial Sequence: Synthetic oligonucleotide
uggaccuccucuagugugu

SEQ ID NO: 463723 - RNA, 19 nt, Artificial Sequence
  Description of Artificial Sequence: Synthetic oligonucleotide
aagggguuggggcgccccg

SEQ ID NO: 463724 - RNA, 19 nt, Artificial Sequence
  Description of Artificial Sequence: Synthetic oligonucleotide
cacccgguggauacgcugg

SEQ ID NO: 463725 - RNA, 19 nt, Artificial Sequence
  Description of Artificial Sequence: Synthetic oligonucleotide
ggaguguccuuuugcaaag

SEQ ID NO: 463726 - RNA, 19 nt, Artificial Sequence
  Description of Artificial Sequence: Synthetic oligonucleotide
ucacgaugccaucgugugc

SEQ ID NO: 463727 - RNA, 19 nt, Artificial Sequence
  Description of Artificial Sequence: Synthetic oligonucleotide
ucggcugcagaagagguau

SEQ ID NO: 463728 - RNA, 19 nt, Artificial Sequence
  Description of Artificial Sequence: Synthetic oligonucleotide
ucuuuaucacgauccccuc

SEQ ID NO: 463729 - RNA, 19 nt, Artificial Sequence
  Description of Artificial Sequence: Synthetic oligonucleotide
uucauccauuuauugucaa

SEQ ID NO: 463730 - RNA, 19 nt, Artificial Sequence
  Description of Artificial Sequence: Synthetic oligonucleotide
ugaccucgcacucggcaca

SEQ ID NO: 463731 - RNA, 19 nt, Artificial Sequence
  Description of Artificial Sequence: Synthetic oligonucleotide
uucgucgguguuccagcag

SEQ ID NO: 463732 - RNA, 19 nt, Artificial Sequence
  Description of Artificial Sequence: Synthetic oligonucleotide
cuggccucauaucucccgg

SEQ ID NO: 463733 - RNA, 19 nt, Artificial Sequence
  Description of Artificial Sequence: Synthetic oligonucleotide
uucgcgcgagugcacgcgg

SEQ ID NO: 463734 - RNA, 19 nt, Artificial Sequence
  Description of Artificial Sequence: Synthetic oligonucleotide
uuucuagcagguucuccau

SEQ ID NO: 463735 - RNA, 19 nt, Artificial Sequence
  Description of Artificial Sequence: Synthetic oligonucleotide
uaccguccuggggagaagg

SEQ ID NO: 463736 - RNA, 19 nt, Artificial Sequence
  Description of Artificial Sequence: Synthetic oligonucleotide
ggucucacuaccguccugg

SEQ ID NO: 463737 - RNA, 19 nt, Artificial Sequence
  Description of Artificial Sequence: Synthetic oligonucleotide
gugguuggugagcuuagac

SEQ ID NO: 463738 - RNA, 19 nt, Artificial Sequence
  Description of Artificial Sequence: Synthetic oligonucleotide
augcaugcggccguucgcg

SEQ ID NO: 463739 - RNA, 19 nt, Artificial Sequence
  Description of Artificial Sequence: Synthetic oligonucleotide
aggggccuuagacccuugc

SEQ ID NO: 463740 - RNA, 19 nt, Artificial Sequence
  Description of Artificial Sequence: Synthetic oligonucleotide
ggucaggcuugauuugugg

SEQ ID NO: 463741 - RNA, 19 nt, Artificial Sequence
  Description of Artificial Sequence: Synthetic oligonucleotide
aggucccacgguucucacc

SEQ ID NO: 463742 - RNA, 19 nt, Artificial Sequence
  Description of Artificial Sequence: Synthetic oligonucleotide
agauggugcuugcggauga

SEQ ID NO: 463743 - RNA, 19 nt, Artificial Sequence
  Description of Artificial Sequence: Synthetic oligonucleotide
cugcgaauggcuggcagcc

SEQ ID NO: 463744 - RNA, 19 nt, Artificial Sequence
  Description of Artificial Sequence: Synthetic oligonucleotide
ugugggugucucacccucc

SEQ ID NO: 463745 - RNA, 19 nt, Artificial Sequence
  Description of Artificial Sequence: Synthetic oligonucleotide
ucacuaccguccuggggag

SEQ ID NO: 463746 - RNA, 19 nt, Artificial Sequence
  Description of Artificial Sequence: Synthetic oligonucleotide
ucuuacauuccgggcacgu

SEQ ID NO: 463747 - RNA, 19 nt, Artificial Sequence
  Description of Artificial Sequence: Synthetic oligonucleotide
cuuguuccugcauguccag

SEQ ID NO: 463748 - RNA, 19 nt, Artificial Sequence
  Description of Artificial Sequence: Synthetic oligonucleotide
gcugaauucacuggagccc

SEQ ID NO: 463749 - RNA, 19 nt, Artificial Sequence
  Description of Artificial Sequence: Synthetic oligonucleotide
uuaucacgauccccucugu

SEQ ID NO: 463750 - RNA, 19 nt, Artificial Sequence
  Description of Artificial Sequence: Synthetic oligonucleotide
cuuuugcaaagugggacuc

SEQ ID NO: 463751 - RNA, 19 nt, Artificial Sequence
  Description of Artificial Sequence: Synthetic oligonucleotide
uuuugcaaagugggacucu

SEQ ID NO: 463752 - RNA, 19 nt, Artificial Sequence
  Description of Artificial Sequence: Synthetic oligonucleotide
gagugaucucugcgguggg

SEQ ID NO: 463753 - RNA, 19 nt, Artificial Sequence
  Description of Artificial Sequence: Synthetic oligonucleotide
ucggguggaccuccucuag

SEQ ID NO: 463754 - RNA, 19 nt, Artificial Sequence
  Description of Artificial Sequence: Synthetic oligonucleotide
agccaagcgagugaucucu

SEQ ID NO: 463755 - RNA, 19 nt, Artificial Sequence
  Description of Artificial Sequence: Synthetic oligonucleotide
ucccacgguucucacccag

SEQ ID NO: 463756 - RNA, 19 nt, Artificial Sequence
  Description of Artificial Sequence: Synthetic oligonucleotide
cuccagaccuucugagccc

SEQ ID NO: 463757 - RNA, 19 nt, Artificial Sequence
  Description of Artificial Sequence: Synthetic oligonucleotide
  modified_base (14)..(14): a, c, u, g, unknown or other
cagcgagucuuucncagga

SEQ ID NO: 463758 - RNA, 19 nt, Artificial Sequence
  Description of Artificial Sequence: Synthetic oligonucleotide
aggcguagccacugcgcac

SEQ ID NO: 463759 - RNA, 19 nt, Artificial Sequence
  Description of Artificial Sequence: Synthetic oligonucleotide
uugguccccguccugcccu

SEQ ID NO: 463760 - RNA, 19 nt, Artificial Sequence
  Description of Artificial Sequence: Synthetic oligonucleotide
caccucaaucuugaucacg

SEQ ID NO: 463761 - RNA, 19 nt, Artificial Sequence
  Description of Artificial Sequence: Synthetic oligonucleotide
uacauuccgggcacgugua

SEQ ID NO: 463762 - RNA, 19 nt, Artificial Sequence
  Description of Artificial Sequence: Synthetic oligonucleotide
gaggcguagccacugcgca

SEQ ID NO: 463763 - RNA, 19 nt, Artificial Sequence
  Description of Artificial Sequence: Synthetic oligonucleotide
ugaaagccguguuccucca

SEQ ID NO: 463764 - RNA, 19 nt, Artificial Sequence
  Description of Artificial Sequence: Synthetic oligonucleotide
gugccgcucaccaugcccg

SEQ ID NO: 463765 - RNA, 19 nt, Artificial Sequence
  Description of Artificial Sequence: Synthetic oligonucleotide
caugcaugcggccguucgc

SEQ ID NO: 463766 - RNA, 19 nt, Artificial Sequence
  Description of Artificial Sequence: Synthetic oligonucleotide
ccuaccugcgaauggcugg

SEQ ID NO: 463767 - RNA, 19 nt, Artificial Sequence
  Description of Artificial Sequence: Synthetic oligonucleotide
uuugggccguggcuugagc

SEQ ID NO: 463768 - RNA, 19 nt, Artificial Sequence
  Description of Artificial Sequence: Synthetic oligonucleotide
caugcaagugaagggccgc

SEQ ID NO: 463769 - RNA, 19 nt, Artificial Sequence
  Description of Artificial Sequence: Synthetic oligonucleotide
  modified_base (2)..(2): a, c, u, g, unknown or other
cncaggaacuucgaggaga

SEQ ID NO: 463770 - RNA, 19 nt, Artificial Sequence
  Description of Artificial Sequence: Synthetic oligonucleotide
gggauugcaagugcugggg

SEQ ID NO: 463771 - RNA, 19 nt, Artificial Sequence
  Description of Artificial Sequence: Synthetic oligonucleotide
auucgucgguguuccagca

SEQ ID NO: 463772 - RNA, 19 nt, Artificial Sequence
  Description of Artificial Sequence: Synthetic oligonucleotide
uuagacccuugcaccuggc

SEQ ID NO: 463773 - RNA, 19 nt, Artificial Sequence
  Description of Artificial Sequence: Synthetic oligonucleotide
ugaguccugaaagccgugu

SEQ ID NO: 463774 - RNA, 19 nt, Artificial Sequence
  Description of Artificial Sequence: Synthetic oligonucleotide
agccguguuccuccacuuc

SEQ ID NO: 463775 - RNA, 19 nt, Artificial Sequence
  Description of Artificial Sequence: Synthetic oligonucleotide
ugccagcauguacacgcug

SEQ ID NO: 463776 - RNA, 19 nt, Artificial Sequence
  Description of Artificial Sequence: Synthetic oligonucleotide
ugggccguggcuugagcga

SEQ ID NO: 463777 - RNA, 19 nt, Artificial Sequence
  Description of Artificial Sequence: Synthetic oligonucleotide
cuggguugccuaacugcag

SEQ ID NO: 463778 - RNA, 19 nt, Artificial Sequence
  Description of Artificial Sequence: Synthetic oligonucleotide
uucuuacauuccgggcacg

SEQ ID NO: 463779 - RNA, 19 nt, Artificial Sequence
  Description of Artificial Sequence: Synthetic oligonucleotide
cuaccugcgaauggcuggc

SEQ ID NO: 463780 - RNA, 19 nt, Artificial Sequence
  Description of Artificial Sequence: Synthetic oligonucleotide
ucugugggugucucacccu

SEQ ID NO: 463781 - RNA, 19 nt, Artificial Sequence
  Description of Artificial Sequence: Synthetic oligonucleotide
gguauggaaaggagugucc

SEQ ID NO: 463782 - RNA, 19 nt, Artificial Sequence
  Description of Artificial Sequence: Synthetic oligonucleotide
ugggugauuugggccgugg

SEQ ID NO: 463783 - RNA, 19 nt, Artificial Sequence
  Description of Artificial Sequence: Synthetic oligonucleotide
agcaggugcgacgggcggc

SEQ ID NO: 463784 - RNA, 19 nt, Artificial Sequence
  Description of Artificial Sequence: Synthetic oligonucleotide
cuuguggcggaagcugacc

SEQ ID NO: 463785 - RNA, 19 nt, Artificial Sequence
  Description of Artificial Sequence: Synthetic oligonucleotide
gggccuuagacccuugcac

SEQ ID NO: 463786 - RNA, 19 nt, Artificial Sequence
  Description of Artificial Sequence: Synthetic oligonucleotide
ggcgccagccucuucacug

SEQ ID NO: 463787 - RNA, 19 nt, Artificial Sequence
  Description of Artificial Sequence: Synthetic oligonucleotide
ggucaguagccgcauggcc

SEQ ID NO: 463788 - RNA, 19 nt, Artificial Sequence
  Description of Artificial Sequence: Synthetic oligonucleotide
uggauacgcugguguagug

SEQ ID NO: 463789 - RNA, 19 nt, Artificial Sequence
  Description of Artificial Sequence: Synthetic oligonucleotide
ggaaaggaguguccuuuug

SEQ ID NO: 463790 - RNA, 19 nt, Artificial Sequence
  Description of Artificial Sequence: Synthetic oligonucleotide
ugccaucgugugcagcacu

SEQ ID NO: 463791 - RNA, 19 nt, Artificial Sequence
  Description of Artificial Sequence: Synthetic oligonucleotide
cuuacauuccgggcacgug

SEQ ID NO: 463792 - RNA, 19 nt, Artificial Sequence
  Description of Artificial Sequence: Synthetic oligonucleotide
aagugggacucuggagcag

SEQ ID NO: 463793 - RNA, 19 nt, Artificial Sequence
  Description of Artificial Sequence: Synthetic oligonucleotide
cacagccguucucucacag

SEQ ID NO: 463794 - RNA, 19 nt, Artificial Sequence
  Description of Artificial Sequence: Synthetic oligonucleotide
gcaugcaugcggccguucg

SEQ ID NO: 463795 - RNA, 19 nt, Artificial Sequence
  Description of Artificial Sequence: Synthetic oligonucleotide
guugccuaacugcaggggu

SEQ ID NO: 463796 - RNA, 19 nt, Artificial Sequence
  Description of Artificial Sequence: Synthetic oligonucleotide
aggggcggggcgcaugcuc

SEQ ID NO: 463797 - RNA, 19 nt, Artificial Sequence
  Description of Artificial Sequence: Synthetic oligonucleotide
ggucacccagcucugaguc

SEQ ID NO: 463798 - RNA, 19 nt, Artificial Sequence
  Description of Artificial Sequence: Synthetic oligonucleotide
ggucugauacauacuggcc

SEQ ID NO: 463799 - RNA, 19 nt, Artificial Sequence
  Description of Artificial Sequence: Synthetic oligonucleotide
cugugggugucucacccuc

SEQ ID NO: 463800 - RNA, 19 nt, Artificial Sequence
  Description of Artificial Sequence: Synthetic oligonucleotide
cagcacaacccacuugcuc

SEQ ID NO: 463801 - RNA, 19 nt, Artificial Sequence
  Description of Artificial Sequence: Synthetic oligonucleotide
acagccguucucucacagu

SEQ ID NO: 463802 - RNA, 19 nt, Artificial Sequence
  Description of Artificial Sequence: Synthetic oligonucleotide
ggguugccuaacugcaggg

SEQ ID NO: 463803 - RNA, 19 nt, Artificial Sequence
  Description of Artificial Sequence: Synthetic oligonucleotide
ggauucgucgguguuccag

SEQ ID NO: 463804 - RNA, 19 nt, Artificial Sequence
  Description of Artificial Sequence: Synthetic oligonucleotide
gccacugcgcacccggugg

SEQ ID NO: 463805 - RNA, 19 nt, Artificial Sequence
  Description of Artificial Sequence: Synthetic oligonucleotide
gcuggucucacuaccgucc

SEQ ID NO: 463806 - RNA, 19 nt, Artificial Sequence
  Description of Artificial Sequence: Synthetic oligonucleotide
uucggguggaccuccucua

SEQ ID NO: 463807 - RNA, 19 nt, Artificial Sequence
  Description of Artificial Sequence: Synthetic oligonucleotide
aagccguguuccuccacuu

SEQ ID NO: 463808 - RNA, 19 nt, Artificial Sequence
  Description of Artificial Sequence: Synthetic oligonucleotide
ggcuugagcgaguguuugg

SEQ ID NO: 463809 - RNA, 19 nt, Artificial Sequence
  Description of Artificial Sequence: Synthetic oligonucleotide
ccaugcaagugaagggccg

SEQ ID NO: 463810 - RNA, 19 nt, Artificial Sequence
  Description of Artificial Sequence: Synthetic oligonucleotide
uccagaccuucugagcccu

SEQ ID NO: 463811 - RNA, 19 nt, Artificial Sequence
  Description of Artificial Sequence: Synthetic oligonucleotide
cgcugaauucacuggagcc

SEQ ID NO: 463812 - RNA, 19 nt, Artificial Sequence
  Description of Artificial Sequence: Synthetic oligonucleotide
gguugccuaacugcagggg

SEQ ID NO: 463813 - RNA, 19 nt, Artificial Sequence
  Description of Artificial Sequence: Synthetic oligonucleotide
cacucagcgcagugauagg

SEQ ID NO: 463814 - RNA, 19 nt, Artificial Sequence
  Description of Artificial Sequence: Synthetic oligonucleotide
gugagcucguuggugcucc

SEQ ID NO: 463815 - RNA, 19 nt, Artificial Sequence
  Description of Artificial Sequence: Synthetic oligonucleotide
cugcgcacccgguggauac

SEQ ID NO: 463816 - RNA, 19 nt, Artificial Sequence
  Description of Artificial Sequence: Synthetic oligonucleotide
ggugccgcucaccaugccc

SEQ ID NO: 463817 - RNA, 19 nt, Artificial Sequence
  Description of Artificial Sequence: Synthetic oligonucleotide
  modified_base (10)..(10): a, c, u, g, unknown or other
gagucuuucncaggaacuu

SEQ ID NO: 463818 - RNA, 19 nt, Artificial Sequence
  Description of Artificial Sequence: Synthetic oligonucleotide
ugcacgcggcagugguugg

SEQ ID NO: 463819 - RNA, 19 nt, Artificial Sequence
  Description of Artificial Sequence: Synthetic oligonucleotide
gaucacgaugccaucgugu

SEQ ID NO: 463820 - RNA, 19 nt, Artificial Sequence
  Description of Artificial Sequence: Synthetic oligonucleotide
ugauacauacuggccucau

SEQ ID NO: 463821 - RNA, 19 nt, Artificial Sequence
  Description of Artificial Sequence: Synthetic oligonucleotide
guucgcgcgagugcacgcg

SEQ ID NO: 463822 - RNA, 19 nt, Artificial Sequence
  Description of Artificial Sequence: Synthetic oligonucleotide
uagccgcauggccugggcu

SEQ ID NO: 463823 - RNA, 19 nt, Artificial Sequence
  Description of Artificial Sequence: Synthetic oligonucleotide
cuugagcgaguguuuggga

SEQ ID NO: 463824 - RNA, 19 nt, Artificial Sequence
  Description of Artificial Sequence: Synthetic oligonucleotide
caggugccgcucaccaugc

SEQ ID NO: 463825 - RNA, 19 nt, Artificial Sequence
  Description of Artificial Sequence: Synthetic oligonucleotide
uggccucauaucucccgga

SEQ ID NO: 463826 - RNA, 19 nt, Artificial Sequence
  Description of Artificial Sequence: Synthetic oligonucleotide
guccauacuccugcagcag

SEQ ID NO: 463827 - RNA, 19 nt, Artificial Sequence
  Description of Artificial Sequence: Synthetic oligonucleotide
ugcaugcggccguucgcgc

SEQ ID NO: 463828 - RNA, 19 nt, Artificial Sequence
  Description of Artificial Sequence: Synthetic oligonucleotide
gaaagccguguuccuccac

SEQ ID NO: 463829 - RNA, 19 nt, Artificial Sequence
  Description of Artificial Sequence: Synthetic oligonucleotide
guggauaaccaggcugaug

SEQ ID NO: 463830 - RNA, 19 nt, Artificial Sequence
  Description of Artificial Sequence: Synthetic oligonucleotide
acuaccguccuggggagaa

SEQ ID NO: 463831 - RNA, 19 nt, Artificial Sequence
  Description of Artificial Sequence: Synthetic oligonucleotide
augccaucgugugcagcac

SEQ ID NO: 463832 - RNA, 19 nt, Artificial Sequence
  Description of Artificial Sequence: Synthetic oligonucleotide
cugcauguccaggucuggc

SEQ ID NO: 463833 - RNA, 19 nt, Artificial Sequence
  Description of Artificial Sequence: Synthetic oligonucleotide
ggcgcaugcucacucgccc

SEQ ID NO: 463834 - RNA, 19 nt, Artificial Sequence
  Description of Artificial Sequence: Synthetic oligonucleotide
gggaggcguagccacugcg

SEQ ID NO: 463835 - RNA, 19 nt, Artificial Sequence
  Description of Artificial Sequence: Synthetic oligonucleotide
gagcccuuucggguggacc

SEQ ID NO: 463836 - RNA, 19 nt, Artificial Sequence
  Description of Artificial Sequence: Synthetic oligonucleotide
ccugcgaauggcuggcagc

SEQ ID NO: 463837 - RNA, 19 nt, Artificial Sequence
  Description of Artificial Sequence: Synthetic oligonucleotide
gucaguagccgcauggccu

SEQ ID NO: 463838 - RNA, 19 nt, Artificial Sequence
  Description of Artificial Sequence: Synthetic oligonucleotide
aggugccgcucaccaugcc

SEQ ID NO: 463839 - RNA, 19 nt, Artificial Sequence
  Description of Artificial Sequence: Synthetic oligonucleotide
ccaggugccgcucaccaug

SEQ ID NO: 463840 - RNA, 19 nt, Artificial Sequence
  Description of Artificial Sequence: Synthetic oligonucleotide
ucacucgcccguguggguc

SEQ ID NO: 463841 - RNA, 19 nt, Artificial Sequence
  Description of Artificial Sequence: Synthetic oligonucleotide
gugacagggucagcgaguc

SEQ ID NO: 463842 - RNA, 19 nt, Artificial Sequence
  Description of Artificial Sequence: Synthetic oligonucleotide
cugcuggguugccuaacug

SEQ ID NO: 463843 - RNA, 19 nt, Artificial Sequence
  Description of Artificial Sequence: Synthetic oligonucleotide
aggcuugauuuguggcuga

SEQ ID NO: 463844 - RNA, 19 nt, Artificial Sequence
  Description of Artificial Sequence: Synthetic oligonucleotide
gugaagggccgcucgccac

SEQ ID NO: 463845 - RNA, 19 nt, Artificial Sequence
  Description of Artificial Sequence: Synthetic oligonucleotide
acaagcgaccuggcugguc

SEQ ID NO: 463846 - RNA, 19 nt, Artificial Sequence
  Description of Artificial Sequence: Synthetic oligonucleotide
cuuuucgcugaagcucuuc

SEQ ID NO: 463847 - RNA, 19 nt, Artificial Sequence
  Description of Artificial Sequence: Synthetic oligonucleotide
uggugagcuuagacuuuuc

SEQ ID NO: 463848 - RNA, 19 nt, Artificial Sequence
  Description of Artificial Sequence: Synthetic oligonucleotide
cagcaggugcgacgggcgg

SEQ ID NO: 463849 - RNA, 19 nt, Artificial Sequence
  Description of Artificial Sequence: Synthetic oligonucleotide
cugaguccugaaagccgug

SEQ ID NO: 463850 - RNA, 19 nt, Artificial Sequence
  Description of Artificial Sequence: Synthetic oligonucleotide
ggcguagccacugcgcacc

SEQ ID NO: 463851 - RNA, 19 nt, Artificial Sequence
  Description of Artificial Sequence: Synthetic oligonucleotide
gcuuggucaggcuugauuu

SEQ ID NO: 463852 - RNA, 19 nt, Artificial Sequence
  Description of Artificial Sequence: Synthetic oligonucleotide
ugaauucacuggagcccuu

SEQ ID NO: 463853 - RNA, 19 nt, Artificial Sequence
  Description of Artificial Sequence: Synthetic oligonucleotide
caagcgaccuggcuggucu

SEQ ID NO: 463854 - RNA, 19 nt, Artificial Sequence
  Description of Artificial Sequence: Synthetic oligonucleotide
cuuuaucacgauccccucu

SEQ ID NO: 463855 - RNA, 19 nt, Artificial Sequence
  Description of Artificial Sequence: Synthetic oligonucleotide
uucgucccaucaguggcuc

SEQ ID NO: 463856 - RNA, 19 nt, Artificial Sequence
  Description of Artificial Sequence: Synthetic oligonucleotide
ugcgcacccgguggauacg

SEQ ID NO: 463857 - RNA, 19 nt, Artificial Sequence
  Description of Artificial Sequence: Synthetic oligonucleotide
ugcggugggcaguggcugu

SEQ ID NO: 463858 - RNA, 19 nt, Artificial Sequence
  Description of Artificial Sequence: Synthetic oligonucleotide
ucuucacugcuggguugcc

SEQ ID NO: 463859 - RNA, 19 nt, Artificial Sequence
  Description of Artificial Sequence: Synthetic oligonucleotide
uggcggaagcugaccucgc

SEQ ID NO: 463860 - RNA, 19 nt, Artificial Sequence
  Description of Artificial Sequence: Synthetic oligonucleotide
ucgcgcgagugcacgcggc

SEQ ID NO: 463861 - RNA, 19 nt, Artificial Sequence
  Description of Artificial Sequence: Synthetic oligonucleotide
uccuccacuucgucccauc

SEQ ID NO: 463862 - RNA, 19 nt, Artificial Sequence
  Description of Artificial Sequence: Synthetic oligonucleotide
gagugcacgcggcaguggu

SEQ ID NO: 463863 - RNA, 19 nt, Artificial Sequence
  Description of Artificial Sequence: Synthetic oligonucleotide
cccaagggauugcaagugc

SEQ ID NO: 463864 - RNA, 19 nt, Artificial Sequence
  Description of Artificial Sequence: Synthetic oligonucleotide
aggcaacaagcgaccuggc

SEQ ID NO: 463865 - RNA, 19 nt, Artificial Sequence
  Description of Artificial Sequence: Synthetic oligonucleotide
gcaugcggccguucgcgcg

SEQ ID NO: 463866 - RNA, 19 nt, Artificial Sequence
  Description of Artificial Sequence: Synthetic oligonucleotide
gaccucgugcuugccagca

SEQ ID NO: 463867 - RNA, 19 nt, Artificial Sequence
  Description of Artificial Sequence: Synthetic oligonucleotide
ccaagcgagugaucucugc

SEQ ID NO: 463868 - RNA, 19 nt, Artificial Sequence
  Description of Artificial Sequence: Synthetic oligonucleotide
ggaggcguagccacugcgc

SEQ ID NO: 463869 - RNA, 19 nt, Artificial Sequence
  Description of Artificial Sequence: Synthetic oligonucleotide
gcagccgaggcacccgucc

SEQ ID NO: 463870 - RNA, 19 nt, Artificial Sequence
  Description of Artificial Sequence: Synthetic oligonucleotide
gcugaccucgcacucggca

SEQ ID NO: 463871 - RNA, 19 nt, Artificial Sequence
  Description of Artificial Sequence: Synthetic oligonucleotide
ggggacaucuccccaggca

SEQ ID NO: 463872 - RNA, 19 nt, Artificial Sequence
  Description of Artificial Sequence: Synthetic oligonucleotide
cugaauucacuggagcccu

SEQ ID NO: 463873 - RNA, 19 nt, Artificial Sequence
  Description of Artificial Sequence: Synthetic oligonucleotide
ggccucauaucucccggac

SEQ ID NO: 463874 - RNA, 19 nt, Artificial Sequence
  Description of Artificial Sequence: Synthetic oligonucleotide
guuggggcgccccgcuccc

SEQ ID NO: 463875 - RNA, 19 nt, Artificial Sequence
  Description of Artificial Sequence: Synthetic oligonucleotide
aucgcgccuaccugcgaau

SEQ ID NO: 463876 - RNA, 19 nt, Artificial Sequence
  Description of Artificial Sequence: Synthetic oligonucleotide
ucgcgccuaccugcgaaug

SEQ ID NO: 463877 - RNA, 19 nt, Artificial Sequence
  Description of Artificial Sequence: Synthetic oligonucleotide
guccuuuugcaaaguggga

SEQ ID NO: 463878 - RNA, 19 nt, Artificial Sequence
  Description of Artificial Sequence: Synthetic oligonucleotide
cucuaguguguucucuugu

SEQ ID NO: 463879 - RNA, 19 nt, Artificial Sequence
  Description of Artificial Sequence: Synthetic oligonucleotide
acgauccccucugugcagu

SEQ ID NO: 463880 - RNA, 19 nt, Artificial Sequence
  Description of Artificial Sequence: Synthetic oligonucleotide
cagccaagcgagugaucuc

SEQ ID NO: 463881 - RNA, 19 nt, Artificial Sequence
  Description of Artificial Sequence: Synthetic oligonucleotide
ugcgaauggcuggcagcca

SEQ ID NO: 463882 - RNA, 19 nt, Artificial Sequence
  Description of Artificial Sequence: Synthetic oligonucleotide
gagccacgcucuggggagg

SEQ ID NO: 463883 - RNA, 19 nt, Artificial Sequence
  Description of Artificial Sequence: Synthetic oligonucleotide
gaguccgcugguggcgcag

SEQ ID NO: 463884 - RNA, 19 nt, Artificial Sequence
  Description of Artificial Sequence: Synthetic oligonucleotide
  modified_base (17)..(17): a, c, u, g, unknown or other
ggucagcgagucuuucnca

SEQ ID NO: 463885 - RNA, 19 nt, Artificial Sequence
  Description of Artificial Sequence: Synthetic oligonucleotide
gagcgaguguuugggagua

SEQ ID NO: 463886 - RNA, 19 nt, Artificial Sequence
  Description of Artificial Sequence: Synthetic oligonucleotide
uagccacugcgcacccggu

SEQ ID NO: 463887 - RNA, 19 nt, Artificial Sequence
  Description of Artificial Sequence: Synthetic oligonucleotide
caugcggccguucgcgcga

SEQ ID NO: 463888 - RNA, 19 nt, Artificial Sequence
  Description of Artificial Sequence: Synthetic oligonucleotide
ggucgcucgcccgugugag

SEQ ID NO: 463889 - RNA, 19 nt, Artificial Sequence
  Description of Artificial Sequence: Synthetic oligonucleotide
aggugcgacgggcggcuga

SEQ ID NO: 463890 - RNA, 19 nt, Artificial Sequence
  Description of Artificial Sequence: Synthetic oligonucleotide
caucgcgccuaccugcgaa

SEQ ID NO: 463891 - RNA, 19 nt, Artificial Sequence
  Description of Artificial Sequence: Synthetic oligonucleotide
guaaaggcugagccacgcu

SEQ ID NO: 463892 - RNA, 19 nt, Artificial Sequence
  Description of Artificial Sequence: Synthetic oligonucleotide
cacgcggcagugguuggug

SEQ ID NO: 463893 - RNA, 19 nt, Artificial Sequence
  Description of Artificial Sequence: Synthetic oligonucleotide
auacgcugguguaguguga

SEQ ID NO: 463894 - RNA, 19 nt, Artificial Sequence
  Description of Artificial Sequence: Synthetic oligonucleotide
gcccaagggauugcaagug

SEQ ID NO: 463895 - RNA, 19 nt, Artificial Sequence
  Description of Artificial Sequence: Synthetic oligonucleotide
caggaacuucgaggagagg

SEQ ID NO: 463896 - RNA, 19 nt, Artificial Sequence
  Description of Artificial Sequence: Synthetic oligonucleotide
ggcuggucucacuaccguc

SEQ ID NO: 463897 - RNA, 19 nt, Artificial Sequence
  Description of Artificial Sequence: Synthetic oligonucleotide
cacucggggcaugcaugcg

SEQ ID NO: 463898 - RNA, 19 nt, Artificial Sequence
  Description of Artificial Sequence: Synthetic oligonucleotide
cuucgucccaucaguggcu

SEQ ID NO: 463899 - RNA, 19 nt, Artificial Sequence
  Description of Artificial Sequence: Synthetic oligonucleotide
acgcggcagugguugguga

SEQ ID NO: 463900 - RNA, 19 nt, Artificial Sequence
  Description of Artificial Sequence: Synthetic oligonucleotide
ggggccuuagacccuugca

SEQ ID NO: 463901 - RNA, 19 nt, Artificial Sequence
  Description of Artificial Sequence: Synthetic oligonucleotide
agccguucucucacagucu

SEQ ID NO: 463902 - RNA, 19 nt, Artificial Sequence
  Description of Artificial Sequence: Synthetic oligonucleotide
cgugcagauuguuuucauc

SEQ ID NO: 463903 - RNA, 19 nt, Artificial Sequence
  Description of Artificial Sequence: Synthetic oligonucleotide
ccucgcacucggcacauuc

SEQ ID NO: 463904 - RNA, 19 nt, Artificial Sequence
  Description of Artificial Sequence: Synthetic oligonucleotide
ucgucccaucaguggcucu

SEQ ID NO: 463905 - RNA, 19 nt, Artificial Sequence
  Description of Artificial Sequence: Synthetic oligonucleotide
ugccgcucaccaugcccgu

SEQ ID NO: 463906 - RNA, 19 nt, Artificial Sequence
  Description of Artificial Sequence: Synthetic oligonucleotide
cccacgguucucacccagg

SEQ ID NO: 463907 - RNA, 19 nt, Artificial Sequence
  Description of Artificial Sequence: Synthetic oligonucleotide
gaguccugaaagccguguu

SEQ ID NO: 463908 - RNA, 19 nt, Artificial Sequence
  Description of Artificial Sequence: Synthetic oligonucleotide
gcgccuaccugcgaauggc

SEQ ID NO: 463909 - RNA, 19 nt, Artificial Sequence
  Description of Artificial Sequence: Synthetic oligonucleotide
cucggcugcagaagaggua

SEQ ID NO: 463910 - RNA, 19 nt, Artificial Sequence
  Description of Artificial Sequence: Synthetic oligonucleotide
ugcccgugggaaugcccau

SEQ ID NO: 463911 - RNA, 19 nt, Artificial Sequence
  Description of Artificial Sequence: Synthetic oligonucleotide
cucgccacgccgguuccuc

SEQ ID NO: 463912 - RNA, 19 nt, Artificial Sequence
  Description of Artificial Sequence: Synthetic oligonucleotide
guacacgcugguggauaac

SEQ ID NO: 463913 - RNA, 19 nt, Artificial Sequence
  Description of Artificial Sequence: Synthetic oligonucleotide
gcugcagaagagguaugga

SEQ ID NO: 463914 - RNA, 19 nt, Artificial Sequence
  Description of Artificial Sequence: Synthetic oligonucleotide
ccgcucaccaugcccgugc

SEQ ID NO: 463915 - RNA, 19 nt, Artificial Sequence
  Description of Artificial Sequence: Synthetic oligonucleotide
gggaaugcccaugaaugcu

SEQ ID NO: 463916 - RNA, 19 nt, Artificial Sequence
  Description of Artificial Sequence: Synthetic oligonucleotide
cuaccguccuggggagaag

SEQ ID NO: 463917 - RNA, 19 nt, Artificial Sequence
  Description of Artificial Sequence: Synthetic oligonucleotide
gguuaaucuucagccgaaa

SEQ ID NO: 463918 - RNA, 19 nt, Artificial Sequence
  Description of Artificial Sequence: Synthetic oligonucleotide
gugggugucucacccuccu

SEQ ID NO: 463919 - RNA, 19 nt, Artificial Sequence
  Description of Artificial Sequence: Synthetic oligonucleotide
gaauucacuggagcccuuu

SEQ ID NO: 463920 - RNA, 19 nt, Artificial Sequence
  Description of Artificial Sequence: Synthetic oligonucleotide
ccgcacuccaugcaaguga

SEQ ID NO: 463921 - RNA, 19 nt, Artificial Sequence
  Description of Artificial Sequence: Synthetic oligonucleotide
gccuaccugcgaauggcug

SEQ ID NO: 463922 - RNA, 19 nt, Artificial Sequence
  Description of Artificial Sequence: Synthetic oligonucleotide
caguagccgcauggccugg

SEQ ID NO: 463923 - RNA, 19 nt, Artificial Sequence
  Description of Artificial Sequence: Synthetic oligonucleotide
acgcucuggggaggcguag

SEQ ID NO: 463924 - RNA, 19 nt, Artificial Sequence
  Description of Artificial Sequence: Synthetic oligonucleotide
gggccguggcuugagcgag

SEQ ID NO: 463925 - RNA, 19 nt, Artificial Sequence
  Description of Artificial Sequence: Synthetic oligonucleotide
ggcaacaagcgaccuggcu

SEQ ID NO: 463926 - RNA, 19 nt, Artificial Sequence
  Description of Artificial Sequence: Synthetic oligonucleotide
ccuuagacccuugcaccug

SEQ ID NO: 463927 - RNA, 19 nt, Artificial Sequence
  Description of Artificial Sequence: Synthetic oligonucleotide
ggauacgcugguguagugu

SEQ ID NO: 463928 - RNA, 19 nt, Artificial Sequence
  Description of Artificial Sequence: Synthetic oligonucleotide
ucucgcacucugggcacuu

SEQ ID NO: 463929 - RNA, 19 nt, Artificial Sequence
  Description of Artificial Sequence: Synthetic oligonucleotide
uuggggcgccccgcucccg

SEQ ID NO: 463930 - RNA, 19 nt, Artificial Sequence
  Description of Artificial Sequence: Synthetic oligonucleotide
gcggcagugguuggugagc

SEQ ID NO: 463931 - RNA, 19 nt, Artificial Sequence
  Description of Artificial Sequence: Synthetic oligonucleotide
cgguucucacccaggugcc

SEQ ID NO: 463932 - RNA, 19 nt, Artificial Sequence
  Description of Artificial Sequence: Synthetic oligonucleotide
uggagcccuuucgggugga

SEQ ID NO: 463933 - RNA, 19 nt, Artificial Sequence
  Description of Artificial Sequence: Synthetic oligonucleotide
ggggaggcguagccacugc

SEQ ID NO: 463934 - RNA, 19 nt, Artificial Sequence
  Description of Artificial Sequence: Synthetic oligonucleotide
cucgcacucugggcacuug

SEQ ID NO: 463935 - RNA, 19 nt, Artificial Sequence
  Description of Artificial Sequence: Synthetic oligonucleotide
ggccguucgcgcgagugca

SEQ ID NO: 463936 - RNA, 19 nt, Artificial Sequence
  Description of Artificial Sequence: Synthetic oligonucleotide
gggcgcaugcucacucgcc

SEQ ID NO: 463937 - RNA, 19 nt, Artificial Sequence
  Description of Artificial Sequence: Synthetic oligonucleotide
cgcgccuaccugcgaaugg

SEQ ID NO: 463938 - RNA, 19 nt, Artificial Sequence
  Description of Artificial Sequence: Synthetic oligonucleotide
gcgagugcacgcggcagug

SEQ ID NO: 463939 - RNA, 19 nt, Artificial Sequence
  Description of Artificial Sequence: Synthetic oligonucleotide
ccguucgcgcgagugcacg

SEQ ID NO: 463940 - RNA, 19 nt, Artificial Sequence
  Description of Artificial Sequence: Synthetic oligonucleotide
gcgaguguuugggaguaaa

SEQ ID NO: 463941 - RNA, 19 nt, Artificial Sequence
  Description of Artificial Sequence: Synthetic oligonucleotide
gugcgugcaaggguagggu

SEQ ID NO: 463942 - RNA, 19 nt, Artificial Sequence
  Description of Artificial Sequence: Synthetic oligonucleotide
gucccacgguucucaccca

SEQ ID NO: 463943 - RNA, 19 nt, Artificial Sequence
  Description of Artificial Sequence: Synthetic oligonucleotide
gcagauggugcuugcggau

SEQ ID NO: 463944 - RNA, 19 nt, Artificial Sequence
  Description of Artificial Sequence: Synthetic oligonucleotide
gccguggcuugagcgagug

SEQ ID NO: 463945 - RNA, 19 nt, Artificial Sequence
  Description of Artificial Sequence: Synthetic oligonucleotide
cgcggcagugguuggugag

SEQ ID NO: 463946 - RNA, 19 nt, Artificial Sequence
  Description of Artificial Sequence: Synthetic oligonucleotide
guagugugaguugcugcuu

SEQ ID NO: 463947 - RNA, 19 nt, Artificial Sequence
  Description of Artificial Sequence: Synthetic oligonucleotide
cccgugggaaugcccauga

SEQ ID NO: 463948 - RNA, 19 nt, Artificial Sequence
  Description of Artificial Sequence: Synthetic oligonucleotide
gccaagcgagugaucucug

SEQ ID NO: 463949 - RNA, 19 nt, Artificial Sequence
  Description of Artificial Sequence: Synthetic oligonucleotide
agcgaguguuugggaguaa

SEQ ID NO: 463950 - RNA, 19 nt, Artificial Sequence
  Description of Artificial Sequence: Synthetic oligonucleotide
gcggccguucgcgcgagug

SEQ ID NO: 463951 - RNA, 19 nt, Artificial Sequence
  Description of Artificial Sequence: Synthetic oligonucleotide
gcggggcgcaugcucacuc

SEQ ID NO: 463952 - RNA, 19 nt, Artificial Sequence
  Description of Artificial Sequence: Synthetic oligonucleotide
cucgcccucaggggacauc

SEQ ID NO: 463953 - RNA, 19 nt, Artificial Sequence
  Description of Artificial Sequence: Synthetic oligonucleotide
cguucgcgcgagugcacgc

SEQ ID NO: 463954 - RNA, 19 nt, Artificial Sequence
  Description of Artificial Sequence: Synthetic oligonucleotide
gacgggcggcugaagcucu

SEQ ID NO: 463955 - RNA, 19 nt, Artificial Sequence
  Description of Artificial Sequence: Synthetic oligonucleotide
augcggccguucgcgcgag

SEQ ID NO: 463956 - RNA, 19 nt, Artificial Sequence
  Description of Artificial Sequence: Synthetic oligonucleotide
cgugccaugcccgugggaa

SEQ ID NO: 463957 - RNA, 19 nt, Artificial Sequence
  Description of Artificial Sequence: Synthetic oligonucleotide
cuagcagguucuccauguu

SEQ ID NO: 463958 - RNA, 19 nt, Artificial Sequence
  Description of Artificial Sequence: Synthetic oligonucleotide
gcgcacccgguggauacgc

SEQ ID NO: 463959 - RNA, 19 nt, Artificial Sequence
  Description of Artificial Sequence: Synthetic oligonucleotide
gcguagccacugcgcaccc

SEQ ID NO: 463960 - RNA, 19 nt, Artificial Sequence
  Description of Artificial Sequence: Synthetic oligonucleotide
gcgcgagugcacgcggcag

SEQ ID NO: 463961 - RNA, 19 nt, Artificial Sequence
  Description of Artificial Sequence: Synthetic oligonucleotide
cggggcgcaugcucacucg

SEQ ID NO: 463962 - RNA, 19 nt, Artificial Sequence
  Description of Artificial Sequence: Synthetic oligonucleotide
ccgaaagcucuugccgcac

SEQ ID NO: 463963 - RNA, 19 nt, Artificial Sequence
  Description of Artificial Sequence: Synthetic oligonucleotide
ugcggccguucgcgcgagu

SEQ ID NO: 463964 - RNA, 19 nt, Artificial Sequence
  Description of Artificial Sequence: Synthetic oligonucleotide
ccgcucgccacgccgguuc

SEQ ID NO: 463965 - RNA, 19 nt, Artificial Sequence
  Description of Artificial Sequence: Synthetic oligonucleotide
gcgacgggcggcugaagcu

SEQ ID NO: 463966 - RNA, 19 nt, Artificial Sequence
  Description of Artificial Sequence: Synthetic oligonucleotide
cauguacacgcugguggau

SEQ ID NO: 463967 - RNA, 19 nt, Artificial Sequence
  Description of Artificial Sequence: Synthetic oligonucleotide
guagggcuuggggccgcca

SEQ ID NO: 463968 - RNA, 19 nt, Artificial Sequence
  Description of Artificial Sequence: Synthetic oligonucleotide
guggcuugagcgaguguuu

SEQ ID NO: 463969 - RNA, 19 nt, Artificial Sequence
  Description of Artificial Sequence: Synthetic oligonucleotide
cucacucgcccgugugggu

SEQ ID NO: 463970 - RNA, 19 nt, Artificial Sequence
  Description of Artificial Sequence: Synthetic oligonucleotide
gcucaccaugcccgugcca

SEQ ID NO: 463971 - RNA, 19 nt, Artificial Sequence
  Description of Artificial Sequence: Synthetic oligonucleotide
gugcgacgggcggcugaag

SEQ ID NO: 463972 - RNA, 19 nt, Artificial Sequence
  Description of Artificial Sequence: Synthetic oligonucleotide
gcgcagugcgugcaagggu

SEQ ID NO: 463973 - RNA, 19 nt, Artificial Sequence
  Description of Artificial Sequence: Synthetic oligonucleotide
gaccucgcacucggcacau

SEQ ID NO: 463974 - RNA, 19 nt, Artificial Sequence
  Description of Artificial Sequence: Synthetic oligonucleotide
gggcggggcgcaugcucac

SEQ ID NO: 463975 - RNA, 19 nt, Artificial Sequence
  Description of Artificial Sequence: Synthetic oligonucleotide
cggaagcugaccucgcacu

SEQ ID NO: 463976 - RNA, 19 nt, Artificial Sequence
  Description of Artificial Sequence: Synthetic oligonucleotide
cgacgggcggcugaagcuc

SEQ ID NO: 463977 - RNA, 19 nt, Artificial Sequence
  Description of Artificial Sequence: Synthetic oligonucleotide
gcaucgcgccuaccugcga

SEQ ID NO: 463978 - RNA, 19 nt, Artificial Sequence
  Description of Artificial Sequence: Synthetic oligonucleotide
caggugcgacgggcggcug

SEQ ID NO: 463979 - RNA, 19 nt, Artificial Sequence
  Description of Artificial Sequence: Synthetic oligonucleotide
gguggauaaccaggcugau

SEQ ID NO: 463980 - RNA, 19 nt, Artificial Sequence
  Description of Artificial Sequence: Synthetic oligonucleotide
ggagcccuuucggguggac

SEQ ID NO: 463981 - RNA, 19 nt, Artificial Sequence
  Description of Artificial Sequence: Synthetic oligonucleotide
cgccacgccgguuccucug

SEQ ID NO: 463982 - RNA, 19 nt, Artificial Sequence
  Description of Artificial Sequence: Synthetic oligonucleotide
gccgcucaccaugcccgug

SEQ ID NO: 463983 - RNA, 19 nt, Artificial Sequence
  Description of Artificial Sequence: Synthetic oligonucleotide
ccacugcgcacccggugga

SEQ ID NO: 463984 - RNA, 19 nt, Artificial Sequence
  Description of Artificial Sequence: Synthetic oligonucleotide
gcaggugcgacgggcggcu

SEQ ID NO: 463985 - RNA, 19 nt, Artificial Sequence
  Description of Artificial Sequence: Synthetic oligonucleotide
ccacagccguucucucaca

SEQ ID NO: 463986 - RNA, 19 nt, Artificial Sequence
  Description of Artificial Sequence: Synthetic oligonucleotide
gccguucgcgcgagugcac

SEQ ID NO: 463987 - RNA, 19 nt, Artificial Sequence
  Description of Artificial Sequence: Synthetic oligonucleotide
cgcucgccacgccgguucc

SEQ ID NO: 463988 - RNA, 19 nt, Artificial Sequence
  Description of Artificial Sequence: Synthetic oligonucleotide
ggcagccgaggcacccguc

SEQ ID NO: 463989 - RNA, 19 nt, Artificial Sequence
  Description of Artificial Sequence: Synthetic oligonucleotide
accucgcacucggcacauu

SEQ ID NO: 463990 - RNA, 19 nt, Artificial Sequence
  Description of Artificial Sequence: Synthetic oligonucleotide
ccucagucuuuaucacgau

SEQ ID NO: 463991 - RNA, 19 nt, Artificial Sequence
  Description of Artificial Sequence: Synthetic oligonucleotide
cgcacucggcacauucaua

SEQ ID NO: 463992 - RNA, 19 nt, Artificial Sequence
  Description of Artificial Sequence: Synthetic oligonucleotide
ggcagugguuggugagcuu

SEQ ID NO: 463993 - RNA, 19 nt, Artificial Sequence
  Description of Artificial Sequence: Synthetic oligonucleotide
cgcgcgagugcacgcggca

SEQ ID NO: 463994 - RNA, 19 nt, Artificial Sequence
  Description of Artificial Sequence: Synthetic oligonucleotide
ccgugggaaugcccaugaa

SEQ ID NO: 463995 - RNA, 19 nt, Artificial Sequence
  Description of Artificial Sequence: Synthetic oligonucleotide
cacugcgcacccgguggau

SEQ ID NO: 463996 - RNA, 19 nt, Artificial Sequence
  Description of Artificial Sequence: Synthetic oligonucleotide
ccacgcucuggggaggcgu

SEQ ID NO: 463997 - RNA, 19 nt, Artificial Sequence
  Description of Artificial Sequence: Synthetic oligonucleotide
cgcaugcucacucgcccgu

SEQ ID NO: 463998 - RNA, 19 nt, Artificial Sequence
  Description of Artificial Sequence: Synthetic oligonucleotide
gcacgcggcagugguuggu

SEQ ID NO: 463999 - RNA, 19 nt, Artificial Sequence
  Description of Artificial Sequence: Synthetic oligonucleotide
cgccuaccugcgaauggcu

SEQ ID NO: 464000 - RNA, 19 nt, Artificial Sequence
  Description of Artificial Sequence: Synthetic oligonucleotide
cgcgagugcacgcggcagu

SEQ ID NO: 464001 - RNA, 19 nt, Artificial Sequence
  Description of Artificial Sequence: Synthetic oligonucleotide
cggguggaccuccucuagu

SEQ ID NO: 464002 - RNA, 19 nt, Artificial Sequence
  Description of Artificial Sequence: Synthetic oligonucleotide
ggcggggcgcaugcucacu

SEQ ID NO: 464003 - RNA, 19 nt, Artificial Sequence
  Description of Artificial Sequence: Synthetic oligonucleotide
cgucgguguuccagcagau

SEQ ID NO: 464004 - RNA, 19 nt, Artificial Sequence
  Description of Artificial Sequence: Synthetic oligonucleotide
cugccugagcugggugauu

SEQ ID NO: 464005 - RNA, 19 nt, Artificial Sequence
  Description of Artificial Sequence: Synthetic oligonucleotide
ccgucccaggggccuuaga

SEQ ID NO: 464006 - RNA, 19 nt, Artificial Sequence
  Description of Artificial Sequence: Synthetic oligonucleotide
cccuugcaccuggcugcuc

SEQ ID NO: 464007 - RNA, 19 nt, Artificial Sequence
  Description of Artificial Sequence: Synthetic oligonucleotide
ggccguggcuugagcgagu

SEQ ID NO: 464008 - RNA, 19 nt, Artificial Sequence
  Description of Artificial Sequence: Synthetic oligonucleotide
caggggcggggcgcaugcu

SEQ ID NO: 464009 - RNA, 19 nt, Artificial Sequence
  Description of Artificial Sequence: Synthetic oligonucleotide
gcucgccacgccgguuccu

SEQ ID NO: 464010 - RNA, 19 nt, Artificial Sequence
  Description of Artificial Sequence: Synthetic oligonucleotide
ccguggcuugagcgagugu

SEQ ID NO: 464011 - RNA, 19 nt, Artificial Sequence
  Description of Artificial Sequence: Synthetic oligonucleotide
gcgcagugauagggccgcu

SEQ ID NO: 464012 - RNA, 19 nt, Artificial Sequence
  Description of Artificial Sequence: Synthetic oligonucleotide
gccgcucgccacgccgguu

SEQ ID NO: 464013 - RNA, 19 nt, Artificial Sequence
  Description of Artificial Sequence: Synthetic oligonucleotide
aauuuauagauucagaggc

SEQ ID NO: 464014 - RNA, 19 nt, Artificial Sequence
  Description of Artificial Sequence: Synthetic oligonucleotide
uguaucacaaauuuuacag

SEQ ID NO: 464015 - RNA, 19 nt, Artificial Sequence
  Description of Artificial Sequence: Synthetic oligonucleotide
aacuuaguaguacacagcg

SEQ ID NO: 464016 - RNA, 19 nt, Artificial Sequence
  Description of Artificial Sequence: Synthetic oligonucleotide
aaaacuuaguaguacacag

SEQ ID NO: 464017 - RNA, 19 nt, Artificial Sequence
  Description of Artificial Sequence: Synthetic oligonucleotide
aauguaacaacucugugca

SEQ ID NO: 464018 - RNA, 19 nt, Artificial Sequence
  Description of Artificial Sequence: Synthetic oligonucleotide
aaauguguaagcuaggcca

SEQ ID NO: 464019 - RNA, 19 nt, Artificial Sequence
  Description of Artificial Sequence: Synthetic oligonucleotide
uauaauacucagcagagug

SEQ ID NO: 464020 - RNA, 19 nt, Artificial Sequence
  Description of Artificial Sequence: Synthetic oligonucleotide
ugguguauuaucuaaacag

SEQ ID NO: 464021 - RNA, 19 nt, Artificial Sequence
  Description of Artificial Sequence: Synthetic oligonucleotide
caaauuugcguucaaaugg

SEQ ID NO: 464022 - RNA, 19 nt, Artificial Sequence
  Description of Artificial Sequence: Synthetic oligonucleotide
uuuaacggaaaucaguaug

SEQ ID NO: 464023 - RNA, 19 nt, Artificial Sequence
  Description of Artificial Sequence: Synthetic oligonucleotide
agaacaaaagaccaucacg

SEQ ID NO: 464024 - RNA, 19 nt, Artificial Sequence
  Description of Artificial Sequence: Synthetic oligonucleotide
aauacuaauaauugcagua

SEQ ID NO: 464025 - RNA, 19 nt, Artificial Sequence
  Description of Artificial Sequence: Synthetic oligonucleotide
aaaagugguaugcacgcac

SEQ ID NO: 464026 - RNA, 19 nt, Artificial Sequence
  Description of Artificial Sequence: Synthetic oligonucleotide
ugauacaguaucuagauau

SEQ ID NO: 464027 - RNA, 19 nt, Artificial Sequence
  Description of Artificial Sequence: Synthetic oligonucleotide
aacaaaagaccaucacgcc

SEQ ID NO: 464028 - RNA, 19 nt, Artificial Sequence
  Description of Artificial Sequence: Synthetic oligonucleotide
acaaaagugguaugcacgc

SEQ ID NO: 464029 - RNA, 19 nt, Artificial Sequence
  Description of Artificial Sequence: Synthetic oligonucleotide
guacauuucuguuaaaucc

SEQ ID NO: 464030 - RNA, 19 nt, Artificial Sequence
  Description of Artificial Sequence: Synthetic oligonucleotide
aaaguauuuuaagucacac

SEQ ID NO: 464031 - RNA, 19 nt, Artificial Sequence
  Description of Artificial Sequence: Synthetic oligonucleotide
uaucuaaacagaaaucgug

SEQ ID NO: 464032 - RNA, 19 nt, Artificial Sequence
  Description of Artificial Sequence: Synthetic oligonucleotide
uauacuaacaccaguuucu

SEQ ID NO: 464033 - RNA, 19 nt, Artificial Sequence
  Description of Artificial Sequence: Synthetic oligonucleotide
ucuagauaugcacaaaacu

SEQ ID NO: 464034 - RNA, 19 nt, Artificial Sequence
  Description of Artificial Sequence: Synthetic oligonucleotide
acaguaucuagauaugcac

SEQ ID NO: 464035 - RNA, 19 nt, Artificial Sequence
  Description of Artificial Sequence: Synthetic oligonucleotide
cuagauaugcacaaaacuc

SEQ ID NO: 464036 - RNA, 19 nt, Artificial Sequence
  Description of Artificial Sequence: Synthetic oligonucleotide
gaacaaaagaccaucacgc

SEQ ID NO: 464037 - RNA, 19 nt, Artificial Sequence
  Description of Artificial Sequence: Synthetic oligonucleotide
aagauuaugguugaacuug

SEQ ID NO: 464038 - RNA, 19 nt, Artificial Sequence
  Description of Artificial Sequence: Synthetic oligonucleotide
uuaugguugaacuugggac

SEQ ID NO: 464039 - RNA, 19 nt, Artificial Sequence
  Description of Artificial Sequence: Synthetic oligonucleotide
uguuaaauaugccucgggc

SEQ ID NO: 464040 - RNA, 19 nt, Artificial Sequence
  Description of Artificial Sequence: Synthetic oligonucleotide
uuugcguucaaauggucgg

SEQ ID NO: 464041 - RNA, 19 nt, Artificial Sequence
  Description of Artificial Sequence: Synthetic oligonucleotide
ucuagucaaugcuagacag

SEQ ID NO: 464042 - RNA, 19 nt, Artificial Sequence
  Description of Artificial Sequence: Synthetic oligonucleotide
ugaugugccauaauaaacu

SEQ ID NO: 464043 - RNA, 19 nt, Artificial Sequence
  Description of Artificial Sequence: Synthetic oligonucleotide
uacacuuuagggcacagca

SEQ ID NO: 464044 - RNA, 19 nt, Artificial Sequence
  Description of Artificial Sequence: Synthetic oligonucleotide
uucucuuuaucuaaaggug

SEQ ID NO: 464045 - RNA, 19 nt, Artificial Sequence
  Description of Artificial Sequence: Synthetic oligonucleotide
uguacaugcguccugaaaa

SEQ ID NO: 464046 - RNA, 19 nt, Artificial Sequence
  Description of Artificial Sequence: Synthetic oligonucleotide
ugauauuuaggcuuaucug

SEQ ID NO: 464047 - RNA, 19 nt, Artificial Sequence
  Description of Artificial Sequence: Synthetic oligonucleotide
gguuauauauuccaggugc

SEQ ID NO: 464048 - RNA, 19 nt, Artificial Sequence
  Description of Artificial Sequence: Synthetic oligonucleotide
ugugccauaauaaacuguc

SEQ ID NO: 464049 - RNA, 19 nt, Artificial Sequence
  Description of Artificial Sequence: Synthetic oligonucleotide
uuguauagggcuuuggugu

SEQ ID NO: 464050 - RNA, 19 nt, Artificial Sequence
  Description of Artificial Sequence: Synthetic oligonucleotide
aaacuagaguaacuguauc

SEQ ID NO: 464051 - RNA, 19 nt, Artificial Sequence
  Description of Artificial Sequence: Synthetic oligonucleotide
ugugggauaauuauacuaa

SEQ ID NO: 464052 - RNA, 19 nt, Artificial Sequence
  Description of Artificial Sequence: Synthetic oligonucleotide
caaagguagccuuagaaac

SEQ ID NO: 464053 - RNA, 19 nt, Artificial Sequence
  Description of Artificial Sequence: Synthetic oligonucleotide
aacuagaguaacuguaucu

SEQ ID NO: 464054 - RNA, 19 nt, Artificial Sequence
  Description of Artificial Sequence: Synthetic oligonucleotide
uuaacggaaaucaguaugu

SEQ ID NO: 464055 - RNA, 19 nt, Artificial Sequence
  Description of Artificial Sequence: Synthetic oligonucleotide
cucaaugacauguagcuug

SEQ ID NO: 464056 - RNA, 19 nt, Artificial Sequence
  Description of Artificial Sequence: Synthetic oligonucleotide
uucuguuaaauccacuaca

SEQ ID NO: 464057 - RNA, 19 nt, Artificial Sequence
  Description of Artificial Sequence: Synthetic oligonucleotide
agugguguauuaucuaaac

SEQ ID NO: 464058 - RNA, 19 nt, Artificial Sequence
  Description of Artificial Sequence: Synthetic oligonucleotide
aucuaaacagaaaucgugc

SEQ ID NO: 464059 - RNA, 19 nt, Artificial Sequence
  Description of Artificial Sequence: Synthetic oligonucleotide
guuaaauccacuacacugg

SEQ ID NO: 464060 - RNA, 19 nt, Artificial Sequence
  Description of Artificial Sequence: Synthetic oligonucleotide
agccuaaagaacaaaagac

SEQ ID NO: 464061 - RNA, 19 nt, Artificial Sequence
  Description of Artificial Sequence: Synthetic oligonucleotide
uuaagcagugaccauaaaa

SEQ ID NO: 464062 - RNA, 19 nt, Artificial Sequence
  Description of Artificial Sequence: Synthetic oligonucleotide
uuacuguuaaauaugccuc

SEQ ID NO: 464063 - RNA, 19 nt, Artificial Sequence
  Description of Artificial Sequence: Synthetic oligonucleotide
agaaaauauaauacucagc

SEQ ID NO: 464064 - RNA, 19 nt, Artificial Sequence
  Description of Artificial Sequence: Synthetic oligonucleotide
ucuguuaaauccacuacac

SEQ ID NO: 464065 - RNA, 19 nt, Artificial Sequence
  Description of Artificial Sequence: Synthetic oligonucleotide
gauuauuaacagaauguag

SEQ ID NO: 464066 - RNA, 19 nt, Artificial Sequence
  Description of Artificial Sequence: Synthetic oligonucleotide
auaugcacaaaacucauaa

SEQ ID NO: 464067 - RNA, 19 nt, Artificial Sequence
  Description of Artificial Sequence: Synthetic oligonucleotide
aaacuuaguaguacacagc

SEQ ID NO: 464068 - RNA, 19 nt, Artificial Sequence
  Description of Artificial Sequence: Synthetic oligonucleotide
aaugcuagacaguucuuca

SEQ ID NO: 464069 - RNA, 19 nt, Artificial Sequence
  Description of Artificial Sequence: Synthetic oligonucleotide
uggaacucaacacaccacc

SEQ ID NO: 464070 - RNA, 19 nt, Artificial Sequence
  Description of Artificial Sequence: Synthetic oligonucleotide
agcgaaaugaucuaagaau

SEQ ID NO: 464071 - RNA, 19 nt, Artificial Sequence
  Description of Artificial Sequence: Synthetic oligonucleotide
uacuguuaaauaugccucg

SEQ ID NO: 464072 - RNA, 19 nt, Artificial Sequence
  Description of Artificial Sequence: Synthetic oligonucleotide
gguaauuuggaucuccagg

SEQ ID NO: 464073 - RNA, 19 nt, Artificial Sequence
  Description of Artificial Sequence: Synthetic oligonucleotide
caggugauuacacauuucg

SEQ ID NO: 464074 - RNA, 19 nt, Artificial Sequence
  Description of Artificial Sequence: Synthetic oligonucleotide
ucauaagagucuuuggaga

SEQ ID NO: 464075 - RNA, 19 nt, Artificial Sequence
  Description of Artificial Sequence: Synthetic oligonucleotide
uuauacuaacaccaguuuc

SEQ ID NO: 464076 - RNA, 19 nt, Artificial Sequence
  Description of Artificial Sequence: Synthetic oligonucleotide
ugcucacuaaucuucauca

SEQ ID NO: 464077 - RNA, 19 nt, Artificial Sequence
  Description of Artificial Sequence: Synthetic oligonucleotide
ucaaacuagaguaacugua

SEQ ID NO: 464078 - RNA, 19 nt, Artificial Sequence
  Description of Artificial Sequence: Synthetic oligonucleotide
ucugcagacuuugaaauag

SEQ ID NO: 464079 - RNA, 19 nt, Artificial Sequence
  Description of Artificial Sequence: Synthetic oligonucleotide
aauuauacuaacaccaguu

SEQ ID NO: 464080 - RNA, 19 nt, Artificial Sequence
  Description of Artificial Sequence: Synthetic oligonucleotide
uguagcauguuuucugacc

SEQ ID NO: 464081 - RNA, 19 nt, Artificial Sequence
  Description of Artificial Sequence: Synthetic oligonucleotide
aauaaaguuugaguguacu

SEQ ID NO: 464082 - RNA, 19 nt, Artificial Sequence
  Description of Artificial Sequence: Synthetic oligonucleotide
ugaacuaugggcuuucaua

SEQ ID NO: 464083 - RNA, 19 nt, Artificial Sequence
  Description of Artificial Sequence: Synthetic oligonucleotide
uaauuauacuaacaccagu

SEQ ID NO: 464084 - RNA, 19 nt, Artificial Sequence
  Description of Artificial Sequence: Synthetic oligonucleotide
uaugcacgcacuauguaca

SEQ ID NO: 464085 - RNA, 19 nt, Artificial Sequence
  Description of Artificial Sequence: Synthetic oligonucleotide
gugauauguuaauuuauag

SEQ ID NO: 464086 - RNA, 19 nt, Artificial Sequence
  Description of Artificial Sequence: Synthetic oligonucleotide
aaagauuaugguugaacuu

SEQ ID NO: 464087 - RNA, 19 nt, Artificial Sequence
  Description of Artificial Sequence: Synthetic oligonucleotide
uauagauucagaggccacg

SEQ ID NO: 464088 - RNA, 19 nt, Artificial Sequence
  Description of Artificial Sequence: Synthetic oligonucleotide
uuaucuaaaggugggagga

SEQ ID NO: 464089 - RNA, 19 nt, Artificial Sequence
  Description of Artificial Sequence: Synthetic oligonucleotide
guaauucagguuuauguac

SEQ ID NO: 464090 - RNA, 19 nt, Artificial Sequence
  Description of Artificial Sequence: Synthetic oligonucleotide
guaauuuggaucuccagga

SEQ ID NO: 464091 - RNA, 19 nt, Artificial Sequence
  Description of Artificial Sequence: Synthetic oligonucleotide
uuuauagauucagaggcca

SEQ ID NO: 464092 - RNA, 19 nt, Artificial Sequence
  Description of Artificial Sequence: Synthetic oligonucleotide
cauuguaucacaaauuuua

SEQ ID NO: 464093 - RNA, 19 nt, Artificial Sequence
  Description of Artificial Sequence: Synthetic oligonucleotide
uaagcgaagcuccacgggc

SEQ ID NO: 464094 - RNA, 19 nt, Artificial Sequence
  Description of Artificial Sequence: Synthetic oligonucleotide
uuaggcacggugcugauau

SEQ ID NO: 464095 - RNA, 19 nt, Artificial Sequence
  Description of Artificial Sequence: Synthetic oligonucleotide
accuaaugauuauuaacag

SEQ ID NO: 464096 - RNA, 19 nt, Artificial Sequence
  Description of Artificial Sequence: Synthetic oligonucleotide
cuuguauguguagaaaugc

SEQ ID NO: 464097 - RNA, 19 nt, Artificial Sequence
  Description of Artificial Sequence: Synthetic oligonucleotide
ggagagaauacaaagguag

SEQ ID NO: 464098 - RNA, 19 nt, Artificial Sequence
  Description of Artificial Sequence: Synthetic oligonucleotide
aagucacaccaucauuuuc

SEQ ID NO: 464099 - RNA, 19 nt, Artificial Sequence
  Description of Artificial Sequence: Synthetic oligonucleotide
cuuguauagggcuuuggug

SEQ ID NO: 464100 - RNA, 19 nt, Artificial Sequence
  Description of Artificial Sequence: Synthetic oligonucleotide
ucuaaacagaaaucgugcu

SEQ ID NO: 464101 - RNA, 19 nt, Artificial Sequence
  Description of Artificial Sequence: Synthetic oligonucleotide
agaaacuugguucuguuua

SEQ ID NO: 464102 - RNA, 19 nt, Artificial Sequence
  Description of Artificial Sequence: Synthetic oligonucleotide
aaugaccuuguauguguag

SEQ ID NO: 464103 - RNA, 19 nt, Artificial Sequence
  Description of Artificial Sequence: Synthetic oligonucleotide
agggcuuuggugugaaucg

SEQ ID NO: 464104 - RNA, 19 nt, Artificial Sequence
  Description of Artificial Sequence: Synthetic oligonucleotide
gggauaauuauacuaacac

SEQ ID NO: 464105 - RNA, 19 nt, Artificial Sequence
  Description of Artificial Sequence: Synthetic oligonucleotide
agauuucuugcucgauucc

SEQ ID NO: 464106 - RNA, 19 nt, Artificial Sequence
  Description of Artificial Sequence: Synthetic oligonucleotide
ggauaauuauacuaacacc

SEQ ID NO: 464107 - RNA, 19 nt, Artificial Sequence
  Description of Artificial Sequence: Synthetic oligonucleotide
auauuuaggcuuaucugcg

SEQ ID NO: 464108 - RNA, 19 nt, Artificial Sequence
  Description of Artificial Sequence: Synthetic oligonucleotide
auuaugguugaacuuggga

SEQ ID NO: 464109 - RNA, 19 nt, Artificial Sequence
  Description of Artificial Sequence: Synthetic oligonucleotide
uuguaucacaaauuuuaca

SEQ ID NO: 464110 - RNA, 19 nt, Artificial Sequence
  Description of Artificial Sequence: Synthetic oligonucleotide
auaucuuugaaacucucua

SEQ ID NO: 464111 - RNA, 19 nt, Artificial Sequence
  Description of Artificial Sequence: Synthetic oligonucleotide
aucuuugaaacucucuagu

SEQ ID NO: 464112 - RNA, 19 nt, Artificial Sequence
  Description of Artificial Sequence: Synthetic oligonucleotide
uguggugauauguuaauuu

SEQ ID NO: 464113 - RNA, 19 nt, Artificial Sequence
  Description of Artificial Sequence: Synthetic oligonucleotide
uuaaauccacuacacuggu

SEQ ID NO: 464114 - RNA, 19 nt, Artificial Sequence
  Description of Artificial Sequence: Synthetic oligonucleotide
gaacuaugggcuuucauaa

SEQ ID NO: 464115 - RNA, 19 nt, Artificial Sequence
  Description of Artificial Sequence: Synthetic oligonucleotide
cugaugugccauaauaaac

SEQ ID NO: 464116 - RNA, 19 nt, Artificial Sequence
  Description of Artificial Sequence: Synthetic oligonucleotide
auacucagcagagugguuc

SEQ ID NO: 464117 - RNA, 19 nt, Artificial Sequence
  Description of Artificial Sequence: Synthetic oligonucleotide
cuuuaucuaaaggugggag

SEQ ID NO: 464118 - RNA, 19 nt, Artificial Sequence
  Description of Artificial Sequence: Synthetic oligonucleotide
cuucauuugacccucccuc

SEQ ID NO: 464119 - RNA, 19 nt, Artificial Sequence
  Description of Artificial Sequence: Synthetic oligonucleotide
cuuaguaguacacagcgaa

SEQ ID NO: 464120 - RNA, 19 nt, Artificial Sequence
  Description of Artificial Sequence: Synthetic oligonucleotide
cugaccgugguucaggggc

SEQ ID NO: 464121 - RNA, 19 nt, Artificial Sequence
  Description of Artificial Sequence: Synthetic oligonucleotide
cagauuuagaaauuugaga

SEQ ID NO: 464122 - RNA, 19 nt, Artificial Sequence
  Description of Artificial Sequence: Synthetic oligonucleotide
cuugggacugucaaauuug

SEQ ID NO: 464123 - RNA, 19 nt, Artificial Sequence
  Description of Artificial Sequence: Synthetic oligonucleotide
agugugguaagcgaagcuc

SEQ ID NO: 464124 - RNA, 19 nt, Artificial Sequence
  Description of Artificial Sequence: Synthetic oligonucleotide
cuaaacagaaaucgugcug

SEQ ID NO: 464125 - RNA, 19 nt, Artificial Sequence
  Description of Artificial Sequence: Synthetic oligonucleotide
auaauuauacuaacaccag

SEQ ID NO: 464126 - RNA, 19 nt, Artificial Sequence
  Description of Artificial Sequence: Synthetic oligonucleotide
uugugggauaauuauacua

SEQ ID NO: 464127 - RNA, 19 nt, Artificial Sequence
  Description of Artificial Sequence: Synthetic oligonucleotide
acauauaggaguucugaaa

SEQ ID NO: 464128 - RNA, 19 nt, Artificial Sequence
  Description of Artificial Sequence: Synthetic oligonucleotide
aaauuugcguucaaauggu

SEQ ID NO: 464129 - RNA, 19 nt, Artificial Sequence
  Description of Artificial Sequence: Synthetic oligonucleotide
gugugaaucgguuguaggc

SEQ ID NO: 464130 - RNA, 19 nt, Artificial Sequence
  Description of Artificial Sequence: Synthetic oligonucleotide
auuugcguucaaauggucg

SEQ ID NO: 464131 - RNA, 19 nt, Artificial Sequence
  Description of Artificial Sequence: Synthetic oligonucleotide
uguaagcuaggccaagguc

SEQ ID NO: 464132 - RNA, 19 nt, Artificial Sequence
  Description of Artificial Sequence: Synthetic oligonucleotide
aucuagauaugcacaaaac

SEQ ID NO: 464133 - RNA, 19 nt, Artificial Sequence
  Description of Artificial Sequence: Synthetic oligonucleotide
aaauuuuacagaagggaua

SEQ ID NO: 464134 - RNA, 19 nt, Artificial Sequence
  Description of Artificial Sequence: Synthetic oligonucleotide
uucauuugacccucccucc

SEQ ID NO: 464135 - RNA, 19 nt, Artificial Sequence
  Description of Artificial Sequence: Synthetic oligonucleotide
uaauugcaguauaaauucu

SEQ ID NO: 464136 - RNA, 19 nt, Artificial Sequence
  Description of Artificial Sequence: Synthetic oligonucleotide
guaugcacgcacuauguac

SEQ ID NO: 464137 - RNA, 19 nt, Artificial Sequence
  Description of Artificial Sequence: Synthetic oligonucleotide
ugaaucgguuguaggcugg

SEQ ID NO: 464138 - RNA, 19 nt, Artificial Sequence
  Description of Artificial Sequence: Synthetic oligonucleotide
aaaucaguaugugaaguua

SEQ ID NO: 464139 - RNA, 19 nt, Artificial Sequence
  Description of Artificial Sequence: Synthetic oligonucleotide
ucucuagucaaugcuagac

SEQ ID NO: 464140 - RNA, 19 nt, Artificial Sequence
  Description of Artificial Sequence: Synthetic oligonucleotide
ugcugauauuauuuauuug

SEQ ID NO: 464141 - RNA, 19 nt, Artificial Sequence
  Description of Artificial Sequence: Synthetic oligonucleotide
gguuccuaaaaguagguca

SEQ ID NO: 464142 - RNA, 19 nt, Artificial Sequence
  Description of Artificial Sequence: Synthetic oligonucleotide
acacauuucggaaaccauc

SEQ ID NO: 464143 - RNA, 19 nt, Artificial Sequence
  Description of Artificial Sequence: Synthetic oligonucleotide
gaaaucgugcugaugugcc

SEQ ID NO: 464144 - RNA, 19 nt, Artificial Sequence
  Description of Artificial Sequence: Synthetic oligonucleotide
gaagggauacuuugcaaga

SEQ ID NO: 464145 - RNA, 19 nt, Artificial Sequence
  Description of Artificial Sequence: Synthetic oligonucleotide
aaaauccagugauacugaa

SEQ ID NO: 464146 - RNA, 19 nt, Artificial Sequence
  Description of Artificial Sequence: Synthetic oligonucleotide
auuauacuaacaccaguuu

SEQ ID NO: 464147 - RNA, 19 nt, Artificial Sequence
  Description of Artificial Sequence: Synthetic oligonucleotide
acaaaugcuuaauacuaau

SEQ ID NO: 464148 - RNA, 19 nt, Artificial Sequence
  Description of Artificial Sequence: Synthetic oligonucleotide
aaggacucacgggaacugc

SEQ ID NO: 464149 - RNA, 19 nt, Artificial Sequence
  Description of Artificial Sequence: Synthetic oligonucleotide
aauaaccacaaaaggaauu

SEQ ID NO: 464150 - RNA, 19 nt, Artificial Sequence
  Description of Artificial Sequence: Synthetic oligonucleotide
ggugauuacacauuucgga

SEQ ID NO: 464151 - RNA, 19 nt, Artificial Sequence
  Description of Artificial Sequence: Synthetic oligonucleotide
uacuaauaauugcaguaua

SEQ ID NO: 464152 - RNA, 19 nt, Artificial Sequence
  Description of Artificial Sequence: Synthetic oligonucleotide
uggugauauguuaauuuau

SEQ ID NO: 464153 - RNA, 19 nt, Artificial Sequence
  Description of Artificial Sequence: Synthetic oligonucleotide
aaauggucgggcgagcacu

SEQ ID NO: 464154 - RNA, 19 nt, Artificial Sequence
  Description of Artificial Sequence: Synthetic oligonucleotide
accaccauuacuguuaaau

SEQ ID NO: 464155 - RNA, 19 nt, Artificial Sequence
  Description of Artificial Sequence: Synthetic oligonucleotide
ucaacacaccaccauuacu

SEQ ID NO: 464156 - RNA, 19 nt, Artificial Sequence
  Description of Artificial Sequence: Synthetic oligonucleotide
uuauagauucagaggccac

SEQ ID NO: 464157 - RNA, 19 nt, Artificial Sequence
  Description of Artificial Sequence: Synthetic oligonucleotide
ucauuugacccucccuccc

SEQ ID NO: 464158 - RNA, 19 nt, Artificial Sequence
  Description of Artificial Sequence: Synthetic oligonucleotide
auuucggaaaccaucacau

SEQ ID NO: 464159 - RNA, 19 nt, Artificial Sequence
  Description of Artificial Sequence: Synthetic oligonucleotide
acaccaguuucuauggaac

SEQ ID NO: 464160 - RNA, 19 nt, Artificial Sequence
  Description of Artificial Sequence: Synthetic oligonucleotide
uaguacacagcgaaaugau

SEQ ID NO: 464161 - RNA, 19 nt, Artificial Sequence
  Description of Artificial Sequence: Synthetic oligonucleotide
uuugaagguaauucagguu

SEQ ID NO: 464162 - RNA, 19 nt, Artificial Sequence
  Description of Artificial Sequence: Synthetic oligonucleotide
uuguaggcuggagugacag

SEQ ID NO: 464163 - RNA, 19 nt, Artificial Sequence
  Description of Artificial Sequence: Synthetic oligonucleotide
ugggaggaugcuauugucu

SEQ ID NO: 464164 - RNA, 19 nt, Artificial Sequence
  Description of Artificial Sequence: Synthetic oligonucleotide
acuguuaaauaugccucgg

SEQ ID NO: 464165 - RNA, 19 nt, Artificial Sequence
  Description of Artificial Sequence: Synthetic oligonucleotide
acggaaaucaguaugugaa

SEQ ID NO: 464166 - RNA, 19 nt, Artificial Sequence
  Description of Artificial Sequence: Synthetic oligonucleotide
agauuaugguugaacuugg

SEQ ID NO: 464167 - RNA, 19 nt, Artificial Sequence
  Description of Artificial Sequence: Synthetic oligonucleotide
cuguuaaauaugccucggg

SEQ ID NO: 464168 - RNA, 19 nt, Artificial Sequence
  Description of Artificial Sequence: Synthetic oligonucleotide
uguaacaacucugugcauu

SEQ ID NO: 464169 - RNA, 19 nt, Artificial Sequence
  Description of Artificial Sequence: Synthetic oligonucleotide
agucacaccaucauuuucu

SEQ ID NO: 464170 - RNA, 19 nt, Artificial Sequence
  Description of Artificial Sequence: Synthetic oligonucleotide
cuauggaacucaacacacc

SEQ ID NO: 464171 - RNA, 19 nt, Artificial Sequence
  Description of Artificial Sequence: Synthetic oligonucleotide
aauuugcguucaaaugguc

SEQ ID NO: 464172 - RNA, 19 nt, Artificial Sequence
  Description of Artificial Sequence: Synthetic oligonucleotide
uuaguaguacacagcgaaa

SEQ ID NO: 464173 - RNA, 19 nt, Artificial Sequence
  Description of Artificial Sequence: Synthetic oligonucleotide
guaagcgaagcuccacggg

SEQ ID NO: 464174 - RNA, 19 nt, Artificial Sequence
  Description of Artificial Sequence: Synthetic oligonucleotide
augcguccugaaaacaucc

SEQ ID NO: 464175 - RNA, 19 nt, Artificial Sequence
  Description of Artificial Sequence: Synthetic oligonucleotide
uucugaccgugguucaggg

SEQ ID NO: 464176 - RNA, 19 nt, Artificial Sequence
  Description of Artificial Sequence: Synthetic oligonucleotide
cuggcuuacucugagccgg

SEQ ID NO: 464177 - RNA, 19 nt, Artificial Sequence
  Description of Artificial Sequence: Synthetic oligonucleotide
agguaauuuggaucuccag

SEQ ID NO: 464178 - RNA, 19 nt, Artificial Sequence
  Description of Artificial Sequence: Synthetic oligonucleotide
aacaaaugcuuaauacuaa

SEQ ID NO: 464179 - RNA, 19 nt, Artificial Sequence
  Description of Artificial Sequence: Synthetic oligonucleotide
cuucccuaagagaaaugug

SEQ ID NO: 464180 - RNA, 19 nt, Artificial Sequence
  Description of Artificial Sequence: Synthetic oligonucleotide
guaacaacucugugcauuc

SEQ ID NO: 464181 - RNA, 19 nt, Artificial Sequence
  Description of Artificial Sequence: Synthetic oligonucleotide
acuaauaauugcaguauaa

SEQ ID NO: 464182 - RNA, 19 nt, Artificial Sequence
  Description of Artificial Sequence: Synthetic oligonucleotide
gauuaugguugaacuuggg

SEQ ID NO: 464183 - RNA, 19 nt, Artificial Sequence
  Description of Artificial Sequence: Synthetic oligonucleotide
cacgggaacugccuuaggc

SEQ ID NO: 464184 - RNA, 19 nt, Artificial Sequence
  Description of Artificial Sequence: Synthetic oligonucleotide
uguagugguguauuaucua

SEQ ID NO: 464185 - RNA, 19 nt, Artificial Sequence
  Description of Artificial Sequence: Synthetic oligonucleotide
gacauauaggaguucugaa

SEQ ID NO: 464186 - RNA, 19 nt, Artificial Sequence
  Description of Artificial Sequence: Synthetic oligonucleotide
caagguaauuuggaucucc

SEQ ID NO: 464187 - RNA, 19 nt, Artificial Sequence
  Description of Artificial Sequence: Synthetic oligonucleotide
gguaagcgaagcuccacgg

SEQ ID NO: 464188 - RNA, 19 nt, Artificial Sequence
  Description of Artificial Sequence: Synthetic oligonucleotide
uauuccaggugcauuugua

SEQ ID NO: 464189 - RNA, 19 nt, Artificial Sequence
  Description of Artificial Sequence: Synthetic oligonucleotide
ugugguaagcgaagcucca

SEQ ID NO: 464190 - RNA, 19 nt, Artificial Sequence
  Description of Artificial Sequence: Synthetic oligonucleotide
gcacgcacuauguacaugc

SEQ ID NO: 464191 - RNA, 19 nt, Artificial Sequence
  Description of Artificial Sequence: Synthetic oligonucleotide
acgggaacugccuuaggca

SEQ ID NO: 464192 - RNA, 19 nt, Artificial Sequence
  Description of Artificial Sequence: Synthetic oligonucleotide
uccacuacacugguuauau

SEQ ID NO: 464193 - RNA, 19 nt, Artificial Sequence
  Description of Artificial Sequence: Synthetic oligonucleotide
uaucugcguggacagagaa

SEQ ID NO: 464194 - RNA, 19 nt, Artificial Sequence
  Description of Artificial Sequence: Synthetic oligonucleotide
guagugguguauuaucuaa

SEQ ID NO: 464195 - RNA, 19 nt, Artificial Sequence
  Description of Artificial Sequence: Synthetic oligonucleotide
uuaccucaugcauaauaaa

SEQ ID NO: 464196 - RNA, 19 nt, Artificial Sequence
  Description of Artificial Sequence: Synthetic oligonucleotide
aauccacuacacugguuau

SEQ ID NO: 464197 - RNA, 19 nt, Artificial Sequence
  Description of Artificial Sequence: Synthetic oligonucleotide
uugcucgauuccuucagga

SEQ ID NO: 464198 - RNA, 19 nt, Artificial Sequence
  Description of Artificial Sequence: Synthetic oligonucleotide
guuugaguguacuuuggaa

SEQ ID NO: 464199 - RNA, 19 nt, Artificial Sequence
  Description of Artificial Sequence: Synthetic oligonucleotide
cauaagagucuuuggagaa

SEQ ID NO: 464200 - RNA, 19 nt, Artificial Sequence
  Description of Artificial Sequence: Synthetic oligonucleotide
uagaugucuguggugauau

SEQ ID NO: 464201 - RNA, 19 nt, Artificial Sequence
  Description of Artificial Sequence: Synthetic oligonucleotide
ucccuaagagaaauguguu

SEQ ID NO: 464202 - RNA, 19 nt, Artificial Sequence
  Description of Artificial Sequence: Synthetic oligonucleotide
aggugauuacacauuucgg

SEQ ID NO: 464203 - RNA, 19 nt, Artificial Sequence
  Description of Artificial Sequence: Synthetic oligonucleotide
uuaucugcguggacagaga

SEQ ID NO: 464204 - RNA, 19 nt, Artificial Sequence
  Description of Artificial Sequence: Synthetic oligonucleotide
cacauuaccucaugcauaa

SEQ ID NO: 464205 - RNA, 19 nt, Artificial Sequence
  Description of Artificial Sequence: Synthetic oligonucleotide
gguagccuuagaaacuugg

SEQ ID NO: 464206 - RNA, 19 nt, Artificial Sequence
  Description of Artificial Sequence: Synthetic oligonucleotide
guacaugcguccugaaaac

SEQ ID NO: 464207 - RNA, 19 nt, Artificial Sequence
  Description of Artificial Sequence: Synthetic oligonucleotide
caguaucuagauaugcaca

SEQ ID NO: 464208 - RNA, 19 nt, Artificial Sequence
  Description of Artificial Sequence: Synthetic oligonucleotide
aagguaauuuggaucucca

SEQ ID NO: 464209 - RNA, 19 nt, Artificial Sequence
  Description of Artificial Sequence: Synthetic oligonucleotide
aggccacggaaccaggcuc

SEQ ID NO: 464210 - RNA, 19 nt, Artificial Sequence
  Description of Artificial Sequence: Synthetic oligonucleotide
gagaauacaaagguagccu

SEQ ID NO: 464211 - RNA, 19 nt, Artificial Sequence
  Description of Artificial Sequence: Synthetic oligonucleotide
uugcguucaaauggucggg

SEQ ID NO: 464212 - RNA, 19 nt, Artificial Sequence
  Description of Artificial Sequence: Synthetic oligonucleotide
uccuugugggauaauuaua

SEQ ID NO: 464213 - RNA, 19 nt, Artificial Sequence
  Description of Artificial Sequence: Synthetic oligonucleotide
acucucuagucaaugcuag

SEQ ID NO: 464214 - RNA, 19 nt, Artificial Sequence
  Description of Artificial Sequence: Synthetic oligonucleotide
uuaggcuuaucugcgugga

SEQ ID NO: 464215 - RNA, 19 nt, Artificial Sequence
  Description of Artificial Sequence: Synthetic oligonucleotide
aguguacuuuggaaagaac

SEQ ID NO: 464216 - RNA, 19 nt, Artificial Sequence
  Description of Artificial Sequence: Synthetic oligonucleotide
gugaaucgguuguaggcug

SEQ ID NO: 464217 - RNA, 19 nt, Artificial Sequence
  Description of Artificial Sequence: Synthetic oligonucleotide
cuuucacaccuaaugauua

SEQ ID NO: 464218 - RNA, 19 nt, Artificial Sequence
  Description of Artificial Sequence: Synthetic oligonucleotide
aaucgugcugaugugccau

SEQ ID NO: 464219 - RNA, 19 nt, Artificial Sequence
  Description of Artificial Sequence: Synthetic oligonucleotide
ucugaccgugguucagggg

SEQ ID NO: 464220 - RNA, 19 nt, Artificial Sequence
  Description of Artificial Sequence: Synthetic oligonucleotide
auugcaguauaaauucuaa

SEQ ID NO: 464221 - RNA, 19 nt, Artificial Sequence
  Description of Artificial Sequence: Synthetic oligonucleotide
uggacagagaaaguuucaa

SEQ ID NO: 464222 - RNA, 19 nt, Artificial Sequence
  Description of Artificial Sequence: Synthetic oligonucleotide
aucaguaugugaaguuaag

SEQ ID NO: 464223 - RNA, 19 nt, Artificial Sequence
  Description of Artificial Sequence: Synthetic oligonucleotide
gugguguauuaucuaaaca

SEQ ID NO: 464224 - RNA, 19 nt, Artificial Sequence
  Description of Artificial Sequence: Synthetic oligonucleotide
acaauuuacucaaucuuuu

SEQ ID NO: 464225 - RNA, 19 nt, Artificial Sequence
  Description of Artificial Sequence: Synthetic oligonucleotide
ugguuagaugucuguggug

SEQ ID NO: 464226 - RNA, 19 nt, Artificial Sequence
  Description of Artificial Sequence: Synthetic oligonucleotide
gugugguaagcgaagcucc

SEQ ID NO: 464227 - RNA, 19 nt, Artificial Sequence
  Description of Artificial Sequence: Synthetic oligonucleotide
ugaguguacuuuggaaaga

SEQ ID NO: 464228 - RNA, 19 nt, Artificial Sequence
  Description of Artificial Sequence: Synthetic oligonucleotide
uacacagcgaaaugaucua

SEQ ID NO: 464229 - RNA, 19 nt, Artificial Sequence
  Description of Artificial Sequence: Synthetic oligonucleotide
ugcugguuagaugucugug

SEQ ID NO: 464230 - RNA, 19 nt, Artificial Sequence
  Description of Artificial Sequence: Synthetic oligonucleotide
cauuugacccucccucccc

SEQ ID NO: 464231 - RNA, 19 nt, Artificial Sequence
  Description of Artificial Sequence: Synthetic oligonucleotide
agggauacuuugcaagaau

SEQ ID NO: 464232 - RNA, 19 nt, Artificial Sequence
  Description of Artificial Sequence: Synthetic oligonucleotide
gguuagaugucugugguga

SEQ ID NO: 464233 - RNA, 19 nt, Artificial Sequence
  Description of Artificial Sequence: Synthetic oligonucleotide
auauaauacucagcagagu

SEQ ID NO: 464234 - RNA, 19 nt, Artificial Sequence
  Description of Artificial Sequence: Synthetic oligonucleotide
aguuucaacuccacuguca

SEQ ID NO: 464235 - RNA, 19 nt, Artificial Sequence
  Description of Artificial Sequence: Synthetic oligonucleotide
agaauguagugguguauua

SEQ ID NO: 464236 - RNA, 19 nt, Artificial Sequence
  Description of Artificial Sequence: Synthetic oligonucleotide
guguauuaucuaaacagaa

SEQ ID NO: 464237 - RNA, 19 nt, Artificial Sequence
  Description of Artificial Sequence: Synthetic oligonucleotide
guuauauauuccaggugca

SEQ ID NO: 464238 - RNA, 19 nt, Artificial Sequence
  Description of Artificial Sequence: Synthetic oligonucleotide
aagggauacuuugcaagaa

SEQ ID NO: 464239 - RNA, 19 nt, Artificial Sequence
  Description of Artificial Sequence: Synthetic oligonucleotide
ccaaguuuuagggucacag

SEQ ID NO: 464240 - RNA, 19 nt, Artificial Sequence
  Description of Artificial Sequence: Synthetic oligonucleotide
gguguauuaucuaaacaga

SEQ ID NO: 464241 - RNA, 19 nt, Artificial Sequence
  Description of Artificial Sequence: Synthetic oligonucleotide
ccagugauacugaauugcc

SEQ ID NO: 464242 - RNA, 19 nt, Artificial Sequence
  Description of Artificial Sequence: Synthetic oligonucleotide
uggugugaaucgguuguag

SEQ ID NO: 464243 - RNA, 19 nt, Artificial Sequence
  Description of Artificial Sequence: Synthetic oligonucleotide
ucucugggaagcccuucug

SEQ ID NO: 464244 - RNA, 19 nt, Artificial Sequence
  Description of Artificial Sequence: Synthetic oligonucleotide
ugcguggacagagaaaguu

SEQ ID NO: 464245 - RNA, 19 nt, Artificial Sequence
  Description of Artificial Sequence: Synthetic oligonucleotide
ugcguccugaaaacaucca

SEQ ID NO: 464246 - RNA, 19 nt, Artificial Sequence
  Description of Artificial Sequence: Synthetic oligonucleotide
cucuagucaaugcuagaca

SEQ ID NO: 464247 - RNA, 19 nt, Artificial Sequence
  Description of Artificial Sequence: Synthetic oligonucleotide
ugugcugaacuaugggcuu

SEQ ID NO: 464248 - RNA, 19 nt, Artificial Sequence
  Description of Artificial Sequence: Synthetic oligonucleotide
uuucggaaaccaucacauc

SEQ ID NO: 464249 - RNA, 19 nt, Artificial Sequence
  Description of Artificial Sequence: Synthetic oligonucleotide
guuccuaaaaguaggucaa

SEQ ID NO: 464250 - RNA, 19 nt, Artificial Sequence
  Description of Artificial Sequence: Synthetic oligonucleotide
uguccuucccuaagagaaa

SEQ ID NO: 464251 - RNA, 19 nt, Artificial Sequence
  Description of Artificial Sequence: Synthetic oligonucleotide
aaucgguuguaggcuggag

SEQ ID NO: 464252 - RNA, 19 nt, Artificial Sequence
  Description of Artificial Sequence: Synthetic oligonucleotide
cagaaaucgugcugaugug

SEQ ID NO: 464253 - RNA, 19 nt, Artificial Sequence
  Description of Artificial Sequence: Synthetic oligonucleotide
uacaugcguccugaaaaca

SEQ ID NO: 464254 - RNA, 19 nt, Artificial Sequence
  Description of Artificial Sequence: Synthetic oligonucleotide
agauaugcacaaaacucau

SEQ ID NO: 464255 - RNA, 19 nt, Artificial Sequence
  Description of Artificial Sequence: Synthetic oligonucleotide
auuugacccucccucccca

SEQ ID NO: 464256 - RNA, 19 nt, Artificial Sequence
  Description of Artificial Sequence: Synthetic oligonucleotide
acgcacuauguacaugcgu

SEQ ID NO: 464257 - RNA, 19 nt, Artificial Sequence
  Description of Artificial Sequence: Synthetic oligonucleotide
ggagugacaguuuucggaa

SEQ ID NO: 464258 - RNA, 19 nt, Artificial Sequence
  Description of Artificial Sequence: Synthetic oligonucleotide
ggcgagcacuuguauaggg

SEQ ID NO: 464259 - RNA, 19 nt, Artificial Sequence
  Description of Artificial Sequence: Synthetic oligonucleotide
cacgcacuauguacaugcg

SEQ ID NO: 464260 - RNA, 19 nt, Artificial Sequence
  Description of Artificial Sequence: Synthetic oligonucleotide
uucagaugcauagccuaaa

SEQ ID NO: 464261 - RNA, 19 nt, Artificial Sequence
  Description of Artificial Sequence: Synthetic oligonucleotide
uuagaugucuguggugaua

SEQ ID NO: 464262 - RNA, 19 nt, Artificial Sequence
  Description of Artificial Sequence: Synthetic oligonucleotide
agaguuuauaaaaguuaau

SEQ ID NO: 464263 - RNA, 19 nt, Artificial Sequence
  Description of Artificial Sequence: Synthetic oligonucleotide
uagccaccacaguaugacc

SEQ ID NO: 464264 - RNA, 19 nt, Artificial Sequence
  Description of Artificial Sequence: Synthetic oligonucleotide
gggacugucaaauuugcgu

SEQ ID NO: 464265 - RNA, 19 nt, Artificial Sequence
  Description of Artificial Sequence: Synthetic oligonucleotide
augauacaguaucuagaua

SEQ ID NO: 464266 - RNA, 19 nt, Artificial Sequence
  Description of Artificial Sequence: Synthetic oligonucleotide
acaagguaauuuggaucuc

SEQ ID NO: 464267 - RNA, 19 nt, Artificial Sequence
  Description of Artificial Sequence: Synthetic oligonucleotide
ggaacugccuuaggcacgg

SEQ ID NO: 464268 - RNA, 19 nt, Artificial Sequence
  Description of Artificial Sequence: Synthetic oligonucleotide
uacuaacaccaguuucuau

SEQ ID NO: 464269 - RNA, 19 nt, Artificial Sequence
  Description of Artificial Sequence: Synthetic oligonucleotide
aagcgaagcuccacgggcu

SEQ ID NO: 464270 - RNA, 19 nt, Artificial Sequence
  Description of Artificial Sequence: Synthetic oligonucleotide
cagcgaaaugaucuaagaa

SEQ ID NO: 464271 - RNA, 19 nt, Artificial Sequence
  Description of Artificial Sequence: Synthetic oligonucleotide
cuauguacaugcguccuga

SEQ ID NO: 464272 - RNA, 19 nt, Artificial Sequence
  Description of Artificial Sequence: Synthetic oligonucleotide
gguuuauguacaguuucac

SEQ ID NO: 464273 - RNA, 19 nt, Artificial Sequence
  Description of Artificial Sequence: Synthetic oligonucleotide
uggucgggcgagcacuugu

SEQ ID NO: 464274 - RNA, 19 nt, Artificial Sequence
  Description of Artificial Sequence: Synthetic oligonucleotide
caagagguacaggagagaa

SEQ ID NO: 464275 - RNA, 19 nt, Artificial Sequence
  Description of Artificial Sequence: Synthetic oligonucleotide
ucaaugcuagacaguucuu

SEQ ID NO: 464276 - RNA, 19 nt, Artificial Sequence
  Description of Artificial Sequence: Synthetic oligonucleotide
acggugcugauauuauuua

SEQ ID NO: 464277 - RNA, 19 nt, Artificial Sequence
  Description of Artificial Sequence: Synthetic oligonucleotide
caaauggucgggcgagcac

SEQ ID NO: 464278 - RNA, 19 nt, Artificial Sequence
  Description of Artificial Sequence: Synthetic oligonucleotide
ugguuccuaaaaguagguc

SEQ ID NO: 464279 - RNA, 19 nt, Artificial Sequence
  Description of Artificial Sequence: Synthetic oligonucleotide
ggacauauaggaguucuga

SEQ ID NO: 464280 - RNA, 19 nt, Artificial Sequence
  Description of Artificial Sequence: Synthetic oligonucleotide
gcacuauguacaugcgucc

SEQ ID NO: 464281 - RNA, 19 nt, Artificial Sequence
  Description of Artificial Sequence: Synthetic oligonucleotide
ucacgggaacugccuuagg

SEQ ID NO: 464282 - RNA, 19 nt, Artificial Sequence
  Description of Artificial Sequence: Synthetic oligonucleotide
cucacgggaacugccuuag

SEQ ID NO: 464283 - RNA, 19 nt, Artificial Sequence
  Description of Artificial Sequence: Synthetic oligonucleotide
uauguacaugcguccugaa

SEQ ID NO: 464284 - RNA, 19 nt, Artificial Sequence
  Description of Artificial Sequence: Synthetic oligonucleotide
uauagggcuuuggugugaa

SEQ ID NO: 464285 - RNA, 19 nt, Artificial Sequence
  Description of Artificial Sequence: Synthetic oligonucleotide
aauaugccucgggcuguag

SEQ ID NO: 464286 - RNA, 19 nt, Artificial Sequence
  Description of Artificial Sequence: Synthetic oligonucleotide
acaugcguccugaaaacau

SEQ ID NO: 464287 - RNA, 19 nt, Artificial Sequence
  Description of Artificial Sequence: Synthetic oligonucleotide
ggugauauguuaauuuaua

SEQ ID NO: 464288 - RNA, 19 nt, Artificial Sequence
  Description of Artificial Sequence: Synthetic oligonucleotide
uaggcuuaucugcguggac

SEQ ID NO: 464289 - RNA, 19 nt, Artificial Sequence
  Description of Artificial Sequence: Synthetic oligonucleotide
cagagugguuccuaaaagu

SEQ ID NO: 464290 - RNA, 19 nt, Artificial Sequence
  Description of Artificial Sequence: Synthetic oligonucleotide
acuuaguaguacacagcga

SEQ ID NO: 464291 - RNA, 19 nt, Artificial Sequence
  Description of Artificial Sequence: Synthetic oligonucleotide
gcguucaaauggucgggcg

SEQ ID NO: 464292 - RNA, 19 nt, Artificial Sequence
  Description of Artificial Sequence: Synthetic oligonucleotide
gaacucaacacaccaccau

SEQ ID NO: 464293 - RNA, 19 nt, Artificial Sequence
  Description of Artificial Sequence: Synthetic oligonucleotide
auacuaacaccaguuucua

SEQ ID NO: 464294 - RNA, 19 nt, Artificial Sequence
  Description of Artificial Sequence: Synthetic oligonucleotide
gauaugcacaaaacucaua

SEQ ID NO: 464295 - RNA, 19 nt, Artificial Sequence
  Description of Artificial Sequence: Synthetic oligonucleotide
gagguacaggagagaauac

SEQ ID NO: 464296 - RNA, 19 nt, Artificial Sequence
  Description of Artificial Sequence: Synthetic oligonucleotide
cuaggccaaggucauaaua

SEQ ID NO: 464297 - RNA, 19 nt, Artificial Sequence
  Description of Artificial Sequence: Synthetic oligonucleotide
ucgggcgagcacuuguaua

SEQ ID NO: 464298 - RNA, 19 nt, Artificial Sequence
  Description of Artificial Sequence: Synthetic oligonucleotide
gggcuggcggccuaaacac

SEQ ID NO: 464299 - RNA, 19 nt, Artificial Sequence
  Description of Artificial Sequence: Synthetic oligonucleotide
ugcacgcacuauguacaug

SEQ ID NO: 464300 - RNA, 19 nt, Artificial Sequence
  Description of Artificial Sequence: Synthetic oligonucleotide
aaauaugccucgggcugua

SEQ ID NO: 464301 - RNA, 19 nt, Artificial Sequence
  Description of Artificial Sequence: Synthetic oligonucleotide
uuccuaaaaguaggucaau

SEQ ID NO: 464302 - RNA, 19 nt, Artificial Sequence
  Description of Artificial Sequence: Synthetic oligonucleotide
acucacgggaacugccuua

SEQ ID NO: 464303 - RNA, 19 nt, Artificial Sequence
  Description of Artificial Sequence: Synthetic oligonucleotide
cgggcgagcacuuguauag

SEQ ID NO: 464304 - RNA, 19 nt, Artificial Sequence
  Description of Artificial Sequence: Synthetic oligonucleotide
uucacccugagggcccuug

SEQ ID NO: 464305 - RNA, 19 nt, Artificial Sequence
  Description of Artificial Sequence: Synthetic oligonucleotide
augcacgcacuauguacau

SEQ ID NO: 464306 - RNA, 19 nt, Artificial Sequence
  Description of Artificial Sequence: Synthetic oligonucleotide
acacagcgaaaugaucuaa

SEQ ID NO: 464307 - RNA, 19 nt, Artificial Sequence
  Description of Artificial Sequence: Synthetic oligonucleotide
aauacucagcagagugguu

SEQ ID NO: 464308 - RNA, 19 nt, Artificial Sequence
  Description of Artificial Sequence: Synthetic oligonucleotide
auguaacaacucugugcau

SEQ ID NO: 464309 - RNA, 19 nt, Artificial Sequence
  Description of Artificial Sequence: Synthetic oligonucleotide
cuagucaaugcuagacagu

SEQ ID NO: 464310 - RNA, 19 nt, Artificial Sequence
  Description of Artificial Sequence: Synthetic oligonucleotide
aggucauaauaaaguuuga

SEQ ID NO: 464311 - RNA, 19 nt, Artificial Sequence
  Description of Artificial Sequence: Synthetic oligonucleotide
gggaacugccuuaggcacg

SEQ ID NO: 464312 - RNA, 19 nt, Artificial Sequence
  Description of Artificial Sequence: Synthetic oligonucleotide
cucucuagucaaugcuaga

SEQ ID NO: 464313 - RNA, 19 nt, Artificial Sequence
  Description of Artificial Sequence: Synthetic oligonucleotide
cacggugcugauauuauuu

SEQ ID NO: 464314 - RNA, 19 nt, Artificial Sequence
  Description of Artificial Sequence: Synthetic oligonucleotide
guguaagcuaggccaaggu

SEQ ID NO: 464315 - RNA, 19 nt, Artificial Sequence
  Description of Artificial Sequence: Synthetic oligonucleotide
gaaucgguuguaggcugga

SEQ ID NO: 464316 - RNA, 19 nt, Artificial Sequence
  Description of Artificial Sequence: Synthetic oligonucleotide
cuagaguaacuguaucuuu

SEQ ID NO: 464317 - RNA, 19 nt, Artificial Sequence
  Description of Artificial Sequence: Synthetic oligonucleotide
cacggaaccaggcucacau

SEQ ID NO: 464318 - RNA, 19 nt, Artificial Sequence
  Description of Artificial Sequence: Synthetic oligonucleotide
aauggucgggcgagcacuu

SEQ ID NO: 464319 - RNA, 19 nt, Artificial Sequence
  Description of Artificial Sequence: Synthetic oligonucleotide
uuggugugaaucgguugua

SEQ ID NO: 464320 - RNA, 19 nt, Artificial Sequence
  Description of Artificial Sequence: Synthetic oligonucleotide
ugccuuaggcacggugcug

SEQ ID NO: 464321 - RNA, 19 nt, Artificial Sequence
  Description of Artificial Sequence: Synthetic oligonucleotide
gugguaagcgaagcuccac

SEQ ID NO: 464322 - RNA, 19 nt, Artificial Sequence
  Description of Artificial Sequence: Synthetic oligonucleotide
gaggccacggaaccaggcu

SEQ ID NO: 464323 - RNA, 19 nt, Artificial Sequence
  Description of Artificial Sequence: Synthetic oligonucleotide
ggaacucaacacaccacca

SEQ ID NO: 464324 - RNA, 19 nt, Artificial Sequence
  Description of Artificial Sequence: Synthetic oligonucleotide
caaaagugguaugcacgca

SEQ ID NO: 464325 - RNA, 19 nt, Artificial Sequence
  Description of Artificial Sequence: Synthetic oligonucleotide
guagccuuagaaacuuggu

SEQ ID NO: 464326 - RNA, 19 nt, Artificial Sequence
  Description of Artificial Sequence: Synthetic oligonucleotide
guuaagcagugaccauaaa

SEQ ID NO: 464327 - RNA, 19 nt, Artificial Sequence
  Description of Artificial Sequence: Synthetic oligonucleotide
gcgagcacuuguauagggc

SEQ ID NO: 464328 - RNA, 19 nt, Artificial Sequence
  Description of Artificial Sequence: Synthetic oligonucleotide
gcgaaaugaucuaagaauu

SEQ ID NO: 464329 - RNA, 19 nt, Artificial Sequence
  Description of Artificial Sequence: Synthetic oligonucleotide
guauagggcuuugguguga

SEQ ID NO: 464330 - RNA, 19 nt, Artificial Sequence
  Description of Artificial Sequence: Synthetic oligonucleotide
ggcucacaugcuuuggugu

SEQ ID NO: 464331 - RNA, 19 nt, Artificial Sequence
  Description of Artificial Sequence: Synthetic oligonucleotide
ccaacauuucagaugcaua

SEQ ID NO: 464332 - RNA, 19 nt, Artificial Sequence
  Description of Artificial Sequence: Synthetic oligonucleotide
gcguccugaaaacauccaa

SEQ ID NO: 464333 - RNA, 19 nt, Artificial Sequence
  Description of Artificial Sequence: Synthetic oligonucleotide
agguagccuuagaaacuug

SEQ ID NO: 464334 - RNA, 19 nt, Artificial Sequence
  Description of Artificial Sequence: Synthetic oligonucleotide
guuagaugucuguggugau

SEQ ID NO: 464335 - RNA, 19 nt, Artificial Sequence
  Description of Artificial Sequence: Synthetic oligonucleotide
ggugcugauauuauuuauu

SEQ ID NO: 464336 - RNA, 19 nt, Artificial Sequence
  Description of Artificial Sequence: Synthetic oligonucleotide
ccaggugauuacacauuuc

SEQ ID NO: 464337 - RNA, 19 nt, Artificial Sequence
  Description of Artificial Sequence: Synthetic oligonucleotide
auagggcuuuggugugaau

SEQ ID NO: 464338 - RNA, 19 nt, Artificial Sequence
  Description of Artificial Sequence: Synthetic oligonucleotide
cagaauguagugguguauu

SEQ ID NO: 464339 - RNA, 19 nt, Artificial Sequence
  Description of Artificial Sequence: Synthetic oligonucleotide
gggcgagcacuuguauagg

SEQ ID NO: 464340 - RNA, 19 nt, Artificial Sequence
  Description of Artificial Sequence: Synthetic oligonucleotide
gccuuaggcacggugcuga

SEQ ID NO: 464341 - RNA, 19 nt, Artificial Sequence
  Description of Artificial Sequence: Synthetic oligonucleotide
gggcucagcagaguuucac

SEQ ID NO: 464342 - RNA, 19 nt, Artificial Sequence
  Description of Artificial Sequence: Synthetic oligonucleotide
cuaaaggugggaggaugcu

SEQ ID NO: 464343 - RNA, 19 nt, Artificial Sequence
  Description of Artificial Sequence: Synthetic oligonucleotide
gucaaaguucaaggcucaa

SEQ ID NO: 464344 - RNA, 19 nt, Artificial Sequence
  Description of Artificial Sequence: Synthetic oligonucleotide
cgaaaugaucuaagaauua

SEQ ID NO: 464345 - RNA, 19 nt, Artificial Sequence
  Description of Artificial Sequence: Synthetic oligonucleotide
cugccuuaggcacggugcu

SEQ ID NO: 464346 - RNA, 19 nt, Artificial Sequence
  Description of Artificial Sequence: Synthetic oligonucleotide
cugcugguuagaugucugu

SEQ ID NO: 464347 - RNA, 19 nt, Artificial Sequence
  Description of Artificial Sequence: Synthetic oligonucleotide
cguucaaauggucgggcga

SEQ ID NO: 464348 - RNA, 19 nt, Artificial Sequence
  Description of Artificial Sequence: Synthetic oligonucleotide
acauuaccucaugcauaau

SEQ ID NO: 464349 - RNA, 19 nt, Artificial Sequence
  Description of Artificial Sequence: Synthetic oligonucleotide
auggucgggcgagcacuug

SEQ ID NO: 464350 - RNA, 19 nt, Artificial Sequence
  Description of Artificial Sequence: Synthetic oligonucleotide
uaggcacggugcugauauu

SEQ ID NO: 464351 - RNA, 19 nt, Artificial Sequence
  Description of Artificial Sequence: Synthetic oligonucleotide
gcagacuuugaaauagauu

SEQ ID NO: 464352 - RNA, 19 nt, Artificial Sequence
  Description of Artificial Sequence: Synthetic oligonucleotide
ggccacggaaccaggcuca

SEQ ID NO: 464353 - RNA, 19 nt, Artificial Sequence
  Description of Artificial Sequence: Synthetic oligonucleotide
cgagcacuuguauagggcu

SEQ ID NO: 464354 - RNA, 19 nt, Artificial Sequence
  Description of Artificial Sequence: Synthetic oligonucleotide
cuuaggcacggugcugaua

SEQ ID NO: 464355 - RNA, 19 nt, Artificial Sequence
  Description of Artificial Sequence: Synthetic oligonucleotide
gucgggcgagcacuuguau

SEQ ID NO: 464356 - RNA, 19 nt, Artificial Sequence
  Description of Artificial Sequence: Synthetic oligonucleotide
cgggcuggcggccuaaaca

SEQ ID NO: 464357 - RNA, 19 nt, Artificial Sequence
  Description of Artificial Sequence: Synthetic oligonucleotide
gcauuguaucacaaauuuu

SEQ ID NO: 464358 - RNA, 19 nt, Artificial Sequence
  Description of Artificial Sequence: Synthetic oligonucleotide
ggcuuuggugugaaucggu

SEQ ID NO: 464359 - RNA, 19 nt, Artificial Sequence
  Description of Artificial Sequence: Synthetic oligonucleotide
cugcguggacagagaaagu

SEQ ID NO: 464360 - RNA, 19 nt, Artificial Sequence
  Description of Artificial Sequence: Synthetic oligonucleotide
cccuaagagaaauguguuu

SEQ ID NO: 464361 - RNA, 19 nt, Artificial Sequence
  Description of Artificial Sequence: Synthetic oligonucleotide
ggucgggcgagcacuugua

SEQ ID NO: 464362 - RNA, 19 nt, Artificial Sequence
  Description of Artificial Sequence: Synthetic oligonucleotide
gccacggaaccaggcucac

SEQ ID NO: 464363 - RNA, 19 nt, Artificial Sequence
  Description of Artificial Sequence: Synthetic oligonucleotide
ccgggcuggcggccuaaac

SEQ ID NO: 464364 - RNA, 19 nt, Artificial Sequence
  Description of Artificial Sequence: Synthetic oligonucleotide
gaccgugguucaggggcau

SEQ ID NO: 464365 - RNA, 19 nt, Artificial Sequence
  Description of Artificial Sequence: Synthetic oligonucleotide
cuucacccugagggcccuu

SEQ ID NO: 464366 - RNA, 19 nt, Artificial Sequence
  Description of Artificial Sequence: Synthetic oligonucleotide
uuaaggaauagcuaaagga

SEQ ID NO: 464367 - RNA, 19 nt, Artificial Sequence
  Description of Artificial Sequence: Synthetic oligonucleotide
uuuaaggaauagcuaaagg

SEQ ID NO: 464368 - RNA, 19 nt, Artificial Sequence
  Description of Artificial Sequence: Synthetic oligonucleotide
aaaaccucuuccgaggugc

SEQ ID NO: 464369 - RNA, 19 nt, Artificial Sequence
  Description of Artificial Sequence: Synthetic oligonucleotide
ugugaaaugacacccucgg

SEQ ID NO: 464370 - RNA, 19 nt, Artificial Sequence
  Description of Artificial Sequence: Synthetic oligonucleotide
auucauaugauggaccucc

SEQ ID NO: 464371 - RNA, 19 nt, Artificial Sequence
  Description of Artificial Sequence: Synthetic oligonucleotide
ucaaauuuacgguacuggg

SEQ ID NO: 464372 - RNA, 19 nt, Artificial Sequence
  Description of Artificial Sequence: Synthetic oligonucleotide
uuuagccucaccuauucgg

SEQ ID NO: 464373 - RNA, 19 nt, Artificial Sequence
  Description of Artificial Sequence: Synthetic oligonucleotide
auucggaugcgcuugaugg

SEQ ID NO: 464374 - RNA, 19 nt, Artificial Sequence
  Description of Artificial Sequence: Synthetic oligonucleotide
auuuguaccauuucccagg

SEQ ID NO: 464375 - RNA, 19 nt, Artificial Sequence
  Description of Artificial Sequence: Synthetic oligonucleotide
uccauuguggguuagugag

SEQ ID NO: 464376 - RNA, 19 nt, Artificial Sequence
  Description of Artificial Sequence: Synthetic oligonucleotide
aaggacaacagucauuugu

SEQ ID NO: 464377 - RNA, 19 nt, Artificial Sequence
  Description of Artificial Sequence: Synthetic oligonucleotide
cagaguguuacacaaaacc

SEQ ID NO: 464378 - RNA, 19 nt, Artificial Sequence
  Description of Artificial Sequence: Synthetic oligonucleotide
uucaugucgauccaguugu

SEQ ID NO: 464379 - RNA, 19 nt, Artificial Sequence
  Description of Artificial Sequence: Synthetic oligonucleotide
agagcgaccaguuauucuc

SEQ ID NO: 464380 - RNA, 19 nt, Artificial Sequence
  Description of Artificial Sequence: Synthetic oligonucleotide
aauagcuaaaggaagcuca

SEQ ID NO: 464381 - RNA, 19 nt, Artificial Sequence
  Description of Artificial Sequence: Synthetic oligonucleotide
aauuacacaggugauggug

SEQ ID NO: 464382 - RNA, 19 nt, Artificial Sequence
  Description of Artificial Sequence: Synthetic oligonucleotide
gaugcuacucaacaggcug

SEQ ID NO: 464383 - RNA, 19 nt, Artificial Sequence
  Description of Artificial Sequence: Synthetic oligonucleotide
acaauuugacaaaagggcg

SEQ ID NO: 464384 - RNA, 19 nt, Artificial Sequence
  Description of Artificial Sequence: Synthetic oligonucleotide
uugcacgucagcuugaaga

SEQ ID NO: 464385 - RNA, 19 nt, Artificial Sequence
  Description of Artificial Sequence: Synthetic oligonucleotide
uguaccauuucccagggua

SEQ ID NO: 464386 - RNA, 19 nt, Artificial Sequence
  Description of Artificial Sequence: Synthetic oligonucleotide
aaggaauagcuaaaggaag

SEQ ID NO: 464387 - RNA, 19 nt, Artificial Sequence
  Description of Artificial Sequence: Synthetic oligonucleotide
auuuacgguacugggaggc

SEQ ID NO: 464388 - RNA, 19 nt, Artificial Sequence
  Description of Artificial Sequence: Synthetic oligonucleotide
agacauugguuucugagug

SEQ ID NO: 464389 - RNA, 19 nt, Artificial Sequence
  Description of Artificial Sequence: Synthetic oligonucleotide
aucaaauuuacgguacugg

SEQ ID NO: 464390 - RNA, 19 nt, Artificial Sequence
  Description of Artificial Sequence: Synthetic oligonucleotide
agugcacgggcacagacgg

SEQ ID NO: 464391 - RNA, 19 nt, Artificial Sequence
  Description of Artificial Sequence: Synthetic oligonucleotide
gacaacagucauuuguacc

SEQ ID NO: 464392 - RNA, 19 nt, Artificial Sequence
  Description of Artificial Sequence: Synthetic oligonucleotide
cauuuggucaccaggcggg

SEQ ID NO: 464393 - RNA, 19 nt, Artificial Sequence
  Description of Artificial Sequence: Synthetic oligonucleotide
uuacguucaggcuuagggc

SEQ ID NO: 464394 - RNA, 19 nt, Artificial Sequence
  Description of Artificial Sequence: Synthetic oligonucleotide
gaauggguugggcuggugg

SEQ ID NO: 464395 - RNA, 19 nt, Artificial Sequence
  Description of Artificial Sequence: Synthetic oligonucleotide
uguuacacaaaaccucuuc

SEQ ID NO: 464396 - RNA, 19 nt, Artificial Sequence
  Description of Artificial Sequence: Synthetic oligonucleotide
ugaggcuuucugcagaacu

SEQ ID NO: 464397 - RNA, 19 nt, Artificial Sequence
  Description of Artificial Sequence: Synthetic oligonucleotide
acacccgccucucauaaac

SEQ ID NO: 464398 - RNA, 19 nt, Artificial Sequence
  Description of Artificial Sequence: Synthetic oligonucleotide
aaggcggcggcagaagugc

SEQ ID NO: 464399 - RNA, 19 nt, Artificial Sequence
  Description of Artificial Sequence: Synthetic oligonucleotide
ucaggaccuuacaugaagc

SEQ ID NO: 464400 - RNA, 19 nt, Artificial Sequence
  Description of Artificial Sequence: Synthetic oligonucleotide
uacguucaggcuuagggcu

SEQ ID NO: 464401 - RNA, 19 nt, Artificial Sequence
  Description of Artificial Sequence: Synthetic oligonucleotide
aacaagguuuguugcacgu

SEQ ID NO: 464402 - RNA, 19 nt, Artificial Sequence
  Description of Artificial Sequence: Synthetic oligonucleotide
acaacaagguuuguugcac

SEQ ID NO: 464403 - RNA, 19 nt, Artificial Sequence
  Description of Artificial Sequence: Synthetic oligonucleotide
aaaagggcgaggagacucc

SEQ ID NO: 464404 - RNA, 19 nt, Artificial Sequence
  Description of Artificial Sequence: Synthetic oligonucleotide
acagaggcgaacaaaagug

SEQ ID NO: 464405 - RNA, 19 nt, Artificial Sequence
  Description of Artificial Sequence: Synthetic oligonucleotide
aggcgucaaagcuucauuc

SEQ ID NO: 464406 - RNA, 19 nt, Artificial Sequence
  Description of Artificial Sequence: Synthetic oligonucleotide
guuuaaggaauagcuaaag

SEQ ID NO: 464407 - RNA, 19 nt, Artificial Sequence
  Description of Artificial Sequence: Synthetic oligonucleotide
guucucaggaccuuacaug

SEQ ID NO: 464408 - RNA, 19 nt, Artificial Sequence
  Description of Artificial Sequence: Synthetic oligonucleotide
aucguggacacagacauug

SEQ ID NO: 464409 - RNA, 19 nt, Artificial Sequence
  Description of Artificial Sequence: Synthetic oligonucleotide
gaguagcucauagaugagg

SEQ ID NO: 464410 - RNA, 19 nt, Artificial Sequence
  Description of Artificial Sequence: Synthetic oligonucleotide
uuacaugaagcugcaacug

SEQ ID NO: 464411 - RNA, 19 nt, Artificial Sequence
  Description of Artificial Sequence: Synthetic oligonucleotide
uuuugcagauuuucacagc

SEQ ID NO: 464412 - RNA, 19 nt, Artificial Sequence
  Description of Artificial Sequence: Synthetic oligonucleotide
agaguguuacacaaaaccu

SEQ ID NO: 464413 - RNA, 19 nt, Artificial Sequence
  Description of Artificial Sequence: Synthetic oligonucleotide
agaggcgaacaaaaguggc

SEQ ID NO: 464414 - RNA, 19 nt, Artificial Sequence
  Description of Artificial Sequence: Synthetic oligonucleotide
uauucggaugcgcuugaug

SEQ ID NO: 464415 - RNA, 19 nt, Artificial Sequence
  Description of Artificial Sequence: Synthetic oligonucleotide
uuaggggaggccuuggguc

SEQ ID NO: 464416 - RNA, 19 nt, Artificial Sequence
  Description of Artificial Sequence: Synthetic oligonucleotide
ugucgauccaguuguucag

SEQ ID NO: 464417 - RNA, 19 nt, Artificial Sequence
  Description of Artificial Sequence: Synthetic oligonucleotide
aguguuacacaaaaccucu

SEQ ID NO: 464418 - RNA, 19 nt, Artificial Sequence
  Description of Artificial Sequence: Synthetic oligonucleotide
ucaccuauucggaugcgcu

SEQ ID NO: 464419 - RNA, 19 nt, Artificial Sequence
  Description of Artificial Sequence: Synthetic oligonucleotide
aucgcgcucccucaguugg

SEQ ID NO: 464420 - RNA, 19 nt, Artificial Sequence
  Description of Artificial Sequence: Synthetic oligonucleotide
aaggggaaugugagggugc

SEQ ID NO: 464421 - RNA, 19 nt, Artificial Sequence
  Description of Artificial Sequence: Synthetic oligonucleotide
cucaggaccuuacaugaag

SEQ ID NO: 464422 - RNA, 19 nt, Artificial Sequence
  Description of Artificial Sequence: Synthetic oligonucleotide
ugcaaugcgccaacagcag

SEQ ID NO: 464423 - RNA, 19 nt, Artificial Sequence
  Description of Artificial Sequence: Synthetic oligonucleotide
aaguuggugguaccgccug

SEQ ID NO: 464424 - RNA, 19 nt, Artificial Sequence
  Description of Artificial Sequence: Synthetic oligonucleotide
gaguguuacacaaaaccuc

SEQ ID NO: 464425 - RNA, 19 nt, Artificial Sequence
  Description of Artificial Sequence: Synthetic oligonucleotide
cauuguggguuagugaggc

SEQ ID NO: 464426 - RNA, 19 nt, Artificial Sequence
  Description of Artificial Sequence: Synthetic oligonucleotide
uucggaugcgcuugauggg

SEQ ID NO: 464427 - RNA, 19 nt, Artificial Sequence
  Description of Artificial Sequence: Synthetic oligonucleotide
uguugaagugcacgggcac

SEQ ID NO: 464428 - RNA, 19 nt, Artificial Sequence
  Description of Artificial Sequence: Synthetic oligonucleotide
cacaguaguaaaucgcauc

SEQ ID NO: 464429 - RNA, 19 nt, Artificial Sequence
  Description of Artificial Sequence: Synthetic oligonucleotide
caauuugacaaaagggcga

SEQ ID NO: 464430 - RNA, 19 nt, Artificial Sequence
  Description of Artificial Sequence: Synthetic oligonucleotide
caaauuuacgguacuggga

SEQ ID NO: 464431 - RNA, 19 nt, Artificial Sequence
  Description of Artificial Sequence: Synthetic oligonucleotide
uggggaagcgagcaugcug

SEQ ID NO: 464432 - RNA, 19 nt, Artificial Sequence
  Description of Artificial Sequence: Synthetic oligonucleotide
acagacgggcugcaguagg

SEQ ID NO: 464433 - RNA, 19 nt, Artificial Sequence
  Description of Artificial Sequence: Synthetic oligonucleotide
acaaaaguggccacagucu

SEQ ID NO: 464434 - RNA, 19 nt, Artificial Sequence
  Description of Artificial Sequence: Synthetic oligonucleotide
uuacgguacugggaggccg

SEQ ID NO: 464435 - RNA, 19 nt, Artificial Sequence
  Description of Artificial Sequence: Synthetic oligonucleotide
accauuucccaggguaacc

SEQ ID NO: 464436 - RNA, 19 nt, Artificial Sequence
  Description of Artificial Sequence: Synthetic oligonucleotide
uggcgugugugaaaugaca

SEQ ID NO: 464437 - RNA, 19 nt, Artificial Sequence
  Description of Artificial Sequence: Synthetic oligonucleotide
ugaaggacgggcugaggcu

SEQ ID NO: 464438 - RNA, 19 nt, Artificial Sequence
  Description of Artificial Sequence: Synthetic oligonucleotide
aagugcacgggcacagacg

SEQ ID NO: 464439 - RNA, 19 nt, Artificial Sequence
  Description of Artificial Sequence: Synthetic oligonucleotide
ggaccuuacaugaagcugc

SEQ ID NO: 464440 - RNA, 19 nt, Artificial Sequence
  Description of Artificial Sequence: Synthetic oligonucleotide
augggaucggccuccagca

SEQ ID NO: 464441 - RNA, 19 nt, Artificial Sequence
  Description of Artificial Sequence: Synthetic oligonucleotide
uguugcaaguuggugguac

SEQ ID NO: 464442 - RNA, 19 nt, Artificial Sequence
  Description of Artificial Sequence: Synthetic oligonucleotide
ggugaaacugacgugggcc

SEQ ID NO: 464443 - RNA, 19 nt, Artificial Sequence
  Description of Artificial Sequence: Synthetic oligonucleotide
gaggcgaacaaaaguggcc

SEQ ID NO: 464444 - RNA, 19 nt, Artificial Sequence
  Description of Artificial Sequence: Synthetic oligonucleotide
acccgcuuuagccucaccu

SEQ ID NO: 464445 - RNA, 19 nt, Artificial Sequence
  Description of Artificial Sequence: Synthetic oligonucleotide
ugugucuggggaagcgagc

SEQ ID NO: 464446 - RNA, 19 nt, Artificial Sequence
  Description of Artificial Sequence: Synthetic oligonucleotide
ucugccgaggccagguacu

SEQ ID NO: 464447 - RNA, 19 nt, Artificial Sequence
  Description of Artificial Sequence: Synthetic oligonucleotide
aaagucggaggcggucugg

SEQ ID NO: 464448 - RNA, 19 nt, Artificial Sequence
  Description of Artificial Sequence: Synthetic oligonucleotide
gugugaaaugacacccucg

SEQ ID NO: 464449 - RNA, 19 nt, Artificial Sequence
  Description of Artificial Sequence: Synthetic oligonucleotide
uggugaaacugacgugggc

SEQ ID NO: 464450 - RNA, 19 nt, Artificial Sequence
  Description of Artificial Sequence: Synthetic oligonucleotide
aggcuuagggcuugcuguc

SEQ ID NO: 464451 - RNA, 19 nt, Artificial Sequence
  Description of Artificial Sequence: Synthetic oligonucleotide
agcauaggugcugccaggg

SEQ ID NO: 464452 - RNA, 19 nt, Artificial Sequence
  Description of Artificial Sequence: Synthetic oligonucleotide
uauuacauccaaggacaac

SEQ ID NO: 464453 - RNA, 19 nt, Artificial Sequence
  Description of Artificial Sequence: Synthetic oligonucleotide
gaggccgagacgaucucgg

SEQ ID NO: 464454 - RNA, 19 nt, Artificial Sequence
  Description of Artificial Sequence: Synthetic oligonucleotide
aggaccuuacaugaagcug

SEQ ID NO: 464455 - RNA, 19 nt, Artificial Sequence
  Description of Artificial Sequence: Synthetic oligonucleotide
gggcggauucauaugaugg

SEQ ID NO: 464456 - RNA, 19 nt, Artificial Sequence
  Description of Artificial Sequence: Synthetic oligonucleotide
uaauuacacaggugauggu

SEQ ID NO: 464457 - RNA, 19 nt, Artificial Sequence
  Description of Artificial Sequence: Synthetic oligonucleotide
gguacugggaggccgagac

SEQ ID NO: 464458 - RNA, 19 nt, Artificial Sequence
  Description of Artificial Sequence: Synthetic oligonucleotide
gaccggggcucccacagag

SEQ ID NO: 464459 - RNA, 19 nt, Artificial Sequence
  Description of Artificial Sequence: Synthetic oligonucleotide
aggcgaacaaaaguggcca

SEQ ID NO: 464460 - RNA, 19 nt, Artificial Sequence
  Description of Artificial Sequence: Synthetic oligonucleotide
ggagaguagagggacagug

SEQ ID NO: 464461 - RNA, 19 nt, Artificial Sequence
  Description of Artificial Sequence: Synthetic oligonucleotide
ucauaugauggaccuccau

SEQ ID NO: 464462 - RNA, 19 nt, Artificial Sequence
  Description of Artificial Sequence: Synthetic oligonucleotide
aggugcauggcugcucuac

SEQ ID NO: 464463 - RNA, 19 nt, Artificial Sequence
  Description of Artificial Sequence: Synthetic oligonucleotide
aucccgugcuccuucaggu

SEQ ID NO: 464464 - RNA, 19 nt, Artificial Sequence
  Description of Artificial Sequence: Synthetic oligonucleotide
caucaggggaugaggcugc

SEQ ID NO: 464465 - RNA, 19 nt, Artificial Sequence
  Description of Artificial Sequence: Synthetic oligonucleotide
uguccguggagcccguggu

SEQ ID NO: 464466 - RNA, 19 nt, Artificial Sequence
  Description of Artificial Sequence: Synthetic oligonucleotide
cugugggcguggcugaggg

SEQ ID NO: 464467 - RNA, 19 nt, Artificial Sequence
  Description of Artificial Sequence: Synthetic oligonucleotide
aggguaacccggaugcagg

SEQ ID NO: 464468 - RNA, 19 nt, Artificial Sequence
  Description of Artificial Sequence: Synthetic oligonucleotide
ucggucuuucauauuuaua

SEQ ID NO: 464469 - RNA, 19 nt, Artificial Sequence
  Description of Artificial Sequence: Synthetic oligonucleotide
accuauucggaugcgcuug

SEQ ID NO: 464470 - RNA, 19 nt, Artificial Sequence
  Description of Artificial Sequence: Synthetic oligonucleotide
uuuacgguacugggaggcc

SEQ ID NO: 464471 - RNA, 19 nt, Artificial Sequence
  Description of Artificial Sequence: Synthetic oligonucleotide
uacgguacugggaggccga

SEQ ID NO: 464472 - RNA, 19 nt, Artificial Sequence
  Description of Artificial Sequence: Synthetic oligonucleotide
cucgaauggguugggcugg

SEQ ID NO: 464473 - RNA, 19 nt, Artificial Sequence
  Description of Artificial Sequence: Synthetic oligonucleotide
ugguggaguagcucauaga

SEQ ID NO: 464474 - RNA, 19 nt, Artificial Sequence
  Description of Artificial Sequence: Synthetic oligonucleotide
gaggcuuucugcagaacuc

SEQ ID NO: 464475 - RNA, 19 nt, Artificial Sequence
  Description of Artificial Sequence: Synthetic oligonucleotide
cugcugaugcuacucaaca

SEQ ID NO: 464476 - RNA, 19 nt, Artificial Sequence
  Description of Artificial Sequence: Synthetic oligonucleotide
cucauugaagcgcagcucu

SEQ ID NO: 464477 - RNA, 19 nt, Artificial Sequence
  Description of Artificial Sequence: Synthetic oligonucleotide
ggaacucaucaaauuuacg

SEQ ID NO: 464478 - RNA, 19 nt, Artificial Sequence
  Description of Artificial Sequence: Synthetic oligonucleotide
acauaauuacacaggugau

SEQ ID NO: 464479 - RNA, 19 nt, Artificial Sequence
  Description of Artificial Sequence: Synthetic oligonucleotide
ugggugagugggcggauuc

SEQ ID NO: 464480 - RNA, 19 nt, Artificial Sequence
  Description of Artificial Sequence: Synthetic oligonucleotide
gguggaguagcucauagau

SEQ ID NO: 464481 - RNA, 19 nt, Artificial Sequence
  Description of Artificial Sequence: Synthetic oligonucleotide
uggcuuacguucaggcuua

SEQ ID NO: 464482 - RNA, 19 nt, Artificial Sequence
  Description of Artificial Sequence: Synthetic oligonucleotide
acccgccucucauaaaccu

SEQ ID NO: 464483 - RNA, 19 nt, Artificial Sequence
  Description of Artificial Sequence: Synthetic oligonucleotide
augugucuggggaagcgag

SEQ ID NO: 464484 - RNA, 19 nt, Artificial Sequence
  Description of Artificial Sequence: Synthetic oligonucleotide
cgugugugaaaugacaccc

SEQ ID NO: 464485 - RNA, 19 nt, Artificial Sequence
  Description of Artificial Sequence: Synthetic oligonucleotide
cacaccccgccuucggucc

SEQ ID NO: 464486 - RNA, 19 nt, Artificial Sequence
  Description of Artificial Sequence: Synthetic oligonucleotide
gacgugggccccucugaag

SEQ ID NO: 464487 - RNA, 19 nt, Artificial Sequence
  Description of Artificial Sequence: Synthetic oligonucleotide
ucucaggaccuuacaugaa

SEQ ID NO: 464488 - RNA, 19 nt, Artificial Sequence
  Description of Artificial Sequence: Synthetic oligonucleotide
cucaccuauucggaugcgc

SEQ ID NO: 464489 - RNA, 19 nt, Artificial Sequence
  Description of Artificial Sequence: Synthetic oligonucleotide
gcaaguuggugguaccgcc

SEQ ID NO: 464490 - RNA, 19 nt, Artificial Sequence
  Description of Artificial Sequence: Synthetic oligonucleotide
aggacaacagucauuugua

SEQ ID NO: 464491 - RNA, 19 nt, Artificial Sequence
  Description of Artificial Sequence: Synthetic oligonucleotide
gaagagcgaccaguuauuc

SEQ ID NO: 464492 - RNA, 19 nt, Artificial Sequence
  Description of Artificial Sequence: Synthetic oligonucleotide
gauucauaugauggaccuc

SEQ ID NO: 464493 - RNA, 19 nt, Artificial Sequence
  Description of Artificial Sequence: Synthetic oligonucleotide
caggguaacccggaugcag

SEQ ID NO: 464494 - RNA, 19 nt, Artificial Sequence
  Description of Artificial Sequence: Synthetic oligonucleotide
ugcacggcucacuaucuuu

SEQ ID NO: 464495 - RNA, 19 nt, Artificial Sequence
  Description of Artificial Sequence: Synthetic oligonucleotide
caaaaccucuuccgaggug

SEQ ID NO: 464496 - RNA, 19 nt, Artificial Sequence
  Description of Artificial Sequence: Synthetic oligonucleotide
guggugaaacugacguggg

SEQ ID NO: 464497 - RNA, 19 nt, Artificial Sequence
  Description of Artificial Sequence: Synthetic oligonucleotide
uaccauuucccaggguaac

SEQ ID NO: 464498 - RNA, 19 nt, Artificial Sequence
  Description of Artificial Sequence: Synthetic oligonucleotide
cuggcgugugugaaaugac

SEQ ID NO: 464499 - RNA, 19 nt, Artificial Sequence
  Description of Artificial Sequence: Synthetic oligonucleotide
gaaggcggcggcagaagug

SEQ ID NO: 464500 - RNA, 19 nt, Artificial Sequence
  Description of Artificial Sequence: Synthetic oligonucleotide
gucggcagaacuguucuca

SEQ ID NO: 464501 - RNA, 19 nt, Artificial Sequence
  Description of Artificial Sequence: Synthetic oligonucleotide
auagcuaaaggaagcucau

SEQ ID NO: 464502 - RNA, 19 nt, Artificial Sequence
  Description of Artificial Sequence: Synthetic oligonucleotide
uuguugcacgucagcuuga

SEQ ID NO: 464503 - RNA, 19 nt, Artificial Sequence
  Description of Artificial Sequence: Synthetic oligonucleotide
agucacaacaagguuuguu

SEQ ID NO: 464504 - RNA, 19 nt, Artificial Sequence
  Description of Artificial Sequence: Synthetic oligonucleotide
gacaggagcaaagaguuuu

SEQ ID NO: 464505 - RNA, 19 nt, Artificial Sequence
  Description of Artificial Sequence: Synthetic oligonucleotide
guuagugaggcaggcguca

SEQ ID NO: 464506 - RNA, 19 nt, Artificial Sequence
  Description of Artificial Sequence: Synthetic oligonucleotide
gcaaugcgccaacagcagg

SEQ ID NO: 464507 - RNA, 19 nt, Artificial Sequence
  Description of Artificial Sequence: Synthetic oligonucleotide
uuggugguaccgccuggcu

SEQ ID NO: 464508 - RNA, 19 nt, Artificial Sequence
  Description of Artificial Sequence: Synthetic oligonucleotide
gguaaucgcgcucccucag

SEQ ID NO: 464509 - RNA, 19 nt, Artificial Sequence
  Description of Artificial Sequence: Synthetic oligonucleotide
ggcacaguaguaaaucgca

SEQ ID NO: 464510 - RNA, 19 nt, Artificial Sequence
  Description of Artificial Sequence: Synthetic oligonucleotide
ugggaucggccuccagcag

SEQ ID NO: 464511 - RNA, 19 nt, Artificial Sequence
  Description of Artificial Sequence: Synthetic oligonucleotide
ggccgagacgaucucgggg

SEQ ID NO: 464512 - RNA, 19 nt, Artificial Sequence
  Description of Artificial Sequence: Synthetic oligonucleotide
agcgagcaugcugggaggg

SEQ ID NO: 464513 - RNA, 19 nt, Artificial Sequence
  Description of Artificial Sequence: Synthetic oligonucleotide
auguugaagugcacgggca

SEQ ID NO: 464514 - RNA, 19 nt, Artificial Sequence
  Description of Artificial Sequence: Synthetic oligonucleotide
uuuggucaccaggcgggcc

SEQ ID NO: 464515 - RNA, 19 nt, Artificial Sequence
  Description of Artificial Sequence: Synthetic oligonucleotide
acacccucggucuuucaua

SEQ ID NO: 464516 - RNA, 19 nt, Artificial Sequence
  Description of Artificial Sequence: Synthetic oligonucleotide
ggacacauccuccguggag

SEQ ID NO: 464517 - RNA, 19 nt, Artificial Sequence
  Description of Artificial Sequence: Synthetic oligonucleotide
guugcacgucagcuugaag

SEQ ID NO: 464518 - RNA, 19 nt, Artificial Sequence
  Description of Artificial Sequence: Synthetic oligonucleotide
guuggugguaccgccuggc

SEQ ID NO: 464519 - RNA, 19 nt, Artificial Sequence
  Description of Artificial Sequence: Synthetic oligonucleotide
gcgugugugaaaugacacc

SEQ ID NO: 464520 - RNA, 19 nt, Artificial Sequence
  Description of Artificial Sequence: Synthetic oligonucleotide
gcuuuagccucaccuauuc

SEQ ID NO: 464521 - RNA, 19 nt, Artificial Sequence
  Description of Artificial Sequence: Synthetic oligonucleotide
uucccguggugggugagug

SEQ ID NO: 464522 - RNA, 19 nt, Artificial Sequence
  Description of Artificial Sequence: Synthetic oligonucleotide
aagucggaggcggucuggu

SEQ ID NO: 464523 - RNA, 19 nt, Artificial Sequence
  Description of Artificial Sequence: Synthetic oligonucleotide
agggcgaggagacuccauu

SEQ ID NO: 464524 - RNA, 19 nt, Artificial Sequence
  Description of Artificial Sequence: Synthetic oligonucleotide
cacccgccucucauaaacc

SEQ ID NO: 464525 - RNA, 19 nt, Artificial Sequence
  Description of Artificial Sequence: Synthetic oligonucleotide
ccuccaucgcugcaggucc

SEQ ID NO: 464526 - RNA, 19 nt, Artificial Sequence
  Description of Artificial Sequence: Synthetic oligonucleotide
caaagucggaggcggucug

SEQ ID NO: 464527 - RNA, 19 nt, Artificial Sequence
  Description of Artificial Sequence: Synthetic oligonucleotide
aaugcgccaacagcagguu

SEQ ID NO: 464528 - RNA, 19 nt, Artificial Sequence
  Description of Artificial Sequence: Synthetic oligonucleotide
ucgcgcucccucaguuggg

SEQ ID NO: 464529 - RNA, 19 nt, Artificial Sequence
  Description of Artificial Sequence: Synthetic oligonucleotide
ucccguggugggugagugg

SEQ ID NO: 464530 - RNA, 19 nt, Artificial Sequence
  Description of Artificial Sequence: Synthetic oligonucleotide
aggccgagacgaucucggg

SEQ ID NO: 464531 - RNA, 19 nt, Artificial Sequence
  Description of Artificial Sequence: Synthetic oligonucleotide
ucccgugcuccuucaggug

SEQ ID NO: 464532 - RNA, 19 nt, Artificial Sequence
  Description of Artificial Sequence: Synthetic oligonucleotide
ggcggauucauaugaugga

SEQ ID NO: 464533 - RNA, 19 nt, Artificial Sequence
  Description of Artificial Sequence: Synthetic oligonucleotide
gggacuguaagagggcccc

SEQ ID NO: 464534 - RNA, 19 nt, Artificial Sequence
  Description of Artificial Sequence: Synthetic oligonucleotide
ugaugggaucggccuccag

SEQ ID NO: 464535 - RNA, 19 nt, Artificial Sequence
  Description of Artificial Sequence: Synthetic oligonucleotide
ggcgugugugaaaugacac

SEQ ID NO: 464536 - RNA, 19 nt, Artificial Sequence
  Description of Artificial Sequence: Synthetic oligonucleotide
gcugcgcaggaccacuggg

SEQ ID NO: 464537 - RNA, 19 nt, Artificial Sequence
  Description of Artificial Sequence: Synthetic oligonucleotide
ggcucugcgcgauggcugg

SEQ ID NO: 464538 - RNA, 19 nt, Artificial Sequence
  Description of Artificial Sequence: Synthetic oligonucleotide
ggcugcaaugcgccaacag

SEQ ID NO: 464539 - RNA, 19 nt, Artificial Sequence
  Description of Artificial Sequence: Synthetic oligonucleotide
agacgggcugcaguaggag

SEQ ID NO: 464540 - RNA, 19 nt, Artificial Sequence
  Description of Artificial Sequence: Synthetic oligonucleotide
caaugcgccaacagcaggu

SEQ ID NO: 464541 - RNA, 19 nt, Artificial Sequence
  Description of Artificial Sequence: Synthetic oligonucleotide
ggucuucgcauuuggucac

SEQ ID NO: 464542 - RNA, 19 nt, Artificial Sequence
  Description of Artificial Sequence: Synthetic oligonucleotide
ggcgcagugggaguggcag

SEQ ID NO: 464543 - RNA, 19 nt, Artificial Sequence
  Description of Artificial Sequence: Synthetic oligonucleotide
cacaaagucggaggcgguc

SEQ ID NO: 464544 - RNA, 19 nt, Artificial Sequence
  Description of Artificial Sequence: Synthetic oligonucleotide
uuagugaggcaggcgucaa

SEQ ID NO: 464545 - RNA, 19 nt, Artificial Sequence
  Description of Artificial Sequence: Synthetic oligonucleotide
aaaccucuuccgaggugca

SEQ ID NO: 464546 - RNA, 19 nt, Artificial Sequence
  Description of Artificial Sequence: Synthetic oligonucleotide
acacgcugagcuggggaag

SEQ ID NO: 464547 - RNA, 19 nt, Artificial Sequence
  Description of Artificial Sequence: Synthetic oligonucleotide
gagcccguggugaaacuga

SEQ ID NO: 464548 - RNA, 19 nt, Artificial Sequence
  Description of Artificial Sequence: Synthetic oligonucleotide
ugucggcagaacuguucuc

SEQ ID NO: 464549 - RNA, 19 nt, Artificial Sequence
  Description of Artificial Sequence: Synthetic oligonucleotide
guaccauuucccaggguaa

SEQ ID NO: 464550 - RNA, 19 nt, Artificial Sequence
  Description of Artificial Sequence: Synthetic oligonucleotide
gaccuuacaugaagcugca

SEQ ID NO: 464551 - RNA, 19 nt, Artificial Sequence
  Description of Artificial Sequence: Synthetic oligonucleotide
ggguuagugaggcaggcgu

SEQ ID NO: 464552 - RNA, 19 nt, Artificial Sequence
  Description of Artificial Sequence: Synthetic oligonucleotide
gcggauucauaugauggac

SEQ ID NO: 464553 - RNA, 19 nt, Artificial Sequence
  Description of Artificial Sequence: Synthetic oligonucleotide
gccggucuggaacucauca

SEQ ID NO: 464554 - RNA, 19 nt, Artificial Sequence
  Description of Artificial Sequence: Synthetic oligonucleotide
gcuggcgugugugaaauga

SEQ ID NO: 464555 - RNA, 19 nt, Artificial Sequence
  Description of Artificial Sequence: Synthetic oligonucleotide
cagcuuggcauaggugccc

SEQ ID NO: 464556 - RNA, 19 nt, Artificial Sequence
  Description of Artificial Sequence: Synthetic oligonucleotide
agcgaccaguuauucucau

SEQ ID NO: 464557 - RNA, 19 nt, Artificial Sequence
  Description of Artificial Sequence: Synthetic oligonucleotide
aacugacgugggccccucu

SEQ ID NO: 464558 - RNA, 19 nt, Artificial Sequence
  Description of Artificial Sequence: Synthetic oligonucleotide
auccaguuguucagagugu

SEQ ID NO: 464559 - RNA, 19 nt, Artificial Sequence
  Description of Artificial Sequence: Synthetic oligonucleotide
cccgcacaaagucggaggc

SEQ ID NO: 464560 - RNA, 19 nt, Artificial Sequence
  Description of Artificial Sequence: Synthetic oligonucleotide
uggcuuaggggaggccuug

SEQ ID NO: 464561 - RNA, 19 nt, Artificial Sequence
  Description of Artificial Sequence: Synthetic oligonucleotide
gagcgaccaguuauucuca

SEQ ID NO: 464562 - RNA, 19 nt, Artificial Sequence
  Description of Artificial Sequence: Synthetic oligonucleotide
gucccgcacaaagucggag

SEQ ID NO: 464563 - RNA, 19 nt, Artificial Sequence
  Description of Artificial Sequence: Synthetic oligonucleotide
cagcacccgcuuuagccuc

SEQ ID NO: 464564 - RNA, 19 nt, Artificial Sequence
  Description of Artificial Sequence: Synthetic oligonucleotide
cccauagcaggcacugcag

SEQ ID NO: 464565 - RNA, 19 nt, Artificial Sequence
  Description of Artificial Sequence: Synthetic oligonucleotide
gcuaaaggaagcucaucgu

SEQ ID NO: 464566 - RNA, 19 nt, Artificial Sequence
  Description of Artificial Sequence: Synthetic oligonucleotide
ggaggccgagacgaucucg

SEQ ID NO: 464567 - RNA, 19 nt, Artificial Sequence
  Description of Artificial Sequence: Synthetic oligonucleotide
gucgauccaguuguucaga

SEQ ID NO: 464568 - RNA, 19 nt, Artificial Sequence
  Description of Artificial Sequence: Synthetic oligonucleotide
cuguucucaggaccuuaca

SEQ ID NO: 464569 - RNA, 19 nt, Artificial Sequence
  Description of Artificial Sequence: Synthetic oligonucleotide
cacagacgggcugcaguag

SEQ ID NO: 464570 - RNA, 19 nt, Artificial Sequence
  Description of Artificial Sequence: Synthetic oligonucleotide
caggaccuuacaugaagcu

SEQ ID NO: 464571 - RNA, 19 nt, Artificial Sequence
  Description of Artificial Sequence: Synthetic oligonucleotide
ggcgaacaaaaguggccac

SEQ ID NO: 464572 - RNA, 19 nt, Artificial Sequence
  Description of Artificial Sequence: Synthetic oligonucleotide
uggagcccguggugaaacu

SEQ ID NO: 464573 - RNA, 19 nt, Artificial Sequence
  Description of Artificial Sequence: Synthetic oligonucleotide
cucaguugggcccgcaccu

SEQ ID NO: 464574 - RNA, 19 nt, Artificial Sequence
  Description of Artificial Sequence: Synthetic oligonucleotide
aggcggucuggugcggcac

SEQ ID NO: 464575 - RNA, 19 nt, Artificial Sequence
  Description of Artificial Sequence: Synthetic oligonucleotide
cagacgggcugcaguagga

SEQ ID NO: 464576 - RNA, 19 nt, Artificial Sequence
  Description of Artificial Sequence: Synthetic oligonucleotide
cagcgacugcguguagagg

SEQ ID NO: 464577 - RNA, 19 nt, Artificial Sequence
  Description of Artificial Sequence: Synthetic oligonucleotide
ccggaugcaggcaaggaaa

SEQ ID NO: 464578 - RNA, 19 nt, Artificial Sequence
  Description of Artificial Sequence: Synthetic oligonucleotide
ccgccuucgguccaccgcc

SEQ ID NO: 464579 - RNA, 19 nt, Artificial Sequence
  Description of Artificial Sequence: Synthetic oligonucleotide
caaguuggugguaccgccu

SEQ ID NO: 464580 - RNA, 19 nt, Artificial Sequence
  Description of Artificial Sequence: Synthetic oligonucleotide
uugaugggaucggccucca

SEQ ID NO: 464581 - RNA, 19 nt, Artificial Sequence
  Description of Artificial Sequence: Synthetic oligonucleotide
ggacacgcugagcugggga

SEQ ID NO: 464582 - RNA, 19 nt, Artificial Sequence
  Description of Artificial Sequence: Synthetic oligonucleotide
gggguagguccucccgccg

SEQ ID NO: 464583 - RNA, 19 nt, Artificial Sequence
  Description of Artificial Sequence: Synthetic oligonucleotide
gucuucgcauuuggucacc

SEQ ID NO: 464584 - RNA, 19 nt, Artificial Sequence
  Description of Artificial Sequence: Synthetic oligonucleotide
ggagcccguggugaaacug

SEQ ID NO: 464585 - RNA, 19 nt, Artificial Sequence
  Description of Artificial Sequence: Synthetic oligonucleotide
ccgguaaucgcgcucccuc

SEQ ID NO: 464586 - RNA, 19 nt, Artificial Sequence
  Description of Artificial Sequence: Synthetic oligonucleotide
gaaacugacgugggccccu

SEQ ID NO: 464587 - RNA, 19 nt, Artificial Sequence
  Description of Artificial Sequence: Synthetic oligonucleotide
agguccucccgccgguaau

SEQ ID NO: 464588 - RNA, 19 nt, Artificial Sequence
  Description of Artificial Sequence: Synthetic oligonucleotide
ucgaauggguugggcuggu

SEQ ID NO: 464589 - RNA, 19 nt, Artificial Sequence
  Description of Artificial Sequence: Synthetic oligonucleotide
gguuagugaggcaggcguc

SEQ ID NO: 464590 - RNA, 19 nt, Artificial Sequence
  Description of Artificial Sequence: Synthetic oligonucleotide
guaaucgcgcucccucagu

SEQ ID NO: 464591 - RNA, 19 nt, Artificial Sequence
  Description of Artificial Sequence: Synthetic oligonucleotide
caccgccuucucugcaaac

SEQ ID NO: 464592 - RNA, 19 nt, Artificial Sequence
  Description of Artificial Sequence: Synthetic oligonucleotide
ccgccucucauaaaccuca

SEQ ID NO: 464593 - RNA, 19 nt, Artificial Sequence
  Description of Artificial Sequence: Synthetic oligonucleotide
cgcaccucgaauggguugg

SEQ ID NO: 464594 - RNA, 19 nt, Artificial Sequence
  Description of Artificial Sequence: Synthetic oligonucleotide
cccguggugaaacugacgu

SEQ ID NO: 464595 - RNA, 19 nt, Artificial Sequence
  Description of Artificial Sequence: Synthetic oligonucleotide
ggugggcgcagugggagug

SEQ ID NO: 464596 - RNA, 19 nt, Artificial Sequence
  Description of Artificial Sequence: Synthetic oligonucleotide
gcgaacaaaaguggccaca

SEQ ID NO: 464597 - RNA, 19 nt, Artificial Sequence
  Description of Artificial Sequence: Synthetic oligonucleotide
gggcaccgggauguggugg

SEQ ID NO: 464598 - RNA, 19 nt, Artificial Sequence
  Description of Artificial Sequence: Synthetic oligonucleotide
agaccggggcucccacaga

SEQ ID NO: 464599 - RNA, 19 nt, Artificial Sequence
  Description of Artificial Sequence: Synthetic oligonucleotide
aagggcgaggagacuccau

SEQ ID NO: 464600 - RNA, 19 nt, Artificial Sequence
  Description of Artificial Sequence: Synthetic oligonucleotide
gguggcuuaggggaggccu

SEQ ID NO: 464601 - RNA, 19 nt, Artificial Sequence
  Description of Artificial Sequence: Synthetic oligonucleotide
acgguacugggaggccgag

SEQ ID NO: 464602 - RNA, 19 nt, Artificial Sequence
  Description of Artificial Sequence: Synthetic oligonucleotide
ggcgaggagacuccauugu

SEQ ID NO: 464603 - RNA, 19 nt, Artificial Sequence
  Description of Artificial Sequence: Synthetic oligonucleotide
ggggcucccacagaguuua

SEQ ID NO: 464604 - RNA, 19 nt, Artificial Sequence
  Description of Artificial Sequence: Synthetic oligonucleotide
gcacauuguccuugcugga

SEQ ID NO: 464605 - RNA, 19 nt, Artificial Sequence
  Description of Artificial Sequence: Synthetic oligonucleotide
cacccucggucuuucauau

SEQ ID NO: 464606 - RNA, 19 nt, Artificial Sequence
  Description of Artificial Sequence: Synthetic oligonucleotide
gugcacgggcacagacggg

SEQ ID NO: 464607 - RNA, 19 nt, Artificial Sequence
  Description of Artificial Sequence: Synthetic oligonucleotide
ccgguggaugaucccgugc

SEQ ID NO: 464608 - RNA, 19 nt, Artificial Sequence
  Description of Artificial Sequence: Synthetic oligonucleotide
gcacacccgccucucauaa

SEQ ID NO: 464609 - RNA, 19 nt, Artificial Sequence
  Description of Artificial Sequence: Synthetic oligonucleotide
aggcugcacggcucacuau

SEQ ID NO: 464610 - RNA, 19 nt, Artificial Sequence
  Description of Artificial Sequence: Synthetic oligonucleotide
acaccccgccuucggucca

SEQ ID NO: 464611 - RNA, 19 nt, Artificial Sequence
  Description of Artificial Sequence: Synthetic oligonucleotide
ccgagucacaacaagguuu

SEQ ID NO: 464612 - RNA, 19 nt, Artificial Sequence
  Description of Artificial Sequence: Synthetic oligonucleotide
ggcggucuggugcggcacc

SEQ ID NO: 464613 - RNA, 19 nt, Artificial Sequence
  Description of Artificial Sequence: Synthetic oligonucleotide
guagagggacagugugggu

SEQ ID NO: 464614 - RNA, 19 nt, Artificial Sequence
  Description of Artificial Sequence: Synthetic oligonucleotide
guugggcccgcaccucgaa

SEQ ID NO: 464615 - RNA, 19 nt, Artificial Sequence
  Description of Artificial Sequence: Synthetic oligonucleotide
agucccgcacaaagucgga

SEQ ID NO: 464616 - RNA, 19 nt, Artificial Sequence
  Description of Artificial Sequence: Synthetic oligonucleotide
gacuccauuguggguuagu

SEQ ID NO: 464617 - RNA, 19 nt, Artificial Sequence
  Description of Artificial Sequence: Synthetic oligonucleotide
ccacaccccgccuucgguc

SEQ ID NO: 464618 - RNA, 19 nt, Artificial Sequence
  Description of Artificial Sequence: Synthetic oligonucleotide
cuucgguccaccgccuucu

SEQ ID NO: 464619 - RNA, 19 nt, Artificial Sequence
  Description of Artificial Sequence: Synthetic oligonucleotide
ccgccgguaaucgcgcucc

SEQ ID NO: 464620 - RNA, 19 nt, Artificial Sequence
  Description of Artificial Sequence: Synthetic oligonucleotide
gccguucugcccugggaga

SEQ ID NO: 464621 - RNA, 19 nt, Artificial Sequence
  Description of Artificial Sequence: Synthetic oligonucleotide
ggcggcagaagugccugac

SEQ ID NO: 464622 - RNA, 19 nt, Artificial Sequence
  Description of Artificial Sequence: Synthetic oligonucleotide
acgucagcuugaagagcga

SEQ ID NO: 464623 - RNA, 19 nt, Artificial Sequence
  Description of Artificial Sequence: Synthetic oligonucleotide
accccgccuucgguccacc

SEQ ID NO: 464624 - RNA, 19 nt, Artificial Sequence
  Description of Artificial Sequence: Synthetic oligonucleotide
gugcggcaccucccgggug

SEQ ID NO: 464625 - RNA, 19 nt, Artificial Sequence
  Description of Artificial Sequence: Synthetic oligonucleotide
ccgccuggcuucugcuugg

SEQ ID NO: 464626 - RNA, 19 nt, Artificial Sequence
  Description of Artificial Sequence: Synthetic oligonucleotide
gcggcggcagaagugccug

SEQ ID NO: 464627 - RNA, 19 nt, Artificial Sequence
  Description of Artificial Sequence: Synthetic oligonucleotide
cacccgcuuuagccucacc

SEQ ID NO: 464628 - RNA, 19 nt, Artificial Sequence
  Description of Artificial Sequence: Synthetic oligonucleotide
agcacccgcuuuagccuca

SEQ ID NO: 464629 - RNA, 19 nt, Artificial Sequence
  Description of Artificial Sequence: Synthetic oligonucleotide
ccccgagucacaacaaggu

SEQ ID NO: 464630 - RNA, 19 nt, Artificial Sequence
  Description of Artificial Sequence: Synthetic oligonucleotide
acccucggucuuucauauu

SEQ ID NO: 464631 - RNA, 19 nt, Artificial Sequence
  Description of Artificial Sequence: Synthetic oligonucleotide
cugggagaccggggcuccc

SEQ ID NO: 464632 - RNA, 19 nt, Artificial Sequence
  Description of Artificial Sequence: Synthetic oligonucleotide
caccuauucggaugcgcuu

SEQ ID NO: 464633 - RNA, 19 nt, Artificial Sequence
  Description of Artificial Sequence: Synthetic oligonucleotide
ggcuggcgugugugaaaug

SEQ ID NO: 464634 - RNA, 19 nt, Artificial Sequence
  Description of Artificial Sequence: Synthetic oligonucleotide
cccgcuuuagccucaccua

SEQ ID NO: 464635 - RNA, 19 nt, Artificial Sequence
  Description of Artificial Sequence: Synthetic oligonucleotide
gcgagcaugcugggagggc

SEQ ID NO: 464636 - RNA, 19 nt, Artificial Sequence
  Description of Artificial Sequence: Synthetic oligonucleotide
gcgcucccucaguugggcc

SEQ ID NO: 464637 - RNA, 19 nt, Artificial Sequence
  Description of Artificial Sequence: Synthetic oligonucleotide
ggggcuggcgugugugaaa

SEQ ID NO: 464638 - RNA, 19 nt, Artificial Sequence
  Description of Artificial Sequence: Synthetic oligonucleotide
ccucaccuauucggaugcg

SEQ ID NO: 464639 - RNA, 19 nt, Artificial Sequence
  Description of Artificial Sequence: Synthetic oligonucleotide
guguuacacaaaaccucuu

SEQ ID NO: 464640 - RNA, 19 nt, Artificial Sequence
  Description of Artificial Sequence: Synthetic oligonucleotide
ccggucuggaacucaucaa

SEQ ID NO: 464641 - RNA, 19 nt, Artificial Sequence
  Description of Artificial Sequence: Synthetic oligonucleotide
gggaggccgagacgaucuc

SEQ ID NO: 464642 - RNA, 19 nt, Artificial Sequence
  Description of Artificial Sequence: Synthetic oligonucleotide
cgcgauggcuggcaguuga

SEQ ID NO: 464643 - RNA, 19 nt, Artificial Sequence
  Description of Artificial Sequence: Synthetic oligonucleotide
ccguggagccugauggaaa

SEQ ID NO: 464644 - RNA, 19 nt, Artificial Sequence
  Description of Artificial Sequence: Synthetic oligonucleotide
ggugcggcaccucccgggu

SEQ ID NO: 464645 - RNA, 19 nt, Artificial Sequence
  Description of Artificial Sequence: Synthetic oligonucleotide
ggcucgcuucaugucgauc

SEQ ID NO: 464646 - RNA, 19 nt, Artificial Sequence
  Description of Artificial Sequence: Synthetic oligonucleotide
ggcuuacguucaggcuuag

SEQ ID NO: 464647 - RNA, 19 nt, Artificial Sequence
  Description of Artificial Sequence: Synthetic oligonucleotide
ggcguggcugaggggcacc

SEQ ID NO: 464648 - RNA, 19 nt, Artificial Sequence
  Description of Artificial Sequence: Synthetic oligonucleotide
cuccaucgcugcagguccu

SEQ ID NO: 464649 - RNA, 19 nt, Artificial Sequence
  Description of Artificial Sequence: Synthetic oligonucleotide
ggacuguaagagggcccca

SEQ ID NO: 464650 - RNA, 19 nt, Artificial Sequence
  Description of Artificial Sequence: Synthetic oligonucleotide
cgguaaucgcgcucccuca

SEQ ID NO: 464651 - RNA, 19 nt, Artificial Sequence
  Description of Artificial Sequence: Synthetic oligonucleotide
caccccgccuucgguccac

SEQ ID NO: 464652 - RNA, 19 nt, Artificial Sequence
  Description of Artificial Sequence: Synthetic oligonucleotide
caucguggacacagacauu

SEQ ID NO: 464653 - RNA, 19 nt, Artificial Sequence
  Description of Artificial Sequence: Synthetic oligonucleotide
cccgccgguaaucgcgcuc

SEQ ID NO: 464654 - RNA, 19 nt, Artificial Sequence
  Description of Artificial Sequence: Synthetic oligonucleotide
guagguccucccgccggua

SEQ ID NO: 464655 - RNA, 19 nt, Artificial Sequence
  Description of Artificial Sequence: Synthetic oligonucleotide
cugcgcgauggcuggcagu

SEQ ID NO: 464656 - RNA, 19 nt, Artificial Sequence
  Description of Artificial Sequence: Synthetic oligonucleotide
guggcuuaggggaggccuu

SEQ ID NO: 464657 - RNA, 19 nt, Artificial Sequence
  Description of Artificial Sequence: Synthetic oligonucleotide
ccccgccuucgguccaccg

SEQ ID NO: 464658 - RNA, 19 nt, Artificial Sequence
  Description of Artificial Sequence: Synthetic oligonucleotide
ggcguggaaggcggcggca

SEQ ID NO: 464659 - RNA, 19 nt, Artificial Sequence
  Description of Artificial Sequence: Synthetic oligonucleotide
cgcgcucccucaguugggc

SEQ ID NO: 464660 - RNA, 19 nt, Artificial Sequence
  Description of Artificial Sequence: Synthetic oligonucleotide
cuauucggaugcgcuugau

SEQ ID NO: 464661 - RNA, 19 nt, Artificial Sequence
  Description of Artificial Sequence: Synthetic oligonucleotide
gcaggcgucaaagcuucau

SEQ ID NO: 464662 - RNA, 19 nt, Artificial Sequence
  Description of Artificial Sequence: Synthetic oligonucleotide
gggcuggcgugugugaaau

SEQ ID NO: 464663 - RNA, 19 nt, Artificial Sequence
  Description of Artificial Sequence: Synthetic oligonucleotide
cccgagucacaacaagguu

SEQ ID NO: 464664 - RNA, 19 nt, Artificial Sequence
  Description of Artificial Sequence: Synthetic oligonucleotide
ccaccgccuucucugcaaa

SEQ ID NO: 464665 - RNA, 19 nt, Artificial Sequence
  Description of Artificial Sequence: Synthetic oligonucleotide
gcacccgcuuuagccucac

SEQ ID NO: 464666 - RNA, 19 nt, Artificial Sequence
  Description of Artificial Sequence: Synthetic oligonucleotide
gugggugagugggcggauu

SEQ ID NO: 464667 - RNA, 19 nt, Artificial Sequence
  Description of Artificial Sequence: Synthetic oligonucleotide
gcgcgauggcuggcaguug

SEQ ID NO: 464668 - RNA, 19 nt, Artificial Sequence
  Description of Artificial Sequence: Synthetic oligonucleotide
ccguggagcccguggugaa

SEQ ID NO: 464669 - RNA, 19 nt, Artificial Sequence
  Description of Artificial Sequence: Synthetic oligonucleotide
cgccgguaaucgcgcuccc

SEQ ID NO: 464670 - RNA, 19 nt, Artificial Sequence
  Description of Artificial Sequence: Synthetic oligonucleotide
gccgguaaucgcgcucccu

SEQ ID NO: 464671 - RNA, 19 nt, Artificial Sequence
  Description of Artificial Sequence: Synthetic oligonucleotide
gccuucgguccaccgccuu

SEQ ID NO: 464672 - RNA, 19 nt, Artificial Sequence
  Description of Artificial Sequence: Synthetic oligonucleotide
cggcaccucccgggugaug

SEQ ID NO: 464673 - RNA, 19 nt, Artificial Sequence
  Description of Artificial Sequence: Synthetic oligonucleotide
cgccuucgguccaccgccu

SEQ ID NO: 464674 - RNA, 19 nt, Artificial Sequence
  Description of Artificial Sequence: Synthetic oligonucleotide
gaaguuauggcuuugacug

SEQ ID NO: 464675 - RNA, 19 nt, Artificial Sequence
  Description of Artificial Sequence: Synthetic oligonucleotide
aaccugauaucacaaaugc

SEQ ID NO: 464676 - RNA, 19 nt, Artificial Sequence
  Description of Artificial Sequence: Synthetic oligonucleotide
aaguaaauggugcuuauug

SEQ ID NO: 464677 - RNA, 19 nt, Artificial Sequence
  Description of Artificial Sequence: Synthetic oligonucleotide
caaaguauagaugagagag

SEQ ID NO: 464678 - RNA, 19 nt, Artificial Sequence
  Description of Artificial Sequence: Synthetic oligonucleotide
auauguucauuacagugcc

SEQ ID NO: 464679 - RNA, 19 nt, Artificial Sequence
  Description of Artificial Sequence: Synthetic oligonucleotide
aaauaauggguccagguga

SEQ ID NO: 464680 - RNA, 19 nt, Artificial Sequence
  Description of Artificial Sequence: Synthetic oligonucleotide
aaagaagcgaucaccaggc

SEQ ID NO: 464681 - RNA, 19 nt, Artificial Sequence
  Description of Artificial Sequence: Synthetic oligonucleotide
aguaaauggugcuuauugc

SEQ ID NO: 464682 - RNA, 19 nt, Artificial Sequence
  Description of Artificial Sequence: Synthetic oligonucleotide
uggaucauuaaccugauau

SEQ ID NO: 464683 - RNA, 19 nt, Artificial Sequence
  Description of Artificial Sequence: Synthetic oligonucleotide
gaguuaguaagcuuugggg

SEQ ID NO: 464684 - RNA, 19 nt, Artificial Sequence
  Description of Artificial Sequence: Synthetic oligonucleotide
cucgccauaacuuuggacc

SEQ ID NO: 464685 - RNA, 19 nt, Artificial Sequence
  Description of Artificial Sequence: Synthetic oligonucleotide
agugcugugccaaagaggc

SEQ ID NO: 464686 - RNA, 19 nt, Artificial Sequence
  Description of Artificial Sequence: Synthetic oligonucleotide
uuacacaagacucagccac

SEQ ID NO: 464687 - RNA, 19 nt, Artificial Sequence
  Description of Artificial Sequence: Synthetic oligonucleotide
acauauguucauuacagug

SEQ ID NO: 464688 - RNA, 19 nt, Artificial Sequence
  Description of Artificial Sequence: Synthetic oligonucleotide
uaugucaccuggaaagugg

SEQ ID NO: 464689 - RNA, 19 nt, Artificial Sequence
  Description of Artificial Sequence: Synthetic oligonucleotide
gauacaguuaaggaguuag

SEQ ID NO: 464690 - RNA, 19 nt, Artificial Sequence
  Description of Artificial Sequence: Synthetic oligonucleotide
uaaggauauguacuugagg

SEQ ID NO: 464691 - RNA, 19 nt, Artificial Sequence
  Description of Artificial Sequence: Synthetic oligonucleotide
uucaacaugagcacggaga

SEQ ID NO: 464692 - RNA, 19 nt, Artificial Sequence
  Description of Artificial Sequence: Synthetic oligonucleotide
ugggauacaguuaaggagu

SEQ ID NO: 464693 - RNA, 19 nt, Artificial Sequence
  Description of Artificial Sequence: Synthetic oligonucleotide
aguauaccccugcaaagcc

SEQ ID NO: 464694 - RNA, 19 nt, Artificial Sequence
  Description of Artificial Sequence: Synthetic oligonucleotide
acaaaugcccgacauauug

SEQ ID NO: 464695 - RNA, 19 nt, Artificial Sequence
  Description of Artificial Sequence: Synthetic oligonucleotide
caguuaaggaguuaguaag

SEQ ID NO: 464696 - RNA, 19 nt, Artificial Sequence
  Description of Artificial Sequence: Synthetic oligonucleotide
ccugauaucacaaaugccc

SEQ ID NO: 464697 - RNA, 19 nt, Artificial Sequence
  Description of Artificial Sequence: Synthetic oligonucleotide
uguacgagcauaucggaug

SEQ ID NO: 464698 - RNA, 19 nt, Artificial Sequence
  Description of Artificial Sequence: Synthetic oligonucleotide
agauccgccaaccccaacc

SEQ ID NO: 464699 - RNA, 19 nt, Artificial Sequence
  Description of Artificial Sequence: Synthetic oligonucleotide
aguuaguaagcuuugggga

SEQ ID NO: 464700 - RNA, 19 nt, Artificial Sequence
  Description of Artificial Sequence: Synthetic oligonucleotide
uacacacacauacacacac

SEQ ID NO: 464701 - RNA, 19 nt, Artificial Sequence
  Description of Artificial Sequence: Synthetic oligonucleotide
aauucugacaccgccauga

SEQ ID NO: 464702 - RNA, 19 nt, Artificial Sequence
  Description of Artificial Sequence: Synthetic oligonucleotide
uaaggaguuaguaagcuuu

SEQ ID NO: 464703 - RNA, 19 nt, Artificial Sequence
  Description of Artificial Sequence: Synthetic oligonucleotide
uuugacugcacuucgggga

SEQ ID NO: 464704 - RNA, 19 nt, Artificial Sequence
  Description of Artificial Sequence: Synthetic oligonucleotide
agggaaacugccccaaagc

SEQ ID NO: 464705 - RNA, 19 nt, Artificial Sequence
  Description of Artificial Sequence: Synthetic oligonucleotide
acuuacaacaggccgaucu

SEQ ID NO: 464706 - RNA, 19 nt, Artificial Sequence
  Description of Artificial Sequence: Synthetic oligonucleotide
aauggaaccccacgaguag

SEQ ID NO: 464707 - RNA, 19 nt, Artificial Sequence
  Description of Artificial Sequence: Synthetic oligonucleotide
guuaguaagcuuuggggag

SEQ ID NO: 464708 - RNA, 19 nt, Artificial Sequence
  Description of Artificial Sequence: Synthetic oligonucleotide
aguguguccacauauugca

SEQ ID NO: 464709 - RNA, 19 nt, Artificial Sequence
  Description of Artificial Sequence: Synthetic oligonucleotide
acgaguaguucauuagucg

SEQ ID NO: 464710 - RNA, 19 nt, Artificial Sequence
  Description of Artificial Sequence: Synthetic oligonucleotide
cugggauacaguuaaggag

SEQ ID NO: 464711 - RNA, 19 nt, Artificial Sequence
  Description of Artificial Sequence: Synthetic oligonucleotide
cugauaucacaaaugcccg

SEQ ID NO: 464712 - RNA, 19 nt, Artificial Sequence
  Description of Artificial Sequence: Synthetic oligonucleotide
uguauccaaagaagaagcc

SEQ ID NO: 464713 - RNA, 19 nt, Artificial Sequence
  Description of Artificial Sequence: Synthetic oligonucleotide
uagucguuacugaagaacu

SEQ ID NO: 464714 - RNA, 19 nt, Artificial Sequence
  Description of Artificial Sequence: Synthetic oligonucleotide
aacccaaccucugcaaacc

SEQ ID NO: 464715 - RNA, 19 nt, Artificial Sequence
  Description of Artificial Sequence: Synthetic oligonucleotide
guaaggguguuuuaaaaca

SEQ ID NO: 464716 - RNA, 19 nt, Artificial Sequence
  Description of Artificial Sequence: Synthetic oligonucleotide
augucucagaagauaaucc

SEQ ID NO: 464717 - RNA, 19 nt, Artificial Sequence
  Description of Artificial Sequence: Synthetic oligonucleotide
aacagaccaaauuaaucaa

SEQ ID NO: 464718 - RNA, 19 nt, Artificial Sequence
  Description of Artificial Sequence: Synthetic oligonucleotide
agaaguuauggcuuugacu

SEQ ID NO: 464719 - RNA, 19 nt, Artificial Sequence
  Description of Artificial Sequence: Synthetic oligonucleotide
caguguacgagcauaucgg

SEQ ID NO: 464720 - RNA, 19 nt, Artificial Sequence
  Description of Artificial Sequence: Synthetic oligonucleotide
auacaucaucuuuauuugg

SEQ ID NO: 464721 - RNA, 19 nt, Artificial Sequence
  Description of Artificial Sequence: Synthetic oligonucleotide
aagagguuagccuggggca

SEQ ID NO: 464722 - RNA, 19 nt, Artificial Sequence
  Description of Artificial Sequence: Synthetic oligonucleotide
acauauugcaccaggacag

SEQ ID NO: 464723 - RNA, 19 nt, Artificial Sequence
  Description of Artificial Sequence: Synthetic oligonucleotide
uaucggaugcuaaggauga

SEQ ID NO: 464724 - RNA, 19 nt, Artificial Sequence
  Description of Artificial Sequence: Synthetic oligonucleotide
aguuaaggaguuaguaagc

SEQ ID NO: 464725 - RNA, 19 nt, Artificial Sequence
  Description of Artificial Sequence: Synthetic oligonucleotide
guagacggcaccaaugacg

SEQ ID NO: 464726 - RNA, 19 nt, Artificial Sequence
  Description of Artificial Sequence: Synthetic oligonucleotide
uuggcauuggguauccuga

SEQ ID NO: 464727 - RNA, 19 nt, Artificial Sequence
  Description of Artificial Sequence: Synthetic oligonucleotide
uuagucguuacugaagaac

SEQ ID NO: 464728 - RNA, 19 nt, Artificial Sequence
  Description of Artificial Sequence: Synthetic oligonucleotide
uggguauccugacauaugu

SEQ ID NO: 464729 - RNA, 19 nt, Artificial Sequence
  Description of Artificial Sequence: Synthetic oligonucleotide
uaucccucuagaagugugg

SEQ ID NO: 464730 - RNA, 19 nt, Artificial Sequence
  Description of Artificial Sequence: Synthetic oligonucleotide
acacaauaggaaauggaac

SEQ ID NO: 464731 - RNA, 19 nt, Artificial Sequence
  Description of Artificial Sequence: Synthetic oligonucleotide
uagacggcaccaaugacga

SEQ ID NO: 464732 - RNA, 19 nt, Artificial Sequence
  Description of Artificial Sequence: Synthetic oligonucleotide
aaaggggaguccaugugac

SEQ ID NO: 464733 - RNA, 19 nt, Artificial Sequence
  Description of Artificial Sequence: Synthetic oligonucleotide
gauucugaucuaguggccg

SEQ ID NO: 464734 - RNA, 19 nt, Artificial Sequence
  Description of Artificial Sequence: Synthetic oligonucleotide
ucccaaagagguuagccug

SEQ ID NO: 464735 - RNA, 19 nt, Artificial Sequence
  Description of Artificial Sequence: Synthetic oligonucleotide
caucaauucugacaccgcc

SEQ ID NO: 464736 - RNA, 19 nt, Artificial Sequence
  Description of Artificial Sequence: Synthetic oligonucleotide
agaagcgaucaccaggcag

SEQ ID NO: 464737 - RNA, 19 nt, Artificial Sequence
  Description of Artificial Sequence: Synthetic oligonucleotide
uucaaggguaucuguacca

SEQ ID NO: 464738 - RNA, 19 nt, Artificial Sequence
  Description of Artificial Sequence: Synthetic oligonucleotide
uacuugacuacaacagcca

SEQ ID NO: 464739 - RNA, 19 nt, Artificial Sequence
  Description of Artificial Sequence: Synthetic oligonucleotide
ugagagagggcaccgcgag

SEQ ID NO: 464740 - RNA, 19 nt, Artificial Sequence
  Description of Artificial Sequence: Synthetic oligonucleotide
cucuggaucauuaaccuga

SEQ ID NO: 464741 - RNA, 19 nt, Artificial Sequence
  Description of Artificial Sequence: Synthetic oligonucleotide
gaugucucagaagauaauc

SEQ ID NO: 464742 - RNA, 19 nt, Artificial Sequence
  Description of Artificial Sequence: Synthetic oligonucleotide
gaauagugguaccccaacc

SEQ ID NO: 464743 - RNA, 19 nt, Artificial Sequence
  Description of Artificial Sequence: Synthetic oligonucleotide
gaucuaguggccgugggcc

SEQ ID NO: 464744 - RNA, 19 nt, Artificial Sequence
  Description of Artificial Sequence: Synthetic oligonucleotide
gacaccgccaugaaguaag

SEQ ID NO: 464745 - RNA, 19 nt, Artificial Sequence
  Description of Artificial Sequence: Synthetic oligonucleotide
gggauucugaucuaguggc

SEQ ID NO: 464746 - RNA, 19 nt, Artificial Sequence
  Description of Artificial Sequence: Synthetic oligonucleotide
gcaguguacgagcauaucg

SEQ ID NO: 464747 - RNA, 19 nt, Artificial Sequence
  Description of Artificial Sequence: Synthetic oligonucleotide
cuuugacugcacuucgggg

SEQ ID NO: 464748 - RNA, 19 nt, Artificial Sequence
  Description of Artificial Sequence: Synthetic oligonucleotide
uaucacaaaugcccgacau

SEQ ID NO: 464749 - RNA, 19 nt, Artificial Sequence
  Description of Artificial Sequence: Synthetic oligonucleotide
aaccaggugcuucacauua

SEQ ID NO: 464750 - RNA, 19 nt, Artificial Sequence
  Description of Artificial Sequence: Synthetic oligonucleotide
uucccaaagagguuagccu

SEQ ID NO: 464751 - RNA, 19 nt, Artificial Sequence
  Description of Artificial Sequence: Synthetic oligonucleotide
agcauaucggaugcuaagg

SEQ ID NO: 464752 - RNA, 19 nt, Artificial Sequence
  Description of Artificial Sequence: Synthetic oligonucleotide
ggaguuaguaagcuuuggg

SEQ ID NO: 464753 - RNA, 19 nt, Artificial Sequence
  Description of Artificial Sequence: Synthetic oligonucleotide
cacacacauacacacacac

SEQ ID NO: 464754 - RNA, 19 nt, Artificial Sequence
  Description of Artificial Sequence: Synthetic oligonucleotide
auaauccuucaucucuguc

SEQ ID NO: 464755 - RNA, 19 nt, Artificial Sequence
  Description of Artificial Sequence: Synthetic oligonucleotide
agguuacgcagccacacag

SEQ ID NO: 464756 - RNA, 19 nt, Artificial Sequence
  Description of Artificial Sequence: Synthetic oligonucleotide
ucggaugcuaaggaugagg

SEQ ID NO: 464757 - RNA, 19 nt, Artificial Sequence
  Description of Artificial Sequence: Synthetic oligonucleotide
gagcauaucggaugcuaag

SEQ ID NO: 464758 - RNA, 19 nt, Artificial Sequence
  Description of Artificial Sequence: Synthetic oligonucleotide
cacacaauaggaaauggaa

SEQ ID NO: 464759 - RNA, 19 nt, Artificial Sequence
  Description of Artificial Sequence: Synthetic oligonucleotide
gacggcaccaaugacgagc

SEQ ID NO: 464760 - RNA, 19 nt, Artificial Sequence
  Description of Artificial Sequence: Synthetic oligonucleotide
cugcgguucaacaugagca

SEQ ID NO: 464761 - RNA, 19 nt, Artificial Sequence
  Description of Artificial Sequence: Synthetic oligonucleotide
cauaacuuuggaccugcag

SEQ ID NO: 464762 - RNA, 19 nt, Artificial Sequence
  Description of Artificial Sequence: Synthetic oligonucleotide
auaucggaugcuaaggaug

SEQ ID NO: 464763 - RNA, 19 nt, Artificial Sequence
  Description of Artificial Sequence: Synthetic oligonucleotide
cucguggaggaagagaacc

SEQ ID NO: 464764 - RNA, 19 nt, Artificial Sequence
  Description of Artificial Sequence: Synthetic oligonucleotide
cacauauugcaccaggaca

SEQ ID NO: 464765 - RNA, 19 nt, Artificial Sequence
  Description of Artificial Sequence: Synthetic oligonucleotide
cauuagucguuacugaaga

SEQ ID NO: 464766 - RNA, 19 nt, Artificial Sequence
  Description of Artificial Sequence: Synthetic oligonucleotide
ugaucuaguggccgugggc

SEQ ID NO: 464767 - RNA, 19 nt, Artificial Sequence
  Description of Artificial Sequence: Synthetic oligonucleotide
ucaucaauucugacaccgc

SEQ ID NO: 464768 - RNA, 19 nt, Artificial Sequence
  Description of Artificial Sequence: Synthetic oligonucleotide
uuaguaagcuuuggggagc

SEQ ID NO: 464769 - RNA, 19 nt, Artificial Sequence
  Description of Artificial Sequence: Synthetic oligonucleotide
uuacacacacauacacaca

SEQ ID NO: 464770 - RNA, 19 nt, Artificial Sequence
  Description of Artificial Sequence: Synthetic oligonucleotide
auagugguaccccaacccu

SEQ ID NO: 464771 - RNA, 19 nt, Artificial Sequence
  Description of Artificial Sequence: Synthetic oligonucleotide
aaagggcuccgugaugagg

SEQ ID NO: 464772 - RNA, 19 nt, Artificial Sequence
  Description of Artificial Sequence: Synthetic oligonucleotide
ucguuacugaagaacugcu

SEQ ID NO: 464773 - RNA, 19 nt, Artificial Sequence
  Description of Artificial Sequence: Synthetic oligonucleotide
gguauccugacauauguuc

SEQ ID NO: 464774 - RNA, 19 nt, Artificial Sequence
  Description of Artificial Sequence: Synthetic oligonucleotide
gaggcugcgguucaacaug

SEQ ID NO: 464775 - RNA, 19 nt, Artificial Sequence
  Description of Artificial Sequence: Synthetic oligonucleotide
aaggccucacacaauagga

SEQ ID NO: 464776 - RNA, 19 nt, Artificial Sequence
  Description of Artificial Sequence: Synthetic oligonucleotide
aggaucuugagcugauaug

SEQ ID NO: 464777 - RNA, 19 nt, Artificial Sequence
  Description of Artificial Sequence: Synthetic oligonucleotide
cuugagcugauaugucacc

SEQ ID NO: 464778 - RNA, 19 nt, Artificial Sequence
  Description of Artificial Sequence: Synthetic oligonucleotide
uacaguuaaggaguuagua

SEQ ID NO: 464779 - RNA, 19 nt, Artificial Sequence
  Description of Artificial Sequence: Synthetic oligonucleotide
ugauaucacaaaugcccga

SEQ ID NO: 464780 - RNA, 19 nt, Artificial Sequence
  Description of Artificial Sequence: Synthetic oligonucleotide
ucaaggguaucuguaccag

SEQ ID NO: 464781 - RNA, 19 nt, Artificial Sequence
  Description of Artificial Sequence: Synthetic oligonucleotide
uggcaaagaagcgaucacc

SEQ ID NO: 464782 - RNA, 19 nt, Artificial Sequence
  Description of Artificial Sequence: Synthetic oligonucleotide
auuuugccaacacucugga

SEQ ID NO: 464783 - RNA, 19 nt, Artificial Sequence
  Description of Artificial Sequence: Synthetic oligonucleotide
cacgaguaguucauuaguc

SEQ ID NO: 464784 - RNA, 19 nt, Artificial Sequence
  Description of Artificial Sequence: Synthetic oligonucleotide
cacacagaaccugagcugc

SEQ ID NO: 464785 - RNA, 19 nt, Artificial Sequence
  Description of Artificial Sequence: Synthetic oligonucleotide
aaauggaaccccacgagua

SEQ ID NO: 464786 - RNA, 19 nt, Artificial Sequence
  Description of Artificial Sequence: Synthetic oligonucleotide
cucacacaauaggaaaugg

SEQ ID NO: 464787 - RNA, 19 nt, Artificial Sequence
  Description of Artificial Sequence: Synthetic oligonucleotide
ggauauguacuugaggcgc

SEQ ID NO: 464788 - RNA, 19 nt, Artificial Sequence
  Description of Artificial Sequence: Synthetic oligonucleotide
guacgagcauaucggaugc

SEQ ID NO: 464789 - RNA, 19 nt, Artificial Sequence
  Description of Artificial Sequence: Synthetic oligonucleotide
cagugcugugccaaagagg

SEQ ID NO: 464790 - RNA, 19 nt, Artificial Sequence
  Description of Artificial Sequence: Synthetic oligonucleotide
ggaaauggaaccccacgag

SEQ ID NO: 464791 - RNA, 19 nt, Artificial Sequence
  Description of Artificial Sequence: Synthetic oligonucleotide
ugcgguucaacaugagcac

SEQ ID NO: 464792 - RNA, 19 nt, Artificial Sequence
  Description of Artificial Sequence: Synthetic oligonucleotide
gucguuacugaagaacugc

SEQ ID NO: 464793 - RNA, 19 nt, Artificial Sequence
  Description of Artificial Sequence: Synthetic oligonucleotide
aguguacgagcauaucgga

SEQ ID NO: 464794 - RNA, 19 nt, Artificial Sequence
  Description of Artificial Sequence: Synthetic oligonucleotide
caccuuuaagcacuucagc

SEQ ID NO: 464795 - RNA, 19 nt, Artificial Sequence
  Description of Artificial Sequence: Synthetic oligonucleotide
uguagcggacccaggcucc

SEQ ID NO: 464796 - RNA, 19 nt, Artificial Sequence
  Description of Artificial Sequence: Synthetic oligonucleotide
gacaggugacaccuuuaag

SEQ ID NO: 464797 - RNA, 19 nt, Artificial Sequence
  Description of Artificial Sequence: Synthetic oligonucleotide
aauaauggguccaggugaa

SEQ ID NO: 464798 - RNA, 19 nt, Artificial Sequence
  Description of Artificial Sequence: Synthetic oligonucleotide
aagggcuccgugaugaggu

SEQ ID NO: 464799 - RNA, 19 nt, Artificial Sequence
  Description of Artificial Sequence: Synthetic oligonucleotide
uuauuuggcauuggguauc

SEQ ID NO: 464800 - RNA, 19 nt, Artificial Sequence
  Description of Artificial Sequence: Synthetic oligonucleotide
ucugaucuaguggccgugg

SEQ ID NO: 464801 - RNA, 19 nt, Artificial Sequence
  Description of Artificial Sequence: Synthetic oligonucleotide
agauccaaugguccuauuu

SEQ ID NO: 464802 - RNA, 19 nt, Artificial Sequence
  Description of Artificial Sequence: Synthetic oligonucleotide
gaucaccaggcaguguacg

SEQ ID NO: 464803 - RNA, 19 nt, Artificial Sequence
  Description of Artificial Sequence: Synthetic oligonucleotide
gacuacaacagccaccagu

SEQ ID NO: 464804 - RNA, 19 nt, Artificial Sequence
  Description of Artificial Sequence: Synthetic oligonucleotide
uauccugacauauguucau

SEQ ID NO: 464805 - RNA, 19 nt, Artificial Sequence
  Description of Artificial Sequence: Synthetic oligonucleotide
ucguggaggaagagaacca

SEQ ID NO: 464806 - RNA, 19 nt, Artificial Sequence
  Description of Artificial Sequence: Synthetic oligonucleotide
caauuacacaagacucagc

SEQ ID NO: 464807 - RNA, 19 nt, Artificial Sequence
  Description of Artificial Sequence: Synthetic oligonucleotide
auaggaaauggaaccccac

SEQ ID NO: 464808 - RNA, 19 nt, Artificial Sequence
  Description of Artificial Sequence: Synthetic oligonucleotide
ggacaucuccagcaaaggg

SEQ ID NO: 464809 - RNA, 19 nt, Artificial Sequence
  Description of Artificial Sequence: Synthetic oligonucleotide
agauaauccuucaucucug

SEQ ID NO: 464810 - RNA, 19 nt, Artificial Sequence
  Description of Artificial Sequence: Synthetic oligonucleotide
cacaagucaggcucucgcc

SEQ ID NO: 464811 - RNA, 19 nt, Artificial Sequence
  Description of Artificial Sequence: Synthetic oligonucleotide
uccaugugacauucagccc

SEQ ID NO: 464812 - RNA, 19 nt, Artificial Sequence
  Description of Artificial Sequence: Synthetic oligonucleotide
ucgccauaacuuuggaccu

SEQ ID NO: 464813 - RNA, 19 nt, Artificial Sequence
  Description of Artificial Sequence: Synthetic oligonucleotide
acaccuuuaagcacuucag

SEQ ID NO: 464814 - RNA, 19 nt, Artificial Sequence
  Description of Artificial Sequence: Synthetic oligonucleotide
uuauggcuuugacugcacu

SEQ ID NO: 464815 - RNA, 19 nt, Artificial Sequence
  Description of Artificial Sequence: Synthetic oligonucleotide
gcuuugacugcacuucggg

SEQ ID NO: 464816 - RNA, 19 nt, Artificial Sequence
  Description of Artificial Sequence: Synthetic oligonucleotide
gggcacuuacaacaggccg

SEQ ID NO: 464817 - RNA, 19 nt, Artificial Sequence
  Description of Artificial Sequence: Synthetic oligonucleotide
acucuggaucauuaaccug

SEQ ID NO: 464818 - RNA, 19 nt, Artificial Sequence
  Description of Artificial Sequence: Synthetic oligonucleotide
cacacauacacacacacau

SEQ ID NO: 464819 - RNA, 19 nt, Artificial Sequence
  Description of Artificial Sequence: Synthetic oligonucleotide
ucagcguacuugacuacaa

SEQ ID NO: 464820 - RNA, 19 nt, Artificial Sequence
  Description of Artificial Sequence: Synthetic oligonucleotide
auaucacaaaugcccgaca

SEQ ID NO: 464821 - RNA, 19 nt, Artificial Sequence
  Description of Artificial Sequence: Synthetic oligonucleotide
uaaagauccaaugguccua

SEQ ID NO: 464822 - RNA, 19 nt, Artificial Sequence
  Description of Artificial Sequence: Synthetic oligonucleotide
aucccucuagaaguguggg

SEQ ID NO: 464823 - RNA, 19 nt, Artificial Sequence
  Description of Artificial Sequence: Synthetic oligonucleotide
gaaccccacgaguaguuca

SEQ ID NO: 464824 - RNA, 19 nt, Artificial Sequence
  Description of Artificial Sequence: Synthetic oligonucleotide
auaugucaccuggaaagug

SEQ ID NO: 464825 - RNA, 19 nt, Artificial Sequence
  Description of Artificial Sequence: Synthetic oligonucleotide
uccgggcacuuacaacagg

SEQ ID NO: 464826 - RNA, 19 nt, Artificial Sequence
  Description of Artificial Sequence: Synthetic oligonucleotide
cauuaccccucuucugggc

SEQ ID NO: 464827 - RNA, 19 nt, Artificial Sequence
  Description of Artificial Sequence: Synthetic oligonucleotide
acccuguucccaaagaggu

SEQ ID NO: 464828 - RNA, 19 nt, Artificial Sequence
  Description of Artificial Sequence: Synthetic oligonucleotide
acacauacacacacacauc

SEQ ID NO: 464829 - RNA, 19 nt, Artificial Sequence
  Description of Artificial Sequence: Synthetic oligonucleotide
aguaguucauuagucguua

SEQ ID NO: 464830 - RNA, 19 nt, Artificial Sequence
  Description of Artificial Sequence: Synthetic oligonucleotide
agccuggaauagugguacc

SEQ ID NO: 464831 - RNA, 19 nt, Artificial Sequence
  Description of Artificial Sequence: Synthetic oligonucleotide
guauccugacauauguuca

SEQ ID NO: 464832 - RNA, 19 nt, Artificial Sequence
  Description of Artificial Sequence: Synthetic oligonucleotide
uuacgcagccacacagaac

SEQ ID NO: 464833 - RNA, 19 nt, Artificial Sequence
  Description of Artificial Sequence: Synthetic oligonucleotide
auuagucguuacugaagaa

SEQ ID NO: 464834 - RNA, 19 nt, Artificial Sequence
  Description of Artificial Sequence: Synthetic oligonucleotide
uagucaggaucuugagcug

SEQ ID NO: 464835 - RNA, 19 nt, Artificial Sequence
  Description of Artificial Sequence: Synthetic oligonucleotide
cuccaaccccacaagucag

SEQ ID NO: 464836 - RNA, 19 nt, Artificial Sequence
  Description of Artificial Sequence: Synthetic oligonucleotide
acuuuggcagaaagggcuc

SEQ ID NO: 464837 - RNA, 19 nt, Artificial Sequence
  Description of Artificial Sequence: Synthetic oligonucleotide
cuggacaaucgccacacca

SEQ ID NO: 464838 - RNA, 19 nt, Artificial Sequence
  Description of Artificial Sequence: Synthetic oligonucleotide
ucuagaagugugggaagaa

SEQ ID NO: 464839 - RNA, 19 nt, Artificial Sequence
  Description of Artificial Sequence: Synthetic oligonucleotide
gaggauguugucagcguac

SEQ ID NO: 464840 - RNA, 19 nt, Artificial Sequence
  Description of Artificial Sequence: Synthetic oligonucleotide
cuucagcccaccagagccc

SEQ ID NO: 464841 - RNA, 19 nt, Artificial Sequence
  Description of Artificial Sequence: Synthetic oligonucleotide
aaucgccacaccagugaag

SEQ ID NO: 464842 - RNA, 19 nt, Artificial Sequence
  Description of Artificial Sequence: Synthetic oligonucleotide
agaggcugcgguucaacau

SEQ ID NO: 464843 - RNA, 19 nt, Artificial Sequence
  Description of Artificial Sequence: Synthetic oligonucleotide
aggcguguauccaaagaag

SEQ ID NO: 464844 - RNA, 19 nt, Artificial Sequence
  Description of Artificial Sequence: Synthetic oligonucleotide
uuacaacaggccgaucuuc

SEQ ID NO: 464845 - RNA, 19 nt, Artificial Sequence
  Description of Artificial Sequence: Synthetic oligonucleotide
guuacgcagccacacagaa

SEQ ID NO: 464846 - RNA, 19 nt, Artificial Sequence
  Description of Artificial Sequence: Synthetic oligonucleotide
aaggggaguccaugugaca

SEQ ID NO: 464847 - RNA, 19 nt, Artificial Sequence
  Description of Artificial Sequence: Synthetic oligonucleotide
aucaauucugacaccgcca

SEQ ID NO: 464848 - RNA, 19 nt, Artificial Sequence
  Description of Artificial Sequence: Synthetic oligonucleotide
uccgugaugaggucuccuc

SEQ ID NO: 464849 - RNA, 19 nt, Artificial Sequence
  Description of Artificial Sequence: Synthetic oligonucleotide
caaaugcccgacauauuga

SEQ ID NO: 464850 - RNA, 19 nt, Artificial Sequence
  Description of Artificial Sequence: Synthetic oligonucleotide
aagaagcgaucaccaggca

SEQ ID NO: 464851 - RNA, 19 nt, Artificial Sequence
  Description of Artificial Sequence: Synthetic oligonucleotide
cugaucuaguggccguggg

SEQ ID NO: 464852 - RNA, 19 nt, Artificial Sequence
  Description of Artificial Sequence: Synthetic oligonucleotide
auaucccucuagaagugug

SEQ ID NO: 464853 - RNA, 19 nt, Artificial Sequence
  Description of Artificial Sequence: Synthetic oligonucleotide
caaagagguuagccugggg

SEQ ID NO: 464854 - RNA, 19 nt, Artificial Sequence
  Description of Artificial Sequence: Synthetic oligonucleotide
auccgccaaccccaaccgc

SEQ ID NO: 464855 - RNA, 19 nt, Artificial Sequence
  Description of Artificial Sequence: Synthetic oligonucleotide
ucacuccgggcacuuacaa

SEQ ID NO: 464856 - RNA, 19 nt, Artificial Sequence
  Description of Artificial Sequence: Synthetic oligonucleotide
ugcuaguccggccccggga

SEQ ID NO: 464857 - RNA, 19 nt, Artificial Sequence
  Description of Artificial Sequence: Synthetic oligonucleotide
cauauugcaccaggacagc

SEQ ID NO: 464858 - RNA, 19 nt, Artificial Sequence
  Description of Artificial Sequence: Synthetic oligonucleotide
cuaaggaugagggaggcgu

SEQ ID NO: 464859 - RNA, 19 nt, Artificial Sequence
  Description of Artificial Sequence: Synthetic oligonucleotide
aucacaaaugcccgacaua

SEQ ID NO: 464860 - RNA, 19 nt, Artificial Sequence
  Description of Artificial Sequence: Synthetic oligonucleotide
agaaccugagcugccuuug

SEQ ID NO: 464861 - RNA, 19 nt, Artificial Sequence
  Description of Artificial Sequence: Synthetic oligonucleotide
cggaugcuaaggaugaggg

SEQ ID NO: 464862 - RNA, 19 nt, Artificial Sequence
  Description of Artificial Sequence: Synthetic oligonucleotide
guaguucauuagucguuac

SEQ ID NO: 464863 - RNA, 19 nt, Artificial Sequence
  Description of Artificial Sequence: Synthetic oligonucleotide
caggcguguauccaaagaa

SEQ ID NO: 464864 - RNA, 19 nt, Artificial Sequence
  Description of Artificial Sequence: Synthetic oligonucleotide
ucccucuagaaguguggga

SEQ ID NO: 464865 - RNA, 19 nt, Artificial Sequence
  Description of Artificial Sequence: Synthetic oligonucleotide
uuaccccucuucugggcga

SEQ ID NO: 464866 - RNA, 19 nt, Artificial Sequence
  Description of Artificial Sequence: Synthetic oligonucleotide
aggggaguccaugugacau

SEQ ID NO: 464867 - RNA, 19 nt, Artificial Sequence
  Description of Artificial Sequence: Synthetic oligonucleotide
agucguuacugaagaacug

SEQ ID NO: 464868 - RNA, 19 nt, Artificial Sequence
  Description of Artificial Sequence: Synthetic oligonucleotide
guauccaaagaagaagccu

SEQ ID NO: 464869 - RNA, 19 nt, Artificial Sequence
  Description of Artificial Sequence: Synthetic oligonucleotide
gaucuugagcugauauguc

SEQ ID NO: 464870 - RNA, 19 nt, Artificial Sequence
  Description of Artificial Sequence: Synthetic oligonucleotide
aggcgugagaggcugcggu

SEQ ID NO: 464871 - RNA, 19 nt, Artificial Sequence
  Description of Artificial Sequence: Synthetic oligonucleotide
uaccagggaaacugcccca

SEQ ID NO: 464872 - RNA, 19 nt, Artificial Sequence
  Description of Artificial Sequence: Synthetic oligonucleotide
agaagccucgacgggccac

SEQ ID NO: 464873 - RNA, 19 nt, Artificial Sequence
  Description of Artificial Sequence: Synthetic oligonucleotide
caguggacagcacaauaga

SEQ ID NO: 464874 - RNA, 19 nt, Artificial Sequence
  Description of Artificial Sequence: Synthetic oligonucleotide
ggaucuugagcugauaugu

SEQ ID NO: 464875 - RNA, 19 nt, Artificial Sequence
  Description of Artificial Sequence: Synthetic oligonucleotide
agcggugguggcaaagaag

SEQ ID NO: 464876 - RNA, 19 nt, Artificial Sequence
  Description of Artificial Sequence: Synthetic oligonucleotide
guagagguagacggcacca

SEQ ID NO: 464877 - RNA, 19 nt, Artificial Sequence
  Description of Artificial Sequence: Synthetic oligonucleotide
uggaaccccacgaguaguu

SEQ ID NO: 464878 - RNA, 19 nt, Artificial Sequence
  Description of Artificial Sequence: Synthetic oligonucleotide
ccgccaugaaguaagggug

SEQ ID NO: 464879 - RNA, 19 nt, Artificial Sequence
  Description of Artificial Sequence: Synthetic oligonucleotide
agccaaagaggcgaaugga

SEQ ID NO: 464880 - RNA, 19 nt, Artificial Sequence
  Description of Artificial Sequence: Synthetic oligonucleotide
gcugcgguucaacaugagc

SEQ ID NO: 464881 - RNA, 19 nt, Artificial Sequence
  Description of Artificial Sequence: Synthetic oligonucleotide
auacaguuaaggaguuagu

SEQ ID NO: 464882 - RNA, 19 nt, Artificial Sequence
  Description of Artificial Sequence: Synthetic oligonucleotide
gcauaucggaugcuaagga

SEQ ID NO: 464883 - RNA, 19 nt, Artificial Sequence
  Description of Artificial Sequence: Synthetic oligonucleotide
ccgggcacuuacaacaggc

SEQ ID NO: 464884 - RNA, 19 nt, Artificial Sequence
  Description of Artificial Sequence: Synthetic oligonucleotide
aguaagcuuuggggagcgc

SEQ ID NO: 464885 - RNA, 19 nt, Artificial Sequence
  Description of Artificial Sequence: Synthetic oligonucleotide
cuccgggcacuuacaacag

SEQ ID NO: 464886 - RNA, 19 nt, Artificial Sequence
  Description of Artificial Sequence: Synthetic oligonucleotide
uaucuguaccagggaaacu

SEQ ID NO: 464887 - RNA, 19 nt, Artificial Sequence
  Description of Artificial Sequence: Synthetic oligonucleotide
ggcaaauaauggguccagg

SEQ ID NO: 464888 - RNA, 19 nt, Artificial Sequence
  Description of Artificial Sequence: Synthetic oligonucleotide
cacucuggaucauuaaccu

SEQ ID NO: 464889 - RNA, 19 nt, Artificial Sequence
  Description of Artificial Sequence: Synthetic oligonucleotide
gagguuacgcagccacaca

SEQ ID NO: 464890 - RNA, 19 nt, Artificial Sequence
  Description of Artificial Sequence: Synthetic oligonucleotide
ggauacggccccuggcccg

SEQ ID NO: 464891 - RNA, 19 nt, Artificial Sequence
  Description of Artificial Sequence: Synthetic oligonucleotide
gcaaauaauggguccaggu

SEQ ID NO: 464892 - RNA, 19 nt, Artificial Sequence
  Description of Artificial Sequence: Synthetic oligonucleotide
aucuaguggccgugggcca

SEQ ID NO: 464893 - RNA, 19 nt, Artificial Sequence
  Description of Artificial Sequence: Synthetic oligonucleotide
acacacauacacacacaca

SEQ ID NO: 464894 - RNA, 19 nt, Artificial Sequence
  Description of Artificial Sequence: Synthetic oligonucleotide
cagcguacuugacuacaac

SEQ ID NO: 464895 - RNA, 19 nt, Artificial Sequence
  Description of Artificial Sequence: Synthetic oligonucleotide
ccacauauugcaccaggac

SEQ ID NO: 464896 - RNA, 19 nt, Artificial Sequence
  Description of Artificial Sequence: Synthetic oligonucleotide
agccucgacgggccacagc

SEQ ID NO: 464897 - RNA, 19 nt, Artificial Sequence
  Description of Artificial Sequence: Synthetic oligonucleotide
ggcguguauccaaagaaga

SEQ ID NO: 464898 - RNA, 19 nt, Artificial Sequence
  Description of Artificial Sequence: Synthetic oligonucleotide
cacuccgggcacuuacaac

SEQ ID NO: 464899 - RNA, 19 nt, Artificial Sequence
  Description of Artificial Sequence: Synthetic oligonucleotide
aaccccacgaguaguucau

SEQ ID NO: 464900 - RNA, 19 nt, Artificial Sequence
  Description of Artificial Sequence: Synthetic oligonucleotide
ucuaguggccgugggccac

SEQ ID NO: 464901 - RNA, 19 nt, Artificial Sequence
  Description of Artificial Sequence: Synthetic oligonucleotide
gcggauacggccccuggcc

SEQ ID NO: 464902 - RNA, 19 nt, Artificial Sequence
  Description of Artificial Sequence: Synthetic oligonucleotide
caccagcucucacuucacc

SEQ ID NO: 464903 - RNA, 19 nt, Artificial Sequence
  Description of Artificial Sequence: Synthetic oligonucleotide
gaaccugagcugccuuuga

SEQ ID NO: 464904 - RNA, 19 nt, Artificial Sequence
  Description of Artificial Sequence: Synthetic oligonucleotide
gucagcguacuugacuaca

SEQ ID NO: 464905 - RNA, 19 nt, Artificial Sequence
  Description of Artificial Sequence: Synthetic oligonucleotide
aagucaggcucucgccaua

SEQ ID NO: 464906 - RNA, 19 nt, Artificial Sequence
  Description of Artificial Sequence: Synthetic oligonucleotide
gccucgacgggccacagca

SEQ ID NO: 464907 - RNA, 19 nt, Artificial Sequence
  Description of Artificial Sequence: Synthetic oligonucleotide
auggaaccccacgaguagu

SEQ ID NO: 464908 - RNA, 19 nt, Artificial Sequence
  Description of Artificial Sequence: Synthetic oligonucleotide
aggccgaucuucaagggua

SEQ ID NO: 464909 - RNA, 19 nt, Artificial Sequence
  Description of Artificial Sequence: Synthetic oligonucleotide
aggcucucgccauaacuuu

SEQ ID NO: 464910 - RNA, 19 nt, Artificial Sequence
  Description of Artificial Sequence: Synthetic oligonucleotide
gucuccucgagaagacagc

SEQ ID NO: 464911 - RNA, 19 nt, Artificial Sequence
  Description of Artificial Sequence: Synthetic oligonucleotide
cauaucggaugcuaaggau

SEQ ID NO: 464912 - RNA, 19 nt, Artificial Sequence
  Description of Artificial Sequence: Synthetic oligonucleotide
agccaauggggcugcgaga

SEQ ID NO: 464913 - RNA, 19 nt, Artificial Sequence
  Description of Artificial Sequence: Synthetic oligonucleotide
gcucucgccauaacuuugg

SEQ ID NO: 464914 - RNA, 19 nt, Artificial Sequence
  Description of Artificial Sequence: Synthetic oligonucleotide
agggcuccgugaugagguc

SEQ ID NO: 464915 - RNA, 19 nt, Artificial Sequence
  Description of Artificial Sequence: Synthetic oligonucleotide
cucuccucacuccgggcac

SEQ ID NO: 464916 - RNA, 19 nt, Artificial Sequence
  Description of Artificial Sequence: Synthetic oligonucleotide
ucgccacaccagugaagag

SEQ ID NO: 464917 - RNA, 19 nt, Artificial Sequence
  Description of Artificial Sequence: Synthetic oligonucleotide
gccuaguuggagguuacgc

SEQ ID NO: 464918 - RNA, 19 nt, Artificial Sequence
  Description of Artificial Sequence: Synthetic oligonucleotide
cacaauagacagggaggug

SEQ ID NO: 464919 - RNA, 19 nt, Artificial Sequence
  Description of Artificial Sequence: Synthetic oligonucleotide
aggcuugguuuaguaccac

SEQ ID NO: 464920 - RNA, 19 nt, Artificial Sequence
  Description of Artificial Sequence: Synthetic oligonucleotide
ccauaucccucuagaagug

SEQ ID NO: 464921 - RNA, 19 nt, Artificial Sequence
  Description of Artificial Sequence: Synthetic oligonucleotide
ccgugaugaggucuccucg

SEQ ID NO: 464922 - RNA, 19 nt, Artificial Sequence
  Description of Artificial Sequence: Synthetic oligonucleotide
cacaagacucagccacuuc

SEQ ID NO: 464923 - RNA, 19 nt, Artificial Sequence
  Description of Artificial Sequence: Synthetic oligonucleotide
ggccucacacaauaggaaa

SEQ ID NO: 464924 - RNA, 19 nt, Artificial Sequence
  Description of Artificial Sequence: Synthetic oligonucleotide
acacacacauacacacaca

SEQ ID NO: 464925 - RNA, 19 nt, Artificial Sequence
  Description of Artificial Sequence: Synthetic oligonucleotide
gguagacggcaccaaugac

SEQ ID NO: 464926 - RNA, 19 nt, Artificial Sequence
  Description of Artificial Sequence: Synthetic oligonucleotide
caggccccuacccuggcuc

SEQ ID NO: 464927 - RNA, 19 nt, Artificial Sequence
  Description of Artificial Sequence: Synthetic oligonucleotide
acgagcauaucggaugcua

SEQ ID NO: 464928 - RNA, 19 nt, Artificial Sequence
  Description of Artificial Sequence: Synthetic oligonucleotide
gacgagcccagcgcccagg

SEQ ID NO: 464929 - RNA, 19 nt, Artificial Sequence
  Description of Artificial Sequence: Synthetic oligonucleotide
aguagcccaccaaaggcuu

SEQ ID NO: 464930 - RNA, 19 nt, Artificial Sequence
  Description of Artificial Sequence: Synthetic oligonucleotide
guuauggcuuugacugcac

SEQ ID NO: 464931 - RNA, 19 nt, Artificial Sequence
  Description of Artificial Sequence: Synthetic oligonucleotide
caccgccaugaaguaaggg

SEQ ID NO: 464932 - RNA, 19 nt, Artificial Sequence
  Description of Artificial Sequence: Synthetic oligonucleotide
gcgguucaacaugagcacg

SEQ ID NO: 464933 - RNA, 19 nt, Artificial Sequence
  Description of Artificial Sequence: Synthetic oligonucleotide
ggauucugaucuaguggcc

SEQ ID NO: 464934 - RNA, 19 nt, Artificial Sequence
  Description of Artificial Sequence: Synthetic oligonucleotide
ggcagauccgccaacccca

SEQ ID NO: 464935 - RNA, 19 nt, Artificial Sequence
  Description of Artificial Sequence: Synthetic oligonucleotide
aggccuaguuggagguuac

SEQ ID NO: 464936 - RNA, 19 nt, Artificial Sequence
  Description of Artificial Sequence: Synthetic oligonucleotide
augagagagggcaccgcga

SEQ ID NO: 464937 - RNA, 19 nt, Artificial Sequence
  Description of Artificial Sequence: Synthetic oligonucleotide
ugaccacagcggugguggc

SEQ ID NO: 464938 - RNA, 19 nt, Artificial Sequence
  Description of Artificial Sequence: Synthetic oligonucleotide
accaaaggcuugguuuagu

SEQ ID NO: 464939 - RNA, 19 nt, Artificial Sequence
  Description of Artificial Sequence: Synthetic oligonucleotide
ccgggauucugaucuagug

SEQ ID NO: 464940 - RNA, 19 nt, Artificial Sequence
  Description of Artificial Sequence: Synthetic oligonucleotide
gcuguagagguagacggca

SEQ ID NO: 464941 - RNA, 19 nt, Artificial Sequence
  Description of Artificial Sequence: Synthetic oligonucleotide
caacaugagcacggagaac

SEQ ID NO: 464942 - RNA, 19 nt, Artificial Sequence
  Description of Artificial Sequence: Synthetic oligonucleotide
aguggccgugggccacccc

SEQ ID NO: 464943 - RNA, 19 nt, Artificial Sequence
  Description of Artificial Sequence: Synthetic oligonucleotide
agcucucacuucaccagca

SEQ ID NO: 464944 - RNA, 19 nt, Artificial Sequence
  Description of Artificial Sequence: Synthetic oligonucleotide
gcgcccagggcaaauaaug

SEQ ID NO: 464945 - RNA, 19 nt, Artificial Sequence
  Description of Artificial Sequence: Synthetic oligonucleotide
uccggccccgggauucuga

SEQ ID NO: 464946 - RNA, 19 nt, Artificial Sequence
  Description of Artificial Sequence: Synthetic oligonucleotide
gaagccucgacgggccaca

SEQ ID NO: 464947 - RNA, 19 nt, Artificial Sequence
  Description of Artificial Sequence: Synthetic oligonucleotide
uaguccggccccgggauuc

SEQ ID NO: 464948 - RNA, 19 nt, Artificial Sequence
  Description of Artificial Sequence: Synthetic oligonucleotide
aggccucacacaauaggaa

SEQ ID NO: 464949 - RNA, 19 nt, Artificial Sequence
  Description of Artificial Sequence: Synthetic oligonucleotide
caaucgccacaccagugaa

SEQ ID NO: 464950 - RNA, 19 nt, Artificial Sequence
  Description of Artificial Sequence: Synthetic oligonucleotide
gugccuggacaaucgccac

SEQ ID NO: 464951 - RNA, 19 nt, Artificial Sequence
  Description of Artificial Sequence: Synthetic oligonucleotide
cugcaggcgugagaggcug

SEQ ID NO: 464952 - RNA, 19 nt, Artificial Sequence
  Description of Artificial Sequence: Synthetic oligonucleotide
acaccgccaugaaguaagg

SEQ ID NO: 464953 - RNA, 19 nt, Artificial Sequence
  Description of Artificial Sequence: Synthetic oligonucleotide
uacgagcauaucggaugcu

SEQ ID NO: 464954 - RNA, 19 nt, Artificial Sequence
  Description of Artificial Sequence: Synthetic oligonucleotide
gaguaguucauuagucguu

SEQ ID NO: 464955 - RNA, 19 nt, Artificial Sequence
  Description of Artificial Sequence: Synthetic oligonucleotide
cacagcggugguggcaaag

SEQ ID NO: 464956 - RNA, 19 nt, Artificial Sequence
  Description of Artificial Sequence: Synthetic oligonucleotide
cugcuaguccggccccggg

SEQ ID NO: 464957 - RNA, 19 nt, Artificial Sequence
  Description of Artificial Sequence: Synthetic oligonucleotide
agacggcaccaaugacgag

SEQ ID NO: 464958 - RNA, 19 nt, Artificial Sequence
  Description of Artificial Sequence: Synthetic oligonucleotide
gcuaaggaugagggaggcg

SEQ ID NO: 464959 - RNA, 19 nt, Artificial Sequence
  Description of Artificial Sequence: Synthetic oligonucleotide
cgcccagggcaaauaaugg

SEQ ID NO: 464960 - RNA, 19 nt, Artificial Sequence
  Description of Artificial Sequence: Synthetic oligonucleotide
agagcccaagcugcagaca

SEQ ID NO: 464961 - RNA, 19 nt, Artificial Sequence
  Description of Artificial Sequence: Synthetic oligonucleotide
auccugacauauguucauu

SEQ ID NO: 464962 - RNA, 19 nt, Artificial Sequence
  Description of Artificial Sequence: Synthetic oligonucleotide
caccgcgagcuugagugug

SEQ ID NO: 464963 - RNA, 19 nt, Artificial Sequence
  Description of Artificial Sequence: Synthetic oligonucleotide
gcuccauaucccucuagaa

SEQ ID NO: 464964 - RNA, 19 nt, Artificial Sequence
  Description of Artificial Sequence: Synthetic oligonucleotide
caggcucucgccauaacuu

SEQ ID NO: 464965 - RNA, 19 nt, Artificial Sequence
  Description of Artificial Sequence: Synthetic oligonucleotide
cuaguggccgugggccacc

SEQ ID NO: 464966 - RNA, 19 nt, Artificial Sequence
  Description of Artificial Sequence: Synthetic oligonucleotide
agucaggcucucgccauaa

SEQ ID NO: 464967 - RNA, 19 nt, Artificial Sequence
  Description of Artificial Sequence: Synthetic oligonucleotide
ccuccccuccccauuuugc

SEQ ID NO: 464968 - RNA, 19 nt, Artificial Sequence
  Description of Artificial Sequence: Synthetic oligonucleotide
aagccucgacgggccacag

SEQ ID NO: 464969 - RNA, 19 nt, Artificial Sequence
  Description of Artificial Sequence: Synthetic oligonucleotide
auaauggguccaggugaaa

SEQ ID NO: 464970 - RNA, 19 nt, Artificial Sequence
  Description of Artificial Sequence: Synthetic oligonucleotide
ccaaccccacaagucaggc

SEQ ID NO: 464971 - RNA, 19 nt, Artificial Sequence
  Description of Artificial Sequence: Synthetic oligonucleotide
guauaccccugcaaagccu

SEQ ID NO: 464972 - RNA, 19 nt, Artificial Sequence
  Description of Artificial Sequence: Synthetic oligonucleotide
ggacaaucgccacaccagu

SEQ ID NO: 464973 - RNA, 19 nt, Artificial Sequence
  Description of Artificial Sequence: Synthetic oligonucleotide
aggcaguguacgagcauau

SEQ ID NO: 464974 - RNA, 19 nt, Artificial Sequence
  Description of Artificial Sequence: Synthetic oligonucleotide
cugacaccgccaugaagua

SEQ ID NO: 464975 - RNA, 19 nt, Artificial Sequence
  Description of Artificial Sequence: Synthetic oligonucleotide
gguuacgcagccacacaga

SEQ ID NO: 464976 - RNA, 19 nt, Artificial Sequence
  Description of Artificial Sequence: Synthetic oligonucleotide
gcuccauauccaugugaca

SEQ ID NO: 464977 - RNA, 19 nt, Artificial Sequence
  Description of Artificial Sequence: Synthetic oligonucleotide
ggaggcguucuggaccacc

SEQ ID NO: 464978 - RNA, 19 nt, Artificial Sequence
  Description of Artificial Sequence: Synthetic oligonucleotide
cagcgcgccagcggauacg

SEQ ID NO: 464979 - RNA, 19 nt, Artificial Sequence
  Description of Artificial Sequence: Synthetic oligonucleotide
gcccuugaggauguuguca

SEQ ID NO: 464980 - RNA, 19 nt, Artificial Sequence
  Description of Artificial Sequence: Synthetic oligonucleotide
cgggcacuuacaacaggcc

SEQ ID NO: 464981 - RNA, 19 nt, Artificial Sequence
  Description of Artificial Sequence: Synthetic oligonucleotide
cucgacgggccacagcagu

SEQ ID NO: 464982 - RNA, 19 nt, Artificial Sequence
  Description of Artificial Sequence: Synthetic oligonucleotide
gcggcagauccgccaaccc

SEQ ID NO: 464983 - RNA, 19 nt, Artificial Sequence
  Description of Artificial Sequence: Synthetic oligonucleotide
agcgcccagggcaaauaau

SEQ ID NO: 464984 - RNA, 19 nt, Artificial Sequence
  Description of Artificial Sequence: Synthetic oligonucleotide
cauaucccucuagaagugu

SEQ ID NO: 464985 - RNA, 19 nt, Artificial Sequence
  Description of Artificial Sequence: Synthetic oligonucleotide
uggcaacauacuggagguu

SEQ ID NO: 464986 - RNA, 19 nt, Artificial Sequence
  Description of Artificial Sequence: Synthetic oligonucleotide
accccacaagucaggcucu

SEQ ID NO: 464987 - RNA, 19 nt, Artificial Sequence
  Description of Artificial Sequence: Synthetic oligonucleotide
gcaugagagacaggacauc

SEQ ID NO: 464988 - RNA, 19 nt, Artificial Sequence
  Description of Artificial Sequence: Synthetic oligonucleotide
uaguggccgugggccaccc

SEQ ID NO: 464989 - RNA, 19 nt, Artificial Sequence
  Description of Artificial Sequence: Synthetic oligonucleotide
guguacgagcauaucggau

SEQ ID NO: 464990 - RNA, 19 nt, Artificial Sequence
  Description of Artificial Sequence: Synthetic oligonucleotide
accgcgagcuugagugugu

SEQ ID NO: 464991 - RNA, 19 nt, Artificial Sequence
  Description of Artificial Sequence: Synthetic oligonucleotide
cagcggugguggcaaagaa

SEQ ID NO: 464992 - RNA, 19 nt, Artificial Sequence
  Description of Artificial Sequence: Synthetic oligonucleotide
caggccgaucuucaagggu

SEQ ID NO: 464993 - RNA, 19 nt, Artificial Sequence
  Description of Artificial Sequence: Synthetic oligonucleotide
ggaaccccacgaguaguuc

SEQ ID NO: 464994 - RNA, 19 nt, Artificial Sequence
  Description of Artificial Sequence: Synthetic oligonucleotide
ggcuccgugaugaggucuc

SEQ ID NO: 464995 - RNA, 19 nt, Artificial Sequence
  Description of Artificial Sequence: Synthetic oligonucleotide
cagcgcccagggcaaauaa

SEQ ID NO: 464996 - RNA, 19 nt, Artificial Sequence
  Description of Artificial Sequence: Synthetic oligonucleotide
cagccucguggaggaagag

SEQ ID NO: 464997 - RNA, 19 nt, Artificial Sequence
  Description of Artificial Sequence: Synthetic oligonucleotide
gcgccagcggauacggccc

SEQ ID NO: 464998 - RNA, 19 nt, Artificial Sequence
  Description of Artificial Sequence: Synthetic oligonucleotide
cccuagcuccauaucccuc

SEQ ID NO: 464999 - RNA, 19 nt, Artificial Sequence
  Description of Artificial Sequence: Synthetic oligonucleotide
guagcggacccaggcucca

SEQ ID NO: 465000 - RNA, 19 nt, Artificial Sequence
  Description of Artificial Sequence: Synthetic oligonucleotide
ccacgaguaguucauuagu

SEQ ID NO: 465001 - RNA, 19 nt, Artificial Sequence
  Description of Artificial Sequence: Synthetic oligonucleotide
cugcacuucggggaaggcu

SEQ ID NO: 465002 - RNA, 19 nt, Artificial Sequence
  Description of Artificial Sequence: Synthetic oligonucleotide
cggugagccgcuguagcgg

SEQ ID NO: 465003 - RNA, 19 nt, Artificial Sequence
  Description of Artificial Sequence: Synthetic oligonucleotide
cggauacggccccuggccc

SEQ ID NO: 465004 - RNA, 19 nt, Artificial Sequence
  Description of Artificial Sequence: Synthetic oligonucleotide
ggcaguguacgagcauauc

SEQ ID NO: 465005 - RNA, 19 nt, Artificial Sequence
  Description of Artificial Sequence: Synthetic oligonucleotide
cgacauauugaaaguaaau

SEQ ID NO: 465006 - RNA, 19 nt, Artificial Sequence
  Description of Artificial Sequence: Synthetic oligonucleotide
cgaucaccaggcaguguac

SEQ ID NO: 465007 - RNA, 19 nt, Artificial Sequence
  Description of Artificial Sequence: Synthetic oligonucleotide
gcgugagaggcugcgguuc

SEQ ID NO: 465008 - RNA, 19 nt, Artificial Sequence
  Description of Artificial Sequence: Synthetic oligonucleotide
gggcugcgagaguggacug

SEQ ID NO: 465009 - RNA, 19 nt, Artificial Sequence
  Description of Artificial Sequence: Synthetic oligonucleotide
ccgccaaccccaaccgcug

SEQ ID NO: 465010 - RNA, 19 nt, Artificial Sequence
  Description of Artificial Sequence: Synthetic oligonucleotide
gccgccgcggcagauccgc

SEQ ID NO: 465011 - RNA, 19 nt, Artificial Sequence
  Description of Artificial Sequence: Synthetic oligonucleotide
cacuuacaacaggccgauc

SEQ ID NO: 465012 - RNA, 19 nt, Artificial Sequence
  Description of Artificial Sequence: Synthetic oligonucleotide
cacaaaugcccgacauauu

SEQ ID NO: 465013 - RNA, 19 nt, Artificial Sequence
  Description of Artificial Sequence: Synthetic oligonucleotide
aguccggccccgggauucu

SEQ ID NO: 465014 - RNA, 19 nt, Artificial Sequence
  Description of Artificial Sequence: Synthetic oligonucleotide
cgagcauaucggaugcuaa

SEQ ID NO: 465015 - RNA, 19 nt, Artificial Sequence
  Description of Artificial Sequence: Synthetic oligonucleotide
cuugcugugccuggacaau

SEQ ID NO: 465016 - RNA, 19 nt, Artificial Sequence
  Description of Artificial Sequence: Synthetic oligonucleotide
acgcagccacacagaaccu

SEQ ID NO: 465017 - RNA, 19 nt, Artificial Sequence
  Description of Artificial Sequence: Synthetic oligonucleotide
gccucacacaauaggaaau

SEQ ID NO: 465018 - RNA, 19 nt, Artificial Sequence
  Description of Artificial Sequence: Synthetic oligonucleotide
cacggagaacagugcugua

SEQ ID NO: 465019 - RNA, 19 nt, Artificial Sequence
  Description of Artificial Sequence: Synthetic oligonucleotide
gugagccgcuguagcggac

SEQ ID NO: 465020 - RNA, 19 nt, Artificial Sequence
  Description of Artificial Sequence: Synthetic oligonucleotide
gcuaguccggccccgggau

SEQ ID NO: 465021 - RNA, 19 nt, Artificial Sequence
  Description of Artificial Sequence: Synthetic oligonucleotide
caacaguggacagcacaau

SEQ ID NO: 465022 - RNA, 19 nt, Artificial Sequence
  Description of Artificial Sequence: Synthetic oligonucleotide
guggacuggcagcuuuauu

SEQ ID NO: 465023 - RNA, 19 nt, Artificial Sequence
  Description of Artificial Sequence: Synthetic oligonucleotide
ccccgggauucugaucuag

SEQ ID NO: 465024 - RNA, 19 nt, Artificial Sequence
  Description of Artificial Sequence: Synthetic oligonucleotide
ccccacgaguaguucauua

SEQ ID NO: 465025 - RNA, 19 nt, Artificial Sequence
  Description of Artificial Sequence: Synthetic oligonucleotide
ccauaacuuuggaccugca

SEQ ID NO: 465026 - RNA, 19 nt, Artificial Sequence
  Description of Artificial Sequence: Synthetic oligonucleotide
cgacgggccacagcagugc

SEQ ID NO: 465027 - RNA, 19 nt, Artificial Sequence
  Description of Artificial Sequence: Synthetic oligonucleotide
gcacuuacaacaggccgau

SEQ ID NO: 465028 - RNA, 19 nt, Artificial Sequence
  Description of Artificial Sequence: Synthetic oligonucleotide
accccacgaguaguucauu

SEQ ID NO: 465029 - RNA, 19 nt, Artificial Sequence
  Description of Artificial Sequence: Synthetic oligonucleotide
cgcggcagauccgccaacc

SEQ ID NO: 465030 - RNA, 19 nt, Artificial Sequence
  Description of Artificial Sequence: Synthetic oligonucleotide
gccgcggcagauccgccaa

SEQ ID NO: 465031 - RNA, 19 nt, Artificial Sequence
  Description of Artificial Sequence: Synthetic oligonucleotide
ccagcggauacggccccug

SEQ ID NO: 465032 - RNA, 19 nt, Artificial Sequence
  Description of Artificial Sequence: Synthetic oligonucleotide
ggggaguccaugugacauu

SEQ ID NO: 465033 - RNA, 19 nt, Artificial Sequence
  Description of Artificial Sequence: Synthetic oligonucleotide
cgccauaacuuuggaccug

SEQ ID NO: 465034 - RNA, 19 nt, Artificial Sequence
  Description of Artificial Sequence: Synthetic oligonucleotide
guccggccccgggauucug

SEQ ID NO: 465035 - RNA, 19 nt, Artificial Sequence
  Description of Artificial Sequence: Synthetic oligonucleotide
ggcgugagaggcugcgguu

SEQ ID NO: 465036 - RNA, 19 nt, Artificial Sequence
  Description of Artificial Sequence: Synthetic oligonucleotide
caaccccaaccgcugccau

SEQ ID NO: 465037 - RNA, 19 nt, Artificial Sequence
  Description of Artificial Sequence: Synthetic oligonucleotide
gcagauccgccaaccccaa

SEQ ID NO: 465038 - RNA, 19 nt, Artificial Sequence
  Description of Artificial Sequence: Synthetic oligonucleotide
ggguauccugacauauguu

SEQ ID NO: 465039 - RNA, 19 nt, Artificial Sequence
  Description of Artificial Sequence: Synthetic oligonucleotide
cccgggauucugaucuagu

SEQ ID NO: 465040 - RNA, 19 nt, Artificial Sequence
  Description of Artificial Sequence: Synthetic oligonucleotide
cacuucggggaaggcugua

SEQ ID NO: 465041 - RNA, 19 nt, Artificial Sequence
  Description of Artificial Sequence: Synthetic oligonucleotide
cgagcccagcgcccagggc

SEQ ID NO: 465042 - RNA, 19 nt, Artificial Sequence
  Description of Artificial Sequence: Synthetic oligonucleotide
cuaguccggccccgggauu

SEQ ID NO: 465043 - RNA, 19 nt, Artificial Sequence
  Description of Artificial Sequence: Synthetic oligonucleotide
ccgcgagcuugaguguguc

SEQ ID NO: 465044 - RNA, 19 nt, Artificial Sequence
  Description of Artificial Sequence: Synthetic oligonucleotide
gccaugaaguaaggguguu

SEQ ID NO: 465045 - RNA, 19 nt, Artificial Sequence
  Description of Artificial Sequence: Synthetic oligonucleotide
ggccgaucuucaaggguau

SEQ ID NO: 465046 - RNA, 19 nt, Artificial Sequence
  Description of Artificial Sequence: Synthetic oligonucleotide
ccgcggcagauccgccaac

SEQ ID NO: 465047 - RNA, 19 nt, Artificial Sequence
  Description of Artificial Sequence: Synthetic oligonucleotide
gcacuucggggaaggcugu

SEQ ID NO: 465048 - RNA, 19 nt, Artificial Sequence
  Description of Artificial Sequence: Synthetic oligonucleotide
ccaugaaguaaggguguuu

SEQ ID NO: 465049 - RNA, 19 nt, Artificial Sequence
  Description of Artificial Sequence: Synthetic oligonucleotide
gugcuguagucaggaucuu

SEQ ID NO: 465050 - RNA, 19 nt, Artificial Sequence
  Description of Artificial Sequence: Synthetic oligonucleotide
ccccagacagcaggcgugu

SEQ ID NO: 465051 - RNA, 19 nt, Artificial Sequence
  Description of Artificial Sequence: Synthetic oligonucleotide
caaagcccuugaggauguu

SEQ ID NO: 465052 - RNA, 19 nt, Artificial Sequence
  Description of Artificial Sequence: Synthetic oligonucleotide
ccacagcggugguggcaaa

SEQ ID NO: 465053 - RNA, 19 nt, Artificial Sequence
  Description of Artificial Sequence: Synthetic oligonucleotide
ccggccccgggauucugau

SEQ ID NO: 465054 - RNA, 19 nt, Artificial Sequence
  Description of Artificial Sequence: Synthetic oligonucleotide
gccagcggauacggccccu

SEQ ID NO: 465055 - RNA, 19 nt, Artificial Sequence
  Description of Artificial Sequence: Synthetic oligonucleotide
ccccaaccgcugccauguu

SEQ ID NO: 465056 - RNA, 19 nt, Artificial Sequence
  Description of Artificial Sequence: Synthetic oligonucleotide
aaguauuuaauugaggcgg

SEQ ID NO: 465057 - RNA, 19 nt, Artificial Sequence
  Description of Artificial Sequence: Synthetic oligonucleotide
uacaauuucagucaccucc

SEQ ID NO: 465058 - RNA, 19 nt, Artificial Sequence
  Description of Artificial Sequence: Synthetic oligonucleotide
uaaauuauaucccugggac

SEQ ID NO: 465059 - RNA, 19 nt, Artificial Sequence
  Description of Artificial Sequence: Synthetic oligonucleotide
ucuauacugaggaagagcc

SEQ ID NO: 465060 - RNA, 19 nt, Artificial Sequence
  Description of Artificial Sequence: Synthetic oligonucleotide
aucaacauacaguacauuc

SEQ ID NO: 465061 - RNA, 19 nt, Artificial Sequence
  Description of Artificial Sequence: Synthetic oligonucleotide
uuuacugugcaaauucucc

SEQ ID NO: 465062 - RNA, 19 nt, Artificial Sequence
  Description of Artificial Sequence: Synthetic oligonucleotide
aaugggaaagccgagaacu

SEQ ID NO: 465063 - RNA, 19 nt, Artificial Sequence
  Description of Artificial Sequence: Synthetic oligonucleotide
uauuauuuaugccagcauc

SEQ ID NO: 465064 - RNA, 19 nt, Artificial Sequence
  Description of Artificial Sequence: Synthetic oligonucleotide
uuauacugcaucuuagagc

SEQ ID NO: 465065 - RNA, 19 nt, Artificial Sequence
  Description of Artificial Sequence: Synthetic oligonucleotide
gacucuuacacacacacac

SEQ ID NO: 465066 - RNA, 19 nt, Artificial Sequence
  Description of Artificial Sequence: Synthetic oligonucleotide
aacugcgccagcaauaccc

SEQ ID NO: 465067 - RNA, 19 nt, Artificial Sequence
  Description of Artificial Sequence: Synthetic oligonucleotide
augacucucagauggaugg

SEQ ID NO: 465068 - RNA, 19 nt, Artificial Sequence
  Description of Artificial Sequence: Synthetic oligonucleotide
ugguaaauuauaucccugg

SEQ ID NO: 465069 - RNA, 19 nt, Artificial Sequence
  Description of Artificial Sequence: Synthetic oligonucleotide
agagguguaauuauacugc

SEQ ID NO: 465070 - RNA, 19 nt, Artificial Sequence
  Description of Artificial Sequence: Synthetic oligonucleotide
uacaguuagguuuagucca

SEQ ID NO: 465071 - RNA, 19 nt, Artificial Sequence
  Description of Artificial Sequence: Synthetic oligonucleotide
uggucagacacacugugcg

SEQ ID NO: 465072 - RNA, 19 nt, Artificial Sequence
  Description of Artificial Sequence: Synthetic oligonucleotide
augcauaugaaacaagugu

SEQ ID NO: 465073 - RNA, 19 nt, Artificial Sequence
  Description of Artificial Sequence: Synthetic oligonucleotide
caugauagcccacagagug

SEQ ID NO: 465074 - RNA, 19 nt, Artificial Sequence
  Description of Artificial Sequence: Synthetic oligonucleotide
gagagguguaauuauacug

SEQ ID NO: 465075 - RNA, 19 nt, Artificial Sequence
  Description of Artificial Sequence: Synthetic oligonucleotide
ugcauaugaaacaaguguc

SEQ ID NO: 465076 - RNA, 19 nt, Artificial Sequence
  Description of Artificial Sequence: Synthetic oligonucleotide
uguaggacaagccacacuu

SEQ ID NO: 465077 - RNA, 19 nt, Artificial Sequence
  Description of Artificial Sequence: Synthetic oligonucleotide
cuuacacacacacacacac

SEQ ID NO: 465078 - RNA, 19 nt, Artificial Sequence
  Description of Artificial Sequence: Synthetic oligonucleotide
uacacacacacacacacac

SEQ ID NO: 465079 - RNA, 19 nt, Artificial Sequence
  Description of Artificial Sequence: Synthetic oligonucleotide
ugccauguauuauuuaugc

SEQ ID NO: 465080 - RNA, 19 nt, Artificial Sequence
  Description of Artificial Sequence: Synthetic oligonucleotide
gaagaugucgacugcuggg

SEQ ID NO: 465081 - RNA, 19 nt, Artificial Sequence
  Description of Artificial Sequence: Synthetic oligonucleotide
uuacucuauacugaggaag

SEQ ID NO: 465082 - RNA, 19 nt, Artificial Sequence
  Description of Artificial Sequence: Synthetic oligonucleotide
uuugccauguauuauuuau

SEQ ID NO: 465083 - RNA, 19 nt, Artificial Sequence
  Description of Artificial Sequence: Synthetic oligonucleotide
aagaugucgacugcugggc

SEQ ID NO: 465084 - RNA, 19 nt, Artificial Sequence
  Description of Artificial Sequence: Synthetic oligonucleotide
uucacuaagacaugaggcu

SEQ ID NO: 465085 - RNA, 19 nt, Artificial Sequence
  Description of Artificial Sequence: Synthetic oligonucleotide
gugugugaaacccagucgg

SEQ ID NO: 465086 - RNA, 19 nt, Artificial Sequence
  Description of Artificial Sequence: Synthetic oligonucleotide
ucaccuaucagggugaugu

SEQ ID NO: 465087 - RNA, 19 nt, Artificial Sequence
  Description of Artificial Sequence: Synthetic oligonucleotide
aauguuccagccccuuugg

SEQ ID NO: 465088 - RNA, 19 nt, Artificial Sequence
  Description of Artificial Sequence: Synthetic oligonucleotide
uguauuauuuaugccagca

SEQ ID NO: 465089 - RNA, 19 nt, Artificial Sequence
  Description of Artificial Sequence: Synthetic oligonucleotide
uucuguauaaaagacuaga

SEQ ID NO: 465090 - RNA, 19 nt, Artificial Sequence
  Description of Artificial Sequence: Synthetic oligonucleotide
cauguuuccugcaaacccg

SEQ ID NO: 465091 - RNA, 19 nt, Artificial Sequence
  Description of Artificial Sequence: Synthetic oligonucleotide
uaugaaacaagugucuggu

SEQ ID NO: 465092 - RNA, 19 nt, Artificial Sequence
  Description of Artificial Sequence: Synthetic oligonucleotide
ucuguauaaaagacuagau

SEQ ID NO: 465093 - RNA, 19 nt, Artificial Sequence
  Description of Artificial Sequence: Synthetic oligonucleotide
uccucaguccccaaugucc

SEQ ID NO: 465094 - RNA, 19 nt, Artificial Sequence
  Description of Artificial Sequence: Synthetic oligonucleotide
uacucuauacugaggaaga

SEQ ID NO: 465095 - RNA, 19 nt, Artificial Sequence
  Description of Artificial Sequence: Synthetic oligonucleotide
uuuuccgcuaccuggaccu

SEQ ID NO: 465096 - RNA, 19 nt, Artificial Sequence
  Description of Artificial Sequence: Synthetic oligonucleotide
ucuaucaccuccuguagac

SEQ ID NO: 465097 - RNA, 19 nt, Artificial Sequence
  Description of Artificial Sequence: Synthetic oligonucleotide
ugucccuuucccaauaaac

SEQ ID NO: 465098 - RNA, 19 nt, Artificial Sequence
  Description of Artificial Sequence: Synthetic oligonucleotide
gaaaucagauggcucuagg

SEQ ID NO: 465099 - RNA, 19 nt, Artificial Sequence
  Description of Artificial Sequence: Synthetic oligonucleotide
aggugugugaaacccaguc

SEQ ID NO: 465100 - RNA, 19 nt, Artificial Sequence
  Description of Artificial Sequence: Synthetic oligonucleotide
ugucccaaugucuaucacc

SEQ ID NO: 465101 - RNA, 19 nt, Artificial Sequence
  Description of Artificial Sequence: Synthetic oligonucleotide
acacgucugucuuagucac

SEQ ID NO: 465102 - RNA, 19 nt, Artificial Sequence
  Description of Artificial Sequence: Synthetic oligonucleotide
agaaguggggcaaucacgg

SEQ ID NO: 465103 - RNA, 19 nt, Artificial Sequence
  Description of Artificial Sequence: Synthetic oligonucleotide
uaugacucucagauggaug

SEQ ID NO: 465104 - RNA, 19 nt, Artificial Sequence
  Description of Artificial Sequence: Synthetic oligonucleotide
cuaugggccacauuugcag

SEQ ID NO: 465105 - RNA, 19 nt, Artificial Sequence
  Description of Artificial Sequence: Synthetic oligonucleotide
uggacgaucucuucgguga

SEQ ID NO: 465106 - RNA, 19 nt, Artificial Sequence
  Description of Artificial Sequence: Synthetic oligonucleotide
aaguggggcaaucacggca

SEQ ID NO: 465107 - RNA, 19 nt, Artificial Sequence
  Description of Artificial Sequence: Synthetic oligonucleotide
ucugccuaauguuccagcc

SEQ ID NO: 465108 - RNA, 19 nt, Artificial Sequence
  Description of Artificial Sequence: Synthetic oligonucleotide
aaagccgagaacugcgcca

SEQ ID NO: 465109 - RNA, 19 nt, Artificial Sequence
  Description of Artificial Sequence: Synthetic oligonucleotide
guaaauuauaucccuggga

SEQ ID NO: 465110 - RNA, 19 nt, Artificial Sequence
  Description of Artificial Sequence: Synthetic oligonucleotide
cucugguuacucuauacug

SEQ ID NO: 465111 - RNA, 19 nt, Artificial Sequence
  Description of Artificial Sequence: Synthetic oligonucleotide
caugcauaugaaacaagug

SEQ ID NO: 465112 - RNA, 19 nt, Artificial Sequence
  Description of Artificial Sequence: Synthetic oligonucleotide
gguaaauuauaucccuggg

SEQ ID NO: 465113 - RNA, 19 nt, Artificial Sequence
  Description of Artificial Sequence: Synthetic oligonucleotide
guugguaacagacaggggu

SEQ ID NO: 465114 - RNA, 19 nt, Artificial Sequence
  Description of Artificial Sequence: Synthetic oligonucleotide
cacacacacacacacacac

SEQ ID NO: 465115 - RNA, 19 nt, Artificial Sequence
  Description of Artificial Sequence: Synthetic oligonucleotide
cucuuacacacacacacac

SEQ ID NO: 465116 - RNA, 19 nt, Artificial Sequence
  Description of Artificial Sequence: Synthetic oligonucleotide
uuuaaugggaaagccgaga

SEQ ID NO: 465117 - RNA, 19 nt, Artificial Sequence
  Description of Artificial Sequence: Synthetic oligonucleotide
ucuagccuguaguagcugc

SEQ ID NO: 465118 - RNA, 19 nt, Artificial Sequence
  Description of Artificial Sequence: Synthetic oligonucleotide
acuggaaucaacauacagu

SEQ ID NO: 465119 - RNA, 19 nt, Artificial Sequence
  Description of Artificial Sequence: Synthetic oligonucleotide
aaucacggcagugacagaa

SEQ ID NO: 465120 - RNA, 19 nt, Artificial Sequence
  Description of Artificial Sequence: Synthetic oligonucleotide
cagaaguggggcaaucacg

SEQ ID NO: 465121 - RNA, 19 nt, Artificial Sequence
  Description of Artificial Sequence: Synthetic oligonucleotide
cugguuacucuauacugag

SEQ ID NO: 465122 - RNA, 19 nt, Artificial Sequence
  Description of Artificial Sequence: Synthetic oligonucleotide
cauacaguacauucugcug

SEQ ID NO: 465123 - RNA, 19 nt, Artificial Sequence
  Description of Artificial Sequence: Synthetic oligonucleotide
auuuaugccagcaucaauu

SEQ ID NO: 465124 - RNA, 19 nt, Artificial Sequence
  Description of Artificial Sequence: Synthetic oligonucleotide
agaacugcgccagcaauac

SEQ ID NO: 465125 - RNA, 19 nt, Artificial Sequence
  Description of Artificial Sequence: Synthetic oligonucleotide
aucgagcucauguucucac

SEQ ID NO: 465126 - RNA, 19 nt, Artificial Sequence
  Description of Artificial Sequence: Synthetic oligonucleotide
guuugaaccuccuaccauc

SEQ ID NO: 465127 - RNA, 19 nt, Artificial Sequence
  Description of Artificial Sequence: Synthetic oligonucleotide
gguuacucuauacugagga

SEQ ID NO: 465128 - RNA, 19 nt, Artificial Sequence
  Description of Artificial Sequence: Synthetic oligonucleotide
ucuuacacacacacacaca

SEQ ID NO: 465129 - RNA, 19 nt, Artificial Sequence
  Description of Artificial Sequence: Synthetic oligonucleotide
guaauuauacugcaucuua

SEQ ID NO: 465130 - RNA, 19 nt, Artificial Sequence
  Description of Artificial Sequence: Synthetic oligonucleotide
accgaagaaccugaaaauc

SEQ ID NO: 465131 - RNA, 19 nt, Artificial Sequence
  Description of Artificial Sequence: Synthetic oligonucleotide
agaugucgacugcugggcc

SEQ ID NO: 465132 - RNA, 19 nt, Artificial Sequence
  Description of Artificial Sequence: Synthetic oligonucleotide
ugcgccagcaauacccucc

SEQ ID NO: 465133 - RNA, 19 nt, Artificial Sequence
  Description of Artificial Sequence: Synthetic oligonucleotide
uguugguaacagacagggg

SEQ ID NO: 465134 - RNA, 19 nt, Artificial Sequence
  Description of Artificial Sequence: Synthetic oligonucleotide
uccguuuaaugggaaagcc

SEQ ID NO: 465135 - RNA, 19 nt, Artificial Sequence
  Description of Artificial Sequence: Synthetic oligonucleotide
auuaucgucauggugggaa

SEQ ID NO: 465136 - RNA, 19 nt, Artificial Sequence
  Description of Artificial Sequence: Synthetic oligonucleotide
cagguuugaaccuccuacc

SEQ ID NO: 465137 - RNA, 19 nt, Artificial Sequence
  Description of Artificial Sequence: Synthetic oligonucleotide
acgagagguguaauuauac

SEQ ID NO: 465138 - RNA, 19 nt, Artificial Sequence
  Description of Artificial Sequence: Synthetic oligonucleotide
ugguuacucuauacugagg

SEQ ID NO: 465139 - RNA, 19 nt, Artificial Sequence
  Description of Artificial Sequence: Synthetic oligonucleotide
cacuggaaucaacauacag

SEQ ID NO: 465140 - RNA, 19 nt, Artificial Sequence
  Description of Artificial Sequence: Synthetic oligonucleotide
uagaccuguuggcuggcgg

SEQ ID NO: 465141 - RNA, 19 nt, Artificial Sequence
  Description of Artificial Sequence: Synthetic oligonucleotide
ggagaauccggguacuggg

SEQ ID NO: 465142 - RNA, 19 nt, Artificial Sequence
  Description of Artificial Sequence: Synthetic oligonucleotide
cuguagaccuguuggcugg

SEQ ID NO: 465143 - RNA, 19 nt, Artificial Sequence
  Description of Artificial Sequence: Synthetic oligonucleotide
uauaggucugcuccguuua

SEQ ID NO: 465144 - RNA, 19 nt, Artificial Sequence
  Description of Artificial Sequence: Synthetic oligonucleotide
caucuagauccacaggcag

SEQ ID NO: 465145 - RNA, 19 nt, Artificial Sequence
  Description of Artificial Sequence: Synthetic oligonucleotide
agugaagcugaggagacca

SEQ ID NO: 465146 - RNA, 19 nt, Artificial Sequence
  Description of Artificial Sequence: Synthetic oligonucleotide
gguucuagccuguaguagc

SEQ ID NO: 465147 - RNA, 19 nt, Artificial Sequence
  Description of Artificial Sequence: Synthetic oligonucleotide
uuaucgucauggugggaag

SEQ ID NO: 465148 - RNA, 19 nt, Artificial Sequence
  Description of Artificial Sequence: Synthetic oligonucleotide
uauuuaugccagcaucaau

SEQ ID NO: 465149 - RNA, 19 nt, Artificial Sequence
  Description of Artificial Sequence: Synthetic oligonucleotide
aagccauugggacuggcuu

SEQ ID NO: 465150 - RNA, 19 nt, Artificial Sequence
  Description of Artificial Sequence: Synthetic oligonucleotide
ugugaaacccagucggcaa

SEQ ID NO: 465151 - RNA, 19 nt, Artificial Sequence
  Description of Artificial Sequence: Synthetic oligonucleotide
uuuaugccagcaucaauuu

SEQ ID NO: 465152 - RNA, 19 nt, Artificial Sequence
  Description of Artificial Sequence: Synthetic oligonucleotide
ugcaucuuagagccaccag

SEQ ID NO: 465153 - RNA, 19 nt, Artificial Sequence
  Description of Artificial Sequence: Synthetic oligonucleotide
uuacacacacacacacaca

SEQ ID NO: 465154 - RNA, 19 nt, Artificial Sequence
  Description of Artificial Sequence: Synthetic oligonucleotide
cucuauacugaggaagagc

SEQ ID NO: 465155 - RNA, 19 nt, Artificial Sequence
  Description of Artificial Sequence: Synthetic oligonucleotide
auugaggcgggcuuacagu

SEQ ID NO: 465156 - RNA, 19 nt, Artificial Sequence
  Description of Artificial Sequence: Synthetic oligonucleotide
uuggucagacacacugugc

SEQ ID NO: 465157 - RNA, 19 nt, Artificial Sequence
  Description of Artificial Sequence: Synthetic oligonucleotide
uguaauuauacugcaucuu

SEQ ID NO: 465158 - RNA, 19 nt, Artificial Sequence
  Description of Artificial Sequence: Synthetic oligonucleotide
uuccugcaaacccggggcg

SEQ ID NO: 465159 - RNA, 19 nt, Artificial Sequence
  Description of Artificial Sequence: Synthetic oligonucleotide
uuauaucccugggacagca

SEQ ID NO: 465160 - RNA, 19 nt, Artificial Sequence
  Description of Artificial Sequence: Synthetic oligonucleotide
aggucauauccucccuccc

SEQ ID NO: 465161 - RNA, 19 nt, Artificial Sequence
  Description of Artificial Sequence: Synthetic oligonucleotide
gaggcgggcuuacaguuag

SEQ ID NO: 465162 - RNA, 19 nt, Artificial Sequence
  Description of Artificial Sequence: Synthetic oligonucleotide
auuauaucccugggacagc

SEQ ID NO: 465163 - RNA, 19 nt, Artificial Sequence
  Description of Artificial Sequence: Synthetic oligonucleotide
ugggcuuuugacucuuaca

SEQ ID NO: 465164 - RNA, 19 nt, Artificial Sequence
  Description of Artificial Sequence: Synthetic oligonucleotide
ugucauuccuccacuggaa

SEQ ID NO: 465165 - RNA, 19 nt, Artificial Sequence
  Description of Artificial Sequence: Synthetic oligonucleotide
cugagcacgcccauguuuc

SEQ ID NO: 465166 - RNA, 19 nt, Artificial Sequence
  Description of Artificial Sequence: Synthetic oligonucleotide
gugccugaagaagaugucg

SEQ ID NO: 465167 - RNA, 19 nt, Artificial Sequence
  Description of Artificial Sequence: Synthetic oligonucleotide
cacacacacacacacacga

SEQ ID NO: 465168 - RNA, 19 nt, Artificial Sequence
  Description of Artificial Sequence: Synthetic oligonucleotide
auggguuaggccacgguuc

SEQ ID NO: 465169 - RNA, 19 nt, Artificial Sequence
  Description of Artificial Sequence: Synthetic oligonucleotide
gcagguuugaaccuccuac

SEQ ID NO: 465170 - RNA, 19 nt, Artificial Sequence
  Description of Artificial Sequence: Synthetic oligonucleotide
uccuacaauuucagucacc

SEQ ID NO: 465171 - RNA, 19 nt, Artificial Sequence
  Description of Artificial Sequence: Synthetic oligonucleotide
uggcuugggcuuuugacuc

SEQ ID NO: 465172 - RNA, 19 nt, Artificial Sequence
  Description of Artificial Sequence: Synthetic oligonucleotide
uggguuaggccacgguuca

SEQ ID NO: 465173 - RNA, 19 nt, Artificial Sequence
  Description of Artificial Sequence: Synthetic oligonucleotide
cugguucuauuuacugugc

SEQ ID NO: 465174 - RNA, 19 nt, Artificial Sequence
  Description of Artificial Sequence: Synthetic oligonucleotide
aggagaauccggguacugg

SEQ ID NO: 465175 - RNA, 19 nt, Artificial Sequence
  Description of Artificial Sequence: Synthetic oligonucleotide
ugggcacaaagcuccagga

SEQ ID NO: 465176 - RNA, 19 nt, Artificial Sequence
  Description of Artificial Sequence: Synthetic oligonucleotide
ucagucaccuccccuguau

SEQ ID NO: 465177 - RNA, 19 nt, Artificial Sequence
  Description of Artificial Sequence: Synthetic oligonucleotide
ccuccuguagaccuguugg

SEQ ID NO: 465178 - RNA, 19 nt, Artificial Sequence
  Description of Artificial Sequence: Synthetic oligonucleotide
uauccucuggagagcaccu

SEQ ID NO: 465179 - RNA, 19 nt, Artificial Sequence
  Description of Artificial Sequence: Synthetic oligonucleotide
aggagaccaaagcuugucu

SEQ ID NO: 465180 - RNA, 19 nt, Artificial Sequence
  Description of Artificial Sequence: Synthetic oligonucleotide
acacacacacacgaaauaa

SEQ ID NO: 465181 - RNA, 19 nt, Artificial Sequence
  Description of Artificial Sequence: Synthetic oligonucleotide
uuauggguuaggccacggu

SEQ ID NO: 465182 - RNA, 19 nt, Artificial Sequence
  Description of Artificial Sequence: Synthetic oligonucleotide
acagcuaggucccgggcca

SEQ ID NO: 465183 - RNA, 19 nt, Artificial Sequence
  Description of Artificial Sequence: Synthetic oligonucleotide
uucggugaggcccgggcac

SEQ ID NO: 465184 - RNA, 19 nt, Artificial Sequence
  Description of Artificial Sequence: Synthetic oligonucleotide
uggauccagaguucuacau

SEQ ID NO: 465185 - RNA, 19 nt, Artificial Sequence
  Description of Artificial Sequence: Synthetic oligonucleotide
guuuaaugggaaagccgag

SEQ ID NO: 465186 - RNA, 19 nt, Artificial Sequence
  Description of Artificial Sequence: Synthetic oligonucleotide
acgucugucuuagucacug

SEQ ID NO: 465187 - RNA, 19 nt, Artificial Sequence
  Description of Artificial Sequence: Synthetic oligonucleotide
cugccuaauguuccagccc

SEQ ID NO: 465188 - RNA, 19 nt, Artificial Sequence
  Description of Artificial Sequence: Synthetic oligonucleotide
uaacagacagggguuauuu

SEQ ID NO: 465189 - RNA, 19 nt, Artificial Sequence
  Description of Artificial Sequence: Synthetic oligonucleotide
acacacugugcguuggccu

SEQ ID NO: 465190 - RNA, 19 nt, Artificial Sequence
  Description of Artificial Sequence: Synthetic oligonucleotide
aguuagguuuaguccauua

SEQ ID NO: 465191 - RNA, 19 nt, Artificial Sequence
  Description of Artificial Sequence: Synthetic oligonucleotide
acaaagcuccaggagcguc

SEQ ID NO: 465192 - RNA, 19 nt, Artificial Sequence
  Description of Artificial Sequence: Synthetic oligonucleotide
ccugucucgggucaagugg

SEQ ID NO: 465193 - RNA, 19 nt, Artificial Sequence
  Description of Artificial Sequence: Synthetic oligonucleotide
auauaggucugcuccguuu

SEQ ID NO: 465194 - RNA, 19 nt, Artificial Sequence
  Description of Artificial Sequence: Synthetic oligonucleotide
cuccguuuaaugggaaagc

SEQ ID NO: 465195 - RNA, 19 nt, Artificial Sequence
  Description of Artificial Sequence: Synthetic oligonucleotide
ccguuuaaugggaaagccg

SEQ ID NO: 465196 - RNA, 19 nt, Artificial Sequence
  Description of Artificial Sequence: Synthetic oligonucleotide
uugaggcgggcuuacaguu

SEQ ID NO: 465197 - RNA, 19 nt, Artificial Sequence
  Description of Artificial Sequence: Synthetic oligonucleotide
gaugucgacugcugggcca

SEQ ID NO: 465198 - RNA, 19 nt, Artificial Sequence
  Description of Artificial Sequence: Synthetic oligonucleotide
uacaugcaccaccuguauc

SEQ ID NO: 465199 - RNA, 19 nt, Artificial Sequence
  Description of Artificial Sequence: Synthetic oligonucleotide
ucgagcucauguucucacc

SEQ ID NO: 465200 - RNA, 19 nt, Artificial Sequence
  Description of Artificial Sequence: Synthetic oligonucleotide
aguagcugcaggaggcggg

SEQ ID NO: 465201 - RNA, 19 nt, Artificial Sequence
  Description of Artificial Sequence: Synthetic oligonucleotide
aguucuacaucuagaucca

SEQ ID NO: 465202 - RNA, 19 nt, Artificial Sequence
  Description of Artificial Sequence: Synthetic oligonucleotide
gaaccuccuaccaucccug

SEQ ID NO: 465203 - RNA, 19 nt, Artificial Sequence
  Description of Artificial Sequence: Synthetic oligonucleotide
gucacaugggcgcccgccg

SEQ ID NO: 465204 - RNA, 19 nt, Artificial Sequence
  Description of Artificial Sequence: Synthetic oligonucleotide
uuaugccagcaucaauuuu

SEQ ID NO: 465205 - RNA, 19 nt, Artificial Sequence
  Description of Artificial Sequence: Synthetic oligonucleotide
ucuuagucacuguucuauu

SEQ ID NO: 465206 - RNA, 19 nt, Artificial Sequence
  Description of Artificial Sequence: Synthetic oligonucleotide
acacacacacacgucuguc

SEQ ID NO: 465207 - RNA, 19 nt, Artificial Sequence
  Description of Artificial Sequence: Synthetic oligonucleotide
acucuauacugaggaagag

SEQ ID NO: 465208 - RNA, 19 nt, Artificial Sequence
  Description of Artificial Sequence: Synthetic oligonucleotide
uggguucuagccuguagua

SEQ ID NO: 465209 - RNA, 19 nt, Artificial Sequence
  Description of Artificial Sequence: Synthetic oligonucleotide
gaaguggggcaaucacggc

SEQ ID NO: 465210 - RNA, 19 nt, Artificial Sequence
  Description of Artificial Sequence: Synthetic oligonucleotide
auacaugcaccaccuguau

SEQ ID NO: 465211 - RNA, 19 nt, Artificial Sequence
  Description of Artificial Sequence: Synthetic oligonucleotide
cuaccaucccugucucggg

SEQ ID NO: 465212 - RNA, 19 nt, Artificial Sequence
  Description of Artificial Sequence: Synthetic oligonucleotide
aaacccggggcgccccggg

SEQ ID NO: 465213 - RNA, 19 nt, Artificial Sequence
  Description of Artificial Sequence: Synthetic oligonucleotide
uccccuguauagaggccag

SEQ ID NO: 465214 - RNA, 19 nt, Artificial Sequence
  Description of Artificial Sequence: Synthetic oligonucleotide
uaucgucauggugggaagc

SEQ ID NO: 465215 - RNA, 19 nt, Artificial Sequence
  Description of Artificial Sequence: Synthetic oligonucleotide
cuguucuauuguugugaag

SEQ ID NO: 465216 - RNA, 19 nt, Artificial Sequence
  Description of Artificial Sequence: Synthetic oligonucleotide
gaagcaugguggcgugcag

SEQ ID NO: 465217 - RNA, 19 nt, Artificial Sequence
  Description of Artificial Sequence: Synthetic oligonucleotide
aggacgagagguguaauua

SEQ ID NO: 465218 - RNA, 19 nt, Artificial Sequence
  Description of Artificial Sequence: Synthetic oligonucleotide
cacacugugcguuggccuc

SEQ ID NO: 465219 - RNA, 19 nt, Artificial Sequence
  Description of Artificial Sequence: Synthetic oligonucleotide
guuacucuauacugaggaa

SEQ ID NO: 465220 - RNA, 19 nt, Artificial Sequence
  Description of Artificial Sequence: Synthetic oligonucleotide
cuauuguugugaagagaca

SEQ ID NO: 465221 - RNA, 19 nt, Artificial Sequence
  Description of Artificial Sequence: Synthetic oligonucleotide
agcaucgagcucauguucu

SEQ ID NO: 465222 - RNA, 19 nt, Artificial Sequence
  Description of Artificial Sequence: Synthetic oligonucleotide
acacacacacacacacacg

SEQ ID NO: 465223 - RNA, 19 nt, Artificial Sequence
  Description of Artificial Sequence: Synthetic oligonucleotide
uuaggccacgguucagcac

SEQ ID NO: 465224 - RNA, 19 nt, Artificial Sequence
  Description of Artificial Sequence: Synthetic oligonucleotide
ggcuaugggccacauuugc

SEQ ID NO: 465225 - RNA, 19 nt, Artificial Sequence
  Description of Artificial Sequence: Synthetic oligonucleotide
cacacacacacacacgaaa

SEQ ID NO: 465226 - RNA, 19 nt, Artificial Sequence
  Description of Artificial Sequence: Synthetic oligonucleotide
aacaagugucugguucacu

SEQ ID NO: 465227 - RNA, 19 nt, Artificial Sequence
  Description of Artificial Sequence: Synthetic oligonucleotide
cacacacacacacacacgu

SEQ ID NO: 465228 - RNA, 19 nt, Artificial Sequence
  Description of Artificial Sequence: Synthetic oligonucleotide
caaugucccaaugucuauc

SEQ ID NO: 465229 - RNA, 19 nt, Artificial Sequence
  Description of Artificial Sequence: Synthetic oligonucleotide
uccuaccaucccugucucg

SEQ ID NO: 465230 - RNA, 19 nt, Artificial Sequence
  Description of Artificial Sequence: Synthetic oligonucleotide
gcuccguuuaaugggaaag

SEQ ID NO: 465231 - RNA, 19 nt, Artificial Sequence
  Description of Artificial Sequence: Synthetic oligonucleotide
ugagcacgcccauguuucc

SEQ ID NO: 465232 - RNA, 19 nt, Artificial Sequence
  Description of Artificial Sequence: Synthetic oligonucleotide
aggcgggaugcugucauuc

SEQ ID NO: 465233 - RNA, 19 nt, Artificial Sequence
  Description of Artificial Sequence: Synthetic oligonucleotide
ccuaccaucccugucucgg

SEQ ID NO: 465234 - RNA, 19 nt, Artificial Sequence
  Description of Artificial Sequence: Synthetic oligonucleotide
acacacacacacacgaaau

SEQ ID NO: 465235 - RNA, 19 nt, Artificial Sequence
  Description of Artificial Sequence: Synthetic oligonucleotide
ugcuccguuuaaugggaaa

SEQ ID NO: 465236 - RNA, 19 nt, Artificial Sequence
  Description of Artificial Sequence: Synthetic oligonucleotide
ucacaugggcgcccgccga

SEQ ID NO: 465237 - RNA, 19 nt, Artificial Sequence
  Description of Artificial Sequence: Synthetic oligonucleotide
aaccuccuaccaucccugu

SEQ ID NO: 465238 - RNA, 19 nt, Artificial Sequence
  Description of Artificial Sequence: Synthetic oligonucleotide
uccgcuaccuggaccuccu

SEQ ID NO: 465239 - RNA, 19 nt, Artificial Sequence
  Description of Artificial Sequence: Synthetic oligonucleotide
gacucuuauaaaggaaagu

SEQ ID NO: 465240 - RNA, 19 nt, Artificial Sequence
  Description of Artificial Sequence: Synthetic oligonucleotide
cagcaucgagcucauguuc

SEQ ID NO: 465241 - RNA, 19 nt, Artificial Sequence
  Description of Artificial Sequence: Synthetic oligonucleotide
ccgaagaaccugaaaauca

SEQ ID NO: 465242 - RNA, 19 nt, Artificial Sequence
  Description of Artificial Sequence: Synthetic oligonucleotide
gucccaaugucuaucaccu

SEQ ID NO: 465243 - RNA, 19 nt, Artificial Sequence
  Description of Artificial Sequence: Synthetic oligonucleotide
agccagaguuaugacucuc

SEQ ID NO: 465244 - RNA, 19 nt, Artificial Sequence
  Description of Artificial Sequence: Synthetic oligonucleotide
ugucuuagucacuguucua

SEQ ID NO: 465245 - RNA, 19 nt, Artificial Sequence
  Description of Artificial Sequence: Synthetic oligonucleotide
agguccgccacugucuuga

SEQ ID NO: 465246 - RNA, 19 nt, Artificial Sequence
  Description of Artificial Sequence: Synthetic oligonucleotide
cacacacacacacacgucu

SEQ ID NO: 465247 - RNA, 19 nt, Artificial Sequence
  Description of Artificial Sequence: Synthetic oligonucleotide
acacacacacacacacguc

SEQ ID NO: 465248 - RNA, 19 nt, Artificial Sequence
  Description of Artificial Sequence: Synthetic oligonucleotide
ucgacugcugggccaugga

SEQ ID NO: 465249 - RNA, 19 nt, Artificial Sequence
  Description of Artificial Sequence: Synthetic oligonucleotide
gcaccaugcauaugaaaca

SEQ ID NO: 465250 - RNA, 19 nt, Artificial Sequence
  Description of Artificial Sequence: Synthetic oligonucleotide
acucuuacacacacacaca

SEQ ID NO: 465251 - RNA, 19 nt, Artificial Sequence
  Description of Artificial Sequence: Synthetic oligonucleotide
gaacugcgccagcaauacc

SEQ ID NO: 465252 - RNA, 19 nt, Artificial Sequence
  Description of Artificial Sequence: Synthetic oligonucleotide
agggguuauuuuauucacu

SEQ ID NO: 465253 - RNA, 19 nt, Artificial Sequence
  Description of Artificial Sequence: Synthetic oligonucleotide
acacacacacacacgucug

SEQ ID NO: 465254 - RNA, 19 nt, Artificial Sequence
  Description of Artificial Sequence: Synthetic oligonucleotide
ccaccgaagaaccugaaaa

SEQ ID NO: 465255 - RNA, 19 nt, Artificial Sequence
  Description of Artificial Sequence: Synthetic oligonucleotide
guaccauccuccccucuca

SEQ ID NO: 465256 - RNA, 19 nt, Artificial Sequence
  Description of Artificial Sequence: Synthetic oligonucleotide
guaguuuguccaggcuucc

SEQ ID NO: 465257 - RNA, 19 nt, Artificial Sequence
  Description of Artificial Sequence: Synthetic oligonucleotide
accuaucagggugauguau

SEQ ID NO: 465258 - RNA, 19 nt, Artificial Sequence
  Description of Artificial Sequence: Synthetic oligonucleotide
gguacugggcacaaagcuc

SEQ ID NO: 465259 - RNA, 19 nt, Artificial Sequence
  Description of Artificial Sequence: Synthetic oligonucleotide
gcugaccucccagaagugg

SEQ ID NO: 465260 - RNA, 19 nt, Artificial Sequence
  Description of Artificial Sequence: Synthetic oligonucleotide
gguuaggccacgguucagc

SEQ ID NO: 465261 - RNA, 19 nt, Artificial Sequence
  Description of Artificial Sequence: Synthetic oligonucleotide
guuaugacucucagaugga

SEQ ID NO: 465262 - RNA, 19 nt, Artificial Sequence
  Description of Artificial Sequence: Synthetic oligonucleotide
gacgagagguguaauuaua

SEQ ID NO: 465263 - RNA, 19 nt, Artificial Sequence
  Description of Artificial Sequence: Synthetic oligonucleotide
gugugaaacccagucggca

SEQ ID NO: 465264 - RNA, 19 nt, Artificial Sequence
  Description of Artificial Sequence: Synthetic oligonucleotide
gcuaccuggaccuccuaca

SEQ ID NO: 465265 - RNA, 19 nt, Artificial Sequence
  Description of Artificial Sequence: Synthetic oligonucleotide
uguuggcuggcggggagac

SEQ ID NO: 465266 - RNA, 19 nt, Artificial Sequence
  Description of Artificial Sequence: Synthetic oligonucleotide
gucuuagucacuguucuau

SEQ ID NO: 465267 - RNA, 19 nt, Artificial Sequence
  Description of Artificial Sequence: Synthetic oligonucleotide
uuccgcuaccuggaccucc

SEQ ID NO: 465268 - RNA, 19 nt, Artificial Sequence
  Description of Artificial Sequence: Synthetic oligonucleotide
augauagcccacagaguga

SEQ ID NO: 465269 - RNA, 19 nt, Artificial Sequence
  Description of Artificial Sequence: Synthetic oligonucleotide
gucgacugcugggccaugg

SEQ ID NO: 465270 - RNA, 19 nt, Artificial Sequence
  Description of Artificial Sequence: Synthetic oligonucleotide
gucaagugguuggucacca

SEQ ID NO: 465271 - RNA, 19 nt, Artificial Sequence
  Description of Artificial Sequence: Synthetic oligonucleotide
gucuugauccuuuggcccu

SEQ ID NO: 465272 - RNA, 19 nt, Artificial Sequence
  Description of Artificial Sequence: Synthetic oligonucleotide
uggggcaaucacggcagug

SEQ ID NO: 465273 - RNA, 19 nt, Artificial Sequence
  Description of Artificial Sequence: Synthetic oligonucleotide
ggguucuagccuguaguag

SEQ ID NO: 465274 - RNA, 19 nt, Artificial Sequence
  Description of Artificial Sequence: Synthetic oligonucleotide
guagaccuguuggcuggcg

SEQ ID NO: 465275 - RNA, 19 nt, Artificial Sequence
  Description of Artificial Sequence: Synthetic oligonucleotide
agcagguuugaaccuccua

SEQ ID NO: 465276 - RNA, 19 nt, Artificial Sequence
  Description of Artificial Sequence: Synthetic oligonucleotide
cacacacacacacgaaaua

SEQ ID NO: 465277 - RNA, 19 nt, Artificial Sequence
  Description of Artificial Sequence: Synthetic oligonucleotide
ggugacucuuauaaaggaa

SEQ ID NO: 465278 - RNA, 19 nt, Artificial Sequence
  Description of Artificial Sequence: Synthetic oligonucleotide
acaguuagguuuaguccau

SEQ ID NO: 465279 - RNA, 19 nt, Artificial Sequence
  Description of Artificial Sequence: Synthetic oligonucleotide
cccagcugguucuauuuac

SEQ ID NO: 465280 - RNA, 19 nt, Artificial Sequence
  Description of Artificial Sequence: Synthetic oligonucleotide
agugucugguucacuggga

SEQ ID NO: 465281 - RNA, 19 nt, Artificial Sequence
  Description of Artificial Sequence: Synthetic oligonucleotide
cuccuaccaucccugucuc

SEQ ID NO: 465282 - RNA, 19 nt, Artificial Sequence
  Description of Artificial Sequence: Synthetic oligonucleotide
gucucgggucaagugguug

SEQ ID NO: 465283 - RNA, 19 nt, Artificial Sequence
  Description of Artificial Sequence: Synthetic oligonucleotide
cacaugggcgcccgccgag

SEQ ID NO: 465284 - RNA, 19 nt, Artificial Sequence
  Description of Artificial Sequence: Synthetic oligonucleotide
cuaccuggaccuccuacaa

SEQ ID NO: 465285 - RNA, 19 nt, Artificial Sequence
  Description of Artificial Sequence: Synthetic oligonucleotide
acacacacacacacacaca

SEQ ID NO: 465286 - RNA, 19 nt, Artificial Sequence
  Description of Artificial Sequence: Synthetic oligonucleotide
ggcgggaugcugucauucc

SEQ ID NO: 465287 - RNA, 19 nt, Artificial Sequence
  Description of Artificial Sequence: Synthetic oligonucleotide
cagacagggguuauuuuau

SEQ ID NO: 465288 - RNA, 19 nt, Artificial Sequence
  Description of Artificial Sequence: Synthetic oligonucleotide
ucccaaugucuaucaccuc

SEQ ID NO: 465289 - RNA, 19 nt, Artificial Sequence
  Description of Artificial Sequence: Synthetic oligonucleotide
ugcaaacccggggcgcccc

SEQ ID NO: 465290 - RNA, 19 nt, Artificial Sequence
  Description of Artificial Sequence: Synthetic oligonucleotide
guaggacaagccacacuuc

SEQ ID NO: 465291 - RNA, 19 nt, Artificial Sequence
  Description of Artificial Sequence: Synthetic oligonucleotide
gggugauguaugcaggugu

SEQ ID NO: 465292 - RNA, 19 nt, Artificial Sequence
  Description of Artificial Sequence: Synthetic oligonucleotide
aggcuaugggccacauuug

SEQ ID NO: 465293 - RNA, 19 nt, Artificial Sequence
  Description of Artificial Sequence: Synthetic oligonucleotide
acugcgccagcaauacccu

SEQ ID NO: 465294 - RNA, 19 nt, Artificial Sequence
  Description of Artificial Sequence: Synthetic oligonucleotide
gauggcucuagggcucaga

SEQ ID NO: 465295 - RNA, 19 nt, Artificial Sequence
  Description of Artificial Sequence: Synthetic oligonucleotide
gcauaugaaacaagugucu

SEQ ID NO: 465296 - RNA, 19 nt, Artificial Sequence
  Description of Artificial Sequence: Synthetic oligonucleotide
ugucucgggucaagugguu

SEQ ID NO: 465297 - RNA, 19 nt, Artificial Sequence
  Description of Artificial Sequence: Synthetic oligonucleotide
cuucggugaggcccgggca

SEQ ID NO: 465298 - RNA, 19 nt, Artificial Sequence
  Description of Artificial Sequence: Synthetic oligonucleotide
ucgucauggugggaagcau

SEQ ID NO: 465299 - RNA, 19 nt, Artificial Sequence
  Description of Artificial Sequence: Synthetic oligonucleotide
cugucucgggucaaguggu

SEQ ID NO: 465300 - RNA, 19 nt, Artificial Sequence
  Description of Artificial Sequence: Synthetic oligonucleotide
caggagaauccggguacug

SEQ ID NO: 465301 - RNA, 19 nt, Artificial Sequence
  Description of Artificial Sequence: Synthetic oligonucleotide
caaguaguuuguccaggcu

SEQ ID NO: 465302 - RNA, 19 nt, Artificial Sequence
  Description of Artificial Sequence: Synthetic oligonucleotide
caugggcgcccgccgagac

SEQ ID NO: 465303 - RNA, 19 nt, Artificial Sequence
  Description of Artificial Sequence: Synthetic oligonucleotide
uggcuggcggggagacuug

SEQ ID NO: 465304 - RNA, 19 nt, Artificial Sequence
  Description of Artificial Sequence: Synthetic oligonucleotide
ucggugaggcccgggcaca

SEQ ID NO: 465305 - RNA, 19 nt, Artificial Sequence
  Description of Artificial Sequence: Synthetic oligonucleotide
cuagggcucagaggacuuc

SEQ ID NO: 465306 - RNA, 19 nt, Artificial Sequence
  Description of Artificial Sequence: Synthetic oligonucleotide
augucgacugcugggccau

SEQ ID NO: 465307 - RNA, 19 nt, Artificial Sequence
  Description of Artificial Sequence: Synthetic oligonucleotide
gucauuccuccacuggaau

SEQ ID NO: 465308 - RNA, 19 nt, Artificial Sequence
  Description of Artificial Sequence: Synthetic oligonucleotide
ccacgguucagcaccucug

SEQ ID NO: 465309 - RNA, 19 nt, Artificial Sequence
  Description of Artificial Sequence: Synthetic oligonucleotide
caucgagcucauguucuca

SEQ ID NO: 465310 - RNA, 19 nt, Artificial Sequence
  Description of Artificial Sequence: Synthetic oligonucleotide
ucgggucaagugguugguc

SEQ ID NO: 465311 - RNA, 19 nt, Artificial Sequence
  Description of Artificial Sequence: Synthetic oligonucleotide
acacacacacacacacgaa

SEQ ID NO: 465312 - RNA, 19 nt, Artificial Sequence
  Description of Artificial Sequence: Synthetic oligonucleotide
cauccuccccucucagcca

SEQ ID NO: 465313 - RNA, 19 nt, Artificial Sequence
  Description of Artificial Sequence: Synthetic oligonucleotide
gguuugaaccuccuaccau

SEQ ID NO: 465314 - RNA, 19 nt, Artificial Sequence
  Description of Artificial Sequence: Synthetic oligonucleotide
ucuuggguucuagccugua

SEQ ID NO: 465315 - RNA, 19 nt, Artificial Sequence
  Description of Artificial Sequence: Synthetic oligonucleotide
gcuaugggccacauuugca

SEQ ID NO: 465316 - RNA, 19 nt, Artificial Sequence
  Description of Artificial Sequence: Synthetic oligonucleotide
ggagaccaaagcuugucuu

SEQ ID NO: 465317 - RNA, 19 nt, Artificial Sequence
  Description of Artificial Sequence: Synthetic oligonucleotide
gcaucgagcucauguucuc

SEQ ID NO: 465318 - RNA, 19 nt, Artificial Sequence
  Description of Artificial Sequence: Synthetic oligonucleotide
cucaccuaucagggugaug

SEQ ID NO: 465319 - RNA, 19 nt, Artificial Sequence
  Description of Artificial Sequence: Synthetic oligonucleotide
cugcgccagcaauacccuc

SEQ ID NO: 465320 - RNA, 19 nt, Artificial Sequence
  Description of Artificial Sequence: Synthetic oligonucleotide
caaacccggggcgccccgg

SEQ ID NO: 465321 - RNA, 19 nt, Artificial Sequence
  Description of Artificial Sequence: Synthetic oligonucleotide
ccccuuuggugacauccag

SEQ ID NO: 465322 - RNA, 19 nt, Artificial Sequence
  Description of Artificial Sequence: Synthetic oligonucleotide
cugcaaacccggggcgccc

SEQ ID NO: 465323 - RNA, 19 nt, Artificial Sequence
  Description of Artificial Sequence: Synthetic oligonucleotide
cacacacacacacgucugu

SEQ ID NO: 465324 - RNA, 19 nt, Artificial Sequence
  Description of Artificial Sequence: Synthetic oligonucleotide
aucuuggguucuagccugu

SEQ ID NO: 465325 - RNA, 19 nt, Artificial Sequence
  Description of Artificial Sequence: Synthetic oligonucleotide
cccugucucgggucaagug

SEQ ID NO: 465326 - RNA, 19 nt, Artificial Sequence
  Description of Artificial Sequence: Synthetic oligonucleotide
cgggcuuacaguuagguuu

SEQ ID NO: 465327 - RNA, 19 nt, Artificial Sequence
  Description of Artificial Sequence: Synthetic oligonucleotide
guccgccacugucuugauc

SEQ ID NO: 465328 - RNA, 19 nt, Artificial Sequence
  Description of Artificial Sequence: Synthetic oligonucleotide
cuggcaggacgagaggugu

SEQ ID NO: 465329 - RNA, 19 nt, Artificial Sequence
  Description of Artificial Sequence: Synthetic oligonucleotide
caggacgagagguguaauu

SEQ ID NO: 465330 - RNA, 19 nt, Artificial Sequence
  Description of Artificial Sequence: Synthetic oligonucleotide
ugucgacugcugggccaug

SEQ ID NO: 465331 - RNA, 19 nt, Artificial Sequence
  Description of Artificial Sequence: Synthetic oligonucleotide
ggcuggcggggagacuugg

SEQ ID NO: 465332 - RNA, 19 nt, Artificial Sequence
  Description of Artificial Sequence: Synthetic oligonucleotide
ggcaggcaauucugggcuc

SEQ ID NO: 465333 - RNA, 19 nt, Artificial Sequence
  Description of Artificial Sequence: Synthetic oligonucleotide
aggcgggcuuacaguuagg

SEQ ID NO: 465334 - RNA, 19 nt, Artificial Sequence
  Description of Artificial Sequence: Synthetic oligonucleotide
guaacagacagggguuauu

SEQ ID NO: 465335 - RNA, 19 nt, Artificial Sequence
  Description of Artificial Sequence: Synthetic oligonucleotide
ugguggcgugcaggcagac

SEQ ID NO: 465336 - RNA, 19 nt, Artificial Sequence
  Description of Artificial Sequence: Synthetic oligonucleotide
cagucaccuccccuguaua

SEQ ID NO: 465337 - RNA, 19 nt, Artificial Sequence
  Description of Artificial Sequence: Synthetic oligonucleotide
gucggcaagcagggaagaa

SEQ ID NO: 465338 - RNA, 19 nt, Artificial Sequence
  Description of Artificial Sequence: Synthetic oligonucleotide
cauauaggucugcuccguu

SEQ ID NO: 465339 - RNA, 19 nt, Artificial Sequence
  Description of Artificial Sequence: Synthetic oligonucleotide
caccuaucagggugaugua

SEQ ID NO: 465340 - RNA, 19 nt, Artificial Sequence
  Description of Artificial Sequence: Synthetic oligonucleotide
cgcuaccuggaccuccuac

SEQ ID NO: 465341 - RNA, 19 nt, Artificial Sequence
  Description of Artificial Sequence: Synthetic oligonucleotide
cagcuaggucccgggccag

SEQ ID NO: 465342 - RNA, 19 nt, Artificial Sequence
  Description of Artificial Sequence: Synthetic oligonucleotide
ccucucagccagaguuaug

SEQ ID NO: 465343 - RNA, 19 nt, Artificial Sequence
  Description of Artificial Sequence: Synthetic oligonucleotide
cccacccugagcacgccca

SEQ ID NO: 465344 - RNA, 19 nt, Artificial Sequence
  Description of Artificial Sequence: Synthetic oligonucleotide
auccggguacugggcacaa

SEQ ID NO: 465345 - RNA, 19 nt, Artificial Sequence
  Description of Artificial Sequence: Synthetic oligonucleotide
ggguuaggccacgguucag

SEQ ID NO: 465346 - RNA, 19 nt, Artificial Sequence
  Description of Artificial Sequence: Synthetic oligonucleotide
gcgggaugcugucauuccu

SEQ ID NO: 465347 - RNA, 19 nt, Artificial Sequence
  Description of Artificial Sequence: Synthetic oligonucleotide
gccacgguucagcaccucu

SEQ ID NO: 465348 - RNA, 19 nt, Artificial Sequence
  Description of Artificial Sequence: Synthetic oligonucleotide
gggcugucacaugggcgcc

SEQ ID NO: 465349 - RNA, 19 nt, Artificial Sequence
  Description of Artificial Sequence: Synthetic oligonucleotide
cacgucugucuuagucacu

SEQ ID NO: 465350 - RNA, 19 nt, Artificial Sequence
  Description of Artificial Sequence: Synthetic oligonucleotide
gccuguggacaggauggca

SEQ ID NO: 465351 - RNA, 19 nt, Artificial Sequence
  Description of Artificial Sequence: Synthetic oligonucleotide
gagccccgaagguccugua

SEQ ID NO: 465352 - RNA, 19 nt, Artificial Sequence
  Description of Artificial Sequence: Synthetic oligonucleotide
cacaaagcuccaggagcgu

SEQ ID NO: 465353 - RNA, 19 nt, Artificial Sequence
  Description of Artificial Sequence: Synthetic oligonucleotide
cccaccgaagaaccugaaa

SEQ ID NO: 465354 - RNA, 19 nt, Artificial Sequence
  Description of Artificial Sequence: Synthetic oligonucleotide
ccuguauagaggccagcau

SEQ ID NO: 465355 - RNA, 19 nt, Artificial Sequence
  Description of Artificial Sequence: Synthetic oligonucleotide
cggggagacuuggucagac

SEQ ID NO: 465356 - RNA, 19 nt, Artificial Sequence
  Description of Artificial Sequence: Synthetic oligonucleotide
ccgagaacugcgccagcaa

SEQ ID NO: 465357 - RNA, 19 nt, Artificial Sequence
  Description of Artificial Sequence: Synthetic oligonucleotide
gcgggcuuacaguuagguu

SEQ ID NO: 465358 - RNA, 19 nt, Artificial Sequence
  Description of Artificial Sequence: Synthetic oligonucleotide
ccccucucagccagaguua

SEQ ID NO: 465359 - RNA, 19 nt, Artificial Sequence
  Description of Artificial Sequence: Synthetic oligonucleotide
cguuggccucugccuaaug

SEQ ID NO: 465360 - RNA, 19 nt, Artificial Sequence
  Description of Artificial Sequence: Synthetic oligonucleotide
caguuagguuuaguccauu

SEQ ID NO: 465361 - RNA, 19 nt, Artificial Sequence
  Description of Artificial Sequence: Synthetic oligonucleotide
gccuaauguuccagccccu

SEQ ID NO: 465362 - RNA, 19 nt, Artificial Sequence
  Description of Artificial Sequence: Synthetic oligonucleotide
gcggggagacuuggucaga

SEQ ID NO: 465363 - RNA, 19 nt, Artificial Sequence
  Description of Artificial Sequence: Synthetic oligonucleotide
gcaggacgagagguguaau

SEQ ID NO: 465364 - RNA, 19 nt, Artificial Sequence
  Description of Artificial Sequence: Synthetic oligonucleotide
ccuaauguuccagccccuu

SEQ ID NO: 465365 - RNA, 19 nt, Artificial Sequence
  Description of Artificial Sequence: Synthetic oligonucleotide
cccucucagccagaguuau

SEQ ID NO: 465366 - RNA, 19 nt, Artificial Sequence
  Description of Artificial Sequence: Synthetic oligonucleotide
cucgggccagcugcaucau

SEQ ID NO: 465367 - RNA, 19 nt, Artificial Sequence
  Description of Artificial Sequence: Synthetic oligonucleotide
gcguuggccucugccuaau

SEQ ID NO: 465368 - RNA, 19 nt, Artificial Sequence
  Description of Artificial Sequence: Synthetic oligonucleotide
ccgcuaccuggaccuccua

SEQ ID NO: 465369 - RNA, 19 nt, Artificial Sequence
  Description of Artificial Sequence: Synthetic oligonucleotide
aacaacauuacgcagcagg

SEQ ID NO: 465370 - RNA, 19 nt, Artificial Sequence
  Description of Artificial Sequence: Synthetic oligonucleotide
aaagcuauaguugaugacg

SEQ ID NO: 465371 - RNA, 19 nt, Artificial Sequence
  Description of Artificial Sequence: Synthetic oligonucleotide
uggucuuaaguucugagcg

SEQ ID NO: 465372 - RNA, 19 nt, Artificial Sequence
  Description of Artificial Sequence: Synthetic oligonucleotide
aacauuacgcagcagguag

SEQ ID NO: 465373 - RNA, 19 nt, Artificial Sequence
  Description of Artificial Sequence: Synthetic oligonucleotide
ucuacauccagacggauga

SEQ ID NO: 465374 - RNA, 19 nt, Artificial Sequence
  Description of Artificial Sequence: Synthetic oligonucleotide
guugaaugauccuucaucc

SEQ ID NO: 465375 - RNA, 19 nt, Artificial Sequence
  Description of Artificial Sequence: Synthetic oligonucleotide
agcacuauagaugugggcg

SEQ ID NO: 465376 - RNA, 19 nt, Artificial Sequence
  Description of Artificial Sequence: Synthetic oligonucleotide
aauaggcugugccacuucg

SEQ ID NO: 465377 - RNA, 19 nt, Artificial Sequence
  Description of Artificial Sequence: Synthetic oligonucleotide
aagaccucacccaaugucc

SEQ ID NO: 465378 - RNA, 19 nt, Artificial Sequence
  Description of Artificial Sequence: Synthetic oligonucleotide
aaugauuaugucaggguuc

SEQ ID NO: 465379 - RNA, 19 nt, Artificial Sequence
  Description of Artificial Sequence: Synthetic oligonucleotide
gacgguuucgugcugaaag

SEQ ID NO: 465380 - RNA, 19 nt, Artificial Sequence
  Description of Artificial Sequence: Synthetic oligonucleotide
ucagucacgaugagggugg

SEQ ID NO: 465381 - RNA, 19 nt, Artificial Sequence
  Description of Artificial Sequence: Synthetic oligonucleotide
aaauccuugggccgguagg

SEQ ID NO: 465382 - RNA, 19 nt, Artificial Sequence
  Description of Artificial Sequence: Synthetic oligonucleotide
gaggguggaacauuuauug

SEQ ID NO: 465383 - RNA, 19 nt, Artificial Sequence
  Description of Artificial Sequence: Synthetic oligonucleotide
agcguugucggccacacgg

SEQ ID NO: 465384 - RNA, 19 nt, Artificial Sequence
  Description of Artificial Sequence: Synthetic oligonucleotide
aagcacuauagaugugggc

SEQ ID NO: 465385 - RNA, 19 nt, Artificial Sequence
  Description of Artificial Sequence: Synthetic oligonucleotide
aacuucgccaaguugauuu

SEQ ID NO: 465386 - RNA, 19 nt, Artificial Sequence
  Description of Artificial Sequence: Synthetic oligonucleotide
agagcgcacauacugcugc

SEQ ID NO: 465387 - RNA, 19 nt, Artificial Sequence
  Description of Artificial Sequence: Synthetic oligonucleotide
caaagcacuauagaugugg

SEQ ID NO: 465388 - RNA, 19 nt, Artificial Sequence
  Description of Artificial Sequence: Synthetic oligonucleotide
cugauugccccacaaaccg

SEQ ID NO: 465389 - RNA, 19 nt, Artificial Sequence
  Description of Artificial Sequence: Synthetic oligonucleotide
acgucgauguuucaggauc

SEQ ID NO: 465390 - RNA, 19 nt, Artificial Sequence
  Description of Artificial Sequence: Synthetic oligonucleotide
gacgagagcgcacauacug

SEQ ID NO: 465391 - RNA, 19 nt, Artificial Sequence
  Description of Artificial Sequence: Synthetic oligonucleotide
ucuagugaacuucaugguc

SEQ ID NO: 465392 - RNA, 19 nt, Artificial Sequence
  Description of Artificial Sequence: Synthetic oligonucleotide
uucaagaccucacccaaug

SEQ ID NO: 465393 - RNA, 19 nt, Artificial Sequence
  Description of Artificial Sequence: Synthetic oligonucleotide
ugugagaccugcccgagca

SEQ ID NO: 465394 - RNA, 19 nt, Artificial Sequence
  Description of Artificial Sequence: Synthetic oligonucleotide
agugggugcaagcccagcc

SEQ ID NO: 465395 - RNA, 19 nt, Artificial Sequence
  Description of Artificial Sequence: Synthetic oligonucleotide
aaugccuaggcauccuuca

SEQ ID NO: 465396 - RNA, 19 nt, Artificial Sequence
  Description of Artificial Sequence: Synthetic oligonucleotide
uuggucuuaaguucugagc

SEQ ID NO: 465397 - RNA, 19 nt, Artificial Sequence
  Description of Artificial Sequence: Synthetic oligonucleotide
uguucugcgccucaucccc

SEQ ID NO: 465398 - RNA, 19 nt, Artificial Sequence
  Description of Artificial Sequence: Synthetic oligonucleotide
acaaaccgcuucuucuucc

SEQ ID NO: 465399 - RNA, 19 nt, Artificial Sequence
  Description of Artificial Sequence: Synthetic oligonucleotide
uggacgagagcgcacauac

SEQ ID NO: 465400 - RNA, 19 nt, Artificial Sequence
  Description of Artificial Sequence: Synthetic oligonucleotide
uuugcugguaaaugccuag

SEQ ID NO: 465401 - RNA, 19 nt, Artificial Sequence
  Description of Artificial Sequence: Synthetic oligonucleotide
aggaaggcggccuaugauc

SEQ ID NO: 465402 - RNA, 19 nt, Artificial Sequence
  Description of Artificial Sequence: Synthetic oligonucleotide
ucuacgacgguuucgugcu

SEQ ID NO: 465403 - RNA, 19 nt, Artificial Sequence
  Description of Artificial Sequence: Synthetic oligonucleotide
aacuggucuagugaacuuc

SEQ ID NO: 465404 - RNA, 19 nt, Artificial Sequence
  Description of Artificial Sequence: Synthetic oligonucleotide
agcaaaccccauuucaaag

SEQ ID NO: 465405 - RNA, 19 nt, Artificial Sequence
  Description of Artificial Sequence: Synthetic oligonucleotide
guagcuguucagcaaaccc

SEQ ID NO: 465406 - RNA, 19 nt, Artificial Sequence
  Description of Artificial Sequence: Synthetic oligonucleotide
acgguuucgugcugaaagc

SEQ ID NO: 465407 - RNA, 19 nt, Artificial Sequence
  Description of Artificial Sequence: Synthetic oligonucleotide
cacacgacccacacgaugc

SEQ ID NO: 465408 - RNA, 19 nt, Artificial Sequence
  Description of Artificial Sequence: Synthetic oligonucleotide
gccaaguugauuuuacggg

SEQ ID NO: 465409 - RNA, 19 nt, Artificial Sequence
  Description of Artificial Sequence: Synthetic oligonucleotide
cucgcugguugaaugaucc

SEQ ID NO: 465410 - RNA, 19 nt, Artificial Sequence
  Description of Artificial Sequence: Synthetic oligonucleotide
ugugaacuucgccaaguug

SEQ ID NO: 465411 - RNA, 19 nt, Artificial Sequence
  Description of Artificial Sequence: Synthetic oligonucleotide
aaggcggccuaugaucucc

SEQ ID NO: 465412 - RNA, 19 nt, Artificial Sequence
  Description of Artificial Sequence: Synthetic oligonucleotide
gagcuuugcugguaaaugc

SEQ ID NO: 465413 - RNA, 19 nt, Artificial Sequence
  Description of Artificial Sequence: Synthetic oligonucleotide
aaguugauuuuacgggcug

SEQ ID NO: 465414 - RNA, 19 nt, Artificial Sequence
  Description of Artificial Sequence: Synthetic oligonucleotide
cugacgucgauguuucagg

SEQ ID NO: 465415 - RNA, 19 nt, Artificial Sequence
  Description of Artificial Sequence: Synthetic oligonucleotide
auaccggccacucucuguc

SEQ ID NO: 465416 - RNA, 19 nt, Artificial Sequence
  Description of Artificial Sequence: Synthetic oligonucleotide
gaagagugggugcaagccc

SEQ ID NO: 465417 - RNA, 19 nt, Artificial Sequence
  Description of Artificial Sequence: Synthetic oligonucleotide
gaaagcuauaguugaugac

SEQ ID NO: 465418 - RNA, 19 nt, Artificial Sequence
  Description of Artificial Sequence: Synthetic oligonucleotide
caaaccccauuucaaagag

SEQ ID NO: 465419 - RNA, 19 nt, Artificial Sequence
  Description of Artificial Sequence: Synthetic oligonucleotide
acuucggccugcucgggcc

SEQ ID NO: 465420 - RNA, 19 nt, Artificial Sequence
  Description of Artificial Sequence: Synthetic oligonucleotide
uuggugucuacauccagac

SEQ ID NO: 465421 - RNA, 19 nt, Artificial Sequence
  Description of Artificial Sequence: Synthetic oligonucleotide
gaggcguugaucucaaaga

SEQ ID NO: 465422 - RNA, 19 nt, Artificial Sequence
  Description of Artificial Sequence: Synthetic oligonucleotide
cuuggucuuaaguucugag

SEQ ID NO: 465423 - RNA, 19 nt, Artificial Sequence
  Description of Artificial Sequence: Synthetic oligonucleotide
ugcaucaaccgcccagggg

SEQ ID NO: 465424 - RNA, 19 nt, Artificial Sequence
  Description of Artificial Sequence: Synthetic oligonucleotide
auuaugucaggguucucgu

SEQ ID NO: 465425 - RNA, 19 nt, Artificial Sequence
  Description of Artificial Sequence: Synthetic oligonucleotide
ugcugguaaaugccuaggc

SEQ ID NO: 465426 - RNA, 19 nt, Artificial Sequence
  Description of Artificial Sequence: Synthetic oligonucleotide
uggucuagugaacuucaug

SEQ ID NO: 465427 - RNA, 19 nt, Artificial Sequence
  Description of Artificial Sequence: Synthetic oligonucleotide
ugguccaaagcacuauaga

SEQ ID NO: 465428 - RNA, 19 nt, Artificial Sequence
  Description of Artificial Sequence: Synthetic oligonucleotide
caaagcgggagcugaagag

SEQ ID NO: 465429 - RNA, 19 nt, Artificial Sequence
  Description of Artificial Sequence: Synthetic oligonucleotide
caugagguacucugcgugg

SEQ ID NO: 465430 - RNA, 19 nt, Artificial Sequence
  Description of Artificial Sequence: Synthetic oligonucleotide
gugaacuucgccaaguuga

SEQ ID NO: 465431 - RNA, 19 nt, Artificial Sequence
  Description of Artificial Sequence: Synthetic oligonucleotide
agccacgugcaucaaccgc

SEQ ID NO: 465432 - RNA, 19 nt, Artificial Sequence
  Description of Artificial Sequence: Synthetic oligonucleotide
ugccuaggcauccuucaag

SEQ ID NO: 465433 - RNA, 19 nt, Artificial Sequence
  Description of Artificial Sequence: Synthetic oligonucleotide
uguccucgcgcacaaggag

SEQ ID NO: 465434 - RNA, 19 nt, Artificial Sequence
  Description of Artificial Sequence: Synthetic oligonucleotide
ucgcugacgagccuccucc

SEQ ID NO: 465435 - RNA, 19 nt, Artificial Sequence
  Description of Artificial Sequence: Synthetic oligonucleotide
ucagaucaaggaccgcacc

SEQ ID NO: 465436 - RNA, 19 nt, Artificial Sequence
  Description of Artificial Sequence: Synthetic oligonucleotide
aacagcacaugagaacaug

SEQ ID NO: 465437 - RNA, 19 nt, Artificial Sequence
  Description of Artificial Sequence: Synthetic oligonucleotide
ugguaaaugccuaggcauc

SEQ ID NO: 465438 - RNA, 19 nt, Artificial Sequence
  Description of Artificial Sequence: Synthetic oligonucleotide
gucaaaauccuugggccgg

SEQ ID NO: 465439 - RNA, 19 nt, Artificial Sequence
  Description of Artificial Sequence: Synthetic oligonucleotide
cucuugggcucuacgacgg

SEQ ID NO: 465440 - RNA, 19 nt, Artificial Sequence
  Description of Artificial Sequence: Synthetic oligonucleotide
aaagcgggagcugaagagu

SEQ ID NO: 465441 - RNA, 19 nt, Artificial Sequence
  Description of Artificial Sequence: Synthetic oligonucleotide
aagcuauaguugaugacgu

SEQ ID NO: 465442 - RNA, 19 nt, Artificial Sequence
  Description of Artificial Sequence: Synthetic oligonucleotide
caugagaacaugucaguga

SEQ ID NO: 465443 - RNA, 19 nt, Artificial Sequence
  Description of Artificial Sequence: Synthetic oligonucleotide
ucgccaaguugauuuuacg

SEQ ID NO: 465444 - RNA, 19 nt, Artificial Sequence
  Description of Artificial Sequence: Synthetic oligonucleotide
gacggaugagcacaggcuc

SEQ ID NO: 465445 - RNA, 19 nt, Artificial Sequence
  Description of Artificial Sequence: Synthetic oligonucleotide
cuugauggacucaggugag

SEQ ID NO: 465446 - RNA, 19 nt, Artificial Sequence
  Description of Artificial Sequence: Synthetic oligonucleotide
uugaaugauccuucauccu

SEQ ID NO: 465447 - RNA, 19 nt, Artificial Sequence
  Description of Artificial Sequence: Synthetic oligonucleotide
ugggcgagggugauggagc

SEQ ID NO: 465448 - RNA, 19 nt, Artificial Sequence
  Description of Artificial Sequence: Synthetic oligonucleotide
caagaccucacccaauguc

SEQ ID NO: 465449 - RNA, 19 nt, Artificial Sequence
  Description of Artificial Sequence: Synthetic oligonucleotide
caaaccgcuucuucuuccg

SEQ ID NO: 465450 - RNA, 19 nt, Artificial Sequence
  Description of Artificial Sequence: Synthetic oligonucleotide
aaagaugguugugcgggug

SEQ ID NO: 465451 - RNA, 19 nt, Artificial Sequence
  Description of Artificial Sequence: Synthetic oligonucleotide
augaggguggaacauuuau

SEQ ID NO: 465452 - RNA, 19 nt, Artificial Sequence
  Description of Artificial Sequence: Synthetic oligonucleotide
uggugucuacauccagacg

SEQ ID NO: 465453 - RNA, 19 nt, Artificial Sequence
  Description of Artificial Sequence: Synthetic oligonucleotide
ucucgugcagggcagcaac

SEQ ID NO: 465454 - RNA, 19 nt, Artificial Sequence
  Description of Artificial Sequence: Synthetic oligonucleotide
cugguccaaagcacuauag

SEQ ID NO: 465455 - RNA, 19 nt, Artificial Sequence
  Description of Artificial Sequence: Synthetic oligonucleotide
ggaggcguugaucucaaag

SEQ ID NO: 465456 - RNA, 19 nt, Artificial Sequence
  Description of Artificial Sequence: Synthetic oligonucleotide
cuuugaccgcuucuggccc

SEQ ID NO: 465457 - RNA, 19 nt, Artificial Sequence
  Description of Artificial Sequence: Synthetic oligonucleotide
ugaggguggaacauuuauu

SEQ ID NO: 465458 - RNA, 19 nt, Artificial Sequence
  Description of Artificial Sequence: Synthetic oligonucleotide
ugauugccccacaaaccgc

SEQ ID NO: 465459 - RNA, 19 nt, Artificial Sequence
  Description of Artificial Sequence: Synthetic oligonucleotide
agggcgcuggacgagagcg

SEQ ID NO: 465460 - RNA, 19 nt, Artificial Sequence
  Description of Artificial Sequence: Synthetic oligonucleotide
uccaaaccagggcuaucag

SEQ ID NO: 465461 - RNA, 19 nt, Artificial Sequence
  Description of Artificial Sequence: Synthetic oligonucleotide
aucagaucaaggaccgcac

SEQ ID NO: 465462 - RNA, 19 nt, Artificial Sequence
  Description of Artificial Sequence: Synthetic oligonucleotide
cuagugaacuucauggucu

SEQ ID NO: 465463 - RNA, 19 nt, Artificial Sequence
  Description of Artificial Sequence: Synthetic oligonucleotide
ugaacuucgccaaguugau

SEQ ID NO: 465464 - RNA, 19 nt, Artificial Sequence
  Description of Artificial Sequence: Synthetic oligonucleotide
agaucaaggaccgcaccag

SEQ ID NO: 465465 - RNA, 19 nt, Artificial Sequence
  Description of Artificial Sequence: Synthetic oligonucleotide
ugugugaacuucgccaagu

SEQ ID NO: 465466 - RNA, 19 nt, Artificial Sequence
  Description of Artificial Sequence: Synthetic oligonucleotide
gaagccccuaggcugaguc

SEQ ID NO: 465467 - RNA, 19 nt, Artificial Sequence
  Description of Artificial Sequence: Synthetic oligonucleotide
gcuauaguugaugacguug

SEQ ID NO: 465468 - RNA, 19 nt, Artificial Sequence
  Description of Artificial Sequence: Synthetic oligonucleotide
ugacgucgauguuucagga

SEQ ID NO: 465469 - RNA, 19 nt, Artificial Sequence
  Description of Artificial Sequence: Synthetic oligonucleotide
agaccucacccaauguccc

SEQ ID NO: 465470 - RNA, 19 nt, Artificial Sequence
  Description of Artificial Sequence: Synthetic oligonucleotide
uccagacggaugagcacag

SEQ ID NO: 465471 - RNA, 19 nt, Artificial Sequence
  Description of Artificial Sequence: Synthetic oligonucleotide
ccgaacaacauuacgcagc

SEQ ID NO: 465472 - RNA, 19 nt, Artificial Sequence
  Description of Artificial Sequence: Synthetic oligonucleotide
uguggccgagaacagcacu

SEQ ID NO: 465473 - RNA, 19 nt, Artificial Sequence
  Description of Artificial Sequence: Synthetic oligonucleotide
uucugagcgcauacggccu

SEQ ID NO: 465474 - RNA, 19 nt, Artificial Sequence
  Description of Artificial Sequence: Synthetic oligonucleotide
caaggaauaggcugugcca

SEQ ID NO: 465475 - RNA, 19 nt, Artificial Sequence
  Description of Artificial Sequence: Synthetic oligonucleotide
uauaccggccacucucugu

SEQ ID NO: 465476 - RNA, 19 nt, Artificial Sequence
  Description of Artificial Sequence: Synthetic oligonucleotide
acaacauuacgcagcaggu

SEQ ID NO: 465477 - RNA, 19 nt, Artificial Sequence
  Description of Artificial Sequence: Synthetic oligonucleotide
ucacgcuuguaggagcugc

SEQ ID NO: 465478 - RNA, 19 nt, Artificial Sequence
  Description of Artificial Sequence: Synthetic oligonucleotide
ucugagcgcauacggccug

SEQ ID NO: 465479 - RNA, 19 nt, Artificial Sequence
  Description of Artificial Sequence: Synthetic oligonucleotide
aaggaccgcaccagccacc

SEQ ID NO: 465480 - RNA, 19 nt, Artificial Sequence
  Description of Artificial Sequence: Synthetic oligonucleotide
auccagacggaugagcaca

SEQ ID NO: 465481 - RNA, 19 nt, Artificial Sequence
  Description of Artificial Sequence: Synthetic oligonucleotide
uuucgugcugaaagcugcu

SEQ ID NO: 465482 - RNA, 19 nt, Artificial Sequence
  Description of Artificial Sequence: Synthetic oligonucleotide
uccaugagguacucugcgu

SEQ ID NO: 465483 - RNA, 19 nt, Artificial Sequence
  Description of Artificial Sequence: Synthetic oligonucleotide
ccaaggaauaggcugugcc

SEQ ID NO: 465484 - RNA, 19 nt, Artificial Sequence
  Description of Artificial Sequence: Synthetic oligonucleotide
guggaacauuuauugugug

SEQ ID NO: 465485 - RNA, 19 nt, Artificial Sequence
  Description of Artificial Sequence: Synthetic oligonucleotide
cuauagaugugggcgcagc

SEQ ID NO: 465486 - RNA, 19 nt, Artificial Sequence
  Description of Artificial Sequence: Synthetic oligonucleotide
ccgcucacugucaaaaucc

SEQ ID NO: 465487 - RNA, 19 nt, Artificial Sequence
  Description of Artificial Sequence: Synthetic oligonucleotide
augucccaucaaaagcagc

SEQ ID NO: 465488 - RNA, 19 nt, Artificial Sequence
  Description of Artificial Sequence: Synthetic oligonucleotide
cugccaacugcaccugagg

SEQ ID NO: 465489 - RNA, 19 nt, Artificial Sequence
  Description of Artificial Sequence: Synthetic oligonucleotide
cccaucagaucaaggaccg

SEQ ID NO: 465490 - RNA, 19 nt, Artificial Sequence
  Description of Artificial Sequence: Synthetic oligonucleotide
gggccgaacaacauuacgc

SEQ ID NO: 465491 - RNA, 19 nt, Artificial Sequence
  Description of Artificial Sequence: Synthetic oligonucleotide
uucuuccggucccacuuga

SEQ ID NO: 465492 - RNA, 19 nt, Artificial Sequence
  Description of Artificial Sequence: Synthetic oligonucleotide
ggucuuaaguucugagcgc

SEQ ID NO: 465493 - RNA, 19 nt, Artificial Sequence
  Description of Artificial Sequence: Synthetic oligonucleotide
cagucugaggcacccgacc

SEQ ID NO: 465494 - RNA, 19 nt, Artificial Sequence
  Description of Artificial Sequence: Synthetic oligonucleotide
gauagcacuguuccucaua

SEQ ID NO: 465495 - RNA, 19 nt, Artificial Sequence
  Description of Artificial Sequence: Synthetic oligonucleotide
agaugguugugcgggugcg

SEQ ID NO: 465496 - RNA, 19 nt, Artificial Sequence
  Description of Artificial Sequence: Synthetic oligonucleotide
cugguaaaugccuaggcau

SEQ ID NO: 465497 - RNA, 19 nt, Artificial Sequence
  Description of Artificial Sequence: Synthetic oligonucleotide
auagacacuggcuccugua

SEQ ID NO: 465498 - RNA, 19 nt, Artificial Sequence
  Description of Artificial Sequence: Synthetic oligonucleotide
ugguugaaugauccuucau

SEQ ID NO: 465499 - RNA, 19 nt, Artificial Sequence
  Description of Artificial Sequence: Synthetic oligonucleotide
acgacccacacgaugcagg

SEQ ID NO: 465500 - RNA, 19 nt, Artificial Sequence
  Description of Artificial Sequence: Synthetic oligonucleotide
gccugauugccccacaaac

SEQ ID NO: 465501 - RNA, 19 nt, Artificial Sequence
  Description of Artificial Sequence: Synthetic oligonucleotide
gaugguugugcgggugcgg

SEQ ID NO: 465502 - RNA, 19 nt, Artificial Sequence
  Description of Artificial Sequence: Synthetic oligonucleotide
guccucgcgcacaaggagg

SEQ ID NO: 465503 - RNA, 19 nt, Artificial Sequence
  Description of Artificial Sequence: Synthetic oligonucleotide
ugucaggguucucgugcag

SEQ ID NO: 465504 - RNA, 19 nt, Artificial Sequence
  Description of Artificial Sequence: Synthetic oligonucleotide
uugggcucuacgacgguuu

SEQ ID NO: 465505 - RNA, 19 nt, Artificial Sequence
  Description of Artificial Sequence: Synthetic oligonucleotide
cagaucaaggaccgcacca

SEQ ID NO: 465506 - RNA, 19 nt, Artificial Sequence
  Description of Artificial Sequence: Synthetic oligonucleotide
acuggucuagugaacuuca

SEQ ID NO: 465507 - RNA, 19 nt, Artificial Sequence
  Description of Artificial Sequence: Synthetic oligonucleotide
ucgauguuucaggaucugu

SEQ ID NO: 465508 - RNA, 19 nt, Artificial Sequence
  Description of Artificial Sequence: Synthetic oligonucleotide
ugagggcgcuggacgagag

SEQ ID NO: 465509 - RNA, 19 nt, Artificial Sequence
  Description of Artificial Sequence: Synthetic oligonucleotide
aguugauuuuacgggcugu

SEQ ID NO: 465510 - RNA, 19 nt, Artificial Sequence
  Description of Artificial Sequence: Synthetic oligonucleotide
aggaauaggcugugccacu

SEQ ID NO: 465511 - RNA, 19 nt, Artificial Sequence
  Description of Artificial Sequence: Synthetic oligonucleotide
uuacgggcugucuggucca

SEQ ID NO: 465512 - RNA, 19 nt, Artificial Sequence
  Description of Artificial Sequence: Synthetic oligonucleotide
auauaccggccacucucug

SEQ ID NO: 465513 - RNA, 19 nt, Artificial Sequence
  Description of Artificial Sequence: Synthetic oligonucleotide
ugugggcgcagcucacacc

SEQ ID NO: 465514 - RNA, 19 nt, Artificial Sequence
  Description of Artificial Sequence: Synthetic oligonucleotide
gcaaaccccauuucaaaga

SEQ ID NO: 465515 - RNA, 19 nt, Artificial Sequence
  Description of Artificial Sequence: Synthetic oligonucleotide
aagccccuaggcugagucu

SEQ ID NO: 465516 - RNA, 19 nt, Artificial Sequence
  Description of Artificial Sequence: Synthetic oligonucleotide
gcugguaaaugccuaggca

SEQ ID NO: 465517 - RNA, 19 nt, Artificial Sequence
  Description of Artificial Sequence: Synthetic oligonucleotide
uggcuccucgguugggucc

SEQ ID NO: 465518 - RNA, 19 nt, Artificial Sequence
  Description of Artificial Sequence: Synthetic oligonucleotide
caaggaccgcaccagccac

SEQ ID NO: 465519 - RNA, 19 nt, Artificial Sequence
  Description of Artificial Sequence: Synthetic oligonucleotide
ugagaccugcccgagcaaa

SEQ ID NO: 465520 - RNA, 19 nt, Artificial Sequence
  Description of Artificial Sequence: Synthetic oligonucleotide
auaggcugugccacuucgg

SEQ ID NO: 465521 - RNA, 19 nt, Artificial Sequence
  Description of Artificial Sequence: Synthetic oligonucleotide
acuauagaugugggcgcag

SEQ ID NO: 465522 - RNA, 19 nt, Artificial Sequence
  Description of Artificial Sequence: Synthetic oligonucleotide
guccaaaccagggcuauca

SEQ ID NO: 465523 - RNA, 19 nt, Artificial Sequence
  Description of Artificial Sequence: Synthetic oligonucleotide
ugagcguugucggccacac

SEQ ID NO: 465524 - RNA, 19 nt, Artificial Sequence
  Description of Artificial Sequence: Synthetic oligonucleotide
guugucggccacacggugc

SEQ ID NO: 465525 - RNA, 19 nt, Artificial Sequence
  Description of Artificial Sequence: Synthetic oligonucleotide
ugcugagcguugucggcca

SEQ ID NO: 465526 - RNA, 19 nt, Artificial Sequence
  Description of Artificial Sequence: Synthetic oligonucleotide
cagauagcacuguuccuca

SEQ ID NO: 465527 - RNA, 19 nt, Artificial Sequence
  Description of Artificial Sequence: Synthetic oligonucleotide
gccaacagcacaugagaac

SEQ ID NO: 465528 - RNA, 19 nt, Artificial Sequence
  Description of Artificial Sequence: Synthetic oligonucleotide
caaugauuaugucaggguu

SEQ ID NO: 465529 - RNA, 19 nt, Artificial Sequence
  Description of Artificial Sequence: Synthetic oligonucleotide
acagucugaggcacccgac

SEQ ID NO: 465530 - RNA, 19 nt, Artificial Sequence
  Description of Artificial Sequence: Synthetic oligonucleotide
gguccaaagcacuauagau

SEQ ID NO: 465531 - RNA, 19 nt, Artificial Sequence
  Description of Artificial Sequence: Synthetic oligonucleotide
ggggccgaacaacauuacg

SEQ ID NO: 465532 - RNA, 19 nt, Artificial Sequence
  Description of Artificial Sequence: Synthetic oligonucleotide
ucgugcagggcagcaacug

SEQ ID NO: 465533 - RNA, 19 nt, Artificial Sequence
  Description of Artificial Sequence: Synthetic oligonucleotide
gaagcuaucgauagcuuuu

SEQ ID NO: 465534 - RNA, 19 nt, Artificial Sequence
  Description of Artificial Sequence: Synthetic oligonucleotide
gcaucaaccgcccaggggu

SEQ ID NO: 465535 - RNA, 19 nt, Artificial Sequence
  Description of Artificial Sequence: Synthetic oligonucleotide
uacgacgguuucgugcuga

SEQ ID NO: 465536 - RNA, 19 nt, Artificial Sequence
  Description of Artificial Sequence: Synthetic oligonucleotide
uggaagcuaucgauagcuu

SEQ ID NO: 465537 - RNA, 19 nt, Artificial Sequence
  Description of Artificial Sequence: Synthetic oligonucleotide
ucaaaauccuugggccggu

SEQ ID NO: 465538 - RNA, 19 nt, Artificial Sequence
  Description of Artificial Sequence: Synthetic oligonucleotide
cagccacgugcaucaaccg

SEQ ID NO: 465539 - RNA, 19 nt, Artificial Sequence
  Description of Artificial Sequence: Synthetic oligonucleotide
cagccuccguuuucugugg

SEQ ID NO: 465540 - RNA, 19 nt, Artificial Sequence
  Description of Artificial Sequence: Synthetic oligonucleotide
ugccgagcuuugcugguaa

SEQ ID NO: 465541 - RNA, 19 nt, Artificial Sequence
  Description of Artificial Sequence: Synthetic oligonucleotide
gugcaucaaccgcccaggg

SEQ ID NO: 465542 - RNA, 19 nt, Artificial Sequence
  Description of Artificial Sequence: Synthetic oligonucleotide
ugcggucccaccgaugcuc

SEQ ID NO: 465543 - RNA, 19 nt, Artificial Sequence
  Description of Artificial Sequence: Synthetic oligonucleotide
ugcugauauaccggccacu

SEQ ID NO: 465544 - RNA, 19 nt, Artificial Sequence
  Description of Artificial Sequence: Synthetic oligonucleotide
gaaagcugcuucaggccuc

SEQ ID NO: 465545 - RNA, 19 nt, Artificial Sequence
  Description of Artificial Sequence: Synthetic oligonucleotide
caaguugauuuuacgggcu

SEQ ID NO: 465546 - RNA, 19 nt, Artificial Sequence
  Description of Artificial Sequence: Synthetic oligonucleotide
cugacgagccuccucccuc

SEQ ID NO: 465547 - RNA, 19 nt, Artificial Sequence
  Description of Artificial Sequence: Synthetic oligonucleotide
cacccaaugucccaucaaa

SEQ ID NO: 465548 - RNA, 19 nt, Artificial Sequence
  Description of Artificial Sequence: Synthetic oligonucleotide
uugacuccgcccucgcuuu

SEQ ID NO: 465549 - RNA, 19 nt, Artificial Sequence
  Description of Artificial Sequence: Synthetic oligonucleotide
gccacgugcaucaaccgcc

SEQ ID NO: 465550 - RNA, 19 nt, Artificial Sequence
  Description of Artificial Sequence: Synthetic oligonucleotide
uccguuuucuguggccaga

SEQ ID NO: 465551 - RNA, 19 nt, Artificial Sequence
  Description of Artificial Sequence: Synthetic oligonucleotide
gucuagugaacuucauggu

SEQ ID NO: 465552 - RNA, 19 nt, Artificial Sequence
  Description of Artificial Sequence: Synthetic oligonucleotide
uggggccgaacaacauuac

SEQ ID NO: 465553 - RNA, 19 nt, Artificial Sequence
  Description of Artificial Sequence: Synthetic oligonucleotide
caucaaccgcccaggggug

SEQ ID NO: 465554 - RNA, 19 nt, Artificial Sequence
  Description of Artificial Sequence: Synthetic oligonucleotide
ccgguaggggacauaaaac

SEQ ID NO: 465555 - RNA, 19 nt, Artificial Sequence
  Description of Artificial Sequence: Synthetic oligonucleotide
gagagcgcacauacugcug

SEQ ID NO: 465556 - RNA, 19 nt, Artificial Sequence
  Description of Artificial Sequence: Synthetic oligonucleotide
gauugccccacaaaccgcu

SEQ ID NO: 465557 - RNA, 19 nt, Artificial Sequence
  Description of Artificial Sequence: Synthetic oligonucleotide
acuucgccaaguugauuuu

SEQ ID NO: 465558 - RNA, 19 nt, Artificial Sequence
  Description of Artificial Sequence: Synthetic oligonucleotide
gaggcaccuugacuccgcc

SEQ ID NO: 465559 - RNA, 19 nt, Artificial Sequence
  Description of Artificial Sequence: Synthetic oligonucleotide
cacggugcaggccccgaag

SEQ ID NO: 465560 - RNA, 19 nt, Artificial Sequence
  Description of Artificial Sequence: Synthetic oligonucleotide
uggccugauugccccacaa

SEQ ID NO: 465561 - RNA, 19 nt, Artificial Sequence
  Description of Artificial Sequence: Synthetic oligonucleotide
ccuaggcugagucuggcuc

SEQ ID NO: 465562 - RNA, 19 nt, Artificial Sequence
  Description of Artificial Sequence: Synthetic oligonucleotide
ugggcucuacgacgguuuc

SEQ ID NO: 465563 - RNA, 19 nt, Artificial Sequence
  Description of Artificial Sequence: Synthetic oligonucleotide
ggugcuuuguagcuacaaa

SEQ ID NO: 465564 - RNA, 19 nt, Artificial Sequence
  Description of Artificial Sequence: Synthetic oligonucleotide
aucaaccgcccaggggugg

SEQ ID NO: 465565 - RNA, 19 nt, Artificial Sequence
  Description of Artificial Sequence: Synthetic oligonucleotide
augguugugcgggugcggu

SEQ ID NO: 465566 - RNA, 19 nt, Artificial Sequence
  Description of Artificial Sequence: Synthetic oligonucleotide
gcaaugauuaugucagggu

SEQ ID NO: 465567 - RNA, 19 nt, Artificial Sequence
  Description of Artificial Sequence: Synthetic oligonucleotide
agcuauaguugaugacguu

SEQ ID NO: 465568 - RNA, 19 nt, Artificial Sequence
  Description of Artificial Sequence: Synthetic oligonucleotide
gauauaccggccacucucu

SEQ ID NO: 465569 - RNA, 19 nt, Artificial Sequence
  Description of Artificial Sequence: Synthetic oligonucleotide
cacaugagaacaugucagu

SEQ ID NO: 465570 - RNA, 19 nt, Artificial Sequence
  Description of Artificial Sequence: Synthetic oligonucleotide
uguggccagauagcacugu

SEQ ID NO: 465571 - RNA, 19 nt, Artificial Sequence
  Description of Artificial Sequence: Synthetic oligonucleotide
ucuugggcucuacgacggu

SEQ ID NO: 465572 - RNA, 19 nt, Artificial Sequence
  Description of Artificial Sequence: Synthetic oligonucleotide
ucgcugguugaaugauccu

SEQ ID NO: 465573 - RNA, 19 nt, Artificial Sequence
  Description of Artificial Sequence: Synthetic oligonucleotide
gguggaacauuuauugugu

SEQ ID NO: 465574 - RNA, 19 nt, Artificial Sequence
  Description of Artificial Sequence: Synthetic oligonucleotide
ucaaccgcccagggguggc

SEQ ID NO: 465575 - RNA, 19 nt, Artificial Sequence
  Description of Artificial Sequence: Synthetic oligonucleotide
guuugggcaguguggccga

SEQ ID NO: 465576 - RNA, 19 nt, Artificial Sequence
  Description of Artificial Sequence: Synthetic oligonucleotide
ccugacgucgauguuucag

SEQ ID NO: 465577 - RNA, 19 nt, Artificial Sequence
  Description of Artificial Sequence: Synthetic oligonucleotide
agauagcacuguuccucau

SEQ ID NO: 465578 - RNA, 19 nt, Artificial Sequence
  Description of Artificial Sequence: Synthetic oligonucleotide
aggaggucuugagcuguuc

SEQ ID NO: 465579 - RNA, 19 nt, Artificial Sequence
  Description of Artificial Sequence: Synthetic oligonucleotide
caccuugacuccgcccucg

SEQ ID NO: 465580 - RNA, 19 nt, Artificial Sequence
  Description of Artificial Sequence: Synthetic oligonucleotide
uggccgagaacagcacugu

SEQ ID NO: 465581 - RNA, 19 nt, Artificial Sequence
  Description of Artificial Sequence: Synthetic oligonucleotide
agcacgccaucccugccaa

SEQ ID NO: 465582 - RNA, 19 nt, Artificial Sequence
  Description of Artificial Sequence: Synthetic oligonucleotide
cacuucggccugcucgggc

SEQ ID NO: 465583 - RNA, 19 nt, Artificial Sequence
  Description of Artificial Sequence: Synthetic oligonucleotide
gcugauauaccggccacuc

SEQ ID NO: 465584 - RNA, 19 nt, Artificial Sequence
  Description of Artificial Sequence: Synthetic oligonucleotide
cugugagaccugcccgagc

SEQ ID NO: 465585 - RNA, 19 nt, Artificial Sequence
  Description of Artificial Sequence: Synthetic oligonucleotide
agagucccggucaucaauu

SEQ ID NO: 465586 - RNA, 19 nt, Artificial Sequence
  Description of Artificial Sequence: Synthetic oligonucleotide
gagcguugucggccacacg

SEQ ID NO: 465587 - RNA, 19 nt, Artificial Sequence
  Description of Artificial Sequence: Synthetic oligonucleotide
cuacauccagacggaugag

SEQ ID NO: 465588 - RNA, 19 nt, Artificial Sequence
  Description of Artificial Sequence: Synthetic oligonucleotide
cucggggcagggaggcacc

SEQ ID NO: 465589 - RNA, 19 nt, Artificial Sequence
  Description of Artificial Sequence: Synthetic oligonucleotide
gucgauguuucaggaucug

SEQ ID NO: 465590 - RNA, 19 nt, Artificial Sequence
  Description of Artificial Sequence: Synthetic oligonucleotide
gagggcgcuggacgagagc

SEQ ID NO: 465591 - RNA, 19 nt, Artificial Sequence
  Description of Artificial Sequence: Synthetic oligonucleotide
gaugugggcgcagcucaca

SEQ ID NO: 465592 - RNA, 19 nt, Artificial Sequence
  Description of Artificial Sequence: Synthetic oligonucleotide
gcucugccgagcuuugcug

SEQ ID NO: 465593 - RNA, 19 nt, Artificial Sequence
  Description of Artificial Sequence: Synthetic oligonucleotide
cauggucucgcuggaccac

SEQ ID NO: 465594 - RNA, 19 nt, Artificial Sequence
  Description of Artificial Sequence: Synthetic oligonucleotide
cagggcuaucaggaagccc

SEQ ID NO: 465595 - RNA, 19 nt, Artificial Sequence
  Description of Artificial Sequence: Synthetic oligonucleotide
agcgcacauacugcugcug

SEQ ID NO: 465596 - RNA, 19 nt, Artificial Sequence
  Description of Artificial Sequence: Synthetic oligonucleotide
cuucauggucucgcuggac

SEQ ID NO: 465597 - RNA, 19 nt, Artificial Sequence
  Description of Artificial Sequence: Synthetic oligonucleotide
gcggcccaggaacaggugc

SEQ ID NO: 465598 - RNA, 19 nt, Artificial Sequence
  Description of Artificial Sequence: Synthetic oligonucleotide
cucgcugacgagccuccuc

SEQ ID NO: 465599 - RNA, 19 nt, Artificial Sequence
  Description of Artificial Sequence: Synthetic oligonucleotide
ugcugccgaccucggcuca

SEQ ID NO: 465600 - RNA, 19 nt, Artificial Sequence
  Description of Artificial Sequence: Synthetic oligonucleotide
uucucgugcagggcagcaa

SEQ ID NO: 465601 - RNA, 19 nt, Artificial Sequence
  Description of Artificial Sequence: Synthetic oligonucleotide
aggccccgaagguccagug

SEQ ID NO: 465602 - RNA, 19 nt, Artificial Sequence
  Description of Artificial Sequence: Synthetic oligonucleotide
aggaccgcaccagccaccu

SEQ ID NO: 465603 - RNA, 19 nt, Artificial Sequence
  Description of Artificial Sequence: Synthetic oligonucleotide
cugggccugacgucgaugu

SEQ ID NO: 465604 - RNA, 19 nt, Artificial Sequence
  Description of Artificial Sequence: Synthetic oligonucleotide
acgaugaggguggaacauu

SEQ ID NO: 465605 - RNA, 19 nt, Artificial Sequence
  Description of Artificial Sequence: Synthetic oligonucleotide
cuccgcgcugcaggaagcg

SEQ ID NO: 465606 - RNA, 19 nt, Artificial Sequence
  Description of Artificial Sequence: Synthetic oligonucleotide
gagcuugcccuuggcagga

SEQ ID NO: 465607 - RNA, 19 nt, Artificial Sequence
  Description of Artificial Sequence: Synthetic oligonucleotide
gacgucgauguuucaggau

SEQ ID NO: 465608 - RNA, 19 nt, Artificial Sequence
  Description of Artificial Sequence: Synthetic oligonucleotide
gucucgcugacgagccucc

SEQ ID NO: 465609 - RNA, 19 nt, Artificial Sequence
  Description of Artificial Sequence: Synthetic oligonucleotide
uccgcgcugcaggaagcgc

SEQ ID NO: 465610 - RNA, 19 nt, Artificial Sequence
  Description of Artificial Sequence: Synthetic oligonucleotide
gccuccgcgcugcaggaag

SEQ ID NO: 465611 - RNA, 19 nt, Artificial Sequence
  Description of Artificial Sequence: Synthetic oligonucleotide
gggccucgcugguugaaug

SEQ ID NO: 465612 - RNA, 19 nt, Artificial Sequence
  Description of Artificial Sequence: Synthetic oligonucleotide
ggcuccuuacauccucuuc

SEQ ID NO: 465613 - RNA, 19 nt, Artificial Sequence
  Description of Artificial Sequence: Synthetic oligonucleotide
uaccggccacucucugucu

SEQ ID NO: 465614 - RNA, 19 nt, Artificial Sequence
  Description of Artificial Sequence: Synthetic oligonucleotide
ucccaccgaugcucagccc

SEQ ID NO: 465615 - RNA, 19 nt, Artificial Sequence
  Description of Artificial Sequence: Synthetic oligonucleotide
ccacacgacccacacgaug

SEQ ID NO: 465616 - RNA, 19 nt, Artificial Sequence
  Description of Artificial Sequence: Synthetic oligonucleotide
cccgcucacugucaaaauc

SEQ ID NO: 465617 - RNA, 19 nt, Artificial Sequence
  Description of Artificial Sequence: Synthetic oligonucleotide
gcgcacaaggaggaaggag

SEQ ID NO: 465618 - RNA, 19 nt, Artificial Sequence
  Description of Artificial Sequence: Synthetic oligonucleotide
ggucucgcuggaccacucc

SEQ ID NO: 465619 - RNA, 19 nt, Artificial Sequence
  Description of Artificial Sequence: Synthetic oligonucleotide
cccagcacgccaucccugc

SEQ ID NO: 465620 - RNA, 19 nt, Artificial Sequence
  Description of Artificial Sequence: Synthetic oligonucleotide
acgacgguuucgugcugaa

SEQ ID NO: 465621 - RNA, 19 nt, Artificial Sequence
  Description of Artificial Sequence: Synthetic oligonucleotide
gcgcacauacugcugcuga

SEQ ID NO: 465622 - RNA, 19 nt, Artificial Sequence
  Description of Artificial Sequence: Synthetic oligonucleotide
cagcacgccaucccugcca

SEQ ID NO: 465623 - RNA, 19 nt, Artificial Sequence
  Description of Artificial Sequence: Synthetic oligonucleotide
cacccgacccagcacgcca

SEQ ID NO: 465624 - RNA, 19 nt, Artificial Sequence
  Description of Artificial Sequence: Synthetic oligonucleotide
ugcgggugcgguagcucuu

SEQ ID NO: 465625 - RNA, 19 nt, Artificial Sequence
  Description of Artificial Sequence: Synthetic oligonucleotide
caaagaugguugugcgggu

SEQ ID NO: 465626 - RNA, 19 nt, Artificial Sequence
  Description of Artificial Sequence: Synthetic oligonucleotide
cuacgacgguuucgugcug

SEQ ID NO: 465627 - RNA, 19 nt, Artificial Sequence
  Description of Artificial Sequence: Synthetic oligonucleotide
guaaaugccuaggcauccu

SEQ ID NO: 465628 - RNA, 19 nt, Artificial Sequence
  Description of Artificial Sequence: Synthetic oligonucleotide
caggucaagcagguaggga

SEQ ID NO: 465629 - RNA, 19 nt, Artificial Sequence
  Description of Artificial Sequence: Synthetic oligonucleotide
ccucaugaggcugggcgag

SEQ ID NO: 465630 - RNA, 19 nt, Artificial Sequence
  Description of Artificial Sequence: Synthetic oligonucleotide
gggcucuacgacgguuucg

SEQ ID NO: 465631 - RNA, 19 nt, Artificial Sequence
  Description of Artificial Sequence: Synthetic oligonucleotide
ccccgaagguccagugacg

SEQ ID NO: 465632 - RNA, 19 nt, Artificial Sequence
  Description of Artificial Sequence: Synthetic oligonucleotide
ggccucgcugguugaauga

SEQ ID NO: 465633 - RNA, 19 nt, Artificial Sequence
  Description of Artificial Sequence: Synthetic oligonucleotide
gugcgggugcgguagcucu

SEQ ID NO: 465634 - RNA, 19 nt, Artificial Sequence
  Description of Artificial Sequence: Synthetic oligonucleotide
cugccgcuuggcacgcauc

SEQ ID NO: 465635 - RNA, 19 nt, Artificial Sequence
  Description of Artificial Sequence: Synthetic oligonucleotide
caggaaagcuauaguugau

SEQ ID NO: 465636 - RNA, 19 nt, Artificial Sequence
  Description of Artificial Sequence: Synthetic oligonucleotide
caggaggcguugaucucaa

SEQ ID NO: 465637 - RNA, 19 nt, Artificial Sequence
  Description of Artificial Sequence: Synthetic oligonucleotide
ggccugacgucgauguuuc

SEQ ID NO: 465638 - RNA, 19 nt, Artificial Sequence
  Description of Artificial Sequence: Synthetic oligonucleotide
ggaggcaccuugacuccgc

SEQ ID NO: 465639 - RNA, 19 nt, Artificial Sequence
  Description of Artificial Sequence: Synthetic oligonucleotide
gggugcgguagcucuugac

SEQ ID NO: 465640 - RNA, 19 nt, Artificial Sequence
  Description of Artificial Sequence: Synthetic oligonucleotide
aaccgcccagggguggcaa

SEQ ID NO: 465641 - RNA, 19 nt, Artificial Sequence
  Description of Artificial Sequence: Synthetic oligonucleotide
ggcucuacgacgguuucgu

SEQ ID NO: 465642 - RNA, 19 nt, Artificial Sequence
  Description of Artificial Sequence: Synthetic oligonucleotide
ugguguccucgcgcacaag

SEQ ID NO: 465643 - RNA, 19 nt, Artificial Sequence
  Description of Artificial Sequence: Synthetic oligonucleotide
ccucgcugguugaaugauc

SEQ ID NO: 465644 - RNA, 19 nt, Artificial Sequence
  Description of Artificial Sequence: Synthetic oligonucleotide
caacagcacaugagaacau

SEQ ID NO: 465645 - RNA, 19 nt, Artificial Sequence
  Description of Artificial Sequence: Synthetic oligonucleotide
ccacucucugucuugauuu

SEQ ID NO: 465646 - RNA, 19 nt, Artificial Sequence
  Description of Artificial Sequence: Synthetic oligonucleotide
ccacacgaugcaggaagag

SEQ ID NO: 465647 - RNA, 19 nt, Artificial Sequence
  Description of Artificial Sequence: Synthetic oligonucleotide
cagagucccggucaucaau

SEQ ID NO: 465648 - RNA, 19 nt, Artificial Sequence
  Description of Artificial Sequence: Synthetic oligonucleotide
gugagaccugcccgagcaa

SEQ ID NO: 465649 - RNA, 19 nt, Artificial Sequence
  Description of Artificial Sequence: Synthetic oligonucleotide
gcucuacgacgguuucgug

SEQ ID NO: 465650 - RNA, 19 nt, Artificial Sequence
  Description of Artificial Sequence: Synthetic oligonucleotide
gagucccggucaucaauuu

SEQ ID NO: 465651 - RNA, 19 nt, Artificial Sequence
  Description of Artificial Sequence: Synthetic oligonucleotide
ggcgcuggacgagagcgca

SEQ ID NO: 465652 - RNA, 19 nt, Artificial Sequence
  Description of Artificial Sequence: Synthetic oligonucleotide
cacgcuuguaggagcugcu

SEQ ID NO: 465653 - RNA, 19 nt, Artificial Sequence
  Description of Artificial Sequence: Synthetic oligonucleotide
ggccugauugccccacaaa

SEQ ID NO: 465654 - RNA, 19 nt, Artificial Sequence
  Description of Artificial Sequence: Synthetic oligonucleotide
cugagcguugucggccaca

SEQ ID NO: 465655 - RNA, 19 nt, Artificial Sequence
  Description of Artificial Sequence: Synthetic oligonucleotide
ccuccgcgcugcaggaagc

SEQ ID NO: 465656 - RNA, 19 nt, Artificial Sequence
  Description of Artificial Sequence: Synthetic oligonucleotide
cucgugcagggcagcaacu

SEQ ID NO: 465657 - RNA, 19 nt, Artificial Sequence
  Description of Artificial Sequence: Synthetic oligonucleotide
caacuggucuagugaacuu

SEQ ID NO: 465658 - RNA, 19 nt, Artificial Sequence
  Description of Artificial Sequence: Synthetic oligonucleotide
ccagggcuaucaggaagcc

SEQ ID NO: 465659 - RNA, 19 nt, Artificial Sequence
  Description of Artificial Sequence: Synthetic oligonucleotide
gagaccugcccgagcaaau

SEQ ID NO: 465660 - RNA, 19 nt, Artificial Sequence
  Description of Artificial Sequence: Synthetic oligonucleotide
aggaggcguugaucucaaa

SEQ ID NO: 465661 - RNA, 19 nt, Artificial Sequence
  Description of Artificial Sequence: Synthetic oligonucleotide
gggccgguaggggacauaa

SEQ ID NO: 465662 - RNA, 19 nt, Artificial Sequence
  Description of Artificial Sequence: Synthetic oligonucleotide
auugccccacaaaccgcuu

SEQ ID NO: 465663 - RNA, 19 nt, Artificial Sequence
  Description of Artificial Sequence: Synthetic oligonucleotide
uacgggcugucugguccaa

SEQ ID NO: 465664 - RNA, 19 nt, Artificial Sequence
  Description of Artificial Sequence: Synthetic oligonucleotide
ggcggccuaugaucuccug

SEQ ID NO: 465665 - RNA, 19 nt, Artificial Sequence
  Description of Artificial Sequence: Synthetic oligonucleotide
cuggacgagagcgcacaua

SEQ ID NO: 465666 - RNA, 19 nt, Artificial Sequence
  Description of Artificial Sequence: Synthetic oligonucleotide
cccacacgaugcaggaaga

SEQ ID NO: 465667 - RNA, 19 nt, Artificial Sequence
  Description of Artificial Sequence: Synthetic oligonucleotide
ggucacgcuuguaggagcu

SEQ ID NO: 465668 - RNA, 19 nt, Artificial Sequence
  Description of Artificial Sequence: Synthetic oligonucleotide
ccagcacgccaucccugcc

SEQ ID NO: 465669 - RNA, 19 nt, Artificial Sequence
  Description of Artificial Sequence: Synthetic oligonucleotide
gggugcaagcccagcccug

SEQ ID NO: 465670 - RNA, 19 nt, Artificial Sequence
  Description of Artificial Sequence: Synthetic oligonucleotide
cacgugcaucaaccgccca

SEQ ID NO: 465671 - RNA, 19 nt, Artificial Sequence
  Description of Artificial Sequence: Synthetic oligonucleotide
gaacuucgccaaguugauu

SEQ ID NO: 465672 - RNA, 19 nt, Artificial Sequence
  Description of Artificial Sequence: Synthetic oligonucleotide
cuggucuagugaacuucau

SEQ ID NO: 465673 - RNA, 19 nt, Artificial Sequence
  Description of Artificial Sequence: Synthetic oligonucleotide
ggcacccgacccagcacgc

SEQ ID NO: 465674 - RNA, 19 nt, Artificial Sequence
  Description of Artificial Sequence: Synthetic oligonucleotide
aggcggccuaugaucuccu

SEQ ID NO: 465675 - RNA, 19 nt, Artificial Sequence
  Description of Artificial Sequence: Synthetic oligonucleotide
gcgggugcgguagcucuug

SEQ ID NO: 465676 - RNA, 19 nt, Artificial Sequence
  Description of Artificial Sequence: Synthetic oligonucleotide
gcaccuugacuccgcccuc

SEQ ID NO: 465677 - RNA, 19 nt, Artificial Sequence
  Description of Artificial Sequence: Synthetic oligonucleotide
cuugggcucuacgacgguu

SEQ ID NO: 465678 - RNA, 19 nt, Artificial Sequence
  Description of Artificial Sequence: Synthetic oligonucleotide
gcugagcguugucggccac

SEQ ID NO: 465679 - RNA, 19 nt, Artificial Sequence
  Description of Artificial Sequence: Synthetic oligonucleotide
cgagagcgcacauacugcu

SEQ ID NO: 465680 - RNA, 19 nt, Artificial Sequence
  Description of Artificial Sequence: Synthetic oligonucleotide
cacgcaucaucuggcugcu

SEQ ID NO: 465681 - RNA, 19 nt, Artificial Sequence
  Description of Artificial Sequence: Synthetic oligonucleotide
cacacggugcaggccccga

SEQ ID NO: 465682 - RNA, 19 nt, Artificial Sequence
  Description of Artificial Sequence: Synthetic oligonucleotide
ugggccgguaggggacaua

SEQ ID NO: 465683 - RNA, 19 nt, Artificial Sequence
  Description of Artificial Sequence: Synthetic oligonucleotide
cgcugacgagccuccuccc

SEQ ID NO: 465684 - RNA, 19 nt, Artificial Sequence
  Description of Artificial Sequence: Synthetic oligonucleotide
acgggcugucugguccaaa

SEQ ID NO: 465685 - RNA, 19 nt, Artificial Sequence
  Description of Artificial Sequence: Synthetic oligonucleotide
cgucgauguuucaggaucu

SEQ ID NO: 465686 - RNA, 19 nt, Artificial Sequence
  Description of Artificial Sequence: Synthetic oligonucleotide
gcacccgacccagcacgcc

SEQ ID NO: 465687 - RNA, 19 nt, Artificial Sequence
  Description of Artificial Sequence: Synthetic oligonucleotide
gggccugacgucgauguuu

SEQ ID NO: 465688 - RNA, 19 nt, Artificial Sequence
  Description of Artificial Sequence: Synthetic oligonucleotide
gccccugcggucccaccga

SEQ ID NO: 465689 - RNA, 19 nt, Artificial Sequence
  Description of Artificial Sequence: Synthetic oligonucleotide
cagucacgaugagggugga

SEQ ID NO: 465690 - RNA, 19 nt, Artificial Sequence
  Description of Artificial Sequence: Synthetic oligonucleotide
cugccgagcuuugcuggua

SEQ ID NO: 465691 - RNA, 19 nt, Artificial Sequence
  Description of Artificial Sequence: Synthetic oligonucleotide
gccgagcuuugcugguaaa

SEQ ID NO: 465692 - RNA, 19 nt, Artificial Sequence
  Description of Artificial Sequence: Synthetic oligonucleotide
ggaccgcaccagccaccug

SEQ ID NO: 465693 - RNA, 19 nt, Artificial Sequence
  Description of Artificial Sequence: Synthetic oligonucleotide
ccacacggugcaggccccg

SEQ ID NO: 465694 - RNA, 19 nt, Artificial Sequence
  Description of Artificial Sequence: Synthetic oligonucleotide
gcggucccaccgaugcuca

SEQ ID NO: 465695 - RNA, 19 nt, Artificial Sequence
  Description of Artificial Sequence: Synthetic oligonucleotide
ccgcgcugcaggaagcgcu

SEQ ID NO: 465696 - RNA, 19 nt, Artificial Sequence
  Description of Artificial Sequence: Synthetic oligonucleotide
gccugacgucgauguuuca

SEQ ID NO: 465697 - RNA, 19 nt, Artificial Sequence
  Description of Artificial Sequence: Synthetic oligonucleotide
ggacgagagcgcacauacu

SEQ ID NO: 465698 - RNA, 19 nt, Artificial Sequence
  Description of Artificial Sequence: Synthetic oligonucleotide
ggcuaucaggaagccccua

SEQ ID NO: 465699 - RNA, 19 nt, Artificial Sequence
  Description of Artificial Sequence: Synthetic oligonucleotide
cgcuggacgagagcgcaca

SEQ ID NO: 465700 - RNA, 19 nt, Artificial Sequence
  Description of Artificial Sequence: Synthetic oligonucleotide
ggccgagaacagcacuguu

SEQ ID NO: 465701 - RNA, 19 nt, Artificial Sequence
  Description of Artificial Sequence: Synthetic oligonucleotide
caggccccgaagguccagu

SEQ ID NO: 465702 - RNA, 19 nt, Artificial Sequence
  Description of Artificial Sequence: Synthetic oligonucleotide
gcguugucggccacacggu

SEQ ID NO: 465703 - RNA, 19 nt, Artificial Sequence
  Description of Artificial Sequence: Synthetic oligonucleotide
gcuggacgagagcgcacau

SEQ ID NO: 465704 - RNA, 19 nt, Artificial Sequence
  Description of Artificial Sequence: Synthetic oligonucleotide
acgcaucaucuggcugcuu

SEQ ID NO: 465705 - RNA, 19 nt, Artificial Sequence
  Description of Artificial Sequence: Synthetic oligonucleotide
gccucgcugguugaaugau

SEQ ID NO: 465706 - RNA, 19 nt, Artificial Sequence
  Description of Artificial Sequence: Synthetic oligonucleotide
gcgcuggacgagagcgcac

SEQ ID NO: 465707 - RNA, 19 nt, Artificial Sequence
  Description of Artificial Sequence: Synthetic oligonucleotide
cgaccucggcucauguucu

SEQ ID NO: 465708 - RNA, 19 nt, Artificial Sequence
  Description of Artificial Sequence: Synthetic oligonucleotide
ccgagcuuugcugguaaau

SEQ ID NO: 465709 - RNA, 19 nt, Artificial Sequence
  Description of Artificial Sequence: Synthetic oligonucleotide
cgguuucgugcugaaagcu

SEQ ID NO: 465710 - RNA, 19 nt, Artificial Sequence
  Description of Artificial Sequence: Synthetic oligonucleotide
cgcugguugaaugauccuu

SEQ ID NO: 465711 - RNA, 19 nt, Artificial Sequence
  Description of Artificial Sequence: Synthetic oligonucleotide
ccuugacuccgcccucgcu

SEQ ID NO: 465712 - RNA, 19 nt, Artificial Sequence
  Description of Artificial Sequence: Synthetic oligonucleotide
ccguuuucuguggccagau

SEQ ID NO: 465713 - RNA, 19 nt, Artificial Sequence
  Description of Artificial Sequence: Synthetic oligonucleotide
ccccgcucacugucaaaau

SEQ ID NO: 465714 - RNA, 19 nt, Artificial Sequence
  Description of Artificial Sequence: Synthetic oligonucleotide
gccgcuuggcacgcaucau

SEQ ID NO: 465715 - RNA, 19 nt, Artificial Sequence
  Description of Artificial Sequence: Synthetic oligonucleotide
cgacgguuucgugcugaaa

SEQ ID NO: 465716 - RNA, 19 nt, Artificial Sequence
  Description of Artificial Sequence: Synthetic oligonucleotide
ccgccccugcuggaagcua

SEQ ID NO: 465717 - RNA, 19 nt, Artificial Sequence
  Description of Artificial Sequence: Synthetic oligonucleotide
cccgggcggccaggucagu

SEQ ID NO: 465718 - RNA, 19 nt, Artificial Sequence
  Description of Artificial Sequence: Synthetic oligonucleotide
aauguagcaauguacaugg

SEQ ID NO: 465719 - RNA, 19 nt, Artificial Sequence
  Description of Artificial Sequence: Synthetic oligonucleotide
uuuaaaugaaccaaaacug

SEQ ID NO: 465720 - RNA, 19 nt, Artificial Sequence
  Description of Artificial Sequence: Synthetic oligonucleotide
aaaaccagcgcuuuuaucu

SEQ ID NO: 465721 - RNA, 19 nt, Artificial Sequence
  Description of Artificial Sequence: Synthetic oligonucleotide
cuuucuacuacccuggucg

SEQ ID NO: 465722 - RNA, 19 nt, Artificial Sequence
  Description of Artificial Sequence: Synthetic oligonucleotide
ugugugaugauccagaaua

SEQ ID NO: 465723 - RNA, 19 nt, Artificial Sequence
  Description of Artificial Sequence: Synthetic oligonucleotide
uuucaaagcagcacgaacc

SEQ ID NO: 465724 - RNA, 19 nt, Artificial Sequence
  Description of Artificial Sequence: Synthetic oligonucleotide
aaaccgaagaacuucaaga

SEQ ID NO: 465725 - RNA, 19 nt, Artificial Sequence
  Description of Artificial Sequence: Synthetic oligonucleotide
aacuuuaagagugcggccc

SEQ ID NO: 465726 - RNA, 19 nt, Artificial Sequence
  Description of Artificial Sequence: Synthetic oligonucleotide
ucuuaaauaaccgaagacu

SEQ ID NO: 465727 - RNA, 19 nt, Artificial Sequence
  Description of Artificial Sequence: Synthetic oligonucleotide
aaagguucuaucucggucu

SEQ ID NO: 465728 - RNA, 19 nt, Artificial Sequence
  Description of Artificial Sequence: Synthetic oligonucleotide
gagcaugccauccuuaucg

SEQ ID NO: 465729 - RNA, 19 nt, Artificial Sequence
  Description of Artificial Sequence: Synthetic oligonucleotide
auuauuuuggcugaauguc

SEQ ID NO: 465730 - RNA, 19 nt, Artificial Sequence
  Description of Artificial Sequence: Synthetic oligonucleotide
uugccuaggauacacacag

SEQ ID NO: 465731 - RNA, 19 nt, Artificial Sequence
  Description of Artificial Sequence: Synthetic oligonucleotide
aagacuuaccaauauacaa

SEQ ID NO: 465732 - RNA, 19 nt, Artificial Sequence
  Description of Artificial Sequence: Synthetic oligonucleotide
ugaacuuuaagagugcggc

SEQ ID NO: 465733 - RNA, 19 nt, Artificial Sequence
  Description of Artificial Sequence: Synthetic oligonucleotide
agaaucauuagauggggag

SEQ ID NO: 465734 - RNA, 19 nt, Artificial Sequence
  Description of Artificial Sequence: Synthetic oligonucleotide
ugaaccaaaacugaugucu

SEQ ID NO: 465735 - RNA, 19 nt, Artificial Sequence
  Description of Artificial Sequence: Synthetic oligonucleotide
ucauugucuaccauuggag

SEQ ID NO: 465736 - RNA, 19 nt, Artificial Sequence
  Description of Artificial Sequence: Synthetic oligonucleotide
ucuuuuauccgguuccccg

SEQ ID NO: 465737 - RNA, 19 nt, Artificial Sequence
  Description of Artificial Sequence: Synthetic oligonucleotide
uucgauugcucccaaggcg

SEQ ID NO: 465738 - RNA, 19 nt, Artificial Sequence
  Description of Artificial Sequence: Synthetic oligonucleotide
uucaaagcagcacgaaccg

SEQ ID NO: 465739 - RNA, 19 nt, Artificial Sequence
  Description of Artificial Sequence: Synthetic oligonucleotide
aaaucuagaugcuuucaca

SEQ ID NO: 465740 - RNA, 19 nt, Artificial Sequence
  Description of Artificial Sequence: Synthetic oligonucleotide
uaaccgaagacucagccga

SEQ ID NO: 465741 - RNA, 19 nt, Artificial Sequence
  Description of Artificial Sequence: Synthetic oligonucleotide
cauaaguccagaccaaucc

SEQ ID NO: 465742 - RNA, 19 nt, Artificial Sequence
  Description of Artificial Sequence: Synthetic oligonucleotide
uuauuuuggcugaaugucc

SEQ ID NO: 465743 - RNA, 19 nt, Artificial Sequence
  Description of Artificial Sequence: Synthetic oligonucleotide
aauuccaacucgcaguaga

SEQ ID NO: 465744 - RNA, 19 nt, Artificial Sequence
  Description of Artificial Sequence: Synthetic oligonucleotide
ucuuuucgcaguaaagcag

SEQ ID NO: 465745 - RNA, 19 nt, Artificial Sequence
  Description of Artificial Sequence: Synthetic oligonucleotide
uuuaucucauacaaaguau

SEQ ID NO: 465746 - RNA, 19 nt, Artificial Sequence
  Description of Artificial Sequence: Synthetic oligonucleotide
caugcucauaccuaucucg

SEQ ID NO: 465747 - RNA, 19 nt, Artificial Sequence
  Description of Artificial Sequence: Synthetic oligonucleotide
acuucgauugcucccaagg

SEQ ID NO: 465748 - RNA, 19 nt, Artificial Sequence
  Description of Artificial Sequence: Synthetic oligonucleotide
uuuagugaacagcucagac

SEQ ID NO: 465749 - RNA, 19 nt, Artificial Sequence
  Description of Artificial Sequence: Synthetic oligonucleotide
ucuagaugcuuucacauua

SEQ ID NO: 465750 - RNA, 19 nt, Artificial Sequence
  Description of Artificial Sequence: Synthetic oligonucleotide
uaaaucuagaugcuuucac

SEQ ID NO: 465751 - RNA, 19 nt, Artificial Sequence
  Description of Artificial Sequence: Synthetic oligonucleotide
cuuuucgcaguaaagcagc

SEQ ID NO: 465752 - RNA, 19 nt, Artificial Sequence
  Description of Artificial Sequence: Synthetic oligonucleotide
aaaccagcgcuuuuaucuc

SEQ ID NO: 465753 - RNA, 19 nt, Artificial Sequence
  Description of Artificial Sequence: Synthetic oligonucleotide
auaaccgaagacucagccg

SEQ ID NO: 465754 - RNA, 19 nt, Artificial Sequence
  Description of Artificial Sequence: Synthetic oligonucleotide
uguucgaaaaggcuaucug

SEQ ID NO: 465755 - RNA, 19 nt, Artificial Sequence
  Description of Artificial Sequence: Synthetic oligonucleotide
uauuuuggcugaaugucca

SEQ ID NO: 465756 - RNA, 19 nt, Artificial Sequence
  Description of Artificial Sequence: Synthetic oligonucleotide
aaccgaagaacuucaagaa

SEQ ID NO: 465757 - RNA, 19 nt, Artificial Sequence
  Description of Artificial Sequence: Synthetic oligonucleotide
uucaaaccgaagaacuuca

SEQ ID NO: 465758 - RNA, 19 nt, Artificial Sequence
  Description of Artificial Sequence: Synthetic oligonucleotide
aguucauguucgaaaaggc

SEQ ID NO: 465759 - RNA, 19 nt, Artificial Sequence
  Description of Artificial Sequence: Synthetic oligonucleotide
uucacugcguuucacagau

SEQ ID NO: 465760 - RNA, 19 nt, Artificial Sequence
  Description of Artificial Sequence: Synthetic oligonucleotide
aauuaaccccacucaaaga

SEQ ID NO: 465761 - RNA, 19 nt, Artificial Sequence
  Description of Artificial Sequence: Synthetic oligonucleotide
uuucacuuuagugaacagc

SEQ ID NO: 465762 - RNA, 19 nt, Artificial Sequence
  Description of Artificial Sequence: Synthetic oligonucleotide
uuaucucauacaaaguauu

SEQ ID NO: 465763 - RNA, 19 nt, Artificial Sequence
  Description of Artificial Sequence: Synthetic oligonucleotide
uuaucgguggaaaugucaa

SEQ ID NO: 465764 - RNA, 19 nt, Artificial Sequence
  Description of Artificial Sequence: Synthetic oligonucleotide
caaaucccugcacagaccc

SEQ ID NO: 465765 - RNA, 19 nt, Artificial Sequence
  Description of Artificial Sequence: Synthetic oligonucleotide
ugugaacuuuaagagugcg

SEQ ID NO: 465766 - RNA, 19 nt, Artificial Sequence
  Description of Artificial Sequence: Synthetic oligonucleotide
caaacuuuugccuaggaua

SEQ ID NO: 465767 - RNA, 19 nt, Artificial Sequence
  Description of Artificial Sequence: Synthetic oligonucleotide
cacuaagaagacucgcucg

SEQ ID NO: 465768 - RNA, 19 nt, Artificial Sequence
  Description of Artificial Sequence: Synthetic oligonucleotide
aaauaaccgaagacucagc

SEQ ID NO: 465769 - RNA, 19 nt, Artificial Sequence
  Description of Artificial Sequence: Synthetic oligonucleotide
uaucucauacaaaguauuc

SEQ ID NO: 465770 - RNA, 19 nt, Artificial Sequence
  Description of Artificial Sequence: Synthetic oligonucleotide
uccuaaugaaugugcauca

SEQ ID NO: 465771 - RNA, 19 nt, Artificial Sequence
  Description of Artificial Sequence: Synthetic oligonucleotide
aauagcacacagucucuga

SEQ ID NO: 465772 - RNA, 19 nt, Artificial Sequence
  Description of Artificial Sequence: Synthetic oligonucleotide
ucgauugcucccaaggcga

SEQ ID NO: 465773 - RNA, 19 nt, Artificial Sequence
  Description of Artificial Sequence: Synthetic oligonucleotide
cagauccuaaugaaugugc

SEQ ID NO: 465774 - RNA, 19 nt, Artificial Sequence
  Description of Artificial Sequence: Synthetic oligonucleotide
uccggauugcagaaucccg

SEQ ID NO: 465775 - RNA, 19 nt, Artificial Sequence
  Description of Artificial Sequence: Synthetic oligonucleotide
agggucggcaguuagucuc

SEQ ID NO: 465776 - RNA, 19 nt, Artificial Sequence
  Description of Artificial Sequence: Synthetic oligonucleotide
gaaucauuagauggggagc

SEQ ID NO: 465777 - RNA, 19 nt, Artificial Sequence
  Description of Artificial Sequence: Synthetic oligonucleotide
ugggcuuuucuagaagucg

SEQ ID NO: 465778 - RNA, 19 nt, Artificial Sequence
  Description of Artificial Sequence: Synthetic oligonucleotide
gucguccccacuucgaugg

SEQ ID NO: 465779 - RNA, 19 nt, Artificial Sequence
  Description of Artificial Sequence: Synthetic oligonucleotide
uaaguccagaccaauccac

SEQ ID NO: 465780 - RNA, 19 nt, Artificial Sequence
  Description of Artificial Sequence: Synthetic oligonucleotide
aguaaagcagccauguuga

SEQ ID NO: 465781 - RNA, 19 nt, Artificial Sequence
  Description of Artificial Sequence: Synthetic oligonucleotide
ucacuaagaagacucgcuc

SEQ ID NO: 465782 - RNA, 19 nt, Artificial Sequence
  Description of Artificial Sequence: Synthetic oligonucleotide
acaggcuagaggaacaggg

SEQ ID NO: 465783 - RNA, 19 nt, Artificial Sequence
  Description of Artificial Sequence: Synthetic oligonucleotide
ucuacuacccuggucgucc

SEQ ID NO: 465784 - RNA, 19 nt, Artificial Sequence
  Description of Artificial Sequence: Synthetic oligonucleotide
aucgguggaaaugucaauc

SEQ ID NO: 465785 - RNA, 19 nt, Artificial Sequence
  Description of Artificial Sequence: Synthetic oligonucleotide
ucaaagacuuaccaauaua

SEQ ID NO: 465786 - RNA, 19 nt, Artificial Sequence
  Description of Artificial Sequence: Synthetic oligonucleotide
uaagagugcggccccaggc

SEQ ID NO: 465787 - RNA, 19 nt, Artificial Sequence
  Description of Artificial Sequence: Synthetic oligonucleotide
augucucggaaguucaaag

SEQ ID NO: 465788 - RNA, 19 nt, Artificial Sequence
  Description of Artificial Sequence: Synthetic oligonucleotide
aagguucuaucucggucuc

SEQ ID NO: 465789 - RNA, 19 nt, Artificial Sequence
  Description of Artificial Sequence: Synthetic oligonucleotide
ucuagaagucgcugacacg

SEQ ID NO: 465790 - RNA, 19 nt, Artificial Sequence
  Description of Artificial Sequence: Synthetic oligonucleotide
caagaaagauucugcacug

SEQ ID NO: 465791 - RNA, 19 nt, Artificial Sequence
  Description of Artificial Sequence: Synthetic oligonucleotide
agaccccaggucucuaucc

SEQ ID NO: 465792 - RNA, 19 nt, Artificial Sequence
  Description of Artificial Sequence: Synthetic oligonucleotide
aguugguuuccuaaaaucu

SEQ ID NO: 465793 - RNA, 19 nt, Artificial Sequence
  Description of Artificial Sequence: Synthetic oligonucleotide
ucgaugggcagaaucauua

SEQ ID NO: 465794 - RNA, 19 nt, Artificial Sequence
  Description of Artificial Sequence: Synthetic oligonucleotide
ucgacugucaaaugaccca

SEQ ID NO: 465795 - RNA, 19 nt, Artificial Sequence
  Description of Artificial Sequence: Synthetic oligonucleotide
uccgaccagucacuaaagg

SEQ ID NO: 465796 - RNA, 19 nt, Artificial Sequence
  Description of Artificial Sequence: Synthetic oligonucleotide
ucugucucgacugucaaau

SEQ ID NO: 465797 - RNA, 19 nt, Artificial Sequence
  Description of Artificial Sequence: Synthetic oligonucleotide
auaccuaucucgcucuuga

SEQ ID NO: 465798 - RNA, 19 nt, Artificial Sequence
  Description of Artificial Sequence: Synthetic oligonucleotide
auaaguccagaccaaucca

SEQ ID NO: 465799 - RNA, 19 nt, Artificial Sequence
  Description of Artificial Sequence: Synthetic oligonucleotide
ucucggaaguucaaaguuc

SEQ ID NO: 465800 - RNA, 19 nt, Artificial Sequence
  Description of Artificial Sequence: Synthetic oligonucleotide
ucucgacugucaaaugacc

SEQ ID NO: 465801 - RNA, 19 nt, Artificial Sequence
  Description of Artificial Sequence: Synthetic oligonucleotide
uuaagagugcggccccagg

SEQ ID NO: 465802 - RNA, 19 nt, Artificial Sequence
  Description of Artificial Sequence: Synthetic oligonucleotide
aaauagcacacagucucug

SEQ ID NO: 465803 - RNA, 19 nt, Artificial Sequence
  Description of Artificial Sequence: Synthetic oligonucleotide
gaaguucaaaguucuucac

SEQ ID NO: 465804 - RNA, 19 nt, Artificial Sequence
  Description of Artificial Sequence: Synthetic oligonucleotide
cacacagucucugauaaug

SEQ ID NO: 465805 - RNA, 19 nt, Artificial Sequence
  Description of Artificial Sequence: Synthetic oligonucleotide
cauuagauggggagcguag

SEQ ID NO: 465806 - RNA, 19 nt, Artificial Sequence
  Description of Artificial Sequence: Synthetic oligonucleotide
gaacuuuaagagugcggcc

SEQ ID NO: 465807 - RNA, 19 nt, Artificial Sequence
  Description of Artificial Sequence: Synthetic oligonucleotide
gcugcggugacuucgauug

SEQ ID NO: 465808 - RNA, 19 nt, Artificial Sequence
  Description of Artificial Sequence: Synthetic oligonucleotide
agaaccaaaaggccgccca

SEQ ID NO: 465809 - RNA, 19 nt, Artificial Sequence
  Description of Artificial Sequence: Synthetic oligonucleotide
ucuuucgugcucacucucc

SEQ ID NO: 465810 - RNA, 19 nt, Artificial Sequence
  Description of Artificial Sequence: Synthetic oligonucleotide
aaucccgucugaaacauaa

SEQ ID NO: 465811 - RNA, 19 nt, Artificial Sequence
  Description of Artificial Sequence: Synthetic oligonucleotide
ugucucguucccgaagucg

SEQ ID NO: 465812 - RNA, 19 nt, Artificial Sequence
  Description of Artificial Sequence: Synthetic oligonucleotide
uucaggugcacaccuuagc

SEQ ID NO: 465813 - RNA, 19 nt, Artificial Sequence
  Description of Artificial Sequence: Synthetic oligonucleotide
ucuaauggaucuggcaucu

SEQ ID NO: 465814 - RNA, 19 nt, Artificial Sequence
  Description of Artificial Sequence: Synthetic oligonucleotide
ucgguggaaaugucaauca

SEQ ID NO: 465815 - RNA, 19 nt, Artificial Sequence
  Description of Artificial Sequence: Synthetic oligonucleotide
uguugagagccccuaguuc

SEQ ID NO: 465816 - RNA, 19 nt, Artificial Sequence
  Description of Artificial Sequence: Synthetic oligonucleotide
agcgcuuuuaucucauaca

SEQ ID NO: 465817 - RNA, 19 nt, Artificial Sequence
  Description of Artificial Sequence: Synthetic oligonucleotide
acaagcugcuuccggauug

SEQ ID NO: 465818 - RNA, 19 nt, Artificial Sequence
  Description of Artificial Sequence: Synthetic oligonucleotide
ugucucggaaguucaaagu

SEQ ID NO: 465819 - RNA, 19 nt, Artificial Sequence
  Description of Artificial Sequence: Synthetic oligonucleotide
augaaccaaaacugauguc

SEQ ID NO: 465820 - RNA, 19 nt, Artificial Sequence
  Description of Artificial Sequence: Synthetic oligonucleotide
acaccuuagcccuugcacu

SEQ ID NO: 465821 - RNA, 19 nt, Artificial Sequence
  Description of Artificial Sequence: Synthetic oligonucleotide
uuuucgcaguaaagcagcc

SEQ ID NO: 465822 - RNA, 19 nt, Artificial Sequence
  Description of Artificial Sequence: Synthetic oligonucleotide
aucucauacaaaguauuca

SEQ ID NO: 465823 - RNA, 19 nt, Artificial Sequence
  Description of Artificial Sequence: Synthetic oligonucleotide
caaagguucuaucucgguc

SEQ ID NO: 465824 - RNA, 19 nt, Artificial Sequence
  Description of Artificial Sequence: Synthetic oligonucleotide
augcucauaccuaucucgc

SEQ ID NO: 465825 - RNA, 19 nt, Artificial Sequence
  Description of Artificial Sequence: Synthetic oligonucleotide
agcacacagucucugauaa

SEQ ID NO: 465826 - RNA, 19 nt, Artificial Sequence
  Description of Artificial Sequence: Synthetic oligonucleotide
auuagauggggagcguagg

SEQ ID NO: 465827 - RNA, 19 nt, Artificial Sequence
  Description of Artificial Sequence: Synthetic oligonucleotide
ucgcucguucuucuuuucg

SEQ ID NO: 465828 - RNA, 19 nt, Artificial Sequence
  Description of Artificial Sequence: Synthetic oligonucleotide
uccuuaucgguggaaaugu

SEQ ID NO: 465829 - RNA, 19 nt, Artificial Sequence
  Description of Artificial Sequence: Synthetic oligonucleotide
auucugacugagaagucuc

SEQ ID NO: 465830 - RNA, 19 nt, Artificial Sequence
  Description of Artificial Sequence: Synthetic oligonucleotide
cacaccuuagcccuugcac

SEQ ID NO: 465831 - RNA, 19 nt, Artificial Sequence
  Description of Artificial Sequence: Synthetic oligonucleotide
agaccgugaauggaccugc

SEQ ID NO: 465832 - RNA, 19 nt, Artificial Sequence
  Description of Artificial Sequence: Synthetic oligonucleotide
agaccaauccacaucuauc

SEQ ID NO: 465833 - RNA, 19 nt, Artificial Sequence
  Description of Artificial Sequence: Synthetic oligonucleotide
aguuuacugucuucagucu

SEQ ID NO: 465834 - RNA, 19 nt, Artificial Sequence
  Description of Artificial Sequence: Synthetic oligonucleotide
ugcguuucacagauucuga

SEQ ID NO: 465835 - RNA, 19 nt, Artificial Sequence
  Description of Artificial Sequence: Synthetic oligonucleotide
aaugugcaucaucuaacuu

SEQ ID NO: 465836 - RNA, 19 nt, Artificial Sequence
  Description of Artificial Sequence: Synthetic oligonucleotide
cuuaucgguggaaauguca

SEQ ID NO: 465837 - RNA, 19 nt, Artificial Sequence
  Description of Artificial Sequence: Synthetic oligonucleotide
aguggcaguggcuacaguu

SEQ ID NO: 465838 - RNA, 19 nt, Artificial Sequence
  Description of Artificial Sequence: Synthetic oligonucleotide
cacugcguuucacagauuc

SEQ ID NO: 465839 - RNA, 19 nt, Artificial Sequence
  Description of Artificial Sequence: Synthetic oligonucleotide
gaugaguugguuuccuaaa

SEQ ID NO: 465840 - RNA, 19 nt, Artificial Sequence
  Description of Artificial Sequence: Synthetic oligonucleotide
acagggucggcaguuaguc

SEQ ID NO: 465841 - RNA, 19 nt, Artificial Sequence
  Description of Artificial Sequence: Synthetic oligonucleotide
uagucucucucucucucug

SEQ ID NO: 465842 - RNA, 19 nt, Artificial Sequence
  Description of Artificial Sequence: Synthetic oligonucleotide
cacuuuagugaacagcuca

SEQ ID NO: 465843 - RNA, 19 nt, Artificial Sequence
  Description of Artificial Sequence: Synthetic oligonucleotide
uggacuagucaguucugug

SEQ ID NO: 465844 - RNA, 19 nt, Artificial Sequence
  Description of Artificial Sequence: Synthetic oligonucleotide
agacuuaccaauauacaau

SEQ ID NO: 465845 - RNA, 19 nt, Artificial Sequence
  Description of Artificial Sequence: Synthetic oligonucleotide
ugcuuucaaaccgaagaac

SEQ ID NO: 465846 - RNA, 19 nt, Artificial Sequence
  Description of Artificial Sequence: Synthetic oligonucleotide
ucggcaguuagucucucuc

SEQ ID NO: 465847 - RNA, 19 nt, Artificial Sequence
  Description of Artificial Sequence: Synthetic oligonucleotide
cacugaugggcucguaucc

SEQ ID NO: 465848 - RNA, 19 nt, Artificial Sequence
  Description of Artificial Sequence: Synthetic oligonucleotide
uaccauuggaguguuugug

SEQ ID NO: 465849 - RNA, 19 nt, Artificial Sequence
  Description of Artificial Sequence: Synthetic oligonucleotide
uuuuauccgguuccccggu

SEQ ID NO: 465850 - RNA, 19 nt, Artificial Sequence
  Description of Artificial Sequence: Synthetic oligonucleotide
cuaucucggucucuguccc

SEQ ID NO: 465851 - RNA, 19 nt, Artificial Sequence
  Description of Artificial Sequence: Synthetic oligonucleotide
caauggauccucgagcaug

SEQ ID NO: 465852 - RNA, 19 nt, Artificial Sequence
  Description of Artificial Sequence: Synthetic oligonucleotide
gugaacuuuaagagugcgg

SEQ ID NO: 465853 - RNA, 19 nt, Artificial Sequence
  Description of Artificial Sequence: Synthetic oligonucleotide
acuucgaugggcagaauca

SEQ ID NO: 465854 - RNA, 19 nt, Artificial Sequence
  Description of Artificial Sequence: Synthetic oligonucleotide
aucccauggagucauuuau

SEQ ID NO: 465855 - RNA, 19 nt, Artificial Sequence
  Description of Artificial Sequence: Synthetic oligonucleotide
cucccggucaugcucauac

SEQ ID NO: 465856 - RNA, 19 nt, Artificial Sequence
  Description of Artificial Sequence: Synthetic oligonucleotide
ugccgauccgacucagggg

SEQ ID NO: 465857 - RNA, 19 nt, Artificial Sequence
  Description of Artificial Sequence: Synthetic oligonucleotide
aggccgcccaaacuuuugc

SEQ ID NO: 465858 - RNA, 19 nt, Artificial Sequence
  Description of Artificial Sequence: Synthetic oligonucleotide
acacguuucuuucacuuua

SEQ ID NO: 465859 - RNA, 19 nt, Artificial Sequence
  Description of Artificial Sequence: Synthetic oligonucleotide
cccgucugaaacauaaugc

SEQ ID NO: 465860 - RNA, 19 nt, Artificial Sequence
  Description of Artificial Sequence: Synthetic oligonucleotide
aaaucccugcacagacccc

SEQ ID NO: 465861 - RNA, 19 nt, Artificial Sequence
  Description of Artificial Sequence: Synthetic oligonucleotide
ugcauccccggccagaauu

SEQ ID NO: 465862 - RNA, 19 nt, Artificial Sequence
  Description of Artificial Sequence: Synthetic oligonucleotide
gaaguagcucauugucuac

SEQ ID NO: 465863 - RNA, 19 nt, Artificial Sequence
  Description of Artificial Sequence: Synthetic oligonucleotide
uuagucucucucucucucu

SEQ ID NO: 465864 - RNA, 19 nt, Artificial Sequence
  Description of Artificial Sequence: Synthetic oligonucleotide
cucguucuucuuuucgcag

SEQ ID NO: 465865 - RNA, 19 nt, Artificial Sequence
  Description of Artificial Sequence: Synthetic oligonucleotide
aaccagcgcuuuuaucuca

SEQ ID NO: 465866 - RNA, 19 nt, Artificial Sequence
  Description of Artificial Sequence: Synthetic oligonucleotide
uugggcuuuucuagaaguc

SEQ ID NO: 465867 - RNA, 19 nt, Artificial Sequence
  Description of Artificial Sequence: Synthetic oligonucleotide
uuccggauugcagaauccc

SEQ ID NO: 465868 - RNA, 19 nt, Artificial Sequence
  Description of Artificial Sequence: Synthetic oligonucleotide
accgugaauggaccugccg

SEQ ID NO: 465869 - RNA, 19 nt, Artificial Sequence
  Description of Artificial Sequence: Synthetic oligonucleotide
ucucucucucucucugucc

SEQ ID NO: 465870 - RNA, 19 nt, Artificial Sequence
  Description of Artificial Sequence: Synthetic oligonucleotide
augaguugguuuccuaaaa

SEQ ID NO: 465871 - RNA, 19 nt, Artificial Sequence
  Description of Artificial Sequence: Synthetic oligonucleotide
ucguucccgaagucgaucu

SEQ ID NO: 465872 - RNA, 19 nt, Artificial Sequence
  Description of Artificial Sequence: Synthetic oligonucleotide
guuagucucucucucucuc

SEQ ID NO: 465873 - RNA, 19 nt, Artificial Sequence
  Description of Artificial Sequence: Synthetic oligonucleotide
caaugcuuucaaaccgaag

SEQ ID NO: 465874 - RNA, 19 nt, Artificial Sequence
  Description of Artificial Sequence: Synthetic oligonucleotide
uuuaagagugcggccccag

SEQ ID NO: 465875 - RNA, 19 nt, Artificial Sequence
  Description of Artificial Sequence: Synthetic oligonucleotide
aguuagucucucucucucu

SEQ ID NO: 465876 - RNA, 19 nt, Artificial Sequence
  Description of Artificial Sequence: Synthetic oligonucleotide
ucacagauucugacugaga

SEQ ID NO: 465877 - RNA, 19 nt, Artificial Sequence
  Description of Artificial Sequence: Synthetic oligonucleotide
ucacaguucccuuuucguu

SEQ ID NO: 465878 - RNA, 19 nt, Artificial Sequence
  Description of Artificial Sequence: Synthetic oligonucleotide
gaaccaaaacugaugucuc

SEQ ID NO: 465879 - RNA, 19 nt, Artificial Sequence
  Description of Artificial Sequence: Synthetic oligonucleotide
cuucaggugcacaccuuag

SEQ ID NO: 465880 - RNA, 19 nt, Artificial Sequence
  Description of Artificial Sequence: Synthetic oligonucleotide
cuuuggcauaaguccagac

SEQ ID NO: 465881 - RNA, 19 nt, Artificial Sequence
  Description of Artificial Sequence: Synthetic oligonucleotide
ucaucuaacuuggacucau

SEQ ID NO: 465882 - RNA, 19 nt, Artificial Sequence
  Description of Artificial Sequence: Synthetic oligonucleotide
aaauuccaacucgcaguag

SEQ ID NO: 465883 - RNA, 19 nt, Artificial Sequence
  Description of Artificial Sequence: Synthetic oligonucleotide
ggugacuucgauugcuccc

SEQ ID NO: 465884 - RNA, 19 nt, Artificial Sequence
  Description of Artificial Sequence: Synthetic oligonucleotide
cagcgcuuuuaucucauac

SEQ ID NO: 465885 - RNA, 19 nt, Artificial Sequence
  Description of Artificial Sequence: Synthetic oligonucleotide
aggcuagaggaacagggau

SEQ ID NO: 465886 - RNA, 19 nt, Artificial Sequence
  Description of Artificial Sequence: Synthetic oligonucleotide
ucaaaccgaagaacuucaa

SEQ ID NO: 465887 - RNA, 19 nt, Artificial Sequence
  Description of Artificial Sequence: Synthetic oligonucleotide
uuucuacuacccuggucgu

SEQ ID NO: 465888 - RNA, 19 nt, Artificial Sequence
  Description of Artificial Sequence: Synthetic oligonucleotide
agauccuaaugaaugugca

SEQ ID NO: 465889 - RNA, 19 nt, Artificial Sequence
  Description of Artificial Sequence: Synthetic oligonucleotide
ucggucucugguucguggc

SEQ ID NO: 465890 - RNA, 19 nt, Artificial Sequence
  Description of Artificial Sequence: Synthetic oligonucleotide
uggugcuaguuuacugucu

SEQ ID NO: 465891 - RNA, 19 nt, Artificial Sequence
  Description of Artificial Sequence: Synthetic oligonucleotide
ggcuguaucuucuuucuuc

SEQ ID NO: 465892 - RNA, 19 nt, Artificial Sequence
  Description of Artificial Sequence: Synthetic oligonucleotide
aauggaccugccgauccga

SEQ ID NO: 465893 - RNA, 19 nt, Artificial Sequence
  Description of Artificial Sequence: Synthetic oligonucleotide
ucgcaguaaagcagccaug

SEQ ID NO: 465894 - RNA, 19 nt, Artificial Sequence
  Description of Artificial Sequence: Synthetic oligonucleotide
cuaucucgcucuugaaguc

SEQ ID NO: 465895 - RNA, 19 nt, Artificial Sequence
  Description of Artificial Sequence: Synthetic oligonucleotide
agccccuaguucauguucg

SEQ ID NO: 465896 - RNA, 19 nt, Artificial Sequence
  Description of Artificial Sequence: Synthetic oligonucleotide
agucccgggaacugccauc

SEQ ID NO: 465897 - RNA, 19 nt, Artificial Sequence
  Description of Artificial Sequence: Synthetic oligonucleotide
uaucucgcucuugaagucu

SEQ ID NO: 465898 - RNA, 19 nt, Artificial Sequence
  Description of Artificial Sequence: Synthetic oligonucleotide
accccaggucucuauccac

SEQ ID NO: 465899 - RNA, 19 nt, Artificial Sequence
  Description of Artificial Sequence: Synthetic oligonucleotide
caguuagucucucucucuc

SEQ ID NO: 465900 - RNA, 19 nt, Artificial Sequence
  Description of Artificial Sequence: Synthetic oligonucleotide
auguugagagccccuaguu

SEQ ID NO: 465901 - RNA, 19 nt, Artificial Sequence
  Description of Artificial Sequence: Synthetic oligonucleotide
ucgagcaugccauccuuau

SEQ ID NO: 465902 - RNA, 19 nt, Artificial Sequence
  Description of Artificial Sequence: Synthetic oligonucleotide
auguucgaaaaggcuaucu

SEQ ID NO: 465903 - RNA, 19 nt, Artificial Sequence
  Description of Artificial Sequence: Synthetic oligonucleotide
ccgaccagucacuaaaggc

SEQ ID NO: 465904 - RNA, 19 nt, Artificial Sequence
  Description of Artificial Sequence: Synthetic oligonucleotide
aacucgcaguagaacagcu

SEQ ID NO: 465905 - RNA, 19 nt, Artificial Sequence
  Description of Artificial Sequence: Synthetic oligonucleotide
cuacaguucaggguccaug

SEQ ID NO: 465906 - RNA, 19 nt, Artificial Sequence
  Description of Artificial Sequence: Synthetic oligonucleotide
acaauuaaccccacucaaa

SEQ ID NO: 465907 - RNA, 19 nt, Artificial Sequence
  Description of Artificial Sequence: Synthetic oligonucleotide
accuuagcccuugcacucc

SEQ ID NO: 465908 - RNA, 19 nt, Artificial Sequence
  Description of Artificial Sequence: Synthetic oligonucleotide
gucucgacugucaaaugac

SEQ ID NO: 465909 - RNA, 19 nt, Artificial Sequence
  Description of Artificial Sequence: Synthetic oligonucleotide
acauaaugcuuuacaacau

SEQ ID NO: 465910 - RNA, 19 nt, Artificial Sequence
  Description of Artificial Sequence: Synthetic oligonucleotide
gaagacucgcucguucuuc

SEQ ID NO: 465911 - RNA, 19 nt, Artificial Sequence
  Description of Artificial Sequence: Synthetic oligonucleotide
agccgaaguagcucauugu

SEQ ID NO: 465912 - RNA, 19 nt, Artificial Sequence
  Description of Artificial Sequence: Synthetic oligonucleotide
gcucacaucuucaaauccc

SEQ ID NO: 465913 - RNA, 19 nt, Artificial Sequence
  Description of Artificial Sequence: Synthetic oligonucleotide
gagccccuaguucauguuc

SEQ ID NO: 465914 - RNA, 19 nt, Artificial Sequence
  Description of Artificial Sequence: Synthetic oligonucleotide
uucgaugggcagaaucauu

SEQ ID NO: 465915 - RNA, 19 nt, Artificial Sequence
  Description of Artificial Sequence: Synthetic oligonucleotide
ucgcugacacguuucuuuc

SEQ ID NO: 465916 - RNA, 19 nt, Artificial Sequence
  Description of Artificial Sequence: Synthetic oligonucleotide
gacuucgauugcucccaag

SEQ ID NO: 465917 - RNA, 19 nt, Artificial Sequence
  Description of Artificial Sequence: Synthetic oligonucleotide
caaaugacccagaccguga

SEQ ID NO: 465918 - RNA, 19 nt, Artificial Sequence
  Description of Artificial Sequence: Synthetic oligonucleotide
cugaauguccaguacugua

SEQ ID NO: 465919 - RNA, 19 nt, Artificial Sequence
  Description of Artificial Sequence: Synthetic oligonucleotide
ucauuagauggggagcgua

SEQ ID NO: 465920 - RNA, 19 nt, Artificial Sequence
  Description of Artificial Sequence: Synthetic oligonucleotide
uggcauaaguccagaccaa

SEQ ID NO: 465921 - RNA, 19 nt, Artificial Sequence
  Description of Artificial Sequence: Synthetic oligonucleotide
agaaucccgucugaaacau

SEQ ID NO: 465922 - RNA, 19 nt, Artificial Sequence
  Description of Artificial Sequence: Synthetic oligonucleotide
agucucugauaaugaacaa

SEQ ID NO: 465923 - RNA, 19 nt, Artificial Sequence
  Description of Artificial Sequence: Synthetic oligonucleotide
caacucgcaguagaacagc

SEQ ID NO: 465924 - RNA, 19 nt, Artificial Sequence
  Description of Artificial Sequence: Synthetic oligonucleotide
gaagucgcugacacguuuc

SEQ ID NO: 465925 - RNA, 19 nt, Artificial Sequence
  Description of Artificial Sequence: Synthetic oligonucleotide
agaagucgcugacacguuu

SEQ ID NO: 465926 - RNA, 19 nt, Artificial Sequence
  Description of Artificial Sequence: Synthetic oligonucleotide
caaaacugaugucucggaa

SEQ ID NO: 465927 - RNA, 19 nt, Artificial Sequence
  Description of Artificial Sequence: Synthetic oligonucleotide
uaucgguggaaaugucaau

SEQ ID NO: 465928 - RNA, 19 nt, Artificial Sequence
  Description of Artificial Sequence: Synthetic oligonucleotide
cuugaagucugucucgacu

SEQ ID NO: 465929 - RNA, 19 nt, Artificial Sequence
  Description of Artificial Sequence: Synthetic oligonucleotide
uggcuacaguucagggucc

SEQ ID NO: 465930 - RNA, 19 nt, Artificial Sequence
  Description of Artificial Sequence: Synthetic oligonucleotide
cugaaacauaaugcuuuac

SEQ ID NO: 465931 - RNA, 19 nt, Artificial Sequence
  Description of Artificial Sequence: Synthetic oligonucleotide
ugcggugacuucgauugcu

SEQ ID NO: 465932 - RNA, 19 nt, Artificial Sequence
  Description of Artificial Sequence: Synthetic oligonucleotide
acuuaccaauauacaaugu

SEQ ID NO: 465933 - RNA, 19 nt, Artificial Sequence
  Description of Artificial Sequence: Synthetic oligonucleotide
ccaacucgcaguagaacag

SEQ ID NO: 465934 - RNA, 19 nt, Artificial Sequence
  Description of Artificial Sequence: Synthetic oligonucleotide
gaugucucggaaguucaaa

SEQ ID NO: 465935 - RNA, 19 nt, Artificial Sequence
  Description of Artificial Sequence: Synthetic oligonucleotide
aacauggucccaggucacu

SEQ ID NO: 465936 - RNA, 19 nt, Artificial Sequence
  Description of Artificial Sequence: Synthetic oligonucleotide
guauccuuccccagcacca

SEQ ID NO: 465937 - RNA, 19 nt, Artificial Sequence
  Description of Artificial Sequence: Synthetic oligonucleotide
ggaugcuuuggcauaaguc

SEQ ID NO: 465938 - RNA, 19 nt, Artificial Sequence
  Description of Artificial Sequence: Synthetic oligonucleotide
uuuauccgguuccccgguc

SEQ ID NO: 465939 - RNA, 19 nt, Artificial Sequence
  Description of Artificial Sequence: Synthetic oligonucleotide
caugcccucugugcggucg

SEQ ID NO: 465940 - RNA, 19 nt, Artificial Sequence
  Description of Artificial Sequence: Synthetic oligonucleotide
gcugacacguuucuuucac

SEQ ID NO: 465941 - RNA, 19 nt, Artificial Sequence
  Description of Artificial Sequence: Synthetic oligonucleotide
cucucucucucucugucca

SEQ ID NO: 465942 - RNA, 19 nt, Artificial Sequence
  Description of Artificial Sequence: Synthetic oligonucleotide
gcucauaccuaucucgcuc

SEQ ID NO: 465943 - RNA, 19 nt, Artificial Sequence
  Description of Artificial Sequence: Synthetic oligonucleotide
ugccuaggauacacacagc

SEQ ID NO: 465944 - RNA, 19 nt, Artificial Sequence
  Description of Artificial Sequence: Synthetic oligonucleotide
cauggcuauugagucccgg

SEQ ID NO: 465945 - RNA, 19 nt, Artificial Sequence
  Description of Artificial Sequence: Synthetic oligonucleotide
gauccuaaugaaugugcau

SEQ ID NO: 465946 - RNA, 19 nt, Artificial Sequence
  Description of Artificial Sequence: Synthetic oligonucleotide
gacucagccgaaguagcuc

SEQ ID NO: 465947 - RNA, 19 nt, Artificial Sequence
  Description of Artificial Sequence: Synthetic oligonucleotide
cucguauccuuccccagca

SEQ ID NO: 465948 - RNA, 19 nt, Artificial Sequence
  Description of Artificial Sequence: Synthetic oligonucleotide
uccccggccagaauuucau

SEQ ID NO: 465949 - RNA, 19 nt, Artificial Sequence
  Description of Artificial Sequence: Synthetic oligonucleotide
ggaugaguugguuuccuaa

SEQ ID NO: 465950 - RNA, 19 nt, Artificial Sequence
  Description of Artificial Sequence: Synthetic oligonucleotide
gcagugguugcaguauugg

SEQ ID NO: 465951 - RNA, 19 nt, Artificial Sequence
  Description of Artificial Sequence: Synthetic oligonucleotide
agucucucucucucucugu

SEQ ID NO: 465952 - RNA, 19 nt, Artificial Sequence
  Description of Artificial Sequence: Synthetic oligonucleotide
ugguucguggccacucuuu

SEQ ID NO: 465953 - RNA, 19 nt, Artificial Sequence
  Description of Artificial Sequence: Synthetic oligonucleotide
uccucaugguggagacugc

SEQ ID NO: 465954 - RNA, 19 nt, Artificial Sequence
  Description of Artificial Sequence: Synthetic oligonucleotide
gugacuucgauugcuccca

SEQ ID NO: 465955 - RNA, 19 nt, Artificial Sequence
  Description of Artificial Sequence: Synthetic oligonucleotide
gucucucucucucucuguc

SEQ ID NO: 465956 - RNA, 19 nt, Artificial Sequence
  Description of Artificial Sequence: Synthetic oligonucleotide
cuuucgugcucacucucca

SEQ ID NO: 465957 - RNA, 19 nt, Artificial Sequence
  Description of Artificial Sequence: Synthetic oligonucleotide
gugugaacuuuaagagugc

SEQ ID NO: 465958 - RNA, 19 nt, Artificial Sequence
  Description of Artificial Sequence: Synthetic oligonucleotide
uggucguccccacuucgau

SEQ ID NO: 465959 - RNA, 19 nt, Artificial Sequence
  Description of Artificial Sequence: Synthetic oligonucleotide
cucucucucucuguccaag

SEQ ID NO: 465960 - RNA, 19 nt, Artificial Sequence
  Description of Artificial Sequence: Synthetic oligonucleotide
agcaauguacauggguaaa

SEQ ID NO: 465961 - RNA, 19 nt, Artificial Sequence
  Description of Artificial Sequence: Synthetic oligonucleotide
ggucacuaagaagacucgc

SEQ ID NO: 465962 - RNA, 19 nt, Artificial Sequence
  Description of Artificial Sequence: Synthetic oligonucleotide
cagaaucaccuuuggaucu

SEQ ID NO: 465963 - RNA, 19 nt, Artificial Sequence
  Description of Artificial Sequence: Synthetic oligonucleotide
ucauccgaccagucacuaa

SEQ ID NO: 465964 - RNA, 19 nt, Artificial Sequence
  Description of Artificial Sequence: Synthetic oligonucleotide
ggaccugccgauccgacuc

SEQ ID NO: 465965 - RNA, 19 nt, Artificial Sequence
  Description of Artificial Sequence: Synthetic oligonucleotide
cuuuagugaacagcucaga

SEQ ID NO: 465966 - RNA, 19 nt, Artificial Sequence
  Description of Artificial Sequence: Synthetic oligonucleotide
gccgauccgacucagggga

SEQ ID NO: 465967 - RNA, 19 nt, Artificial Sequence
  Description of Artificial Sequence: Synthetic oligonucleotide
uggaccugccgauccgacu

SEQ ID NO: 465968 - RNA, 19 nt, Artificial Sequence
  Description of Artificial Sequence: Synthetic oligonucleotide
caggcuagaggaacaggga

SEQ ID NO: 465969 - RNA, 19 nt, Artificial Sequence
  Description of Artificial Sequence: Synthetic oligonucleotide
cuacuacccuggucguccc

SEQ ID NO: 465970 - RNA, 19 nt, Artificial Sequence
  Description of Artificial Sequence: Synthetic oligonucleotide
ugcggucgggcacauccuc

SEQ ID NO: 465971 - RNA, 19 nt, Artificial Sequence
  Description of Artificial Sequence: Synthetic oligonucleotide
ccgggaacugccauccagg

SEQ ID NO: 465972 - RNA, 19 nt, Artificial Sequence
  Description of Artificial Sequence: Synthetic oligonucleotide
gucucguucccgaagucga

SEQ ID NO: 465973 - RNA, 19 nt, Artificial Sequence
  Description of Artificial Sequence: Synthetic oligonucleotide
aaggccgcccaaacuuuug

SEQ ID NO: 465974 - RNA, 19 nt, Artificial Sequence
  Description of Artificial Sequence: Synthetic oligonucleotide
agcagugguugcaguauug

SEQ ID NO: 465975 - RNA, 19 nt, Artificial Sequence
  Description of Artificial Sequence: Synthetic oligonucleotide
ucguauccuuccccagcac

SEQ ID NO: 465976 - RNA, 19 nt, Artificial Sequence
  Description of Artificial Sequence: Synthetic oligonucleotide
caagcugcuuccggauugc

SEQ ID NO: 465977 - RNA, 19 nt, Artificial Sequence
  Description of Artificial Sequence: Synthetic oligonucleotide
uacuacccuggucgucccc

SEQ ID NO: 465978 - RNA, 19 nt, Artificial Sequence
  Description of Artificial Sequence: Synthetic oligonucleotide
ucguccccacuucgauggg

SEQ ID NO: 465979 - RNA, 19 nt, Artificial Sequence
  Description of Artificial Sequence: Synthetic oligonucleotide
ccuaggauacacacagcuc

SEQ ID NO: 465980 - RNA, 19 nt, Artificial Sequence
  Description of Artificial Sequence: Synthetic oligonucleotide
cugucucgacugucaaaug

SEQ ID NO: 465981 - RNA, 19 nt, Artificial Sequence
  Description of Artificial Sequence: Synthetic oligonucleotide
ugagagccccuaguucaug

SEQ ID NO: 465982 - RNA, 19 nt, Artificial Sequence
  Description of Artificial Sequence: Synthetic oligonucleotide
aaaaggcuaucugcaucuu

SEQ ID NO: 465983 - RNA, 19 nt, Artificial Sequence
  Description of Artificial Sequence: Synthetic oligonucleotide
ucccggucaugcucauacc

SEQ ID NO: 465984 - RNA, 19 nt, Artificial Sequence
  Description of Artificial Sequence: Synthetic oligonucleotide
gcguuucacagauucugac

SEQ ID NO: 465985 - RNA, 19 nt, Artificial Sequence
  Description of Artificial Sequence: Synthetic oligonucleotide
uaccuaucucgcucuugaa

SEQ ID NO: 465986 - RNA, 19 nt, Artificial Sequence
  Description of Artificial Sequence: Synthetic oligonucleotide
uugcagaaucccgucugaa

SEQ ID NO: 465987 - RNA, 19 nt, Artificial Sequence
  Description of Artificial Sequence: Synthetic oligonucleotide
gauccucgagcaugccauc

SEQ ID NO: 465988 - RNA, 19 nt, Artificial Sequence
  Description of Artificial Sequence: Synthetic oligonucleotide
uuggaucuuuuacgcuuuu

SEQ ID NO: 465989 - RNA, 19 nt, Artificial Sequence
  Description of Artificial Sequence: Synthetic oligonucleotide
auggauccucgagcaugcc

SEQ ID NO: 465990 - RNA, 19 nt, Artificial Sequence
  Description of Artificial Sequence: Synthetic oligonucleotide
uuccccggucccauucccu

SEQ ID NO: 465991 - RNA, 19 nt, Artificial Sequence
  Description of Artificial Sequence: Synthetic oligonucleotide
gccuaggauacacacagcu

SEQ ID NO: 465992 - RNA, 19 nt, Artificial Sequence
  Description of Artificial Sequence: Synthetic oligonucleotide
ugacuucgauugcucccaa

SEQ ID NO: 465993 - RNA, 19 nt, Artificial Sequence
  Description of Artificial Sequence: Synthetic oligonucleotide
ugccucgggucucuccggu

SEQ ID NO: 465994 - RNA, 19 nt, Artificial Sequence
  Description of Artificial Sequence: Synthetic oligonucleotide
auggaccugccgauccgac

SEQ ID NO: 465995 - RNA, 19 nt, Artificial Sequence
  Description of Artificial Sequence: Synthetic oligonucleotide
ccuaucucgcucuugaagu

SEQ ID NO: 465996 - RNA, 19 nt, Artificial Sequence
  Description of Artificial Sequence: Synthetic oligonucleotide
gucgcugacacguuucuuu

SEQ ID NO: 465997 - RNA, 19 nt, Artificial Sequence
  Description of Artificial Sequence: Synthetic oligonucleotide
agacucagccgaaguagcu

SEQ ID NO: 465998 - RNA, 19 nt, Artificial Sequence
  Description of Artificial Sequence: Synthetic oligonucleotide
cauguugagagccccuagu

SEQ ID NO: 465999 - RNA, 19 nt, Artificial Sequence
  Description of Artificial Sequence: Synthetic oligonucleotide
uggggagcguaggcgacca

SEQ ID NO: 466000 - RNA, 19 nt, Artificial Sequence
  Description of Artificial Sequence: Synthetic oligonucleotide
ucucucucucucuguccaa

SEQ ID NO: 466001 - RNA, 19 nt, Artificial Sequence
  Description of Artificial Sequence: Synthetic oligonucleotide
aaaggccgcccaaacuuuu

SEQ ID NO: 466002 - RNA, 19 nt, Artificial Sequence
  Description of Artificial Sequence: Synthetic oligonucleotide
cagaaccaaaaggccgccc

SEQ ID NO: 466003 - RNA, 19 nt, Artificial Sequence
  Description of Artificial Sequence: Synthetic oligonucleotide
cccacucaaagacuuacca

SEQ ID NO: 466004 - RNA, 19 nt, Artificial Sequence
  Description of Artificial Sequence: Synthetic oligonucleotide
cccgaagucgaucucgguc

SEQ ID NO: 466005 - RNA, 19 nt, Artificial Sequence
  Description of Artificial Sequence: Synthetic oligonucleotide
ccagauccuaaugaaugug

SEQ ID NO: 466006 - RNA, 19 nt, Artificial Sequence
  Description of Artificial Sequence: Synthetic oligonucleotide
cgaaaaggcuaucugcauc

SEQ ID NO: 466007 - RNA, 19 nt, Artificial Sequence
  Description of Artificial Sequence: Synthetic oligonucleotide
cauguucgaaaaggcuauc

SEQ ID NO: 466008 - RNA, 19 nt, Artificial Sequence
  Description of Artificial Sequence: Synthetic oligonucleotide
cguauccuuccccagcacc

SEQ ID NO: 466009 - RNA, 19 nt, Artificial Sequence
  Description of Artificial Sequence: Synthetic oligonucleotide
cagaccccaggucucuauc

SEQ ID NO: 466010 - RNA, 19 nt, Artificial Sequence
  Description of Artificial Sequence: Synthetic oligonucleotide
agagccccuaguucauguu

SEQ ID NO: 466011 - RNA, 19 nt, Artificial Sequence
  Description of Artificial Sequence: Synthetic oligonucleotide
cuuguccaggggcuugaca

SEQ ID NO: 466012 - RNA, 19 nt, Artificial Sequence
  Description of Artificial Sequence: Synthetic oligonucleotide
gucucugauaaugaacaau

SEQ ID NO: 466013 - RNA, 19 nt, Artificial Sequence
  Description of Artificial Sequence: Synthetic oligonucleotide
gguucuguacauggcgcug

SEQ ID NO: 466014 - RNA, 19 nt, Artificial Sequence
  Description of Artificial Sequence: Synthetic oligonucleotide
ggucguccccacuucgaug

SEQ ID NO: 466015 - RNA, 19 nt, Artificial Sequence
  Description of Artificial Sequence: Synthetic oligonucleotide
cugccucgggucucuccgg

SEQ ID NO: 466016 - RNA, 19 nt, Artificial Sequence
  Description of Artificial Sequence: Synthetic oligonucleotide
cucguucccgaagucgauc

SEQ ID NO: 466017 - RNA, 19 nt, Artificial Sequence
  Description of Artificial Sequence: Synthetic oligonucleotide
gacacguuucuuucacuuu

SEQ ID NO: 466018 - RNA, 19 nt, Artificial Sequence
  Description of Artificial Sequence: Synthetic oligonucleotide
gcgaccagagguguggcug

SEQ ID NO: 466019 - RNA, 19 nt, Artificial Sequence
  Description of Artificial Sequence: Synthetic oligonucleotide
gacugucaaaugacccaga

SEQ ID NO: 466020 - RNA, 19 nt, Artificial Sequence
  Description of Artificial Sequence: Synthetic oligonucleotide
cuaccauuggaguguuugu

SEQ ID NO: 466021 - RNA, 19 nt, Artificial Sequence
  Description of Artificial Sequence: Synthetic oligonucleotide
cccuuuucguucuucacaa

SEQ ID NO: 466022 - RNA, 19 nt, Artificial Sequence
  Description of Artificial Sequence: Synthetic oligonucleotide
cauggucccaggucacuaa

SEQ ID NO: 466023 - RNA, 19 nt, Artificial Sequence
  Description of Artificial Sequence: Synthetic oligonucleotide
uggauacuggauggugcua

SEQ ID NO: 466024 - RNA, 19 nt, Artificial Sequence
  Description of Artificial Sequence: Synthetic oligonucleotide
ugucuaccauuggaguguu

SEQ ID NO: 466025 - RNA, 19 nt, Artificial Sequence
  Description of Artificial Sequence: Synthetic oligonucleotide
ggccgcccaaacuuuugcc

SEQ ID NO: 466026 - RNA, 19 nt, Artificial Sequence
  Description of Artificial Sequence: Synthetic oligonucleotide
acauggucccaggucacua

SEQ ID NO: 466027 - RNA, 19 nt, Artificial Sequence
  Description of Artificial Sequence: Synthetic oligonucleotide
ccucgggucucuccggucc

SEQ ID NO: 466028 - RNA, 19 nt, Artificial Sequence
  Description of Artificial Sequence: Synthetic oligonucleotide
ccuggucguccccacuucg

SEQ ID NO: 466029 - RNA, 19 nt, Artificial Sequence
  Description of Artificial Sequence: Synthetic oligonucleotide
ccgugaauggaccugccga

SEQ ID NO: 466030 - RNA, 19 nt, Artificial Sequence
  Description of Artificial Sequence: Synthetic oligonucleotide
ggcucguauccuuccccag

SEQ ID NO: 466031 - RNA, 19 nt, Artificial Sequence
  Description of Artificial Sequence: Synthetic oligonucleotide
gaccgugaauggaccugcc

SEQ ID NO: 466032 - RNA, 19 nt, Artificial Sequence
  Description of Artificial Sequence: Synthetic oligonucleotide
cugcggugacuucgauugc

SEQ ID NO: 466033 - RNA, 19 nt, Artificial Sequence
  Description of Artificial Sequence: Synthetic oligonucleotide
cugucucguucccgaaguc

SEQ ID NO: 466034 - RNA, 19 nt, Artificial Sequence
  Description of Artificial Sequence: Synthetic oligonucleotide
cuggucguccccacuucga

SEQ ID NO: 466035 - RNA, 19 nt, Artificial Sequence
  Description of Artificial Sequence: Synthetic oligonucleotide
gcaauguacauggguaaaa

SEQ ID NO: 466036 - RNA, 19 nt, Artificial Sequence
  Description of Artificial Sequence: Synthetic oligonucleotide
ccgucugaaacauaaugcu

SEQ ID NO: 466037 - RNA, 19 nt, Artificial Sequence
  Description of Artificial Sequence: Synthetic oligonucleotide
aaccgaagacucagccgaa

SEQ ID NO: 466038 - RNA, 19 nt, Artificial Sequence
  Description of Artificial Sequence: Synthetic oligonucleotide
guaggcgaccagaggugug

SEQ ID NO: 466039 - RNA, 19 nt, Artificial Sequence
  Description of Artificial Sequence: Synthetic oligonucleotide
gaccugccgauccgacuca

SEQ ID NO: 466040 - RNA, 19 nt, Artificial Sequence
  Description of Artificial Sequence: Synthetic oligonucleotide
guucguggccacucuuuua

SEQ ID NO: 466041 - RNA, 19 nt, Artificial Sequence
  Description of Artificial Sequence: Synthetic oligonucleotide
gcguggaccucucuucuuc

SEQ ID NO: 466042 - RNA, 19 nt, Artificial Sequence
  Description of Artificial Sequence: Synthetic oligonucleotide
gggcacauccucauccgac

SEQ ID NO: 466043 - RNA, 19 nt, Artificial Sequence
  Description of Artificial Sequence: Synthetic oligonucleotide
cacaucuaucacaucuaau

SEQ ID NO: 466044 - RNA, 19 nt, Artificial Sequence
  Description of Artificial Sequence: Synthetic oligonucleotide
cgaaguagcucauugucua

SEQ ID NO: 466045 - RNA, 19 nt, Artificial Sequence
  Description of Artificial Sequence: Synthetic oligonucleotide
ccuuuucguucuucacaag

SEQ ID NO: 466046 - RNA, 19 nt, Artificial Sequence
  Description of Artificial Sequence: Synthetic oligonucleotide
ugcccucugugcggucggg

SEQ ID NO: 466047 - RNA, 19 nt, Artificial Sequence
  Description of Artificial Sequence: Synthetic oligonucleotide
ggugcuaguuuacugucuu

SEQ ID NO: 466048 - RNA, 19 nt, Artificial Sequence
  Description of Artificial Sequence: Synthetic oligonucleotide
cgguggaaaugucaaucag

SEQ ID NO: 466049 - RNA, 19 nt, Artificial Sequence
  Description of Artificial Sequence: Synthetic oligonucleotide
cuaaaggcuguaucuucuu

SEQ ID NO: 466050 - RNA, 19 nt, Artificial Sequence
  Description of Artificial Sequence: Synthetic oligonucleotide
ccuuaucgguggaaauguc

SEQ ID NO: 466051 - RNA, 19 nt, Artificial Sequence
  Description of Artificial Sequence: Synthetic oligonucleotide
ccgaagucgaucucggucu

SEQ ID NO: 466052 - RNA, 19 nt, Artificial Sequence
  Description of Artificial Sequence: Synthetic oligonucleotide
accagcgcuuuuaucucau

SEQ ID NO: 466053 - RNA, 19 nt, Artificial Sequence
  Description of Artificial Sequence: Synthetic oligonucleotide
agguucuaucucggucucu

SEQ ID NO: 466054 - RNA, 19 nt, Artificial Sequence
  Description of Artificial Sequence: Synthetic oligonucleotide
cgugcguggaccucucuuc

SEQ ID NO: 466055 - RNA, 19 nt, Artificial Sequence
  Description of Artificial Sequence: Synthetic oligonucleotide
gcccuugcacucccucagg

SEQ ID NO: 466056 - RNA, 19 nt, Artificial Sequence
  Description of Artificial Sequence: Synthetic oligonucleotide
accugccgauccgacucag

SEQ ID NO: 466057 - RNA, 19 nt, Artificial Sequence
  Description of Artificial Sequence: Synthetic oligonucleotide
gcaguuagucucucucucu

SEQ ID NO: 466058 - RNA, 19 nt, Artificial Sequence
  Description of Artificial Sequence: Synthetic oligonucleotide
ggucucugguucguggcca

SEQ ID NO: 466059 - RNA, 19 nt, Artificial Sequence
  Description of Artificial Sequence: Synthetic oligonucleotide
gugcguggaccucucuucu

SEQ ID NO: 466060 - RNA, 19 nt, Artificial Sequence
  Description of Artificial Sequence: Synthetic oligonucleotide
gggagcguaggcgaccaga

SEQ ID NO: 466061 - RNA, 19 nt, Artificial Sequence
  Description of Artificial Sequence: Synthetic oligonucleotide
acauggcgcugcagcaugu

SEQ ID NO: 466062 - RNA, 19 nt, Artificial Sequence
  Description of Artificial Sequence: Synthetic oligonucleotide
cauccccggccagaauuuc

SEQ ID NO: 466063 - RNA, 19 nt, Artificial Sequence
  Description of Artificial Sequence: Synthetic oligonucleotide
cgcccaaacuuuugccuag

SEQ ID NO: 466064 - RNA, 19 nt, Artificial Sequence
  Description of Artificial Sequence: Synthetic oligonucleotide
cuggacuagucaguucugu

SEQ ID NO: 466065 - RNA, 19 nt, Artificial Sequence
  Description of Artificial Sequence: Synthetic oligonucleotide
ucgggucucuccggucccu

SEQ ID NO: 466066 - RNA, 19 nt, Artificial Sequence
  Description of Artificial Sequence: Synthetic oligonucleotide
cggauugcagaaucccguc

SEQ ID NO: 466067 - RNA, 19 nt, Artificial Sequence
  Description of Artificial Sequence: Synthetic oligonucleotide
ccgaaguagcucauugucu

SEQ ID NO: 466068 - RNA, 19 nt, Artificial Sequence
  Description of Artificial Sequence: Synthetic oligonucleotide
uggcugcggugacuucgau

SEQ ID NO: 466069 - RNA, 19 nt, Artificial Sequence
  Description of Artificial Sequence: Synthetic oligonucleotide
aucccgucugaaacauaau

SEQ ID NO: 466070 - RNA, 19 nt, Artificial Sequence
  Description of Artificial Sequence: Synthetic oligonucleotide
gaaucccgucugaaacaua

SEQ ID NO: 466071 - RNA, 19 nt, Artificial Sequence
  Description of Artificial Sequence: Synthetic oligonucleotide
cccggccagaauuucaucu

SEQ ID NO: 466072 - RNA, 19 nt, Artificial Sequence
  Description of Artificial Sequence: Synthetic oligonucleotide
cgauugcucccaaggcgag

SEQ ID NO: 466073 - RNA, 19 nt, Artificial Sequence
  Description of Artificial Sequence: Synthetic oligonucleotide
gucggcaguuagucucucu

SEQ ID NO: 466074 - RNA, 19 nt, Artificial Sequence
  Description of Artificial Sequence: Synthetic oligonucleotide
cucuuucuacuacccuggu

SEQ ID NO: 466075 - RNA, 19 nt, Artificial Sequence
  Description of Artificial Sequence: Synthetic oligonucleotide
guacauggcgcugcagcau

SEQ ID NO: 466076 - RNA, 19 nt, Artificial Sequence
  Description of Artificial Sequence: Synthetic oligonucleotide
ggcuuuucuagaagucgcu

SEQ ID NO: 466077 - RNA, 19 nt, Artificial Sequence
  Description of Artificial Sequence: Synthetic oligonucleotide
cggucucugguucguggcc

SEQ ID NO: 466078 - RNA, 19 nt, Artificial Sequence
  Description of Artificial Sequence: Synthetic oligonucleotide
ccgauccgacucaggggag

SEQ ID NO: 466079 - RNA, 19 nt, Artificial Sequence
  Description of Artificial Sequence: Synthetic oligonucleotide
gguucguggccacucuuuu

SEQ ID NO: 466080 - RNA, 19 nt, Artificial Sequence
  Description of Artificial Sequence: Synthetic oligonucleotide
ggcauaaguccagaccaau

SEQ ID NO: 466081 - RNA, 19 nt, Artificial Sequence
  Description of Artificial Sequence: Synthetic oligonucleotide
cccaaacuuuugccuagga

SEQ ID NO: 466082 - RNA, 19 nt, Artificial Sequence
  Description of Artificial Sequence: Synthetic oligonucleotide
cgaagacucagccgaagua

SEQ ID NO: 466083 - RNA, 19 nt, Artificial Sequence
  Description of Artificial Sequence: Synthetic oligonucleotide
cagggucggcaguuagucu

SEQ ID NO: 466084 - RNA, 19 nt, Artificial Sequence
  Description of Artificial Sequence: Synthetic oligonucleotide
gccccuaguucauguucga

SEQ ID NO: 466085 - RNA, 19 nt, Artificial Sequence
  Description of Artificial Sequence: Synthetic oligonucleotide
cucaggggagcuucuucuu

SEQ ID NO: 466086 - RNA, 19 nt, Artificial Sequence
  Description of Artificial Sequence: Synthetic oligonucleotide
ggcuacaguucagggucca

SEQ ID NO: 466087 - RNA, 19 nt, Artificial Sequence
  Description of Artificial Sequence: Synthetic oligonucleotide
cccacuucgaugggcagaa

SEQ ID NO: 466088 - RNA, 19 nt, Artificial Sequence
  Description of Artificial Sequence: Synthetic oligonucleotide
ccgcccaaacuuuugccua

SEQ ID NO: 466089 - RNA, 19 nt, Artificial Sequence
  Description of Artificial Sequence: Synthetic oligonucleotide
cccggucaugcucauaccu

SEQ ID NO: 466090 - RNA, 19 nt, Artificial Sequence
  Description of Artificial Sequence: Synthetic oligonucleotide
cgaagucgaucucggucuc

SEQ ID NO: 466091 - RNA, 19 nt, Artificial Sequence
  Description of Artificial Sequence: Synthetic oligonucleotide
ggggagcguaggcgaccag

SEQ ID NO: 466092 - RNA, 19 nt, Artificial Sequence
  Description of Artificial Sequence: Synthetic oligonucleotide
ccgaagacucagccgaagu

SEQ ID NO: 466093 - RNA, 19 nt, Artificial Sequence
  Description of Artificial Sequence: Synthetic oligonucleotide
gcgaggaggcaagagcagu

SEQ ID NO: 466094 - RNA, 19 nt, Artificial Sequence
  Description of Artificial Sequence: Synthetic oligonucleotide
gcggucgggcacauccuca

SEQ ID NO: 466095 - RNA, 19 nt, Artificial Sequence
  Description of Artificial Sequence: Synthetic oligonucleotide
cugguucguggccacucuu

SEQ ID NO: 466096 - RNA, 19 nt, Artificial Sequence
  Description of Artificial Sequence: Synthetic oligonucleotide
gccauccuuaucgguggaa

SEQ ID NO: 466097 - RNA, 19 nt, Artificial Sequence
  Description of Artificial Sequence: Synthetic oligonucleotide
ggcugcggugacuucgauu

SEQ ID NO: 466098 - RNA, 19 nt, Artificial Sequence
  Description of Artificial Sequence: Synthetic oligonucleotide
ggcgaccagagguguggcu

SEQ ID NO: 466099 - RNA, 19 nt, Artificial Sequence
  Description of Artificial Sequence: Synthetic oligonucleotide
ccagucacuaaaggcugua

SEQ ID NO: 466100 - RNA, 19 nt, Artificial Sequence
  Description of Artificial Sequence: Synthetic oligonucleotide
ggucggcaguuagucucuc

SEQ ID NO: 466101 - RNA, 19 nt, Artificial Sequence
  Description of Artificial Sequence: Synthetic oligonucleotide
ggucucuuucgugcucacu

SEQ ID NO: 466102 - RNA, 19 nt, Artificial Sequence
  Description of Artificial Sequence: Synthetic oligonucleotide
ccccacuucgaugggcaga

SEQ ID NO: 466103 - RNA, 19 nt, Artificial Sequence
  Description of Artificial Sequence: Synthetic oligonucleotide
caucacugaugggcucgua

SEQ ID NO: 466104 - RNA, 19 nt, Artificial Sequence
  Description of Artificial Sequence: Synthetic oligonucleotide
ccuaaugaaugugcaucau

SEQ ID NO: 466105 - RNA, 19 nt, Artificial Sequence
  Description of Artificial Sequence: Synthetic oligonucleotide
gugcggucgggcacauccu

SEQ ID NO: 466106 - RNA, 19 nt, Artificial Sequence
  Description of Artificial Sequence: Synthetic oligonucleotide
ccagaccaauccacaucua

SEQ ID NO: 466107 - RNA, 19 nt, Artificial Sequence
  Description of Artificial Sequence: Synthetic oligonucleotide
cggcaguuagucucucucu

SEQ ID NO: 466108 - RNA, 19 nt, Artificial Sequence
  Description of Artificial Sequence: Synthetic oligonucleotide
cugugcggucgggcacauc

SEQ ID NO: 466109 - RNA, 19 nt, Artificial Sequence
  Description of Artificial Sequence: Synthetic oligonucleotide
ccagcgcuuuuaucucaua

SEQ ID NO: 466110 - RNA, 19 nt, Artificial Sequence
  Description of Artificial Sequence: Synthetic oligonucleotide
gcauccccggccagaauuu

SEQ ID NO: 466111 - RNA, 19 nt, Artificial Sequence
  Description of Artificial Sequence: Synthetic oligonucleotide
gcuacaguucaggguccau

SEQ ID NO: 466112 - RNA, 19 nt, Artificial Sequence
  Description of Artificial Sequence: Synthetic oligonucleotide
cguaggcgaccagaggugu

SEQ ID NO: 466113 - RNA, 19 nt, Artificial Sequence
  Description of Artificial Sequence: Synthetic oligonucleotide
gucuaccauuggaguguuu

SEQ ID NO: 466114 - RNA, 19 nt, Artificial Sequence
  Description of Artificial Sequence: Synthetic oligonucleotide
ccacuucgaugggcagaau

SEQ ID NO: 466115 - RNA, 19 nt, Artificial Sequence
  Description of Artificial Sequence: Synthetic oligonucleotide
aacguauaaaaguauauag

SEQ ID NO: 466116 - RNA, 19 nt, Artificial Sequence
  Description of Artificial Sequence: Synthetic oligonucleotide
ugauauaacgucaauaucu

SEQ ID NO: 466117 - RNA, 19 nt, Artificial Sequence
  Description of Artificial Sequence: Synthetic oligonucleotide
aacgucaauaucuagcagg

SEQ ID NO: 466118 - RNA, 19 nt, Artificial Sequence
  Description of Artificial Sequence: Synthetic oligonucleotide
agaaagauuagccagcuuc

SEQ ID NO: 466119 - RNA, 19 nt, Artificial Sequence
  Description of Artificial Sequence: Synthetic oligonucleotide
aacaccuaagugcagagcg

SEQ ID NO: 466120 - RNA, 19 nt, Artificial Sequence
  Description of Artificial Sequence: Synthetic oligonucleotide
aaauuuaagcccuuaaaga

SEQ ID NO: 466121 - RNA, 19 nt, Artificial Sequence
  Description of Artificial Sequence: Synthetic oligonucleotide
uauaacgucaauaucuagc

SEQ ID NO: 466122 - RNA, 19 nt, Artificial Sequence
  Description of Artificial Sequence: Synthetic oligonucleotide
uauuuagaguaacaguagg

SEQ ID NO: 466123 - RNA, 19 nt, Artificial Sequence
  Description of Artificial Sequence: Synthetic oligonucleotide
uuguuaacuaguuugauaa

SEQ ID NO: 466124 - RNA, 19 nt, Artificial Sequence
  Description of Artificial Sequence: Synthetic oligonucleotide
ucuaaggcuacaaagguac

SEQ ID NO: 466125 - RNA, 19 nt, Artificial Sequence
  Description of Artificial Sequence: Synthetic oligonucleotide
auacuuguuaacuaguuug

SEQ ID NO: 466126 - RNA, 19 nt, Artificial Sequence
  Description of Artificial Sequence: Synthetic oligonucleotide
ucagcuaaaacucaaggaa

SEQ ID NO: 466127 - RNA, 19 nt, Artificial Sequence
  Description of Artificial Sequence: Synthetic oligonucleotide
aaguuuuacugauuacugg

SEQ ID NO: 466128 - RNA, 19 nt, Artificial Sequence
  Description of Artificial Sequence: Synthetic oligonucleotide
gugaucaucagucuaaggc

SEQ ID NO: 466129 - RNA, 19 nt, Artificial Sequence
  Description of Artificial Sequence: Synthetic oligonucleotide
ugucagcuaaaacucaagg

SEQ ID NO: 466130 - RNA, 19 nt, Artificial Sequence
  Description of Artificial Sequence: Synthetic oligonucleotide
aaggcuaacacggugauca

SEQ ID NO: 466131 - RNA, 19 nt, Artificial Sequence
  Description of Artificial Sequence: Synthetic oligonucleotide
auguacgugaccuugagcu

SEQ ID NO: 466132 - RNA, 19 nt, Artificial Sequence
  Description of Artificial Sequence: Synthetic oligonucleotide
aauacuugauauaacguca

SEQ ID NO: 466133 - RNA, 19 nt, Artificial Sequence
  Description of Artificial Sequence: Synthetic oligonucleotide
auauacacaagguacgcug

SEQ ID NO: 466134 - RNA, 19 nt, Artificial Sequence
  Description of Artificial Sequence: Synthetic oligonucleotide
acguauaaaaguauauagc

SEQ ID NO: 466135 - RNA, 19 nt, Artificial Sequence
  Description of Artificial Sequence: Synthetic oligonucleotide
auaacgucaauaucuagca

SEQ ID NO: 466136 - RNA, 19 nt, Artificial Sequence
  Description of Artificial Sequence: Synthetic oligonucleotide
guuaacagugaacagugag

SEQ ID NO: 466137 - RNA, 19 nt, Artificial Sequence
  Description of Artificial Sequence: Synthetic oligonucleotide
uuuagaguaacaguaggca

SEQ ID NO: 466138 - RNA, 19 nt, Artificial Sequence
  Description of Artificial Sequence: Synthetic oligonucleotide
uuacccuuaccacugcugg

SEQ ID NO: 466139 - RNA, 19 nt, Artificial Sequence
  Description of Artificial Sequence: Synthetic oligonucleotide
auuuagaguaacaguaggc

SEQ ID NO: 466140 - RNA, 19 nt, Artificial Sequence
  Description of Artificial Sequence: Synthetic oligonucleotide
acauuaaucaucucugacu

SEQ ID NO: 466141 - RNA, 19 nt, Artificial Sequence
  Description of Artificial Sequence: Synthetic oligonucleotide
uauaacccggacaaguuca

SEQ ID NO: 466142 - RNA, 19 nt, Artificial Sequence
  Description of Artificial Sequence: Synthetic oligonucleotide
uuaacuaguuugauaagaa

SEQ ID NO: 466143 - RNA, 19 nt, Artificial Sequence
  Description of Artificial Sequence: Synthetic oligonucleotide
uauucgcuuacaaacauau

SEQ ID NO: 466144 - RNA, 19 nt, Artificial Sequence
  Description of Artificial Sequence: Synthetic oligonucleotide
aguuacacuaauugucagg

SEQ ID NO: 466145 - RNA, 19 nt, Artificial Sequence
  Description of Artificial Sequence: Synthetic oligonucleotide
uccgugacugaaaagacga

SEQ ID NO: 466146 - RNA, 19 nt, Artificial Sequence
  Description of Artificial Sequence: Synthetic oligonucleotide
ugaucuacauucauccuga

SEQ ID NO: 466147 - RNA, 19 nt, Artificial Sequence
  Description of Artificial Sequence: Synthetic oligonucleotide
uagucguguguuuuaaagg

SEQ ID NO: 466148 - RNA, 19 nt, Artificial Sequence
  Description of Artificial Sequence: Synthetic oligonucleotide
auaucuagcagggacauug

SEQ ID NO: 466149 - RNA, 19 nt, Artificial Sequence
  Description of Artificial Sequence: Synthetic oligonucleotide
gauuacuggccacugguag

SEQ ID NO: 466150 - RNA, 19 nt, Artificial Sequence
  Description of Artificial Sequence: Synthetic oligonucleotide
uucuauuuagaguaacagu

SEQ ID NO: 466151 - RNA, 19 nt, Artificial Sequence
  Description of Artificial Sequence: Synthetic oligonucleotide
ugagagucgcaaaaccagg

SEQ ID NO: 466152 - RNA, 19 nt, Artificial Sequence
  Description of Artificial Sequence: Synthetic oligonucleotide
uagaguaacaguaggcaac

SEQ ID NO: 466153 - RNA, 19 nt, Artificial Sequence
  Description of Artificial Sequence: Synthetic oligonucleotide
cuauuuagaguaacaguag

SEQ ID NO: 466154 - RNA, 19 nt, Artificial Sequence
  Description of Artificial Sequence: Synthetic oligonucleotide
agaugucucacguuuguag

SEQ ID NO: 466155 - RNA, 19 nt, Artificial Sequence
  Description of Artificial Sequence: Synthetic oligonucleotide
guagucguguguuuuaaag

SEQ ID NO: 466156 - RNA, 19 nt, Artificial Sequence
  Description of Artificial Sequence: Synthetic oligonucleotide
agucguguguuuuaaagga

SEQ ID NO: 466157 - RNA, 19 nt, Artificial Sequence
  Description of Artificial Sequence: Synthetic oligonucleotide
ccgauuaaaauuuaagccc

SEQ ID NO: 466158 - RNA, 19 nt, Artificial Sequence
  Description of Artificial Sequence: Synthetic oligonucleotide
uguaaacgguaacagagau

SEQ ID NO: 466159 - RNA, 19 nt, Artificial Sequence
  Description of Artificial Sequence: Synthetic oligonucleotide
aagaccguuagaauuagcu

SEQ ID NO: 466160 - RNA, 19 nt, Artificial Sequence
  Description of Artificial Sequence: Synthetic oligonucleotide
ucugagaugucucacguuu

SEQ ID NO: 466161 - RNA, 19 nt, Artificial Sequence
  Description of Artificial Sequence: Synthetic oligonucleotide
auugaacgugacuucacag

SEQ ID NO: 466162 - RNA, 19 nt, Artificial Sequence
  Description of Artificial Sequence: Synthetic oligonucleotide
aaagcauauucgcuuacaa

SEQ ID NO: 466163 - RNA, 19 nt, Artificial Sequence
  Description of Artificial Sequence: Synthetic oligonucleotide
guaacaguaggcaacauga

SEQ ID NO: 466164 - RNA, 19 nt, Artificial Sequence
  Description of Artificial Sequence: Synthetic oligonucleotide
auuuccuuauaacccggac

SEQ ID NO: 466165 - RNA, 19 nt, Artificial Sequence
  Description of Artificial Sequence: Synthetic oligonucleotide
cccgauuaaaauuuaagcc

SEQ ID NO: 466166 - RNA, 19 nt, Artificial Sequence
  Description of Artificial Sequence: Synthetic oligonucleotide
uacuuguuaacuaguuuga

SEQ ID NO: 466167 - RNA, 19 nt, Artificial Sequence
  Description of Artificial Sequence: Synthetic oligonucleotide
aauaacguauaaaaguaua

SEQ ID NO: 466168 - RNA, 19 nt, Artificial Sequence
  Description of Artificial Sequence: Synthetic oligonucleotide
uccucguguguucuguugg

SEQ ID NO: 466169 - RNA, 19 nt, Artificial Sequence
  Description of Artificial Sequence: Synthetic oligonucleotide
ucugcagcgcagccgaacg

SEQ ID NO: 466170 - RNA, 19 nt, Artificial Sequence
  Description of Artificial Sequence: Synthetic oligonucleotide
uuagaguaacaguaggcaa

SEQ ID NO: 466171 - RNA, 19 nt, Artificial Sequence
  Description of Artificial Sequence: Synthetic oligonucleotide
acgguaacagagaugaggg

SEQ ID NO: 466172 - RNA, 19 nt, Artificial Sequence
  Description of Artificial Sequence: Synthetic oligonucleotide
ugcagagcgaguccaaaca

SEQ ID NO: 466173 - RNA, 19 nt, Artificial Sequence
  Description of Artificial Sequence: Synthetic oligonucleotide
acuugguucaucccgauua

SEQ ID NO: 466174 - RNA, 19 nt, Artificial Sequence
  Description of Artificial Sequence: Synthetic oligonucleotide
uaacagugaacagugagaa

SEQ ID NO: 466175 - RNA, 19 nt, Artificial Sequence
  Description of Artificial Sequence: Synthetic oligonucleotide
acgcugugaaagcauauuc

SEQ ID NO: 466176 - RNA, 19 nt, Artificial Sequence
  Description of Artificial Sequence: Synthetic oligonucleotide
uuauaacccggacaaguuc

SEQ ID NO: 466177 - RNA, 19 nt, Artificial Sequence
  Description of Artificial Sequence: Synthetic oligonucleotide
aagccguagcaucagaaaa

SEQ ID NO: 466178 - RNA, 19 nt, Artificial Sequence
  Description of Artificial Sequence: Synthetic oligonucleotide
agcucauugaaacaccuaa

SEQ ID NO: 466179 - RNA, 19 nt, Artificial Sequence
  Description of Artificial Sequence: Synthetic oligonucleotide
uugaacgugacuucacagu

SEQ ID NO: 466180 - RNA, 19 nt, Artificial Sequence
  Description of Artificial Sequence: Synthetic oligonucleotide
ugaaacaccuaagugcaga

SEQ ID NO: 466181 - RNA, 19 nt, Artificial Sequence
  Description of Artificial Sequence: Synthetic oligonucleotide
aaagccguagcaucagaaa

SEQ ID NO: 466182 - RNA, 19 nt, Artificial Sequence
  Description of Artificial Sequence: Synthetic oligonucleotide
cuugauauaacgucaauau

SEQ ID NO: 466183 - RNA, 19 nt, Artificial Sequence
  Description of Artificial Sequence: Synthetic oligonucleotide
uuuacugauuacuggccac

SEQ ID NO: 466184 - RNA, 19 nt, Artificial Sequence
  Description of Artificial Sequence: Synthetic oligonucleotide
aagcauauucgcuuacaaa

SEQ ID NO: 466185 - RNA, 19 nt, Artificial Sequence
  Description of Artificial Sequence: Synthetic oligonucleotide
aaauaacguauaaaaguau

SEQ ID NO: 466186 - RNA, 19 nt, Artificial Sequence
  Description of Artificial Sequence: Synthetic oligonucleotide
guuaacuaguuugauaaga

SEQ ID NO: 466187 - RNA, 19 nt, Artificial Sequence
  Description of Artificial Sequence: Synthetic oligonucleotide
cagcuaaaacucaaggaac

SEQ ID NO: 466188 - RNA, 19 nt, Artificial Sequence
  Description of Artificial Sequence: Synthetic oligonucleotide
uugucagcuaaaacucaag

SEQ ID NO: 466189 - RNA, 19 nt, Artificial Sequence
  Description of Artificial Sequence: Synthetic oligonucleotide
uuagccgaugccuccaugu

SEQ ID NO: 466190 - RNA, 19 nt, Artificial Sequence
  Description of Artificial Sequence: Synthetic oligonucleotide
uaacgucaauaucuagcag

SEQ ID NO: 466191 - RNA, 19 nt, Artificial Sequence
  Description of Artificial Sequence: Synthetic oligonucleotide
cuauccgugacugaaaaga

SEQ ID NO: 466192 - RNA, 19 nt, Artificial Sequence
  Description of Artificial Sequence: Synthetic oligonucleotide
acugauuacuggccacugg

SEQ ID NO: 466193 - RNA, 19 nt, Artificial Sequence
  Description of Artificial Sequence: Synthetic oligonucleotide
ugaucuuagccgaugccuc

SEQ ID NO: 466194 - RNA, 19 nt, Artificial Sequence
  Description of Artificial Sequence: Synthetic oligonucleotide
aguugcccgagacacuggg

SEQ ID NO: 466195 - RNA, 19 nt, Artificial Sequence
  Description of Artificial Sequence: Synthetic oligonucleotide
caagguacgcugugaaagc

SEQ ID NO: 466196 - RNA, 19 nt, Artificial Sequence
  Description of Artificial Sequence: Synthetic oligonucleotide
ucccuauguuucuauuuag

SEQ ID NO: 466197 - RNA, 19 nt, Artificial Sequence
  Description of Artificial Sequence: Synthetic oligonucleotide
aaccuaugacuucagcuua

SEQ ID NO: 466198 - RNA, 19 nt, Artificial Sequence
  Description of Artificial Sequence: Synthetic oligonucleotide
ucuauccgugacugaaaag

SEQ ID NO: 466199 - RNA, 19 nt, Artificial Sequence
  Description of Artificial Sequence: Synthetic oligonucleotide
acuaauugucagguagagg

SEQ ID NO: 466200 - RNA, 19 nt, Artificial Sequence
  Description of Artificial Sequence: Synthetic oligonucleotide
uccugaucuuagccgaugc

SEQ ID NO: 466201 - RNA, 19 nt, Artificial Sequence
  Description of Artificial Sequence: Synthetic oligonucleotide
aaagaccguuagaauuagc

SEQ ID NO: 466202 - RNA, 19 nt, Artificial Sequence
  Description of Artificial Sequence: Synthetic oligonucleotide
ugguugauaacagaucaau

SEQ ID NO: 466203 - RNA, 19 nt, Artificial Sequence
  Description of Artificial Sequence: Synthetic oligonucleotide
cacugagagucgcaaaacc

SEQ ID NO: 466204 - RNA, 19 nt, Artificial Sequence
  Description of Artificial Sequence: Synthetic oligonucleotide
ggaaagaucaauuccauau

SEQ ID NO: 466205 - RNA, 19 nt, Artificial Sequence
  Description of Artificial Sequence: Synthetic oligonucleotide
auaacguauaaaaguauau

SEQ ID NO: 466206 - RNA, 19 nt, Artificial Sequence
  Description of Artificial Sequence: Synthetic oligonucleotide
agccgaugccuccauguac

SEQ ID NO: 466207 - RNA, 19 nt, Artificial Sequence
  Description of Artificial Sequence: Synthetic oligonucleotide
ucacucuuacccuuaccac

SEQ ID NO: 466208 - RNA, 19 nt, Artificial Sequence
  Description of Artificial Sequence: Synthetic oligonucleotide
agucgcaaaaccaggaaca

SEQ ID NO: 466209 - RNA, 19 nt, Artificial Sequence
  Description of Artificial Sequence: Synthetic oligonucleotide
cuuacccuuaccacugcug

SEQ ID NO: 466210 - RNA, 19 nt, Artificial Sequence
  Description of Artificial Sequence: Synthetic oligonucleotide
gauauaacgucaauaucua

SEQ ID NO: 466211 - RNA, 19 nt, Artificial Sequence
  Description of Artificial Sequence: Synthetic oligonucleotide
gcaguugucagcuaaaacu

SEQ ID NO: 466212 - RNA, 19 nt, Artificial Sequence
  Description of Artificial Sequence: Synthetic oligonucleotide
acuugauauaacgucaaua

SEQ ID NO: 466213 - RNA, 19 nt, Artificial Sequence
  Description of Artificial Sequence: Synthetic oligonucleotide
uugaaacaccuaagugcag

SEQ ID NO: 466214 - RNA, 19 nt, Artificial Sequence
  Description of Artificial Sequence: Synthetic oligonucleotide
aaaagccguagcaucagaa

SEQ ID NO: 466215 - RNA, 19 nt, Artificial Sequence
  Description of Artificial Sequence: Synthetic oligonucleotide
uugguugauaacagaucaa

SEQ ID NO: 466216 - RNA, 19 nt, Artificial Sequence
  Description of Artificial Sequence: Synthetic oligonucleotide
uacccuuaccacugcuggg

SEQ ID NO: 466217 - RNA, 19 nt, Artificial Sequence
  Description of Artificial Sequence: Synthetic oligonucleotide
cuuguuaacuaguuugaua

SEQ ID NO: 466218 - RNA, 19 nt, Artificial Sequence
  Description of Artificial Sequence: Synthetic oligonucleotide
caguuacacuaauugucag

SEQ ID NO: 466219 - RNA, 19 nt, Artificial Sequence
  Description of Artificial Sequence: Synthetic oligonucleotide
acagucucguccucgugug

SEQ ID NO: 466220 - RNA, 19 nt, Artificial Sequence
  Description of Artificial Sequence: Synthetic oligonucleotide
acugagagucgcaaaacca

SEQ ID NO: 466221 - RNA, 19 nt, Artificial Sequence
  Description of Artificial Sequence: Synthetic oligonucleotide
cuaaggcuacaaagguacc

SEQ ID NO: 466222 - RNA, 19 nt, Artificial Sequence
  Description of Artificial Sequence: Synthetic oligonucleotide
caucgggacgccccgagcc

SEQ ID NO: 466223 - RNA, 19 nt, Artificial Sequence
  Description of Artificial Sequence: Synthetic oligonucleotide
guguaaggcuaacacggug

SEQ ID NO: 466224 - RNA, 19 nt, Artificial Sequence
  Description of Artificial Sequence: Synthetic oligonucleotide
agaccguuagaauuagcuu

SEQ ID NO: 466225 - RNA, 19 nt, Artificial Sequence
  Description of Artificial Sequence: Synthetic oligonucleotide
ucuuacccuuaccacugcu

SEQ ID NO: 466226 - RNA, 19 nt, Artificial Sequence
  Description of Artificial Sequence: Synthetic oligonucleotide
cacuaauugucagguagag

SEQ ID NO: 466227 - RNA, 19 nt, Artificial Sequence
  Description of Artificial Sequence: Synthetic oligonucleotide
caaacuugguucaucccga

SEQ ID NO: 466228 - RNA, 19 nt, Artificial Sequence
  Description of Artificial Sequence: Synthetic oligonucleotide
aagguacgcugugaaagca

SEQ ID NO: 466229 - RNA, 19 nt, Artificial Sequence
  Description of Artificial Sequence: Synthetic oligonucleotide
caaagguaccggcaugaug

SEQ ID NO: 466230 - RNA, 19 nt, Artificial Sequence
  Description of Artificial Sequence: Synthetic oligonucleotide
caaggguccacuuuauaaa

SEQ ID NO: 466231 - RNA, 19 nt, Artificial Sequence
  Description of Artificial Sequence: Synthetic oligonucleotide
aauuuccuuauaacccgga

SEQ ID NO: 466232 - RNA, 19 nt, Artificial Sequence
  Description of Artificial Sequence: Synthetic oligonucleotide
acaccggucugggaaagac

SEQ ID NO: 466233 - RNA, 19 nt, Artificial Sequence
  Description of Artificial Sequence: Synthetic oligonucleotide
aucgggacgccccgagccc

SEQ ID NO: 466234 - RNA, 19 nt, Artificial Sequence
  Description of Artificial Sequence: Synthetic oligonucleotide
cauguacgugaccuugagc

SEQ ID NO: 466235 - RNA, 19 nt, Artificial Sequence
  Description of Artificial Sequence: Synthetic oligonucleotide
ugauuacuggccacuggua

SEQ ID NO: 466236 - RNA, 19 nt, Artificial Sequence
  Description of Artificial Sequence: Synthetic oligonucleotide
uguguagucguguguuuua

SEQ ID NO: 466237 - RNA, 19 nt, Artificial Sequence
  Description of Artificial Sequence: Synthetic oligonucleotide
gaaagcauauucgcuuaca

SEQ ID NO: 466238 - RNA, 19 nt, Artificial Sequence
  Description of Artificial Sequence: Synthetic oligonucleotide
aucagucuaaggcuacaaa

SEQ ID NO: 466239 - RNA, 19 nt, Artificial Sequence
  Description of Artificial Sequence: Synthetic oligonucleotide
agcgccgacuugcccacgc

SEQ ID NO: 466240 - RNA, 19 nt, Artificial Sequence
  Description of Artificial Sequence: Synthetic oligonucleotide
aaacuugguucaucccgau

SEQ ID NO: 466241 - RNA, 19 nt, Artificial Sequence
  Description of Artificial Sequence: Synthetic oligonucleotide
cucauugaaacaccuaagu

SEQ ID NO: 466242 - RNA, 19 nt, Artificial Sequence
  Description of Artificial Sequence: Synthetic oligonucleotide
agggacauugaacgugacu

SEQ ID NO: 466243 - RNA, 19 nt, Artificial Sequence
  Description of Artificial Sequence: Synthetic oligonucleotide
uaccggcaugauguaaacg

SEQ ID NO: 466244 - RNA, 19 nt, Artificial Sequence
  Description of Artificial Sequence: Synthetic oligonucleotide
uguagucguguguuuuaaa

SEQ ID NO: 466245 - RNA, 19 nt, Artificial Sequence
  Description of Artificial Sequence: Synthetic oligonucleotide
uacugauuacuggccacug

SEQ ID NO: 466246 - RNA, 19 nt, Artificial Sequence
  Description of Artificial Sequence: Synthetic oligonucleotide
augggaguugacaucaaaa

SEQ ID NO: 466247 - RNA, 19 nt, Artificial Sequence
  Description of Artificial Sequence: Synthetic oligonucleotide
acacuaauugucagguaga

SEQ ID NO: 466248 - RNA, 19 nt, Artificial Sequence
  Description of Artificial Sequence: Synthetic oligonucleotide
ucaucccgauuaaaauuua

SEQ ID NO: 466249 - RNA, 19 nt, Artificial Sequence
  Description of Artificial Sequence: Synthetic oligonucleotide
gugagcgccgacuugccca

SEQ ID NO: 466250 - RNA, 19 nt, Artificial Sequence
  Description of Artificial Sequence: Synthetic oligonucleotide
agagcgaguccaaacauuu

SEQ ID NO: 466251 - RNA, 19 nt, Artificial Sequence
  Description of Artificial Sequence: Synthetic oligonucleotide
cgcugugaaagcauauucg

SEQ ID NO: 466252 - RNA, 19 nt, Artificial Sequence
  Description of Artificial Sequence: Synthetic oligonucleotide
gucucugcagcgcagccga

SEQ ID NO: 466253 - RNA, 19 nt, Artificial Sequence
  Description of Artificial Sequence: Synthetic oligonucleotide
cuaacacggugaucaucag

SEQ ID NO: 466254 - RNA, 19 nt, Artificial Sequence
  Description of Artificial Sequence: Synthetic oligonucleotide
aacuugguucaucccgauu

SEQ ID NO: 466255 - RNA, 19 nt, Artificial Sequence
  Description of Artificial Sequence: Synthetic oligonucleotide
uuacacuaauugucaggua

SEQ ID NO: 466256 - RNA, 19 nt, Artificial Sequence
  Description of Artificial Sequence: Synthetic oligonucleotide
ucaucagucuaaggcuaca

SEQ ID NO: 466257 - RNA, 19 nt, Artificial Sequence
  Description of Artificial Sequence: Synthetic oligonucleotide
aguugucagcuaaaacuca

SEQ ID NO: 466258 - RNA, 19 nt, Artificial Sequence
  Description of Artificial Sequence: Synthetic oligonucleotide
ucggagaaucugucuuuga

SEQ ID NO: 466259 - RNA, 19 nt, Artificial Sequence
  Description of Artificial Sequence: Synthetic oligonucleotide
ucuccgcgucucugcagcg

SEQ ID NO: 466260 - RNA, 19 nt, Artificial Sequence
  Description of Artificial Sequence: Synthetic oligonucleotide
gugcagagcgaguccaaac

SEQ ID NO: 466261 - RNA, 19 nt, Artificial Sequence
  Description of Artificial Sequence: Synthetic oligonucleotide
uuaccugucucuggugauc

SEQ ID NO: 466262 - RNA, 19 nt, Artificial Sequence
  Description of Artificial Sequence: Synthetic oligonucleotide
gagcugccuugcuaauugc

SEQ ID NO: 466263 - RNA, 19 nt, Artificial Sequence
  Description of Artificial Sequence: Synthetic oligonucleotide
gcuacaggcgguaggacgc

SEQ ID NO: 466264 - RNA, 19 nt, Artificial Sequence
  Description of Artificial Sequence: Synthetic oligonucleotide
gaucauaguccgucacaaa

SEQ ID NO: 466265 - RNA, 19 nt, Artificial Sequence
  Description of Artificial Sequence: Synthetic oligonucleotide
cucuauccgugacugaaaa

SEQ ID NO: 466266 - RNA, 19 nt, Artificial Sequence
  Description of Artificial Sequence: Synthetic oligonucleotide
ugagcgccgacuugcccac

SEQ ID NO: 466267 - RNA, 19 nt, Artificial Sequence
  Description of Artificial Sequence: Synthetic oligonucleotide
ugucucacguuuguagauu

SEQ ID NO: 466268 - RNA, 19 nt, Artificial Sequence
  Description of Artificial Sequence: Synthetic oligonucleotide
uacgcugugaaagcauauu

SEQ ID NO: 466269 - RNA, 19 nt, Artificial Sequence
  Description of Artificial Sequence: Synthetic oligonucleotide
gucgcaaaaccaggaacac

SEQ ID NO: 466270 - RNA, 19 nt, Artificial Sequence
  Description of Artificial Sequence: Synthetic oligonucleotide
gggaaagaccguuagaauu

SEQ ID NO: 466271 - RNA, 19 nt, Artificial Sequence
  Description of Artificial Sequence: Synthetic oligonucleotide
guccgucacaaaauaggac

SEQ ID NO: 466272 - RNA, 19 nt, Artificial Sequence
  Description of Artificial Sequence: Synthetic oligonucleotide
caagcucauugaaacaccu

SEQ ID NO: 466273 - RNA, 19 nt, Artificial Sequence
  Description of Artificial Sequence: Synthetic oligonucleotide
auaccacugagagucgcaa

SEQ ID NO: 466274 - RNA, 19 nt, Artificial Sequence
  Description of Artificial Sequence: Synthetic oligonucleotide
acggugaucaucagucuaa

SEQ ID NO: 466275 - RNA, 19 nt, Artificial Sequence
  Description of Artificial Sequence: Synthetic oligonucleotide
agacgagcaagaagcccuc

SEQ ID NO: 466276 - RNA, 19 nt, Artificial Sequence
  Description of Artificial Sequence: Synthetic oligonucleotide
caucccgauuaaaauuuaa

SEQ ID NO: 466277 - RNA, 19 nt, Artificial Sequence
  Description of Artificial Sequence: Synthetic oligonucleotide
cuuauaacccggacaaguu

SEQ ID NO: 466278 - RNA, 19 nt, Artificial Sequence
  Description of Artificial Sequence: Synthetic oligonucleotide
aauaucuagcagggacauu

SEQ ID NO: 466279 - RNA, 19 nt, Artificial Sequence
  Description of Artificial Sequence: Synthetic oligonucleotide
cagugaacagugagaauua

SEQ ID NO: 466280 - RNA, 19 nt, Artificial Sequence
  Description of Artificial Sequence: Synthetic oligonucleotide
gagcgaguccaaacauuug

SEQ ID NO: 466281 - RNA, 19 nt, Artificial Sequence
  Description of Artificial Sequence: Synthetic oligonucleotide
ccauaaccaggaauacuug

SEQ ID NO: 466282 - RNA, 19 nt, Artificial Sequence
  Description of Artificial Sequence: Synthetic oligonucleotide
aguuaacagugaacaguga

SEQ ID NO: 466283 - RNA, 19 nt, Artificial Sequence
  Description of Artificial Sequence: Synthetic oligonucleotide
auccugaucuuagccgaug

SEQ ID NO: 466284 - RNA, 19 nt, Artificial Sequence
  Description of Artificial Sequence: Synthetic oligonucleotide
accuugagcugccuugcua

SEQ ID NO: 466285 - RNA, 19 nt, Artificial Sequence
  Description of Artificial Sequence: Synthetic oligonucleotide
ugguuggaucauaguccgu

SEQ ID NO: 466286 - RNA, 19 nt, Artificial Sequence
  Description of Artificial Sequence: Synthetic oligonucleotide
gucuaaggcuacaaaggua

SEQ ID NO: 466287 - RNA, 19 nt, Artificial Sequence
  Description of Artificial Sequence: Synthetic oligonucleotide
gguaccggcaugauguaaa

SEQ ID NO: 466288 - RNA, 19 nt, Artificial Sequence
  Description of Artificial Sequence: Synthetic oligonucleotide
cugcagcgcagccgaacgc

SEQ ID NO: 466289 - RNA, 19 nt, Artificial Sequence
  Description of Artificial Sequence: Synthetic oligonucleotide
gggagcgcgcuccucuccg

SEQ ID NO: 466290 - RNA, 19 nt, Artificial Sequence
  Description of Artificial Sequence: Synthetic oligonucleotide
guaaggcuaacacggugau

SEQ ID NO: 466291 - RNA, 19 nt, Artificial Sequence
  Description of Artificial Sequence: Synthetic oligonucleotide
agucucguccucguguguu

SEQ ID NO: 466292 - RNA, 19 nt, Artificial Sequence
  Description of Artificial Sequence: Synthetic oligonucleotide
gcuacaaagguaccggcau

SEQ ID NO: 466293 - RNA, 19 nt, Artificial Sequence
  Description of Artificial Sequence: Synthetic oligonucleotide
cacggugaucaucagucua

SEQ ID NO: 466294 - RNA, 19 nt, Artificial Sequence
  Description of Artificial Sequence: Synthetic oligonucleotide
gucguguguuuuaaaggaa

SEQ ID NO: 466295 - RNA, 19 nt, Artificial Sequence
  Description of Artificial Sequence: Synthetic oligonucleotide
gaacgugacuucacagucu

SEQ ID NO: 466296 - RNA, 19 nt, Artificial Sequence
  Description of Artificial Sequence: Synthetic oligonucleotide
acgagccgguacuucuccu

SEQ ID NO: 466297 - RNA, 19 nt, Artificial Sequence
  Description of Artificial Sequence: Synthetic oligonucleotide
gucucguccucguguguuc

SEQ ID NO: 466298 - RNA, 19 nt, Artificial Sequence
  Description of Artificial Sequence: Synthetic oligonucleotide
cauauacacaagguacgcu

SEQ ID NO: 466299 - RNA, 19 nt, Artificial Sequence
  Description of Artificial Sequence: Synthetic oligonucleotide
aggcgguaggacgcgcggg

SEQ ID NO: 466300 - RNA, 19 nt, Artificial Sequence
  Description of Artificial Sequence: Synthetic oligonucleotide
acaaagguaccggcaugau

SEQ ID NO: 466301 - RNA, 19 nt, Artificial Sequence
  Description of Artificial Sequence: Synthetic oligonucleotide
cagaggacgcagcgaccag

SEQ ID NO: 466302 - RNA, 19 nt, Artificial Sequence
  Description of Artificial Sequence: Synthetic oligonucleotide
cgacggagggcauucuugc

SEQ ID NO: 466303 - RNA, 19 nt, Artificial Sequence
  Description of Artificial Sequence: Synthetic oligonucleotide
ugggacuguuguacacauu

SEQ ID NO: 466304 - RNA, 19 nt, Artificial Sequence
  Description of Artificial Sequence: Synthetic oligonucleotide
gagaugucucacguuugua

SEQ ID NO: 466305 - RNA, 19 nt, Artificial Sequence
  Description of Artificial Sequence: Synthetic oligonucleotide
caucagucuaaggcuacaa

SEQ ID NO: 466306 - RNA, 19 nt, Artificial Sequence
  Description of Artificial Sequence: Synthetic oligonucleotide
auaacccggacaaguucau

SEQ ID NO: 466307 - RNA, 19 nt, Artificial Sequence
  Description of Artificial Sequence: Synthetic oligonucleotide
agguacgcugugaaagcau

SEQ ID NO: 466308 - RNA, 19 nt, Artificial Sequence
  Description of Artificial Sequence: Synthetic oligonucleotide
ggcuacaaagguaccggca

SEQ ID NO: 466309 - RNA, 19 nt, Artificial Sequence
  Description of Artificial Sequence: Synthetic oligonucleotide
guguagucguguguuuuaa

SEQ ID NO: 466310 - RNA, 19 nt, Artificial Sequence
  Description of Artificial Sequence: Synthetic oligonucleotide
gguaggacgcgcggggccc

SEQ ID NO: 466311 - RNA, 19 nt, Artificial Sequence
  Description of Artificial Sequence: Synthetic oligonucleotide
auucgcuuacaaacauaua

SEQ ID NO: 466312 - RNA, 19 nt, Artificial Sequence
  Description of Artificial Sequence: Synthetic oligonucleotide
gcgacggagggcauucuug

SEQ ID NO: 466313 - RNA, 19 nt, Artificial Sequence
  Description of Artificial Sequence: Synthetic oligonucleotide
gacggagggcauucuugcu

SEQ ID NO: 466314 - RNA, 19 nt, Artificial Sequence
  Description of Artificial Sequence: Synthetic oligonucleotide
ccuuauaacccggacaagu

SEQ ID NO: 466315 - RNA, 19 nt, Artificial Sequence
  Description of Artificial Sequence: Synthetic oligonucleotide
ccgugacugaaaagacgag

SEQ ID NO: 466316 - RNA, 19 nt, Artificial Sequence
  Description of Artificial Sequence: Synthetic oligonucleotide
agguaccggcaugauguaa

SEQ ID NO: 466317 - RNA, 19 nt, Artificial Sequence
  Description of Artificial Sequence: Synthetic oligonucleotide
cagggagcgcgcuccucuc

SEQ ID NO: 466318 - RNA, 19 nt, Artificial Sequence
  Description of Artificial Sequence: Synthetic oligonucleotide
cgguaacagagaugagggc

SEQ ID NO: 466319 - RNA, 19 nt, Artificial Sequence
  Description of Artificial Sequence: Synthetic oligonucleotide
cagagcgaguccaaacauu

SEQ ID NO: 466320 - RNA, 19 nt, Artificial Sequence
  Description of Artificial Sequence: Synthetic oligonucleotide
gcagagcgaguccaaacau

SEQ ID NO: 466321 - RNA, 19 nt, Artificial Sequence
  Description of Artificial Sequence: Synthetic oligonucleotide
gcggccaucgggacgcccc

SEQ ID NO: 466322 - RNA, 19 nt, Artificial Sequence
  Description of Artificial Sequence: Synthetic oligonucleotide
cgguccuuuacucggagaa

SEQ ID NO: 466323 - RNA, 19 nt, Artificial Sequence
  Description of Artificial Sequence: Synthetic oligonucleotide
guacgcugugaaagcauau

SEQ ID NO: 466324 - RNA, 19 nt, Artificial Sequence
  Description of Artificial Sequence: Synthetic oligonucleotide
gaccaaggguuuccacuuu

SEQ ID NO: 466325 - RNA, 19 nt, Artificial Sequence
  Description of Artificial Sequence: Synthetic oligonucleotide
gagcgccgacuugcccacg

SEQ ID NO: 466326 - RNA, 19 nt, Artificial Sequence
  Description of Artificial Sequence: Synthetic oligonucleotide
ccucuauccgugacugaaa

SEQ ID NO: 466327 - RNA, 19 nt, Artificial Sequence
  Description of Artificial Sequence: Synthetic oligonucleotide
ccaucgggacgccccgagc

SEQ ID NO: 466328 - RNA, 19 nt, Artificial Sequence
  Description of Artificial Sequence: Synthetic oligonucleotide
gcgccgacuugcccacgcc

SEQ ID NO: 466329 - RNA, 19 nt, Artificial Sequence
  Description of Artificial Sequence: Synthetic oligonucleotide
gcgguaggacgcgcggggc

SEQ ID NO: 466330 - RNA, 19 nt, Artificial Sequence
  Description of Artificial Sequence: Synthetic oligonucleotide
gugcggccggcugggcuac

SEQ ID NO: 466331 - RNA, 19 nt, Artificial Sequence
  Description of Artificial Sequence: Synthetic oligonucleotide
ggggcccgugaguggccug

SEQ ID NO: 466332 - RNA, 19 nt, Artificial Sequence
  Description of Artificial Sequence: Synthetic oligonucleotide
ccguagcaucagaaaaggu

SEQ ID NO: 466333 - RNA, 19 nt, Artificial Sequence
  Description of Artificial Sequence: Synthetic oligonucleotide
ggcgacggagggcauucuu

SEQ ID NO: 466334 - RNA, 19 nt, Artificial Sequence
  Description of Artificial Sequence: Synthetic oligonucleotide
ccgucgcgccagccggccg

SEQ ID NO: 466335 - RNA, 19 nt, Artificial Sequence
  Description of Artificial Sequence: Synthetic oligonucleotide
cccggaaaggcugggaguu

SEQ ID NO: 466336 - RNA, 19 nt, Artificial Sequence
  Description of Artificial Sequence: Synthetic oligonucleotide
gggccgcucugucaucgau

SEQ ID NO: 466337 - RNA, 19 nt, Artificial Sequence
  Description of Artificial Sequence: Synthetic oligonucleotide
gggacgagugcggccggcu

SEQ ID NO: 466338 - RNA, 19 nt, Artificial Sequence
  Description of Artificial Sequence: Synthetic oligonucleotide
ggccaucgggacgccccga

SEQ ID NO: 466339 - RNA, 19 nt, Artificial Sequence
  Description of Artificial Sequence: Synthetic oligonucleotide
cgggccgcucugucaucga

SEQ ID NO: 466340 - RNA, 19 nt, Artificial Sequence
  Description of Artificial Sequence: Synthetic oligonucleotide
cgcgcgcccuaggcccggc

SEQ ID NO: 466341 - RNA, 19 nt, Artificial Sequence
  Description of Artificial Sequence: Synthetic oligonucleotide
cggggcccgugaguggccu

SEQ ID NO: 466342 - RNA, 19 nt, Artificial Sequence
  Description of Artificial Sequence: Synthetic oligonucleotide
ugcuguauaauuuaauucg

SEQ ID NO: 466343 - RNA, 19 nt, Artificial Sequence
  Description of Artificial Sequence: Synthetic oligonucleotide
uauaauuuaauucgccugg

SEQ ID NO: 466344 - RNA, 19 nt, Artificial Sequence
  Description of Artificial Sequence: Synthetic oligonucleotide
ucuucgaacuaccagaugg

SEQ ID NO: 466345 - RNA, 19 nt, Artificial Sequence
  Description of Artificial Sequence: Synthetic oligonucleotide
ucaaucuuaaucuuauugg

SEQ ID NO: 466346 - RNA, 19 nt, Artificial Sequence
  Description of Artificial Sequence: Synthetic oligonucleotide
aaaagcuuggaucaaccgg

SEQ ID NO: 466347 - RNA, 19 nt, Artificial Sequence
  Description of Artificial Sequence: Synthetic oligonucleotide
ucuuaugucagucccaagg

SEQ ID NO: 466348 - RNA, 19 nt, Artificial Sequence
  Description of Artificial Sequence: Synthetic oligonucleotide
agggcuguaaaucuuaggc

SEQ ID NO: 466349 - RNA, 19 nt, Artificial Sequence
  Description of Artificial Sequence: Synthetic oligonucleotide
uauuuaucuaauuuaaccu

SEQ ID NO: 466350 - RNA, 19 nt, Artificial Sequence
  Description of Artificial Sequence: Synthetic oligonucleotide
ucacuuucgauuuauagug

SEQ ID NO: 466351 - RNA, 19 nt, Artificial Sequence
  Description of Artificial Sequence: Synthetic oligonucleotide
aauuuaaccugcucaaucu

SEQ ID NO: 466352 - RNA, 19 nt, Artificial Sequence
  Description of Artificial Sequence: Synthetic oligonucleotide
ugaaccaguaacuucaggc

SEQ ID NO: 466353 - RNA, 19 nt, Artificial Sequence
  Description of Artificial Sequence: Synthetic oligonucleotide
ugaccaagaagucacauca

SEQ ID NO: 466354 - RNA, 19 nt, Artificial Sequence
  Description of Artificial Sequence: Synthetic oligonucleotide
auuuauagugcugagcucg

SEQ ID NO: 466355 - RNA, 19 nt, Artificial Sequence
  Description of Artificial Sequence: Synthetic oligonucleotide
uaaagaguagaguccaagg

SEQ ID NO: 466356 - RNA, 19 nt, Artificial Sequence
  Description of Artificial Sequence: Synthetic oligonucleotide
aaagcuuggaucaaccggg

SEQ ID NO: 466357 - RNA, 19 nt, Artificial Sequence
  Description of Artificial Sequence: Synthetic oligonucleotide
caaacgaucaagucguucc

SEQ ID NO: 466358 - RNA, 19 nt, Artificial Sequence
  Description of Artificial Sequence: Synthetic oligonucleotide
aaucuuaaucuuauuggac

SEQ ID NO: 466359 - RNA, 19 nt, Artificial Sequence
  Description of Artificial Sequence: Synthetic oligonucleotide
uuauaaggcaacaguacug

SEQ ID NO: 466360 - RNA, 19 nt, Artificial Sequence
  Description of Artificial Sequence: Synthetic oligonucleotide
ugauuagcaacacugcugu

SEQ ID NO: 466361 - RNA, 19 nt, Artificial Sequence
  Description of Artificial Sequence: Synthetic oligonucleotide
aaagucaccccaccauccc

SEQ ID NO: 466362 - RNA, 19 nt, Artificial Sequence
  Description of Artificial Sequence: Synthetic oligonucleotide
aaucuuauuggacuuccca

SEQ ID NO: 466363 - RNA, 19 nt, Artificial Sequence
  Description of Artificial Sequence: Synthetic oligonucleotide
gaugaaauggagucagaag

SEQ ID NO: 466364 - RNA, 19 nt, Artificial Sequence
  Description of Artificial Sequence: Synthetic oligonucleotide
uguggaacauaguacaucu

SEQ ID NO: 466365 - RNA, 19 nt, Artificial Sequence
  Description of Artificial Sequence: Synthetic oligonucleotide
uguauugugaccccucucu

SEQ ID NO: 466366 - RNA, 19 nt, Artificial Sequence
  Description of Artificial Sequence: Synthetic oligonucleotide
aagcaguuuagccaaacga

SEQ ID NO: 466367 - RNA, 19 nt, Artificial Sequence
  Description of Artificial Sequence: Synthetic oligonucleotide
aucuuauuggacuucccac

SEQ ID NO: 466368 - RNA, 19 nt, Artificial Sequence
  Description of Artificial Sequence: Synthetic oligonucleotide
caucauuggacccugaaug

SEQ ID NO: 466369 - RNA, 19 nt, Artificial Sequence
  Description of Artificial Sequence: Synthetic oligonucleotide
aguuguggaacauaguaca

SEQ ID NO: 466370 - RNA, 19 nt, Artificial Sequence
  Description of Artificial Sequence: Synthetic oligonucleotide
guauaauuuaauucgccug

SEQ ID NO: 466371 - RNA, 19 nt, Artificial Sequence
  Description of Artificial Sequence: Synthetic oligonucleotide
acauucagaccuuugucac

SEQ ID NO: 466372 - RNA, 19 nt, Artificial Sequence
  Description of Artificial Sequence: Synthetic oligonucleotide
aguaaaacuuggcugaccu

SEQ ID NO: 466373 - RNA, 19 nt, Artificial Sequence
  Description of Artificial Sequence: Synthetic oligonucleotide
aaugugagcucucaauagu

SEQ ID NO: 466374 - RNA, 19 nt, Artificial Sequence
  Description of Artificial Sequence: Synthetic oligonucleotide
uuacuauagauccuucugu

SEQ ID NO: 466375 - RNA, 19 nt, Artificial Sequence
  Description of Artificial Sequence: Synthetic oligonucleotide
uguguuguuagcucuggag

SEQ ID NO: 466376 - RNA, 19 nt, Artificial Sequence
  Description of Artificial Sequence: Synthetic oligonucleotide
auaaucaaaauccggcugu

SEQ ID NO: 466377 - RNA, 19 nt, Artificial Sequence
  Description of Artificial Sequence: Synthetic oligonucleotide
ugcuucaugaauacacucc

SEQ ID NO: 466378 - RNA, 19 nt, Artificial Sequence
  Description of Artificial Sequence: Synthetic oligonucleotide
acaucuucgaacuaccaga

SEQ ID NO: 466379 - RNA, 19 nt, Artificial Sequence
  Description of Artificial Sequence: Synthetic oligonucleotide
uaauuccuaggcuuugagg

SEQ ID NO: 466380 - RNA, 19 nt, Artificial Sequence
  Description of Artificial Sequence: Synthetic oligonucleotide
aauguugggacuaucugug

SEQ ID NO: 466381 - RNA, 19 nt, Artificial Sequence
  Description of Artificial Sequence: Synthetic oligonucleotide
uguugauuagcaacacugc

SEQ ID NO: 466382 - RNA, 19 nt, Artificial Sequence
  Description of Artificial Sequence: Synthetic oligonucleotide
ucaacaugugcacaguuuc

SEQ ID NO: 466383 - RNA, 19 nt, Artificial Sequence
  Description of Artificial Sequence: Synthetic oligonucleotide
aggacuuauagucugauuu

SEQ ID NO: 466384 - RNA, 19 nt, Artificial Sequence
  Description of Artificial Sequence: Synthetic oligonucleotide
gucaggacgacucuucugg

SEQ ID NO: 466385 - RNA, 19 nt, Artificial Sequence
  Description of Artificial Sequence: Synthetic oligonucleotide
ugagagucuagaauccgag

SEQ ID NO: 466386 - RNA, 19 nt, Artificial Sequence
  Description of Artificial Sequence: Synthetic oligonucleotide
cuuacuauagauccuucug

SEQ ID NO: 466387 - RNA, 19 nt, Artificial Sequence
  Description of Artificial Sequence: Synthetic oligonucleotide
aauccgaggagguauugcu

SEQ ID NO: 466388 - RNA, 19 nt, Artificial Sequence
  Description of Artificial Sequence: Synthetic oligonucleotide
agagucuagaauccgagga

SEQ ID NO: 466389 - RNA, 19 nt, Artificial Sequence
  Description of Artificial Sequence: Synthetic oligonucleotide
ugguauuuucaaaugcuga

SEQ ID NO: 466390 - RNA, 19 nt, Artificial Sequence
  Description of Artificial Sequence: Synthetic oligonucleotide
uggcauaaucaaaauccgg

SEQ ID NO: 466391 - RNA, 19 nt, Artificial Sequence
  Description of Artificial Sequence: Synthetic oligonucleotide
aaagagaguucuuucuuau

SEQ ID NO: 466392 - RNA, 19 nt, Artificial Sequence
  Description of Artificial Sequence: Synthetic oligonucleotide
cugggugacacauacaguc

SEQ ID NO: 466393 - RNA, 19 nt, Artificial Sequence
  Description of Artificial Sequence: Synthetic oligonucleotide
ucaggauguauuuaucuaa

SEQ ID NO: 466394 - RNA, 19 nt, Artificial Sequence
  Description of Artificial Sequence: Synthetic oligonucleotide
ugguuguccagucacaauc

SEQ ID NO: 466395 - RNA, 19 nt, Artificial Sequence
  Description of Artificial Sequence: Synthetic oligonucleotide
gaaacuuauuccaaaguuc

SEQ ID NO: 466396 - RNA, 19 nt, Artificial Sequence
  Description of Artificial Sequence: Synthetic oligonucleotide
ugugccuagcauuucagcu

SEQ ID NO: 466397 - RNA, 19 nt, Artificial Sequence
  Description of Artificial Sequence: Synthetic oligonucleotide
acaaugagaaagcacccug

SEQ ID NO: 466398 - RNA, 19 nt, Artificial Sequence
  Description of Artificial Sequence: Synthetic oligonucleotide
ucuuacauugcuuccucug

SEQ ID NO: 466399 - RNA, 19 nt, Artificial Sequence
  Description of Artificial Sequence: Synthetic oligonucleotide
aaguaaaacuuggcugacc

SEQ ID NO: 466400 - RNA, 19 nt, Artificial Sequence
  Description of Artificial Sequence: Synthetic oligonucleotide
gaagcaguuuagccaaacg

SEQ ID NO: 466401 - RNA, 19 nt, Artificial Sequence
  Description of Artificial Sequence: Synthetic oligonucleotide
uuucgauuuauagugcuga

SEQ ID NO: 466402 - RNA, 19 nt, Artificial Sequence
  Description of Artificial Sequence: Synthetic oligonucleotide
uguugggacuaucugugag

SEQ ID NO: 466403 - RNA, 19 nt, Artificial Sequence
  Description of Artificial Sequence: Synthetic oligonucleotide
aaaucuuaggcagguuuuc

SEQ ID NO: 466404 - RNA, 19 nt, Artificial Sequence
  Description of Artificial Sequence: Synthetic oligonucleotide
uggucuauuugucuugucu

SEQ ID NO: 466405 - RNA, 19 nt, Artificial Sequence
  Description of Artificial Sequence: Synthetic oligonucleotide
cuggcauaaucaaaauccg

SEQ ID NO: 466406 - RNA, 19 nt, Artificial Sequence
  Description of Artificial Sequence: Synthetic oligonucleotide
uguugaacagagccucccg

SEQ ID NO: 466407 - RNA, 19 nt, Artificial Sequence
  Description of Artificial Sequence: Synthetic oligonucleotide
aauccggcuguuuucucag

SEQ ID NO: 466408 - RNA, 19 nt, Artificial Sequence
  Description of Artificial Sequence: Synthetic oligonucleotide
acaauugccaggugauuuc

SEQ ID NO: 466409 - RNA, 19 nt, Artificial Sequence
  Description of Artificial Sequence: Synthetic oligonucleotide
guuguaaagaguagagucc

SEQ ID NO: 466410 - RNA, 19 nt, Artificial Sequence
  Description of Artificial Sequence: Synthetic oligonucleotide
aguacaucuucgaacuacc

SEQ ID NO: 466411 - RNA, 19 nt, Artificial Sequence
  Description of Artificial Sequence: Synthetic oligonucleotide
ggaacaaaccaugagacgc

SEQ ID NO: 466412 - RNA, 19 nt, Artificial Sequence
  Description of Artificial Sequence: Synthetic oligonucleotide
agguauugcuggcauaauc

SEQ ID NO: 466413 - RNA, 19 nt, Artificial Sequence
  Description of Artificial Sequence: Synthetic oligonucleotide
uauggagcuacuccuuuca

SEQ ID NO: 466414 - RNA, 19 nt, Artificial Sequence
  Description of Artificial Sequence: Synthetic oligonucleotide
agagaauuagugcuggaaa

SEQ ID NO: 466415 - RNA, 19 nt, Artificial Sequence
  Description of Artificial Sequence: Synthetic oligonucleotide
uggcuuauaaggcaacagu

SEQ ID NO: 466416 - RNA, 19 nt, Artificial Sequence
  Description of Artificial Sequence: Synthetic oligonucleotide
uggaugauggaaguaaaac

SEQ ID NO: 466417 - RNA, 19 nt, Artificial Sequence
  Description of Artificial Sequence: Synthetic oligonucleotide
aaauccggcuguuuucuca

SEQ ID NO: 466418 - RNA, 19 nt, Artificial Sequence
  Description of Artificial Sequence: Synthetic oligonucleotide
augauuugccuccuggaug

SEQ ID NO: 466419 - RNA, 19 nt, Artificial Sequence
  Description of Artificial Sequence: Synthetic oligonucleotide
uuguaaagaguagagucca

SEQ ID NO: 466420 - RNA, 19 nt, Artificial Sequence
  Description of Artificial Sequence: Synthetic oligonucleotide
aaagucaccuguauuguga

SEQ ID NO: 466421 - RNA, 19 nt, Artificial Sequence
  Description of Artificial Sequence: Synthetic oligonucleotide
cuucccaccacaaugagaa

SEQ ID NO: 466422 - RNA, 19 nt, Artificial Sequence
  Description of Artificial Sequence: Synthetic oligonucleotide
cuuauagucugauuuccuc

SEQ ID NO: 466423 - RNA, 19 nt, Artificial Sequence
  Description of Artificial Sequence: Synthetic oligonucleotide
agacucauggcagaaaucu

SEQ ID NO: 466424 - RNA, 19 nt, Artificial Sequence
  Description of Artificial Sequence: Synthetic oligonucleotide
uuaugucagucccaaggca

SEQ ID NO: 466425 - RNA, 19 nt, Artificial Sequence
  Description of Artificial Sequence: Synthetic oligonucleotide
aauaugcucugcagcuucc

SEQ ID NO: 466426 - RNA, 19 nt, Artificial Sequence
  Description of Artificial Sequence: Synthetic oligonucleotide
aaaccaggcgauaccaggg

SEQ ID NO: 466427 - RNA, 19 nt, Artificial Sequence
  Description of Artificial Sequence: Synthetic oligonucleotide
uuacauugcuuccucugca

SEQ ID NO: 466428 - RNA, 19 nt, Artificial Sequence
  Description of Artificial Sequence: Synthetic oligonucleotide
ugauggugaaagaaauccu

SEQ ID NO: 466429 - RNA, 19 nt, Artificial Sequence
  Description of Artificial Sequence: Synthetic oligonucleotide
uccuucuguaugcuuaaug

SEQ ID NO: 466430 - RNA, 19 nt, Artificial Sequence
  Description of Artificial Sequence: Synthetic oligonucleotide
ucaauagugguaucugauc

SEQ ID NO: 466431 - RNA, 19 nt, Artificial Sequence
  Description of Artificial Sequence: Synthetic oligonucleotide
uaaaucuuaggcagguuuu

SEQ ID NO: 466432 - RNA, 19 nt, Artificial Sequence
  Description of Artificial Sequence: Synthetic oligonucleotide
gagagucuagaauccgagg

SEQ ID NO: 466433 - RNA, 19 nt, Artificial Sequence
  Description of Artificial Sequence: Synthetic oligonucleotide
uguacacccuuguucaaca

SEQ ID NO: 466434 - RNA, 19 nt, Artificial Sequence
  Description of Artificial Sequence: Synthetic oligonucleotide
ugcucaaucuuaaucuuau

SEQ ID NO: 466435 - RNA, 19 nt, Artificial Sequence
  Description of Artificial Sequence: Synthetic oligonucleotide
caaucuuaaucuuauugga

SEQ ID NO: 466436 - RNA, 19 nt, Artificial Sequence
  Description of Artificial Sequence: Synthetic oligonucleotide
aaacgaucaagucguucca

SEQ ID NO: 466437 - RNA, 19 nt, Artificial Sequence
  Description of Artificial Sequence: Synthetic oligonucleotide
aagucaccccaccaucccg

SEQ ID NO: 466438 - RNA, 19 nt, Artificial Sequence
  Description of Artificial Sequence: Synthetic oligonucleotide
ugacauucagaccuuuguc

SEQ ID NO: 466439 - RNA, 19 nt, Artificial Sequence
  Description of Artificial Sequence: Synthetic oligonucleotide
caaugagaaagcacccugc

SEQ ID NO: 466440 - RNA, 19 nt, Artificial Sequence
  Description of Artificial Sequence: Synthetic oligonucleotide
acuuucgauuuauagugcu

SEQ ID NO: 466441 - RNA, 19 nt, Artificial Sequence
  Description of Artificial Sequence: Synthetic oligonucleotide
cagcagaugaaauggaguc

SEQ ID NO: 466442 - RNA, 19 nt, Artificial Sequence
  Description of Artificial Sequence: Synthetic oligonucleotide
gucaccuguauugugaccc

SEQ ID NO: 466443 - RNA, 19 nt, Artificial Sequence
  Description of Artificial Sequence: Synthetic oligonucleotide
gaaagucuggggcaaucgc

SEQ ID NO: 466444 - RNA, 19 nt, Artificial Sequence
  Description of Artificial Sequence: Synthetic oligonucleotide
uaaagucaccuguauugug

SEQ ID NO: 466445 - RNA, 19 nt, Artificial Sequence
  Description of Artificial Sequence: Synthetic oligonucleotide
uuagccaaacgaucaaguc

SEQ ID NO: 466446 - RNA, 19 nt, Artificial Sequence
  Description of Artificial Sequence: Synthetic oligonucleotide
uggggcaaucgcaucauug

SEQ ID NO: 466447 - RNA, 19 nt, Artificial Sequence
  Description of Artificial Sequence: Synthetic oligonucleotide
auauggagcuacuccuuuc

SEQ ID NO: 466448 - RNA, 19 nt, Artificial Sequence
  Description of Artificial Sequence: Synthetic oligonucleotide
uuccccguuguaaagagua

SEQ ID NO: 466449 - RNA, 19 nt, Artificial Sequence
  Description of Artificial Sequence: Synthetic oligonucleotide
aacggccuaagaggaaccc

SEQ ID NO: 466450 - RNA, 19 nt, Artificial Sequence
  Description of Artificial Sequence: Synthetic oligonucleotide
uucgauuuauagugcugag

SEQ ID NO: 466451 - RNA, 19 nt, Artificial Sequence
  Description of Artificial Sequence: Synthetic oligonucleotide
caugagacgccuucacagg

SEQ ID NO: 466452 - RNA, 19 nt, Artificial Sequence
  Description of Artificial Sequence: Synthetic oligonucleotide
uuagcaacacugcuguaua

SEQ ID NO: 466453 - RNA, 19 nt, Artificial Sequence
  Description of Artificial Sequence: Synthetic oligonucleotide
ggcauaaucaaaauccggc

SEQ ID NO: 466454 - RNA, 19 nt, Artificial Sequence
  Description of Artificial Sequence: Synthetic oligonucleotide
ucauuugaggauagccugu

SEQ ID NO: 466455 - RNA, 19 nt, Artificial Sequence
  Description of Artificial Sequence: Synthetic oligonucleotide
cauaguacaucuucgaacu

SEQ ID NO: 466456 - RNA, 19 nt, Artificial Sequence
  Description of Artificial Sequence: Synthetic oligonucleotide
gggucaauacaucagaguc

SEQ ID NO: 466457 - RNA, 19 nt, Artificial Sequence
  Description of Artificial Sequence: Synthetic oligonucleotide
guaaagaguagaguccaag

SEQ ID NO: 466458 - RNA, 19 nt, Artificial Sequence
  Description of Artificial Sequence: Synthetic oligonucleotide
cuucgaacuaccagauggc

SEQ ID NO: 466459 - RNA, 19 nt, Artificial Sequence
  Description of Artificial Sequence: Synthetic oligonucleotide
uucaaaccaggcgauacca

SEQ ID NO: 466460 - RNA, 19 nt, Artificial Sequence
  Description of Artificial Sequence: Synthetic oligonucleotide
ucaaaccaggcgauaccag

SEQ ID NO: 466461 - RNA, 19 nt, Artificial Sequence
  Description of Artificial Sequence: Synthetic oligonucleotide
auaccagggcuguaaaucu

SEQ ID NO: 466462 - RNA, 19 nt, Artificial Sequence
  Description of Artificial Sequence: Synthetic oligonucleotide
uuuaauucgccugggugac

SEQ ID NO: 466463 - RNA, 19 nt, Artificial Sequence
  Description of Artificial Sequence: Synthetic oligonucleotide
ucagaccuuugucacggcc

SEQ ID NO: 466464 - RNA, 19 nt, Artificial Sequence
  Description of Artificial Sequence: Synthetic oligonucleotide
uacuauagauccuucugua

SEQ ID NO: 466465 - RNA, 19 nt, Artificial Sequence
  Description of Artificial Sequence: Synthetic oligonucleotide
aaacggccuaagaggaacc

SEQ ID NO: 466466 - RNA, 19 nt, Artificial Sequence
  Description of Artificial Sequence: Synthetic oligonucleotide
ucauccuggguacuuucug

SEQ ID NO: 466467 - RNA, 19 nt, Artificial Sequence
  Description of Artificial Sequence: Synthetic oligonucleotide
aucauuggacccugaaugu

SEQ ID NO: 466468 - RNA, 19 nt, Artificial Sequence
  Description of Artificial Sequence: Synthetic oligonucleotide
uaguacaucuucgaacuac

SEQ ID NO: 466469 - RNA, 19 nt, Artificial Sequence
  Description of Artificial Sequence: Synthetic oligonucleotide
ugagcucgcagccgguagg

SEQ ID NO: 466470 - RNA, 19 nt, Artificial Sequence
  Description of Artificial Sequence: Synthetic oligonucleotide
uaucuaauuuaaccugcuc

SEQ ID NO: 466471 - RNA, 19 nt, Artificial Sequence
  Description of Artificial Sequence: Synthetic oligonucleotide
guaauuccuaggcuuugag

SEQ ID NO: 466472 - RNA, 19 nt, Artificial Sequence
  Description of Artificial Sequence: Synthetic oligonucleotide
acuugcaccgcuucuccag

SEQ ID NO: 466473 - RNA, 19 nt, Artificial Sequence
  Description of Artificial Sequence: Synthetic oligonucleotide
uaaucuuauuggacuuccc

SEQ ID NO: 466474 - RNA, 19 nt, Artificial Sequence
  Description of Artificial Sequence: Synthetic oligonucleotide
gcucuggacagucaggacg

SEQ ID NO: 466475 - RNA, 19 nt, Artificial Sequence
  Description of Artificial Sequence: Synthetic oligonucleotide
gaaagucaccccaccaucc

SEQ ID NO: 466476 - RNA, 19 nt, Artificial Sequence
  Description of Artificial Sequence: Synthetic oligonucleotide
ucuuagauccagacuuccu

SEQ ID NO: 466477 - RNA, 19 nt, Artificial Sequence
  Description of Artificial Sequence: Synthetic oligonucleotide
ucgauuuauagugcugagc

SEQ ID NO: 466478 - RNA, 19 nt, Artificial Sequence
  Description of Artificial Sequence: Synthetic oligonucleotide
cagaccuuugucacggccc

SEQ ID NO: 466479 - RNA, 19 nt, Artificial Sequence
  Description of Artificial Sequence: Synthetic oligonucleotide
auuagcaacacugcuguau

SEQ ID NO: 466480 - RNA, 19 nt, Artificial Sequence
  Description of Artificial Sequence: Synthetic oligonucleotide
aaagucuggggcaaucgca

SEQ ID NO: 466481 - RNA, 19 nt, Artificial Sequence
  Description of Artificial Sequence: Synthetic oligonucleotide
cuuccuacuuuccacagga

SEQ ID NO: 466482 - RNA, 19 nt, Artificial Sequence
  Description of Artificial Sequence: Synthetic oligonucleotide
uucaacaugugcacaguuu

SEQ ID NO: 466483 - RNA, 19 nt, Artificial Sequence
  Description of Artificial Sequence: Synthetic oligonucleotide
cuuucgauuuauagugcug

SEQ ID NO: 466484 - RNA, 19 nt, Artificial Sequence
  Description of Artificial Sequence: Synthetic oligonucleotide
agucguuccaccaaagaga

SEQ ID NO: 466485 - RNA, 19 nt, Artificial Sequence
  Description of Artificial Sequence: Synthetic oligonucleotide
ugagacgccuucacaggag

SEQ ID NO: 466486 - RNA, 19 nt, Artificial Sequence
  Description of Artificial Sequence: Synthetic oligonucleotide
guuuccccguuguaaagag

SEQ ID NO: 466487 - RNA, 19 nt, Artificial Sequence
  Description of Artificial Sequence: Synthetic oligonucleotide
ucaucucuugugccuagca

SEQ ID NO: 466488 - RNA, 19 nt, Artificial Sequence
  Description of Artificial Sequence: Synthetic oligonucleotide
acggcucaugcauugcuuc

SEQ ID NO: 466489 - RNA, 19 nt, Artificial Sequence
  Description of Artificial Sequence: Synthetic oligonucleotide
caggguugcucucacaaac

SEQ ID NO: 466490 - RNA, 19 nt, Artificial Sequence
  Description of Artificial Sequence: Synthetic oligonucleotide
ggagucagaagaaauauga

SEQ ID NO: 466491 - RNA, 19 nt, Artificial Sequence
  Description of Artificial Sequence: Synthetic oligonucleotide
agccaaacgaucaagucgu

SEQ ID NO: 466492 - RNA, 19 nt, Artificial Sequence
  Description of Artificial Sequence: Synthetic oligonucleotide
gaugauggaaguaaaacuu

SEQ ID NO: 466493 - RNA, 19 nt, Artificial Sequence
  Description of Artificial Sequence: Synthetic oligonucleotide
caacaugugcacaguuucc

SEQ ID NO: 466494 - RNA, 19 nt, Artificial Sequence
  Description of Artificial Sequence: Synthetic oligonucleotide
gauuuauagugcugagcuc

SEQ ID NO: 466495 - RNA, 19 nt, Artificial Sequence
  Description of Artificial Sequence: Synthetic oligonucleotide
acuuucugaggccugcagu

SEQ ID NO: 466496 - RNA, 19 nt, Artificial Sequence
  Description of Artificial Sequence: Synthetic oligonucleotide
gcccucuuacuauagaucc

SEQ ID NO: 466497 - RNA, 19 nt, Artificial Sequence
  Description of Artificial Sequence: Synthetic oligonucleotide
acucauggcagaaaucuug

SEQ ID NO: 466498 - RNA, 19 nt, Artificial Sequence
  Description of Artificial Sequence: Synthetic oligonucleotide
aagacucauggcagaaauc

SEQ ID NO: 466499 - RNA, 19 nt, Artificial Sequence
  Description of Artificial Sequence: Synthetic oligonucleotide
aauuggaaaagaaccuuuu

SEQ ID NO: 466500 - RNA, 19 nt, Artificial Sequence
  Description of Artificial Sequence: Synthetic oligonucleotide
caguuuagccaaacgauca

SEQ ID NO: 466501 - RNA, 19 nt, Artificial Sequence
  Description of Artificial Sequence: Synthetic oligonucleotide
aggacgacucuucugggca

SEQ ID NO: 466502 - RNA, 19 nt, Artificial Sequence
  Description of Artificial Sequence: Synthetic oligonucleotide
acuauagauccuucuguau

SEQ ID NO: 466503 - RNA, 19 nt, Artificial Sequence
  Description of Artificial Sequence: Synthetic oligonucleotide
uucuuagauccagacuucc

SEQ ID NO: 466504 - RNA, 19 nt, Artificial Sequence
  Description of Artificial Sequence: Synthetic oligonucleotide
ucgcuccugaaacuuauuc

SEQ ID NO: 466505 - RNA, 19 nt, Artificial Sequence
  Description of Artificial Sequence: Synthetic oligonucleotide
cguuguaaagaguagaguc

SEQ ID NO: 466506 - RNA, 19 nt, Artificial Sequence
  Description of Artificial Sequence: Synthetic oligonucleotide
uugggaaagucaccccacc

SEQ ID NO: 466507 - RNA, 19 nt, Artificial Sequence
  Description of Artificial Sequence: Synthetic oligonucleotide
ugagcucucaauaguggua

SEQ ID NO: 466508 - RNA, 19 nt, Artificial Sequence
  Description of Artificial Sequence: Synthetic oligonucleotide
guucaaaccaggcgauacc

SEQ ID NO: 466509 - RNA, 19 nt, Artificial Sequence
  Description of Artificial Sequence: Synthetic oligonucleotide
cuucaggcgcuuuacccgc

SEQ ID NO: 466510 - RNA, 19 nt, Artificial Sequence
  Description of Artificial Sequence: Synthetic oligonucleotide
ugaaugugugaugggauuc

SEQ ID NO: 466511 - RNA, 19 nt, Artificial Sequence
  Description of Artificial Sequence: Synthetic oligonucleotide
gggacuaucugugaggagc

SEQ ID NO: 466512 - RNA, 19 nt, Artificial Sequence
  Description of Artificial Sequence: Synthetic oligonucleotide
cacuagaacugggaguugg

SEQ ID NO: 466513 - RNA, 19 nt, Artificial Sequence
  Description of Artificial Sequence: Synthetic oligonucleotide
cacuuucgauuuauagugc

SEQ ID NO: 466514 - RNA, 19 nt, Artificial Sequence
  Description of Artificial Sequence: Synthetic oligonucleotide
ugaggauagccugugccca

SEQ ID NO: 466515 - RNA, 19 nt, Artificial Sequence
  Description of Artificial Sequence: Synthetic oligonucleotide
ugucagucugggucaauac

SEQ ID NO: 466516 - RNA, 19 nt, Artificial Sequence
  Description of Artificial Sequence: Synthetic oligonucleotide
uccuaggcuuugaggaaag

SEQ ID NO: 466517 - RNA, 19 nt, Artificial Sequence
  Description of Artificial Sequence: Synthetic oligonucleotide
ugcaacuugccucucuguu

SEQ ID NO: 466518 - RNA, 19 nt, Artificial Sequence
  Description of Artificial Sequence: Synthetic oligonucleotide
ucauuggacccugaaugug

SEQ ID NO: 466519 - RNA, 19 nt, Artificial Sequence
  Description of Artificial Sequence: Synthetic oligonucleotide
gcagucuuaugucaguccc

SEQ ID NO: 466520 - RNA, 19 nt, Artificial Sequence
  Description of Artificial Sequence: Synthetic oligonucleotide
auggcuuauaaggcaacag

SEQ ID NO: 466521 - RNA, 19 nt, Artificial Sequence
  Description of Artificial Sequence: Synthetic oligonucleotide
ucgccugggugacacauac

SEQ ID NO: 466522 - RNA, 19 nt, Artificial Sequence
  Description of Artificial Sequence: Synthetic oligonucleotide
ggaguugggaaagucaccc

SEQ ID NO: 466523 - RNA, 19 nt, Artificial Sequence
  Description of Artificial Sequence: Synthetic oligonucleotide
ugugaccccucucuaggcu

SEQ ID NO: 466524 - RNA, 19 nt, Artificial Sequence
  Description of Artificial Sequence: Synthetic oligonucleotide
cuccuuucauucaaaguca

SEQ ID NO: 466525 - RNA, 19 nt, Artificial Sequence
  Description of Artificial Sequence: Synthetic oligonucleotide
gcuuguacacccuuguuca

SEQ ID NO: 466526 - RNA, 19 nt, Artificial Sequence
  Description of Artificial Sequence: Synthetic oligonucleotide
uuuggucuauuugucuugu

SEQ ID NO: 466527 - RNA, 19 nt, Artificial Sequence
  Description of Artificial Sequence: Synthetic oligonucleotide
agcaguuuagccaaacgau

SEQ ID NO: 466528 - RNA, 19 nt, Artificial Sequence
  Description of Artificial Sequence: Synthetic oligonucleotide
agucacaaucuccaaguua

SEQ ID NO: 466529 - RNA, 19 nt, Artificial Sequence
  Description of Artificial Sequence: Synthetic oligonucleotide
uaauucgccugggugacac

SEQ ID NO: 466530 - RNA, 19 nt, Artificial Sequence
  Description of Artificial Sequence: Synthetic oligonucleotide
aucaagucguuccaccaaa

SEQ ID NO: 466531 - RNA, 19 nt, Artificial Sequence
  Description of Artificial Sequence: Synthetic oligonucleotide
caaacggccuaagaggaac

SEQ ID NO: 466532 - RNA, 19 nt, Artificial Sequence
  Description of Artificial Sequence: Synthetic oligonucleotide
augagacgccuucacagga

SEQ ID NO: 466533 - RNA, 19 nt, Artificial Sequence
  Description of Artificial Sequence: Synthetic oligonucleotide
uucucaggauguauuuauc

SEQ ID NO: 466534 - RNA, 19 nt, Artificial Sequence
  Description of Artificial Sequence: Synthetic oligonucleotide
caaucgcaucauuggaccc

SEQ ID NO: 466535 - RNA, 19 nt, Artificial Sequence
  Description of Artificial Sequence: Synthetic oligonucleotide
cagaaaucuugcucgugug

SEQ ID NO: 466536 - RNA, 19 nt, Artificial Sequence
  Description of Artificial Sequence: Synthetic oligonucleotide
aguuuagccaaacgaucaa

SEQ ID NO: 466537 - RNA, 19 nt, Artificial Sequence
  Description of Artificial Sequence: Synthetic oligonucleotide
uuccuaaagucaccuguau

SEQ ID NO: 466538 - RNA, 19 nt, Artificial Sequence
  Description of Artificial Sequence: Synthetic oligonucleotide
gagucgguuggucacuuuc

SEQ ID NO: 466539 - RNA, 19 nt, Artificial Sequence
  Description of Artificial Sequence: Synthetic oligonucleotide
aauaggcguguugcucugg

SEQ ID NO: 466540 - RNA, 19 nt, Artificial Sequence
  Description of Artificial Sequence: Synthetic oligonucleotide
ugucacggcccucuuacua

SEQ ID NO: 466541 - RNA, 19 nt, Artificial Sequence
  Description of Artificial Sequence: Synthetic oligonucleotide
cauuggacccugaauguga

SEQ ID NO: 466542 - RNA, 19 nt, Artificial Sequence
  Description of Artificial Sequence: Synthetic oligonucleotide
ucgaacuaccagauggcuu

SEQ ID NO: 466543 - RNA, 19 nt, Artificial Sequence
  Description of Artificial Sequence: Synthetic oligonucleotide
gaauccgaggagguauugc

SEQ ID NO: 466544 - RNA, 19 nt, Artificial Sequence
  Description of Artificial Sequence: Synthetic oligonucleotide
guacuugcaccgcuucucc

SEQ ID NO: 466545 - RNA, 19 nt, Artificial Sequence
  Description of Artificial Sequence: Synthetic oligonucleotide
uccccguuguaaagaguag

SEQ ID NO: 466546 - RNA, 19 nt, Artificial Sequence
  Description of Artificial Sequence: Synthetic oligonucleotide
uuuacccgcuccccagagc

SEQ ID NO: 466547 - RNA, 19 nt, Artificial Sequence
  Description of Artificial Sequence: Synthetic oligonucleotide
accgcuucuccagauaucu

SEQ ID NO: 466548 - RNA, 19 nt, Artificial Sequence
  Description of Artificial Sequence: Synthetic oligonucleotide
ggucaauacaucagagucc

SEQ ID NO: 466549 - RNA, 19 nt, Artificial Sequence
  Description of Artificial Sequence: Synthetic oligonucleotide
caguguugaacagagccuc

SEQ ID NO: 466550 - RNA, 19 nt, Artificial Sequence
  Description of Artificial Sequence: Synthetic oligonucleotide
accgucuuugccaugagaa

SEQ ID NO: 466551 - RNA, 19 nt, Artificial Sequence
  Description of Artificial Sequence: Synthetic oligonucleotide
agaccuuugucacggcccu

SEQ ID NO: 466552 - RNA, 19 nt, Artificial Sequence
  Description of Artificial Sequence: Synthetic oligonucleotide
uucgaacuaccagauggcu

SEQ ID NO: 466553 - RNA, 19 nt, Artificial Sequence
  Description of Artificial Sequence: Synthetic oligonucleotide
uccaauaggcguguugcuc

SEQ ID NO: 466554 - RNA, 19 nt, Artificial Sequence
  Description of Artificial Sequence: Synthetic oligonucleotide
uuguacacccuuguucaac

SEQ ID NO: 466555 - RNA, 19 nt, Artificial Sequence
  Description of Artificial Sequence: Synthetic oligonucleotide
uugugaccccucucuaggc

SEQ ID NO: 466556 - RNA, 19 nt, Artificial Sequence
  Description of Artificial Sequence: Synthetic oligonucleotide
ggguugcucucacaaacgg

SEQ ID NO: 466557 - RNA, 19 nt, Artificial Sequence
  Description of Artificial Sequence: Synthetic oligonucleotide
cugcuaucauccuggguac

SEQ ID NO: 466558 - RNA, 19 nt, Artificial Sequence
  Description of Artificial Sequence: Synthetic oligonucleotide
gaguugggaaagucacccc

SEQ ID NO: 466559 - RNA, 19 nt, Artificial Sequence
  Description of Artificial Sequence: Synthetic oligonucleotide
agcuacuccuuucauucaa

SEQ ID NO: 466560 - RNA, 19 nt, Artificial Sequence
  Description of Artificial Sequence: Synthetic oligonucleotide
caucagaguccauaagaga

SEQ ID NO: 466561 - RNA, 19 nt, Artificial Sequence
  Description of Artificial Sequence: Synthetic oligonucleotide
ggacuuauagucugauuuc

SEQ ID NO: 466562 - RNA, 19 nt, Artificial Sequence
  Description of Artificial Sequence: Synthetic oligonucleotide
gcuuauaaggcaacaguac

SEQ ID NO: 466563 - RNA, 19 nt, Artificial Sequence
  Description of Artificial Sequence: Synthetic oligonucleotide
guguuguuagcucuggagu

SEQ ID NO: 466564 - RNA, 19 nt, Artificial Sequence
  Description of Artificial Sequence: Synthetic oligonucleotide
ugugucaaugguggauaug

SEQ ID NO: 466565 - RNA, 19 nt, Artificial Sequence
  Description of Artificial Sequence: Synthetic oligonucleotide
aggguugcucucacaaacg

SEQ ID NO: 466566 - RNA, 19 nt, Artificial Sequence
  Description of Artificial Sequence: Synthetic oligonucleotide
gauagccugugcccaggug

SEQ ID NO: 466567 - RNA, 19 nt, Artificial Sequence
  Description of Artificial Sequence: Synthetic oligonucleotide
agcagaugaaauggaguca

SEQ ID NO: 466568 - RNA, 19 nt, Artificial Sequence
  Description of Artificial Sequence: Synthetic oligonucleotide
caggacgacucuucugggc

SEQ ID NO: 466569 - RNA, 19 nt, Artificial Sequence
  Description of Artificial Sequence: Synthetic oligonucleotide
cauuugaggauagccugug

SEQ ID NO: 466570 - RNA, 19 nt, Artificial Sequence
  Description of Artificial Sequence: Synthetic oligonucleotide
uugcuguacuugcaccgcu

SEQ ID NO: 466571 - RNA, 19 nt, Artificial Sequence
  Description of Artificial Sequence: Synthetic oligonucleotide
aagucuggggcaaucgcau

SEQ ID NO: 466572 - RNA, 19 nt, Artificial Sequence
  Description of Artificial Sequence: Synthetic oligonucleotide
agucuuaugucagucccaa

SEQ ID NO: 466573 - RNA, 19 nt, Artificial Sequence
  Description of Artificial Sequence: Synthetic oligonucleotide
auaggcguguugcucugga

SEQ ID NO: 466574 - RNA, 19 nt, Artificial Sequence
  Description of Artificial Sequence: Synthetic oligonucleotide
agugaaugugugaugggau

SEQ ID NO: 466575 - RNA, 19 nt, Artificial Sequence
  Description of Artificial Sequence: Synthetic oligonucleotide
aggauguauuuaucuaauu

SEQ ID NO: 466576 - RNA, 19 nt, Artificial Sequence
  Description of Artificial Sequence: Synthetic oligonucleotide
ggcguguugcucuggacag

SEQ ID NO: 466577 - RNA, 19 nt, Artificial Sequence
  Description of Artificial Sequence: Synthetic oligonucleotide
aguagaguccaaggucaag

SEQ ID NO: 466578 - RNA, 19 nt, Artificial Sequence
  Description of Artificial Sequence: Synthetic oligonucleotide
uuuccccguuguaaagagu

SEQ ID NO: 466579 - RNA, 19 nt, Artificial Sequence
  Description of Artificial Sequence: Synthetic oligonucleotide
cugagagucuagaauccga

SEQ ID NO: 466580 - RNA, 19 nt, Artificial Sequence
  Description of Artificial Sequence: Synthetic oligonucleotide
aacuaccagcagaugaaau

SEQ ID NO: 466581 - RNA, 19 nt, Artificial Sequence
  Description of Artificial Sequence: Synthetic oligonucleotide
uggagcuacuccuuucauu

SEQ ID NO: 466582 - RNA, 19 nt, Artificial Sequence
  Description of Artificial Sequence: Synthetic oligonucleotide
ucuagaauccgaggaggua

SEQ ID NO: 466583 - RNA, 19 nt, Artificial Sequence
  Description of Artificial Sequence: Synthetic oligonucleotide
uggugugcucagaagucau

SEQ ID NO: 466584 - RNA, 19 nt, Artificial Sequence
  Description of Artificial Sequence: Synthetic oligonucleotide
uuccuaggcuuugaggaaa

SEQ ID NO: 466585 - RNA, 19 nt, Artificial Sequence
  Description of Artificial Sequence: Synthetic oligonucleotide
aucuucgaacuaccagaug

SEQ ID NO: 466586 - RNA, 19 nt, Artificial Sequence
  Description of Artificial Sequence: Synthetic oligonucleotide
ccauaagagaauuagugcu

SEQ ID NO: 466587 - RNA, 19 nt, Artificial Sequence
  Description of Artificial Sequence: Synthetic oligonucleotide
ggaucaaccgggcuguguc

SEQ ID NO: 466588 - RNA, 19 nt, Artificial Sequence
  Description of Artificial Sequence: Synthetic oligonucleotide
aaucaaaauccggcuguuu

SEQ ID NO: 466589 - RNA, 19 nt, Artificial Sequence
  Description of Artificial Sequence: Synthetic oligonucleotide
agcaacacugcuguauaau

SEQ ID NO: 466590 - RNA, 19 nt, Artificial Sequence
  Description of Artificial Sequence: Synthetic oligonucleotide
gguucaaaccaggcgauac

SEQ ID NO: 466591 - RNA, 19 nt, Artificial Sequence
  Description of Artificial Sequence: Synthetic oligonucleotide
agccgguaggacuuauagu

SEQ ID NO: 466592 - RNA, 19 nt, Artificial Sequence
  Description of Artificial Sequence: Synthetic oligonucleotide
acggccuaagaggaacccg

SEQ ID NO: 466593 - RNA, 19 nt, Artificial Sequence
  Description of Artificial Sequence: Synthetic oligonucleotide
gaucaaccgggcuguguca

SEQ ID NO: 466594 - RNA, 19 nt, Artificial Sequence
  Description of Artificial Sequence: Synthetic oligonucleotide
uacagucuuuccuggccaa

SEQ ID NO: 466595 - RNA, 19 nt, Artificial Sequence
  Description of Artificial Sequence: Synthetic oligonucleotide
guuguuagcucuggaguga

SEQ ID NO: 466596 - RNA, 19 nt, Artificial Sequence
  Description of Artificial Sequence: Synthetic oligonucleotide
cauccuggguacuuucuga

SEQ ID NO: 466597 - RNA, 19 nt, Artificial Sequence
  Description of Artificial Sequence: Synthetic oligonucleotide
uggcagaaaucuugcucgu

SEQ ID NO: 466598 - RNA, 19 nt, Artificial Sequence
  Description of Artificial Sequence: Synthetic oligonucleotide
uugguuguccagucacaau

SEQ ID NO: 466599 - RNA, 19 nt, Artificial Sequence
  Description of Artificial Sequence: Synthetic oligonucleotide
aauucgccugggugacaca

SEQ ID NO: 466600 - RNA, 19 nt, Artificial Sequence
  Description of Artificial Sequence: Synthetic oligonucleotide
gggcuguaaaucuuaggca

SEQ ID NO: 466601 - RNA, 19 nt, Artificial Sequence
  Description of Artificial Sequence: Synthetic oligonucleotide
caauaggcguguugcucug

SEQ ID NO: 466602 - RNA, 19 nt, Artificial Sequence
  Description of Artificial Sequence: Synthetic oligonucleotide
agcacccugcuuuuccuaa

SEQ ID NO: 466603 - RNA, 19 nt, Artificial Sequence
  Description of Artificial Sequence: Synthetic oligonucleotide
uagcaacacugcuguauaa

SEQ ID NO: 466604 - RNA, 19 nt, Artificial Sequence
  Description of Artificial Sequence: Synthetic oligonucleotide
auguugggacuaucuguga

SEQ ID NO: 466605 - RNA, 19 nt, Artificial Sequence
  Description of Artificial Sequence: Synthetic oligonucleotide
ugaccgucuuugccaugag

SEQ ID NO: 466606 - RNA, 19 nt, Artificial Sequence
  Description of Artificial Sequence: Synthetic oligonucleotide
accuguauugugaccccuc

SEQ ID NO: 466607 - RNA, 19 nt, Artificial Sequence
  Description of Artificial Sequence: Synthetic oligonucleotide
cucaauagugguaucugau

SEQ ID NO: 466608 - RNA, 19 nt, Artificial Sequence
  Description of Artificial Sequence: Synthetic oligonucleotide
cugagcucgcagccgguag

SEQ ID NO: 466609 - RNA, 19 nt, Artificial Sequence
  Description of Artificial Sequence: Synthetic oligonucleotide
aggugcacucuugcuguac

SEQ ID NO: 466610 - RNA, 19 nt, Artificial Sequence
  Description of Artificial Sequence: Synthetic oligonucleotide
cucuguugauuagcaacac

SEQ ID NO: 466611 - RNA, 19 nt, Artificial Sequence
  Description of Artificial Sequence: Synthetic oligonucleotide
cuggaugauggaaguaaaa

SEQ ID NO: 466612 - RNA, 19 nt, Artificial Sequence
  Description of Artificial Sequence: Synthetic oligonucleotide
agaauccgaggagguauug

SEQ ID NO: 466613 - RNA, 19 nt, Artificial Sequence
  Description of Artificial Sequence: Synthetic oligonucleotide
aucgcaucauuggacccug

SEQ ID NO: 466614 - RNA, 19 nt, Artificial Sequence
  Description of Artificial Sequence: Synthetic oligonucleotide
auaguacaucuucgaacua

SEQ ID NO: 466615 - RNA, 19 nt, Artificial Sequence
  Description of Artificial Sequence: Synthetic oligonucleotide
gauauggagcuacuccuuu

SEQ ID NO: 466616 - RNA, 19 nt, Artificial Sequence
  Description of Artificial Sequence: Synthetic oligonucleotide
gucuuaugucagucccaag

SEQ ID NO: 466617 - RNA, 19 nt, Artificial Sequence
  Description of Artificial Sequence: Synthetic oligonucleotide
uggaaagucuggggcaauc

SEQ ID NO: 466618 - RNA, 19 nt, Artificial Sequence
  Description of Artificial Sequence: Synthetic oligonucleotide
uguaaaucuuaggcagguu

SEQ ID NO: 466619 - RNA, 19 nt, Artificial Sequence
  Description of Artificial Sequence: Synthetic oligonucleotide
gugacacauacagucuuuc

SEQ ID NO: 466620 - RNA, 19 nt, Artificial Sequence
  Description of Artificial Sequence: Synthetic oligonucleotide
auucgccugggugacacau

SEQ ID NO: 466621 - RNA, 19 nt, Artificial Sequence
  Description of Artificial Sequence: Synthetic oligonucleotide
ggcuuauaaggcaacagua

SEQ ID NO: 466622 - RNA, 19 nt, Artificial Sequence
  Description of Artificial Sequence: Synthetic oligonucleotide
gaccgucuuugccaugaga

SEQ ID NO: 466623 - RNA, 19 nt, Artificial Sequence
  Description of Artificial Sequence: Synthetic oligonucleotide
ggagguauugcuggcauaa

SEQ ID NO: 466624 - RNA, 19 nt, Artificial Sequence
  Description of Artificial Sequence: Synthetic oligonucleotide
gaaugugugaugggauucu

SEQ ID NO: 466625 - RNA, 19 nt, Artificial Sequence
  Description of Artificial Sequence: Synthetic oligonucleotide
cuuggcugaccugaagaca

SEQ ID NO: 466626 - RNA, 19 nt, Artificial Sequence
  Description of Artificial Sequence: Synthetic oligonucleotide
ccuucuguaugcuuaaugu

SEQ ID NO: 466627 - RNA, 19 nt, Artificial Sequence
  Description of Artificial Sequence: Synthetic oligonucleotide
cacggcccucuuacuauag

SEQ ID NO: 466628 - RNA, 19 nt, Artificial Sequence
  Description of Artificial Sequence: Synthetic oligonucleotide
gaaauaugauuugccuccu

SEQ ID NO: 466629 - RNA, 19 nt, Artificial Sequence
  Description of Artificial Sequence: Synthetic oligonucleotide
cucacuagaacugggaguu

SEQ ID NO: 466630 - RNA, 19 nt, Artificial Sequence
  Description of Artificial Sequence: Synthetic oligonucleotide
cgauuuauagugcugagcu

SEQ ID NO: 466631 - RNA, 19 nt, Artificial Sequence
  Description of Artificial Sequence: Synthetic oligonucleotide
auggagcuacuccuuucau

SEQ ID NO: 466632 - RNA, 19 nt, Artificial Sequence
  Description of Artificial Sequence: Synthetic oligonucleotide
ugcaccgcuucuccagaua

SEQ ID NO: 466633 - RNA, 19 nt, Artificial Sequence
  Description of Artificial Sequence: Synthetic oligonucleotide
cugaccgucuuugccauga

SEQ ID NO: 466634 - RNA, 19 nt, Artificial Sequence
  Description of Artificial Sequence: Synthetic oligonucleotide
guauugugaccccucucua

SEQ ID NO: 466635 - RNA, 19 nt, Artificial Sequence
  Description of Artificial Sequence: Synthetic oligonucleotide
gagcucucaauagugguau

SEQ ID NO: 466636 - RNA, 19 nt, Artificial Sequence
  Description of Artificial Sequence: Synthetic oligonucleotide
uucaggcgcuuuacccgcu

SEQ ID NO: 466637 - RNA, 19 nt, Artificial Sequence
  Description of Artificial Sequence: Synthetic oligonucleotide
ucacggcccucuuacuaua

SEQ ID NO: 466638 - RNA, 19 nt, Artificial Sequence
  Description of Artificial Sequence: Synthetic oligonucleotide
caggauguauuuaucuaau

SEQ ID NO: 466639 - RNA, 19 nt, Artificial Sequence
  Description of Artificial Sequence: Synthetic oligonucleotide
caaaauccggcuguuuucu

SEQ ID NO: 466640 - RNA, 19 nt, Artificial Sequence
  Description of Artificial Sequence: Synthetic oligonucleotide
acggcccucuuacuauaga

SEQ ID NO: 466641 - RNA, 19 nt, Artificial Sequence
  Description of Artificial Sequence: Synthetic oligonucleotide
gaagacagagugaguggua

SEQ ID NO: 466642 - RNA, 19 nt, Artificial Sequence
  Description of Artificial Sequence: Synthetic oligonucleotide
gagacgccuucacaggagu

SEQ ID NO: 466643 - RNA, 19 nt, Artificial Sequence
  Description of Artificial Sequence: Synthetic oligonucleotide
gagucagaagaaauaugau

SEQ ID NO: 466644 - RNA, 19 nt, Artificial Sequence
  Description of Artificial Sequence: Synthetic oligonucleotide
ugcucguguggcaggugua

SEQ ID NO: 466645 - RNA, 19 nt, Artificial Sequence
  Description of Artificial Sequence: Synthetic oligonucleotide
aacuugccucucuguugau

SEQ ID NO: 466646 - RNA, 19 nt, Artificial Sequence
  Description of Artificial Sequence: Synthetic oligonucleotide
cuugcaccgcuucuccaga

SEQ ID NO: 466647 - RNA, 19 nt, Artificial Sequence
  Description of Artificial Sequence: Synthetic oligonucleotide
cuggugugcucagaaguca

SEQ ID NO: 466648 - RNA, 19 nt, Artificial Sequence
  Description of Artificial Sequence: Synthetic oligonucleotide
ccgucuuugccaugagaag

SEQ ID NO: 466649 - RNA, 19 nt, Artificial Sequence
  Description of Artificial Sequence: Synthetic oligonucleotide
acccgcuccccagagcgag

SEQ ID NO: 466650 - RNA, 19 nt, Artificial Sequence
  Description of Artificial Sequence: Synthetic oligonucleotide
gauuagcaacacugcugua

SEQ ID NO: 466651 - RNA, 19 nt, Artificial Sequence
  Description of Artificial Sequence: Synthetic oligonucleotide
ucguuccaccaaagagagu

SEQ ID NO: 466652 - RNA, 19 nt, Artificial Sequence
  Description of Artificial Sequence: Synthetic oligonucleotide
uucgccugggugacacaua

SEQ ID NO: 466653 - RNA, 19 nt, Artificial Sequence
  Description of Artificial Sequence: Synthetic oligonucleotide
cuguaaaucuuaggcaggu

SEQ ID NO: 466654 - RNA, 19 nt, Artificial Sequence
  Description of Artificial Sequence: Synthetic oligonucleotide
ugcuaucauccuggguacu

SEQ ID NO: 466655 - RNA, 19 nt, Artificial Sequence
  Description of Artificial Sequence: Synthetic oligonucleotide
ucaaccgggcugugucaau

SEQ ID NO: 466656 - RNA, 19 nt, Artificial Sequence
  Description of Artificial Sequence: Synthetic oligonucleotide
ccugaaccaguaacuucag

SEQ ID NO: 466657 - RNA, 19 nt, Artificial Sequence
  Description of Artificial Sequence: Synthetic oligonucleotide
ggcuuugaggaaagcaguc

SEQ ID NO: 466658 - RNA, 19 nt, Artificial Sequence
  Description of Artificial Sequence: Synthetic oligonucleotide
cuuguacacccuuguucaa

SEQ ID NO: 466659 - RNA, 19 nt, Artificial Sequence
  Description of Artificial Sequence: Synthetic oligonucleotide
uugcaccgcuucuccagau

SEQ ID NO: 466660 - RNA, 19 nt, Artificial Sequence
  Description of Artificial Sequence: Synthetic oligonucleotide
cgaacuaccagauggcuua

SEQ ID NO: 466661 - RNA, 19 nt, Artificial Sequence
  Description of Artificial Sequence: Synthetic oligonucleotide
caccgcuucuccagauauc

SEQ ID NO: 466662 - RNA, 19 nt, Artificial Sequence
  Description of Artificial Sequence: Synthetic oligonucleotide
gagaugaaaucaggucugu

SEQ ID NO: 466663 - RNA, 19 nt, Artificial Sequence
  Description of Artificial Sequence: Synthetic oligonucleotide
accaucccgaguguauuuu

SEQ ID NO: 466664 - RNA, 19 nt, Artificial Sequence
  Description of Artificial Sequence: Synthetic oligonucleotide
cgguaggacuuauagucug

SEQ ID NO: 466665 - RNA, 19 nt, Artificial Sequence
  Description of Artificial Sequence: Synthetic oligonucleotide
ggcaacaguacuggcugac

SEQ ID NO: 466666 - RNA, 19 nt, Artificial Sequence
  Description of Artificial Sequence: Synthetic oligonucleotide
gguaggacuuauagucuga

SEQ ID NO: 466667 - RNA, 19 nt, Artificial Sequence
  Description of Artificial Sequence: Synthetic oligonucleotide
agcucgcagccgguaggac

SEQ ID NO: 466668 - RNA, 19 nt, Artificial Sequence
  Description of Artificial Sequence: Synthetic oligonucleotide
gaguagaguccaaggucaa

SEQ ID NO: 466669 - RNA, 19 nt, Artificial Sequence
  Description of Artificial Sequence: Synthetic oligonucleotide
ugguucaaaccaggcgaua

SEQ ID NO: 466670 - RNA, 19 nt, Artificial Sequence
  Description of Artificial Sequence: Synthetic oligonucleotide
ggcccucuuacuauagauc

SEQ ID NO: 466671 - RNA, 19 nt, Artificial Sequence
  Description of Artificial Sequence: Synthetic oligonucleotide
ucgcaucauuggacccuga

SEQ ID NO: 466672 - RNA, 19 nt, Artificial Sequence
  Description of Artificial Sequence: Synthetic oligonucleotide
gacuaucugugaggagcuc

SEQ ID NO: 466673 - RNA, 19 nt, Artificial Sequence
  Description of Artificial Sequence: Synthetic oligonucleotide
gucacggcccucuuacuau

SEQ ID NO: 466674 - RNA, 19 nt, Artificial Sequence
  Description of Artificial Sequence: Synthetic oligonucleotide
ggcagaaaucuugcucgug

SEQ ID NO: 466675 - RNA, 19 nt, Artificial Sequence
  Description of Artificial Sequence: Synthetic oligonucleotide
gagcucgcagccgguagga

SEQ ID NO: 466676 - RNA, 19 nt, Artificial Sequence
  Description of Artificial Sequence: Synthetic oligonucleotide
gucuagaauccgaggaggu

SEQ ID NO: 466677 - RNA, 19 nt, Artificial Sequence
  Description of Artificial Sequence: Synthetic oligonucleotide
cacugcuguauaauuuaau

SEQ ID NO: 466678 - RNA, 19 nt, Artificial Sequence
  Description of Artificial Sequence: Synthetic oligonucleotide
gggaaagucaccccaccau

SEQ ID NO: 466679 - RNA, 19 nt, Artificial Sequence
  Description of Artificial Sequence: Synthetic oligonucleotide
ccaauaggcguguugcucu

SEQ ID NO: 466680 - RNA, 19 nt, Artificial Sequence
  Description of Artificial Sequence: Synthetic oligonucleotide
ggacccugaaugugagcuc

SEQ ID NO: 466681 - RNA, 19 nt, Artificial Sequence
  Description of Artificial Sequence: Synthetic oligonucleotide
gugcacuguguuguuagcu

SEQ ID NO: 466682 - RNA, 19 nt, Artificial Sequence
  Description of Artificial Sequence: Synthetic oligonucleotide
ccaaacgaucaagucguuc

SEQ ID NO: 466683 - RNA, 19 nt, Artificial Sequence
  Description of Artificial Sequence: Synthetic oligonucleotide
gugguugagaggucaucau

SEQ ID NO: 466684 - RNA, 19 nt, Artificial Sequence
  Description of Artificial Sequence: Synthetic oligonucleotide
cugguucaaaccaggcgau

SEQ ID NO: 466685 - RNA, 19 nt, Artificial Sequence
  Description of Artificial Sequence: Synthetic oligonucleotide
cucuugugccuagcauuuc

SEQ ID NO: 466686 - RNA, 19 nt, Artificial Sequence
  Description of Artificial Sequence: Synthetic oligonucleotide
ggcgauaccagggcuguaa

SEQ ID NO: 466687 - RNA, 19 nt, Artificial Sequence
  Description of Artificial Sequence: Synthetic oligonucleotide
accugaagacagagugagu

SEQ ID NO: 466688 - RNA, 19 nt, Artificial Sequence
  Description of Artificial Sequence: Synthetic oligonucleotide
cuugcucguguggcaggug

SEQ ID NO: 466689 - RNA, 19 nt, Artificial Sequence
  Description of Artificial Sequence: Synthetic oligonucleotide
ggugcacucuugcuguacu

SEQ ID NO: 466690 - RNA, 19 nt, Artificial Sequence
  Description of Artificial Sequence: Synthetic oligonucleotide
gcaucauuggacccugaau

SEQ ID NO: 466691 - RNA, 19 nt, Artificial Sequence
  Description of Artificial Sequence: Synthetic oligonucleotide
gcgagagaugaaaucaggu

SEQ ID NO: 466692 - RNA, 19 nt, Artificial Sequence
  Description of Artificial Sequence: Synthetic oligonucleotide
auggugcacuguguuguua

SEQ ID NO: 466693 - RNA, 19 nt, Artificial Sequence
  Description of Artificial Sequence: Synthetic oligonucleotide
gacucauggcagaaaucuu

SEQ ID NO: 466694 - RNA, 19 nt, Artificial Sequence
  Description of Artificial Sequence: Synthetic oligonucleotide
aggagucgguuggucacuu

SEQ ID NO: 466695 - RNA, 19 nt, Artificial Sequence
  Description of Artificial Sequence: Synthetic oligonucleotide
cugugucaaugguggauau

SEQ ID NO: 466696 - RNA, 19 nt, Artificial Sequence
  Description of Artificial Sequence: Synthetic oligonucleotide
guacacccuuguucaacau

SEQ ID NO: 466697 - RNA, 19 nt, Artificial Sequence
  Description of Artificial Sequence: Synthetic oligonucleotide
agacgccuucacaggaguu

SEQ ID NO: 466698 - RNA, 19 nt, Artificial Sequence
  Description of Artificial Sequence: Synthetic oligonucleotide
gcgauaccagggcuguaaa

SEQ ID NO: 466699 - RNA, 19 nt, Artificial Sequence
  Description of Artificial Sequence: Synthetic oligonucleotide
gcaccgcuucuccagauau

SEQ ID NO: 466700 - RNA, 19 nt, Artificial Sequence
  Description of Artificial Sequence: Synthetic oligonucleotide
ccucucuaggcucuuacau

SEQ ID NO: 466701 - RNA, 19 nt, Artificial Sequence
  Description of Artificial Sequence: Synthetic oligonucleotide
cccagagcgagagaugaaa

SEQ ID NO: 466702 - RNA, 19 nt, Artificial Sequence
  Description of Artificial Sequence: Synthetic oligonucleotide
ccccguuguaaagaguaga

SEQ ID NO: 466703 - RNA, 19 nt, Artificial Sequence
  Description of Artificial Sequence: Synthetic oligonucleotide
caguacuggcugaccgucu

SEQ ID NO: 466704 - RNA, 19 nt, Artificial Sequence
  Description of Artificial Sequence: Synthetic oligonucleotide
cuuccggaagcugcucaua

SEQ ID NO: 466705 - RNA, 19 nt, Artificial Sequence
  Description of Artificial Sequence: Synthetic oligonucleotide
gaacuaccagauggcuuau

SEQ ID NO: 466706 - RNA, 19 nt, Artificial Sequence
  Description of Artificial Sequence: Synthetic oligonucleotide
cacggcucaugcauugcuu

SEQ ID NO: 466707 - RNA, 19 nt, Artificial Sequence
  Description of Artificial Sequence: Synthetic oligonucleotide
gcugaccgucuuugccaug

SEQ ID NO: 466708 - RNA, 19 nt, Artificial Sequence
  Description of Artificial Sequence: Synthetic oligonucleotide
caggcgcccacggcucaug

SEQ ID NO: 466709 - RNA, 19 nt, Artificial Sequence
  Description of Artificial Sequence: Synthetic oligonucleotide
ccgguaggacuuauagucu

SEQ ID NO: 466710 - RNA, 19 nt, Artificial Sequence
  Description of Artificial Sequence: Synthetic oligonucleotide
caccaucccgaguguauuu

SEQ ID NO: 466711 - RNA, 19 nt, Artificial Sequence
  Description of Artificial Sequence: Synthetic oligonucleotide
ggauagccugugcccaggu

SEQ ID NO: 466712 - RNA, 19 nt, Artificial Sequence
  Description of Artificial Sequence: Synthetic oligonucleotide
ccagagcgagagaugaaau

SEQ ID NO: 466713 - RNA, 19 nt, Artificial Sequence
  Description of Artificial Sequence: Synthetic oligonucleotide
gcgcccacggcucaugcau

SEQ ID NO: 466714 - RNA, 19 nt, Artificial Sequence
  Description of Artificial Sequence: Synthetic oligonucleotide
ggcgcccacggcucaugca

SEQ ID NO: 466715 - RNA, 19 nt, Artificial Sequence
  Description of Artificial Sequence: Synthetic oligonucleotide
cucguguggcagguguacu

SEQ ID NO: 466716 - RNA, 19 nt, Artificial Sequence
  Description of Artificial Sequence: Synthetic oligonucleotide
gcuaucauccuggguacuu

SEQ ID NO: 466717 - RNA, 19 nt, Artificial Sequence
  Description of Artificial Sequence: Synthetic oligonucleotide
cccacggcucaugcauugc

SEQ ID NO: 466718 - RNA, 19 nt, Artificial Sequence
  Description of Artificial Sequence: Synthetic oligonucleotide
cccucuuacuauagauccu

SEQ ID NO: 466719 - RNA, 19 nt, Artificial Sequence
  Description of Artificial Sequence: Synthetic oligonucleotide
ccguuguaaagaguagagu

SEQ ID NO: 466720 - RNA, 19 nt, Artificial Sequence
  Description of Artificial Sequence: Synthetic oligonucleotide
caggagucgguuggucacu

SEQ ID NO: 466721 - RNA, 19 nt, Artificial Sequence
  Description of Artificial Sequence: Synthetic oligonucleotide
ucgcagccgguaggacuua

SEQ ID NO: 466722 - RNA, 19 nt, Artificial Sequence
  Description of Artificial Sequence: Synthetic oligonucleotide
cgcaucauuggacccugaa

SEQ ID NO: 466723 - RNA, 19 nt, Artificial Sequence
  Description of Artificial Sequence: Synthetic oligonucleotide
ccgcucacucuggaauaug

SEQ ID NO: 466724 - RNA, 19 nt, Artificial Sequence
  Description of Artificial Sequence: Synthetic oligonucleotide
aggcgauaccagggcugua

SEQ ID NO: 466725 - RNA, 19 nt, Artificial Sequence
  Description of Artificial Sequence: Synthetic oligonucleotide
gucgcuccugaaacuuauu

SEQ ID NO: 466726 - RNA, 19 nt, Artificial Sequence
  Description of Artificial Sequence: Synthetic oligonucleotide
cggcccucuuacuauagau

SEQ ID NO: 466727 - RNA, 19 nt, Artificial Sequence
  Description of Artificial Sequence: Synthetic oligonucleotide
ggagucgguuggucacuuu

SEQ ID NO: 466728 - RNA, 19 nt, Artificial Sequence
  Description of Artificial Sequence: Synthetic oligonucleotide
cccaggcgcccacggcuca

SEQ ID NO: 466729 - RNA, 19 nt, Artificial Sequence
  Description of Artificial Sequence: Synthetic oligonucleotide
cccgcucacucuggaauau

SEQ ID NO: 466730 - RNA, 19 nt, Artificial Sequence
  Description of Artificial Sequence: Synthetic oligonucleotide
gccaaacgaucaagucguu

SEQ ID NO: 466731 - RNA, 19 nt, Artificial Sequence
  Description of Artificial Sequence: Synthetic oligonucleotide
cgcagccgguaggacuuau

SEQ ID NO: 466732 - RNA, 19 nt, Artificial Sequence
  Description of Artificial Sequence: Synthetic oligonucleotide
aaauacaacagcuucaggg

SEQ ID NO: 466733 - RNA, 19 nt, Artificial Sequence
  Description of Artificial Sequence: Synthetic oligonucleotide
ucuagcaccacuaagaaug

SEQ ID NO: 466734 - RNA, 19 nt, Artificial Sequence
  Description of Artificial Sequence: Synthetic oligonucleotide
auaguuaaaacuaaguugg

SEQ ID NO: 466735 - RNA, 19 nt, Artificial Sequence
  Description of Artificial Sequence: Synthetic oligonucleotide
ucuaccauaaauacaacag

SEQ ID NO: 466736 - RNA, 19 nt, Artificial Sequence
  Description of Artificial Sequence: Synthetic oligonucleotide
uuaaggucacauuaaaagg

SEQ ID NO: 466737 - RNA, 19 nt, Artificial Sequence
  Description of Artificial Sequence: Synthetic oligonucleotide
uguauaacggucaauguca

SEQ ID NO: 466738 - RNA, 19 nt, Artificial Sequence
  Description of Artificial Sequence: Synthetic oligonucleotide
auagauauauaagucacgc

SEQ ID NO: 466739 - RNA, 19 nt, Artificial Sequence
  Description of Artificial Sequence: Synthetic oligonucleotide
ucaggaauaguucucauga

SEQ ID NO: 466740 - RNA, 19 nt, Artificial Sequence
  Description of Artificial Sequence: Synthetic oligonucleotide
gaucccaaagcccugaagg

SEQ ID NO: 466741 - RNA, 19 nt, Artificial Sequence
  Description of Artificial Sequence: Synthetic oligonucleotide
uucuaaauaguuaaaacua

SEQ ID NO: 466742 - RNA, 19 nt, Artificial Sequence
  Description of Artificial Sequence: Synthetic oligonucleotide
auuacucaagguuccaggc

SEQ ID NO: 466743 - RNA, 19 nt, Artificial Sequence
  Description of Artificial Sequence: Synthetic oligonucleotide
ggguuuaggacauagaagg

SEQ ID NO: 466744 - RNA, 19 nt, Artificial Sequence
  Description of Artificial Sequence: Synthetic oligonucleotide
ugguauaucuuuuauuaag

SEQ ID NO: 466745 - RNA, 19 nt, Artificial Sequence
  Description of Artificial Sequence: Synthetic oligonucleotide
aauaagauacuugagucga

SEQ ID NO: 466746 - RNA, 19 nt, Artificial Sequence
  Description of Artificial Sequence: Synthetic oligonucleotide
aaacuaaguugguagguag

SEQ ID NO: 466747 - RNA, 19 nt, Artificial Sequence
  Description of Artificial Sequence: Synthetic oligonucleotide
auaacggucaaugucacgg

SEQ ID NO: 466748 - RNA, 19 nt, Artificial Sequence
  Description of Artificial Sequence: Synthetic oligonucleotide
uauuacucaagguuccagg

SEQ ID NO: 466749 - RNA, 19 nt, Artificial Sequence
  Description of Artificial Sequence: Synthetic oligonucleotide
caaagcuucuguauaacgg

SEQ ID NO: 466750 - RNA, 19 nt, Artificial Sequence
  Description of Artificial Sequence: Synthetic oligonucleotide
auauaagucacgcucuguc

SEQ ID NO: 466751 - RNA, 19 nt, Artificial Sequence
  Description of Artificial Sequence: Synthetic oligonucleotide
gauauucccagccacauuc

SEQ ID NO: 466752 - RNA, 19 nt, Artificial Sequence
  Description of Artificial Sequence: Synthetic oligonucleotide
aaagcuucuguauaacggu

SEQ ID NO: 466753 - RNA, 19 nt, Artificial Sequence
  Description of Artificial Sequence: Synthetic oligonucleotide
ugacagguuauugugaggg

SEQ ID NO: 466754 - RNA, 19 nt, Artificial Sequence
  Description of Artificial Sequence: Synthetic oligonucleotide
ugugccuuaggccucacag

SEQ ID NO: 466755 - RNA, 19 nt, Artificial Sequence
  Description of Artificial Sequence: Synthetic oligonucleotide
ugucuuagaauucucuucu

SEQ ID NO: 466756 - RNA, 19 nt, Artificial Sequence
  Description of Artificial Sequence: Synthetic oligonucleotide
gucacggucagucacaucc

SEQ ID NO: 466757 - RNA, 19 nt, Artificial Sequence
  Description of Artificial Sequence: Synthetic oligonucleotide
ucuaaauaguuaaaacuaa

SEQ ID NO: 466758 - RNA, 19 nt, Artificial Sequence
  Description of Artificial Sequence: Synthetic oligonucleotide
gaagguauuccguggaucc

SEQ ID NO: 466759 - RNA, 19 nt, Artificial Sequence
  Description of Artificial Sequence: Synthetic oligonucleotide
agagcagucggucugcugg

SEQ ID NO: 466760 - RNA, 19 nt, Artificial Sequence
  Description of Artificial Sequence: Synthetic oligonucleotide
accaauaagauacuugagu

SEQ ID NO: 466761 - RNA, 19 nt, Artificial Sequence
  Description of Artificial Sequence: Synthetic oligonucleotide
cuucacaguaacuggaggg

SEQ ID NO: 466762 - RNA, 19 nt, Artificial Sequence
  Description of Artificial Sequence: Synthetic oligonucleotide
gauacuugagucgaggagc

SEQ ID NO: 466763 - RNA, 19 nt, Artificial Sequence
  Description of Artificial Sequence: Synthetic oligonucleotide
uucuguauaacggucaaug

SEQ ID NO: 466764 - RNA, 19 nt, Artificial Sequence
  Description of Artificial Sequence: Synthetic oligonucleotide
uggauagcauccaaggcag

SEQ ID NO: 466765 - RNA, 19 nt, Artificial Sequence
  Description of Artificial Sequence: Synthetic oligonucleotide
uucacauucuccuaugggu

SEQ ID NO: 466766 - RNA, 19 nt, Artificial Sequence
  Description of Artificial Sequence: Synthetic oligonucleotide
agaguauuacucaagguuc

SEQ ID NO: 466767 - RNA, 19 nt, Artificial Sequence
  Description of Artificial Sequence: Synthetic oligonucleotide
acucuuguaagugggaggc

SEQ ID NO: 466768 - RNA, 19 nt, Artificial Sequence
  Description of Artificial Sequence: Synthetic oligonucleotide
aggagaguauuacucaagg

SEQ ID NO: 466769 - RNA, 19 nt, Artificial Sequence
  Description of Artificial Sequence: Synthetic oligonucleotide
gaucaauggguacaggggc

SEQ ID NO: 466770 - RNA, 19 nt, Artificial Sequence
  Description of Artificial Sequence: Synthetic oligonucleotide
ccagagauuaccuagaaac

SEQ ID NO: 466771 - RNA, 19 nt, Artificial Sequence
  Description of Artificial Sequence: Synthetic oligonucleotide
ucuaggaccaacacaagau

SEQ ID NO: 466772 - RNA, 19 nt, Artificial Sequence
  Description of Artificial Sequence: Synthetic oligonucleotide
uaggccauaggcuacaggu

SEQ ID NO: 466773 - RNA, 19 nt, Artificial Sequence
  Description of Artificial Sequence: Synthetic oligonucleotide
acuggcucgaaaucucucc

SEQ ID NO: 466774 - RNA, 19 nt, Artificial Sequence
  Description of Artificial Sequence: Synthetic oligonucleotide
ucuccuauggguaggugag

SEQ ID NO: 466775 - RNA, 19 nt, Artificial Sequence
  Description of Artificial Sequence: Synthetic oligonucleotide
aucccgguggcccagacac

SEQ ID NO: 466776 - RNA, 19 nt, Artificial Sequence
  Description of Artificial Sequence: Synthetic oligonucleotide
uucuaccauaaauacaaca

SEQ ID NO: 466777 - RNA, 19 nt, Artificial Sequence
  Description of Artificial Sequence: Synthetic oligonucleotide
cauagaagguauuccgugg

SEQ ID NO: 466778 - RNA, 19 nt, Artificial Sequence
  Description of Artificial Sequence: Synthetic oligonucleotide
ucuagugccagccucccug

SEQ ID NO: 466779 - RNA, 19 nt, Artificial Sequence
  Description of Artificial Sequence: Synthetic oligonucleotide
acuugagcacgauaccagc

SEQ ID NO: 466780 - RNA, 19 nt, Artificial Sequence
  Description of Artificial Sequence: Synthetic oligonucleotide
cucagugaguccgagaugg

SEQ ID NO: 466781 - RNA, 19 nt, Artificial Sequence
  Description of Artificial Sequence: Synthetic oligonucleotide
uaagauacuugagucgagg

SEQ ID NO: 466782 - RNA, 19 nt, Artificial Sequence
  Description of Artificial Sequence: Synthetic oligonucleotide
uacucaagguuccaggcug

SEQ ID NO: 466783 - RNA, 19 nt, Artificial Sequence
  Description of Artificial Sequence: Synthetic oligonucleotide
uuauugugaggguuuagga

SEQ ID NO: 466784 - RNA, 19 nt, Artificial Sequence
  Description of Artificial Sequence: Synthetic oligonucleotide
aaucacuccacuggggauc

SEQ ID NO: 466785 - RNA, 19 nt, Artificial Sequence
  Description of Artificial Sequence: Synthetic oligonucleotide
agauacuugagucgaggag

SEQ ID NO: 466786 - RNA, 19 nt, Artificial Sequence
  Description of Artificial Sequence: Synthetic oligonucleotide
uacuugagcacgauaccag

SEQ ID NO: 466787 - RNA, 19 nt, Artificial Sequence
  Description of Artificial Sequence: Synthetic oligonucleotide
acauagaagguauuccgug

SEQ ID NO: 466788 - RNA, 19 nt, Artificial Sequence
  Description of Artificial Sequence: Synthetic oligonucleotide
ugcacuagauggcaguagc

SEQ ID NO: 466789 - RNA, 19 nt, Artificial Sequence
  Description of Artificial Sequence: Synthetic oligonucleotide
aagauacuugagucgagga

SEQ ID NO: 466790 - RNA, 19 nt, Artificial Sequence
  Description of Artificial Sequence: Synthetic oligonucleotide
gagauggaauccaagguag

SEQ ID NO: 466791 - RNA, 19 nt, Artificial Sequence
  Description of Artificial Sequence: Synthetic oligonucleotide
auuccguggauccacaccu

SEQ ID NO: 466792 - RNA, 19 nt, Artificial Sequence
  Description of Artificial Sequence: Synthetic oligonucleotide
gguauaucuuuuauuaagg

SEQ ID NO: 466793 - RNA, 19 nt, Artificial Sequence
  Description of Artificial Sequence: Synthetic oligonucleotide
cuugcuaagcugucggugc

SEQ ID NO: 466794 - RNA, 19 nt, Artificial Sequence
  Description of Artificial Sequence: Synthetic oligonucleotide
aaggacuagggucacuacu

SEQ ID NO: 466795 - RNA, 19 nt, Artificial Sequence
  Description of Artificial Sequence: Synthetic oligonucleotide
uagaauucucuucuucaca

SEQ ID NO: 466796 - RNA, 19 nt, Artificial Sequence
  Description of Artificial Sequence: Synthetic oligonucleotide
uauaagucacgcucuguca

SEQ ID NO: 466797 - RNA, 19 nt, Artificial Sequence
  Description of Artificial Sequence: Synthetic oligonucleotide
cacgauaccagcucccucc

SEQ ID NO: 466798 - RNA, 19 nt, Artificial Sequence
  Description of Artificial Sequence: Synthetic oligonucleotide
ucacgcucugucaaggcag

SEQ ID NO: 466799 - RNA, 19 nt, Artificial Sequence
  Description of Artificial Sequence: Synthetic oligonucleotide
gaaagaucaauggguacag

SEQ ID NO: 466800 - RNA, 19 nt, Artificial Sequence
  Description of Artificial Sequence: Synthetic oligonucleotide
caucccagagauuaccuag

SEQ ID NO: 466801 - RNA, 19 nt, Artificial Sequence
  Description of Artificial Sequence: Synthetic oligonucleotide
acaccauggaaagcaaugc

SEQ ID NO: 466802 - RNA, 19 nt, Artificial Sequence
  Description of Artificial Sequence: Synthetic oligonucleotide
agaaagaucaauggguaca

SEQ ID NO: 466803 - RNA, 19 nt, Artificial Sequence
  Description of Artificial Sequence: Synthetic oligonucleotide
ucaggauauucccagccac

SEQ ID NO: 466804 - RNA, 19 nt, Artificial Sequence
  Description of Artificial Sequence: Synthetic oligonucleotide
ugccuuaggccucacagac

SEQ ID NO: 466805 - RNA, 19 nt, Artificial Sequence
  Description of Artificial Sequence: Synthetic oligonucleotide
agaucaauggguacagggg

SEQ ID NO: 466806 - RNA, 19 nt, Artificial Sequence
  Description of Artificial Sequence: Synthetic oligonucleotide
uauuccguggauccacacc

SEQ ID NO: 466807 - RNA, 19 nt, Artificial Sequence
  Description of Artificial Sequence: Synthetic oligonucleotide
cuguauaacggucaauguc

SEQ ID NO: 466808 - RNA, 19 nt, Artificial Sequence
  Description of Artificial Sequence: Synthetic oligonucleotide
uacagccucgcucaagagc

SEQ ID NO: 466809 - RNA, 19 nt, Artificial Sequence
  Description of Artificial Sequence: Synthetic oligonucleotide
uuagugggaacuugcuuug

SEQ ID NO: 466810 - RNA, 19 nt, Artificial Sequence
  Description of Artificial Sequence: Synthetic oligonucleotide
uucuccuauggguagguga

SEQ ID NO: 466811 - RNA, 19 nt, Artificial Sequence
  Description of Artificial Sequence: Synthetic oligonucleotide
auauauaagucacgcucug

SEQ ID NO: 466812 - RNA, 19 nt, Artificial Sequence
  Description of Artificial Sequence: Synthetic oligonucleotide
guaggugagggcuugcagc

SEQ ID NO: 466813 - RNA, 19 nt, Artificial Sequence
  Description of Artificial Sequence: Synthetic oligonucleotide
caaggaaucgggcaccagc

SEQ ID NO: 466814 - RNA, 19 nt, Artificial Sequence
  Description of Artificial Sequence: Synthetic oligonucleotide
ugagcacgauaccagcucc

SEQ ID NO: 466815 - RNA, 19 nt, Artificial Sequence
  Description of Artificial Sequence: Synthetic oligonucleotide
agaaugacuuuuaggagag

SEQ ID NO: 466816 - RNA, 19 nt, Artificial Sequence
  Description of Artificial Sequence: Synthetic oligonucleotide
aguucucaugaucucaggu

SEQ ID NO: 466817 - RNA, 19 nt, Artificial Sequence
  Description of Artificial Sequence: Synthetic oligonucleotide
ucuguauaacggucaaugu

SEQ ID NO: 466818 - RNA, 19 nt, Artificial Sequence
  Description of Artificial Sequence: Synthetic oligonucleotide
gugacgacaagugauggag

SEQ ID NO: 466819 - RNA, 19 nt, Artificial Sequence
  Description of Artificial Sequence: Synthetic oligonucleotide
acaugcuccucuaaggagg

SEQ ID NO: 466820 - RNA, 19 nt, Artificial Sequence
  Description of Artificial Sequence: Synthetic oligonucleotide
cuagaaacaaggggcagcc

SEQ ID NO: 466821 - RNA, 19 nt, Artificial Sequence
  Description of Artificial Sequence: Synthetic oligonucleotide
uauaacggucaaugucacg

SEQ ID NO: 466822 - RNA, 19 nt, Artificial Sequence
  Description of Artificial Sequence: Synthetic oligonucleotide
auagaagguauuccgugga

SEQ ID NO: 466823 - RNA, 19 nt, Artificial Sequence
  Description of Artificial Sequence: Synthetic oligonucleotide
uggauccacaccuugguuc

SEQ ID NO: 466824 - RNA, 19 nt, Artificial Sequence
  Description of Artificial Sequence: Synthetic oligonucleotide
ccaauaagauacuugaguc

SEQ ID NO: 466825 - RNA, 19 nt, Artificial Sequence
  Description of Artificial Sequence: Synthetic oligonucleotide
gacgacaagugauggagac

SEQ ID NO: 466826 - RNA, 19 nt, Artificial Sequence
  Description of Artificial Sequence: Synthetic oligonucleotide
auacuugagucgaggagcc

SEQ ID NO: 466827 - RNA, 19 nt, Artificial Sequence
  Description of Artificial Sequence: Synthetic oligonucleotide
acagacaaucacuccacug

SEQ ID NO: 466828 - RNA, 19 nt, Artificial Sequence
  Description of Artificial Sequence: Synthetic oligonucleotide
cuggauagcauccaaggca

SEQ ID NO: 466829 - RNA, 19 nt, Artificial Sequence
  Description of Artificial Sequence: Synthetic oligonucleotide
uuacucaagguuccaggcu

SEQ ID NO: 466830 - RNA, 19 nt, Artificial Sequence
  Description of Artificial Sequence: Synthetic oligonucleotide
caaucacuccuuuccagcc

SEQ ID NO: 466831 - RNA, 19 nt, Artificial Sequence
  Description of Artificial Sequence: Synthetic oligonucleotide
auagcuucuaccauaaaua

SEQ ID NO: 466832 - RNA, 19 nt, Artificial Sequence
  Description of Artificial Sequence: Synthetic oligonucleotide
gagaguauuacucaagguu

SEQ ID NO: 466833 - RNA, 19 nt, Artificial Sequence
  Description of Artificial Sequence: Synthetic oligonucleotide
agugauggaauagcugagg

SEQ ID NO: 466834 - RNA, 19 nt, Artificial Sequence
  Description of Artificial Sequence: Synthetic oligonucleotide
aucggaaccccugagaacu

SEQ ID NO: 466835 - RNA, 19 nt, Artificial Sequence
  Description of Artificial Sequence: Synthetic oligonucleotide
ucgaaaucucuccucugug

SEQ ID NO: 466836 - RNA, 19 nt, Artificial Sequence
  Description of Artificial Sequence: Synthetic oligonucleotide
ugugcuugacagguuauug

SEQ ID NO: 466837 - RNA, 19 nt, Artificial Sequence
  Description of Artificial Sequence: Synthetic oligonucleotide
auccaagguagaaagauca

SEQ ID NO: 466838 - RNA, 19 nt, Artificial Sequence
  Description of Artificial Sequence: Synthetic oligonucleotide
aggagucccgucucaacac

SEQ ID NO: 466839 - RNA, 19 nt, Artificial Sequence
  Description of Artificial Sequence: Synthetic oligonucleotide
cugucuuagaauucucuuc

SEQ ID NO: 466840 - RNA, 19 nt, Artificial Sequence
  Description of Artificial Sequence: Synthetic oligonucleotide
auaagucacgcucugucaa

SEQ ID NO: 466841 - RNA, 19 nt, Artificial Sequence
  Description of Artificial Sequence: Synthetic oligonucleotide
ugggcagugggaaucuuca

SEQ ID NO: 466842 - RNA, 19 nt, Artificial Sequence
  Description of Artificial Sequence: Synthetic oligonucleotide
accauggaaagcaaugcuc

SEQ ID NO: 466843 - RNA, 19 nt, Artificial Sequence
  Description of Artificial Sequence: Synthetic oligonucleotide
gucaaugucacggucaguc

SEQ ID NO: 466844 - RNA, 19 nt, Artificial Sequence
  Description of Artificial Sequence: Synthetic oligonucleotide
uugacagguuauugugagg

SEQ ID NO: 466845 - RNA, 19 nt, Artificial Sequence
  Description of Artificial Sequence: Synthetic oligonucleotide
guucagcccuuguagaugc

SEQ ID NO: 466846 - RNA, 19 nt, Artificial Sequence
  Description of Artificial Sequence: Synthetic oligonucleotide
ucgcucaagagcacucggg

SEQ ID NO: 466847 - RNA, 19 nt, Artificial Sequence
  Description of Artificial Sequence: Synthetic oligonucleotide
cuaggaccaacacaagaug

SEQ ID NO: 466848 - RNA, 19 nt, Artificial Sequence
  Description of Artificial Sequence: Synthetic oligonucleotide
ucgaggagccaccuggccc

SEQ ID NO: 466849 - RNA, 19 nt, Artificial Sequence
  Description of Artificial Sequence: Synthetic oligonucleotide
aagucacgcucugucaagg

SEQ ID NO: 466850 - RNA, 19 nt, Artificial Sequence
  Description of Artificial Sequence: Synthetic oligonucleotide
gaguauuacucaagguucc

SEQ ID NO: 466851 - RNA, 19 nt, Artificial Sequence
  Description of Artificial Sequence: Synthetic oligonucleotide
ucuuguaagugggaggccu

SEQ ID NO: 466852 - RNA, 19 nt, Artificial Sequence
  Description of Artificial Sequence: Synthetic oligonucleotide
auaggcuacaggugcagca

SEQ ID NO: 466853 - RNA, 19 nt, Artificial Sequence
  Description of Artificial Sequence: Synthetic oligonucleotide
uaagucacgcucugucaag

SEQ ID NO: 466854 - RNA, 19 nt, Artificial Sequence
  Description of Artificial Sequence: Synthetic oligonucleotide
agucacaucccagagauua

SEQ ID NO: 466855 - RNA, 19 nt, Artificial Sequence
  Description of Artificial Sequence: Synthetic oligonucleotide
agaagguauuccguggauc

SEQ ID NO: 466856 - RNA, 19 nt, Artificial Sequence
  Description of Artificial Sequence: Synthetic oligonucleotide
ugagucgaggagccuggcg

SEQ ID NO: 466857 - RNA, 19 nt, Artificial Sequence
  Description of Artificial Sequence: Synthetic oligonucleotide
agucacgcucugucaaggc

SEQ ID NO: 466858 - RNA, 19 nt, Artificial Sequence
  Description of Artificial Sequence: Synthetic oligonucleotide
uugagcacgauaccagcuc

SEQ ID NO: 466859 - RNA, 19 nt, Artificial Sequence
  Description of Artificial Sequence: Synthetic oligonucleotide
auaguucucaugaucucag

SEQ ID NO: 466860 - RNA, 19 nt, Artificial Sequence
  Description of Artificial Sequence: Synthetic oligonucleotide
ggaaaagaggcgcuggaug

SEQ ID NO: 466861 - RNA, 19 nt, Artificial Sequence
  Description of Artificial Sequence: Synthetic oligonucleotide
gcaaagcuucuguauaacg

SEQ ID NO: 466862 - RNA, 19 nt, Artificial Sequence
  Description of Artificial Sequence: Synthetic oligonucleotide
uaggugagggcuugcagcu

SEQ ID NO: 466863 - RNA, 19 nt, Artificial Sequence
  Description of Artificial Sequence: Synthetic oligonucleotide
aaggaaucgggcaccagcu

SEQ ID NO: 466864 - RNA, 19 nt, Artificial Sequence
  Description of Artificial Sequence: Synthetic oligonucleotide
cugggcaaaguugugguag

SEQ ID NO: 466865 - RNA, 19 nt, Artificial Sequence
  Description of Artificial Sequence: Synthetic oligonucleotide
ugaaggaaaagaggcgcug

SEQ ID NO: 466866 - RNA, 19 nt, Artificial Sequence
  Description of Artificial Sequence: Synthetic oligonucleotide
aggcuacaggugcagcacc

SEQ ID NO: 466867 - RNA, 19 nt, Artificial Sequence
  Description of Artificial Sequence: Synthetic oligonucleotide
cuacuggccuccuugucag

SEQ ID NO: 466868 - RNA, 19 nt, Artificial Sequence
  Description of Artificial Sequence: Synthetic oligonucleotide
aaggucacauuaaaaggaa

SEQ ID NO: 466869 - RNA, 19 nt, Artificial Sequence
  Description of Artificial Sequence: Synthetic oligonucleotide
gacaaucacuccacugggg

SEQ ID NO: 466870 - RNA, 19 nt, Artificial Sequence
  Description of Artificial Sequence: Synthetic oligonucleotide
cagcaacucuuguaagugg

SEQ ID NO: 466871 - RNA, 19 nt, Artificial Sequence
  Description of Artificial Sequence: Synthetic oligonucleotide
acaggugcagcaccaauaa

SEQ ID NO: 466872 - RNA, 19 nt, Artificial Sequence
  Description of Artificial Sequence: Synthetic oligonucleotide
aaugcucagugaguccgag

SEQ ID NO: 466873 - RNA, 19 nt, Artificial Sequence
  Description of Artificial Sequence: Synthetic oligonucleotide
uggugacgacaagugaugg

SEQ ID NO: 466874 - RNA, 19 nt, Artificial Sequence
  Description of Artificial Sequence: Synthetic oligonucleotide
ugcacugcuacagccaaac

SEQ ID NO: 466875 - RNA, 19 nt, Artificial Sequence
  Description of Artificial Sequence: Synthetic oligonucleotide
cacaguaacuggaggguug

SEQ ID NO: 466876 - RNA, 19 nt, Artificial Sequence
  Description of Artificial Sequence: Synthetic oligonucleotide
gacuagggucacuacuggc

SEQ ID NO: 466877 - RNA, 19 nt, Artificial Sequence
  Description of Artificial Sequence: Synthetic oligonucleotide
gcauagauauauaagucac

SEQ ID NO: 466878 - RNA, 19 nt, Artificial Sequence
  Description of Artificial Sequence: Synthetic oligonucleotide
auauucccagccacauucc

SEQ ID NO: 466879 - RNA, 19 nt, Artificial Sequence
  Description of Artificial Sequence: Synthetic oligonucleotide
cuggugacgacaagugaug

SEQ ID NO: 466880 - RNA, 19 nt, Artificial Sequence
  Description of Artificial Sequence: Synthetic oligonucleotide
ucaagagcacucgggcacg

SEQ ID NO: 466881 - RNA, 19 nt, Artificial Sequence
  Description of Artificial Sequence: Synthetic oligonucleotide
ugacgacaagugauggaga

SEQ ID NO: 466882 - RNA, 19 nt, Artificial Sequence
  Description of Artificial Sequence: Synthetic oligonucleotide
agucgaggagccuggcggg

SEQ ID NO: 466883 - RNA, 19 nt, Artificial Sequence
  Description of Artificial Sequence: Synthetic oligonucleotide
uauauaagucacgcucugu

SEQ ID NO: 466884 - RNA, 19 nt, Artificial Sequence
  Description of Artificial Sequence: Synthetic oligonucleotide
gcaaugcucagugaguccg

SEQ ID NO: 466885 - RNA, 19 nt, Artificial Sequence
  Description of Artificial Sequence: Synthetic oligonucleotide
cagagauuaccuagaaaca

SEQ ID NO: 466886 - RNA, 19 nt, Artificial Sequence
  Description of Artificial Sequence: Synthetic oligonucleotide
guauuacucaagguuccag

SEQ ID NO: 466887 - RNA, 19 nt, Artificial Sequence
  Description of Artificial Sequence: Synthetic oligonucleotide
aggacuagggucacuacug

SEQ ID NO: 466888 - RNA, 19 nt, Artificial Sequence
  Description of Artificial Sequence: Synthetic oligonucleotide
aguuaaaacuaaguuggua

SEQ ID NO: 466889 - RNA, 19 nt, Artificial Sequence
  Description of Artificial Sequence: Synthetic oligonucleotide
uccuagccagcccugcagc

SEQ ID NO: 466890 - RNA, 19 nt, Artificial Sequence
  Description of Artificial Sequence: Synthetic oligonucleotide
aauggguacaggggcugag

SEQ ID NO: 466891 - RNA, 19 nt, Artificial Sequence
  Description of Artificial Sequence: Synthetic oligonucleotide
aguugguagguagacacau

SEQ ID NO: 466892 - RNA, 19 nt, Artificial Sequence
  Description of Artificial Sequence: Synthetic oligonucleotide
gguucuagcaccacuaaga

SEQ ID NO: 466893 - RNA, 19 nt, Artificial Sequence
  Description of Artificial Sequence: Synthetic oligonucleotide
ggcaucaaacucuuucagc

SEQ ID NO: 466894 - RNA, 19 nt, Artificial Sequence
  Description of Artificial Sequence: Synthetic oligonucleotide
ggaaugcaguggcauaggg

SEQ ID NO: 466895 - RNA, 19 nt, Artificial Sequence
  Description of Artificial Sequence: Synthetic oligonucleotide
aacuggcucgaaaucucuc

SEQ ID NO: 466896 - RNA, 19 nt, Artificial Sequence
  Description of Artificial Sequence: Synthetic oligonucleotide
uccguggauccacaccuug

SEQ ID NO: 466897 - RNA, 19 nt, Artificial Sequence
  Description of Artificial Sequence: Synthetic oligonucleotide
cugaaacuggcucgaaauc

SEQ ID NO: 466898 - RNA, 19 nt, Artificial Sequence
  Description of Artificial Sequence: Synthetic oligonucleotide
uccauccuuugaucuagug

SEQ ID NO: 466899 - RNA, 19 nt, Artificial Sequence
  Description of Artificial Sequence: Synthetic oligonucleotide
ggccauaggcuacaggugc

SEQ ID NO: 466900 - RNA, 19 nt, Artificial Sequence
  Description of Artificial Sequence: Synthetic oligonucleotide
ucacggucagucacauccc

SEQ ID NO: 466901 - RNA, 19 nt, Artificial Sequence
  Description of Artificial Sequence: Synthetic oligonucleotide
gagcuuagugggaacuugc

SEQ ID NO: 466902 - RNA, 19 nt, Artificial Sequence
  Description of Artificial Sequence: Synthetic oligonucleotide
ugcuaguucaggugacccu

SEQ ID NO: 466903 - RNA, 19 nt, Artificial Sequence
  Description of Artificial Sequence: Synthetic oligonucleotide
uugcuaagcugucggugca

SEQ ID NO: 466904 - RNA, 19 nt, Artificial Sequence
  Description of Artificial Sequence: Synthetic oligonucleotide
cuuagugggaacuugcuuu

SEQ ID NO: 466905 - RNA, 19 nt, Artificial Sequence
  Description of Artificial Sequence: Synthetic oligonucleotide
uucgaggagccaccuggcc

SEQ ID NO: 466906 - RNA, 19 nt, Artificial Sequence
  Description of Artificial Sequence: Synthetic oligonucleotide
guaggagaguauuacucaa

SEQ ID NO: 466907 - RNA, 19 nt, Artificial Sequence
  Description of Artificial Sequence: Synthetic oligonucleotide
guucuagcaccacuaagaa

SEQ ID NO: 466908 - RNA, 19 nt, Artificial Sequence
  Description of Artificial Sequence: Synthetic oligonucleotide
uagaagguauuccguggau

SEQ ID NO: 466909 - RNA, 19 nt, Artificial Sequence
  Description of Artificial Sequence: Synthetic oligonucleotide
cucgcucaagagcacucgg

SEQ ID NO: 466910 - RNA, 19 nt, Artificial Sequence
  Description of Artificial Sequence: Synthetic oligonucleotide
uucuagcaccacuaagaau

SEQ ID NO: 466911 - RNA, 19 nt, Artificial Sequence
  Description of Artificial Sequence: Synthetic oligonucleotide
guagaugcucugcuaguuc

SEQ ID NO: 466912 - RNA, 19 nt, Artificial Sequence
  Description of Artificial Sequence: Synthetic oligonucleotide
gaagcggcagagaugggca

SEQ ID NO: 466913 - RNA, 19 nt, Artificial Sequence
  Description of Artificial Sequence: Synthetic oligonucleotide
caucaaggaaucgggcacc

SEQ ID NO: 466914 - RNA, 19 nt, Artificial Sequence
  Description of Artificial Sequence: Synthetic oligonucleotide
guaggccauaggcuacagg

SEQ ID NO: 466915 - RNA, 19 nt, Artificial Sequence
  Description of Artificial Sequence: Synthetic oligonucleotide
auaagauacuugagucgag

SEQ ID NO: 466916 - RNA, 19 nt, Artificial Sequence
  Description of Artificial Sequence: Synthetic oligonucleotide
gcccugaaggaaaagaggc

SEQ ID NO: 466917 - RNA, 19 nt, Artificial Sequence
  Description of Artificial Sequence: Synthetic oligonucleotide
guaagugggaggccuccug

SEQ ID NO: 466918 - RNA, 19 nt, Artificial Sequence
  Description of Artificial Sequence: Synthetic oligonucleotide
gaguggaaucaggauauuc

SEQ ID NO: 466919 - RNA, 19 nt, Artificial Sequence
  Description of Artificial Sequence: Synthetic oligonucleotide
ucugugcuugacagguuau

SEQ ID NO: 466920 - RNA, 19 nt, Artificial Sequence
  Description of Artificial Sequence: Synthetic oligonucleotide
gauguacuugagcacgaua

SEQ ID NO: 466921 - RNA, 19 nt, Artificial Sequence
  Description of Artificial Sequence: Synthetic oligonucleotide
cuuguaagugggaggccuc

SEQ ID NO: 466922 - RNA, 19 nt, Artificial Sequence
  Description of Artificial Sequence: Synthetic oligonucleotide
uugcuuugggcagugggaa

SEQ ID NO: 466923 - RNA, 19 nt, Artificial Sequence
  Description of Artificial Sequence: Synthetic oligonucleotide
cugcuaguucaggugaccc

SEQ ID NO: 466924 - RNA, 19 nt, Artificial Sequence
  Description of Artificial Sequence: Synthetic oligonucleotide
guaacuggaggguuguccu

SEQ ID NO: 466925 - RNA, 19 nt, Artificial Sequence
  Description of Artificial Sequence: Synthetic oligonucleotide
aguauuacucaagguucca

SEQ ID NO: 466926 - RNA, 19 nt, Artificial Sequence
  Description of Artificial Sequence: Synthetic oligonucleotide
cccugcauagauauauaag

SEQ ID NO: 466927 - RNA, 19 nt, Artificial Sequence
  Description of Artificial Sequence: Synthetic oligonucleotide
uaggcuacaggugcagcac

SEQ ID NO: 466928 - RNA, 19 nt, Artificial Sequence
  Description of Artificial Sequence: Synthetic oligonucleotide
ggccuugcuaagcugucgg

SEQ ID NO: 466929 - RNA, 19 nt, Artificial Sequence
  Description of Artificial Sequence: Synthetic oligonucleotide
ggacuagggucacuacugg

SEQ ID NO: 466930 - RNA, 19 nt, Artificial Sequence
  Description of Artificial Sequence: Synthetic oligonucleotide
ucguuucucagugcagcug

SEQ ID NO: 466931 - RNA, 19 nt, Artificial Sequence
  Description of Artificial Sequence: Synthetic oligonucleotide
uauggguaggugagggcuu

SEQ ID NO: 466932 - RNA, 19 nt, Artificial Sequence
  Description of Artificial Sequence: Synthetic oligonucleotide
gccugaacauccuggcugg

SEQ ID NO: 466933 - RNA, 19 nt, Artificial Sequence
  Description of Artificial Sequence: Synthetic oligonucleotide
aaguugguagguagacaca

SEQ ID NO: 466934 - RNA, 19 nt, Artificial Sequence
  Description of Artificial Sequence: Synthetic oligonucleotide
ggucagucacaucccagag

SEQ ID NO: 466935 - RNA, 19 nt, Artificial Sequence
  Description of Artificial Sequence: Synthetic oligonucleotide
cagacuggcccggacacag

SEQ ID NO: 466936 - RNA, 19 nt, Artificial Sequence
  Description of Artificial Sequence: Synthetic oligonucleotide
acagguuauugugaggguu

SEQ ID NO: 466937 - RNA, 19 nt, Artificial Sequence
  Description of Artificial Sequence: Synthetic oligonucleotide
caucggaaccccugagaac

SEQ ID NO: 466938 - RNA, 19 nt, Artificial Sequence
  Description of Artificial Sequence: Synthetic oligonucleotide
guauaacggucaaugucac

SEQ ID NO: 466939 - RNA, 19 nt, Artificial Sequence
  Description of Artificial Sequence: Synthetic oligonucleotide
cauggagcuuagugggaac

SEQ ID NO: 466940 - RNA, 19 nt, Artificial Sequence
  Description of Artificial Sequence: Synthetic oligonucleotide
cauaugccaaggccugaac

SEQ ID NO: 466941 - RNA, 19 nt, Artificial Sequence
  Description of Artificial Sequence: Synthetic oligonucleotide
cuccuagccagcccugcag

SEQ ID NO: 466942 - RNA, 19 nt, Artificial Sequence
  Description of Artificial Sequence: Synthetic oligonucleotide
uuccaugcacagcgagggc

SEQ ID NO: 466943 - RNA, 19 nt, Artificial Sequence
  Description of Artificial Sequence: Synthetic oligonucleotide
gaucuagugccagccuccc

SEQ ID NO: 466944 - RNA, 19 nt, Artificial Sequence
  Description of Artificial Sequence: Synthetic oligonucleotide
ccaucaaggaaucgggcac

SEQ ID NO: 466945 - RNA, 19 nt, Artificial Sequence
  Description of Artificial Sequence: Synthetic oligonucleotide
uccccaucggaaccccuga

SEQ ID NO: 466946 - RNA, 19 nt, Artificial Sequence
  Description of Artificial Sequence: Synthetic oligonucleotide
aggauauucccagccacau

SEQ ID NO: 466947 - RNA, 19 nt, Artificial Sequence
  Description of Artificial Sequence: Synthetic oligonucleotide
aucaauggguacaggggcu

SEQ ID NO: 466948 - RNA, 19 nt, Artificial Sequence
  Description of Artificial Sequence: Synthetic oligonucleotide
gaugggugagcagcuggug

SEQ ID NO: 466949 - RNA, 19 nt, Artificial Sequence
  Description of Artificial Sequence: Synthetic oligonucleotide
ucagugaguccgagaugga

SEQ ID NO: 466950 - RNA, 19 nt, Artificial Sequence
  Description of Artificial Sequence: Synthetic oligonucleotide
cccugaaggaaaagaggcg

SEQ ID NO: 466951 - RNA, 19 nt, Artificial Sequence
  Description of Artificial Sequence: Synthetic oligonucleotide
cacgcucugucaaggcagc

SEQ ID NO: 466952 - RNA, 19 nt, Artificial Sequence
  Description of Artificial Sequence: Synthetic oligonucleotide
gaaggcugucuuagaauuc

SEQ ID NO: 466953 - RNA, 19 nt, Artificial Sequence
  Description of Artificial Sequence: Synthetic oligonucleotide
acaccagggaaaaucacuu

SEQ ID NO: 466954 - RNA, 19 nt, Artificial Sequence
  Description of Artificial Sequence: Synthetic oligonucleotide
ggcagugggaaucuucaca

SEQ ID NO: 466955 - RNA, 19 nt, Artificial Sequence
  Description of Artificial Sequence: Synthetic oligonucleotide
acaucccagagauuaccua

SEQ ID NO: 466956 - RNA, 19 nt, Artificial Sequence
  Description of Artificial Sequence: Synthetic oligonucleotide
acucaagguuccaggcugg

SEQ ID NO: 466957 - RNA, 19 nt, Artificial Sequence
  Description of Artificial Sequence: Synthetic oligonucleotide
gucacgcucugucaaggca

SEQ ID NO: 466958 - RNA, 19 nt, Artificial Sequence
  Description of Artificial Sequence: Synthetic oligonucleotide
caaggacuagggucacuac

SEQ ID NO: 466959 - RNA, 19 nt, Artificial Sequence
  Description of Artificial Sequence: Synthetic oligonucleotide
gguuguccuuuuccagucg

SEQ ID NO: 466960 - RNA, 19 nt, Artificial Sequence
  Description of Artificial Sequence: Synthetic oligonucleotide
ggguucuagcaccacuaag

SEQ ID NO: 466961 - RNA, 19 nt, Artificial Sequence
  Description of Artificial Sequence: Synthetic oligonucleotide
ucugcacuagauggcagua

SEQ ID NO: 466962 - RNA, 19 nt, Artificial Sequence
  Description of Artificial Sequence: Synthetic oligonucleotide
cuuaggccucacagacucc

SEQ ID NO: 466963 - RNA, 19 nt, Artificial Sequence
  Description of Artificial Sequence: Synthetic oligonucleotide
caggagucccgucucaaca

SEQ ID NO: 466964 - RNA, 19 nt, Artificial Sequence
  Description of Artificial Sequence: Synthetic oligonucleotide
gagggcaguggcugacacc

SEQ ID NO: 466965 - RNA, 19 nt, Artificial Sequence
  Description of Artificial Sequence: Synthetic oligonucleotide
agcccuuguagaugcucug

SEQ ID NO: 466966 - RNA, 19 nt, Artificial Sequence
  Description of Artificial Sequence: Synthetic oligonucleotide
caggauauucccagccaca

SEQ ID NO: 466967 - RNA, 19 nt, Artificial Sequence
  Description of Artificial Sequence: Synthetic oligonucleotide
cuacagccucgcucaagag

SEQ ID NO: 466968 - RNA, 19 nt, Artificial Sequence
  Description of Artificial Sequence: Synthetic oligonucleotide
agucccgucucaacacuuc

SEQ ID NO: 466969 - RNA, 19 nt, Artificial Sequence
  Description of Artificial Sequence: Synthetic oligonucleotide
aacuugcuuugggcagugg

SEQ ID NO: 466970 - RNA, 19 nt, Artificial Sequence
  Description of Artificial Sequence: Synthetic oligonucleotide
gaaggcaauccugcuccug

SEQ ID NO: 466971 - RNA, 19 nt, Artificial Sequence
  Description of Artificial Sequence: Synthetic oligonucleotide
gaguccgagauggaaucca

SEQ ID NO: 466972 - RNA, 19 nt, Artificial Sequence
  Description of Artificial Sequence: Synthetic oligonucleotide
guauuccguggauccacac

SEQ ID NO: 466973 - RNA, 19 nt, Artificial Sequence
  Description of Artificial Sequence: Synthetic oligonucleotide
ugagaacuucaaagcucau

SEQ ID NO: 466974 - RNA, 19 nt, Artificial Sequence
  Description of Artificial Sequence: Synthetic oligonucleotide
cuaaguugguagguagaca

SEQ ID NO: 466975 - RNA, 19 nt, Artificial Sequence
  Description of Artificial Sequence: Synthetic oligonucleotide
uguaagugggaggccuccu

SEQ ID NO: 466976 - RNA, 19 nt, Artificial Sequence
  Description of Artificial Sequence: Synthetic oligonucleotide
ccuagaaacaaggggcagc

SEQ ID NO: 466977 - RNA, 19 nt, Artificial Sequence
  Description of Artificial Sequence: Synthetic oligonucleotide
ccugcucaaggcuuggcac

SEQ ID NO: 466978 - RNA, 19 nt, Artificial Sequence
  Description of Artificial Sequence: Synthetic oligonucleotide
caaagccaagaagcggcag

SEQ ID NO: 466979 - RNA, 19 nt, Artificial Sequence
  Description of Artificial Sequence: Synthetic oligonucleotide
agagagacagguaggccau

SEQ ID NO: 466980 - RNA, 19 nt, Artificial Sequence
  Description of Artificial Sequence: Synthetic oligonucleotide
ucaaggaaucgggcaccag

SEQ ID NO: 466981 - RNA, 19 nt, Artificial Sequence
  Description of Artificial Sequence: Synthetic oligonucleotide
gacuggcccggacacagaa

SEQ ID NO: 466982 - RNA, 19 nt, Artificial Sequence
  Description of Artificial Sequence: Synthetic oligonucleotide
gaaucgggcaccagcucca

SEQ ID NO: 466983 - RNA, 19 nt, Artificial Sequence
  Description of Artificial Sequence: Synthetic oligonucleotide
uccaugcccugcauagaua

SEQ ID NO: 466984 - RNA, 19 nt, Artificial Sequence
  Description of Artificial Sequence: Synthetic oligonucleotide
agcagucggucugcugggc

SEQ ID NO: 466985 - RNA, 19 nt, Artificial Sequence
  Description of Artificial Sequence: Synthetic oligonucleotide
acgauaccagcucccucca

SEQ ID NO: 466986 - RNA, 19 nt, Artificial Sequence
  Description of Artificial Sequence: Synthetic oligonucleotide
ccaugcucguuucucagug

SEQ ID NO: 466987 - RNA, 19 nt, Artificial Sequence
  Description of Artificial Sequence: Synthetic oligonucleotide
gagcacgauaccagcuccc

SEQ ID NO: 466988 - RNA, 19 nt, Artificial Sequence
  Description of Artificial Sequence: Synthetic oligonucleotide
cacccguccuacagccucg

SEQ ID NO: 466989 - RNA, 19 nt, Artificial Sequence
  Description of Artificial Sequence: Synthetic oligonucleotide
cugcacuagauggcaguag

SEQ ID NO: 466990 - RNA, 19 nt, Artificial Sequence
  Description of Artificial Sequence: Synthetic oligonucleotide
caggugcagcaccaauaag

SEQ ID NO: 466991 - RNA, 19 nt, Artificial Sequence
  Description of Artificial Sequence: Synthetic oligonucleotide
gguucagcccuuguagaug

SEQ ID NO: 466992 - RNA, 19 nt, Artificial Sequence
  Description of Artificial Sequence: Synthetic oligonucleotide
acgacaagugauggagaca

SEQ ID NO: 466993 - RNA, 19 nt, Artificial Sequence
  Description of Artificial Sequence: Synthetic oligonucleotide
ggagcuuagugggaacuug

SEQ ID NO: 466994 - RNA, 19 nt, Artificial Sequence
  Description of Artificial Sequence: Synthetic oligonucleotide
cuugagcacgauaccagcu

SEQ ID NO: 466995 - RNA, 19 nt, Artificial Sequence
  Description of Artificial Sequence: Synthetic oligonucleotide
agcuuagugggaacuugcu

SEQ ID NO: 466996 - RNA, 19 nt, Artificial Sequence
  Description of Artificial Sequence: Synthetic oligonucleotide
gugccuuaggccucacaga

SEQ ID NO: 466997 - RNA, 19 nt, Artificial Sequence
  Description of Artificial Sequence: Synthetic oligonucleotide
agcacgauaccagcucccu

SEQ ID NO: 466998 - RNA, 19 nt, Artificial Sequence
  Description of Artificial Sequence: Synthetic oligonucleotide
ccaagaagcggcagagaug

SEQ ID NO: 466999 - RNA, 19 nt, Artificial Sequence
  Description of Artificial Sequence: Synthetic oligonucleotide
aucccagagauuaccuaga

SEQ ID NO: 467000 - RNA, 19 nt, Artificial Sequence
  Description of Artificial Sequence: Synthetic oligonucleotide
ugggccuugcuaagcuguc

SEQ ID NO: 467001 - RNA, 19 nt, Artificial Sequence
  Description of Artificial Sequence: Synthetic oligonucleotide
cacagcccauaugccaagg

SEQ ID NO: 467002 - RNA, 19 nt, Artificial Sequence
  Description of Artificial Sequence: Synthetic oligonucleotide
cauagggaucccgguggcc

SEQ ID NO: 467003 - RNA, 19 nt, Artificial Sequence
  Description of Artificial Sequence: Synthetic oligonucleotide
ucgggucaguaggagagua

SEQ ID NO: 467004 - RNA, 19 nt, Artificial Sequence
  Description of Artificial Sequence: Synthetic oligonucleotide
gaguuccuccauccuuuga

SEQ ID NO: 467005 - RNA, 19 nt, Artificial Sequence
  Description of Artificial Sequence: Synthetic oligonucleotide
cugucaaggcagccugcac

SEQ ID NO: 467006 - RNA, 19 nt, Artificial Sequence
  Description of Artificial Sequence: Synthetic oligonucleotide
ggugacgacaagugaugga

SEQ ID NO: 467007 - RNA, 19 nt, Artificial Sequence
  Description of Artificial Sequence: Synthetic oligonucleotide
ggguuguccuuuuccaguc

SEQ ID NO: 467008 - RNA, 19 nt, Artificial Sequence
  Description of Artificial Sequence: Synthetic oligonucleotide
agccgggugacaggcagug

SEQ ID NO: 467009 - RNA, 19 nt, Artificial Sequence
  Description of Artificial Sequence: Synthetic oligonucleotide
gacagguuauugugagggu

SEQ ID NO: 467010 - RNA, 19 nt, Artificial Sequence
  Description of Artificial Sequence: Synthetic oligonucleotide
gguuauugugaggguuuag

SEQ ID NO: 467011 - RNA, 19 nt, Artificial Sequence
  Description of Artificial Sequence: Synthetic oligonucleotide
uggcgggccuggcugacau

SEQ ID NO: 467012 - RNA, 19 nt, Artificial Sequence
  Description of Artificial Sequence: Synthetic oligonucleotide
acggucagucacaucccag

SEQ ID NO: 467013 - RNA, 19 nt, Artificial Sequence
  Description of Artificial Sequence: Synthetic oligonucleotide
ggcaaaguugugguagcac

SEQ ID NO: 467014 - RNA, 19 nt, Artificial Sequence
  Description of Artificial Sequence: Synthetic oligonucleotide
ugcuccuagccagcccugc

SEQ ID NO: 467015 - RNA, 19 nt, Artificial Sequence
  Description of Artificial Sequence: Synthetic oligonucleotide
uucagcccuuguagaugcu

SEQ ID NO: 467016 - RNA, 19 nt, Artificial Sequence
  Description of Artificial Sequence: Synthetic oligonucleotide
cagacucagcaacaaggaa

SEQ ID NO: 467017 - RNA, 19 nt, Artificial Sequence
  Description of Artificial Sequence: Synthetic oligonucleotide
uggagcuuagugggaacuu

SEQ ID NO: 467018 - RNA, 19 nt, Artificial Sequence
  Description of Artificial Sequence: Synthetic oligonucleotide
aggucacauuaaaaggaaa

SEQ ID NO: 467019 - RNA, 19 nt, Artificial Sequence
  Description of Artificial Sequence: Synthetic oligonucleotide
caggcuggacaugcuuucc

SEQ ID NO: 467020 - RNA, 19 nt, Artificial Sequence
  Description of Artificial Sequence: Synthetic oligonucleotide
ccguggauccacaccuugg

SEQ ID NO: 467021 - RNA, 19 nt, Artificial Sequence
  Description of Artificial Sequence: Synthetic oligonucleotide
ggagaguauuacucaaggu

SEQ ID NO: 467022 - RNA, 19 nt, Artificial Sequence
  Description of Artificial Sequence: Synthetic oligonucleotide
uugagucgaggagccuggc

SEQ ID NO: 467023 - RNA, 19 nt, Artificial Sequence
  Description of Artificial Sequence: Synthetic oligonucleotide
gcugggaugggcacagccc

SEQ ID NO: 467024 - RNA, 19 nt, Artificial Sequence
  Description of Artificial Sequence: Synthetic oligonucleotide
aucuagugccagccucccu

SEQ ID NO: 467025 - RNA, 19 nt, Artificial Sequence
  Description of Artificial Sequence: Synthetic oligonucleotide
agccaaggacuagggucac

SEQ ID NO: 467026 - RNA, 19 nt, Artificial Sequence
  Description of Artificial Sequence: Synthetic oligonucleotide
ugcucaaggcuuggcacuu

SEQ ID NO: 467027 - RNA, 19 nt, Artificial Sequence
  Description of Artificial Sequence: Synthetic oligonucleotide
gcuggaugcgggccagggg

SEQ ID NO: 467028 - RNA, 19 nt, Artificial Sequence
  Description of Artificial Sequence: Synthetic oligonucleotide
gaucccgguggcccagaca

SEQ ID NO: 467029 - RNA, 19 nt, Artificial Sequence
  Description of Artificial Sequence: Synthetic oligonucleotide
acauagcuucuaccauaaa

SEQ ID NO: 467030 - RNA, 19 nt, Artificial Sequence
  Description of Artificial Sequence: Synthetic oligonucleotide
cagagcagucggucugcug

SEQ ID NO: 467031 - RNA, 19 nt, Artificial Sequence
  Description of Artificial Sequence: Synthetic oligonucleotide
gcgggagccaaggacuagg

SEQ ID NO: 467032 - RNA, 19 nt, Artificial Sequence
  Description of Artificial Sequence: Synthetic oligonucleotide
caccauggaaagcaaugcu

SEQ ID NO: 467033 - RNA, 19 nt, Artificial Sequence
  Description of Artificial Sequence: Synthetic oligonucleotide
gggaaguugccagauccca

SEQ ID NO: 467034 - RNA, 19 nt, Artificial Sequence
  Description of Artificial Sequence: Synthetic oligonucleotide
agguuauugugaggguuua

SEQ ID NO: 467035 - RNA, 19 nt, Artificial Sequence
  Description of Artificial Sequence: Synthetic oligonucleotide
ggcuggugaggguucuagc

SEQ ID NO: 467036 - RNA, 19 nt, Artificial Sequence
  Description of Artificial Sequence: Synthetic oligonucleotide
gcgggccuggcugacauag

SEQ ID NO: 467037 - RNA, 19 nt, Artificial Sequence
  Description of Artificial Sequence: Synthetic oligonucleotide
cagccugcccaucaaggaa

SEQ ID NO: 467038 - RNA, 19 nt, Artificial Sequence
  Description of Artificial Sequence: Synthetic oligonucleotide
uuccguggauccacaccuu

SEQ ID NO: 467039 - RNA, 19 nt, Artificial Sequence
  Description of Artificial Sequence: Synthetic oligonucleotide
gcauagggaucccgguggc

SEQ ID NO: 467040 - RNA, 19 nt, Artificial Sequence
  Description of Artificial Sequence: Synthetic oligonucleotide
cacggucagucacauccca

SEQ ID NO: 467041 - RNA, 19 nt, Artificial Sequence
  Description of Artificial Sequence: Synthetic oligonucleotide
ccugcacccguccuacagc

SEQ ID NO: 467042 - RNA, 19 nt, Artificial Sequence
  Description of Artificial Sequence: Synthetic oligonucleotide
augucacggucagucacau

SEQ ID NO: 467043 - RNA, 19 nt, Artificial Sequence
  Description of Artificial Sequence: Synthetic oligonucleotide
ggagggcaguggcugacac

SEQ ID NO: 467044 - RNA, 19 nt, Artificial Sequence
  Description of Artificial Sequence: Synthetic oligonucleotide
gccaagaagcggcagagau

SEQ ID NO: 467045 - RNA, 19 nt, Artificial Sequence
  Description of Artificial Sequence: Synthetic oligonucleotide
uacuugagucgaggagccu

SEQ ID NO: 467046 - RNA, 19 nt, Artificial Sequence
  Description of Artificial Sequence: Synthetic oligonucleotide
aggcgcuggaugcgggcca

SEQ ID NO: 467047 - RNA, 19 nt, Artificial Sequence
  Description of Artificial Sequence: Synthetic oligonucleotide
gcccugcauagauauauaa

SEQ ID NO: 467048 - RNA, 19 nt, Artificial Sequence
  Description of Artificial Sequence: Synthetic oligonucleotide
aguccgagauggaauccaa

SEQ ID NO: 467049 - RNA, 19 nt, Artificial Sequence
  Description of Artificial Sequence: Synthetic oligonucleotide
ggggaaguugccagauccc

SEQ ID NO: 467050 - RNA, 19 nt, Artificial Sequence
  Description of Artificial Sequence: Synthetic oligonucleotide
ucggaaccccugagaacuu

SEQ ID NO: 467051 - RNA, 19 nt, Artificial Sequence
  Description of Artificial Sequence: Synthetic oligonucleotide
caaacucuuucagcaugga

SEQ ID NO: 467052 - RNA, 19 nt, Artificial Sequence
  Description of Artificial Sequence: Synthetic oligonucleotide
ccaucggaaccccugagaa

SEQ ID NO: 467053 - RNA, 19 nt, Artificial Sequence
  Description of Artificial Sequence: Synthetic oligonucleotide
agccucgcucaagagcacu

SEQ ID NO: 467054 - RNA, 19 nt, Artificial Sequence
  Description of Artificial Sequence: Synthetic oligonucleotide
gcucagugaguccgagaug

SEQ ID NO: 467055 - RNA, 19 nt, Artificial Sequence
  Description of Artificial Sequence: Synthetic oligonucleotide
aaucgggcaccagcuccau

SEQ ID NO: 467056 - RNA, 19 nt, Artificial Sequence
  Description of Artificial Sequence: Synthetic oligonucleotide
cucguuucucagugcagcu

SEQ ID NO: 467057 - RNA, 19 nt, Artificial Sequence
  Description of Artificial Sequence: Synthetic oligonucleotide
cuguccaccaugcucguuu

SEQ ID NO: 467058 - RNA, 19 nt, Artificial Sequence
  Description of Artificial Sequence: Synthetic oligonucleotide
ggucugcacuagauggcag

SEQ ID NO: 467059 - RNA, 19 nt, Artificial Sequence
  Description of Artificial Sequence: Synthetic oligonucleotide
ucggucugcugggcaaagu

SEQ ID NO: 467060 - RNA, 19 nt, Artificial Sequence
  Description of Artificial Sequence: Synthetic oligonucleotide
ucucuccucugugcuugac

SEQ ID NO: 467061 - RNA, 19 nt, Artificial Sequence
  Description of Artificial Sequence: Synthetic oligonucleotide
ucccgguggcccagacaca

SEQ ID NO: 467062 - RNA, 19 nt, Artificial Sequence
  Description of Artificial Sequence: Synthetic oligonucleotide
ccguccuacagccucgcuc

SEQ ID NO: 467063 - RNA, 19 nt, Artificial Sequence
  Description of Artificial Sequence: Synthetic oligonucleotide
cagugaguccgagauggaa

SEQ ID NO: 467064 - RNA, 19 nt, Artificial Sequence
  Description of Artificial Sequence: Synthetic oligonucleotide
ggggacaucucuaggccuc

SEQ ID NO: 467065 - RNA, 19 nt, Artificial Sequence
  Description of Artificial Sequence: Synthetic oligonucleotide
gggccuugcuaagcugucg

SEQ ID NO: 467066 - RNA, 19 nt, Artificial Sequence
  Description of Artificial Sequence: Synthetic oligonucleotide
cugcuccuagccagcccug

SEQ ID NO: 467067 - RNA, 19 nt, Artificial Sequence
  Description of Artificial Sequence: Synthetic oligonucleotide
gucggucugcugggcaaag

SEQ ID NO: 467068 - RNA, 19 nt, Artificial Sequence
  Description of Artificial Sequence: Synthetic oligonucleotide
gcuugguauaucuuuuauu

SEQ ID NO: 467069 - RNA, 19 nt, Artificial Sequence
  Description of Artificial Sequence: Synthetic oligonucleotide
aggccccagccucuuuagu

SEQ ID NO: 467070 - RNA, 19 nt, Artificial Sequence
  Description of Artificial Sequence: Synthetic oligonucleotide
cgagauggaauccaaggua

SEQ ID NO: 467071 - RNA, 19 nt, Artificial Sequence
  Description of Artificial Sequence: Synthetic oligonucleotide
cccgucucaacacuucaca

SEQ ID NO: 467072 - RNA, 19 nt, Artificial Sequence
  Description of Artificial Sequence: Synthetic oligonucleotide
gggucugcacuagauggca

SEQ ID NO: 467073 - RNA, 19 nt, Artificial Sequence
  Description of Artificial Sequence: Synthetic oligonucleotide
gcagguccuugucuaggac

SEQ ID NO: 467074 - RNA, 19 nt, Artificial Sequence
  Description of Artificial Sequence: Synthetic oligonucleotide
gcuggugacgacaagugau

SEQ ID NO: 467075 - RNA, 19 nt, Artificial Sequence
  Description of Artificial Sequence: Synthetic oligonucleotide
guugguagguagacacaua

SEQ ID NO: 467076 - RNA, 19 nt, Artificial Sequence
  Description of Artificial Sequence: Synthetic oligonucleotide
ggaaccccugagaacuuca

SEQ ID NO: 467077 - RNA, 19 nt, Artificial Sequence
  Description of Artificial Sequence: Synthetic oligonucleotide
caaucacuccacuggggau

SEQ ID NO: 467078 - RNA, 19 nt, Artificial Sequence
  Description of Artificial Sequence: Synthetic oligonucleotide
gguauuccguggauccaca

SEQ ID NO: 467079 - RNA, 19 nt, Artificial Sequence
  Description of Artificial Sequence: Synthetic oligonucleotide
gguaggccauaggcuacag

SEQ ID NO: 467080 - RNA, 19 nt, Artificial Sequence
  Description of Artificial Sequence: Synthetic oligonucleotide
cagccgcaugacagccugc

SEQ ID NO: 467081 - RNA, 19 nt, Artificial Sequence
  Description of Artificial Sequence: Synthetic oligonucleotide
agucggucugcugggcaaa

SEQ ID NO: 467082 - RNA, 19 nt, Artificial Sequence
  Description of Artificial Sequence: Synthetic oligonucleotide
ggaaguugccagaucccaa

SEQ ID NO: 467083 - RNA, 19 nt, Artificial Sequence
  Description of Artificial Sequence: Synthetic oligonucleotide
gagcacucgggcacgcucu

SEQ ID NO: 467084 - RNA, 19 nt, Artificial Sequence
  Description of Artificial Sequence: Synthetic oligonucleotide
cagccucgcucaagagcac

SEQ ID NO: 467085 - RNA, 19 nt, Artificial Sequence
  Description of Artificial Sequence: Synthetic oligonucleotide
gcauggagcuuagugggaa

SEQ ID NO: 467086 - RNA, 19 nt, Artificial Sequence
  Description of Artificial Sequence: Synthetic oligonucleotide
cuugcagcugaugccuucu

SEQ ID NO: 467087 - RNA, 19 nt, Artificial Sequence
  Description of Artificial Sequence: Synthetic oligonucleotide
cacagacaaucacuccacu

SEQ ID NO: 467088 - RNA, 19 nt, Artificial Sequence
  Description of Artificial Sequence: Synthetic oligonucleotide
caauggguacaggggcuga

SEQ ID NO: 467089 - RNA, 19 nt, Artificial Sequence
  Description of Artificial Sequence: Synthetic oligonucleotide
gccucuuuagugauggaau

SEQ ID NO: 467090 - RNA, 19 nt, Artificial Sequence
  Description of Artificial Sequence: Synthetic oligonucleotide
gcccggacacagaaggcug

SEQ ID NO: 467091 - RNA, 19 nt, Artificial Sequence
  Description of Artificial Sequence: Synthetic oligonucleotide
gguuccaggcuggagggua

SEQ ID NO: 467092 - RNA, 19 nt, Artificial Sequence
  Description of Artificial Sequence: Synthetic oligonucleotide
gcagucggucugcugggca

SEQ ID NO: 467093 - RNA, 19 nt, Artificial Sequence
  Description of Artificial Sequence: Synthetic oligonucleotide
gaaugacuuuuaggagagu

SEQ ID NO: 467094 - RNA, 19 nt, Artificial Sequence
  Description of Artificial Sequence: Synthetic oligonucleotide
ccgagauggaauccaaggu

SEQ ID NO: 467095 - RNA, 19 nt, Artificial Sequence
  Description of Artificial Sequence: Synthetic oligonucleotide
ggguguuuguagagagaca

SEQ ID NO: 467096 - RNA, 19 nt, Artificial Sequence
  Description of Artificial Sequence: Synthetic oligonucleotide
cagaucccaaagcccugaa

SEQ ID NO: 467097 - RNA, 19 nt, Artificial Sequence
  Description of Artificial Sequence: Synthetic oligonucleotide
ggaacuugcuuugggcagu

SEQ ID NO: 467098 - RNA, 19 nt, Artificial Sequence
  Description of Artificial Sequence: Synthetic oligonucleotide
ggagucccgucucaacacu

SEQ ID NO: 467099 - RNA, 19 nt, Artificial Sequence
  Description of Artificial Sequence: Synthetic oligonucleotide
gguagacacauagcuucua

SEQ ID NO: 467100 - RNA, 19 nt, Artificial Sequence
  Description of Artificial Sequence: Synthetic oligonucleotide
gcuaguucaggugacccuu

SEQ ID NO: 467101 - RNA, 19 nt, Artificial Sequence
  Description of Artificial Sequence: Synthetic oligonucleotide
gccauaggcuacaggugca

SEQ ID NO: 467102 - RNA, 19 nt, Artificial Sequence
  Description of Artificial Sequence: Synthetic oligonucleotide
cccaucggaaccccugaga

SEQ ID NO: 467103 - RNA, 19 nt, Artificial Sequence
  Description of Artificial Sequence: Synthetic oligonucleotide
gcuccuagccagcccugca

SEQ ID NO: 467104 - RNA, 19 nt, Artificial Sequence
  Description of Artificial Sequence: Synthetic oligonucleotide
cacuccuuuccagccagcu

SEQ ID NO: 467105 - RNA, 19 nt, Artificial Sequence
  Description of Artificial Sequence: Synthetic oligonucleotide
cccagagauuaccuagaaa

SEQ ID NO: 467106 - RNA, 19 nt, Artificial Sequence
  Description of Artificial Sequence: Synthetic oligonucleotide
gcccagacacaaagccaag

SEQ ID NO: 467107 - RNA, 19 nt, Artificial Sequence
  Description of Artificial Sequence: Synthetic oligonucleotide
ccccaaucacuccuuucca

SEQ ID NO: 467108 - RNA, 19 nt, Artificial Sequence
  Description of Artificial Sequence: Synthetic oligonucleotide
gggucaguaggagaguauu

SEQ ID NO: 467109 - RNA, 19 nt, Artificial Sequence
  Description of Artificial Sequence: Synthetic oligonucleotide
agcccacuuggagggcagu

SEQ ID NO: 467110 - RNA, 19 nt, Artificial Sequence
  Description of Artificial Sequence: Synthetic oligonucleotide
gagagacagguaggccaua

SEQ ID NO: 467111 - RNA, 19 nt, Artificial Sequence
  Description of Artificial Sequence: Synthetic oligonucleotide
ccccaucggaaccccugag

SEQ ID NO: 467112 - RNA, 19 nt, Artificial Sequence
  Description of Artificial Sequence: Synthetic oligonucleotide
cuucuguauaacggucaau

SEQ ID NO: 467113 - RNA, 19 nt, Artificial Sequence
  Description of Artificial Sequence: Synthetic oligonucleotide
cagccucuuuagugaugga

SEQ ID NO: 467114 - RNA, 19 nt, Artificial Sequence
  Description of Artificial Sequence: Synthetic oligonucleotide
agacuggcccggacacaga

SEQ ID NO: 467115 - RNA, 19 nt, Artificial Sequence
  Description of Artificial Sequence: Synthetic oligonucleotide
ggauagcauccaaggcaga

SEQ ID NO: 467116 - RNA, 19 nt, Artificial Sequence
  Description of Artificial Sequence: Synthetic oligonucleotide
gguuguccauuagcuccuc

SEQ ID NO: 467117 - RNA, 19 nt, Artificial Sequence
  Description of Artificial Sequence: Synthetic oligonucleotide
gcuacaggugcagcaccaa

SEQ ID NO: 467118 - RNA, 19 nt, Artificial Sequence
  Description of Artificial Sequence: Synthetic oligonucleotide
cucgcaggcuggacaugcu

SEQ ID NO: 467119 - RNA, 19 nt, Artificial Sequence
  Description of Artificial Sequence: Synthetic oligonucleotide
gucgggucaguaggagagu

SEQ ID NO: 467120 - RNA, 19 nt, Artificial Sequence
  Description of Artificial Sequence: Synthetic oligonucleotide
gccuugcuaagcugucggu

SEQ ID NO: 467121 - RNA, 19 nt, Artificial Sequence
  Description of Artificial Sequence: Synthetic oligonucleotide
cguggauccacaccuuggu

SEQ ID NO: 467122 - RNA, 19 nt, Artificial Sequence
  Description of Artificial Sequence: Synthetic oligonucleotide
ccggacacagaaggcuguc

SEQ ID NO: 467123 - RNA, 19 nt, Artificial Sequence
  Description of Artificial Sequence: Synthetic oligonucleotide
ccgucucaacacuucacau

SEQ ID NO: 467124 - RNA, 19 nt, Artificial Sequence
  Description of Artificial Sequence: Synthetic oligonucleotide
cccgguggcccagacacaa

SEQ ID NO: 467125 - RNA, 19 nt, Artificial Sequence
  Description of Artificial Sequence: Synthetic oligonucleotide
cagcgagggcugcacugcu

SEQ ID NO: 467126 - RNA, 19 nt, Artificial Sequence
  Description of Artificial Sequence: Synthetic oligonucleotide
gcacagcgagggcugcacu

SEQ ID NO: 467127 - RNA, 19 nt, Artificial Sequence
  Description of Artificial Sequence: Synthetic oligonucleotide
gccuuaggccucacagacu

SEQ ID NO: 467128 - RNA, 19 nt, Artificial Sequence
  Description of Artificial Sequence: Synthetic oligonucleotide
ccagacuggcccggacaca

SEQ ID NO: 467129 - RNA, 19 nt, Artificial Sequence
  Description of Artificial Sequence: Synthetic oligonucleotide
cccguccuacagccucgcu

SEQ ID NO: 467130 - RNA, 19 nt, Artificial Sequence
  Description of Artificial Sequence: Synthetic oligonucleotide
cgggccuggcugacauagu

SEQ ID NO: 467131 - RNA, 19 nt, Artificial Sequence
  Description of Artificial Sequence: Synthetic oligonucleotide
auaauuaaugaacacgacc

SEQ ID NO: 467132 - RNA, 19 nt, Artificial Sequence
  Description of Artificial Sequence: Synthetic oligonucleotide
ucagauaucacuaugagua

SEQ ID NO: 467133 - RNA, 19 nt, Artificial Sequence
  Description of Artificial Sequence: Synthetic oligonucleotide
uuauaauuaaugaacacga

SEQ ID NO: 467134 - RNA, 19 nt, Artificial Sequence
  Description of Artificial Sequence: Synthetic oligonucleotide
auuauaauuaaugaacacg

SEQ ID NO: 467135 - RNA, 19 nt, Artificial Sequence
  Description of Artificial Sequence: Synthetic oligonucleotide
uuaauuguguuucaggaca

SEQ ID NO: 467136 - RNA, 19 nt, Artificial Sequence
  Description of Artificial Sequence: Synthetic oligonucleotide
ucuauugacgucaaggagc

SEQ ID NO: 467137 - RNA, 19 nt, Artificial Sequence
  Description of Artificial Sequence: Synthetic oligonucleotide
uuaaugaacacgaccaacc

SEQ ID NO: 467138 - RNA, 19 nt, Artificial Sequence
  Description of Artificial Sequence: Synthetic oligonucleotide
aagaccagcaacuauucag

SEQ ID NO: 467139 - RNA, 19 nt, Artificial Sequence
  Description of Artificial Sequence: Synthetic oligonucleotide
aacuuaauuguguuucagg

SEQ ID NO: 467140 - RNA, 19 nt, Artificial Sequence
  Description of Artificial Sequence: Synthetic oligonucleotide
cucuacaugacacugauac

SEQ ID NO: 467141 - RNA, 19 nt, Artificial Sequence
  Description of Artificial Sequence: Synthetic oligonucleotide
aucacuaucagauaucacu

SEQ ID NO: 467142 - RNA, 19 nt, Artificial Sequence
  Description of Artificial Sequence: Synthetic oligonucleotide
ucuauuaucaacccgcuua

SEQ ID NO: 467143 - RNA, 19 nt, Artificial Sequence
  Description of Artificial Sequence: Synthetic oligonucleotide
aacagaauacuauucacaa

SEQ ID NO: 467144 - RNA, 19 nt, Artificial Sequence
  Description of Artificial Sequence: Synthetic oligonucleotide
ucuucauacugacagaacu

SEQ ID NO: 467145 - RNA, 19 nt, Artificial Sequence
  Description of Artificial Sequence: Synthetic oligonucleotide
gaacaaaagacuugauggg

SEQ ID NO: 467146 - RNA, 19 nt, Artificial Sequence
  Description of Artificial Sequence: Synthetic oligonucleotide
ugauaaaccuccaacuggc

SEQ ID NO: 467147 - RNA, 19 nt, Artificial Sequence
  Description of Artificial Sequence: Synthetic oligonucleotide
aucucuauuaucaacccgc

SEQ ID NO: 467148 - RNA, 19 nt, Artificial Sequence
  Description of Artificial Sequence: Synthetic oligonucleotide
aagucuacgcuucuucuuc

SEQ ID NO: 467149 - RNA, 19 nt, Artificial Sequence
  Description of Artificial Sequence: Synthetic oligonucleotide
ugaccggaaaguaaauugg

SEQ ID NO: 467150 - RNA, 19 nt, Artificial Sequence
  Description of Artificial Sequence: Synthetic oligonucleotide
ugcuuugugaggcagacac

SEQ ID NO: 467151 - RNA, 19 nt, Artificial Sequence
  Description of Artificial Sequence: Synthetic oligonucleotide
uaugaguaaguccucaagu

SEQ ID NO: 467152 - RNA, 19 nt, Artificial Sequence
  Description of Artificial Sequence: Synthetic oligonucleotide
acuuaauuguguuucagga

SEQ ID NO: 467153 - RNA, 19 nt, Artificial Sequence
  Description of Artificial Sequence: Synthetic oligonucleotide
uaucagauaucacuaugag

SEQ ID NO: 467154 - RNA, 19 nt, Artificial Sequence
  Description of Artificial Sequence: Synthetic oligonucleotide
augaguaaguccucaaguc

SEQ ID NO: 467155 - RNA, 19 nt, Artificial Sequence
  Description of Artificial Sequence: Synthetic oligonucleotide
uuucauuguggucccaggg

SEQ ID NO: 467156 - RNA, 19 nt, Artificial Sequence
  Description of Artificial Sequence: Synthetic oligonucleotide
aucacuaugaguaaguccu

SEQ ID NO: 467157 - RNA, 19 nt, Artificial Sequence
  Description of Artificial Sequence: Synthetic oligonucleotide
acacugauacucuccaagc

SEQ ID NO: 467158 - RNA, 19 nt, Artificial Sequence
  Description of Artificial Sequence: Synthetic oligonucleotide
aggacuaagcuucucuuac

SEQ ID NO: 467159 - RNA, 19 nt, Artificial Sequence
  Description of Artificial Sequence: Synthetic oligonucleotide
aauaccccagaaguagugc

SEQ ID NO: 467160 - RNA, 19 nt, Artificial Sequence
  Description of Artificial Sequence: Synthetic oligonucleotide
uuuaacguucucauucuca

SEQ ID NO: 467161 - RNA, 19 nt, Artificial Sequence
  Description of Artificial Sequence: Synthetic oligonucleotide
agaacucucuggcauaagg

SEQ ID NO: 467162 - RNA, 19 nt, Artificial Sequence
  Description of Artificial Sequence: Synthetic oligonucleotide
aaugcuuugugaggcagac

SEQ ID NO: 467163 - RNA, 19 nt, Artificial Sequence
  Description of Artificial Sequence: Synthetic oligonucleotide
ggugaagguauccugaagg

SEQ ID NO: 467164 - RNA, 19 nt, Artificial Sequence
  Description of Artificial Sequence: Synthetic oligonucleotide
agcaauaaugguucugguc

SEQ ID NO: 467165 - RNA, 19 nt, Artificial Sequence
  Description of Artificial Sequence: Synthetic oligonucleotide
ucuuacuggucaaagcggc

SEQ ID NO: 467166 - RNA, 19 nt, Artificial Sequence
  Description of Artificial Sequence: Synthetic oligonucleotide
aggaacaaaagacuugaug

SEQ ID NO: 467167 - RNA, 19 nt, Artificial Sequence
  Description of Artificial Sequence: Synthetic oligonucleotide
ugagccuuuaaacagugau

SEQ ID NO: 467168 - RNA, 19 nt, Artificial Sequence
  Description of Artificial Sequence: Synthetic oligonucleotide
ugagcagucgaccucgacc

SEQ ID NO: 467169 - RNA, 19 nt, Artificial Sequence
  Description of Artificial Sequence: Synthetic oligonucleotide
uaucacuaugaguaagucc

SEQ ID NO: 467170 - RNA, 19 nt, Artificial Sequence
  Description of Artificial Sequence: Synthetic oligonucleotide
ugaguaaguccucaagucu

SEQ ID NO: 467171 - RNA, 19 nt, Artificial Sequence
  Description of Artificial Sequence: Synthetic oligonucleotide
uuaucaacccgcuuaucgc

SEQ ID NO: 467172 - RNA, 19 nt, Artificial Sequence
  Description of Artificial Sequence: Synthetic oligonucleotide
ugcaauacauggcaugcug

SEQ ID NO: 467173 - RNA, 19 nt, Artificial Sequence
  Description of Artificial Sequence: Synthetic oligonucleotide
auugccuagacgugucccc

SEQ ID NO: 467174 - RNA, 19 nt, Artificial Sequence
  Description of Artificial Sequence: Synthetic oligonucleotide
cuagagaccauuauaauua

SEQ ID NO: 467175 - RNA, 19 nt, Artificial Sequence
  Description of Artificial Sequence: Synthetic oligonucleotide
aaagcggcaaugcuuugug

SEQ ID NO: 467176 - RNA, 19 nt, Artificial Sequence
  Description of Artificial Sequence: Synthetic oligonucleotide
gaauggaauaccccagaag

SEQ ID NO: 467177 - RNA, 19 nt, Artificial Sequence
  Description of Artificial Sequence: Synthetic oligonucleotide
acuaucagauaucacuaug

SEQ ID NO: 467178 - RNA, 19 nt, Artificial Sequence
  Description of Artificial Sequence: Synthetic oligonucleotide
aauuaaugaacacgaccaa

SEQ ID NO: 467179 - RNA, 19 nt, Artificial Sequence
  Description of Artificial Sequence: Synthetic oligonucleotide
uucauuguggucccagggc

SEQ ID NO: 467180 - RNA, 19 nt, Artificial Sequence
  Description of Artificial Sequence: Synthetic oligonucleotide
ugaauagauuuuauacaac

SEQ ID NO: 467181 - RNA, 19 nt, Artificial Sequence
  Description of Artificial Sequence: Synthetic oligonucleotide
cuagcaauggcuuuccuca

SEQ ID NO: 467182 - RNA, 19 nt, Artificial Sequence
  Description of Artificial Sequence: Synthetic oligonucleotide
uuguguccuaccaucacgc

SEQ ID NO: 467183 - RNA, 19 nt, Artificial Sequence
  Description of Artificial Sequence: Synthetic oligonucleotide
cugauacucuccaagcggg

SEQ ID NO: 467184 - RNA, 19 nt, Artificial Sequence
  Description of Artificial Sequence: Synthetic oligonucleotide
uuuucucuacaccugugcu

SEQ ID NO: 467185 - RNA, 19 nt, Artificial Sequence
  Description of Artificial Sequence: Synthetic oligonucleotide
acuagagaccauuauaauu

SEQ ID NO: 467186 - RNA, 19 nt, Artificial Sequence
  Description of Artificial Sequence: Synthetic oligonucleotide
aauagauuuuauacaacau

SEQ ID NO: 467187 - RNA, 19 nt, Artificial Sequence
  Description of Artificial Sequence: Synthetic oligonucleotide
gcaauaaugguucugguca

SEQ ID NO: 467188 - RNA, 19 nt, Artificial Sequence
  Description of Artificial Sequence: Synthetic oligonucleotide
cuacgcuucuucuucauac

SEQ ID NO: 467189 - RNA, 19 nt, Artificial Sequence
  Description of Artificial Sequence: Synthetic oligonucleotide
uggucuuuaaaauccacua

SEQ ID NO: 467190 - RNA, 19 nt, Artificial Sequence
  Description of Artificial Sequence: Synthetic oligonucleotide
uaaguccucaagucuacgc

SEQ ID NO: 467191 - RNA, 19 nt, Artificial Sequence
  Description of Artificial Sequence: Synthetic oligonucleotide
cuucauacugacagaacug

SEQ ID NO: 467192 - RNA, 19 nt, Artificial Sequence
  Description of Artificial Sequence: Synthetic oligonucleotide
aaacucucacaacaaacua

SEQ ID NO: 467193 - RNA, 19 nt, Artificial Sequence
  Description of Artificial Sequence: Synthetic oligonucleotide
uauugguuaggaucuacuc

SEQ ID NO: 467194 - RNA, 19 nt, Artificial Sequence
  Description of Artificial Sequence: Synthetic oligonucleotide
aauccacuaagcaauuugu

SEQ ID NO: 467195 - RNA, 19 nt, Artificial Sequence
  Description of Artificial Sequence: Synthetic oligonucleotide
aacacgaccaacccagcaa

SEQ ID NO: 467196 - RNA, 19 nt, Artificial Sequence
  Description of Artificial Sequence: Synthetic oligonucleotide
auugacgucaaggagcuca

SEQ ID NO: 467197 - RNA, 19 nt, Artificial Sequence
  Description of Artificial Sequence: Synthetic oligonucleotide
agcggcaaugcuuugugag

SEQ ID NO: 467198 - RNA, 19 nt, Artificial Sequence
  Description of Artificial Sequence: Synthetic oligonucleotide
aucagauaucacuaugagu

SEQ ID NO: 467199 - RNA, 19 nt, Artificial Sequence
  Description of Artificial Sequence: Synthetic oligonucleotide
acuagaugagaaugcagga

SEQ ID NO: 467200 - RNA, 19 nt, Artificial Sequence
  Description of Artificial Sequence: Synthetic oligonucleotide
acgucaaggagcucagggg

SEQ ID NO: 467201 - RNA, 19 nt, Artificial Sequence
  Description of Artificial Sequence: Synthetic oligonucleotide
cuuacauagguaacacuuc

SEQ ID NO: 467202 - RNA, 19 nt, Artificial Sequence
  Description of Artificial Sequence: Synthetic oligonucleotide
agacucauuuaaguugagc

SEQ ID NO: 467203 - RNA, 19 nt, Artificial Sequence
  Description of Artificial Sequence: Synthetic oligonucleotide
cuaugaguaaguccucaag

SEQ ID NO: 467204 - RNA, 19 nt, Artificial Sequence
  Description of Artificial Sequence: Synthetic oligonucleotide
uucucuuacuggucaaagc

SEQ ID NO: 467205 - RNA, 19 nt, Artificial Sequence
  Description of Artificial Sequence: Synthetic oligonucleotide
acuuacauagguaacacuu

SEQ ID NO: 467206 - RNA, 19 nt, Artificial Sequence
  Description of Artificial Sequence: Synthetic oligonucleotide
aauaaugguucuggucauc

SEQ ID NO: 467207 - RNA, 19 nt, Artificial Sequence
  Description of Artificial Sequence: Synthetic oligonucleotide
uacgccuucagcugguagc

SEQ ID NO: 467208 - RNA, 19 nt, Artificial Sequence
  Description of Artificial Sequence: Synthetic oligonucleotide
uuuagccaaacacuuugau

SEQ ID NO: 467209 - RNA, 19 nt, Artificial Sequence
  Description of Artificial Sequence: Synthetic oligonucleotide
aguacaucugucaaaacau

SEQ ID NO: 467210 - RNA, 19 nt, Artificial Sequence
  Description of Artificial Sequence: Synthetic oligonucleotide
gucaaaacauuuaacguuc

SEQ ID NO: 467211 - RNA, 19 nt, Artificial Sequence
  Description of Artificial Sequence: Synthetic oligonucleotide
aacucugcgucucuccacu

SEQ ID NO: 467212 - RNA, 19 nt, Artificial Sequence
  Description of Artificial Sequence: Synthetic oligonucleotide
ucaggggaacuuaauugug

SEQ ID NO: 467213 - RNA, 19 nt, Artificial Sequence
  Description of Artificial Sequence: Synthetic oligonucleotide
uuaaacagugaugaaggua

SEQ ID NO: 467214 - RNA, 19 nt, Artificial Sequence
  Description of Artificial Sequence: Synthetic oligonucleotide
uaucaacccgcuuaucgcu

SEQ ID NO: 467215 - RNA, 19 nt, Artificial Sequence
  Description of Artificial Sequence: Synthetic oligonucleotide
ucuagcaauggcuuuccuc

SEQ ID NO: 467216 - RNA, 19 nt, Artificial Sequence
  Description of Artificial Sequence: Synthetic oligonucleotide
uugucuccgagucauuacu

SEQ ID NO: 467217 - RNA, 19 nt, Artificial Sequence
  Description of Artificial Sequence: Synthetic oligonucleotide
cucuauugacgucaaggag

SEQ ID NO: 467218 - RNA, 19 nt, Artificial Sequence
  Description of Artificial Sequence: Synthetic oligonucleotide
uccgugaccggaaaguaaa

SEQ ID NO: 467219 - RNA, 19 nt, Artificial Sequence
  Description of Artificial Sequence: Synthetic oligonucleotide
auaucacuaugaguaaguc

SEQ ID NO: 467220 - RNA, 19 nt, Artificial Sequence
  Description of Artificial Sequence: Synthetic oligonucleotide
agaccagcaacuauucagg

SEQ ID NO: 467221 - RNA, 19 nt, Artificial Sequence
  Description of Artificial Sequence: Synthetic oligonucleotide
cauggcaugcuguucaauc

SEQ ID NO: 467222 - RNA, 19 nt, Artificial Sequence
  Description of Artificial Sequence: Synthetic oligonucleotide
uguucgacuguuuugucuu

SEQ ID NO: 467223 - RNA, 19 nt, Artificial Sequence
  Description of Artificial Sequence: Synthetic oligonucleotide
cucacucauuuugagagcc

SEQ ID NO: 467224 - RNA, 19 nt, Artificial Sequence
  Description of Artificial Sequence: Synthetic oligonucleotide
caguacaucugucaaaaca

SEQ ID NO: 467225 - RNA, 19 nt, Artificial Sequence
  Description of Artificial Sequence: Synthetic oligonucleotide
agauaucacuaugaguaag

SEQ ID NO: 467226 - RNA, 19 nt, Artificial Sequence
  Description of Artificial Sequence: Synthetic oligonucleotide
gaacuuaauuguguuucag

SEQ ID NO: 467227 - RNA, 19 nt, Artificial Sequence
  Description of Artificial Sequence: Synthetic oligonucleotide
uucccugacugacauguga

SEQ ID NO: 467228 - RNA, 19 nt, Artificial Sequence
  Description of Artificial Sequence: Synthetic oligonucleotide
agcaauuuguggcuucuga

SEQ ID NO: 467229 - RNA, 19 nt, Artificial Sequence
  Description of Artificial Sequence: Synthetic oligonucleotide
aggagugggauuuugcuuu

SEQ ID NO: 467230 - RNA, 19 nt, Artificial Sequence
  Description of Artificial Sequence: Synthetic oligonucleotide
gacugagcagucgaccucg

SEQ ID NO: 467231 - RNA, 19 nt, Artificial Sequence
  Description of Artificial Sequence: Synthetic oligonucleotide
aagacugaccaugacuggu

SEQ ID NO: 467232 - RNA, 19 nt, Artificial Sequence
  Description of Artificial Sequence: Synthetic oligonucleotide
uggcauaaggacuaagcuu

SEQ ID NO: 467233 - RNA, 19 nt, Artificial Sequence
  Description of Artificial Sequence: Synthetic oligonucleotide
acauugccuagacgugucc

SEQ ID NO: 467234 - RNA, 19 nt, Artificial Sequence
  Description of Artificial Sequence: Synthetic oligonucleotide
ucucuauuaucaacccgcu

SEQ ID NO: 467235 - RNA, 19 nt, Artificial Sequence
  Description of Artificial Sequence: Synthetic oligonucleotide
acaaacuagagaccauuau

SEQ ID NO: 467236 - RNA, 19 nt, Artificial Sequence
  Description of Artificial Sequence: Synthetic oligonucleotide
gacauugguguauugguua

SEQ ID NO: 467237 - RNA, 19 nt, Artificial Sequence
  Description of Artificial Sequence: Synthetic oligonucleotide
cuagucucaucuucuuggc

SEQ ID NO: 467238 - RNA, 19 nt, Artificial Sequence
  Description of Artificial Sequence: Synthetic oligonucleotide
aacagggucaaaacucuca

SEQ ID NO: 467239 - RNA, 19 nt, Artificial Sequence
  Description of Artificial Sequence: Synthetic oligonucleotide
ugucuccgagucauuacug

SEQ ID NO: 467240 - RNA, 19 nt, Artificial Sequence
  Description of Artificial Sequence: Synthetic oligonucleotide
gaugggagacucauuuaag

SEQ ID NO: 467241 - RNA, 19 nt, Artificial Sequence
  Description of Artificial Sequence: Synthetic oligonucleotide
aaggacuaagcuucucuua

SEQ ID NO: 467242 - RNA, 19 nt, Artificial Sequence
  Description of Artificial Sequence: Synthetic oligonucleotide
ggcauaaggacuaagcuuc

SEQ ID NO: 467243 - RNA, 19 nt, Artificial Sequence
  Description of Artificial Sequence: Synthetic oligonucleotide
agaaaaggaggucuaggua

SEQ ID NO: 467244 - RNA, 19 nt, Artificial Sequence
  Description of Artificial Sequence: Synthetic oligonucleotide
guucaaucuuugugggagg

SEQ ID NO: 467245 - RNA, 19 nt, Artificial Sequence
  Description of Artificial Sequence: Synthetic oligonucleotide
uugacgucaaggagcucag

SEQ ID NO: 467246 - RNA, 19 nt, Artificial Sequence
  Description of Artificial Sequence: Synthetic oligonucleotide
gaugcccuagauuccugcc

SEQ ID NO: 467247 - RNA, 19 nt, Artificial Sequence
  Description of Artificial Sequence: Synthetic oligonucleotide
cacaacaaacuagagacca

SEQ ID NO: 467248 - RNA, 19 nt, Artificial Sequence
  Description of Artificial Sequence: Synthetic oligonucleotide
agaagaccagcaacuauuc

SEQ ID NO: 467249 - RNA, 19 nt, Artificial Sequence
  Description of Artificial Sequence: Synthetic oligonucleotide
caugacugguuguugguuc

SEQ ID NO: 467250 - RNA, 19 nt, Artificial Sequence
  Description of Artificial Sequence: Synthetic oligonucleotide
guaggaagacauugccuag

SEQ ID NO: 467251 - RNA, 19 nt, Artificial Sequence
  Description of Artificial Sequence: Synthetic oligonucleotide
auaccccagaaguagugca

SEQ ID NO: 467252 - RNA, 19 nt, Artificial Sequence
  Description of Artificial Sequence: Synthetic oligonucleotide
cauucauucuggaucagaa

SEQ ID NO: 467253 - RNA, 19 nt, Artificial Sequence
  Description of Artificial Sequence: Synthetic oligonucleotide
guaacacuucuccuucuug

SEQ ID NO: 467254 - RNA, 19 nt, Artificial Sequence
  Description of Artificial Sequence: Synthetic oligonucleotide
gcucaggggaacuuaauug

SEQ ID NO: 467255 - RNA, 19 nt, Artificial Sequence
  Description of Artificial Sequence: Synthetic oligonucleotide
agacacagaguuuccuucu

SEQ ID NO: 467256 - RNA, 19 nt, Artificial Sequence
  Description of Artificial Sequence: Synthetic oligonucleotide
agccucguuucccugacug

SEQ ID NO: 467257 - RNA, 19 nt, Artificial Sequence
  Description of Artificial Sequence: Synthetic oligonucleotide
agacuguuccaggagacug

SEQ ID NO: 467258 - RNA, 19 nt, Artificial Sequence
  Description of Artificial Sequence: Synthetic oligonucleotide
uuucuagcaauggcuuucc

SEQ ID NO: 467259 - RNA, 19 nt, Artificial Sequence
  Description of Artificial Sequence: Synthetic oligonucleotide
agacugagcagucgaccuc

SEQ ID NO: 467260 - RNA, 19 nt, Artificial Sequence
  Description of Artificial Sequence: Synthetic oligonucleotide
gaauaccccagaaguagug

SEQ ID NO: 467261 - RNA, 19 nt, Artificial Sequence
  Description of Artificial Sequence: Synthetic oligonucleotide
ucuuugugggaggaaaguc

SEQ ID NO: 467262 - RNA, 19 nt, Artificial Sequence
  Description of Artificial Sequence: Synthetic oligonucleotide
cuuucuagcaauggcuuuc

SEQ ID NO: 467263 - RNA, 19 nt, Artificial Sequence
  Description of Artificial Sequence: Synthetic oligonucleotide
uguauugguuaggaucuac

SEQ ID NO: 467264 - RNA, 19 nt, Artificial Sequence
  Description of Artificial Sequence: Synthetic oligonucleotide
gaccagcaacuauucaggc

SEQ ID NO: 467265 - RNA, 19 nt, Artificial Sequence
  Description of Artificial Sequence: Synthetic oligonucleotide
agcgggaccagggacuuac

SEQ ID NO: 467266 - RNA, 19 nt, Artificial Sequence
  Description of Artificial Sequence: Synthetic oligonucleotide
accggaaaguaaauugguc

SEQ ID NO: 467267 - RNA, 19 nt, Artificial Sequence
  Description of Artificial Sequence: Synthetic oligonucleotide
caggcucuucugauaaacc

SEQ ID NO: 467268 - RNA, 19 nt, Artificial Sequence
  Description of Artificial Sequence: Synthetic oligonucleotide
acuaugaguaaguccucaa

SEQ ID NO: 467269 - RNA, 19 nt, Artificial Sequence
  Description of Artificial Sequence: Synthetic oligonucleotide
gacugaccaugacugguug

SEQ ID NO: 467270 - RNA, 19 nt, Artificial Sequence
  Description of Artificial Sequence: Synthetic oligonucleotide
ucguuucccugacugacau

SEQ ID NO: 467271 - RNA, 19 nt, Artificial Sequence
  Description of Artificial Sequence: Synthetic oligonucleotide
aguugcgcacacucuuguc

SEQ ID NO: 467272 - RNA, 19 nt, Artificial Sequence
  Description of Artificial Sequence: Synthetic oligonucleotide
cuaagcaauuuguggcuuc

SEQ ID NO: 467273 - RNA, 19 nt, Artificial Sequence
  Description of Artificial Sequence: Synthetic oligonucleotide
ugauuugguccgugaccgg

SEQ ID NO: 467274 - RNA, 19 nt, Artificial Sequence
  Description of Artificial Sequence: Synthetic oligonucleotide
caaaagacuugaugggaga

SEQ ID NO: 467275 - RNA, 19 nt, Artificial Sequence
  Description of Artificial Sequence: Synthetic oligonucleotide
augacugguuguugguucu

SEQ ID NO: 467276 - RNA, 19 nt, Artificial Sequence
  Description of Artificial Sequence: Synthetic oligonucleotide
cucugucgcgccuugcgag

SEQ ID NO: 467277 - RNA, 19 nt, Artificial Sequence
  Description of Artificial Sequence: Synthetic oligonucleotide
cagggacuuacauagguaa

SEQ ID NO: 467278 - RNA, 19 nt, Artificial Sequence
  Description of Artificial Sequence: Synthetic oligonucleotide
uugguccgugaccggaaag

SEQ ID NO: 467279 - RNA, 19 nt, Artificial Sequence
  Description of Artificial Sequence: Synthetic oligonucleotide
agggacuuacauagguaac

SEQ ID NO: 467280 - RNA, 19 nt, Artificial Sequence
  Description of Artificial Sequence: Synthetic oligonucleotide
ucacucauuuugagagcca

SEQ ID NO: 467281 - RNA, 19 nt, Artificial Sequence
  Description of Artificial Sequence: Synthetic oligonucleotide
ucacgcuuguuccuggcuu

SEQ ID NO: 467282 - RNA, 19 nt, Artificial Sequence
  Description of Artificial Sequence: Synthetic oligonucleotide
cuggucaaagcggcaaugc

SEQ ID NO: 467283 - RNA, 19 nt, Artificial Sequence
  Description of Artificial Sequence: Synthetic oligonucleotide
auucugacuccaaugggga

SEQ ID NO: 467284 - RNA, 19 nt, Artificial Sequence
  Description of Artificial Sequence: Synthetic oligonucleotide
ucugucgcgccuugcgagc

SEQ ID NO: 467285 - RNA, 19 nt, Artificial Sequence
  Description of Artificial Sequence: Synthetic oligonucleotide
cauugccuagacguguccc

SEQ ID NO: 467286 - RNA, 19 nt, Artificial Sequence
  Description of Artificial Sequence: Synthetic oligonucleotide
gacagaugcccuagauucc

SEQ ID NO: 467287 - RNA, 19 nt, Artificial Sequence
  Description of Artificial Sequence: Synthetic oligonucleotide
guuucccugacugacaugu

SEQ ID NO: 467288 - RNA, 19 nt, Artificial Sequence
  Description of Artificial Sequence: Synthetic oligonucleotide
ucaacccgcuuaucgcuca

SEQ ID NO: 467289 - RNA, 19 nt, Artificial Sequence
  Description of Artificial Sequence: Synthetic oligonucleotide
gaacacgaccaacccagca

SEQ ID NO: 467290 - RNA, 19 nt, Artificial Sequence
  Description of Artificial Sequence: Synthetic oligonucleotide
ggaagacauugccuagacg

SEQ ID NO: 467291 - RNA, 19 nt, Artificial Sequence
  Description of Artificial Sequence: Synthetic oligonucleotide
gauuugguccgugaccgga

SEQ ID NO: 467292 - RNA, 19 nt, Artificial Sequence
  Description of Artificial Sequence: Synthetic oligonucleotide
acagaugcccuagauuccu

SEQ ID NO: 467293 - RNA, 19 nt, Artificial Sequence
  Description of Artificial Sequence: Synthetic oligonucleotide
cuauugacgucaaggagcu

SEQ ID NO: 467294 - RNA, 19 nt, Artificial Sequence
  Description of Artificial Sequence: Synthetic oligonucleotide
gcagcuagccucuuccacc

SEQ ID NO: 467295 - RNA, 19 nt, Artificial Sequence
  Description of Artificial Sequence: Synthetic oligonucleotide
cacuagucucaucuucuug

SEQ ID NO: 467296 - RNA, 19 nt, Artificial Sequence
  Description of Artificial Sequence: Synthetic oligonucleotide
guaaguccucaagucuacg

SEQ ID NO: 467297 - RNA, 19 nt, Artificial Sequence
  Description of Artificial Sequence: Synthetic oligonucleotide
caucacuaucagauaucac

SEQ ID NO: 467298 - RNA, 19 nt, Artificial Sequence
  Description of Artificial Sequence: Synthetic oligonucleotide
uuugguccgugaccggaaa

SEQ ID NO: 467299 - RNA, 19 nt, Artificial Sequence
  Description of Artificial Sequence: Synthetic oligonucleotide
acccgcuuaucgcucacug

SEQ ID NO: 467300 - RNA, 19 nt, Artificial Sequence
  Description of Artificial Sequence: Synthetic oligonucleotide
aagcggcaaugcuuuguga

SEQ ID NO: 467301 - RNA, 19 nt, Artificial Sequence
  Description of Artificial Sequence: Synthetic oligonucleotide
gacacccgggcacuagaug

SEQ ID NO: 467302 - RNA, 19 nt, Artificial Sequence
  Description of Artificial Sequence: Synthetic oligonucleotide
cuacccuggacagcuuugg

SEQ ID NO: 467303 - RNA, 19 nt, Artificial Sequence
  Description of Artificial Sequence: Synthetic oligonucleotide
agaacucuucagaacuucu

SEQ ID NO: 467304 - RNA, 19 nt, Artificial Sequence
  Description of Artificial Sequence: Synthetic oligonucleotide
gggauguugcugcuauccg

SEQ ID NO: 467305 - RNA, 19 nt, Artificial Sequence
  Description of Artificial Sequence: Synthetic oligonucleotide
cucaggggaacuuaauugu

SEQ ID NO: 467306 - RNA, 19 nt, Artificial Sequence
  Description of Artificial Sequence: Synthetic oligonucleotide
agucuuggccacacagugg

SEQ ID NO: 467307 - RNA, 19 nt, Artificial Sequence
  Description of Artificial Sequence: Synthetic oligonucleotide
acugaccaugacugguugu

SEQ ID NO: 467308 - RNA, 19 nt, Artificial Sequence
  Description of Artificial Sequence: Synthetic oligonucleotide
uucugcaauccauucucuu

SEQ ID NO: 467309 - RNA, 19 nt, Artificial Sequence
  Description of Artificial Sequence: Synthetic oligonucleotide
uguguccuaccaucacgcu

SEQ ID NO: 467310 - RNA, 19 nt, Artificial Sequence
  Description of Artificial Sequence: Synthetic oligonucleotide
gcggcaaugcuuugugagg

SEQ ID NO: 467311 - RNA, 19 nt, Artificial Sequence
  Description of Artificial Sequence: Synthetic oligonucleotide
cagugggcaggacacccgg

SEQ ID NO: 467312 - RNA, 19 nt, Artificial Sequence
  Description of Artificial Sequence: Synthetic oligonucleotide
gccauacgccuucagcugg

SEQ ID NO: 467313 - RNA, 19 nt, Artificial Sequence
  Description of Artificial Sequence: Synthetic oligonucleotide
ucuguucgacuguuuuguc

SEQ ID NO: 467314 - RNA, 19 nt, Artificial Sequence
  Description of Artificial Sequence: Synthetic oligonucleotide
gcugccauacgccuucagc

SEQ ID NO: 467315 - RNA, 19 nt, Artificial Sequence
  Description of Artificial Sequence: Synthetic oligonucleotide
ugcugcuauccggagaguc

SEQ ID NO: 467316 - RNA, 19 nt, Artificial Sequence
  Description of Artificial Sequence: Synthetic oligonucleotide
uugcaauacauggcaugcu

SEQ ID NO: 467317 - RNA, 19 nt, Artificial Sequence
  Description of Artificial Sequence: Synthetic oligonucleotide
aucaacccgcuuaucgcuc

SEQ ID NO: 467318 - RNA, 19 nt, Artificial Sequence
  Description of Artificial Sequence: Synthetic oligonucleotide
ucacuagucucaucuucuu

SEQ ID NO: 467319 - RNA, 19 nt, Artificial Sequence
  Description of Artificial Sequence: Synthetic oligonucleotide
aucacgcuuguuccuggcu

SEQ ID NO: 467320 - RNA, 19 nt, Artificial Sequence
  Description of Artificial Sequence: Synthetic oligonucleotide
caucacgcuuguuccuggc

SEQ ID NO: 467321 - RNA, 19 nt, Artificial Sequence
  Description of Artificial Sequence: Synthetic oligonucleotide
gacuuacauagguaacacu

SEQ ID NO: 467322 - RNA, 19 nt, Artificial Sequence
  Description of Artificial Sequence: Synthetic oligonucleotide
agcaacuauucaggcuuuc

SEQ ID NO: 467323 - RNA, 19 nt, Artificial Sequence
  Description of Artificial Sequence: Synthetic oligonucleotide
uucugacuccaauggggau

SEQ ID NO: 467324 - RNA, 19 nt, Artificial Sequence
  Description of Artificial Sequence: Synthetic oligonucleotide
cuuccccuccacaguugcg

SEQ ID NO: 467325 - RNA, 19 nt, Artificial Sequence
  Description of Artificial Sequence: Synthetic oligonucleotide
gggacuuacauagguaaca

SEQ ID NO: 467326 - RNA, 19 nt, Artificial Sequence
  Description of Artificial Sequence: Synthetic oligonucleotide
cagaagaccagcaacuauu

SEQ ID NO: 467327 - RNA, 19 nt, Artificial Sequence
  Description of Artificial Sequence: Synthetic oligonucleotide
ucgacuguuuugucuucau

SEQ ID NO: 467328 - RNA, 19 nt, Artificial Sequence
  Description of Artificial Sequence: Synthetic oligonucleotide
cuggaucagaaaaggaggu

SEQ ID NO: 467329 - RNA, 19 nt, Artificial Sequence
  Description of Artificial Sequence: Synthetic oligonucleotide
uacauggcaugcuguucaa

SEQ ID NO: 467330 - RNA, 19 nt, Artificial Sequence
  Description of Artificial Sequence: Synthetic oligonucleotide
agagaccggcuccucuuca

SEQ ID NO: 467331 - RNA, 19 nt, Artificial Sequence
  Description of Artificial Sequence: Synthetic oligonucleotide
ggagacugagcagucgacc

SEQ ID NO: 467332 - RNA, 19 nt, Artificial Sequence
  Description of Artificial Sequence: Synthetic oligonucleotide
acuaagcaauuuguggcuu

SEQ ID NO: 467333 - RNA, 19 nt, Artificial Sequence
  Description of Artificial Sequence: Synthetic oligonucleotide
acgaccaacccagcaauaa

SEQ ID NO: 467334 - RNA, 19 nt, Artificial Sequence
  Description of Artificial Sequence: Synthetic oligonucleotide
cuauuaucaacccgcuuau

SEQ ID NO: 467335 - RNA, 19 nt, Artificial Sequence
  Description of Artificial Sequence: Synthetic oligonucleotide
ccugcucacucauuuugag

SEQ ID NO: 467336 - RNA, 19 nt, Artificial Sequence
  Description of Artificial Sequence: Synthetic oligonucleotide
ccgcuuaucgcucacuguc

SEQ ID NO: 467337 - RNA, 19 nt, Artificial Sequence
  Description of Artificial Sequence: Synthetic oligonucleotide
agggaacucugcgucucuc

SEQ ID NO: 467338 - RNA, 19 nt, Artificial Sequence
  Description of Artificial Sequence: Synthetic oligonucleotide
agguaacacugguucccca

SEQ ID NO: 467339 - RNA, 19 nt, Artificial Sequence
  Description of Artificial Sequence: Synthetic oligonucleotide
cuuacucccuucaguccca

SEQ ID NO: 467340 - RNA, 19 nt, Artificial Sequence
  Description of Artificial Sequence: Synthetic oligonucleotide
cuccaucuggccauugcaa

SEQ ID NO: 467341 - RNA, 19 nt, Artificial Sequence
  Description of Artificial Sequence: Synthetic oligonucleotide
acgccuucagcugguagca

SEQ ID NO: 467342 - RNA, 19 nt, Artificial Sequence
  Description of Artificial Sequence: Synthetic oligonucleotide
aaugcaggagugggauuuu

SEQ ID NO: 467343 - RNA, 19 nt, Artificial Sequence
  Description of Artificial Sequence: Synthetic oligonucleotide
cacuaugaguaaguccuca

SEQ ID NO: 467344 - RNA, 19 nt, Artificial Sequence
  Description of Artificial Sequence: Synthetic oligonucleotide
cacugugugugcucagcca

SEQ ID NO: 467345 - RNA, 19 nt, Artificial Sequence
  Description of Artificial Sequence: Synthetic oligonucleotide
gcucacucauuuugagagc

SEQ ID NO: 467346 - RNA, 19 nt, Artificial Sequence
  Description of Artificial Sequence: Synthetic oligonucleotide
gcacuagaugagaaugcag

SEQ ID NO: 467347 - RNA, 19 nt, Artificial Sequence
  Description of Artificial Sequence: Synthetic oligonucleotide
gaccggaaaguaaauuggu

SEQ ID NO: 467348 - RNA, 19 nt, Artificial Sequence
  Description of Artificial Sequence: Synthetic oligonucleotide
uucccacacugugugugcu

SEQ ID NO: 467349 - RNA, 19 nt, Artificial Sequence
  Description of Artificial Sequence: Synthetic oligonucleotide
ccggaaaguaaauuggucu

SEQ ID NO: 467350 - RNA, 19 nt, Artificial Sequence
  Description of Artificial Sequence: Synthetic oligonucleotide
acugacaugugagccuuua

SEQ ID NO: 467351 - RNA, 19 nt, Artificial Sequence
  Description of Artificial Sequence: Synthetic oligonucleotide
gccaguacaucugucaaaa

SEQ ID NO: 467352 - RNA, 19 nt, Artificial Sequence
  Description of Artificial Sequence: Synthetic oligonucleotide
ggcacuagaugagaaugca

SEQ ID NO: 467353 - RNA, 19 nt, Artificial Sequence
  Description of Artificial Sequence: Synthetic oligonucleotide
agccaaguggccaguacau

SEQ ID NO: 467354 - RNA, 19 nt, Artificial Sequence
  Description of Artificial Sequence: Synthetic oligonucleotide
caggggaacuuaauugugu

SEQ ID NO: 467355 - RNA, 19 nt, Artificial Sequence
  Description of Artificial Sequence: Synthetic oligonucleotide
agguaccagcugccauacg

SEQ ID NO: 467356 - RNA, 19 nt, Artificial Sequence
  Description of Artificial Sequence: Synthetic oligonucleotide
ugcuggguaggaagacauu

SEQ ID NO: 467357 - RNA, 19 nt, Artificial Sequence
  Description of Artificial Sequence: Synthetic oligonucleotide
agcugccauacgccuucag

SEQ ID NO: 467358 - RNA, 19 nt, Artificial Sequence
  Description of Artificial Sequence: Synthetic oligonucleotide
aacccgcuuaucgcucacu

SEQ ID NO: 467359 - RNA, 19 nt, Artificial Sequence
  Description of Artificial Sequence: Synthetic oligonucleotide
ugucgcgccuugcgagcug

SEQ ID NO: 467360 - RNA, 19 nt, Artificial Sequence
  Description of Artificial Sequence: Synthetic oligonucleotide
gucgcgccuugcgagcugg

SEQ ID NO: 467361 - RNA, 19 nt, Artificial Sequence
  Description of Artificial Sequence: Synthetic oligonucleotide
gucuccgagucauuacugu

SEQ ID NO: 467362 - RNA, 19 nt, Artificial Sequence
  Description of Artificial Sequence: Synthetic oligonucleotide
agacugaccaugacugguu

SEQ ID NO: 467363 - RNA, 19 nt, Artificial Sequence
  Description of Artificial Sequence: Synthetic oligonucleotide
cagagaccggcuccucuuc

SEQ ID NO: 467364 - RNA, 19 nt, Artificial Sequence
  Description of Artificial Sequence: Synthetic oligonucleotide
auuugguccgugaccggaa

SEQ ID NO: 467365 - RNA, 19 nt, Artificial Sequence
  Description of Artificial Sequence: Synthetic oligonucleotide
caauaaugguucuggucau

SEQ ID NO: 467366 - RNA, 19 nt, Artificial Sequence
  Description of Artificial Sequence: Synthetic oligonucleotide
aguugagcugugagaggga

SEQ ID NO: 467367 - RNA, 19 nt, Artificial Sequence
  Description of Artificial Sequence: Synthetic oligonucleotide
cuggacagcuuugggaaaa

SEQ ID NO: 467368 - RNA, 19 nt, Artificial Sequence
  Description of Artificial Sequence: Synthetic oligonucleotide
gucugcuggguaggaagac

SEQ ID NO: 467369 - RNA, 19 nt, Artificial Sequence
  Description of Artificial Sequence: Synthetic oligonucleotide
caccugugcucuugugcuc

SEQ ID NO: 467370 - RNA, 19 nt, Artificial Sequence
  Description of Artificial Sequence: Synthetic oligonucleotide
cacuuugaucuguucgacu

SEQ ID NO: 467371 - RNA, 19 nt, Artificial Sequence
  Description of Artificial Sequence: Synthetic oligonucleotide
agacuugaugggagacuca

SEQ ID NO: 467372 - RNA, 19 nt, Artificial Sequence
  Description of Artificial Sequence: Synthetic oligonucleotide
ccagcaacuauucaggcuu

SEQ ID NO: 467373 - RNA, 19 nt, Artificial Sequence
  Description of Artificial Sequence: Synthetic oligonucleotide
aggagcucaggggaacuua

SEQ ID NO: 467374 - RNA, 19 nt, Artificial Sequence
  Description of Artificial Sequence: Synthetic oligonucleotide
gcagucgaccucgaccuug

SEQ ID NO: 467375 - RNA, 19 nt, Artificial Sequence
  Description of Artificial Sequence: Synthetic oligonucleotide
ccuacccuggacagcuuug

SEQ ID NO: 467376 - RNA, 19 nt, Artificial Sequence
  Description of Artificial Sequence: Synthetic oligonucleotide
ucucuggcauaaggacuaa

SEQ ID NO: 467377 - RNA, 19 nt, Artificial Sequence
  Description of Artificial Sequence: Synthetic oligonucleotide
ggccagacagaugcccuag

SEQ ID NO: 467378 - RNA, 19 nt, Artificial Sequence
  Description of Artificial Sequence: Synthetic oligonucleotide
gcgagcuggagacaggccu

SEQ ID NO: 467379 - RNA, 19 nt, Artificial Sequence
  Description of Artificial Sequence: Synthetic oligonucleotide
caacccgcuuaucgcucac

SEQ ID NO: 467380 - RNA, 19 nt, Artificial Sequence
  Description of Artificial Sequence: Synthetic oligonucleotide
augcuuugugaggcagaca

SEQ ID NO: 467381 - RNA, 19 nt, Artificial Sequence
  Description of Artificial Sequence: Synthetic oligonucleotide
acauggcaugcuguucaau

SEQ ID NO: 467382 - RNA, 19 nt, Artificial Sequence
  Description of Artificial Sequence: Synthetic oligonucleotide
cuccaagcgggaccaggga

SEQ ID NO: 467383 - RNA, 19 nt, Artificial Sequence
  Description of Artificial Sequence: Synthetic oligonucleotide
guguccuaccaucacgcuu

SEQ ID NO: 467384 - RNA, 19 nt, Artificial Sequence
  Description of Artificial Sequence: Synthetic oligonucleotide
gcagggcagaauggaauac

SEQ ID NO: 467385 - RNA, 19 nt, Artificial Sequence
  Description of Artificial Sequence: Synthetic oligonucleotide
uauugacgucaaggagcuc

SEQ ID NO: 467386 - RNA, 19 nt, Artificial Sequence
  Description of Artificial Sequence: Synthetic oligonucleotide
gcgccuugcgagcuggaga

SEQ ID NO: 467387 - RNA, 19 nt, Artificial Sequence
  Description of Artificial Sequence: Synthetic oligonucleotide
ggaauaccccagaaguagu

SEQ ID NO: 467388 - RNA, 19 nt, Artificial Sequence
  Description of Artificial Sequence: Synthetic oligonucleotide
gguaacacuucuccuucuu

SEQ ID NO: 467389 - RNA, 19 nt, Artificial Sequence
  Description of Artificial Sequence: Synthetic oligonucleotide
caguugcgcacacucuugu

SEQ ID NO: 467390 - RNA, 19 nt, Artificial Sequence
  Description of Artificial Sequence: Synthetic oligonucleotide
cacgaccaacccagcaaua

SEQ ID NO: 467391 - RNA, 19 nt, Artificial Sequence
  Description of Artificial Sequence: Synthetic oligonucleotide
ucgcgccuugcgagcugga

SEQ ID NO: 467392 - RNA, 19 nt, Artificial Sequence
  Description of Artificial Sequence: Synthetic oligonucleotide
acucuccaagcgggaccag

SEQ ID NO: 467393 - RNA, 19 nt, Artificial Sequence
  Description of Artificial Sequence: Synthetic oligonucleotide
caggaacaaaagacuugau

SEQ ID NO: 467394 - RNA, 19 nt, Artificial Sequence
  Description of Artificial Sequence: Synthetic oligonucleotide
cucuauuaucaacccgcuu

SEQ ID NO: 467395 - RNA, 19 nt, Artificial Sequence
  Description of Artificial Sequence: Synthetic oligonucleotide
ggccucuacaugacacuga

SEQ ID NO: 467396 - RNA, 19 nt, Artificial Sequence
  Description of Artificial Sequence: Synthetic oligonucleotide
gcugcuauccggagagucu

SEQ ID NO: 467397 - RNA, 19 nt, Artificial Sequence
  Description of Artificial Sequence: Synthetic oligonucleotide
guguauugguuaggaucua

SEQ ID NO: 467398 - RNA, 19 nt, Artificial Sequence
  Description of Artificial Sequence: Synthetic oligonucleotide
gcuuucuagcaauggcuuu

SEQ ID NO: 467399 - RNA, 19 nt, Artificial Sequence
  Description of Artificial Sequence: Synthetic oligonucleotide
gguuccccaaacucucuuu

SEQ ID NO: 467400 - RNA, 19 nt, Artificial Sequence
  Description of Artificial Sequence: Synthetic oligonucleotide
cagacuguuccaggagacu

SEQ ID NO: 467401 - RNA, 19 nt, Artificial Sequence
  Description of Artificial Sequence: Synthetic oligonucleotide
gcuauccggagagucuucu

SEQ ID NO: 467402 - RNA, 19 nt, Artificial Sequence
  Description of Artificial Sequence: Synthetic oligonucleotide
ccaguacuuuccugcagcu

SEQ ID NO: 467403 - RNA, 19 nt, Artificial Sequence
  Description of Artificial Sequence: Synthetic oligonucleotide
ccucugucgcgccuugcga

SEQ ID NO: 467404 - RNA, 19 nt, Artificial Sequence
  Description of Artificial Sequence: Synthetic oligonucleotide
cagcaacuauucaggcuuu

SEQ ID NO: 467405 - RNA, 19 nt, Artificial Sequence
  Description of Artificial Sequence: Synthetic oligonucleotide
caagcgggaccagggacuu

SEQ ID NO: 467406 - RNA, 19 nt, Artificial Sequence
  Description of Artificial Sequence: Synthetic oligonucleotide
ugacuccaauggggauguu

SEQ ID NO: 467407 - RNA, 19 nt, Artificial Sequence
  Description of Artificial Sequence: Synthetic oligonucleotide
cugucgcgccuugcgagcu

SEQ ID NO: 467408 - RNA, 19 nt, Artificial Sequence
  Description of Artificial Sequence: Synthetic oligonucleotide
cccgcuuaucgcucacugu

SEQ ID NO: 467409 - RNA, 19 nt, Artificial Sequence
  Description of Artificial Sequence: Synthetic oligonucleotide
cgcgccuugcgagcuggag

SEQ ID NO: 467410 - RNA, 19 nt, Artificial Sequence
  Description of Artificial Sequence: Synthetic oligonucleotide
ggacacccgggcacuagau

SEQ ID NO: 467411 - RNA, 19 nt, Artificial Sequence
  Description of Artificial Sequence: Synthetic oligonucleotide
cagccucguuucccugacu

SEQ ID NO: 467412 - RNA, 19 nt, Artificial Sequence
  Description of Artificial Sequence: Synthetic oligonucleotide
cgaccaacccagcaauaau

SEQ ID NO: 467413 - RNA, 19 nt, Artificial Sequence
  Description of Artificial Sequence: Synthetic oligonucleotide
ccgugaccggaaaguaaau

SEQ ID NO: 467414 - RNA, 19 nt, Artificial Sequence
  Description of Artificial Sequence: Synthetic oligonucleotide
gcccuagauuccugccuuu

SEQ ID NO: 467415 - RNA, 19 nt, Artificial Sequence
  Description of Artificial Sequence: Synthetic oligonucleotide
cccuacccuggacagcuuu

SEQ ID NO: 467416 - RNA, 19 nt, Artificial Sequence
  Description of Artificial Sequence: Synthetic oligonucleotide
cgcacacucuuguccucuu

SEQ ID NO: 467417 - RNA, 19 nt, Artificial Sequence
  Description of Artificial Sequence: Synthetic oligonucleotide
ccccuacccuggacagcuu

SEQ ID NO: 467418 - RNA, 19 nt, Artificial Sequence
  Description of Artificial Sequence: Synthetic oligonucleotide
uguuauaggauacauccag

SEQ ID NO: 467419 - RNA, 19 nt, Artificial Sequence
  Description of Artificial Sequence: Synthetic oligonucleotide
uguugcggaaaucaggcgg

SEQ ID NO: 467420 - RNA, 19 nt, Artificial Sequence
  Description of Artificial Sequence: Synthetic oligonucleotide
agaguugccaaccagccgg

SEQ ID NO: 467421 - RNA, 19 nt, Artificial Sequence
  Description of Artificial Sequence: Synthetic oligonucleotide
aaacaagacucccucuugg

SEQ ID NO: 467422 - RNA, 19 nt, Artificial Sequence
  Description of Artificial Sequence: Synthetic oligonucleotide
aaugcgucccagcugauug

SEQ ID NO: 467423 - RNA, 19 nt, Artificial Sequence
  Description of Artificial Sequence: Synthetic oligonucleotide
cagguuaaggguaugcagg

SEQ ID NO: 467424 - RNA, 19 nt, Artificial Sequence
  Description of Artificial Sequence: Synthetic oligonucleotide
agaggucguagucagcacc

SEQ ID NO: 467425 - RNA, 19 nt, Artificial Sequence
  Description of Artificial Sequence: Synthetic oligonucleotide
uagaggugaggucaaggcg

SEQ ID NO: 467426 - RNA, 19 nt, Artificial Sequence
  Description of Artificial Sequence: Synthetic oligonucleotide
uggauuuggaacauccaca

SEQ ID NO: 467427 - RNA, 19 nt, Artificial Sequence
  Description of Artificial Sequence: Synthetic oligonucleotide
uuguacuggauuuggaaca

SEQ ID NO: 467428 - RNA, 19 nt, Artificial Sequence
  Description of Artificial Sequence: Synthetic oligonucleotide
aaucaggcggucccagggc

SEQ ID NO: 467429 - RNA, 19 nt, Artificial Sequence
  Description of Artificial Sequence: Synthetic oligonucleotide
uggggcaaggccaacaccc

SEQ ID NO: 467430 - RNA, 19 nt, Artificial Sequence
  Description of Artificial Sequence: Synthetic oligonucleotide
aacguuagguccaccagac

SEQ ID NO: 467431 - RNA, 19 nt, Artificial Sequence
  Description of Artificial Sequence: Synthetic oligonucleotide
gaucggaaggcccagcagc

SEQ ID NO: 467432 - RNA, 19 nt, Artificial Sequence
  Description of Artificial Sequence: Synthetic oligonucleotide
agguuaaggguaugcaggg

SEQ ID NO: 467433 - RNA, 19 nt, Artificial Sequence
  Description of Artificial Sequence: Synthetic oligonucleotide
ugguguucgucgcucaggg

SEQ ID NO: 467434 - RNA, 19 nt, Artificial Sequence
  Description of Artificial Sequence: Synthetic oligonucleotide
uuaaggguaugcagggcag

SEQ ID NO: 467435 - RNA, 19 nt, Artificial Sequence
  Description of Artificial Sequence: Synthetic oligonucleotide
aaggagcgggccccaaugc

SEQ ID NO: 467436 - RNA, 19 nt, Artificial Sequence
  Description of Artificial Sequence: Synthetic oligonucleotide
aaaggagcgggccccaaug

SEQ ID NO: 467437 - RNA, 19 nt, Artificial Sequence
  Description of Artificial Sequence: Synthetic oligonucleotide
acucuaaaguccccucgcc

SEQ ID NO: 467438 - RNA, 19 nt, Artificial Sequence
  Description of Artificial Sequence: Synthetic oligonucleotide
auagcguuucgagacaacg

SEQ ID NO: 467439 - RNA, 19 nt, Artificial Sequence
  Description of Artificial Sequence: Synthetic oligonucleotide
ucggugggcacaaagggug

SEQ ID NO: 467440 - RNA, 19 nt, Artificial Sequence
  Description of Artificial Sequence: Synthetic oligonucleotide
cuggcauacccauagcacc

SEQ ID NO: 467441 - RNA, 19 nt, Artificial Sequence
  Description of Artificial Sequence: Synthetic oligonucleotide
uauaggauacauccagguc

SEQ ID NO: 467442 - RNA, 19 nt, Artificial Sequence
  Description of Artificial Sequence: Synthetic oligonucleotide
uuucgagacaacguuaggu

SEQ ID NO: 467443 - RNA, 19 nt, Artificial Sequence
  Description of Artificial Sequence: Synthetic oligonucleotide
ggugauagcguuucgagac

SEQ ID NO: 467444 - RNA, 19 nt, Artificial Sequence
  Description of Artificial Sequence: Synthetic oligonucleotide
uucgagacaacguuagguc

SEQ ID NO: 467445 - RNA, 19 nt, Artificial Sequence
  Description of Artificial Sequence: Synthetic oligonucleotide
guggcuguaagaucggaag

SEQ ID NO: 467446 - RNA, 19 nt, Artificial Sequence
  Description of Artificial Sequence: Synthetic oligonucleotide
agaccugucauguugcgga

SEQ ID NO: 467447 - RNA, 19 nt, Artificial Sequence
  Description of Artificial Sequence: Synthetic oligonucleotide
agacucuaaaguccccucg

SEQ ID NO: 467448 - RNA, 19 nt, Artificial Sequence
  Description of Artificial Sequence: Synthetic oligonucleotide
gguacgauccgguagauga

SEQ ID NO: 467449 - RNA, 19 nt, Artificial Sequence
  Description of Artificial Sequence: Synthetic oligonucleotide
ucgagacaacguuaggucc

SEQ ID NO: 467450 - RNA, 19 nt, Artificial Sequence
  Description of Artificial Sequence: Synthetic oligonucleotide
gaaacaagacucccucuug

SEQ ID NO: 467451 - RNA, 19 nt, Artificial Sequence
  Description of Artificial Sequence: Synthetic oligonucleotide
uggcgaugcagguauaggc

SEQ ID NO: 467452 - RNA, 19 nt, Artificial Sequence
  Description of Artificial Sequence: Synthetic oligonucleotide
gucccuuuagucuggaggc

SEQ ID NO: 467453 - RNA, 19 nt, Artificial Sequence
  Description of Artificial Sequence: Synthetic oligonucleotide
guugacagggccccguagg

SEQ ID NO: 467454 - RNA, 19 nt, Artificial Sequence
  Description of Artificial Sequence: Synthetic oligonucleotide
agcguagagaagugggcac

SEQ ID NO: 467455 - RNA, 19 nt, Artificial Sequence
  Description of Artificial Sequence: Synthetic oligonucleotide
uuguuauaggauacaucca

SEQ ID NO: 467456 - RNA, 19 nt, Artificial Sequence
  Description of Artificial Sequence: Synthetic oligonucleotide
acaaagggugcugagcgac

SEQ ID NO: 467457 - RNA, 19 nt, Artificial Sequence
  Description of Artificial Sequence: Synthetic oligonucleotide
ugguucagacucuaaaguc

SEQ ID NO: 467458 - RNA, 19 nt, Artificial Sequence
  Description of Artificial Sequence: Synthetic oligonucleotide
guuaaggguaugcagggca

SEQ ID NO: 467459 - RNA, 19 nt, Artificial Sequence
  Description of Artificial Sequence: Synthetic oligonucleotide
ggaacauccacacuggguc

SEQ ID NO: 467460 - RNA, 19 nt, Artificial Sequence
  Description of Artificial Sequence: Synthetic oligonucleotide
aagaucggaaggcccagca

SEQ ID NO: 467461 - RNA, 19 nt, Artificial Sequence
  Description of Artificial Sequence: Synthetic oligonucleotide
aagggugcugagcgacucc

SEQ ID NO: 467462 - RNA, 19 nt, Artificial Sequence
  Description of Artificial Sequence: Synthetic oligonucleotide
cuggaggccgguacgaucc

SEQ ID NO: 467463 - RNA, 19 nt, Artificial Sequence
  Description of Artificial Sequence: Synthetic oligonucleotide
ugcaucguagaguggcccg

SEQ ID NO: 467464 - RNA, 19 nt, Artificial Sequence
  Description of Artificial Sequence: Synthetic oligonucleotide
acaacguuagguccaccag

SEQ ID NO: 467465 - RNA, 19 nt, Artificial Sequence
  Description of Artificial Sequence: Synthetic oligonucleotide
gacucuaaaguccccucgc

SEQ ID NO: 467466 - RNA, 19 nt, Artificial Sequence
  Description of Artificial Sequence: Synthetic oligonucleotide
cauagcacccaccaguguc

SEQ ID NO: 467467 - RNA, 19 nt, Artificial Sequence
  Description of Artificial Sequence: Synthetic oligonucleotide
ucccauuggggaaagccca

SEQ ID NO: 467468 - RNA, 19 nt, Artificial Sequence
  Description of Artificial Sequence: Synthetic oligonucleotide
gcacaaagggugcugagcg

SEQ ID NO: 467469 - RNA, 19 nt, Artificial Sequence
  Description of Artificial Sequence: Synthetic oligonucleotide
gauacauccagguccucga

SEQ ID NO: 467470 - RNA, 19 nt, Artificial Sequence
  Description of Artificial Sequence: Synthetic oligonucleotide
ucuagcacccauaggcgcu

SEQ ID NO: 467471 - RNA, 19 nt, Artificial Sequence
  Description of Artificial Sequence: Synthetic oligonucleotide
gacuccgacaaguucuggc

SEQ ID NO: 467472 - RNA, 19 nt, Artificial Sequence
  Description of Artificial Sequence: Synthetic oligonucleotide
aauucaacugugcgccggu

SEQ ID NO: 467473 - RNA, 19 nt, Artificial Sequence
  Description of Artificial Sequence: Synthetic oligonucleotide
agcaauaggaguggcgggg

SEQ ID NO: 467474 - RNA, 19 nt, Artificial Sequence
  Description of Artificial Sequence: Synthetic oligonucleotide
aaagggugcugagcgacuc

SEQ ID NO: 467475 - RNA, 19 nt, Artificial Sequence
  Description of Artificial Sequence: Synthetic oligonucleotide
gacaacguuagguccacca

SEQ ID NO: 467476 - RNA, 19 nt, Artificial Sequence
  Description of Artificial Sequence: Synthetic oligonucleotide
accccaaucucuagggucc

SEQ ID NO: 467477 - RNA, 19 nt, Artificial Sequence
  Description of Artificial Sequence: Synthetic oligonucleotide
caccaagugcccugcaucg

SEQ ID NO: 467478 - RNA, 19 nt, Artificial Sequence
  Description of Artificial Sequence: Synthetic oligonucleotide
cacugcuacagucaggguc

SEQ ID NO: 467479 - RNA, 19 nt, Artificial Sequence
  Description of Artificial Sequence: Synthetic oligonucleotide
gauuguuauaggauacauc

SEQ ID NO: 467480 - RNA, 19 nt, Artificial Sequence
  Description of Artificial Sequence: Synthetic oligonucleotide
acuccgacaaguucuggca

SEQ ID NO: 467481 - RNA, 19 nt, Artificial Sequence
  Description of Artificial Sequence: Synthetic oligonucleotide
caucgaugagguuaugguc

SEQ ID NO: 467482 - RNA, 19 nt, Artificial Sequence
  Description of Artificial Sequence: Synthetic oligonucleotide
accuccgucacuugcagga

SEQ ID NO: 467483 - RNA, 19 nt, Artificial Sequence
  Description of Artificial Sequence: Synthetic oligonucleotide
uuccugucacacuacacuc

SEQ ID NO: 467484 - RNA, 19 nt, Artificial Sequence
  Description of Artificial Sequence: Synthetic oligonucleotide
gguagcguagagaaguggg

SEQ ID NO: 467485 - RNA, 19 nt, Artificial Sequence
  Description of Artificial Sequence: Synthetic oligonucleotide
ggcgcaauucaacugugcg

SEQ ID NO: 467486 - RNA, 19 nt, Artificial Sequence
  Description of Artificial Sequence: Synthetic oligonucleotide
gacccucuagcacccauag

SEQ ID NO: 467487 - RNA, 19 nt, Artificial Sequence
  Description of Artificial Sequence: Synthetic oligonucleotide
uagcguuucgagacaacgu

SEQ ID NO: 467488 - RNA, 19 nt, Artificial Sequence
  Description of Artificial Sequence: Synthetic oligonucleotide
gcagcaaugucugagggcc

SEQ ID NO: 467489 - RNA, 19 nt, Artificial Sequence
  Description of Artificial Sequence: Synthetic oligonucleotide
auguugcggaaaucaggcg

SEQ ID NO: 467490 - RNA, 19 nt, Artificial Sequence
  Description of Artificial Sequence: Synthetic oligonucleotide
agcguuucgagacaacguu

SEQ ID NO: 467491 - RNA, 19 nt, Artificial Sequence
  Description of Artificial Sequence: Synthetic oligonucleotide
cauuggggaaagcccaggc

SEQ ID NO: 467492 - RNA, 19 nt, Artificial Sequence
  Description of Artificial Sequence: Synthetic oligonucleotide
aagcgcagguuuccagguc

SEQ ID NO: 467493 - RNA, 19 nt, Artificial Sequence
  Description of Artificial Sequence: Synthetic oligonucleotide
cugccggagauuguuauag

SEQ ID NO: 467494 - RNA, 19 nt, Artificial Sequence
  Description of Artificial Sequence: Synthetic oligonucleotide
augcgucccagcugauugc

SEQ ID NO: 467495 - RNA, 19 nt, Artificial Sequence
  Description of Artificial Sequence: Synthetic oligonucleotide
gagaagcgcagguuuccag

SEQ ID NO: 467496 - RNA, 19 nt, Artificial Sequence
  Description of Artificial Sequence: Synthetic oligonucleotide
agauuguuauaggauacau

SEQ ID NO: 467497 - RNA, 19 nt, Artificial Sequence
  Description of Artificial Sequence: Synthetic oligonucleotide
uccgacaaguucuggcaca

SEQ ID NO: 467498 - RNA, 19 nt, Artificial Sequence
  Description of Artificial Sequence: Synthetic oligonucleotide
agcaccuguuggugggacc

SEQ ID NO: 467499 - RNA, 19 nt, Artificial Sequence
  Description of Artificial Sequence: Synthetic oligonucleotide
uaaggguaugcagggcagg

SEQ ID NO: 467500 - RNA, 19 nt, Artificial Sequence
  Description of Artificial Sequence: Synthetic oligonucleotide
agcgcagguuuccagguca

SEQ ID NO: 467501 - RNA, 19 nt, Artificial Sequence
  Description of Artificial Sequence: Synthetic oligonucleotide
ucgggaagaguugccaacc

SEQ ID NO: 467502 - RNA, 19 nt, Artificial Sequence
  Description of Artificial Sequence: Synthetic oligonucleotide
gacugguucagacucuaaa

SEQ ID NO: 467503 - RNA, 19 nt, Artificial Sequence
  Description of Artificial Sequence: Synthetic oligonucleotide
ugguagcguagagaagugg

SEQ ID NO: 467504 - RNA, 19 nt, Artificial Sequence
  Description of Artificial Sequence: Synthetic oligonucleotide
acaacugcgcuggggacgg

SEQ ID NO: 467505 - RNA, 19 nt, Artificial Sequence
  Description of Artificial Sequence: Synthetic oligonucleotide
agaucggaaggcccagcag

SEQ ID NO: 467506 - RNA, 19 nt, Artificial Sequence
  Description of Artificial Sequence: Synthetic oligonucleotide
acguuagguccaccagacc

SEQ ID NO: 467507 - RNA, 19 nt, Artificial Sequence
  Description of Artificial Sequence: Synthetic oligonucleotide
ugccggagauuguuauagg

SEQ ID NO: 467508 - RNA, 19 nt, Artificial Sequence
  Description of Artificial Sequence: Synthetic oligonucleotide
aacugugcgccgguccacg

SEQ ID NO: 467509 - RNA, 19 nt, Artificial Sequence
  Description of Artificial Sequence: Synthetic oligonucleotide
agugcccugcaucguagag

SEQ ID NO: 467510 - RNA, 19 nt, Artificial Sequence
  Description of Artificial Sequence: Synthetic oligonucleotide
aucagcggaggcucacagg

SEQ ID NO: 467511 - RNA, 19 nt, Artificial Sequence
  Description of Artificial Sequence: Synthetic oligonucleotide
aaggccccuggcgcaaugc

SEQ ID NO: 467512 - RNA, 19 nt, Artificial Sequence
  Description of Artificial Sequence: Synthetic oligonucleotide
auaggcgcuguguguggcg

SEQ ID NO: 467513 - RNA, 19 nt, Artificial Sequence
  Description of Artificial Sequence: Synthetic oligonucleotide
ggaacaacugcgcugggga

SEQ ID NO: 467514 - RNA, 19 nt, Artificial Sequence
  Description of Artificial Sequence: Synthetic oligonucleotide
uguggcgggcaaucagcgg

SEQ ID NO: 467515 - RNA, 19 nt, Artificial Sequence
  Description of Artificial Sequence: Synthetic oligonucleotide
ucguagaguggcccgcuga

SEQ ID NO: 467516 - RNA, 19 nt, Artificial Sequence
  Description of Artificial Sequence: Synthetic oligonucleotide
cccaaugcgggugauagcg

SEQ ID NO: 467517 - RNA, 19 nt, Artificial Sequence
  Description of Artificial Sequence: Synthetic oligonucleotide
ggauacauccagguccucg

SEQ ID NO: 467518 - RNA, 19 nt, Artificial Sequence
  Description of Artificial Sequence: Synthetic oligonucleotide
agcggaggcucacaggaga

SEQ ID NO: 467519 - RNA, 19 nt, Artificial Sequence
  Description of Artificial Sequence: Synthetic oligonucleotide
guagcguagagaagugggc

SEQ ID NO: 467520 - RNA, 19 nt, Artificial Sequence
  Description of Artificial Sequence: Synthetic oligonucleotide
uguacuggauuuggaacau

SEQ ID NO: 467521 - RNA, 19 nt, Artificial Sequence
  Description of Artificial Sequence: Synthetic oligonucleotide
guugcagugcaguggguuc

SEQ ID NO: 467522 - RNA, 19 nt, Artificial Sequence
  Description of Artificial Sequence: Synthetic oligonucleotide
aguccccucgccuucggca

SEQ ID NO: 467523 - RNA, 19 nt, Artificial Sequence
  Description of Artificial Sequence: Synthetic oligonucleotide
cacguuggguggcacaaac

SEQ ID NO: 467524 - RNA, 19 nt, Artificial Sequence
  Description of Artificial Sequence: Synthetic oligonucleotide
gcaggacugguucagacuc

SEQ ID NO: 467525 - RNA, 19 nt, Artificial Sequence
  Description of Artificial Sequence: Synthetic oligonucleotide
ugauagcguuucgagacaa

SEQ ID NO: 467526 - RNA, 19 nt, Artificial Sequence
  Description of Artificial Sequence: Synthetic oligonucleotide
guggcgggcaaucagcgga

SEQ ID NO: 467527 - RNA, 19 nt, Artificial Sequence
  Description of Artificial Sequence: Synthetic oligonucleotide
ggucccgcccagcacaugg

SEQ ID NO: 467528 - RNA, 19 nt, Artificial Sequence
  Description of Artificial Sequence: Synthetic oligonucleotide
cugcagguugacagggccc

SEQ ID NO: 467529 - RNA, 19 nt, Artificial Sequence
  Description of Artificial Sequence: Synthetic oligonucleotide
ugccaccugggcccaacag

SEQ ID NO: 467530 - RNA, 19 nt, Artificial Sequence
  Description of Artificial Sequence: Synthetic oligonucleotide
caacguuagguccaccaga

SEQ ID NO: 467531 - RNA, 19 nt, Artificial Sequence
  Description of Artificial Sequence: Synthetic oligonucleotide
gucccauuggggaaagccc

SEQ ID NO: 467532 - RNA, 19 nt, Artificial Sequence
  Description of Artificial Sequence: Synthetic oligonucleotide
caggcauggcaccuaugcc

SEQ ID NO: 467533 - RNA, 19 nt, Artificial Sequence
  Description of Artificial Sequence: Synthetic oligonucleotide
guggcuggaggccgguacg

SEQ ID NO: 467534 - RNA, 19 nt, Artificial Sequence
  Description of Artificial Sequence: Synthetic oligonucleotide
agggugcugagcgacuccg

SEQ ID NO: 467535 - RNA, 19 nt, Artificial Sequence
  Description of Artificial Sequence: Synthetic oligonucleotide
agcaucccguccucgggag

SEQ ID NO: 467536 - RNA, 19 nt, Artificial Sequence
  Description of Artificial Sequence: Synthetic oligonucleotide
uggcaccuaugccagccca

SEQ ID NO: 467537 - RNA, 19 nt, Artificial Sequence
  Description of Artificial Sequence: Synthetic oligonucleotide
cgcaauucaacugugcgcc

SEQ ID NO: 467538 - RNA, 19 nt, Artificial Sequence
  Description of Artificial Sequence: Synthetic oligonucleotide
agugucucccagguccagg

SEQ ID NO: 467539 - RNA, 19 nt, Artificial Sequence
  Description of Artificial Sequence: Synthetic oligonucleotide
guaagaucggaaggcccag

SEQ ID NO: 467540 - RNA, 19 nt, Artificial Sequence
  Description of Artificial Sequence: Synthetic oligonucleotide
augcgggugauagcguuuc

SEQ ID NO: 467541 - RNA, 19 nt, Artificial Sequence
  Description of Artificial Sequence: Synthetic oligonucleotide
caauaggaguggcggggcc

SEQ ID NO: 467542 - RNA, 19 nt, Artificial Sequence
  Description of Artificial Sequence: Synthetic oligonucleotide
aaaggccccuggcgcaaug

SEQ ID NO: 467543 - RNA, 19 nt, Artificial Sequence
  Description of Artificial Sequence: Synthetic oligonucleotide
ugcgggugauagcguuucg

SEQ ID NO: 467544 - RNA, 19 nt, Artificial Sequence
  Description of Artificial Sequence: Synthetic oligonucleotide
cagacucuaaaguccccuc

SEQ ID NO: 467545 - RNA, 19 nt, Artificial Sequence
  Description of Artificial Sequence: Synthetic oligonucleotide
acgauccgguagaugaggg

SEQ ID NO: 467546 - RNA, 19 nt, Artificial Sequence
  Description of Artificial Sequence: Synthetic oligonucleotide
ugggaccugucccuuuagu

SEQ ID NO: 467547 - RNA, 19 nt, Artificial Sequence
  Description of Artificial Sequence: Synthetic oligonucleotide
cugguagcguagagaagug

SEQ ID NO: 467548 - RNA, 19 nt, Artificial Sequence
  Description of Artificial Sequence: Synthetic oligonucleotide
ggucguagucagcaccagg

SEQ ID NO: 467549 - RNA, 19 nt, Artificial Sequence
  Description of Artificial Sequence: Synthetic oligonucleotide
ccaacccagugcauggugg

SEQ ID NO: 467550 - RNA, 19 nt, Artificial Sequence
  Description of Artificial Sequence: Synthetic oligonucleotide
guggcgaugcagguauagg

SEQ ID NO: 467551 - RNA, 19 nt, Artificial Sequence
  Description of Artificial Sequence: Synthetic oligonucleotide
ugcggaaaucaggcggucc

SEQ ID NO: 467552 - RNA, 19 nt, Artificial Sequence
  Description of Artificial Sequence: Synthetic oligonucleotide
gaggucguagucagcacca

SEQ ID NO: 467553 - RNA, 19 nt, Artificial Sequence
  Description of Artificial Sequence: Synthetic oligonucleotide
ccucggugggcacaaaggg

SEQ ID NO: 467554 - RNA, 19 nt, Artificial Sequence
  Description of Artificial Sequence: Synthetic oligonucleotide
cguuggguggcacaaacag

SEQ ID NO: 467555 - RNA, 19 nt, Artificial Sequence
  Description of Artificial Sequence: Synthetic oligonucleotide
cuccgacaaguucuggcac

SEQ ID NO: 467556 - RNA, 19 nt, Artificial Sequence
  Description of Artificial Sequence: Synthetic oligonucleotide
uaagaucggaaggcccagc

SEQ ID NO: 467557 - RNA, 19 nt, Artificial Sequence
  Description of Artificial Sequence: Synthetic oligonucleotide
gcgcaauucaacugugcgc

SEQ ID NO: 467558 - RNA, 19 nt, Artificial Sequence
  Description of Artificial Sequence: Synthetic oligonucleotide
aggcgcaauucaacugugc

SEQ ID NO: 467559 - RNA, 19 nt, Artificial Sequence
  Description of Artificial Sequence: Synthetic oligonucleotide
cuggcuaaguugggcaaag

SEQ ID NO: 467560 - RNA, 19 nt, Artificial Sequence
  Description of Artificial Sequence: Synthetic oligonucleotide
cguuucgagacaacguuag

SEQ ID NO: 467561 - RNA, 19 nt, Artificial Sequence
  Description of Artificial Sequence: Synthetic oligonucleotide
cagaccugucauguugcgg

SEQ ID NO: 467562 - RNA, 19 nt, Artificial Sequence
  Description of Artificial Sequence: Synthetic oligonucleotide
ucccgcccagcacaugggc

SEQ ID NO: 467563 - RNA, 19 nt, Artificial Sequence
  Description of Artificial Sequence: Synthetic oligonucleotide
guacgauccgguagaugag

SEQ ID NO: 467564 - RNA, 19 nt, Artificial Sequence
  Description of Artificial Sequence: Synthetic oligonucleotide
ugacccucuagcacccaua

SEQ ID NO: 467565 - RNA, 19 nt, Artificial Sequence
  Description of Artificial Sequence: Synthetic oligonucleotide
acuggauuuggaacaucca

SEQ ID NO: 467566 - RNA, 19 nt, Artificial Sequence
  Description of Artificial Sequence: Synthetic oligonucleotide
ggucugggauuggacaugg

SEQ ID NO: 467567 - RNA, 19 nt, Artificial Sequence
  Description of Artificial Sequence: Synthetic oligonucleotide
gcuacagucagggucccgc

SEQ ID NO: 467568 - RNA, 19 nt, Artificial Sequence
  Description of Artificial Sequence: Synthetic oligonucleotide
cugcaucguagaguggccc

SEQ ID NO: 467569 - RNA, 19 nt, Artificial Sequence
  Description of Artificial Sequence: Synthetic oligonucleotide
gacauggcugaguuugagu

SEQ ID NO: 467570 - RNA, 19 nt, Artificial Sequence
  Description of Artificial Sequence: Synthetic oligonucleotide
accugccggagauuguuau

SEQ ID NO: 467571 - RNA, 19 nt, Artificial Sequence
  Description of Artificial Sequence: Synthetic oligonucleotide
caucagggccaacccagug

SEQ ID NO: 467572 - RNA, 19 nt, Artificial Sequence
  Description of Artificial Sequence: Synthetic oligonucleotide
gagacaacguuagguccac

SEQ ID NO: 467573 - RNA, 19 nt, Artificial Sequence
  Description of Artificial Sequence: Synthetic oligonucleotide
gugauagcguuucgagaca

SEQ ID NO: 467574 - RNA, 19 nt, Artificial Sequence
  Description of Artificial Sequence: Synthetic oligonucleotide
gauagcguuucgagacaac

SEQ ID NO: 467575 - RNA, 19 nt, Artificial Sequence
  Description of Artificial Sequence: Synthetic oligonucleotide
cauaggcgcuguguguggc

SEQ ID NO: 467576 - RNA, 19 nt, Artificial Sequence
  Description of Artificial Sequence: Synthetic oligonucleotide
cacccggagcuccacucgg

SEQ ID NO: 467577 - RNA, 19 nt, Artificial Sequence
  Description of Artificial Sequence: Synthetic oligonucleotide
caggcgcaauucaacugug

SEQ ID NO: 467578 - RNA, 19 nt, Artificial Sequence
  Description of Artificial Sequence: Synthetic oligonucleotide
agacaacguuagguccacc

SEQ ID NO: 467579 - RNA, 19 nt, Artificial Sequence
  Description of Artificial Sequence: Synthetic oligonucleotide
gcaauucaacugugcgccg

SEQ ID NO: 467580 - RNA, 19 nt, Artificial Sequence
  Description of Artificial Sequence: Synthetic oligonucleotide
gcgguuagaggugagguca

SEQ ID NO: 467581 - RNA, 19 nt, Artificial Sequence
  Description of Artificial Sequence: Synthetic oligonucleotide
aucguagaguggcccgcug

SEQ ID NO: 467582 - RNA, 19 nt, Artificial Sequence
  Description of Artificial Sequence: Synthetic oligonucleotide
gcgccuggcauacccauag

SEQ ID NO: 467583 - RNA, 19 nt, Artificial Sequence
  Description of Artificial Sequence: Synthetic oligonucleotide
cacugguguucccaccaug

SEQ ID NO: 467584 - RNA, 19 nt, Artificial Sequence
  Description of Artificial Sequence: Synthetic oligonucleotide
aaugcgggugauagcguuu

SEQ ID NO: 467585 - RNA, 19 nt, Artificial Sequence
  Description of Artificial Sequence: Synthetic oligonucleotide
ggcacaaagggugcugagc

SEQ ID NO: 467586 - RNA, 19 nt, Artificial Sequence
  Description of Artificial Sequence: Synthetic oligonucleotide
guccucgggagaagagugg

SEQ ID NO: 467587 - RNA, 19 nt, Artificial Sequence
  Description of Artificial Sequence: Synthetic oligonucleotide
cccugcaucguagaguggc

SEQ ID NO: 467588 - RNA, 19 nt, Artificial Sequence
  Description of Artificial Sequence: Synthetic oligonucleotide
cagaggucguagucagcac

SEQ ID NO: 467589 - RNA, 19 nt, Artificial Sequence
  Description of Artificial Sequence: Synthetic oligonucleotide
cuagggucccauuggggaa

SEQ ID NO: 467590 - RNA, 19 nt, Artificial Sequence
  Description of Artificial Sequence: Synthetic oligonucleotide
guagagaagugggcacagc

SEQ ID NO: 467591 - RNA, 19 nt, Artificial Sequence
  Description of Artificial Sequence: Synthetic oligonucleotide
caccuccgucacuugcagg

SEQ ID NO: 467592 - RNA, 19 nt, Artificial Sequence
  Description of Artificial Sequence: Synthetic oligonucleotide
cagccggucaucagggcca

SEQ ID NO: 467593 - RNA, 19 nt, Artificial Sequence
  Description of Artificial Sequence: Synthetic oligonucleotide
ggccgguacgauccgguag

SEQ ID NO: 467594 - RNA, 19 nt, Artificial Sequence
  Description of Artificial Sequence: Synthetic oligonucleotide
gcaagcggcggcuccacug

SEQ ID NO: 467595 - RNA, 19 nt, Artificial Sequence
  Description of Artificial Sequence: Synthetic oligonucleotide
agaguggcccgcugacccu

SEQ ID NO: 467596 - RNA, 19 nt, Artificial Sequence
  Description of Artificial Sequence: Synthetic oligonucleotide
aggcgggaaagcuggcuaa

SEQ ID NO: 467597 - RNA, 19 nt, Artificial Sequence
  Description of Artificial Sequence: Synthetic oligonucleotide
agggcacaagaggcugccc

SEQ ID NO: 467598 - RNA, 19 nt, Artificial Sequence
  Description of Artificial Sequence: Synthetic oligonucleotide
gggugauagcguuucgaga

SEQ ID NO: 467599 - RNA, 19 nt, Artificial Sequence
  Description of Artificial Sequence: Synthetic oligonucleotide
gguguucgucgcucagggg

SEQ ID NO: 467600 - RNA, 19 nt, Artificial Sequence
  Description of Artificial Sequence: Synthetic oligonucleotide
gguggcuggaggccgguac

SEQ ID NO: 467601 - RNA, 19 nt, Artificial Sequence
  Description of Artificial Sequence: Synthetic oligonucleotide
uguccccaacaauuuuauu

SEQ ID NO: 467602 - RNA, 19 nt, Artificial Sequence
  Description of Artificial Sequence: Synthetic oligonucleotide
cccauagcacccaccagug

SEQ ID NO: 467603 - RNA, 19 nt, Artificial Sequence
  Description of Artificial Sequence: Synthetic oligonucleotide
gguggcgaugcagguauag

SEQ ID NO: 467604 - RNA, 19 nt, Artificial Sequence
  Description of Artificial Sequence: Synthetic oligonucleotide
agcgcaucgaugagguuau

SEQ ID NO: 467605 - RNA, 19 nt, Artificial Sequence
  Description of Artificial Sequence: Synthetic oligonucleotide
cuagcacccauaggcgcug

SEQ ID NO: 467606 - RNA, 19 nt, Artificial Sequence
  Description of Artificial Sequence: Synthetic oligonucleotide
cagcgcaucgaugagguua

SEQ ID NO: 467607 - RNA, 19 nt, Artificial Sequence
  Description of Artificial Sequence: Synthetic oligonucleotide
ugcuacagucagggucccg

SEQ ID NO: 467608 - RNA, 19 nt, Artificial Sequence
  Description of Artificial Sequence: Synthetic oligonucleotide
uccagccgcucuguacugc

SEQ ID NO: 467609 - RNA, 19 nt, Artificial Sequence
  Description of Artificial Sequence: Synthetic oligonucleotide
gcgaugcagguauaggcuc

SEQ ID NO: 467610 - RNA, 19 nt, Artificial Sequence
  Description of Artificial Sequence: Synthetic oligonucleotide
gccucggugggcacaaagg

SEQ ID NO: 467611 - RNA, 19 nt, Artificial Sequence
  Description of Artificial Sequence: Synthetic oligonucleotide
uggggagccugagguacug

SEQ ID NO: 467612 - RNA, 19 nt, Artificial Sequence
  Description of Artificial Sequence: Synthetic oligonucleotide
gguuaaggguaugcagggc

SEQ ID NO: 467613 - RNA, 19 nt, Artificial Sequence
  Description of Artificial Sequence: Synthetic oligonucleotide
accauuggucugggauugg

SEQ ID NO: 467614 - RNA, 19 nt, Artificial Sequence
  Description of Artificial Sequence: Synthetic oligonucleotide
uggcuaaguugggcaaaga

SEQ ID NO: 467615 - RNA, 19 nt, Artificial Sequence
  Description of Artificial Sequence: Synthetic oligonucleotide
gccgguacgauccgguaga

SEQ ID NO: 467616 - RNA, 19 nt, Artificial Sequence
  Description of Artificial Sequence: Synthetic oligonucleotide
guugcggaaaucaggcggu

SEQ ID NO: 467617 - RNA, 19 nt, Artificial Sequence
  Description of Artificial Sequence: Synthetic oligonucleotide
gcaccuaugccagcccagg

SEQ ID NO: 467618 - RNA, 19 nt, Artificial Sequence
  Description of Artificial Sequence: Synthetic oligonucleotide
aggguaugcagggcaggca

SEQ ID NO: 467619 - RNA, 19 nt, Artificial Sequence
  Description of Artificial Sequence: Synthetic oligonucleotide
cucacaguugcagugcagu

SEQ ID NO: 467620 - RNA, 19 nt, Artificial Sequence
  Description of Artificial Sequence: Synthetic oligonucleotide
ccaggcgccuggcauaccc

SEQ ID NO: 467621 - RNA, 19 nt, Artificial Sequence
  Description of Artificial Sequence: Synthetic oligonucleotide
ggccgugcugcccacccag

SEQ ID NO: 467622 - RNA, 19 nt, Artificial Sequence
  Description of Artificial Sequence: Synthetic oligonucleotide
gguguggcugguagcguag

SEQ ID NO: 467623 - RNA, 19 nt, Artificial Sequence
  Description of Artificial Sequence: Synthetic oligonucleotide
gaccugucauguugcggaa

SEQ ID NO: 467624 - RNA, 19 nt, Artificial Sequence
  Description of Artificial Sequence: Synthetic oligonucleotide
ucccguccucgggagaaga

SEQ ID NO: 467625 - RNA, 19 nt, Artificial Sequence
  Description of Artificial Sequence: Synthetic oligonucleotide
ccggucaucagggccaacc

SEQ ID NO: 467626 - RNA, 19 nt, Artificial Sequence
  Description of Artificial Sequence: Synthetic oligonucleotide
gcaauaggaguggcggggc

SEQ ID NO: 467627 - RNA, 19 nt, Artificial Sequence
  Description of Artificial Sequence: Synthetic oligonucleotide
ggcgguuagaggugagguc

SEQ ID NO: 467628 - RNA, 19 nt, Artificial Sequence
  Description of Artificial Sequence: Synthetic oligonucleotide
cuccagccgcucuguacug

SEQ ID NO: 467629 - RNA, 19 nt, Artificial Sequence
  Description of Artificial Sequence: Synthetic oligonucleotide
cguccucgggagaagagug

SEQ ID NO: 467630 - RNA, 19 nt, Artificial Sequence
  Description of Artificial Sequence: Synthetic oligonucleotide
ggcggccauucccagcucc

SEQ ID NO: 467631 - RNA, 19 nt, Artificial Sequence
  Description of Artificial Sequence: Synthetic oligonucleotide
gguccucgagacugucgag

SEQ ID NO: 467632 - RNA, 19 nt, Artificial Sequence
  Description of Artificial Sequence: Synthetic oligonucleotide
guaaggcggccaccaggac

SEQ ID NO: 467633 - RNA, 19 nt, Artificial Sequence
  Description of Artificial Sequence: Synthetic oligonucleotide
cucggugggcacaaagggu

SEQ ID NO: 467634 - RNA, 19 nt, Artificial Sequence
  Description of Artificial Sequence: Synthetic oligonucleotide
aggacugguucagacucua

SEQ ID NO: 467635 - RNA, 19 nt, Artificial Sequence
  Description of Artificial Sequence: Synthetic oligonucleotide
acguuggguggcacaaaca

SEQ ID NO: 467636 - RNA, 19 nt, Artificial Sequence
  Description of Artificial Sequence: Synthetic oligonucleotide
gccccgaaccagcaaggcc

SEQ ID NO: 467637 - RNA, 19 nt, Artificial Sequence
  Description of Artificial Sequence: Synthetic oligonucleotide
gucuggaggccaaaaccaa

SEQ ID NO: 467638 - RNA, 19 nt, Artificial Sequence
  Description of Artificial Sequence: Synthetic oligonucleotide
accaagugcccugcaucgu

SEQ ID NO: 467639 - RNA, 19 nt, Artificial Sequence
  Description of Artificial Sequence: Synthetic oligonucleotide
aggauacauccagguccuc

SEQ ID NO: 467640 - RNA, 19 nt, Artificial Sequence
  Description of Artificial Sequence: Synthetic oligonucleotide
cccgcugacccucuagcac

SEQ ID NO: 467641 - RNA, 19 nt, Artificial Sequence
  Description of Artificial Sequence: Synthetic oligonucleotide
ccugagguacugaggauaa

SEQ ID NO: 467642 - RNA, 19 nt, Artificial Sequence
  Description of Artificial Sequence: Synthetic oligonucleotide
acaccccggcacccagcuc

SEQ ID NO: 467643 - RNA, 19 nt, Artificial Sequence
  Description of Artificial Sequence: Synthetic oligonucleotide
ccaaccagccggucaucag

SEQ ID NO: 467644 - RNA, 19 nt, Artificial Sequence
  Description of Artificial Sequence: Synthetic oligonucleotide
cgagacaacguuaggucca

SEQ ID NO: 467645 - RNA, 19 nt, Artificial Sequence
  Description of Artificial Sequence: Synthetic oligonucleotide
cggagauuguuauaggaua

SEQ ID NO: 467646 - RNA, 19 nt, Artificial Sequence
  Description of Artificial Sequence: Synthetic oligonucleotide
acccggagcuccacucggg

SEQ ID NO: 467647 - RNA, 19 nt, Artificial Sequence
  Description of Artificial Sequence: Synthetic oligonucleotide
gcuggaggccgguacgauc

SEQ ID NO: 467648 - RNA, 19 nt, Artificial Sequence
  Description of Artificial Sequence: Synthetic oligonucleotide
ggcaccuaugccagcccag

SEQ ID NO: 467649 - RNA, 19 nt, Artificial Sequence
  Description of Artificial Sequence: Synthetic oligonucleotide
gaguggcccgcugacccuc

SEQ ID NO: 467650 - RNA, 19 nt, Artificial Sequence
  Description of Artificial Sequence: Synthetic oligonucleotide
cacugagaaugaggugcug

SEQ ID NO: 467651 - RNA, 19 nt, Artificial Sequence
  Description of Artificial Sequence: Synthetic oligonucleotide
cagucaccuccgucacuug

SEQ ID NO: 467652 - RNA, 19 nt, Artificial Sequence
  Description of Artificial Sequence: Synthetic oligonucleotide
gcgggcaaucagcggaggc

SEQ ID NO: 467653 - RNA, 19 nt, Artificial Sequence
  Description of Artificial Sequence: Synthetic oligonucleotide
ggcgggaaagcuggcuaag

SEQ ID NO: 467654 - RNA, 19 nt, Artificial Sequence
  Description of Artificial Sequence: Synthetic oligonucleotide
uuggugggaccugucccuu

SEQ ID NO: 467655 - RNA, 19 nt, Artificial Sequence
  Description of Artificial Sequence: Synthetic oligonucleotide
caucccguccucgggagaa

SEQ ID NO: 467656 - RNA, 19 nt, Artificial Sequence
  Description of Artificial Sequence: Synthetic oligonucleotide
ggcgaugcagguauaggcu

SEQ ID NO: 467657 - RNA, 19 nt, Artificial Sequence
  Description of Artificial Sequence: Synthetic oligonucleotide
ggccucgccagcaggguug

SEQ ID NO: 467658 - RNA, 19 nt, Artificial Sequence
  Description of Artificial Sequence: Synthetic oligonucleotide
caaucagcggaggcucaca

SEQ ID NO: 467659 - RNA, 19 nt, Artificial Sequence
  Description of Artificial Sequence: Synthetic oligonucleotide
gcauacccauagcacccac

SEQ ID NO: 467660 - RNA, 19 nt, Artificial Sequence
  Description of Artificial Sequence: Synthetic oligonucleotide
caaugcgggugauagcguu

SEQ ID NO: 467661 - RNA, 19 nt, Artificial Sequence
  Description of Artificial Sequence: Synthetic oligonucleotide
cccgcccagcacaugggcc

SEQ ID NO: 467662 - RNA, 19 nt, Artificial Sequence
  Description of Artificial Sequence: Synthetic oligonucleotide
cugcuacagucaggguccc

SEQ ID NO: 467663 - RNA, 19 nt, Artificial Sequence
  Description of Artificial Sequence: Synthetic oligonucleotide
ccucgcugcuguuguacug

SEQ ID NO: 467664 - RNA, 19 nt, Artificial Sequence
  Description of Artificial Sequence: Synthetic oligonucleotide
gcgcaaugcgucccagcug

SEQ ID NO: 467665 - RNA, 19 nt, Artificial Sequence
  Description of Artificial Sequence: Synthetic oligonucleotide
caaagggugcugagcgacu

SEQ ID NO: 467666 - RNA, 19 nt, Artificial Sequence
  Description of Artificial Sequence: Synthetic oligonucleotide
cagguauaggcuccugcau

SEQ ID NO: 467667 - RNA, 19 nt, Artificial Sequence
  Description of Artificial Sequence: Synthetic oligonucleotide
gugacuccgccuggcccag

SEQ ID NO: 467668 - RNA, 19 nt, Artificial Sequence
  Description of Artificial Sequence: Synthetic oligonucleotide
uggugggaccugucccuuu

SEQ ID NO: 467669 - RNA, 19 nt, Artificial Sequence
  Description of Artificial Sequence: Synthetic oligonucleotide
cguagagaagugggcacag

SEQ ID NO: 467670 - RNA, 19 nt, Artificial Sequence
  Description of Artificial Sequence: Synthetic oligonucleotide
ggaggccgguacgauccgg

SEQ ID NO: 467671 - RNA, 19 nt, Artificial Sequence
  Description of Artificial Sequence: Synthetic oligonucleotide
aggccgguacgauccggua

SEQ ID NO: 467672 - RNA, 19 nt, Artificial Sequence
  Description of Artificial Sequence: Synthetic oligonucleotide
aucccguccucgggagaag

SEQ ID NO: 467673 - RNA, 19 nt, Artificial Sequence
  Description of Artificial Sequence: Synthetic oligonucleotide
gcucgggaagaguugccaa

SEQ ID NO: 467674 - RNA, 19 nt, Artificial Sequence
  Description of Artificial Sequence: Synthetic oligonucleotide
ccgacaaguucuggcacac

SEQ ID NO: 467675 - RNA, 19 nt, Artificial Sequence
  Description of Artificial Sequence: Synthetic oligonucleotide
gcguagagaagugggcaca

SEQ ID NO: 467676 - RNA, 19 nt, Artificial Sequence
  Description of Artificial Sequence: Synthetic oligonucleotide
gcaaucagcggaggcucac

SEQ ID NO: 467677 - RNA, 19 nt, Artificial Sequence
  Description of Artificial Sequence: Synthetic oligonucleotide
gucacuugcaggacugguu

SEQ ID NO: 467678 - RNA, 19 nt, Artificial Sequence
  Description of Artificial Sequence: Synthetic oligonucleotide
gaggccgguacgauccggu

SEQ ID NO: 467679 - RNA, 19 nt, Artificial Sequence
  Description of Artificial Sequence: Synthetic oligonucleotide
gugcgccgguccacguugg

SEQ ID NO: 467680 - RNA, 19 nt, Artificial Sequence
  Description of Artificial Sequence: Synthetic oligonucleotide
caggcgccuggcauaccca

SEQ ID NO: 467681 - RNA, 19 nt, Artificial Sequence
  Description of Artificial Sequence: Synthetic oligonucleotide
ggcagcgcaucgaugaggu

SEQ ID NO: 467682 - RNA, 19 nt, Artificial Sequence
  Description of Artificial Sequence: Synthetic oligonucleotide
ggcgcuguguguggcgggc

SEQ ID NO: 467683 - RNA, 19 nt, Artificial Sequence
  Description of Artificial Sequence: Synthetic oligonucleotide
ugagugggaggcggccauu

SEQ ID NO: 467684 - RNA, 19 nt, Artificial Sequence
  Description of Artificial Sequence: Synthetic oligonucleotide
ccggagauuguuauaggau

SEQ ID NO: 467685 - RNA, 19 nt, Artificial Sequence
  Description of Artificial Sequence: Synthetic oligonucleotide
cccguccucgggagaagag

SEQ ID NO: 467686 - RNA, 19 nt, Artificial Sequence
  Description of Artificial Sequence: Synthetic oligonucleotide
gccaccugggcccaacagu

SEQ ID NO: 467687 - RNA, 19 nt, Artificial Sequence
  Description of Artificial Sequence: Synthetic oligonucleotide
cucccagguccagggaaca

SEQ ID NO: 467688 - RNA, 19 nt, Artificial Sequence
  Description of Artificial Sequence: Synthetic oligonucleotide
gaccugccggagauuguua

SEQ ID NO: 467689 - RNA, 19 nt, Artificial Sequence
  Description of Artificial Sequence: Synthetic oligonucleotide
caggacugguucagacucu

SEQ ID NO: 467690 - RNA, 19 nt, Artificial Sequence
  Description of Artificial Sequence: Synthetic oligonucleotide
gaguugccaaccagccggu

SEQ ID NO: 467691 - RNA, 19 nt, Artificial Sequence
  Description of Artificial Sequence: Synthetic oligonucleotide
gcugagcgacuccgacaag

SEQ ID NO: 467692 - RNA, 19 nt, Artificial Sequence
  Description of Artificial Sequence: Synthetic oligonucleotide
ggcgggcaaucagcggagg

SEQ ID NO: 467693 - RNA, 19 nt, Artificial Sequence
  Description of Artificial Sequence: Synthetic oligonucleotide
ggccccgaaccagcaaggc

SEQ ID NO: 467694 - RNA, 19 nt, Artificial Sequence
  Description of Artificial Sequence: Synthetic oligonucleotide
ggccaggcgguuagaggug

SEQ ID NO: 467695 - RNA, 19 nt, Artificial Sequence
  Description of Artificial Sequence: Synthetic oligonucleotide
gccaaccagccggucauca

SEQ ID NO: 467696 - RNA, 19 nt, Artificial Sequence
  Description of Artificial Sequence: Synthetic oligonucleotide
gcggccauucccagcuccc

SEQ ID NO: 467697 - RNA, 19 nt, Artificial Sequence
  Description of Artificial Sequence: Synthetic oligonucleotide
gcguuucgagacaacguua

SEQ ID NO: 467698 - RNA, 19 nt, Artificial Sequence
  Description of Artificial Sequence: Synthetic oligonucleotide
gcuggcuaaguugggcaaa

SEQ ID NO: 467699 - RNA, 19 nt, Artificial Sequence
  Description of Artificial Sequence: Synthetic oligonucleotide
ccaagugcccugcaucgua

SEQ ID NO: 467700 - RNA, 19 nt, Artificial Sequence
  Description of Artificial Sequence: Synthetic oligonucleotide
gccucgccagcaggguugg

SEQ ID NO: 467701 - RNA, 19 nt, Artificial Sequence
  Description of Artificial Sequence: Synthetic oligonucleotide
ccaggcgguuagaggugag

SEQ ID NO: 467702 - RNA, 19 nt, Artificial Sequence
  Description of Artificial Sequence: Synthetic oligonucleotide
ggauuggacauggcugagu

SEQ ID NO: 467703 - RNA, 19 nt, Artificial Sequence
  Description of Artificial Sequence: Synthetic oligonucleotide
ccauuggucugggauugga

SEQ ID NO: 467704 - RNA, 19 nt, Artificial Sequence
  Description of Artificial Sequence: Synthetic oligonucleotide
gccaggcgguuagagguga

SEQ ID NO: 467705 - RNA, 19 nt, Artificial Sequence
  Description of Artificial Sequence: Synthetic oligonucleotide
gccgugcugcccacccagg

SEQ ID NO: 467706 - RNA, 19 nt, Artificial Sequence
  Description of Artificial Sequence: Synthetic oligonucleotide
ccccaaucucuaggguccc

SEQ ID NO: 467707 - RNA, 19 nt, Artificial Sequence
  Description of Artificial Sequence: Synthetic oligonucleotide
ccaacacccggagcuccac

SEQ ID NO: 467708 - RNA, 19 nt, Artificial Sequence
  Description of Artificial Sequence: Synthetic oligonucleotide
gcaucccguccucgggaga

SEQ ID NO: 467709 - RNA, 19 nt, Artificial Sequence
  Description of Artificial Sequence: Synthetic oligonucleotide
gcccugcaucguagagugg

SEQ ID NO: 467710 - RNA, 19 nt, Artificial Sequence
  Description of Artificial Sequence: Synthetic oligonucleotide
caaugcgucccagcugauu

SEQ ID NO: 467711 - RNA, 19 nt, Artificial Sequence
  Description of Artificial Sequence: Synthetic oligonucleotide
ccaaugcgggugauagcgu

SEQ ID NO: 467712 - RNA, 19 nt, Artificial Sequence
  Description of Artificial Sequence: Synthetic oligonucleotide
ccgguccacguuggguggc

SEQ ID NO: 467713 - RNA, 19 nt, Artificial Sequence
  Description of Artificial Sequence: Synthetic oligonucleotide
gggugcugagcgacuccga

SEQ ID NO: 467714 - RNA, 19 nt, Artificial Sequence
  Description of Artificial Sequence: Synthetic oligonucleotide
ccucgagacugucgaggaa

SEQ ID NO: 467715 - RNA, 19 nt, Artificial Sequence
  Description of Artificial Sequence: Synthetic oligonucleotide
gcgggaaagcuggcuaagu

SEQ ID NO: 467716 - RNA, 19 nt, Artificial Sequence
  Description of Artificial Sequence: Synthetic oligonucleotide
ggaguggcggggccaugau

SEQ ID NO: 467717 - RNA, 19 nt, Artificial Sequence
  Description of Artificial Sequence: Synthetic oligonucleotide
gcagugcaguggguuccca

SEQ ID NO: 467718 - RNA, 19 nt, Artificial Sequence
  Description of Artificial Sequence: Synthetic oligonucleotide
cgguacgauccgguagaug

SEQ ID NO: 467719 - RNA, 19 nt, Artificial Sequence
  Description of Artificial Sequence: Synthetic oligonucleotide
ccauagcacccaccagugu

SEQ ID NO: 467720 - RNA, 19 nt, Artificial Sequence
  Description of Artificial Sequence: Synthetic oligonucleotide
ggcgccuggcauacccaua

SEQ ID NO: 467721 - RNA, 19 nt, Artificial Sequence
  Description of Artificial Sequence: Synthetic oligonucleotide
ggccaacccagugcauggu

SEQ ID NO: 467722 - RNA, 19 nt, Artificial Sequence
  Description of Artificial Sequence: Synthetic oligonucleotide
cgggcaaucagcggaggcu

SEQ ID NO: 467723 - RNA, 19 nt, Artificial Sequence
  Description of Artificial Sequence: Synthetic oligonucleotide
ggcaagcggcggcuccacu

SEQ ID NO: 467724 - RNA, 19 nt, Artificial Sequence
  Description of Artificial Sequence: Synthetic oligonucleotide
ccguccucgggagaagagu

SEQ ID NO: 467725 - RNA, 19 nt, Artificial Sequence
  Description of Artificial Sequence: Synthetic oligonucleotide
ccgugguggguggcucuug

SEQ ID NO: 467726 - RNA, 19 nt, Artificial Sequence
  Description of Artificial Sequence: Synthetic oligonucleotide
cccaaucucuaggguccca

SEQ ID NO: 467727 - RNA, 19 nt, Artificial Sequence
  Description of Artificial Sequence: Synthetic oligonucleotide
gggcuccgugguggguggc

SEQ ID NO: 467728 - RNA, 19 nt, Artificial Sequence
  Description of Artificial Sequence: Synthetic oligonucleotide
gcgcaucgaugagguuaug

SEQ ID NO: 467729 - RNA, 19 nt, Artificial Sequence
  Description of Artificial Sequence: Synthetic oligonucleotide
gcgcuguguguggcgggca

SEQ ID NO: 467730 - RNA, 19 nt, Artificial Sequence
  Description of Artificial Sequence: Synthetic oligonucleotide
caaaggccccuggcgcaau

SEQ ID NO: 467731 - RNA, 19 nt, Artificial Sequence
  Description of Artificial Sequence: Synthetic oligonucleotide
ccucgccuucggcagcagu

SEQ ID NO: 467732 - RNA, 19 nt, Artificial Sequence
  Description of Artificial Sequence: Synthetic oligonucleotide
gcgcagguuuccaggucau

SEQ ID NO: 467733 - RNA, 19 nt, Artificial Sequence
  Description of Artificial Sequence: Synthetic oligonucleotide
gcaaugcgucccagcugau

SEQ ID NO: 467734 - RNA, 19 nt, Artificial Sequence
  Description of Artificial Sequence: Synthetic oligonucleotide
ccgguacgauccgguagau

SEQ ID NO: 467735 - RNA, 19 nt, Artificial Sequence
  Description of Artificial Sequence: Synthetic oligonucleotide
uauauauauauauauauaa

SEQ ID NO: 467736 - RNA, 19 nt, Artificial Sequence
  Description of Artificial Sequence: Synthetic oligonucleotide
uuuauauauauauauauau

SEQ ID NO: 467737 - RNA, 19 nt, Artificial Sequence
  Description of Artificial Sequence: Synthetic oligonucleotide
uauauauauauauauauau

SEQ ID NO: 467738 - RNA, 19 nt, Artificial Sequence
  Description of Artificial Sequence: Synthetic oligonucleotide
uauauauauauauauaaaa

SEQ ID NO: 467739 - RNA, 19 nt, Artificial Sequence
  Description of Artificial Sequence: Synthetic oligonucleotide
aauaaguggugccgggucc

SEQ ID NO: 467740 - RNA, 19 nt, Artificial Sequence
  Description of Artificial Sequence: Synthetic oligonucleotide
ucuuucaucuuccaguacc

SEQ ID NO: 467741 - RNA, 19 nt, Artificial Sequence
  Description of Artificial Sequence: Synthetic oligonucleotide
aggauuuucuaugagaggg

SEQ ID NO: 467742 - RNA, 19 nt, Artificial Sequence
  Description of Artificial Sequence: Synthetic oligonucleotide
ucaucuaagauacucugca

SEQ ID NO: 467743 - RNA, 19 nt, Artificial Sequence
  Description of Artificial Sequence: Synthetic oligonucleotide
uuauaggacacccggaagc

SEQ ID NO: 467744 - RNA, 19 nt, Artificial Sequence
  Description of Artificial Sequence: Synthetic oligonucleotide
ucguuuauaggacacccgg

SEQ ID NO: 467745 - RNA, 19 nt, Artificial Sequence
  Description of Artificial Sequence: Synthetic oligonucleotide
gcuaccguaaguuugaagg

SEQ ID NO: 467746 - RNA, 19 nt, Artificial Sequence
  Description of Artificial Sequence: Synthetic oligonucleotide
aguuugaaggaauucaucu

SEQ ID NO: 467747 - RNA, 19 nt, Artificial Sequence
  Description of Artificial Sequence: Synthetic oligonucleotide
uuuuauauauauauauaua

SEQ ID NO: 467748 - RNA, 19 nt, Artificial Sequence
  Description of Artificial Sequence: Synthetic oligonucleotide
aacgacagcagggugaugg

SEQ ID NO: 467749 - RNA, 19 nt, Artificial Sequence
  Description of Artificial Sequence: Synthetic oligonucleotide
uuauauauauauauauaua

SEQ ID NO: 467750 - RNA, 19 nt, Artificial Sequence
  Description of Artificial Sequence: Synthetic oligonucleotide
auaugcuuagggcagcggc

SEQ ID NO: 467751 - RNA, 19 nt, Artificial Sequence
  Description of Artificial Sequence: Synthetic oligonucleotide
uuuucuaugagagggucgg

SEQ ID NO: 467752 - RNA, 19 nt, Artificial Sequence
  Description of Artificial Sequence: Synthetic oligonucleotide
uagauacuuggcaauaugc

SEQ ID NO: 467753 - RNA, 19 nt, Artificial Sequence
  Description of Artificial Sequence: Synthetic oligonucleotide
uuugaaguaaccuguccag

SEQ ID NO: 467754 - RNA, 19 nt, Artificial Sequence
  Description of Artificial Sequence: Synthetic oligonucleotide
ugggguuugaauaaguggu

SEQ ID NO: 467755 - RNA, 19 nt, Artificial Sequence
  Description of Artificial Sequence: Synthetic oligonucleotide
gaugccaacgcucugggcc

SEQ ID NO: 467756 - RNA, 19 nt, Artificial Sequence
  Description of Artificial Sequence: Synthetic oligonucleotide
aaugcaccuuuucugggac

SEQ ID NO: 467757 - RNA, 19 nt, Artificial Sequence
  Description of Artificial Sequence: Synthetic oligonucleotide
cuuaccauggcauugccug

SEQ ID NO: 467758 - RNA, 19 nt, Artificial Sequence
  Description of Artificial Sequence: Synthetic oligonucleotide
aaauaggugauggugcguc

SEQ ID NO: 467759 - RNA, 19 nt, Artificial Sequence
  Description of Artificial Sequence: Synthetic oligonucleotide
ugaggcaucaaaagaagga

SEQ ID NO: 467760 - RNA, 19 nt, Artificial Sequence
  Description of Artificial Sequence: Synthetic oligonucleotide
cuugguacgaaguuuauca

SEQ ID NO: 467761 - RNA, 19 nt, Artificial Sequence
  Description of Artificial Sequence: Synthetic oligonucleotide
uaagauacucugcacgcag

SEQ ID NO: 467762 - RNA, 19 nt, Artificial Sequence
  Description of Artificial Sequence: Synthetic oligonucleotide
aaaaccgccaccugacuug

SEQ ID NO: 467763 - RNA, 19 nt, Artificial Sequence
  Description of Artificial Sequence: Synthetic oligonucleotide
gagucaaaauaggugaugg

SEQ ID NO: 467764 - RNA, 19 nt, Artificial Sequence
  Description of Artificial Sequence: Synthetic oligonucleotide
cauuaaugggcuaaggguc

SEQ ID NO: 467765 - RNA, 19 nt, Artificial Sequence
  Description of Artificial Sequence: Synthetic oligonucleotide
caugacuagaucuccauac

SEQ ID NO: 467766 - RNA, 19 nt, Artificial Sequence
  Description of Artificial Sequence: Synthetic oligonucleotide
uuugaauaaguggugccgg

SEQ ID NO: 467767 - RNA, 19 nt, Artificial Sequence
  Description of Artificial Sequence: Synthetic oligonucleotide
ugaaguaaccuguccagcc

SEQ ID NO: 467768 - RNA, 19 nt, Artificial Sequence
  Description of Artificial Sequence: Synthetic oligonucleotide
caaaauaggugauggugcg

SEQ ID NO: 467769 - RNA, 19 nt, Artificial Sequence
  Description of Artificial Sequence: Synthetic oligonucleotide
uuuauaggacacccggaag

SEQ ID NO: 467770 - RNA, 19 nt, Artificial Sequence
  Description of Artificial Sequence: Synthetic oligonucleotide
agagucgggauccagagga

SEQ ID NO: 467771 - RNA, 19 nt, Artificial Sequence
  Description of Artificial Sequence: Synthetic oligonucleotide
acaucaacagagauaaggg

SEQ ID NO: 467772 - RNA, 19 nt, Artificial Sequence
  Description of Artificial Sequence: Synthetic oligonucleotide
gaaaccaacauucucgcaa

SEQ ID NO: 467773 - RNA, 19 nt, Artificial Sequence
  Description of Artificial Sequence: Synthetic oligonucleotide
aagacguucucgucugggg

SEQ ID NO: 467774 - RNA, 19 nt, Artificial Sequence
  Description of Artificial Sequence: Synthetic oligonucleotide
ugaggcuaccguaaguuug

SEQ ID NO: 467775 - RNA, 19 nt, Artificial Sequence
  Description of Artificial Sequence: Synthetic oligonucleotide
agacaaaaggaacuggagu

SEQ ID NO: 467776 - RNA, 19 nt, Artificial Sequence
  Description of Artificial Sequence: Synthetic oligonucleotide
aauaggugauggugcgucg

SEQ ID NO: 467777 - RNA, 19 nt, Artificial Sequence
  Description of Artificial Sequence: Synthetic oligonucleotide
uuuauugaccagagcagga

SEQ ID NO: 467778 - RNA, 19 nt, Artificial Sequence
  Description of Artificial Sequence: Synthetic oligonucleotide
aauucaucuaagauacucu

SEQ ID NO: 467779 - RNA, 19 nt, Artificial Sequence
  Description of Artificial Sequence: Synthetic oligonucleotide
uucaucuaagauacucugc

SEQ ID NO: 467780 - RNA, 19 nt, Artificial Sequence
  Description of Artificial Sequence: Synthetic oligonucleotide
ucgaaguuugggcaugucc

SEQ ID NO: 467781 - RNA, 19 nt, Artificial Sequence
  Description of Artificial Sequence: Synthetic oligonucleotide
uggcaauaugcuuagggca

SEQ ID NO: 467782 - RNA, 19 nt, Artificial Sequence
  Description of Artificial Sequence: Synthetic oligonucleotide
cugggguuugaauaagugg

SEQ ID NO: 467783 - RNA, 19 nt, Artificial Sequence
  Description of Artificial Sequence: Synthetic oligonucleotide
cauugagccaguucugucc

SEQ ID NO: 467784 - RNA, 19 nt, Artificial Sequence
  Description of Artificial Sequence: Synthetic oligonucleotide
cuuuauugaccagagcagg

SEQ ID NO: 467785 - RNA, 19 nt, Artificial Sequence
  Description of Artificial Sequence: Synthetic oligonucleotide
guuugaauaaguggugccg

SEQ ID NO: 467786 - RNA, 19 nt, Artificial Sequence
  Description of Artificial Sequence: Synthetic oligonucleotide
gcaacauuccccuagggag

SEQ ID NO: 467787 - RNA, 19 nt, Artificial Sequence
  Description of Artificial Sequence: Synthetic oligonucleotide
ucaucuuucggacggcggc

SEQ ID NO: 467788 - RNA, 19 nt, Artificial Sequence
  Description of Artificial Sequence: Synthetic oligonucleotide
auacucugcacgcagguca

SEQ ID NO: 467789 - RNA, 19 nt, Artificial Sequence
  Description of Artificial Sequence: Synthetic oligonucleotide
uugaauaaguggugccggg

SEQ ID NO: 467790 - RNA, 19 nt, Artificial Sequence
  Description of Artificial Sequence: Synthetic oligonucleotide
caauucacgaugccaacgc

SEQ ID NO: 467791 - RNA, 19 nt, Artificial Sequence
  Description of Artificial Sequence: Synthetic oligonucleotide
aaccauuaggcagaguaca

SEQ ID NO: 467792 - RNA, 19 nt, Artificial Sequence
  Description of Artificial Sequence: Synthetic oligonucleotide
uucacgaugccaacgcucu

SEQ ID NO: 467793 - RNA, 19 nt, Artificial Sequence
  Description of Artificial Sequence: Synthetic oligonucleotide
uuagagugcgcugugaguc

SEQ ID NO: 467794 - RNA, 19 nt, Artificial Sequence
  Description of Artificial Sequence: Synthetic oligonucleotide
aauccaaagggaauugggu

SEQ ID NO: 467795 - RNA, 19 nt, Artificial Sequence
  Description of Artificial Sequence: Synthetic oligonucleotide
gaaguaaccuguccagccc

SEQ ID NO: 467796 - RNA, 19 nt, Artificial Sequence
  Description of Artificial Sequence: Synthetic oligonucleotide
ugucguuuauaggacaccc

SEQ ID NO: 467797 - RNA, 19 nt, Artificial Sequence
  Description of Artificial Sequence: Synthetic oligonucleotide
aaaccaacauucucgcaaa

SEQ ID NO: 467798 - RNA, 19 nt, Artificial Sequence
  Description of Artificial Sequence: Synthetic oligonucleotide
caguggaaugucaacgagg

SEQ ID NO: 467799 - RNA, 19 nt, Artificial Sequence
  Description of Artificial Sequence: Synthetic oligonucleotide
auauauauauauauauaaa

SEQ ID NO: 467800 - RNA, 19 nt, Artificial Sequence
  Description of Artificial Sequence: Synthetic oligonucleotide
ucaaaacgacagcagggug

SEQ ID NO: 467801 - RNA, 19 nt, Artificial Sequence
  Description of Artificial Sequence: Synthetic oligonucleotide
guuuagagugcgcugugag

SEQ ID NO: 467802 - RNA, 19 nt, Artificial Sequence
  Description of Artificial Sequence: Synthetic oligonucleotide
acgaaguuuaucauagaag

SEQ ID NO: 467803 - RNA, 19 nt, Artificial Sequence
  Description of Artificial Sequence: Synthetic oligonucleotide
cugaggcaucaaaagaagg

SEQ ID NO: 467804 - RNA, 19 nt, Artificial Sequence
  Description of Artificial Sequence: Synthetic oligonucleotide
cauauaagguccccaaauc

SEQ ID NO: 467805 - RNA, 19 nt, Artificial Sequence
  Description of Artificial Sequence: Synthetic oligonucleotide
caacauuccccuagggagg

SEQ ID NO: 467806 - RNA, 19 nt, Artificial Sequence
  Description of Artificial Sequence: Synthetic oligonucleotide
agcacaugucguuuauagg

SEQ ID NO: 467807 - RNA, 19 nt, Artificial Sequence
  Description of Artificial Sequence: Synthetic oligonucleotide
auucucgcaaaagaaaaca

SEQ ID NO: 467808 - RNA, 19 nt, Artificial Sequence
  Description of Artificial Sequence: Synthetic oligonucleotide
cuaugagagggucggagag

SEQ ID NO: 467809 - RNA, 19 nt, Artificial Sequence
  Description of Artificial Sequence: Synthetic oligonucleotide
cauuaggcagaguacauga

SEQ ID NO: 467810 - RNA, 19 nt, Artificial Sequence
  Description of Artificial Sequence: Synthetic oligonucleotide
aauucacgaugccaacgcu

SEQ ID NO: 467811 - RNA, 19 nt, Artificial Sequence
  Description of Artificial Sequence: Synthetic oligonucleotide
aacauuccccuagggaggg

SEQ ID NO: 467812 - RNA, 19 nt, Artificial Sequence
  Description of Artificial Sequence: Synthetic oligonucleotide
uccccugcccauuaauggg

SEQ ID NO: 467813 - RNA, 19 nt, Artificial Sequence
  Description of Artificial Sequence: Synthetic oligonucleotide
uucuaugagagggucggag

SEQ ID NO: 467814 - RNA, 19 nt, Artificial Sequence
  Description of Artificial Sequence: Synthetic oligonucleotide
ucugccgucgaaguuuggg

SEQ ID NO: 467815 - RNA, 19 nt, Artificial Sequence
  Description of Artificial Sequence: Synthetic oligonucleotide
accgccaccugacuugagc

SEQ ID NO: 467816 - RNA, 19 nt, Artificial Sequence
  Description of Artificial Sequence: Synthetic oligonucleotide
guagauacuuggcaauaug

SEQ ID NO: 467817 - RNA, 19 nt, Artificial Sequence
  Description of Artificial Sequence: Synthetic oligonucleotide
uccaguaccccggagcggg

SEQ ID NO: 467818 - RNA, 19 nt, Artificial Sequence
  Description of Artificial Sequence: Synthetic oligonucleotide
cuagcuggccccaucguag

SEQ ID NO: 467819 - RNA, 19 nt, Artificial Sequence
  Description of Artificial Sequence: Synthetic oligonucleotide
caugucguuuauaggacac

SEQ ID NO: 467820 - RNA, 19 nt, Artificial Sequence
  Description of Artificial Sequence: Synthetic oligonucleotide
uccaguggaaugucaacga

SEQ ID NO: 467821 - RNA, 19 nt, Artificial Sequence
  Description of Artificial Sequence: Synthetic oligonucleotide
auauauauauauauauaua

SEQ ID NO: 467822 - RNA, 19 nt, Artificial Sequence
  Description of Artificial Sequence: Synthetic oligonucleotide
gacuagaucuccauacaug

SEQ ID NO: 467823 - RNA, 19 nt, Artificial Sequence
  Description of Artificial Sequence: Synthetic oligonucleotide
aauaugcuuagggcagcgg

SEQ ID NO: 467824 - RNA, 19 nt, Artificial Sequence
  Description of Artificial Sequence: Synthetic oligonucleotide
agaguacaugaaaggaggc

SEQ ID NO: 467825 - RNA, 19 nt, Artificial Sequence
  Description of Artificial Sequence: Synthetic oligonucleotide
aaugggucguauguggcca

SEQ ID NO: 467826 - RNA, 19 nt, Artificial Sequence
  Description of Artificial Sequence: Synthetic oligonucleotide
gaggcaucaaaagaaggac

SEQ ID NO: 467827 - RNA, 19 nt, Artificial Sequence
  Description of Artificial Sequence: Synthetic oligonucleotide
uuaccauggcauugccugg

SEQ ID NO: 467828 - RNA, 19 nt, Artificial Sequence
  Description of Artificial Sequence: Synthetic oligonucleotide
cauucucgcaaaagaaaac

SEQ ID NO: 467829 - RNA, 19 nt, Artificial Sequence
  Description of Artificial Sequence: Synthetic oligonucleotide
uuuagagugcgcugugagu

SEQ ID NO: 467830 - RNA, 19 nt, Artificial Sequence
  Description of Artificial Sequence: Synthetic oligonucleotide
ucgaagacguucucgucug

SEQ ID NO: 467831 - RNA, 19 nt, Artificial Sequence
  Description of Artificial Sequence: Synthetic oligonucleotide
uaugagagggucggagagg

SEQ ID NO: 467832 - RNA, 19 nt, Artificial Sequence
  Description of Artificial Sequence: Synthetic oligonucleotide
caggauuuucuaugagagg

SEQ ID NO: 467833 - RNA, 19 nt, Artificial Sequence
  Description of Artificial Sequence: Synthetic oligonucleotide
cacaugucguuuauaggac

SEQ ID NO: 467834 - RNA, 19 nt, Artificial Sequence
  Description of Artificial Sequence: Synthetic oligonucleotide
auugagccaguucugucca

SEQ ID NO: 467835 - RNA, 19 nt, Artificial Sequence
  Description of Artificial Sequence: Synthetic oligonucleotide
ugcgcuccccuucaggacc

SEQ ID NO: 467836 - RNA, 19 nt, Artificial Sequence
  Description of Artificial Sequence: Synthetic oligonucleotide
aucaaaacgacagcagggu

SEQ ID NO: 467837 - RNA, 19 nt, Artificial Sequence
  Description of Artificial Sequence: Synthetic oligonucleotide
aacgcugggaggccccuag

SEQ ID NO: 467838 - RNA, 19 nt, Artificial Sequence
  Description of Artificial Sequence: Synthetic oligonucleotide
aggcaucaaaagaaggacg

SEQ ID NO: 467839 - RNA, 19 nt, Artificial Sequence
  Description of Artificial Sequence: Synthetic oligonucleotide
aaaacgacagcagggugau

SEQ ID NO: 467840 - RNA, 19 nt, Artificial Sequence
  Description of Artificial Sequence: Synthetic oligonucleotide
gaagacguucucgucuggg

SEQ ID NO: 467841 - RNA, 19 nt, Artificial Sequence
  Description of Artificial Sequence: Synthetic oligonucleotide
augacuagaucuccauaca

SEQ ID NO: 467842 - RNA, 19 nt, Artificial Sequence
  Description of Artificial Sequence: Synthetic oligonucleotide
uucacuagcugaggcauca

SEQ ID NO: 467843 - RNA, 19 nt, Artificial Sequence
  Description of Artificial Sequence: Synthetic oligonucleotide
gcagcggcgguuuagagug

SEQ ID NO: 467844 - RNA, 19 nt, Artificial Sequence
  Description of Artificial Sequence: Synthetic oligonucleotide
gucauuauucugccuggcc

SEQ ID NO: 467845 - RNA, 19 nt, Artificial Sequence
  Description of Artificial Sequence: Synthetic oligonucleotide
augccaacgcucugggccg

SEQ ID NO: 467846 - RNA, 19 nt, Artificial Sequence
  Description of Artificial Sequence: Synthetic oligonucleotide
gagagggcgagaacgcugg

SEQ ID NO: 467847 - RNA, 19 nt, Artificial Sequence
  Description of Artificial Sequence: Synthetic oligonucleotide
auucacgaugccaacgcuc

SEQ ID NO: 467848 - RNA, 19 nt, Artificial Sequence
  Description of Artificial Sequence: Synthetic oligonucleotide
augucguuuauaggacacc

SEQ ID NO: 467849 - RNA, 19 nt, Artificial Sequence
  Description of Artificial Sequence: Synthetic oligonucleotide
cagcuuucuccccaguccg

SEQ ID NO: 467850 - RNA, 19 nt, Artificial Sequence
  Description of Artificial Sequence: Synthetic oligonucleotide
agauacucugcacgcaggu

SEQ ID NO: 467851 - RNA, 19 nt, Artificial Sequence
  Description of Artificial Sequence: Synthetic oligonucleotide
cuugagccggggcuuaggg

SEQ ID NO: 467852 - RNA, 19 nt, Artificial Sequence
  Description of Artificial Sequence: Synthetic oligonucleotide
acauucucgcaaaagaaaa

SEQ ID NO: 467853 - RNA, 19 nt, Artificial Sequence
  Description of Artificial Sequence: Synthetic oligonucleotide
acaugucguuuauaggaca

SEQ ID NO: 467854 - RNA, 19 nt, Artificial Sequence
  Description of Artificial Sequence: Synthetic oligonucleotide
ugguggaaauccaaucgau

SEQ ID NO: 467855 - RNA, 19 nt, Artificial Sequence
  Description of Artificial Sequence: Synthetic oligonucleotide
uccauauaagguccccaaa

SEQ ID NO: 467856 - RNA, 19 nt, Artificial Sequence
  Description of Artificial Sequence: Synthetic oligonucleotide
acaugaaaggaggccagag

SEQ ID NO: 467857 - RNA, 19 nt, Artificial Sequence
  Description of Artificial Sequence: Synthetic oligonucleotide
ugguacgaaguuuaucaua

SEQ ID NO: 467858 - RNA, 19 nt, Artificial Sequence
  Description of Artificial Sequence: Synthetic oligonucleotide
uugagccggggcuuagggg

SEQ ID NO: 467859 - RNA, 19 nt, Artificial Sequence
  Description of Artificial Sequence: Synthetic oligonucleotide
cccauuaaugggcuaaggg

SEQ ID NO: 467860 - RNA, 19 nt, Artificial Sequence
  Description of Artificial Sequence: Synthetic oligonucleotide
gaugaguaugcuggcauca

SEQ ID NO: 467861 - RNA, 19 nt, Artificial Sequence
  Description of Artificial Sequence: Synthetic oligonucleotide
cucaucuuucggacggcgg

SEQ ID NO: 467862 - RNA, 19 nt, Artificial Sequence
  Description of Artificial Sequence: Synthetic oligonucleotide
acgacagcagggugauggc

SEQ ID NO: 467863 - RNA, 19 nt, Artificial Sequence
  Description of Artificial Sequence: Synthetic oligonucleotide
gaggccaucgaagacguuc

SEQ ID NO: 467864 - RNA, 19 nt, Artificial Sequence
  Description of Artificial Sequence: Synthetic oligonucleotide
cacgcaggucacauguucc

SEQ ID NO: 467865 - RNA, 19 nt, Artificial Sequence
  Description of Artificial Sequence: Synthetic oligonucleotide
ugccgucgaaguuugggca

SEQ ID NO: 467866 - RNA, 19 nt, Artificial Sequence
  Description of Artificial Sequence: Synthetic oligonucleotide
auuaaugggcuaagggucu

SEQ ID NO: 467867 - RNA, 19 nt, Artificial Sequence
  Description of Artificial Sequence: Synthetic oligonucleotide
uuggccacaaggcaacauu

SEQ ID NO: 467868 - RNA, 19 nt, Artificial Sequence
  Description of Artificial Sequence: Synthetic oligonucleotide
ucgucugggguuugaauaa

SEQ ID NO: 467869 - RNA, 19 nt, Artificial Sequence
  Description of Artificial Sequence: Synthetic oligonucleotide
ucggagagggcgagaacgc

SEQ ID NO: 467870 - RNA, 19 nt, Artificial Sequence
  Description of Artificial Sequence: Synthetic oligonucleotide
cauaacccuugguacgaag

SEQ ID NO: 467871 - RNA, 19 nt, Artificial Sequence
  Description of Artificial Sequence: Synthetic oligonucleotide
ucuaguuggcacugugguc

SEQ ID NO: 467872 - RNA, 19 nt, Artificial Sequence
  Description of Artificial Sequence: Synthetic oligonucleotide
cugccgucgaaguuugggc

SEQ ID NO: 467873 - RNA, 19 nt, Artificial Sequence
  Description of Artificial Sequence: Synthetic oligonucleotide
agacguucucgucuggggu

SEQ ID NO: 467874 - RNA, 19 nt, Artificial Sequence
  Description of Artificial Sequence: Synthetic oligonucleotide
uuucggacggcggcgaccc

SEQ ID NO: 467875 - RNA, 19 nt, Artificial Sequence
  Description of Artificial Sequence: Synthetic oligonucleotide
ggcaauaugcuuagggcag

SEQ ID NO: 467876 - RNA, 19 nt, Artificial Sequence
  Description of Artificial Sequence: Synthetic oligonucleotide
uguagauacuuggcaauau

SEQ ID NO: 467877 - RNA, 19 nt, Artificial Sequence
  Description of Artificial Sequence: Synthetic oligonucleotide
ugugugagguuccgccgcc

SEQ ID NO: 467878 - RNA, 19 nt, Artificial Sequence
  Description of Artificial Sequence: Synthetic oligonucleotide
guuugaaggaauucaucua

SEQ ID NO: 467879 - RNA, 19 nt, Artificial Sequence
  Description of Artificial Sequence: Synthetic oligonucleotide
aacagagauaagggaccag

SEQ ID NO: 467880 - RNA, 19 nt, Artificial Sequence
  Description of Artificial Sequence: Synthetic oligonucleotide
agcugaggcaucaaaagaa

SEQ ID NO: 467881 - RNA, 19 nt, Artificial Sequence
  Description of Artificial Sequence: Synthetic oligonucleotide
uccggcucaucuuucggac

SEQ ID NO: 467882 - RNA, 19 nt, Artificial Sequence
  Description of Artificial Sequence: Synthetic oligonucleotide
uguccauauaaggucccca

SEQ ID NO: 467883 - RNA, 19 nt, Artificial Sequence
  Description of Artificial Sequence: Synthetic oligonucleotide
uugguacgaaguuuaucau

SEQ ID NO: 467884 - RNA, 19 nt, Artificial Sequence
  Description of Artificial Sequence: Synthetic oligonucleotide
gagacuuugggguccaccu

SEQ ID NO: 467885 - RNA, 19 nt, Artificial Sequence
  Description of Artificial Sequence: Synthetic oligonucleotide
uaccguaaguuugaaggaa

SEQ ID NO: 467886 - RNA, 19 nt, Artificial Sequence
  Description of Artificial Sequence: Synthetic oligonucleotide
ggagaaaaugggucguaug

SEQ ID NO: 467887 - RNA, 19 nt, Artificial Sequence
  Description of Artificial Sequence: Synthetic oligonucleotide
gucguuuauaggacacccg

SEQ ID NO: 467888 - RNA, 19 nt, Artificial Sequence
  Description of Artificial Sequence: Synthetic oligonucleotide
ggucguauguggccaaucc

SEQ ID NO: 467889 - RNA, 19 nt, Artificial Sequence
  Description of Artificial Sequence: Synthetic oligonucleotide
ggugcgucgccucacauca

SEQ ID NO: 467890 - RNA, 19 nt, Artificial Sequence
  Description of Artificial Sequence: Synthetic oligonucleotide
guacaugaaaggaggccag

SEQ ID NO: 467891 - RNA, 19 nt, Artificial Sequence
  Description of Artificial Sequence: Synthetic oligonucleotide
cuucaggaccagucagucc

SEQ ID NO: 467892 - RNA, 19 nt, Artificial Sequence
  Description of Artificial Sequence: Synthetic oligonucleotide
ugcgucgccucacaucaac

SEQ ID NO: 467893 - RNA, 19 nt, Artificial Sequence
  Description of Artificial Sequence: Synthetic oligonucleotide
cuaccguaaguuugaagga

SEQ ID NO: 467894 - RNA, 19 nt, Artificial Sequence
  Description of Artificial Sequence: Synthetic oligonucleotide
auugccuggcaugcgcugg

SEQ ID NO: 467895 - RNA, 19 nt, Artificial Sequence
  Description of Artificial Sequence: Synthetic oligonucleotide
aguuugggcauguccugcu

SEQ ID NO: 467896 - RNA, 19 nt, Artificial Sequence
  Description of Artificial Sequence: Synthetic oligonucleotide
acuagcugaggcaucaaaa

SEQ ID NO: 467897 - RNA, 19 nt, Artificial Sequence
  Description of Artificial Sequence: Synthetic oligonucleotide
uaaugggcuaagggucugg

SEQ ID NO: 467898 - RNA, 19 nt, Artificial Sequence
  Description of Artificial Sequence: Synthetic oligonucleotide
gcaccuagcagacccagcc

SEQ ID NO: 467899 - RNA, 19 nt, Artificial Sequence
  Description of Artificial Sequence: Synthetic oligonucleotide
agaaaccaacauucucgca

SEQ ID NO: 467900 - RNA, 19 nt, Artificial Sequence
  Description of Artificial Sequence: Synthetic oligonucleotide
gccgucucaauucacgaug

SEQ ID NO: 467901 - RNA, 19 nt, Artificial Sequence
  Description of Artificial Sequence: Synthetic oligonucleotide
aagacccggucccuuguau

SEQ ID NO: 467902 - RNA, 19 nt, Artificial Sequence
  Description of Artificial Sequence: Synthetic oligonucleotide
gauccggcccaaaaccgcc

SEQ ID NO: 467903 - RNA, 19 nt, Artificial Sequence
  Description of Artificial Sequence: Synthetic oligonucleotide
uguuccccugcccauuaau

SEQ ID NO: 467904 - RNA, 19 nt, Artificial Sequence
  Description of Artificial Sequence: Synthetic oligonucleotide
cucgucugggguuugaaua

SEQ ID NO: 467905 - RNA, 19 nt, Artificial Sequence
  Description of Artificial Sequence: Synthetic oligonucleotide
caucuuucggacggcggcg

SEQ ID NO: 467906 - RNA, 19 nt, Artificial Sequence
  Description of Artificial Sequence: Synthetic oligonucleotide
gucucaauucacgaugcca

SEQ ID NO: 467907 - RNA, 19 nt, Artificial Sequence
  Description of Artificial Sequence: Synthetic oligonucleotide
ugcagugacacaguuccuu

SEQ ID NO: 467908 - RNA, 19 nt, Artificial Sequence
  Description of Artificial Sequence: Synthetic oligonucleotide
cuuugcccgcccaccaccc

SEQ ID NO: 467909 - RNA, 19 nt, Artificial Sequence
  Description of Artificial Sequence: Synthetic oligonucleotide
ggagccgucucaauucacg

SEQ ID NO: 467910 - RNA, 19 nt, Artificial Sequence
  Description of Artificial Sequence: Synthetic oligonucleotide
gagccgucucaauucacga

SEQ ID NO: 467911 - RNA, 19 nt, Artificial Sequence
  Description of Artificial Sequence: Synthetic oligonucleotide
ccaccuuaguccaucuucc

SEQ ID NO: 467912 - RNA, 19 nt, Artificial Sequence
  Description of Artificial Sequence: Synthetic oligonucleotide
augucaacgaggugcuuuu

SEQ ID NO: 467913 - RNA, 19 nt, Artificial Sequence
  Description of Artificial Sequence: Synthetic oligonucleotide
gucuaguuggcacuguggu

SEQ ID NO: 467914 - RNA, 19 nt, Artificial Sequence
  Description of Artificial Sequence: Synthetic oligonucleotide
aacccuugguacgaaguuu

SEQ ID NO: 467915 - RNA, 19 nt, Artificial Sequence
  Description of Artificial Sequence: Synthetic oligonucleotide
caccuagcagacccagccg

SEQ ID NO: 467916 - RNA, 19 nt, Artificial Sequence
  Description of Artificial Sequence: Synthetic oligonucleotide
cauuccccuagggagggag

SEQ ID NO: 467917 - RNA, 19 nt, Artificial Sequence
  Description of Artificial Sequence: Synthetic oligonucleotide
gaccccgccacuccugcug

SEQ ID NO: 467918 - RNA, 19 nt, Artificial Sequence
  Description of Artificial Sequence: Synthetic oligonucleotide
ugcccauuaaugggcuaag

SEQ ID NO: 467919 - RNA, 19 nt, Artificial Sequence
  Description of Artificial Sequence: Synthetic oligonucleotide
ucucgucugggguuugaau

SEQ ID NO: 467920 - RNA, 19 nt, Artificial Sequence
  Description of Artificial Sequence: Synthetic oligonucleotide
acgcaggucacauguuccu

SEQ ID NO: 467921 - RNA, 19 nt, Artificial Sequence
  Description of Artificial Sequence: Synthetic oligonucleotide
ggaauggaugcuccacuug

SEQ ID NO: 467922 - RNA, 19 nt, Artificial Sequence
  Description of Artificial Sequence: Synthetic oligonucleotide
gaagccggccacacgggcc

SEQ ID NO: 467923 - RNA, 19 nt, Artificial Sequence
  Description of Artificial Sequence: Synthetic oligonucleotide
aaaccgccaccugacuuga

SEQ ID NO: 467924 - RNA, 19 nt, Artificial Sequence
  Description of Artificial Sequence: Synthetic oligonucleotide
gauacucugcacgcagguc

SEQ ID NO: 467925 - RNA, 19 nt, Artificial Sequence
  Description of Artificial Sequence: Synthetic oligonucleotide
caucgaagacguucucguc

SEQ ID NO: 467926 - RNA, 19 nt, Artificial Sequence
  Description of Artificial Sequence: Synthetic oligonucleotide
ggcauugccuggcaugcgc

SEQ ID NO: 467927 - RNA, 19 nt, Artificial Sequence
  Description of Artificial Sequence: Synthetic oligonucleotide
auuauucugccuggccaca

SEQ ID NO: 467928 - RNA, 19 nt, Artificial Sequence
  Description of Artificial Sequence: Synthetic oligonucleotide
ggcgagaacgcugggaggc

SEQ ID NO: 467929 - RNA, 19 nt, Artificial Sequence
  Description of Artificial Sequence: Synthetic oligonucleotide
cauugccuggcaugcgcug

SEQ ID NO: 467930 - RNA, 19 nt, Artificial Sequence
  Description of Artificial Sequence: Synthetic oligonucleotide
agcaccuagcagacccagc

SEQ ID NO: 467931 - RNA, 19 nt, Artificial Sequence
  Description of Artificial Sequence: Synthetic oligonucleotide
gccaucgaagacguucucg

SEQ ID NO: 467932 - RNA, 19 nt, Artificial Sequence
  Description of Artificial Sequence: Synthetic oligonucleotide
gcgcugugagucaaaauag

SEQ ID NO: 467933 - RNA, 19 nt, Artificial Sequence
  Description of Artificial Sequence: Synthetic oligonucleotide
cuguccauauaaggucccc

SEQ ID NO: 467934 - RNA, 19 nt, Artificial Sequence
  Description of Artificial Sequence: Synthetic oligonucleotide
ccauuaaugggcuaagggu

SEQ ID NO: 467935 - RNA, 19 nt, Artificial Sequence
  Description of Artificial Sequence: Synthetic oligonucleotide
gucgggauccagaggagac

SEQ ID NO: 467936 - RNA, 19 nt, Artificial Sequence
  Description of Artificial Sequence: Synthetic oligonucleotide
uggugcgucgccucacauc

SEQ ID NO: 467937 - RNA, 19 nt, Artificial Sequence
  Description of Artificial Sequence: Synthetic oligonucleotide
caccuguggcguugcaccc

SEQ ID NO: 467938 - RNA, 19 nt, Artificial Sequence
  Description of Artificial Sequence: Synthetic oligonucleotide
uuugcccgcccaccacccc

SEQ ID NO: 467939 - RNA, 19 nt, Artificial Sequence
  Description of Artificial Sequence: Synthetic oligonucleotide
accguaaguuugaaggaau

SEQ ID NO: 467940 - RNA, 19 nt, Artificial Sequence
  Description of Artificial Sequence: Synthetic oligonucleotide
uuucuaugagagggucgga

SEQ ID NO: 467941 - RNA, 19 nt, Artificial Sequence
  Description of Artificial Sequence: Synthetic oligonucleotide
gguggaaauccaaucgauc

SEQ ID NO: 467942 - RNA, 19 nt, Artificial Sequence
  Description of Artificial Sequence: Synthetic oligonucleotide
ucgggauccagaggagacu

SEQ ID NO: 467943 - RNA, 19 nt, Artificial Sequence
  Description of Artificial Sequence: Synthetic oligonucleotide
cuuucggacggcggcgacc

SEQ ID NO: 467944 - RNA, 19 nt, Artificial Sequence
  Description of Artificial Sequence: Synthetic oligonucleotide
ccgucucaauucacgaugc

SEQ ID NO: 467945 - RNA, 19 nt, Artificial Sequence
  Description of Artificial Sequence: Synthetic oligonucleotide
gggaugaggcuaccguaag

SEQ ID NO: 467946 - RNA, 19 nt, Artificial Sequence
  Description of Artificial Sequence: Synthetic oligonucleotide
aggcgggugucuccgccuc

SEQ ID NO: 467947 - RNA, 19 nt, Artificial Sequence
  Description of Artificial Sequence: Synthetic oligonucleotide
uggagccgucucaauucac

SEQ ID NO: 467948 - RNA, 19 nt, Artificial Sequence
  Description of Artificial Sequence: Synthetic oligonucleotide
acgcugggaggccccuagc

SEQ ID NO: 467949 - RNA, 19 nt, Artificial Sequence
  Description of Artificial Sequence: Synthetic oligonucleotide
uuauucugccuggccacau

SEQ ID NO: 467950 - RNA, 19 nt, Artificial Sequence
  Description of Artificial Sequence: Synthetic oligonucleotide
ucuuucggacggcggcgac

SEQ ID NO: 467951 - RNA, 19 nt, Artificial Sequence
  Description of Artificial Sequence: Synthetic oligonucleotide
caccuuuucugggacugug

SEQ ID NO: 467952 - RNA, 19 nt, Artificial Sequence
  Description of Artificial Sequence: Synthetic oligonucleotide
gaggcgucuaguuggcacu

SEQ ID NO: 467953 - RNA, 19 nt, Artificial Sequence
  Description of Artificial Sequence: Synthetic oligonucleotide
ggcuaccguaaguuugaag

SEQ ID NO: 467954 - RNA, 19 nt, Artificial Sequence
  Description of Artificial Sequence: Synthetic oligonucleotide
cagggugauggcaccugug

SEQ ID NO: 467955 - RNA, 19 nt, Artificial Sequence
  Description of Artificial Sequence: Synthetic oligonucleotide
auuaggcagaguacaugaa

SEQ ID NO: 467956 - RNA, 19 nt, Artificial Sequence
  Description of Artificial Sequence: Synthetic oligonucleotide
gagaacgcugggaggcccc

SEQ ID NO: 467957 - RNA, 19 nt, Artificial Sequence
  Description of Artificial Sequence: Synthetic oligonucleotide
gccuguagauacuuggcaa

SEQ ID NO: 467958 - RNA, 19 nt, Artificial Sequence
  Description of Artificial Sequence: Synthetic oligonucleotide
cuuucuccccaguccgcuc

SEQ ID NO: 467959 - RNA, 19 nt, Artificial Sequence
  Description of Artificial Sequence: Synthetic oligonucleotide
accauuaggcagaguacau

SEQ ID NO: 467960 - RNA, 19 nt, Artificial Sequence
  Description of Artificial Sequence: Synthetic oligonucleotide
cgucuaguuggcacugugg

SEQ ID NO: 467961 - RNA, 19 nt, Artificial Sequence
  Description of Artificial Sequence: Synthetic oligonucleotide
acccuugguacgaaguuua

SEQ ID NO: 467962 - RNA, 19 nt, Artificial Sequence
  Description of Artificial Sequence: Synthetic oligonucleotide
ccaggauccggcccaaaac

SEQ ID NO: 467963 - RNA, 19 nt, Artificial Sequence
  Description of Artificial Sequence: Synthetic oligonucleotide
cugcacgcaggucacaugu

SEQ ID NO: 467964 - RNA, 19 nt, Artificial Sequence
  Description of Artificial Sequence: Synthetic oligonucleotide
ugcuuagggcagcggcggu

SEQ ID NO: 467965 - RNA, 19 nt, Artificial Sequence
  Description of Artificial Sequence: Synthetic oligonucleotide
ccuagcagacccagccggg

SEQ ID NO: 467966 - RNA, 19 nt, Artificial Sequence
  Description of Artificial Sequence: Synthetic oligonucleotide
ccgccaccugacuugagcc

SEQ ID NO: 467967 - RNA, 19 nt, Artificial Sequence
  Description of Artificial Sequence: Synthetic oligonucleotide
cagguggauggggauuagc

SEQ ID NO: 467968 - RNA, 19 nt, Artificial Sequence
  Description of Artificial Sequence: Synthetic oligonucleotide
cucucauggcucggcgccg

SEQ ID NO: 467969 - RNA, 19 nt, Artificial Sequence
  Description of Artificial Sequence: Synthetic oligonucleotide
ucaccccaucauaacccuu

SEQ ID NO: 467970 - RNA, 19 nt, Artificial Sequence
  Description of Artificial Sequence: Synthetic oligonucleotide
gagggucggagagggcgag

SEQ ID NO: 467971 - RNA, 19 nt, Artificial Sequence
  Description of Artificial Sequence: Synthetic oligonucleotide
aucuuucggacggcggcga

SEQ ID NO: 467972 - RNA, 19 nt, Artificial Sequence
  Description of Artificial Sequence: Synthetic oligonucleotide
ggauccggcccaaaaccgc

SEQ ID NO: 467973 - RNA, 19 nt, Artificial Sequence
  Description of Artificial Sequence: Synthetic oligonucleotide
ccccaugagagcaccuagc

SEQ ID NO: 467974 - RNA, 19 nt, Artificial Sequence
  Description of Artificial Sequence: Synthetic oligonucleotide
guaguuccuuauugaagau

SEQ ID NO: 467975 - RNA, 19 nt, Artificial Sequence
  Description of Artificial Sequence: Synthetic oligonucleotide
aagaucuggcaggcagcaa

SEQ ID NO: 467976 - RNA, 19 nt, Artificial Sequence
  Description of Artificial Sequence: Synthetic oligonucleotide
ggcucucauggcucggcgc

SEQ ID NO: 467977 - RNA, 19 nt, Artificial Sequence
  Description of Artificial Sequence: Synthetic oligonucleotide
ccauuaggcagaguacaug

SEQ ID NO: 467978 - RNA, 19 nt, Artificial Sequence
  Description of Artificial Sequence: Synthetic oligonucleotide
gcccaaaaccgccaccuga

SEQ ID NO: 467979 - RNA, 19 nt, Artificial Sequence
  Description of Artificial Sequence: Synthetic oligonucleotide
gacguucucgucugggguu

SEQ ID NO: 467980 - RNA, 19 nt, Artificial Sequence
  Description of Artificial Sequence: Synthetic oligonucleotide
cguaaguuugaaggaauuc

SEQ ID NO: 467981 - RNA, 19 nt, Artificial Sequence
  Description of Artificial Sequence: Synthetic oligonucleotide
agccaguucuguccauaua

SEQ ID NO: 467982 - RNA, 19 nt, Artificial Sequence
  Description of Artificial Sequence: Synthetic oligonucleotide
aggcgucuaguuggcacug

SEQ ID NO: 467983 - RNA, 19 nt, Artificial Sequence
  Description of Artificial Sequence: Synthetic oligonucleotide
ggacuguguccaugacuag

SEQ ID NO: 467984 - RNA, 19 nt, Artificial Sequence
  Description of Artificial Sequence: Synthetic oligonucleotide
aaacgacagcagggugaug

SEQ ID NO: 467985 - RNA, 19 nt, Artificial Sequence
  Description of Artificial Sequence: Synthetic oligonucleotide
augggucguauguggccaa

SEQ ID NO: 467986 - RNA, 19 nt, Artificial Sequence
  Description of Artificial Sequence: Synthetic oligonucleotide
gucccugacccaggauccg

SEQ ID NO: 467987 - RNA, 19 nt, Artificial Sequence
  Description of Artificial Sequence: Synthetic oligonucleotide
agagugcgcugugagucaa

SEQ ID NO: 467988 - RNA, 19 nt, Artificial Sequence
  Description of Artificial Sequence: Synthetic oligonucleotide
uugagccaguucuguccau

SEQ ID NO: 467989 - RNA, 19 nt, Artificial Sequence
  Description of Artificial Sequence: Synthetic oligonucleotide
ggugagcacaugucguuua

SEQ ID NO: 467990 - RNA, 19 nt, Artificial Sequence
  Description of Artificial Sequence: Synthetic oligonucleotide
accccgccacuccugcugu

SEQ ID NO: 467991 - RNA, 19 nt, Artificial Sequence
  Description of Artificial Sequence: Synthetic oligonucleotide
agggagaaaaugggucgua

SEQ ID NO: 467992 - RNA, 19 nt, Artificial Sequence
  Description of Artificial Sequence: Synthetic oligonucleotide
ggcgccggcgcugugagca

SEQ ID NO: 467993 - RNA, 19 nt, Artificial Sequence
  Description of Artificial Sequence: Synthetic oligonucleotide
ucacuagcugaggcaucaa

SEQ ID NO: 467994 - RNA, 19 nt, Artificial Sequence
  Description of Artificial Sequence: Synthetic oligonucleotide
gguuuagagugcgcuguga

SEQ ID NO: 467995 - RNA, 19 nt, Artificial Sequence
  Description of Artificial Sequence: Synthetic oligonucleotide
auuccccuagggagggaga

SEQ ID NO: 467996 - RNA, 19 nt, Artificial Sequence
  Description of Artificial Sequence: Synthetic oligonucleotide
guauagucucuuucaucuu

SEQ ID NO: 467997 - RNA, 19 nt, Artificial Sequence
  Description of Artificial Sequence: Synthetic oligonucleotide
agaacgcugggaggccccu

SEQ ID NO: 467998 - RNA, 19 nt, Artificial Sequence
  Description of Artificial Sequence: Synthetic oligonucleotide
ccaucgaagacguucucgu

SEQ ID NO: 467999 - RNA, 19 nt, Artificial Sequence
  Description of Artificial Sequence: Synthetic oligonucleotide
ccuugguacgaaguuuauc

SEQ ID NO: 468000 - RNA, 19 nt, Artificial Sequence
  Description of Artificial Sequence: Synthetic oligonucleotide
uccccuagggagggagaaa

SEQ ID NO: 468001 - RNA, 19 nt, Artificial Sequence
  Description of Artificial Sequence: Synthetic oligonucleotide
cccggucccuuguauaguc

SEQ ID NO: 468002 - RNA, 19 nt, Artificial Sequence
  Description of Artificial Sequence: Synthetic oligonucleotide
ccccuuaccauggcauugc

SEQ ID NO: 468003 - RNA, 19 nt, Artificial Sequence
  Description of Artificial Sequence: Synthetic oligonucleotide
acguucucgucugggguuu

SEQ ID NO: 468004 - RNA, 19 nt, Artificial Sequence
  Description of Artificial Sequence: Synthetic oligonucleotide
ggcuguguuggccagcuuu

SEQ ID NO: 468005 - RNA, 19 nt, Artificial Sequence
  Description of Artificial Sequence: Synthetic oligonucleotide
ugauggcaccuguggcguu

SEQ ID NO: 468006 - RNA, 19 nt, Artificial Sequence
  Description of Artificial Sequence: Synthetic oligonucleotide
ggcgcugugagcaggauuu

SEQ ID NO: 468007 - RNA, 19 nt, Artificial Sequence
  Description of Artificial Sequence: Synthetic oligonucleotide
cguuuauaggacacccgga

SEQ ID NO: 468008 - RNA, 19 nt, Artificial Sequence
  Description of Artificial Sequence: Synthetic oligonucleotide
gccccuuaccauggcauug

SEQ ID NO: 468009 - RNA, 19 nt, Artificial Sequence
  Description of Artificial Sequence: Synthetic oligonucleotide
uucggacggcggcgacccc

SEQ ID NO: 468010 - RNA, 19 nt, Artificial Sequence
  Description of Artificial Sequence: Synthetic oligonucleotide
ggcccaaaaccgccaccug

SEQ ID NO: 468011 - RNA, 19 nt, Artificial Sequence
  Description of Artificial Sequence: Synthetic oligonucleotide
ggaugaggcuaccguaagu

SEQ ID NO: 468012 - RNA, 19 nt, Artificial Sequence
  Description of Artificial Sequence: Synthetic oligonucleotide
cgccaccugacuugagccg

SEQ ID NO: 468013 - RNA, 19 nt, Artificial Sequence
  Description of Artificial Sequence: Synthetic oligonucleotide
ggcagcggcgguuuagagu

SEQ ID NO: 468014 - RNA, 19 nt, Artificial Sequence
  Description of Artificial Sequence: Synthetic oligonucleotide
aggcugcgcuccccuucag

SEQ ID NO: 468015 - RNA, 19 nt, Artificial Sequence
  Description of Artificial Sequence: Synthetic oligonucleotide
caccuuaguccaucuuccu

SEQ ID NO: 468016 - RNA, 19 nt, Artificial Sequence
  Description of Artificial Sequence: Synthetic oligonucleotide
ccuguagauacuuggcaau

SEQ ID NO: 468017 - RNA, 19 nt, Artificial Sequence
  Description of Artificial Sequence: Synthetic oligonucleotide
cgucucaauucacgaugcc

SEQ ID NO: 468018 - RNA, 19 nt, Artificial Sequence
  Description of Artificial Sequence: Synthetic oligonucleotide
aucugccgucgaaguuugg

SEQ ID NO: 468019 - RNA, 19 nt, Artificial Sequence
  Description of Artificial Sequence: Synthetic oligonucleotide
gcgaccccgccacuccugc

SEQ ID NO: 468020 - RNA, 19 nt, Artificial Sequence
  Description of Artificial Sequence: Synthetic oligonucleotide
aguuggcacuguggucccu

SEQ ID NO: 468021 - RNA, 19 nt, Artificial Sequence
  Description of Artificial Sequence: Synthetic oligonucleotide
caagacccggucccuugua

SEQ ID NO: 468022 - RNA, 19 nt, Artificial Sequence
  Description of Artificial Sequence: Synthetic oligonucleotide
aggcuaccguaaguuugaa

SEQ ID NO: 468023 - RNA, 19 nt, Artificial Sequence
  Description of Artificial Sequence: Synthetic oligonucleotide
cgaagacguucucgucugg

SEQ ID NO: 468024 - RNA, 19 nt, Artificial Sequence
  Description of Artificial Sequence: Synthetic oligonucleotide
acauuccccuagggaggga

SEQ ID NO: 468025 - RNA, 19 nt, Artificial Sequence
  Description of Artificial Sequence: Synthetic oligonucleotide
gggucguauguggccaauc

SEQ ID NO: 468026 - RNA, 19 nt, Artificial Sequence
  Description of Artificial Sequence: Synthetic oligonucleotide
gcuaagggucugggguaug

SEQ ID NO: 468027 - RNA, 19 nt, Artificial Sequence
  Description of Artificial Sequence: Synthetic oligonucleotide
ccuagcuggccccaucgua

SEQ ID NO: 468028 - RNA, 19 nt, Artificial Sequence
  Description of Artificial Sequence: Synthetic oligonucleotide
ccccuagggagggagaaaa

SEQ ID NO: 468029 - RNA, 19 nt, Artificial Sequence
  Description of Artificial Sequence: Synthetic oligonucleotide
gagugcgcugugagucaaa

SEQ ID NO: 468030 - RNA, 19 nt, Artificial Sequence
  Description of Artificial Sequence: Synthetic oligonucleotide
ccgucgaaguuugggcaug

SEQ ID NO: 468031 - RNA, 19 nt, Artificial Sequence
  Description of Artificial Sequence: Synthetic oligonucleotide
cgguuuagagugcgcugug

SEQ ID NO: 468032 - RNA, 19 nt, Artificial Sequence
  Description of Artificial Sequence: Synthetic oligonucleotide
ccuuaccauggcauugccu

SEQ ID NO: 468033 - RNA, 19 nt, Artificial Sequence
  Description of Artificial Sequence: Synthetic oligonucleotide
gccgucgaaguuugggcau

SEQ ID NO: 468034 - RNA, 19 nt, Artificial Sequence
  Description of Artificial Sequence: Synthetic oligonucleotide
ccguaaguuugaaggaauu

SEQ ID NO: 468035 - RNA, 19 nt, Artificial Sequence
  Description of Artificial Sequence: Synthetic oligonucleotide
gcauugccuggcaugcgcu

SEQ ID NO: 468036 - RNA, 19 nt, Artificial Sequence
  Description of Artificial Sequence: Synthetic oligonucleotide
gcggcgguuuagagugcgc

SEQ ID NO: 468037 - RNA, 19 nt, Artificial Sequence
  Description of Artificial Sequence: Synthetic oligonucleotide
ggcgggugucuccgccuca

SEQ ID NO: 468038 - RNA, 19 nt, Artificial Sequence
  Description of Artificial Sequence: Synthetic oligonucleotide
cgcaggucacauguuccuc

SEQ ID NO: 468039 - RNA, 19 nt, Artificial Sequence
  Description of Artificial Sequence: Synthetic oligonucleotide
ccaaaaccgccaccugacu

SEQ ID NO: 468040 - RNA, 19 nt, Artificial Sequence
  Description of Artificial Sequence: Synthetic oligonucleotide
gcgccggcgcugugagcag

SEQ ID NO: 468041 - RNA, 19 nt, Artificial Sequence
  Description of Artificial Sequence: Synthetic oligonucleotide
cccggaagccccuuaccau

SEQ ID NO: 468042 - RNA, 19 nt, Artificial Sequence
  Description of Artificial Sequence: Synthetic oligonucleotide
ccaagacccggucccuugu

SEQ ID NO: 468043 - RNA, 19 nt, Artificial Sequence
  Description of Artificial Sequence: Synthetic oligonucleotide
gcgcuccccuucaggacca

SEQ ID NO: 468044 - RNA, 19 nt, Artificial Sequence
  Description of Artificial Sequence: Synthetic oligonucleotide
gccggcgcugugagcagga

SEQ ID NO: 468045 - RNA, 19 nt, Artificial Sequence
  Description of Artificial Sequence: Synthetic oligonucleotide
gugcgucgccucacaucaa

SEQ ID NO: 468046 - RNA, 19 nt, Artificial Sequence
  Description of Artificial Sequence: Synthetic oligonucleotide
gcccugguggaaauccaau

SEQ ID NO: 468047 - RNA, 19 nt, Artificial Sequence
  Description of Artificial Sequence: Synthetic oligonucleotide
cguauguggccaaucccuu

SEQ ID NO: 468048 - RNA, 19 nt, Artificial Sequence
  Description of Artificial Sequence: Synthetic oligonucleotide
ccggucccuuguauagucu

SEQ ID NO: 468049 - RNA, 19 nt, Artificial Sequence
  Description of Artificial Sequence: Synthetic oligonucleotide
ggcgucuaguuggcacugu

SEQ ID NO: 468050 - RNA, 19 nt, Artificial Sequence
  Description of Artificial Sequence: Synthetic oligonucleotide
ccccaucauaacccuuggu

SEQ ID NO: 468051 - RNA, 19 nt, Artificial Sequence
  Description of Artificial Sequence: Synthetic oligonucleotide
cccuugguacgaaguuuau

SEQ ID NO: 468052 - RNA, 19 nt, Artificial Sequence
  Description of Artificial Sequence: Synthetic oligonucleotide
cccuagggagggagaaaau

SEQ ID NO: 468053 - RNA, 19 nt, Artificial Sequence
  Description of Artificial Sequence: Synthetic oligonucleotide
ccauggcauugccuggcau

SEQ ID NO: 468054 - RNA, 19 nt, Artificial Sequence
  Description of Artificial Sequence: Synthetic oligonucleotide
gcgcugugagcaggauuuu

SEQ ID NO: 468055 - RNA, 19 nt, Artificial Sequence
  Description of Artificial Sequence: Synthetic oligonucleotide
gggcuguguuggccagcuu

SEQ ID NO: 468056 - RNA, 19 nt, Artificial Sequence
  Description of Artificial Sequence: Synthetic oligonucleotide
ccgccacuccugcugucuu

SEQ ID NO: 468057 - RNA, 19 nt, Artificial Sequence
  Description of Artificial Sequence: Synthetic oligonucleotide
cggcgcugugagcaggauu

SEQ ID NO: 468058 - RNA, 19 nt, Artificial Sequence
  Description of Artificial Sequence: Synthetic oligonucleotide
aauuuaguaaaauugucac

SEQ ID NO: 468059 - RNA, 19 nt, Artificial Sequence
  Description of Artificial Sequence: Synthetic oligonucleotide
uuaaaauuagaucuuggcg

SEQ ID NO: 468060 - RNA, 19 nt, Artificial Sequence
  Description of Artificial Sequence: Synthetic oligonucleotide
aaaaugucugcauucaggg

SEQ ID NO: 468061 - RNA, 19 nt, Artificial Sequence
  Description of Artificial Sequence: Synthetic oligonucleotide
aaucuuguaaugucaagac

SEQ ID NO: 468062 - RNA, 19 nt, Artificial Sequence
  Description of Artificial Sequence: Synthetic oligonucleotide
uaucauaauugcaagaaag

SEQ ID NO: 468063 - RNA, 19 nt, Artificial Sequence
  Description of Artificial Sequence: Synthetic oligonucleotide
aauauugugaaauuauuaa

SEQ ID NO: 468064 - RNA, 19 nt, Artificial Sequence
  Description of Artificial Sequence: Synthetic oligonucleotide
uuagauuaaaagaauuucc

SEQ ID NO: 468065 - RNA, 19 nt, Artificial Sequence
  Description of Artificial Sequence: Synthetic oligonucleotide
agaaagaucugaaagaagc

SEQ ID NO: 468066 - RNA, 19 nt, Artificial Sequence
  Description of Artificial Sequence: Synthetic oligonucleotide
gagucaagauuucagaugg

SEQ ID NO: 468067 - RNA, 19 nt, Artificial Sequence
  Description of Artificial Sequence: Synthetic oligonucleotide
ugggaaggaauuuagagag

SEQ ID NO: 468068 - RNA, 19 nt, Artificial Sequence
  Description of Artificial Sequence: Synthetic oligonucleotide
uucuuacagauaaagaaag

SEQ ID NO: 468069 - RNA, 19 nt, Artificial Sequence
  Description of Artificial Sequence: Synthetic oligonucleotide
ucaaauuacucccuuaacu

SEQ ID NO: 468070 - RNA, 19 nt, Artificial Sequence
  Description of Artificial Sequence: Synthetic oligonucleotide
aaugguacauaccucaagu

SEQ ID NO: 468071 - RNA, 19 nt, Artificial Sequence
  Description of Artificial Sequence: Synthetic oligonucleotide
auaauugcaagaaagaucu

SEQ ID NO: 468072 - RNA, 19 nt, Artificial Sequence
  Description of Artificial Sequence: Synthetic oligonucleotide
gaugcuuacauucagccac

SEQ ID NO: 468073 - RNA, 19 nt, Artificial Sequence
  Description of Artificial Sequence: Synthetic oligonucleotide
aaaauuagaucuuggcgca

SEQ ID NO: 468074 - RNA, 19 nt, Artificial Sequence
  Description of Artificial Sequence: Synthetic oligonucleotide
acauaccucaaguacaaac

SEQ ID NO: 468075 - RNA, 19 nt, Artificial Sequence
  Description of Artificial Sequence: Synthetic oligonucleotide
agauugcuggaccagaugg

SEQ ID NO: 468076 - RNA, 19 nt, Artificial Sequence
  Description of Artificial Sequence: Synthetic oligonucleotide
aacuugguaauuuaguaaa

SEQ ID NO: 468077 - RNA, 19 nt, Artificial Sequence
  Description of Artificial Sequence: Synthetic oligonucleotide
uaaaauugucacaugccag

SEQ ID NO: 468078 - RNA, 19 nt, Artificial Sequence
  Description of Artificial Sequence: Synthetic oligonucleotide
ugugaauuagaccaagggu

SEQ ID NO: 468079 - RNA, 19 nt, Artificial Sequence
  Description of Artificial Sequence: Synthetic oligonucleotide
cucaaguacaaacagcacg

SEQ ID NO: 468080 - RNA, 19 nt, Artificial Sequence
  Description of Artificial Sequence: Synthetic oligonucleotide
uuuucugggaauuucguga

SEQ ID NO: 468081 - RNA, 19 nt, Artificial Sequence
  Description of Artificial Sequence: Synthetic oligonucleotide
uguaaugucaagacuuggc

SEQ ID NO: 468082 - RNA, 19 nt, Artificial Sequence
  Description of Artificial Sequence: Synthetic oligonucleotide
ucuguauccucccugagga

SEQ ID NO: 468083 - RNA, 19 nt, Artificial Sequence
  Description of Artificial Sequence: Synthetic oligonucleotide
aaagacugucaguagagcu

SEQ ID NO: 468084 - RNA, 19 nt, Artificial Sequence
  Description of Artificial Sequence: Synthetic oligonucleotide
agauaaagaaagcagggga

SEQ ID NO: 468085 - RNA, 19 nt, Artificial Sequence
  Description of Artificial Sequence: Synthetic oligonucleotide
caaauuacucccuuaacug

SEQ ID NO: 468086 - RNA, 19 nt, Artificial Sequence
  Description of Artificial Sequence: Synthetic oligonucleotide
aaugugugaaaugccaagg

SEQ ID NO: 468087 - RNA, 19 nt, Artificial Sequence
  Description of Artificial Sequence: Synthetic oligonucleotide
  modified_base (3)..(3): a, c, u, g, unknown or other
uunugaaugggcagggagc

SEQ ID NO: 468088 - RNA, 19 nt, Artificial Sequence
  Description of Artificial Sequence: Synthetic oligonucleotide
aaaggaacugccuuucaca

SEQ ID NO: 468089 - RNA, 19 nt, Artificial Sequence
  Description of Artificial Sequence: Synthetic oligonucleotide
gauaaagaaagcaggggag

SEQ ID NO: 468090 - RNA, 19 nt, Artificial Sequence
  Description of Artificial Sequence: Synthetic oligonucleotide
aauugagaggggugaaguc

SEQ ID NO: 468091 - RNA, 19 nt, Artificial Sequence
  Description of Artificial Sequence: Synthetic oligonucleotide
ugaauuagaccaaggguca

SEQ ID NO: 468092 - RNA, 19 nt, Artificial Sequence
  Description of Artificial Sequence: Synthetic oligonucleotide
  modified_base (4)..(4): a, c, u, g, unknown or other
guunugaaugggcagggag

SEQ ID NO: 468093 - RNA, 19 nt, Artificial Sequence
  Description of Artificial Sequence: Synthetic oligonucleotide
  modified_base (2)..(2): a, c, u, g, unknown or other
unugaaugggcagggagcg

SEQ ID NO: 468094 - RNA, 19 nt, Artificial Sequence
  Description of Artificial Sequence: Synthetic oligonucleotide
uguuagauuaaaagaauuu

SEQ ID NO: 468095 - RNA, 19 nt, Artificial Sequence
  Description of Artificial Sequence: Synthetic oligonucleotide
gaagcgacagcaguaaggg

SEQ ID NO: 468096 - RNA, 19 nt, Artificial Sequence
  Description of Artificial Sequence: Synthetic oligonucleotide
agaguaucauaauugcaag

SEQ ID NO: 468097 - RNA, 19 nt, Artificial Sequence
  Description of Artificial Sequence: Synthetic oligonucleotide
ucagguguacaaaugguac

SEQ ID NO: 468098 - RNA, 19 nt, Artificial Sequence
  Description of Artificial Sequence: Synthetic oligonucleotide
uucacuugagacauuucgc

SEQ ID NO: 468099 - RNA, 19 nt, Artificial Sequence
  Description of Artificial Sequence: Synthetic oligonucleotide
gugugaauuagaccaaggg

SEQ ID NO: 468100 - RNA, 19 nt, Artificial Sequence
  Description of Artificial Sequence: Synthetic oligonucleotide
agacauuucgccuucgugu

SEQ ID NO: 468101 - RNA, 19 nt, Artificial Sequence
  Description of Artificial Sequence: Synthetic oligonucleotide
agacaguuuauaaagacug

SEQ ID NO: 468102 - RNA, 19 nt, Artificial Sequence
  Description of Artificial Sequence: Synthetic oligonucleotide
gaaugugugaaaugccaag

SEQ ID NO: 468103 - RNA, 19 nt, Artificial Sequence
  Description of Artificial Sequence: Synthetic oligonucleotide
gcugagaacgaauugagag

SEQ ID NO: 468104 - RNA, 19 nt, Artificial Sequence
  Description of Artificial Sequence: Synthetic oligonucleotide
aaugccaaauuuguguucu

SEQ ID NO: 468105 - RNA, 19 nt, Artificial Sequence
  Description of Artificial Sequence: Synthetic oligonucleotide
guaaaauugucacaugcca

SEQ ID NO: 468106 - RNA, 19 nt, Artificial Sequence
  Description of Artificial Sequence: Synthetic oligonucleotide
ucuuacagauaaagaaagc

SEQ ID NO: 468107 - RNA, 19 nt, Artificial Sequence
  Description of Artificial Sequence: Synthetic oligonucleotide
auacucuguauuuucagca

SEQ ID NO: 468108 - RNA, 19 nt, Artificial Sequence
  Description of Artificial Sequence: Synthetic oligonucleotide
uuauuuguaccuuuuguuu

SEQ ID NO: 468109 - RNA, 19 nt, Artificial Sequence
  Description of Artificial Sequence: Synthetic oligonucleotide
gugaauuagaccaaggguc

SEQ ID NO: 468110 - RNA, 19 nt, Artificial Sequence
  Description of Artificial Sequence: Synthetic oligonucleotide
guuagauuaaaagaauuuc

SEQ ID NO: 468111 - RNA, 19 nt, Artificial Sequence
  Description of Artificial Sequence: Synthetic oligonucleotide
auaccucaaguacaaacag

SEQ ID NO: 468112 - RNA, 19 nt, Artificial Sequence
  Description of Artificial Sequence: Synthetic oligonucleotide
uggcauaucaugaucuaga

SEQ ID NO: 468113 - RNA, 19 nt, Artificial Sequence
  Description of Artificial Sequence: Synthetic oligonucleotide
gaaagaagcgaguggaaca

SEQ ID NO: 468114 - RNA, 19 nt, Artificial Sequence
  Description of Artificial Sequence: Synthetic oligonucleotide
ugauaggacuccacaagcc

SEQ ID NO: 468115 - RNA, 19 nt, Artificial Sequence
  Description of Artificial Sequence: Synthetic oligonucleotide
uuggauugcugauaggacu

SEQ ID NO: 468116 - RNA, 19 nt, Artificial Sequence
  Description of Artificial Sequence: Synthetic oligonucleotide
ucuacgcuguuuauuuucc

SEQ ID NO: 468117 - RNA, 19 nt, Artificial Sequence
  Description of Artificial Sequence: Synthetic oligonucleotide
auuucuacgcuguuuauuu

SEQ ID NO: 468118 - RNA, 19 nt, Artificial Sequence
  Description of Artificial Sequence: Synthetic oligonucleotide
ggaagaggaaucuugguug

SEQ ID NO: 468119 - RNA, 19 nt, Artificial Sequence
  Description of Artificial Sequence: Synthetic oligonucleotide
ucccuuaacuguaaugcca

SEQ ID NO: 468120 - RNA, 19 nt, Artificial Sequence
  Description of Artificial Sequence: Synthetic oligonucleotide
agacugucaguagagcugc

SEQ ID NO: 468121 - RNA, 19 nt, Artificial Sequence
  Description of Artificial Sequence: Synthetic oligonucleotide
ugaggagugguucuguguc

SEQ ID NO: 468122 - RNA, 19 nt, Artificial Sequence
  Description of Artificial Sequence: Synthetic oligonucleotide
aacgaauugagagggguga

SEQ ID NO: 468123 - RNA, 19 nt, Artificial Sequence
  Description of Artificial Sequence: Synthetic oligonucleotide
uuuguggucgaguccagac

SEQ ID NO: 468124 - RNA, 19 nt, Artificial Sequence
  Description of Artificial Sequence: Synthetic oligonucleotide
uuucgugucacugcuggag

SEQ ID NO: 468125 - RNA, 19 nt, Artificial Sequence
  Description of Artificial Sequence: Synthetic oligonucleotide
uguggucuucacuggaugc

SEQ ID NO: 468126 - RNA, 19 nt, Artificial Sequence
  Description of Artificial Sequence: Synthetic oligonucleotide
gugacugcggcgaaggugg

SEQ ID NO: 468127 - RNA, 19 nt, Artificial Sequence
  Description of Artificial Sequence: Synthetic oligonucleotide
augaucuagaugaggggcc

SEQ ID NO: 468128 - RNA, 19 nt, Artificial Sequence
  Description of Artificial Sequence: Synthetic oligonucleotide
uugugggacuccauauccg

SEQ ID NO: 468129 - RNA, 19 nt, Artificial Sequence
  Description of Artificial Sequence: Synthetic oligonucleotide
aagcgacagcaguaagggc

SEQ ID NO: 468130 - RNA, 19 nt, Artificial Sequence
  Description of Artificial Sequence: Synthetic oligonucleotide
gaucugaaagaagcgagug

SEQ ID NO: 468131 - RNA, 19 nt, Artificial Sequence
  Description of Artificial Sequence: Synthetic oligonucleotide
aacuggcauaucaugaucu

SEQ ID NO: 468132 - RNA, 19 nt, Artificial Sequence
  Description of Artificial Sequence: Synthetic oligonucleotide
uucagguguacaaauggua

SEQ ID NO: 468133 - RNA, 19 nt, Artificial Sequence
  Description of Artificial Sequence: Synthetic oligonucleotide
acucaaauuacucccuuaa

SEQ ID NO: 468134 - RNA, 19 nt, Artificial Sequence
  Description of Artificial Sequence: Synthetic oligonucleotide
uggcgcauaauauugugaa

SEQ ID NO: 468135 - RNA, 19 nt, Artificial Sequence
  Description of Artificial Sequence: Synthetic oligonucleotide
uggauugcugauaggacuc

SEQ ID NO: 468136 - RNA, 19 nt, Artificial Sequence
  Description of Artificial Sequence: Synthetic oligonucleotide
aaagaagcgaguggaacaa

SEQ ID NO: 468137 - RNA, 19 nt, Artificial Sequence
  Description of Artificial Sequence: Synthetic oligonucleotide
auuagaccaagggucagag

SEQ ID NO: 468138 - RNA, 19 nt, Artificial Sequence
  Description of Artificial Sequence: Synthetic oligonucleotide
accuguuagauuaaaagaa

SEQ ID NO: 468139 - RNA, 19 nt, Artificial Sequence
  Description of Artificial Sequence: Synthetic oligonucleotide
cuuggauugcugauaggac

SEQ ID NO: 468140 - RNA, 19 nt, Artificial Sequence
  Description of Artificial Sequence: Synthetic oligonucleotide
agucccaaagguaggaggg

SEQ ID NO: 468141 - RNA, 19 nt, Artificial Sequence
  Description of Artificial Sequence: Synthetic oligonucleotide
uucuacgcuguuuauuuuc

SEQ ID NO: 468142 - RNA, 19 nt, Artificial Sequence
  Description of Artificial Sequence: Synthetic oligonucleotide
auugagaggggugaaguca

SEQ ID NO: 468143 - RNA, 19 nt, Artificial Sequence
  Description of Artificial Sequence: Synthetic oligonucleotide
gagauuucuacgcuguuua

SEQ ID NO: 468144 - RNA, 19 nt, Artificial Sequence
  Description of Artificial Sequence: Synthetic oligonucleotide
agcacaacagcaaaucuca

SEQ ID NO: 468145 - RNA, 19 nt, Artificial Sequence
  Description of Artificial Sequence: Synthetic oligonucleotide
uuggcgcauaauauuguga

SEQ ID NO: 468146 - RNA, 19 nt, Artificial Sequence
  Description of Artificial Sequence: Synthetic oligonucleotide
gagacauuucgccuucgug

SEQ ID NO: 468147 - RNA, 19 nt, Artificial Sequence
  Description of Artificial Sequence: Synthetic oligonucleotide
acuagaggcggaaggagcg

SEQ ID NO: 468148 - RNA, 19 nt, Artificial Sequence
  Description of Artificial Sequence: Synthetic oligonucleotide
  modified_base (8)..(8): a, c, u, g, unknown or other
ucggguunugaaugggcag

SEQ ID NO: 468149 - RNA, 19 nt, Artificial Sequence
  Description of Artificial Sequence: Synthetic oligonucleotide
aaauugucacaugccagga

SEQ ID NO: 468150 - RNA, 19 nt, Artificial Sequence
  Description of Artificial Sequence: Synthetic oligonucleotide
ggagugguggaccacaggc

SEQ ID NO: 468151 - RNA, 19 nt, Artificial Sequence
  Description of Artificial Sequence: Synthetic oligonucleotide
ucuggcguuguuuuaggaa

SEQ ID NO: 468152 - RNA, 19 nt, Artificial Sequence
  Description of Artificial Sequence: Synthetic oligonucleotide
auaaagaaagcaggggaga

SEQ ID NO: 468153 - RNA, 19 nt, Artificial Sequence
  Description of Artificial Sequence: Synthetic oligonucleotide
cugagcuacugguauuucc

SEQ ID NO: 468154 - RNA, 19 nt, Artificial Sequence
  Description of Artificial Sequence: Synthetic oligonucleotide
uucgugucacugcuggagc

SEQ ID NO: 468155 - RNA, 19 nt, Artificial Sequence
  Description of Artificial Sequence: Synthetic oligonucleotide
ugaaaugccaaggcugcug

SEQ ID NO: 468156 - RNA, 19 nt, Artificial Sequence
  Description of Artificial Sequence: Synthetic oligonucleotide
ugguaguucaaaggaacug

SEQ ID NO: 468157 - RNA, 19 nt, Artificial Sequence
  Description of Artificial Sequence: Synthetic oligonucleotide
ggacuugucaaucaacuca

SEQ ID NO: 468158 - RNA, 19 nt, Artificial Sequence
  Description of Artificial Sequence: Synthetic oligonucleotide
aauuagaccaagggucaga

SEQ ID NO: 468159 - RNA, 19 nt, Artificial Sequence
  Description of Artificial Sequence: Synthetic oligonucleotide
uaccuuuuguuuucuggga

SEQ ID NO: 468160 - RNA, 19 nt, Artificial Sequence
  Description of Artificial Sequence: Synthetic oligonucleotide
ggagcuguugacaauacug

SEQ ID NO: 468161 - RNA, 19 nt, Artificial Sequence
  Description of Artificial Sequence: Synthetic oligonucleotide
uugcuuucgugucacugcu

SEQ ID NO: 468162 - RNA, 19 nt, Artificial Sequence
  Description of Artificial Sequence: Synthetic oligonucleotide
gguaguucaaaggaacugc

SEQ ID NO: 468163 - RNA, 19 nt, Artificial Sequence
  Description of Artificial Sequence: Synthetic oligonucleotide
aaccaaacuugguaauuua

SEQ ID NO: 468164 - RNA, 19 nt, Artificial Sequence
  Description of Artificial Sequence: Synthetic oligonucleotide
gaagcgaguggaacaagcc

SEQ ID NO: 468165 - RNA, 19 nt, Artificial Sequence
  Description of Artificial Sequence: Synthetic oligonucleotide
aauuacucccuuaacugua

SEQ ID NO: 468166 - RNA, 19 nt, Artificial Sequence
  Description of Artificial Sequence: Synthetic oligonucleotide
auagccugcggugacugcg

SEQ ID NO: 468167 - RNA, 19 nt, Artificial Sequence
  Description of Artificial Sequence: Synthetic oligonucleotide
aacucaaauuacucccuua

SEQ ID NO: 468168 - RNA, 19 nt, Artificial Sequence
  Description of Artificial Sequence: Synthetic oligonucleotide
agaacgaauugagaggggu

SEQ ID NO: 468169 - RNA, 19 nt, Artificial Sequence
  Description of Artificial Sequence: Synthetic oligonucleotide
uuucuguauccucccugag

SEQ ID NO: 468170 - RNA, 19 nt, Artificial Sequence
  Description of Artificial Sequence: Synthetic oligonucleotide
cucaaauuacucccuuaac

SEQ ID NO: 468171 - RNA, 19 nt, Artificial Sequence
  Description of Artificial Sequence: Synthetic oligonucleotide
ucgucggcuggacuagagg

SEQ ID NO: 468172 - RNA, 19 nt, Artificial Sequence
  Description of Artificial Sequence: Synthetic oligonucleotide
ugcugauaggacuccacaa

SEQ ID NO: 468173 - RNA, 19 nt, Artificial Sequence
  Description of Artificial Sequence: Synthetic oligonucleotide
acuugagacauuucgccuu

SEQ ID NO: 468174 - RNA, 19 nt, Artificial Sequence
  Description of Artificial Sequence: Synthetic oligonucleotide
agugugaauuagaccaagg

SEQ ID NO: 468175 - RNA, 19 nt, Artificial Sequence
  Description of Artificial Sequence: Synthetic oligonucleotide
gggaguauaugguaguuca

SEQ ID NO: 468176 - RNA, 19 nt, Artificial Sequence
  Description of Artificial Sequence: Synthetic oligonucleotide
uucgugauuuggauccacu

SEQ ID NO: 468177 - RNA, 19 nt, Artificial Sequence
  Description of Artificial Sequence: Synthetic oligonucleotide
gucaagauuucagauggac

SEQ ID NO: 468178 - RNA, 19 nt, Artificial Sequence
  Description of Artificial Sequence: Synthetic oligonucleotide
acgcuguuuauuuuccagu

SEQ ID NO: 468179 - RNA, 19 nt, Artificial Sequence
  Description of Artificial Sequence: Synthetic oligonucleotide
aggaaugugugaaaugcca

SEQ ID NO: 468180 - RNA, 19 nt, Artificial Sequence
  Description of Artificial Sequence: Synthetic oligonucleotide
uuguggucgaguccagacu

SEQ ID NO: 468181 - RNA, 19 nt, Artificial Sequence
  Description of Artificial Sequence: Synthetic oligonucleotide
uaggacuccacaagcccga

SEQ ID NO: 468182 - RNA, 19 nt, Artificial Sequence
  Description of Artificial Sequence: Synthetic oligonucleotide
ugaucuagaugaggggccc

SEQ ID NO: 468183 - RNA, 19 nt, Artificial Sequence
  Description of Artificial Sequence: Synthetic oligonucleotide
agggaguauaugguaguuc

SEQ ID NO: 468184 - RNA, 19 nt, Artificial Sequence
  Description of Artificial Sequence: Synthetic oligonucleotide
gaacgaauugagaggggug

SEQ ID NO: 468185 - RNA, 19 nt, Artificial Sequence
  Description of Artificial Sequence: Synthetic oligonucleotide
uucacaucugcugggauuu

SEQ ID NO: 468186 - RNA, 19 nt, Artificial Sequence
  Description of Artificial Sequence: Synthetic oligonucleotide
uucuuaggcugguuuacau

SEQ ID NO: 468187 - RNA, 19 nt, Artificial Sequence
  Description of Artificial Sequence: Synthetic oligonucleotide
ugucccaagucgucggcug

SEQ ID NO: 468188 - RNA, 19 nt, Artificial Sequence
  Description of Artificial Sequence: Synthetic oligonucleotide
gucaagacuuggcugugug

SEQ ID NO: 468189 - RNA, 19 nt, Artificial Sequence
  Description of Artificial Sequence: Synthetic oligonucleotide
uccuaguucuugacugcug

SEQ ID NO: 468190 - RNA, 19 nt, Artificial Sequence
  Description of Artificial Sequence: Synthetic oligonucleotide
guaucauaauugcaagaaa

SEQ ID NO: 468191 - RNA, 19 nt, Artificial Sequence
  Description of Artificial Sequence: Synthetic oligonucleotide
gaauuagaccaagggucag

SEQ ID NO: 468192 - RNA, 19 nt, Artificial Sequence
  Description of Artificial Sequence: Synthetic oligonucleotide
ccacuaacuuauuuguacc

SEQ ID NO: 468193 - RNA, 19 nt, Artificial Sequence
  Description of Artificial Sequence: Synthetic oligonucleotide
ccuaguucuugacugcugg

SEQ ID NO: 468194 - RNA, 19 nt, Artificial Sequence
  Description of Artificial Sequence: Synthetic oligonucleotide
  modified_base (15)..(15): a, c, u, g, unknown or other
aacagccucggguunugaa

SEQ ID NO: 468195 - RNA, 19 nt, Artificial Sequence
  Description of Artificial Sequence: Synthetic oligonucleotide
uguuggaguggugaacgga

SEQ ID NO: 468196 - RNA, 19 nt, Artificial Sequence
  Description of Artificial Sequence: Synthetic oligonucleotide
gguacauaccucaaguaca

SEQ ID NO: 468197 - RNA, 19 nt, Artificial Sequence
  Description of Artificial Sequence: Synthetic oligonucleotide
uguguuuguuggaguggug

SEQ ID NO: 468198 - RNA, 19 nt, Artificial Sequence
  Description of Artificial Sequence: Synthetic oligonucleotide
cagcacggaaaaugugugg

SEQ ID NO: 468199 - RNA, 19 nt, Artificial Sequence
  Description of Artificial Sequence: Synthetic oligonucleotide
cugugugcauuucaguuca

SEQ ID NO: 468200 - RNA, 19 nt, Artificial Sequence
  Description of Artificial Sequence: Synthetic oligonucleotide
cuggcguuguuuuaggaaa

SEQ ID NO: 468201 - RNA, 19 nt, Artificial Sequence
  Description of Artificial Sequence: Synthetic oligonucleotide
  modified_base (12)..(12): a, c, u, g, unknown or other
agccucggguunugaaugg

SEQ ID NO: 468202 - RNA, 19 nt, Artificial Sequence
  Description of Artificial Sequence: Synthetic oligonucleotide
uuagaccaagggucagagc

SEQ ID NO: 468203 - RNA, 19 nt, Artificial Sequence
  Description of Artificial Sequence: Synthetic oligonucleotide
ucccuuuugcuuuucugua

SEQ ID NO: 468204 - RNA, 19 nt, Artificial Sequence
  Description of Artificial Sequence: Synthetic oligonucleotide
ucugucccaagucgucggc

SEQ ID NO: 468205 - RNA, 19 nt, Artificial Sequence
  Description of Artificial Sequence: Synthetic oligonucleotide
gaguggugaacggaagggc

SEQ ID NO: 468206 - RNA, 19 nt, Artificial Sequence
  Description of Artificial Sequence: Synthetic oligonucleotide
uccagugagggaguauaug

SEQ ID NO: 468207 - RNA, 19 nt, Artificial Sequence
  Description of Artificial Sequence: Synthetic oligonucleotide
ugaaaacaccuguuagauu

SEQ ID NO: 468208 - RNA, 19 nt, Artificial Sequence
  Description of Artificial Sequence: Synthetic oligonucleotide
agaggaaucuugguuggga

SEQ ID NO: 468209 - RNA, 19 nt, Artificial Sequence
  Description of Artificial Sequence: Synthetic oligonucleotide
  modified_base (9)..(9): a, c, u, g, unknown or other
cucggguunugaaugggca

SEQ ID NO: 468210 - RNA, 19 nt, Artificial Sequence
  Description of Artificial Sequence: Synthetic oligonucleotide
cugcugaacucauuccaac

SEQ ID NO: 468211 - RNA, 19 nt, Artificial Sequence
  Description of Artificial Sequence: Synthetic oligonucleotide
ucauagccugcggugacug

SEQ ID NO: 468212 - RNA, 19 nt, Artificial Sequence
  Description of Artificial Sequence: Synthetic oligonucleotide
aggagugguucugugucgg

SEQ ID NO: 468213 - RNA, 19 nt, Artificial Sequence
  Description of Artificial Sequence: Synthetic oligonucleotide
caaacagcacggaaaaugu

SEQ ID NO: 468214 - RNA, 19 nt, Artificial Sequence
  Description of Artificial Sequence: Synthetic oligonucleotide
auaucaugaucuagaugag

SEQ ID NO: 468215 - RNA, 19 nt, Artificial Sequence
  Description of Artificial Sequence: Synthetic oligonucleotide
aagaagcgaguggaacaag

SEQ ID NO: 468216 - RNA, 19 nt, Artificial Sequence
  Description of Artificial Sequence: Synthetic oligonucleotide
cuugcccggggagagaggc

SEQ ID NO: 468217 - RNA, 19 nt, Artificial Sequence
  Description of Artificial Sequence: Synthetic oligonucleotide
augguacauaccucaagua

SEQ ID NO: 468218 - RNA, 19 nt, Artificial Sequence
  Description of Artificial Sequence: Synthetic oligonucleotide
acagcacggaaaaugugug

SEQ ID NO: 468219 - RNA, 19 nt, Artificial Sequence
  Description of Artificial Sequence: Synthetic oligonucleotide
gagaacgaauugagagggg

SEQ ID NO: 468220 - RNA, 19 nt, Artificial Sequence
  Description of Artificial Sequence: Synthetic oligonucleotide
ucgugauuuggauccacuu

SEQ ID NO: 468221 - RNA, 19 nt, Artificial Sequence
  Description of Artificial Sequence: Synthetic oligonucleotide
  modified_base (18)..(18): a, c, u, g, unknown or other
uguaacagccucggguunu

SEQ ID NO: 468222 - RNA, 19 nt, Artificial Sequence
  Description of Artificial Sequence: Synthetic oligonucleotide
aggucuggcguuguuuuag

SEQ ID NO: 468223 - RNA, 19 nt, Artificial Sequence
  Description of Artificial Sequence: Synthetic oligonucleotide
caagauagccuuacuuuaa

SEQ ID NO: 468224 - RNA, 19 nt, Artificial Sequence
  Description of Artificial Sequence: Synthetic oligonucleotide
agaucugaaagaagcgagu

SEQ ID NO: 468225 - RNA, 19 nt, Artificial Sequence
  Description of Artificial Sequence: Synthetic oligonucleotide
guugccauucuugcccggg

SEQ ID NO: 468226 - RNA, 19 nt, Artificial Sequence
  Description of Artificial Sequence: Synthetic oligonucleotide
auaugguaguucaaaggaa

SEQ ID NO: 468227 - RNA, 19 nt, Artificial Sequence
  Description of Artificial Sequence: Synthetic oligonucleotide
ccgaguuugcugaaaacac

SEQ ID NO: 468228 - RNA, 19 nt, Artificial Sequence
  Description of Artificial Sequence: Synthetic oligonucleotide
uggcguuguuuuaggaaaa

SEQ ID NO: 468229 - RNA, 19 nt, Artificial Sequence
  Description of Artificial Sequence: Synthetic oligonucleotide
ucaugagggaagugugaau

SEQ ID NO: 468230 - RNA, 19 nt, Artificial Sequence
  Description of Artificial Sequence: Synthetic oligonucleotide
uaguaguuuguggucgagu

SEQ ID NO: 468231 - RNA, 19 nt, Artificial Sequence
  Description of Artificial Sequence: Synthetic oligonucleotide
ggaauuuagagagggcaac

SEQ ID NO: 468232 - RNA, 19 nt, Artificial Sequence
  Description of Artificial Sequence: Synthetic oligonucleotide
ucgugucacugcuggagcu

SEQ ID NO: 468233 - RNA, 19 nt, Artificial Sequence
  Description of Artificial Sequence: Synthetic oligonucleotide
guuuguuggaguggugaac

SEQ ID NO: 468234 - RNA, 19 nt, Artificial Sequence
  Description of Artificial Sequence: Synthetic oligonucleotide
aaggagcgugggcaguggu

SEQ ID NO: 468235 - RNA, 19 nt, Artificial Sequence
  Description of Artificial Sequence: Synthetic oligonucleotide
guaaugccaaauuuguguu

SEQ ID NO: 468236 - RNA, 19 nt, Artificial Sequence
  Description of Artificial Sequence: Synthetic oligonucleotide
gcauaucaugaucuagaug

SEQ ID NO: 468237 - RNA, 19 nt, Artificial Sequence
  Description of Artificial Sequence: Synthetic oligonucleotide
aguucuccgugcccaugag

SEQ ID NO: 468238 - RNA, 19 nt, Artificial Sequence
  Description of Artificial Sequence: Synthetic oligonucleotide
guauccucccugaggagug

SEQ ID NO: 468239 - RNA, 19 nt, Artificial Sequence
  Description of Artificial Sequence: Synthetic oligonucleotide
cuacaagcacaacagcaaa

SEQ ID NO: 468240 - RNA, 19 nt, Artificial Sequence
  Description of Artificial Sequence: Synthetic oligonucleotide
aaauuagaucuuggcgcau

SEQ ID NO: 468241 - RNA, 19 nt, Artificial Sequence
  Description of Artificial Sequence: Synthetic oligonucleotide
guacauaccucaaguacaa

SEQ ID NO: 468242 - RNA, 19 nt, Artificial Sequence
  Description of Artificial Sequence: Synthetic oligonucleotide
augagggaagugugaauua

SEQ ID NO: 468243 - RNA, 19 nt, Artificial Sequence
  Description of Artificial Sequence: Synthetic oligonucleotide
uuucuacgcuguuuauuuu

SEQ ID NO: 468244 - RNA, 19 nt, Artificial Sequence
  Description of Artificial Sequence: Synthetic oligonucleotide
acuggcauaucaugaucua

SEQ ID NO: 468245 - RNA, 19 nt, Artificial Sequence
  Description of Artificial Sequence: Synthetic oligonucleotide
gaauuuagagagggcaacu

SEQ ID NO: 468246 - RNA, 19 nt, Artificial Sequence
  Description of Artificial Sequence: Synthetic oligonucleotide
ucuugcccggggagagagg

SEQ ID NO: 468247 - RNA, 19 nt, Artificial Sequence
  Description of Artificial Sequence: Synthetic oligonucleotide
  modified_base (10)..(10): a, c, u, g, unknown or other
ccucggguunugaaugggc

SEQ ID NO: 468248 - RNA, 19 nt, Artificial Sequence
  Description of Artificial Sequence: Synthetic oligonucleotide
uuucgugauuuggauccac

SEQ ID NO: 468249 - RNA, 19 nt, Artificial Sequence
  Description of Artificial Sequence: Synthetic oligonucleotide
uuacucccuuaacuguaau

SEQ ID NO: 468250 - RNA, 19 nt, Artificial Sequence
  Description of Artificial Sequence: Synthetic oligonucleotide
gagggaagugugaauuaga

SEQ ID NO: 468251 - RNA, 19 nt, Artificial Sequence
  Description of Artificial Sequence: Synthetic oligonucleotide
uugcuucuucggaggcggg

SEQ ID NO: 468252 - RNA, 19 nt, Artificial Sequence
  Description of Artificial Sequence: Synthetic oligonucleotide
gaagugugaauuagaccaa

SEQ ID NO: 468253 - RNA, 19 nt, Artificial Sequence
  Description of Artificial Sequence: Synthetic oligonucleotide
  modified_base (6)..(6): a, c, u, g, unknown or other
ggguunugaaugggcaggg

SEQ ID NO: 468254 - RNA, 19 nt, Artificial Sequence
  Description of Artificial Sequence: Synthetic oligonucleotide
cuguuagauuaaaagaauu

SEQ ID NO: 468255 - RNA, 19 nt, Artificial Sequence
  Description of Artificial Sequence: Synthetic oligonucleotide
gucgaguccagacuuuugu

SEQ ID NO: 468256 - RNA, 19 nt, Artificial Sequence
  Description of Artificial Sequence: Synthetic oligonucleotide
gaccaagggucagagcuuc

SEQ ID NO: 468257 - RNA, 19 nt, Artificial Sequence
  Description of Artificial Sequence: Synthetic oligonucleotide
ggucuggcguuguuuuagg

SEQ ID NO: 468258 - RNA, 19 nt, Artificial Sequence
  Description of Artificial Sequence: Synthetic oligonucleotide
agcccgaguuugcugaaaa

SEQ ID NO: 468259 - RNA, 19 nt, Artificial Sequence
  Description of Artificial Sequence: Synthetic oligonucleotide
acugggcgagucaagauuu

SEQ ID NO: 468260 - RNA, 19 nt, Artificial Sequence
  Description of Artificial Sequence: Synthetic oligonucleotide
cugucgucaucagccagag

SEQ ID NO: 468261 - RNA, 19 nt, Artificial Sequence
  Description of Artificial Sequence: Synthetic oligonucleotide
gggaugacugacugcagga

SEQ ID NO: 468262 - RNA, 19 nt, Artificial Sequence
  Description of Artificial Sequence: Synthetic oligonucleotide
uauccgccagggguuguag

SEQ ID NO: 468263 - RNA, 19 nt, Artificial Sequence
  Description of Artificial Sequence: Synthetic oligonucleotide
auuacucccuuaacuguaa

SEQ ID NO: 468264 - RNA, 19 nt, Artificial Sequence
  Description of Artificial Sequence: Synthetic oligonucleotide
ggcggagauggagaggccg

SEQ ID NO: 468265 - RNA, 19 nt, Artificial Sequence
  Description of Artificial Sequence: Synthetic oligonucleotide
ggagagucccaaagguagg

SEQ ID NO: 468266 - RNA, 19 nt, Artificial Sequence
  Description of Artificial Sequence: Synthetic oligonucleotide
ucucggcagcccgaguuug

SEQ ID NO: 468267 - RNA, 19 nt, Artificial Sequence
  Description of Artificial Sequence: Synthetic oligonucleotide
ugacugcggcgaagguggg

SEQ ID NO: 468268 - RNA, 19 nt, Artificial Sequence
  Description of Artificial Sequence: Synthetic oligonucleotide
guugggagauuucuacgcu

SEQ ID NO: 468269 - RNA, 19 nt, Artificial Sequence
  Description of Artificial Sequence: Synthetic oligonucleotide
uuagaucuuggcgcauaau

SEQ ID NO: 468270 - RNA, 19 nt, Artificial Sequence
  Description of Artificial Sequence: Synthetic oligonucleotide
cgucggcuggacuagaggc

SEQ ID NO: 468271 - RNA, 19 nt, Artificial Sequence
  Description of Artificial Sequence: Synthetic oligonucleotide
ugucaagacuuggcugugu

SEQ ID NO: 468272 - RNA, 19 nt, Artificial Sequence
  Description of Artificial Sequence: Synthetic oligonucleotide
ggugacugcggcgaaggug

SEQ ID NO: 468273 - RNA, 19 nt, Artificial Sequence
  Description of Artificial Sequence: Synthetic oligonucleotide
guggugaacggaagggcac

SEQ ID NO: 468274 - RNA, 19 nt, Artificial Sequence
  Description of Artificial Sequence: Synthetic oligonucleotide
ggcuugugaacuggcacag

SEQ ID NO: 468275 - RNA, 19 nt, Artificial Sequence
  Description of Artificial Sequence: Synthetic oligonucleotide
uguugacaauacugcugua

SEQ ID NO: 468276 - RNA, 19 nt, Artificial Sequence
  Description of Artificial Sequence: Synthetic oligonucleotide
gguuggugagcuggaauug

SEQ ID NO: 468277 - RNA, 19 nt, Artificial Sequence
  Description of Artificial Sequence: Synthetic oligonucleotide
gccgaugcuugccagugug

SEQ ID NO: 468278 - RNA, 19 nt, Artificial Sequence
  Description of Artificial Sequence: Synthetic oligonucleotide
ggucuguugcuggagaguc

SEQ ID NO: 468279 - RNA, 19 nt, Artificial Sequence
  Description of Artificial Sequence: Synthetic oligonucleotide
gggcuugugaacuggcaca

SEQ ID NO: 468280 - RNA, 19 nt, Artificial Sequence
  Description of Artificial Sequence: Synthetic oligonucleotide
  modified_base (7)..(7): a, c, u, g, unknown or other
cggguunugaaugggcagg

SEQ ID NO: 468281 - RNA, 19 nt, Artificial Sequence
  Description of Artificial Sequence: Synthetic oligonucleotide
ucgggguuggaggucucug

SEQ ID NO: 468282 - RNA, 19 nt, Artificial Sequence
  Description of Artificial Sequence: Synthetic oligonucleotide
gaucucggcagcccgaguu

SEQ ID NO: 468283 - RNA, 19 nt, Artificial Sequence
  Description of Artificial Sequence: Synthetic oligonucleotide
ucugagcuacugguauuuc

SEQ ID NO: 468284 - RNA, 19 nt, Artificial Sequence
  Description of Artificial Sequence: Synthetic oligonucleotide
aggccgaugcuugccagug

SEQ ID NO: 468285 - RNA, 19 nt, Artificial Sequence
  Description of Artificial Sequence: Synthetic oligonucleotide
uccgauugugggacuccau

SEQ ID NO: 468286 - RNA, 19 nt, Artificial Sequence
  Description of Artificial Sequence: Synthetic oligonucleotide
ccaaagguaggaggggccg

SEQ ID NO: 468287 - RNA, 19 nt, Artificial Sequence
  Description of Artificial Sequence: Synthetic oligonucleotide
cuacgcuguuuauuuucca

SEQ ID NO: 468288 - RNA, 19 nt, Artificial Sequence
  Description of Artificial Sequence: Synthetic oligonucleotide
guucuuaggcugguuuaca

SEQ ID NO: 468289 - RNA, 19 nt, Artificial Sequence
  Description of Artificial Sequence: Synthetic oligonucleotide
auuucgugauuuggaucca

SEQ ID NO: 468290 - RNA, 19 nt, Artificial Sequence
  Description of Artificial Sequence: Synthetic oligonucleotide
  modified_base (17)..(17): a, c, u, g, unknown or other
guaacagccucggguunug

SEQ ID NO: 468291 - RNA, 19 nt, Artificial Sequence
  Description of Artificial Sequence: Synthetic oligonucleotide
gacugggcgagucaagauu

SEQ ID NO: 468292 - RNA, 19 nt, Artificial Sequence
  Description of Artificial Sequence: Synthetic oligonucleotide
augucaagacuuggcugug

SEQ ID NO: 468293 - RNA, 19 nt, Artificial Sequence
  Description of Artificial Sequence: Synthetic oligonucleotide
caugagggaagugugaauu

SEQ ID NO: 468294 - RNA, 19 nt, Artificial Sequence
  Description of Artificial Sequence: Synthetic oligonucleotide
gacugcggcgaaggugggg

SEQ ID NO: 468295 - RNA, 19 nt, Artificial Sequence
  Description of Artificial Sequence: Synthetic oligonucleotide
ccaagauagccuuacuuua

SEQ ID NO: 468296 - RNA, 19 nt, Artificial Sequence
  Description of Artificial Sequence: Synthetic oligonucleotide
cccaaagguaggaggggcc

SEQ ID NO: 468297 - RNA, 19 nt, Artificial Sequence
  Description of Artificial Sequence: Synthetic oligonucleotide
cacuugagacauuucgccu

SEQ ID NO: 468298 - RNA, 19 nt, Artificial Sequence
  Description of Artificial Sequence: Synthetic oligonucleotide
ggagugguucugugucggg

SEQ ID NO: 468299 - RNA, 19 nt, Artificial Sequence
  Description of Artificial Sequence: Synthetic oligonucleotide
caagcccgagcugucugag

SEQ ID NO: 468300 - RNA, 19 nt, Artificial Sequence
  Description of Artificial Sequence: Synthetic oligonucleotide
gcuggagagucccaaaggu

SEQ ID NO: 468301 - RNA, 19 nt, Artificial Sequence
  Description of Artificial Sequence: Synthetic oligonucleotide
ggaaugugugaaaugccaa

SEQ ID NO: 468302 - RNA, 19 nt, Artificial Sequence
  Description of Artificial Sequence: Synthetic oligonucleotide
augcuuacauucagccacu

SEQ ID NO: 468303 - RNA, 19 nt, Artificial Sequence
  Description of Artificial Sequence: Synthetic oligonucleotide
cacggaaaauguguggucu

SEQ ID NO: 468304 - RNA, 19 nt, Artificial Sequence
  Description of Artificial Sequence: Synthetic oligonucleotide
gcguuguuuuaggaaaaug

SEQ ID NO: 468305 - RNA, 19 nt, Artificial Sequence
  Description of Artificial Sequence: Synthetic oligonucleotide
gggaagcgacagcaguaag

SEQ ID NO: 468306 - RNA, 19 nt, Artificial Sequence
  Description of Artificial Sequence: Synthetic oligonucleotide
caugccaggacuugucaau

SEQ ID NO: 468307 - RNA, 19 nt, Artificial Sequence
  Description of Artificial Sequence: Synthetic oligonucleotide
ucggcagcccgaguuugcu

SEQ ID NO: 468308 - RNA, 19 nt, Artificial Sequence
  Description of Artificial Sequence: Synthetic oligonucleotide
acgaauugagaggggugaa

SEQ ID NO: 468309 - RNA, 19 nt, Artificial Sequence
  Description of Artificial Sequence: Synthetic oligonucleotide
agucaagauuucagaugga

SEQ ID NO: 468310 - RNA, 19 nt, Artificial Sequence
  Description of Artificial Sequence: Synthetic oligonucleotide
ggauugcugauaggacucc

SEQ ID NO: 468311 - RNA, 19 nt, Artificial Sequence
  Description of Artificial Sequence: Synthetic oligonucleotide
uggucgaguccagacuuuu

SEQ ID NO: 468312 - RNA, 19 nt, Artificial Sequence
  Description of Artificial Sequence: Synthetic oligonucleotide
gcgcauaauauugugaaau

SEQ ID NO: 468313 - RNA, 19 nt, Artificial Sequence
  Description of Artificial Sequence: Synthetic oligonucleotide
ugcuugccaguguguuugu

SEQ ID NO: 468314 - RNA, 19 nt, Artificial Sequence
  Description of Artificial Sequence: Synthetic oligonucleotide
ggaagggcacuguugagau

SEQ ID NO: 468315 - RNA, 19 nt, Artificial Sequence
  Description of Artificial Sequence: Synthetic oligonucleotide
gucgucggcuggacuagag

SEQ ID NO: 468316 - RNA, 19 nt, Artificial Sequence
  Description of Artificial Sequence: Synthetic oligonucleotide
guacaacacaaaguuguau

SEQ ID NO: 468317 - RNA, 19 nt, Artificial Sequence
  Description of Artificial Sequence: Synthetic oligonucleotide
ggaaucuugguugggagau

SEQ ID NO: 468318 - RNA, 19 nt, Artificial Sequence
  Description of Artificial Sequence: Synthetic oligonucleotide
cccgaguuugcugaaaaca

SEQ ID NO: 468319 - RNA, 19 nt, Artificial Sequence
  Description of Artificial Sequence: Synthetic oligonucleotide
gcggagauggagaggccgg

SEQ ID NO: 468320 - RNA, 19 nt, Artificial Sequence
  Description of Artificial Sequence: Synthetic oligonucleotide
gaggcggccuuugucaacu

SEQ ID NO: 468321 - RNA, 19 nt, Artificial Sequence
  Description of Artificial Sequence: Synthetic oligonucleotide
caagccugcccugcaaaga

SEQ ID NO: 468322 - RNA, 19 nt, Artificial Sequence
  Description of Artificial Sequence: Synthetic oligonucleotide
gguugccauucuugcccgg

SEQ ID NO: 468323 - RNA, 19 nt, Artificial Sequence
  Description of Artificial Sequence: Synthetic oligonucleotide
gcacggaaaaugugugguc

SEQ ID NO: 468324 - RNA, 19 nt, Artificial Sequence
  Description of Artificial Sequence: Synthetic oligonucleotide
ggcauaucaugaucuagau

SEQ ID NO: 468325 - RNA, 19 nt, Artificial Sequence
  Description of Artificial Sequence: Synthetic oligonucleotide
cccuuaacuguaaugccaa

SEQ ID NO: 468326 - RNA, 19 nt, Artificial Sequence
  Description of Artificial Sequence: Synthetic oligonucleotide
cugaggagugguucugugu

SEQ ID NO: 468327 - RNA, 19 nt, Artificial Sequence
  Description of Artificial Sequence: Synthetic oligonucleotide
cuugacugcugggaaggaa

SEQ ID NO: 468328 - RNA, 19 nt, Artificial Sequence
  Description of Artificial Sequence: Synthetic oligonucleotide
gcgaguggaacaagccugc

SEQ ID NO: 468329 - RNA, 19 nt, Artificial Sequence
  Description of Artificial Sequence: Synthetic oligonucleotide
ccuguuagauuaaaagaau

SEQ ID NO: 468330 - RNA, 19 nt, Artificial Sequence
  Description of Artificial Sequence: Synthetic oligonucleotide
ggcgcauaauauugugaaa

SEQ ID NO: 468331 - RNA, 19 nt, Artificial Sequence
  Description of Artificial Sequence: Synthetic oligonucleotide
gguuguaggucugucccaa

SEQ ID NO: 468332 - RNA, 19 nt, Artificial Sequence
  Description of Artificial Sequence: Synthetic oligonucleotide
gcgagucaagauuucagau

SEQ ID NO: 468333 - RNA, 19 nt, Artificial Sequence
  Description of Artificial Sequence: Synthetic oligonucleotide
agccuuucagaggguggcu

SEQ ID NO: 468334 - RNA, 19 nt, Artificial Sequence
  Description of Artificial Sequence: Synthetic oligonucleotide
guccacuaacuuauuugua

SEQ ID NO: 468335 - RNA, 19 nt, Artificial Sequence
  Description of Artificial Sequence: Synthetic oligonucleotide
ccacucugguggaggagag

SEQ ID NO: 468336 - RNA, 19 nt, Artificial Sequence
  Description of Artificial Sequence: Synthetic oligonucleotide
gggacugggcgagucaaga

SEQ ID NO: 468337 - RNA, 19 nt, Artificial Sequence
  Description of Artificial Sequence: Synthetic oligonucleotide
gagcgugggcaguggugga

SEQ ID NO: 468338 - RNA, 19 nt, Artificial Sequence
  Description of Artificial Sequence: Synthetic oligonucleotide
  modified_base (5)..(5): a, c, u, g, unknown or other
gguunugaaugggcaggga

SEQ ID NO: 468339 - RNA, 19 nt, Artificial Sequence
  Description of Artificial Sequence: Synthetic oligonucleotide
gcuggacuagaggcggaag

SEQ ID NO: 468340 - RNA, 19 nt, Artificial Sequence
  Description of Artificial Sequence: Synthetic oligonucleotide
ggucgaguccagacuuuug

SEQ ID NO: 468341 - RNA, 19 nt, Artificial Sequence
  Description of Artificial Sequence: Synthetic oligonucleotide
gaggccgaugcuugccagu

SEQ ID NO: 468342 - RNA, 19 nt, Artificial Sequence
  Description of Artificial Sequence: Synthetic oligonucleotide
auauccgccagggguugua

SEQ ID NO: 468343 - RNA, 19 nt, Artificial Sequence
  Description of Artificial Sequence: Synthetic oligonucleotide
gccugcggugacugcggcg

SEQ ID NO: 468344 - RNA, 19 nt, Artificial Sequence
  Description of Artificial Sequence: Synthetic oligonucleotide
gagggaguauaugguaguu

SEQ ID NO: 468345 - RNA, 19 nt, Artificial Sequence
  Description of Artificial Sequence: Synthetic oligonucleotide
uggugaggucuggcguugu

SEQ ID NO: 468346 - RNA, 19 nt, Artificial Sequence
  Description of Artificial Sequence: Synthetic oligonucleotide
gccauucccuccugggcuc

SEQ ID NO: 468347 - RNA, 19 nt, Artificial Sequence
  Description of Artificial Sequence: Synthetic oligonucleotide
cauuucgccuucguguuuu

SEQ ID NO: 468348 - RNA, 19 nt, Artificial Sequence
  Description of Artificial Sequence: Synthetic oligonucleotide
gcuuacauucagccacugu

SEQ ID NO: 468349 - RNA, 19 nt, Artificial Sequence
  Description of Artificial Sequence: Synthetic oligonucleotide
cuuucagaggguggcuccu

SEQ ID NO: 468350 - RNA, 19 nt, Artificial Sequence
  Description of Artificial Sequence: Synthetic oligonucleotide
ccgauugugggacuccaua

SEQ ID NO: 468351 - RNA, 19 nt, Artificial Sequence
  Description of Artificial Sequence: Synthetic oligonucleotide
accaagggucagagcuucu

SEQ ID NO: 468352 - RNA, 19 nt, Artificial Sequence
  Description of Artificial Sequence: Synthetic oligonucleotide
ccauauccgccagggguug

SEQ ID NO: 468353 - RNA, 19 nt, Artificial Sequence
  Description of Artificial Sequence: Synthetic oligonucleotide
gcggcgaaggugggguugc

SEQ ID NO: 468354 - RNA, 19 nt, Artificial Sequence
  Description of Artificial Sequence: Synthetic oligonucleotide
gguggaccacaggccacug

SEQ ID NO: 468355 - RNA, 19 nt, Artificial Sequence
  Description of Artificial Sequence: Synthetic oligonucleotide
gaaucuugguugggagauu

SEQ ID NO: 468356 - RNA, 19 nt, Artificial Sequence
  Description of Artificial Sequence: Synthetic oligonucleotide
cuagaugaggggccccguu

SEQ ID NO: 468357 - RNA, 19 nt, Artificial Sequence
  Description of Artificial Sequence: Synthetic oligonucleotide
agagggcaacuggccugcu

SEQ ID NO: 468358 - RNA, 19 nt, Artificial Sequence
  Description of Artificial Sequence: Synthetic oligonucleotide
ggacugggcgagucaagau

SEQ ID NO: 468359 - RNA, 19 nt, Artificial Sequence
  Description of Artificial Sequence: Synthetic oligonucleotide
cugucccaagucgucggcu

SEQ ID NO: 468360 - RNA, 19 nt, Artificial Sequence
  Description of Artificial Sequence: Synthetic oligonucleotide
cgcauaauauugugaaauu

SEQ ID NO: 468361 - RNA, 19 nt, Artificial Sequence
  Description of Artificial Sequence: Synthetic oligonucleotide
ggcguuguuuuaggaaaau

SEQ ID NO: 468362 - RNA, 19 nt, Artificial Sequence
  Description of Artificial Sequence: Synthetic oligonucleotide
gggucuguugcuggagagu

SEQ ID NO: 468363 - RNA, 19 nt, Artificial Sequence
  Description of Artificial Sequence: Synthetic oligonucleotide
gucgggguuggaggucucu

SEQ ID NO: 468364 - RNA, 19 nt, Artificial Sequence
  Description of Artificial Sequence: Synthetic oligonucleotide
cagcccgaguuugcugaaa

SEQ ID NO: 468365 - RNA, 19 nt, Artificial Sequence
  Description of Artificial Sequence: Synthetic oligonucleotide
ggguuugcagagacaguuu

SEQ ID NO: 468366 - RNA, 19 nt, Artificial Sequence
  Description of Artificial Sequence: Synthetic oligonucleotide
cauauccgccagggguugu

SEQ ID NO: 468367 - RNA, 19 nt, Artificial Sequence
  Description of Artificial Sequence: Synthetic oligonucleotide
guggucgaguccagacuuu

SEQ ID NO: 468368 - RNA, 19 nt, Artificial Sequence
  Description of Artificial Sequence: Synthetic oligonucleotide
ggugaggucuggcguuguu

SEQ ID NO: 468369 - RNA, 19 nt, Artificial Sequence
  Description of Artificial Sequence: Synthetic oligonucleotide
ccauugggcugcuuugcuu

SEQ ID NO: 468370 - RNA, 19 nt, Artificial Sequence
  Description of Artificial Sequence: Synthetic oligonucleotide
ggaucucggcagcccgagu

SEQ ID NO: 468371 - RNA, 19 nt, Artificial Sequence
  Description of Artificial Sequence: Synthetic oligonucleotide
ccaagucgucggcuggacu

SEQ ID NO: 468372 - RNA, 19 nt, Artificial Sequence
  Description of Artificial Sequence: Synthetic oligonucleotide
cugcggcgaaggugggguu

SEQ ID NO: 468373 - RNA, 19 nt, Artificial Sequence
  Description of Artificial Sequence: Synthetic oligonucleotide
cgaugcuugccaguguguu

SEQ ID NO: 468374 - RNA, 19 nt, Artificial Sequence
  Description of Artificial Sequence: Synthetic oligonucleotide
aaaaccucaaaacagggcc

SEQ ID NO: 468375 - RNA, 19 nt, Artificial Sequence
  Description of Artificial Sequence: Synthetic oligonucleotide
aacuuauugauauccaggc

SEQ ID NO: 468376 - RNA, 19 nt, Artificial Sequence
  Description of Artificial Sequence: Synthetic oligonucleotide
aaacguaucgcucaagcuc

SEQ ID NO: 468377 - RNA, 19 nt, Artificial Sequence
  Description of Artificial Sequence: Synthetic oligonucleotide
uugaaucacguaaagaggg

SEQ ID NO: 468378 - RNA, 19 nt, Artificial Sequence
  Description of Artificial Sequence: Synthetic oligonucleotide
uaacuuauugauauccagg

SEQ ID NO: 468379 - RNA, 19 nt, Artificial Sequence
  Description of Artificial Sequence: Synthetic oligonucleotide
aaagaaagguaguccaggg

SEQ ID NO: 468380 - RNA, 19 nt, Artificial Sequence
  Description of Artificial Sequence: Synthetic oligonucleotide
aaucauaaccagcuggcag

SEQ ID NO: 468381 - RNA, 19 nt, Artificial Sequence
  Description of Artificial Sequence: Synthetic oligonucleotide
uuacaaguuagaaucaaga

SEQ ID NO: 468382 - RNA, 19 nt, Artificial Sequence
  Description of Artificial Sequence: Synthetic oligonucleotide
uaggcuuagauauugggcc

SEQ ID NO: 468383 - RNA, 19 nt, Artificial Sequence
  Description of Artificial Sequence: Synthetic oligonucleotide
ucgaaggcaggauaaaacg

SEQ ID NO: 468384 - RNA, 19 nt, Artificial Sequence
  Description of Artificial Sequence: Synthetic oligonucleotide
ucucucuacgcauaggagg

SEQ ID NO: 468385 - RNA, 19 nt, Artificial Sequence
  Description of Artificial Sequence: Synthetic oligonucleotide
uaaaacguaucgcucaagc

SEQ ID NO: 468386 - RNA, 19 nt, Artificial Sequence
  Description of Artificial Sequence: Synthetic oligonucleotide
aacguaucgcucaagcucc

SEQ ID NO: 468387 - RNA, 19 nt, Artificial Sequence
  Description of Artificial Sequence: Synthetic oligonucleotide
uucuuaaugguguagggcu

SEQ ID NO: 468388 - RNA, 19 nt, Artificial Sequence
  Description of Artificial Sequence: Synthetic oligonucleotide
uugauauccaggcuuaacu

SEQ ID NO: 468389 - RNA, 19 nt, Artificial Sequence
  Description of Artificial Sequence: Synthetic oligonucleotide
ugcgcuuaggcuuagauau

SEQ ID NO: 468390 - RNA, 19 nt, Artificial Sequence
  Description of Artificial Sequence: Synthetic oligonucleotide
aacucgaccuagcuucucc

SEQ ID NO: 468391 - RNA, 19 nt, Artificial Sequence
  Description of Artificial Sequence: Synthetic oligonucleotide
uacaacucgaccuagcuuc

SEQ ID NO: 468392 - RNA, 19 nt, Artificial Sequence
  Description of Artificial Sequence: Synthetic oligonucleotide
ugauauguacaacucgacc

SEQ ID NO: 468393 - RNA, 19 nt, Artificial Sequence
  Description of Artificial Sequence: Synthetic oligonucleotide
uuagauauugggcccuggg

SEQ ID NO: 468394 - RNA, 19 nt, Artificial Sequence
  Description of Artificial Sequence: Synthetic oligonucleotide
aguuaagcuguccacugac

SEQ ID NO: 468395 - RNA, 19 nt, Artificial Sequence
  Description of Artificial Sequence: Synthetic oligonucleotide
uccacggguuuauagaagg

SEQ ID NO: 468396 - RNA, 19 nt, Artificial Sequence
  Description of Artificial Sequence: Synthetic oligonucleotide
gauauccaggcuuaacugc

SEQ ID NO: 468397 - RNA, 19 nt, Artificial Sequence
  Description of Artificial Sequence: Synthetic oligonucleotide
gauauguacaacucgaccu

SEQ ID NO: 468398 - RNA, 19 nt, Artificial Sequence
  Description of Artificial Sequence: Synthetic oligonucleotide
aaaacguaucgcucaagcu

SEQ ID NO: 468399 - RNA, 19 nt, Artificial Sequence
  Description of Artificial Sequence: Synthetic oligonucleotide
guaacuuauugauauccag

SEQ ID NO: 468400 - RNA, 19 nt, Artificial Sequence
  Description of Artificial Sequence: Synthetic oligonucleotide
uuuggcucaagacucccag

SEQ ID NO: 468401 - RNA, 19 nt, Artificial Sequence
  Description of Artificial Sequence: Synthetic oligonucleotide
aucacgauucuccaucuuc

SEQ ID NO: 468402 - RNA, 19 nt, Artificial Sequence
  Description of Artificial Sequence: Synthetic oligonucleotide
ugauauccaggcuuaacug

SEQ ID NO: 468403 - RNA, 19 nt, Artificial Sequence
  Description of Artificial Sequence: Synthetic oligonucleotide
aguguggauggcuugagug

SEQ ID NO: 468404 - RNA, 19 nt, Artificial Sequence
  Description of Artificial Sequence: Synthetic oligonucleotide
gaugauauguacaacucga

SEQ ID NO: 468405 - RNA, 19 nt, Artificial Sequence
  Description of Artificial Sequence: Synthetic oligonucleotide
uucgaaggcaggauaaaac

SEQ ID NO: 468406 - RNA, 19 nt, Artificial Sequence
  Description of Artificial Sequence: Synthetic oligonucleotide
aaaaggagcucccucuccu

SEQ ID NO: 468407 - RNA, 19 nt, Artificial Sequence
  Description of Artificial Sequence: Synthetic oligonucleotide
uucaagauaccguugcagu

SEQ ID NO: 468408 - RNA, 19 nt, Artificial Sequence
  Description of Artificial Sequence: Synthetic oligonucleotide
ucacgauucuccaucuucc

SEQ ID NO: 468409 - RNA, 19 nt, Artificial Sequence
  Description of Artificial Sequence: Synthetic oligonucleotide
aaucgcuggugucugaaga

SEQ ID NO: 468410 - RNA, 19 nt, Artificial Sequence
  Description of Artificial Sequence: Synthetic oligonucleotide
acugacgucuugcaaccgc

SEQ ID NO: 468411 - RNA, 19 nt, Artificial Sequence
  Description of Artificial Sequence: Synthetic oligonucleotide
ggcaggauaaaacguaucg

SEQ ID NO: 468412 - RNA, 19 nt, Artificial Sequence
  Description of Artificial Sequence: Synthetic oligonucleotide
aaaggccccgguuccagcg

SEQ ID NO: 468413 - RNA, 19 nt, Artificial Sequence
  Description of Artificial Sequence: Synthetic oligonucleotide
ugauacagcgaggaguggg

SEQ ID NO: 468414 - RNA, 19 nt, Artificial Sequence
  Description of Artificial Sequence: Synthetic oligonucleotide
uguacaacucgaccuagcu

SEQ ID NO: 468415 - RNA, 19 nt, Artificial Sequence
  Description of Artificial Sequence: Synthetic oligonucleotide
gaugucgugguagucgugg

SEQ ID NO: 468416 - RNA, 19 nt, Artificial Sequence
  Description of Artificial Sequence: Synthetic oligonucleotide
uuaagaaggggagaagaga

SEQ ID NO: 468417 - RNA, 19 nt, Artificial Sequence
  Description of Artificial Sequence: Synthetic oligonucleotide
uccacugacgucuugcaac

SEQ ID NO: 468418 - RNA, 19 nt, Artificial Sequence
  Description of Artificial Sequence: Synthetic oligonucleotide
ucuuagagcucugauguug

SEQ ID NO: 468419 - RNA, 19 nt, Artificial Sequence
  Description of Artificial Sequence: Synthetic oligonucleotide
ugaaucacguaaagagggc

SEQ ID NO: 468420 - RNA, 19 nt, Artificial Sequence
  Description of Artificial Sequence: Synthetic oligonucleotide
guuccagcggcucaucugg

SEQ ID NO: 468421 - RNA, 19 nt, Artificial Sequence
  Description of Artificial Sequence: Synthetic oligonucleotide
aaucacguaaagagggcuc

SEQ ID NO: 468422 - RNA, 19 nt, Artificial Sequence
  Description of Artificial Sequence: Synthetic oligonucleotide
ugcuacugccuccagaagu

SEQ ID NO: 468423 - RNA, 19 nt, Artificial Sequence
  Description of Artificial Sequence: Synthetic oligonucleotide
ucaagcucccuaagugugg

SEQ ID NO: 468424 - RNA, 19 nt, Artificial Sequence
  Description of Artificial Sequence: Synthetic oligonucleotide
ucuuucgaaggcaggauaa

SEQ ID NO: 468425 - RNA, 19 nt, Artificial Sequence
  Description of Artificial Sequence: Synthetic oligonucleotide
uuauugauauccaggcuua

SEQ ID NO: 468426 - RNA, 19 nt, Artificial Sequence
  Description of Artificial Sequence: Synthetic oligonucleotide
acgauucuccaucuuccgc

SEQ ID NO: 468427 - RNA, 19 nt, Artificial Sequence
  Description of Artificial Sequence: Synthetic oligonucleotide
agauauugggcccugggau

SEQ ID NO: 468428 - RNA, 19 nt, Artificial Sequence
  Description of Artificial Sequence: Synthetic oligonucleotide
aucacguaaagagggcucc

SEQ ID NO: 468429 - RNA, 19 nt, Artificial Sequence
  Description of Artificial Sequence: Synthetic oligonucleotide
auguagggacuuaagaagg

SEQ ID NO: 468430 - RNA, 19 nt, Artificial Sequence
  Description of Artificial Sequence: Synthetic oligonucleotide
uggaugauauguacaacuc

SEQ ID NO: 468431 - RNA, 19 nt, Artificial Sequence
  Description of Artificial Sequence: Synthetic oligonucleotide
uagauauugggcccuggga

SEQ ID NO: 468432 - RNA, 19 nt, Artificial Sequence
  Description of Artificial Sequence: Synthetic oligonucleotide
uaaccagcuggcaggacag

SEQ ID NO: 468433 - RNA, 19 nt, Artificial Sequence
  Description of Artificial Sequence: Synthetic oligonucleotide
uagcgaaacucaaacacau

SEQ ID NO: 468434 - RNA, 19 nt, Artificial Sequence
  Description of Artificial Sequence: Synthetic oligonucleotide
uuagcccgaguccgaaucg

SEQ ID NO: 468435 - RNA, 19 nt, Artificial Sequence
  Description of Artificial Sequence: Synthetic oligonucleotide
ucgaccuagcuucuccccg

SEQ ID NO: 468436 - RNA, 19 nt, Artificial Sequence
  Description of Artificial Sequence: Synthetic oligonucleotide
ucuacgcauaggaggaagc

SEQ ID NO: 468437 - RNA, 19 nt, Artificial Sequence
  Description of Artificial Sequence: Synthetic oligonucleotide
ucauccaucccaacucggc

SEQ ID NO: 468438 - RNA, 19 nt, Artificial Sequence
  Description of Artificial Sequence: Synthetic oligonucleotide
cagcgugcuucuuagagag

SEQ ID NO: 468439 - RNA, 19 nt, Artificial Sequence
  Description of Artificial Sequence: Synthetic oligonucleotide
acucgaccuagcuucuccc

SEQ ID NO: 468440 - RNA, 19 nt, Artificial Sequence
  Description of Artificial Sequence: Synthetic oligonucleotide
uacgcauaggaggaagccg

SEQ ID NO: 468441 - RNA, 19 nt, Artificial Sequence
  Description of Artificial Sequence: Synthetic oligonucleotide
caagauaccguugcagugc

SEQ ID NO: 468442 - RNA, 19 nt, Artificial Sequence
  Description of Artificial Sequence: Synthetic oligonucleotide
accguugcagugcuucagc

SEQ ID NO: 468443 - RNA, 19 nt, Artificial Sequence
  Description of Artificial Sequence: Synthetic oligonucleotide
uccuauggagggaugagau

SEQ ID NO: 468444 - RNA, 19 nt, Artificial Sequence
  Description of Artificial Sequence: Synthetic oligonucleotide
ucagcagcgaacuccugug

SEQ ID NO: 468445 - RNA, 19 nt, Artificial Sequence
  Description of Artificial Sequence: Synthetic oligonucleotide
gaagagaugacugacgggu

SEQ ID NO: 468446 - RNA, 19 nt, Artificial Sequence
  Description of Artificial Sequence: Synthetic oligonucleotide
aagauaccguugcagugcu

SEQ ID NO: 468447 - RNA, 19 nt, Artificial Sequence
  Description of Artificial Sequence: Synthetic oligonucleotide
agcagcgaacuccugugcg

SEQ ID NO: 468448 - RNA, 19 nt, Artificial Sequence
  Description of Artificial Sequence: Synthetic oligonucleotide
ucgaagacucugaggauga

SEQ ID NO: 468449 - RNA, 19 nt, Artificial Sequence
  Description of Artificial Sequence: Synthetic oligonucleotide
aggauaaaacguaucgcuc

SEQ ID NO: 468450 - RNA, 19 nt, Artificial Sequence
  Description of Artificial Sequence: Synthetic oligonucleotide
uagacgacgucucuguuuu

SEQ ID NO: 468451 - RNA, 19 nt, Artificial Sequence
  Description of Artificial Sequence: Synthetic oligonucleotide
cuucaagauaccguugcag

SEQ ID NO: 468452 - RNA, 19 nt, Artificial Sequence
  Description of Artificial Sequence: Synthetic oligonucleotide
augauauguacaacucgac

SEQ ID NO: 468453 - RNA, 19 nt, Artificial Sequence
  Description of Artificial Sequence: Synthetic oligonucleotide
gauaccguugcagugcuuc

SEQ ID NO: 468454 - RNA, 19 nt, Artificial Sequence
  Description of Artificial Sequence: Synthetic oligonucleotide
uuugauuggacggccacuc

SEQ ID NO: 468455 - RNA, 19 nt, Artificial Sequence
  Description of Artificial Sequence: Synthetic oligonucleotide
ucguucgcuuucuugggag

SEQ ID NO: 468456 - RNA, 19 nt, Artificial Sequence
  Description of Artificial Sequence: Synthetic oligonucleotide
auauguacaacucgaccua

SEQ ID NO: 468457 - RNA, 19 nt, Artificial Sequence
  Description of Artificial Sequence: Synthetic oligonucleotide
ggauaaaacguaucgcuca

SEQ ID NO: 468458 - RNA, 19 nt, Artificial Sequence
  Description of Artificial Sequence: Synthetic oligonucleotide
gauaaaacguaucgcucaa

SEQ ID NO: 468459 - RNA, 19 nt, Artificial Sequence
  Description of Artificial Sequence: Synthetic oligonucleotide
agaguccgagcuuucgcuc

SEQ ID NO: 468460 - RNA, 19 nt, Artificial Sequence
  Description of Artificial Sequence: Synthetic oligonucleotide
gugguagucguggaggccg

SEQ ID NO: 468461 - RNA, 19 nt, Artificial Sequence
  Description of Artificial Sequence: Synthetic oligonucleotide
auaggaggaagccgggcug

SEQ ID NO: 468462 - RNA, 19 nt, Artificial Sequence
  Description of Artificial Sequence: Synthetic oligonucleotide
acgcauaggaggaagccgg

SEQ ID NO: 468463 - RNA, 19 nt, Artificial Sequence
  Description of Artificial Sequence: Synthetic oligonucleotide
uccgggguuucuuucgaag

SEQ ID NO: 468464 - RNA, 19 nt, Artificial Sequence
  Description of Artificial Sequence: Synthetic oligonucleotide
cagaauguagggacuuaag

SEQ ID NO: 468465 - RNA, 19 nt, Artificial Sequence
  Description of Artificial Sequence: Synthetic oligonucleotide
ggaggauuguacuuauagc

SEQ ID NO: 468466 - RNA, 19 nt, Artificial Sequence
  Description of Artificial Sequence: Synthetic oligonucleotide
cauccaucccaacucggcc

SEQ ID NO: 468467 - RNA, 19 nt, Artificial Sequence
  Description of Artificial Sequence: Synthetic oligonucleotide
cuuagcccgaguccgaauc

SEQ ID NO: 468468 - RNA, 19 nt, Artificial Sequence
  Description of Artificial Sequence: Synthetic oligonucleotide
aacaugagccgcacgucag

SEQ ID NO: 468469 - RNA, 19 nt, Artificial Sequence
  Description of Artificial Sequence: Synthetic oligonucleotide
aggcgguagacacagguaa

SEQ ID NO: 468470 - RNA, 19 nt, Artificial Sequence
  Description of Artificial Sequence: Synthetic oligonucleotide
cacggguuuauagaagggc

SEQ ID NO: 468471 - RNA, 19 nt, Artificial Sequence
  Description of Artificial Sequence: Synthetic oligonucleotide
cucucuacgcauaggagga

SEQ ID NO: 468472 - RNA, 19 nt, Artificial Sequence
  Description of Artificial Sequence: Synthetic oligonucleotide
cacgauucuccaucuuccg

SEQ ID NO: 468473 - RNA, 19 nt, Artificial Sequence
  Description of Artificial Sequence: Synthetic oligonucleotide
cuuauugauauccaggcuu

SEQ ID NO: 468474 - RNA, 19 nt, Artificial Sequence
  Description of Artificial Sequence: Synthetic oligonucleotide
guuaagcuguccacugacg

SEQ ID NO: 468475 - RNA, 19 nt, Artificial Sequence
  Description of Artificial Sequence: Synthetic oligonucleotide
cucgaagacucugaggaug

SEQ ID NO: 468476 - RNA, 19 nt, Artificial Sequence
  Description of Artificial Sequence: Synthetic oligonucleotide
caggauaaaacguaucgcu

SEQ ID NO: 468477 - RNA, 19 nt, Artificial Sequence
  Description of Artificial Sequence: Synthetic oligonucleotide
cucucucuacgcauaggag

SEQ ID NO: 468478 - RNA, 19 nt, Artificial Sequence
  Description of Artificial Sequence: Synthetic oligonucleotide
auauugggcccugggauag

SEQ ID NO: 468479 - RNA, 19 nt, Artificial Sequence
  Description of Artificial Sequence: Synthetic oligonucleotide
uuucgaaggcaggauaaaa

SEQ ID NO: 468480 - RNA, 19 nt, Artificial Sequence
  Description of Artificial Sequence: Synthetic oligonucleotide
agcgaacuccugugcgucc

SEQ ID NO: 468481 - RNA, 19 nt, Artificial Sequence
  Description of Artificial Sequence: Synthetic oligonucleotide
agggacuuaagaaggggag

SEQ ID NO: 468482 - RNA, 19 nt, Artificial Sequence
  Description of Artificial Sequence: Synthetic oligonucleotide
aagcgcugagccgggacac

SEQ ID NO: 468483 - RNA, 19 nt, Artificial Sequence
  Description of Artificial Sequence: Synthetic oligonucleotide
gaaucgcuggugucugaag

SEQ ID NO: 468484 - RNA, 19 nt, Artificial Sequence
  Description of Artificial Sequence: Synthetic oligonucleotide
uaucgcucaagcucccuaa

SEQ ID NO: 468485 - RNA, 19 nt, Artificial Sequence
  Description of Artificial Sequence: Synthetic oligonucleotide
aguccgaaucgcugguguc

SEQ ID NO: 468486 - RNA, 19 nt, Artificial Sequence
  Description of Artificial Sequence: Synthetic oligonucleotide
ugggcugaagugcgcgagg

SEQ ID NO: 468487 - RNA, 19 nt, Artificial Sequence
  Description of Artificial Sequence: Synthetic oligonucleotide
ugcgucccgguaaucacga

SEQ ID NO: 468488 - RNA, 19 nt, Artificial Sequence
  Description of Artificial Sequence: Synthetic oligonucleotide
ugugcgucccgguaaucac

SEQ ID NO: 468489 - RNA, 19 nt, Artificial Sequence
  Description of Artificial Sequence: Synthetic oligonucleotide
cuacgcauaggaggaagcc

SEQ ID NO: 468490 - RNA, 19 nt, Artificial Sequence
  Description of Artificial Sequence: Synthetic oligonucleotide
uuccgugccaugaccacaa

SEQ ID NO: 468491 - RNA, 19 nt, Artificial Sequence
  Description of Artificial Sequence: Synthetic oligonucleotide
ucgugguagucguggaggc

SEQ ID NO: 468492 - RNA, 19 nt, Artificial Sequence
  Description of Artificial Sequence: Synthetic oligonucleotide
gauauugggcccugggaua

SEQ ID NO: 468493 - RNA, 19 nt, Artificial Sequence
  Description of Artificial Sequence: Synthetic oligonucleotide
gacuuaagaaggggagaag

SEQ ID NO: 468494 - RNA, 19 nt, Artificial Sequence
  Description of Artificial Sequence: Synthetic oligonucleotide
auguacaacucgaccuagc

SEQ ID NO: 468495 - RNA, 19 nt, Artificial Sequence
  Description of Artificial Sequence: Synthetic oligonucleotide
gcucccuaaguguggaugg

SEQ ID NO: 468496 - RNA, 19 nt, Artificial Sequence
  Description of Artificial Sequence: Synthetic oligonucleotide
ccuagcuucaauaaauuaa

SEQ ID NO: 468497 - RNA, 19 nt, Artificial Sequence
  Description of Artificial Sequence: Synthetic oligonucleotide
acguaaagagggcucccug

SEQ ID NO: 468498 - RNA, 19 nt, Artificial Sequence
  Description of Artificial Sequence: Synthetic oligonucleotide
guggaguuaagcuguccac

SEQ ID NO: 468499 - RNA, 19 nt, Artificial Sequence
  Description of Artificial Sequence: Synthetic oligonucleotide
auaaaacguaucgcucaag

SEQ ID NO: 468500 - RNA, 19 nt, Artificial Sequence
  Description of Artificial Sequence: Synthetic oligonucleotide
gcuggaagcgcugagccgg

SEQ ID NO: 468501 - RNA, 19 nt, Artificial Sequence
  Description of Artificial Sequence: Synthetic oligonucleotide
cuacugcucuccucacucg

SEQ ID NO: 468502 - RNA, 19 nt, Artificial Sequence
  Description of Artificial Sequence: Synthetic oligonucleotide
gacggguggggaaugguug

SEQ ID NO: 468503 - RNA, 19 nt, Artificial Sequence
  Description of Artificial Sequence: Synthetic oligonucleotide
auuggacggccacucucuc

SEQ ID NO: 468504 - RNA, 19 nt, Artificial Sequence
  Description of Artificial Sequence: Synthetic oligonucleotide
ggaggagcugcugauacag

SEQ ID NO: 468505 - RNA, 19 nt, Artificial Sequence
  Description of Artificial Sequence: Synthetic oligonucleotide
acgacgucucuguuuucuc

SEQ ID NO: 468506 - RNA, 19 nt, Artificial Sequence
  Description of Artificial Sequence: Synthetic oligonucleotide
gacggccacucucucuacg

SEQ ID NO: 468507 - RNA, 19 nt, Artificial Sequence
  Description of Artificial Sequence: Synthetic oligonucleotide
ucauaaccagcuggcagga

SEQ ID NO: 468508 - RNA, 19 nt, Artificial Sequence
  Description of Artificial Sequence: Synthetic oligonucleotide
uccccggguaacuuauuga

SEQ ID NO: 468509 - RNA, 19 nt, Artificial Sequence
  Description of Artificial Sequence: Synthetic oligonucleotide
cugaagugcgcgaggcgcc

SEQ ID NO: 468510 - RNA, 19 nt, Artificial Sequence
  Description of Artificial Sequence: Synthetic oligonucleotide
uguucauggacugcccgaa

SEQ ID NO: 468511 - RNA, 19 nt, Artificial Sequence
  Description of Artificial Sequence: Synthetic oligonucleotide
cucccucuugcgcuuaggc

SEQ ID NO: 468512 - RNA, 19 nt, Artificial Sequence
  Description of Artificial Sequence: Synthetic oligonucleotide
aucgcucaagcucccuaag

SEQ ID NO: 468513 - RNA, 19 nt, Artificial Sequence
  Description of Artificial Sequence: Synthetic oligonucleotide
gucccgguaaucacgauuc

SEQ ID NO: 468514 - RNA, 19 nt, Artificial Sequence
  Description of Artificial Sequence: Synthetic oligonucleotide
gaagcgcugagccgggaca

SEQ ID NO: 468515 - RNA, 19 nt, Artificial Sequence
  Description of Artificial Sequence: Synthetic oligonucleotide
ugcguagacgacgucucug

SEQ ID NO: 468516 - RNA, 19 nt, Artificial Sequence
  Description of Artificial Sequence: Synthetic oligonucleotide
cucgaccuagcuucucccc

SEQ ID NO: 468517 - RNA, 19 nt, Artificial Sequence
  Description of Artificial Sequence: Synthetic oligonucleotide
uugggcugaagugcgcgag

SEQ ID NO: 468518 - RNA, 19 nt, Artificial Sequence
  Description of Artificial Sequence: Synthetic oligonucleotide
ggcccuuagaagugaacag

SEQ ID NO: 468519 - RNA, 19 nt, Artificial Sequence
  Description of Artificial Sequence: Synthetic oligonucleotide
gcuuggaugauauguacaa

SEQ ID NO: 468520 - RNA, 19 nt, Artificial Sequence
  Description of Artificial Sequence: Synthetic oligonucleotide
ugccgagccuuccuuuccc

SEQ ID NO: 468521 - RNA, 19 nt, Artificial Sequence
  Description of Artificial Sequence: Synthetic oligonucleotide
agguuucuuaaugguguag

SEQ ID NO: 468522 - RNA, 19 nt, Artificial Sequence
  Description of Artificial Sequence: Synthetic oligonucleotide
aucgcuggugucugaagaa

SEQ ID NO: 468523 - RNA, 19 nt, Artificial Sequence
  Description of Artificial Sequence: Synthetic oligonucleotide
cucuacgcauaggaggaag

SEQ ID NO: 468524 - RNA, 19 nt, Artificial Sequence
  Description of Artificial Sequence: Synthetic oligonucleotide
uguggauggcuugaguguu

SEQ ID NO: 468525 - RNA, 19 nt, Artificial Sequence
  Description of Artificial Sequence: Synthetic oligonucleotide
ccacccauacccuugcccc

SEQ ID NO: 468526 - RNA, 19 nt, Artificial Sequence
  Description of Artificial Sequence: Synthetic oligonucleotide
gaccuagcuucuccccggg

SEQ ID NO: 468527 - RNA, 19 nt, Artificial Sequence
  Description of Artificial Sequence: Synthetic oligonucleotide
cauacccuugccccacccc

SEQ ID NO: 468528 - RNA, 19 nt, Artificial Sequence
  Description of Artificial Sequence: Synthetic oligonucleotide
agaugacugacgggugggg

SEQ ID NO: 468529 - RNA, 19 nt, Artificial Sequence
  Description of Artificial Sequence: Synthetic oligonucleotide
aacuccugugcgucccggu

SEQ ID NO: 468530 - RNA, 19 nt, Artificial Sequence
  Description of Artificial Sequence: Synthetic oligonucleotide
gaaucacguaaagagggcu

SEQ ID NO: 468531 - RNA, 19 nt, Artificial Sequence
  Description of Artificial Sequence: Synthetic oligonucleotide
cuccuucaagauaccguug

SEQ ID NO: 468532 - RNA, 19 nt, Artificial Sequence
  Description of Artificial Sequence: Synthetic oligonucleotide
gguuuauagaagggccagg

SEQ ID NO: 468533 - RNA, 19 nt, Artificial Sequence
  Description of Artificial Sequence: Synthetic oligonucleotide
ugacggguggggaaugguu

SEQ ID NO: 468534 - RNA, 19 nt, Artificial Sequence
  Description of Artificial Sequence: Synthetic oligonucleotide
agcgaaacucaaacacauc

SEQ ID NO: 468535 - RNA, 19 nt, Artificial Sequence
  Description of Artificial Sequence: Synthetic oligonucleotide
auaccguugcagugcuuca

SEQ ID NO: 468536 - RNA, 19 nt, Artificial Sequence
  Description of Artificial Sequence: Synthetic oligonucleotide
ucacguaaagagggcuccc

SEQ ID NO: 468537 - RNA, 19 nt, Artificial Sequence
  Description of Artificial Sequence: Synthetic oligonucleotide
uugcaaccgcuuuucuagu

SEQ ID NO: 468538 - RNA, 19 nt, Artificial Sequence
  Description of Artificial Sequence: Synthetic oligonucleotide
ucucacuacugcucuccuc

SEQ ID NO: 468539 - RNA, 19 nt, Artificial Sequence
  Description of Artificial Sequence: Synthetic oligonucleotide
ccuaugcccacucccaccc

SEQ ID NO: 468540 - RNA, 19 nt, Artificial Sequence
  Description of Artificial Sequence: Synthetic oligonucleotide
gguuugauuggacggccac

SEQ ID NO: 468541 - RNA, 19 nt, Artificial Sequence
  Description of Artificial Sequence: Synthetic oligonucleotide
ucccuaaguguggauggcu

SEQ ID NO: 468542 - RNA, 19 nt, Artificial Sequence
  Description of Artificial Sequence: Synthetic oligonucleotide
uuggacggccacucucucu

SEQ ID NO: 468543 - RNA, 19 nt, Artificial Sequence
  Description of Artificial Sequence: Synthetic oligonucleotide
acggguggggaaugguuga

SEQ ID NO: 468544 - RNA, 19 nt, Artificial Sequence
  Description of Artificial Sequence: Synthetic oligonucleotide
uggccccuuagcccgaguc

SEQ ID NO: 468545 - RNA, 19 nt, Artificial Sequence
  Description of Artificial Sequence: Synthetic oligonucleotide
cucaccuagcuucaauaaa

SEQ ID NO: 468546 - RNA, 19 nt, Artificial Sequence
  Description of Artificial Sequence: Synthetic oligonucleotide
gacgucucuguuuucucgu

SEQ ID NO: 468547 - RNA, 19 nt, Artificial Sequence
  Description of Artificial Sequence: Synthetic oligonucleotide
cugugagucaggcaagucu

SEQ ID NO: 468548 - RNA, 19 nt, Artificial Sequence
  Description of Artificial Sequence: Synthetic oligonucleotide
ccuccgaaucauaaccagc

SEQ ID NO: 468549 - RNA, 19 nt, Artificial Sequence
  Description of Artificial Sequence: Synthetic oligonucleotide
ccgggguuucuuucgaagg

SEQ ID NO: 468550 - RNA, 19 nt, Artificial Sequence
  Description of Artificial Sequence: Synthetic oligonucleotide
ccacugacgucuugcaacc

SEQ ID NO: 468551 - RNA, 19 nt, Artificial Sequence
  Description of Artificial Sequence: Synthetic oligonucleotide
acucgaagacucugaggau

SEQ ID NO: 468552 - RNA, 19 nt, Artificial Sequence
  Description of Artificial Sequence: Synthetic oligonucleotide
gugcgucccgguaaucacg

SEQ ID NO: 468553 - RNA, 19 nt, Artificial Sequence
  Description of Artificial Sequence: Synthetic oligonucleotide
uggagaacaugagccgcac

SEQ ID NO: 468554 - RNA, 19 nt, Artificial Sequence
  Description of Artificial Sequence: Synthetic oligonucleotide
gcuuaacugccucuuuuca

SEQ ID NO: 468555 - RNA, 19 nt, Artificial Sequence
  Description of Artificial Sequence: Synthetic oligonucleotide
gauuggacggccacucucu

SEQ ID NO: 468556 - RNA, 19 nt, Artificial Sequence
  Description of Artificial Sequence: Synthetic oligonucleotide
ugguagucguggaggccga

SEQ ID NO: 468557 - RNA, 19 nt, Artificial Sequence
  Description of Artificial Sequence: Synthetic oligonucleotide
uccugugcgucccgguaau

SEQ ID NO: 468558 - RNA, 19 nt, Artificial Sequence
  Description of Artificial Sequence: Synthetic oligonucleotide
uauugggcccugggauagg

SEQ ID NO: 468559 - RNA, 19 nt, Artificial Sequence
  Description of Artificial Sequence: Synthetic oligonucleotide
ucucccucuugcgcuuagg

SEQ ID NO: 468560 - RNA, 19 nt, Artificial Sequence
  Description of Artificial Sequence: Synthetic oligonucleotide
ccuuagaagugaacaggac

SEQ ID NO: 468561 - RNA, 19 nt, Artificial Sequence
  Description of Artificial Sequence: Synthetic oligonucleotide
ucuuagagagcagcuccuu

SEQ ID NO: 468562 - RNA, 19 nt, Artificial Sequence
  Description of Artificial Sequence: Synthetic oligonucleotide
augucgugguagucgugga

SEQ ID NO: 468563 - RNA, 19 nt, Artificial Sequence
  Description of Artificial Sequence: Synthetic oligonucleotide
guccacggguuuauagaag

SEQ ID NO: 468564 - RNA, 19 nt, Artificial Sequence
  Description of Artificial Sequence: Synthetic oligonucleotide
aagugcgcgaggcgcccga

SEQ ID NO: 468565 - RNA, 19 nt, Artificial Sequence
  Description of Artificial Sequence: Synthetic oligonucleotide
caucguaacucaugggccu

SEQ ID NO: 468566 - RNA, 19 nt, Artificial Sequence
  Description of Artificial Sequence: Synthetic oligonucleotide
gacgaggagcuggaaucug

SEQ ID NO: 468567 - RNA, 19 nt, Artificial Sequence
  Description of Artificial Sequence: Synthetic oligonucleotide
uagcccgaguccgaaucgc

SEQ ID NO: 468568 - RNA, 19 nt, Artificial Sequence
  Description of Artificial Sequence: Synthetic oligonucleotide
caaggcgguagacacaggu

SEQ ID NO: 468569 - RNA, 19 nt, Artificial Sequence
  Description of Artificial Sequence: Synthetic oligonucleotide
ggacuuaagaaggggagaa

SEQ ID NO: 468570 - RNA, 19 nt, Artificial Sequence
  Description of Artificial Sequence: Synthetic oligonucleotide
ccacuugcugcguagacga

SEQ ID NO: 468571 - RNA, 19 nt, Artificial Sequence
  Description of Artificial Sequence: Synthetic oligonucleotide
cagcagcgaacuccugugc

SEQ ID NO: 468572 - RNA, 19 nt, Artificial Sequence
  Description of Artificial Sequence: Synthetic oligonucleotide
cuuagguuucuugggcuga

SEQ ID NO: 468573 - RNA, 19 nt, Artificial Sequence
  Description of Artificial Sequence: Synthetic oligonucleotide
gaguccgaaucgcuggugu

SEQ ID NO: 468574 - RNA, 19 nt, Artificial Sequence
  Description of Artificial Sequence: Synthetic oligonucleotide
cuuuggcucaagacuccca

SEQ ID NO: 468575 - RNA, 19 nt, Artificial Sequence
  Description of Artificial Sequence: Synthetic oligonucleotide
ugacugacggguggggaau

SEQ ID NO: 468576 - RNA, 19 nt, Artificial Sequence
  Description of Artificial Sequence: Synthetic oligonucleotide
ucccgguaaucacgauucu

SEQ ID NO: 468577 - RNA, 19 nt, Artificial Sequence
  Description of Artificial Sequence: Synthetic oligonucleotide
cucgggugguucccaguag

SEQ ID NO: 468578 - RNA, 19 nt, Artificial Sequence
  Description of Artificial Sequence: Synthetic oligonucleotide
uccgagcuuucgcucuccu

SEQ ID NO: 468579 - RNA, 19 nt, Artificial Sequence
  Description of Artificial Sequence: Synthetic oligonucleotide
gguccgguccugccgagcc

SEQ ID NO: 468580 - RNA, 19 nt, Artificial Sequence
  Description of Artificial Sequence: Synthetic oligonucleotide
gacgacgucucuguuuucu

SEQ ID NO: 468581 - RNA, 19 nt, Artificial Sequence
  Description of Artificial Sequence: Synthetic oligonucleotide
ugacgucuugcaaccgcuu

SEQ ID NO: 468582 - RNA, 19 nt, Artificial Sequence
  Description of Artificial Sequence: Synthetic oligonucleotide
agacgacgucucuguuuuc

SEQ ID NO: 468583 - RNA, 19 nt, Artificial Sequence
  Description of Artificial Sequence: Synthetic oligonucleotide
agcgugcuucuuagagagc

SEQ ID NO: 468584 - RNA, 19 nt, Artificial Sequence
  Description of Artificial Sequence: Synthetic oligonucleotide
cucccuaaguguggauggc

SEQ ID NO: 468585 - RNA, 19 nt, Artificial Sequence
  Description of Artificial Sequence: Synthetic oligonucleotide
gaagugcgcgaggcgcccg

SEQ ID NO: 468586 - RNA, 19 nt, Artificial Sequence
  Description of Artificial Sequence: Synthetic oligonucleotide
ccacggguuuauagaaggg

SEQ ID NO: 468587 - RNA, 19 nt, Artificial Sequence
  Description of Artificial Sequence: Synthetic oligonucleotide
gggcccuuagaagugaaca

SEQ ID NO: 468588 - RNA, 19 nt, Artificial Sequence
  Description of Artificial Sequence: Synthetic oligonucleotide
acguaucgcucaagcuccc

SEQ ID NO: 468589 - RNA, 19 nt, Artificial Sequence
  Description of Artificial Sequence: Synthetic oligonucleotide
cugauacagcgaggagugg

SEQ ID NO: 468590 - RNA, 19 nt, Artificial Sequence
  Description of Artificial Sequence: Synthetic oligonucleotide
gcgugcuucuuagagagca

SEQ ID NO: 468591 - RNA, 19 nt, Artificial Sequence
  Description of Artificial Sequence: Synthetic oligonucleotide
guaucgcucaagcucccua

SEQ ID NO: 468592 - RNA, 19 nt, Artificial Sequence
  Description of Artificial Sequence: Synthetic oligonucleotide
gccccgauguuucucugcc

SEQ ID NO: 468593 - RNA, 19 nt, Artificial Sequence
  Description of Artificial Sequence: Synthetic oligonucleotide
acgaggagcuggaaucuga

SEQ ID NO: 468594 - RNA, 19 nt, Artificial Sequence
  Description of Artificial Sequence: Synthetic oligonucleotide
gccccuuagcccgaguccg

SEQ ID NO: 468595 - RNA, 19 nt, Artificial Sequence
  Description of Artificial Sequence: Synthetic oligonucleotide
gacaggugguagguauuuc

SEQ ID NO: 468596 - RNA, 19 nt, Artificial Sequence
  Description of Artificial Sequence: Synthetic oligonucleotide
ggcgaugggcccuuucuuc

SEQ ID NO: 468597 - RNA, 19 nt, Artificial Sequence
  Description of Artificial Sequence: Synthetic oligonucleotide
cucguucgcuuucuuggga

SEQ ID NO: 468598 - RNA, 19 nt, Artificial Sequence
  Description of Artificial Sequence: Synthetic oligonucleotide
guagacgacgucucuguuu

SEQ ID NO: 468599 - RNA, 19 nt, Artificial Sequence
  Description of Artificial Sequence: Synthetic oligonucleotide
gggacacuccacccucggg

SEQ ID NO: 468600 - RNA, 19 nt, Artificial Sequence
  Description of Artificial Sequence: Synthetic oligonucleotide
cgacgucucuguuuucucg

SEQ ID NO: 468601 - RNA, 19 nt, Artificial Sequence
  Description of Artificial Sequence: Synthetic oligonucleotide
ccccacagguuucuuaaug

SEQ ID NO: 468602 - RNA, 19 nt, Artificial Sequence
  Description of Artificial Sequence: Synthetic oligonucleotide
cugugcgucccgguaauca

SEQ ID NO: 468603 - RNA, 19 nt, Artificial Sequence
  Description of Artificial Sequence: Synthetic oligonucleotide
acaacucgaccuagcuucu

SEQ ID NO: 468604 - RNA, 19 nt, Artificial Sequence
  Description of Artificial Sequence: Synthetic oligonucleotide
cagaguccgagcuuucgcu

SEQ ID NO: 468605 - RNA, 19 nt, Artificial Sequence
  Description of Artificial Sequence: Synthetic oligonucleotide
ggccccuuagcccgagucc

SEQ ID NO: 468606 - RNA, 19 nt, Artificial Sequence
  Description of Artificial Sequence: Synthetic oligonucleotide
agaagcguccacggguuua

SEQ ID NO: 468607 - RNA, 19 nt, Artificial Sequence
  Description of Artificial Sequence: Synthetic oligonucleotide
ucucuacgcauaggaggaa

SEQ ID NO: 468608 - RNA, 19 nt, Artificial Sequence
  Description of Artificial Sequence: Synthetic oligonucleotide
gacugacggguggggaaug

SEQ ID NO: 468609 - RNA, 19 nt, Artificial Sequence
  Description of Artificial Sequence: Synthetic oligonucleotide
gggguuugauuggacggcc

SEQ ID NO: 468610 - RNA, 19 nt, Artificial Sequence
  Description of Artificial Sequence: Synthetic oligonucleotide
ggccuagcgcagcagcacc

SEQ ID NO: 468611 - RNA, 19 nt, Artificial Sequence
  Description of Artificial Sequence: Synthetic oligonucleotide
caagcucccuaagugugga

SEQ ID NO: 468612 - RNA, 19 nt, Artificial Sequence
  Description of Artificial Sequence: Synthetic oligonucleotide
caugagccgcacgucagca

SEQ ID NO: 468613 - RNA, 19 nt, Artificial Sequence
  Description of Artificial Sequence: Synthetic oligonucleotide
cagcgaacuccugugcguc

SEQ ID NO: 468614 - RNA, 19 nt, Artificial Sequence
  Description of Artificial Sequence: Synthetic oligonucleotide
cccacccauacccuugccc

SEQ ID NO: 468615 - RNA, 19 nt, Artificial Sequence
  Description of Artificial Sequence: Synthetic oligonucleotide
cuugcgcuuaggcuuagau

SEQ ID NO: 468616 - RNA, 19 nt, Artificial Sequence
  Description of Artificial Sequence: Synthetic oligonucleotide
aggcgaugggcccuuucuu

SEQ ID NO: 468617 - RNA, 19 nt, Artificial Sequence
  Description of Artificial Sequence: Synthetic oligonucleotide
gggacuuaagaaggggaga

SEQ ID NO: 468618 - RNA, 19 nt, Artificial Sequence
  Description of Artificial Sequence: Synthetic oligonucleotide
cacugacgucuugcaaccg

SEQ ID NO: 468619 - RNA, 19 nt, Artificial Sequence
  Description of Artificial Sequence: Synthetic oligonucleotide
cuuucgaaggcaggauaaa

SEQ ID NO: 468620 - RNA, 19 nt, Artificial Sequence
  Description of Artificial Sequence: Synthetic oligonucleotide
cugacgucuugcaaccgcu

SEQ ID NO: 468621 - RNA, 19 nt, Artificial Sequence
  Description of Artificial Sequence: Synthetic oligonucleotide
ccggguaacuuauugauau

SEQ ID NO: 468622 - RNA, 19 nt, Artificial Sequence
  Description of Artificial Sequence: Synthetic oligonucleotide
ccaguagggcuucaaguca

SEQ ID NO: 468623 - RNA, 19 nt, Artificial Sequence
  Description of Artificial Sequence: Synthetic oligonucleotide
ggcuugaguguuucaaagu

SEQ ID NO: 468624 - RNA, 19 nt, Artificial Sequence
  Description of Artificial Sequence: Synthetic oligonucleotide
cuuccgugccaugaccaca

SEQ ID NO: 468625 - RNA, 19 nt, Artificial Sequence
  Description of Artificial Sequence: Synthetic oligonucleotide
guacaacucgaccuagcuu

SEQ ID NO: 468626 - RNA, 19 nt, Artificial Sequence
  Description of Artificial Sequence: Synthetic oligonucleotide
guuugauuggacggccacu

SEQ ID NO: 468627 - RNA, 19 nt, Artificial Sequence
  Description of Artificial Sequence: Synthetic oligonucleotide
gacgucuugcaaccgcuuu

SEQ ID NO: 468628 - RNA, 19 nt, Artificial Sequence
  Description of Artificial Sequence: Synthetic oligonucleotide
gcuccuucaagauaccguu

SEQ ID NO: 468629 - RNA, 19 nt, Artificial Sequence
  Description of Artificial Sequence: Synthetic oligonucleotide
agcagaauguagggacuua

SEQ ID NO: 468630 - RNA, 19 nt, Artificial Sequence
  Description of Artificial Sequence: Synthetic oligonucleotide
gugcgcgaggcgcccgagg

SEQ ID NO: 468631 - RNA, 19 nt, Artificial Sequence
  Description of Artificial Sequence: Synthetic oligonucleotide
gccaggcauaggcagcgug

SEQ ID NO: 468632 - RNA, 19 nt, Artificial Sequence
  Description of Artificial Sequence: Synthetic oligonucleotide
cauaaccagcuggcaggac

SEQ ID NO: 468633 - RNA, 19 nt, Artificial Sequence
  Description of Artificial Sequence: Synthetic oligonucleotide
cgauguuucucugccuucc

SEQ ID NO: 468634 - RNA, 19 nt, Artificial Sequence
  Description of Artificial Sequence: Synthetic oligonucleotide
uccgugccaugaccacaac

SEQ ID NO: 468635 - RNA, 19 nt, Artificial Sequence
  Description of Artificial Sequence: Synthetic oligonucleotide
cguucgcuuucuugggagg

SEQ ID NO: 468636 - RNA, 19 nt, Artificial Sequence
  Description of Artificial Sequence: Synthetic oligonucleotide
caucuggcaucuuggcaua

SEQ ID NO: 468637 - RNA, 19 nt, Artificial Sequence
  Description of Artificial Sequence: Synthetic oligonucleotide
ggccccgauguuucucugc

SEQ ID NO: 468638 - RNA, 19 nt, Artificial Sequence
  Description of Artificial Sequence: Synthetic oligonucleotide
gaggaagccgggcugccuu

SEQ ID NO: 468639 - RNA, 19 nt, Artificial Sequence
  Description of Artificial Sequence: Synthetic oligonucleotide
cgaccuagcuucuccccgg

SEQ ID NO: 468640 - RNA, 19 nt, Artificial Sequence
  Description of Artificial Sequence: Synthetic oligonucleotide
ccaaauggagaggugacua

SEQ ID NO: 468641 - RNA, 19 nt, Artificial Sequence
  Description of Artificial Sequence: Synthetic oligonucleotide
gcugcguagacgacgucuc

SEQ ID NO: 468642 - RNA, 19 nt, Artificial Sequence
  Description of Artificial Sequence: Synthetic oligonucleotide
cuccugugcgucccgguaa

SEQ ID NO: 468643 - RNA, 19 nt, Artificial Sequence
  Description of Artificial Sequence: Synthetic oligonucleotide
guucgcuuucuugggaggu

SEQ ID NO: 468644 - RNA, 19 nt, Artificial Sequence
  Description of Artificial Sequence: Synthetic oligonucleotide
aggaagccgggcugccuuu

SEQ ID NO: 468645 - RNA, 19 nt, Artificial Sequence
  Description of Artificial Sequence: Synthetic oligonucleotide
ccgcuugacagugcugagg

SEQ ID NO: 468646 - RNA, 19 nt, Artificial Sequence
  Description of Artificial Sequence: Synthetic oligonucleotide
gguacagggguccgguccu

SEQ ID NO: 468647 - RNA, 19 nt, Artificial Sequence
  Description of Artificial Sequence: Synthetic oligonucleotide
agcccgaguccgaaucgcu

SEQ ID NO: 468648 - RNA, 19 nt, Artificial Sequence
  Description of Artificial Sequence: Synthetic oligonucleotide
ccgauguuucucugccuuc

SEQ ID NO: 468649 - RNA, 19 nt, Artificial Sequence
  Description of Artificial Sequence: Synthetic oligonucleotide
cccgaggccccucaucuuc

SEQ ID NO: 468650 - RNA, 19 nt, Artificial Sequence
  Description of Artificial Sequence: Synthetic oligonucleotide
ccauacccuugccccaccc

SEQ ID NO: 468651 - RNA, 19 nt, Artificial Sequence
  Description of Artificial Sequence: Synthetic oligonucleotide
ccgcacgucagcagcgaac

SEQ ID NO: 468652 - RNA, 19 nt, Artificial Sequence
  Description of Artificial Sequence: Synthetic oligonucleotide
gccuuuggcucaagacucc

SEQ ID NO: 468653 - RNA, 19 nt, Artificial Sequence
  Description of Artificial Sequence: Synthetic oligonucleotide
gccgagggcagaagcgucc

SEQ ID NO: 468654 - RNA, 19 nt, Artificial Sequence
  Description of Artificial Sequence: Synthetic oligonucleotide
agugcgcgaggcgcccgag

SEQ ID NO: 468655 - RNA, 19 nt, Artificial Sequence
  Description of Artificial Sequence: Synthetic oligonucleotide
caacucgaccuagcuucuc

SEQ ID NO: 468656 - RNA, 19 nt, Artificial Sequence
  Description of Artificial Sequence: Synthetic oligonucleotide
gcguagacgacgucucugu

SEQ ID NO: 468657 - RNA, 19 nt, Artificial Sequence
  Description of Artificial Sequence: Synthetic oligonucleotide
ggauggcuugaguguuuca

SEQ ID NO: 468658 - RNA, 19 nt, Artificial Sequence
  Description of Artificial Sequence: Synthetic oligonucleotide
cccaacucggccccgaugu

SEQ ID NO: 468659 - RNA, 19 nt, Artificial Sequence
  Description of Artificial Sequence: Synthetic oligonucleotide
guacagggguccgguccug

SEQ ID NO: 468660 - RNA, 19 nt, Artificial Sequence
  Description of Artificial Sequence: Synthetic oligonucleotide
cuaugcccacucccaccca

SEQ ID NO: 468661 - RNA, 19 nt, Artificial Sequence
  Description of Artificial Sequence: Synthetic oligonucleotide
agccgcacgucagcagcga

SEQ ID NO: 468662 - RNA, 19 nt, Artificial Sequence
  Description of Artificial Sequence: Synthetic oligonucleotide
gagggagggccguggugcu

SEQ ID NO: 468663 - RNA, 19 nt, Artificial Sequence
  Description of Artificial Sequence: Synthetic oligonucleotide
cguccacggguuuauagaa

SEQ ID NO: 468664 - RNA, 19 nt, Artificial Sequence
  Description of Artificial Sequence: Synthetic oligonucleotide
gcagcgaacuccugugcgu

SEQ ID NO: 468665 - RNA, 19 nt, Artificial Sequence
  Description of Artificial Sequence: Synthetic oligonucleotide
uuccgacagcuugccuuuc

SEQ ID NO: 468666 - RNA, 19 nt, Artificial Sequence
  Description of Artificial Sequence: Synthetic oligonucleotide
cacguaaagagggcucccu

SEQ ID NO: 468667 - RNA, 19 nt, Artificial Sequence
  Description of Artificial Sequence: Synthetic oligonucleotide
ggugguacagggguccggu

SEQ ID NO: 468668 - RNA, 19 nt, Artificial Sequence
  Description of Artificial Sequence: Synthetic oligonucleotide
cgucuugcaaccgcuuuuc

SEQ ID NO: 468669 - RNA, 19 nt, Artificial Sequence
  Description of Artificial Sequence: Synthetic oligonucleotide
cucucacuacugcucuccu

SEQ ID NO: 468670 - RNA, 19 nt, Artificial Sequence
  Description of Artificial Sequence: Synthetic oligonucleotide
aagcguccacggguuuaua

SEQ ID NO: 468671 - RNA, 19 nt, Artificial Sequence
  Description of Artificial Sequence: Synthetic oligonucleotide
gcugugagucaggcaaguc

SEQ ID NO: 468672 - RNA, 19 nt, Artificial Sequence
  Description of Artificial Sequence: Synthetic oligonucleotide
ggcgguagacacagguaaa

SEQ ID NO: 468673 - RNA, 19 nt, Artificial Sequence
  Description of Artificial Sequence: Synthetic oligonucleotide
guaacucaugggccugcuu

SEQ ID NO: 468674 - RNA, 19 nt, Artificial Sequence
  Description of Artificial Sequence: Synthetic oligonucleotide
ccgugccaugaccacaaca

SEQ ID NO: 468675 - RNA, 19 nt, Artificial Sequence
  Description of Artificial Sequence: Synthetic oligonucleotide
ccgagcuuucgcucuccuc

SEQ ID NO: 468676 - RNA, 19 nt, Artificial Sequence
  Description of Artificial Sequence: Synthetic oligonucleotide
ggcaaggggcugagaagga

SEQ ID NO: 468677 - RNA, 19 nt, Artificial Sequence
  Description of Artificial Sequence: Synthetic oligonucleotide
guagggcuuccgggguuuc

SEQ ID NO: 468678 - RNA, 19 nt, Artificial Sequence
  Description of Artificial Sequence: Synthetic oligonucleotide
ccccggguaacuuauugau

SEQ ID NO: 468679 - RNA, 19 nt, Artificial Sequence
  Description of Artificial Sequence: Synthetic oligonucleotide
cgcgaggcgcccgaggccc

SEQ ID NO: 468680 - RNA, 19 nt, Artificial Sequence
  Description of Artificial Sequence: Synthetic oligonucleotide
cccggguaacuuauugaua

SEQ ID NO: 468681 - RNA, 19 nt, Artificial Sequence
  Description of Artificial Sequence: Synthetic oligonucleotide
cugcguagacgacgucucu

SEQ ID NO: 468682 - RNA, 19 nt, Artificial Sequence
  Description of Artificial Sequence: Synthetic oligonucleotide
ugccaggcgaugggcccuu

SEQ ID NO: 468683 - RNA, 19 nt, Artificial Sequence
  Description of Artificial Sequence: Synthetic oligonucleotide
ccucgggugguucccagua

SEQ ID NO: 468684 - RNA, 19 nt, Artificial Sequence
  Description of Artificial Sequence: Synthetic oligonucleotide
agauaccguugcagugcuu

SEQ ID NO: 468685 - RNA, 19 nt, Artificial Sequence
  Description of Artificial Sequence: Synthetic oligonucleotide
cacucccacccauacccuu

SEQ ID NO: 468686 - RNA, 19 nt, Artificial Sequence
  Description of Artificial Sequence: Synthetic oligonucleotide
cccgauguuucucugccuu

SEQ ID NO: 468687 - RNA, 19 nt, Artificial Sequence
  Description of Artificial Sequence: Synthetic oligonucleotide
gguaguccaggggccaaau

SEQ ID NO: 468688 - RNA, 19 nt, Artificial Sequence
  Description of Artificial Sequence: Synthetic oligonucleotide
ggguccgguccugccgagc

SEQ ID NO: 468689 - RNA, 19 nt, Artificial Sequence
  Description of Artificial Sequence: Synthetic oligonucleotide
gccgcacgucagcagcgaa

SEQ ID NO: 468690 - RNA, 19 nt, Artificial Sequence
  Description of Artificial Sequence: Synthetic oligonucleotide
ccgaaucgcuggugucuga

SEQ ID NO: 468691 - RNA, 19 nt, Artificial Sequence
  Description of Artificial Sequence: Synthetic oligonucleotide
cgcacgucagcagcgaacu

SEQ ID NO: 468692 - RNA, 19 nt, Artificial Sequence
  Description of Artificial Sequence: Synthetic oligonucleotide
ccgagggcagaagcgucca

SEQ ID NO: 468693 - RNA, 19 nt, Artificial Sequence
  Description of Artificial Sequence: Synthetic oligonucleotide
ccccuuagcccgaguccga

SEQ ID NO: 468694 - RNA, 19 nt, Artificial Sequence
  Description of Artificial Sequence: Synthetic oligonucleotide
ccugugcgucccgguaauc

SEQ ID NO: 468695 - RNA, 19 nt, Artificial Sequence
  Description of Artificial Sequence: Synthetic oligonucleotide
cggccacucucucuacgca

SEQ ID NO: 468696 - RNA, 19 nt, Artificial Sequence
  Description of Artificial Sequence: Synthetic oligonucleotide
cccuuagcccgaguccgaa

SEQ ID NO: 468697 - RNA, 19 nt, Artificial Sequence
  Description of Artificial Sequence: Synthetic oligonucleotide
gccccgguuccagcggcuc

SEQ ID NO: 468698 - RNA, 19 nt, Artificial Sequence
  Description of Artificial Sequence: Synthetic oligonucleotide
ccccgguuccagcggcuca

SEQ ID NO: 468699 - RNA, 19 nt, Artificial Sequence
  Description of Artificial Sequence: Synthetic oligonucleotide
cgucccgguaaucacgauu

SEQ ID NO: 468700 - RNA, 19 nt, Artificial Sequence
  Description of Artificial Sequence: Synthetic oligonucleotide
cggccccgauguuucucug

SEQ ID NO: 468701 - RNA, 19 nt, Artificial Sequence
  Description of Artificial Sequence: Synthetic oligonucleotide
ccuuagcccgaguccgaau

SEQ ID NO: 468702 - RNA, 19 nt, Artificial Sequence
  Description of Artificial Sequence: Synthetic oligonucleotide
ccgguuccagcggcucauc

SEQ ID NO: 468703 - RNA, 19 nt, Artificial Sequence
  Description of Artificial Sequence: Synthetic oligonucleotide
cuggccccuuagcccgagu

SEQ ID NO: 468704 - RNA, 19 nt, Artificial Sequence
  Description of Artificial Sequence: Synthetic oligonucleotide
ccccgauguuucucugccu

SEQ ID NO: 468705 - RNA, 19 nt, Artificial Sequence
  Description of Artificial Sequence: Synthetic oligonucleotide
gcgcuuaggcuuagauauu

SEQ ID NO: 468706 - RNA, 19 nt, Artificial Sequence
  Description of Artificial Sequence: Synthetic oligonucleotide
cccucgggugguucccagu

SEQ ID NO: 468707 - RNA, 19 nt, Artificial Sequence
  Description of Artificial Sequence: Synthetic oligonucleotide
cguaacucaugggccugcu

SEQ ID NO: 468708 - RNA, 19 nt, Artificial Sequence
  Description of Artificial Sequence: Synthetic oligonucleotide
cguagacgacgucucuguu

SEQ ID NO: 468709 - RNA, 19 nt, Artificial Sequence
  Description of Artificial Sequence: Synthetic oligonucleotide
cguaucgcucaagcucccu

SEQ ID NO: 468710 - RNA, 19 nt, Artificial Sequence
  Description of Artificial Sequence: Synthetic oligonucleotide
ggccccgguuccagcggcu

SEQ ID NO: 468711 - RNA, 19 nt, Artificial Sequence
  Description of Artificial Sequence: Synthetic oligonucleotide
aguaucgacaguuaucucc

SEQ ID NO: 468712 - RNA, 19 nt, Artificial Sequence
  Description of Artificial Sequence: Synthetic oligonucleotide
ucuaguacaauccacaccu

SEQ ID NO: 468713 - RNA, 19 nt, Artificial Sequence
  Description of Artificial Sequence: Synthetic oligonucleotide
acaaaguuagaugugaucc

SEQ ID NO: 468714 - RNA, 19 nt, Artificial Sequence
  Description of Artificial Sequence: Synthetic oligonucleotide
aauacuugcacacgacacc

SEQ ID NO: 468715 - RNA, 19 nt, Artificial Sequence
  Description of Artificial Sequence: Synthetic oligonucleotide
caauguauguucaagaccc

SEQ ID NO: 468716 - RNA, 19 nt, Artificial Sequence
  Description of Artificial Sequence: Synthetic oligonucleotide
aauuguagcaacuuaacuu

SEQ ID NO: 468717 - RNA, 19 nt, Artificial Sequence
  Description of Artificial Sequence: Synthetic oligonucleotide
gauggaaugaggcagacac

SEQ ID NO: 468718 - RNA, 19 nt, Artificial Sequence
  Description of Artificial Sequence: Synthetic oligonucleotide
aaaacuaacuuuaagauuu

SEQ ID NO: 468719 - RNA, 19 nt, Artificial Sequence
  Description of Artificial Sequence: Synthetic oligonucleotide
acaauguauguucaagacc

SEQ ID NO: 468720 - RNA, 19 nt, Artificial Sequence
  Description of Artificial Sequence: Synthetic oligonucleotide
aauagguccccucaaacga

SEQ ID NO: 468721 - RNA, 19 nt, Artificial Sequence
  Description of Artificial Sequence: Synthetic oligonucleotide
cuagcauacagacagacac

SEQ ID NO: 468722 - RNA, 19 nt, Artificial Sequence
  Description of Artificial Sequence: Synthetic oligonucleotide
uuuaagauuuauuuuguaa

SEQ ID NO: 468723 - RNA, 19 nt, Artificial Sequence
  Description of Artificial Sequence: Synthetic oligonucleotide
aaauacuugcacacgacac

SEQ ID NO: 468724 - RNA, 19 nt, Artificial Sequence
  Description of Artificial Sequence: Synthetic oligonucleotide
ggucauuuaaccucuaugg

SEQ ID NO: 468725 - RNA, 19 nt, Artificial Sequence
  Description of Artificial Sequence: Synthetic oligonucleotide
ucuuugaaaauacuugcac

SEQ ID NO: 468726 - RNA, 19 nt, Artificial Sequence
  Description of Artificial Sequence: Synthetic oligonucleotide
ucauuuaaccucuauggcu

SEQ ID NO: 468727 - RNA, 19 nt, Artificial Sequence
  Description of Artificial Sequence: Synthetic oligonucleotide
ugaaauuccuaucaaggaa

SEQ ID NO: 468728 - RNA, 19 nt, Artificial Sequence
  Description of Artificial Sequence: Synthetic oligonucleotide
aaacauucaaaacaaugua

SEQ ID NO: 468729 - RNA, 19 nt, Artificial Sequence
  Description of Artificial Sequence: Synthetic oligonucleotide
cauaccauguccuugcuac

SEQ ID NO: 468730 - RNA, 19 nt, Artificial Sequence
  Description of Artificial Sequence: Synthetic oligonucleotide
uagaccauaaaacauucaa

SEQ ID NO: 468731 - RNA, 19 nt, Artificial Sequence
  Description of Artificial Sequence: Synthetic oligonucleotide
agauuugauguguugugac

SEQ ID NO: 468732 - RNA, 19 nt, Artificial Sequence
  Description of Artificial Sequence: Synthetic oligonucleotide
cucaucgugaaacaagucc

SEQ ID NO: 468733 - RNA, 19 nt, Artificial Sequence
  Description of Artificial Sequence: Synthetic oligonucleotide
augagagccacgcacugcc

SEQ ID NO: 468734 - RNA, 19 nt, Artificial Sequence
  Description of Artificial Sequence: Synthetic oligonucleotide
uucgucguugucaaagggg

SEQ ID NO: 468735 - RNA, 19 nt, Artificial Sequence
  Description of Artificial Sequence: Synthetic oligonucleotide
uccguggagauacacacag

SEQ ID NO: 468736 - RNA, 19 nt, Artificial Sequence
  Description of Artificial Sequence: Synthetic oligonucleotide
agcauaagcaacaucucgc

SEQ ID NO: 468737 - RNA, 19 nt, Artificial Sequence
  Description of Artificial Sequence: Synthetic oligonucleotide
auccauugggugcaggacc

SEQ ID NO: 468738 - RNA, 19 nt, Artificial Sequence
  Description of Artificial Sequence: Synthetic oligonucleotide
aguuugggguucuugacuc

SEQ ID NO: 468739 - RNA, 19 nt, Artificial Sequence
  Description of Artificial Sequence: Synthetic oligonucleotide
ugaaacaagucccacucgu

SEQ ID NO: 468740 - RNA, 19 nt, Artificial Sequence
  Description of Artificial Sequence: Synthetic oligonucleotide
uguauguucaagacccagc

SEQ ID NO: 468741 - RNA, 19 nt, Artificial Sequence
  Description of Artificial Sequence: Synthetic oligonucleotide
gacagcuacugucugaggc

SEQ ID NO: 468742 - RNA, 19 nt, Artificial Sequence
  Description of Artificial Sequence: Synthetic oligonucleotide
ugugauccggcauucgggg

SEQ ID NO: 468743 - RNA, 19 nt, Artificial Sequence
  Description of Artificial Sequence: Synthetic oligonucleotide
aaaacgaaguguagcaaag

SEQ ID NO: 468744 - RNA, 19 nt, Artificial Sequence
  Description of Artificial Sequence: Synthetic oligonucleotide
uuucuguaguggaaagggg

SEQ ID NO: 468745 - RNA, 19 nt, Artificial Sequence
  Description of Artificial Sequence: Synthetic oligonucleotide
ggugaaauuccuaucaagg

SEQ ID NO: 468746 - RNA, 19 nt, Artificial Sequence
  Description of Artificial Sequence: Synthetic oligonucleotide
aguacggccacaguagggc

SEQ ID NO: 468747 - RNA, 19 nt, Artificial Sequence
  Description of Artificial Sequence: Synthetic oligonucleotide
uaaccucuauggcugaucc

SEQ ID NO: 468748 - RNA, 19 nt, Artificial Sequence
  Description of Artificial Sequence: Synthetic oligonucleotide
aagugccucaacugaaaag

SEQ ID NO: 468749 - RNA, 19 nt, Artificial Sequence
  Description of Artificial Sequence: Synthetic oligonucleotide
uucgccuggauucauuuca

SEQ ID NO: 468750 - RNA, 19 nt, Artificial Sequence
  Description of Artificial Sequence: Synthetic oligonucleotide
uagcacuucuccauuugcg

SEQ ID NO: 468751 - RNA, 19 nt, Artificial Sequence
  Description of Artificial Sequence: Synthetic oligonucleotide
aaacagauggcgcaacaaa

SEQ ID NO: 468752 - RNA, 19 nt, Artificial Sequence
  Description of Artificial Sequence: Synthetic oligonucleotide
agcacuucuccauuugcgg

SEQ ID NO: 468753 - RNA, 19 nt, Artificial Sequence
  Description of Artificial Sequence: Synthetic oligonucleotide
ucgaugcaagauuugaugu

SEQ ID NO: 468754 - RNA, 19 nt, Artificial Sequence
  Description of Artificial Sequence: Synthetic oligonucleotide
ugcuauagauccaagucau

SEQ ID NO: 468755 - RNA, 19 nt, Artificial Sequence
  Description of Artificial Sequence: Synthetic oligonucleotide
cuaucaaggaauuguagca

SEQ ID NO: 468756 - RNA, 19 nt, Artificial Sequence
  Description of Artificial Sequence: Synthetic oligonucleotide
ucgacaguuaucuccuucc

SEQ ID NO: 468757 - RNA, 19 nt, Artificial Sequence
  Description of Artificial Sequence: Synthetic oligonucleotide
gaaccuccguaauaggucc

SEQ ID NO: 468758 - RNA, 19 nt, Artificial Sequence
  Description of Artificial Sequence: Synthetic oligonucleotide
caugcauaaaauaucugca

SEQ ID NO: 468759 - RNA, 19 nt, Artificial Sequence
  Description of Artificial Sequence: Synthetic oligonucleotide
uccuaucaaggaauuguag

SEQ ID NO: 468760 - RNA, 19 nt, Artificial Sequence
  Description of Artificial Sequence: Synthetic oligonucleotide
acagauggcgcaacaaacc

SEQ ID NO: 468761 - RNA, 19 nt, Artificial Sequence
  Description of Artificial Sequence: Synthetic oligonucleotide
cucgaugcaagauuugaug

SEQ ID NO: 468762 - RNA, 19 nt, Artificial Sequence
  Description of Artificial Sequence: Synthetic oligonucleotide
cacgacaccauauggacug

SEQ ID NO: 468763 - RNA, 19 nt, Artificial Sequence
  Description of Artificial Sequence: Synthetic oligonucleotide
ccaugcauaaaauaucugc

SEQ ID NO: 468764 - RNA, 19 nt, Artificial Sequence
  Description of Artificial Sequence: Synthetic oligonucleotide
guacugauaagggacaagc

SEQ ID NO: 468765 - RNA, 19 nt, Artificial Sequence
  Description of Artificial Sequence: Synthetic oligonucleotide
uuagaugugauccggcauu

SEQ ID NO: 468766 - RNA, 19 nt, Artificial Sequence
  Description of Artificial Sequence: Synthetic oligonucleotide
uccauaaacacaguacccu

SEQ ID NO: 468767 - RNA, 19 nt, Artificial Sequence
  Description of Artificial Sequence: Synthetic oligonucleotide
ucaaacgaggacaaagguu

SEQ ID NO: 468768 - RNA, 19 nt, Artificial Sequence
  Description of Artificial Sequence: Synthetic oligonucleotide
ugucuacuuucaaagcuca

SEQ ID NO: 468769 - RNA, 19 nt, Artificial Sequence
  Description of Artificial Sequence: Synthetic oligonucleotide
aggucauuuaaccucuaug

SEQ ID NO: 468770 - RNA, 19 nt, Artificial Sequence
  Description of Artificial Sequence: Synthetic oligonucleotide
uaguacaauccacaccuca

SEQ ID NO: 468771 - RNA, 19 nt, Artificial Sequence
  Description of Artificial Sequence: Synthetic oligonucleotide
uuacaaaccccaugcauaa

SEQ ID NO: 468772 - RNA, 19 nt, Artificial Sequence
  Description of Artificial Sequence: Synthetic oligonucleotide
aggugaaauuccuaucaag

SEQ ID NO: 468773 - RNA, 19 nt, Artificial Sequence
  Description of Artificial Sequence: Synthetic oligonucleotide
gucauuuaaccucuauggc

SEQ ID NO: 468774 - RNA, 19 nt, Artificial Sequence
  Description of Artificial Sequence: Synthetic oligonucleotide
caagauuugauguguugug

SEQ ID NO: 468775 - RNA, 19 nt, Artificial Sequence
  Description of Artificial Sequence: Synthetic oligonucleotide
aaccucuauggcugauccc

SEQ ID NO: 468776 - RNA, 19 nt, Artificial Sequence
  Description of Artificial Sequence: Synthetic oligonucleotide
uguuguuuccgggacgccg

SEQ ID NO: 468777 - RNA, 19 nt, Artificial Sequence
  Description of Artificial Sequence: Synthetic oligonucleotide
cuauccuuggaccccaaag

SEQ ID NO: 468778 - RNA, 19 nt, Artificial Sequence
  Description of Artificial Sequence: Synthetic oligonucleotide
ucuauggcuacugcaaaug

SEQ ID NO: 468779 - RNA, 19 nt, Artificial Sequence
  Description of Artificial Sequence: Synthetic oligonucleotide
cugcaaaugacuccucuag

SEQ ID NO: 468780 - RNA, 19 nt, Artificial Sequence
  Description of Artificial Sequence: Synthetic oligonucleotide
auuugauguguugugaccu

SEQ ID NO: 468781 - RNA, 19 nt, Artificial Sequence
  Description of Artificial Sequence: Synthetic oligonucleotide
ucaacugaaaaggcuagac

SEQ ID NO: 468782 - RNA, 19 nt, Artificial Sequence
  Description of Artificial Sequence: Synthetic oligonucleotide
ucuagcauacagacagaca

SEQ ID NO: 468783 - RNA, 19 nt, Artificial Sequence
  Description of Artificial Sequence: Synthetic oligonucleotide
uccguaauagguccccuca

SEQ ID NO: 468784 - RNA, 19 nt, Artificial Sequence
  Description of Artificial Sequence: Synthetic oligonucleotide
ucuguaguggaaagggguc

SEQ ID NO: 468785 - RNA, 19 nt, Artificial Sequence
  Description of Artificial Sequence: Synthetic oligonucleotide
uucauuucagcaagugauc

SEQ ID NO: 468786 - RNA, 19 nt, Artificial Sequence
  Description of Artificial Sequence: Synthetic oligonucleotide
ccuaucaaggaauuguagc

SEQ ID NO: 468787 - RNA, 19 nt, Artificial Sequence
  Description of Artificial Sequence: Synthetic oligonucleotide
uuaccccuauccuuggacc

SEQ ID NO: 468788 - RNA, 19 nt, Artificial Sequence
  Description of Artificial Sequence: Synthetic oligonucleotide
uuuucguccagccgccgcc

SEQ ID NO: 468789 - RNA, 19 nt, Artificial Sequence
  Description of Artificial Sequence: Synthetic oligonucleotide
cacacgacaccauauggac

SEQ ID NO: 468790 - RNA, 19 nt, Artificial Sequence
  Description of Artificial Sequence: Synthetic oligonucleotide
gauggcgcaacaaaccuac

SEQ ID NO: 468791 - RNA, 19 nt, Artificial Sequence
  Description of Artificial Sequence: Synthetic oligonucleotide
cauagcgacacucucccac

SEQ ID NO: 468792 - RNA, 19 nt, Artificial Sequence
  Description of Artificial Sequence: Synthetic oligonucleotide
uacugauaagggacaagca

SEQ ID NO: 468793 - RNA, 19 nt, Artificial Sequence
  Description of Artificial Sequence: Synthetic oligonucleotide
agaaccuccguaauagguc

SEQ ID NO: 468794 - RNA, 19 nt, Artificial Sequence
  Description of Artificial Sequence: Synthetic oligonucleotide
aucgacaguuaucuccuuc

SEQ ID NO: 468795 - RNA, 19 nt, Artificial Sequence
  Description of Artificial Sequence: Synthetic oligonucleotide
agcaagugauccaacuccc

SEQ ID NO: 468796 - RNA, 19 nt, Artificial Sequence
  Description of Artificial Sequence: Synthetic oligonucleotide
guaauagguccccucaaac

SEQ ID NO: 468797 - RNA, 19 nt, Artificial Sequence
  Description of Artificial Sequence: Synthetic oligonucleotide
aguuagaugugauccggca

SEQ ID NO: 468798 - RNA, 19 nt, Artificial Sequence
  Description of Artificial Sequence: Synthetic oligonucleotide
gugaaauuccuaucaagga

SEQ ID NO: 468799 - RNA, 19 nt, Artificial Sequence
  Description of Artificial Sequence: Synthetic oligonucleotide
uauggcugaucccuuuucu

SEQ ID NO: 468800 - RNA, 19 nt, Artificial Sequence
  Description of Artificial Sequence: Synthetic oligonucleotide
ggugacaaccuccucuucg

SEQ ID NO: 468801 - RNA, 19 nt, Artificial Sequence
  Description of Artificial Sequence: Synthetic oligonucleotide
ugauccggcauucggggca

SEQ ID NO: 468802 - RNA, 19 nt, Artificial Sequence
  Description of Artificial Sequence: Synthetic oligonucleotide
cucuaguacaauccacacc

SEQ ID NO: 468803 - RNA, 19 nt, Artificial Sequence
  Description of Artificial Sequence: Synthetic oligonucleotide
aacuuaacuuuugcuuguc

SEQ ID NO: 468804 - RNA, 19 nt, Artificial Sequence
  Description of Artificial Sequence: Synthetic oligonucleotide
cuugcuacgcugcacagca

SEQ ID NO: 468805 - RNA, 19 nt, Artificial Sequence
  Description of Artificial Sequence: Synthetic oligonucleotide
guagugaucacaacagcac

SEQ ID NO: 468806 - RNA, 19 nt, Artificial Sequence
  Description of Artificial Sequence: Synthetic oligonucleotide
uuucucuagcauacagaca

SEQ ID NO: 468807 - RNA, 19 nt, Artificial Sequence
  Description of Artificial Sequence: Synthetic oligonucleotide
ucgcccagcucaaagguga

SEQ ID NO: 468808 - RNA, 19 nt, Artificial Sequence
  Description of Artificial Sequence: Synthetic oligonucleotide
aauaccugcacgccuuguu

SEQ ID NO: 468809 - RNA, 19 nt, Artificial Sequence
  Description of Artificial Sequence: Synthetic oligonucleotide
ugccucaacugaaaaggcu

SEQ ID NO: 468810 - RNA, 19 nt, Artificial Sequence
  Description of Artificial Sequence: Synthetic oligonucleotide
uggcgcaacaaaccuacac

SEQ ID NO: 468811 - RNA, 19 nt, Artificial Sequence
  Description of Artificial Sequence: Synthetic oligonucleotide
auaccugcacgccuuguug

SEQ ID NO: 468812 - RNA, 19 nt, Artificial Sequence
  Description of Artificial Sequence: Synthetic oligonucleotide
gaauuguagcaacuuaacu

SEQ ID NO: 468813 - RNA, 19 nt, Artificial Sequence
  Description of Artificial Sequence: Synthetic oligonucleotide
acagaaccuccguaauagg

SEQ ID NO: 468814 - RNA, 19 nt, Artificial Sequence
  Description of Artificial Sequence: Synthetic oligonucleotide
uacaauccacaccucaguu

SEQ ID NO: 468815 - RNA, 19 nt, Artificial Sequence
  Description of Artificial Sequence: Synthetic oligonucleotide
cugcuauagauccaaguca

SEQ ID NO: 468816 - RNA, 19 nt, Artificial Sequence
  Description of Artificial Sequence: Synthetic oligonucleotide
agcgacacucucccacugc

SEQ ID NO: 468817 - RNA, 19 nt, Artificial Sequence
  Description of Artificial Sequence: Synthetic oligonucleotide
cuucgucguugucaaaggg

SEQ ID NO: 468818 - RNA, 19 nt, Artificial Sequence
  Description of Artificial Sequence: Synthetic oligonucleotide
uguacugauaagggacaag

SEQ ID NO: 468819 - RNA, 19 nt, Artificial Sequence
  Description of Artificial Sequence: Synthetic oligonucleotide
accucuauggcugaucccu

SEQ ID NO: 468820 - RNA, 19 nt, Artificial Sequence
  Description of Artificial Sequence: Synthetic oligonucleotide
gcugcuauagauccaaguc

SEQ ID NO: 468821 - RNA, 19 nt, Artificial Sequence
  Description of Artificial Sequence: Synthetic oligonucleotide
aguugcaaaguuugggguu

SEQ ID NO: 468822 - RNA, 19 nt, Artificial Sequence
  Description of Artificial Sequence: Synthetic oligonucleotide
cuuguacugauaagggaca

SEQ ID NO: 468823 - RNA, 19 nt, Artificial Sequence
  Description of Artificial Sequence: Synthetic oligonucleotide
caaacgaggacaaagguuu

SEQ ID NO: 468824 - RNA, 19 nt, Artificial Sequence
  Description of Artificial Sequence: Synthetic oligonucleotide
ccaauuaccccuauccuug

SEQ ID NO: 468825 - RNA, 19 nt, Artificial Sequence
  Description of Artificial Sequence: Synthetic oligonucleotide
ucgugaaacaagucccacu

SEQ ID NO: 468826 - RNA, 19 nt, Artificial Sequence
  Description of Artificial Sequence: Synthetic oligonucleotide
uccuuggaccccaaagcac

SEQ ID NO: 468827 - RNA, 19 nt, Artificial Sequence
  Description of Artificial Sequence: Synthetic oligonucleotide
uugaugcucccacuuucug

SEQ ID NO: 468828 - RNA, 19 nt, Artificial Sequence
  Description of Artificial Sequence: Synthetic oligonucleotide
ccucaaacgaggacaaagg

SEQ ID NO: 468829 - RNA, 19 nt, Artificial Sequence
  Description of Artificial Sequence: Synthetic oligonucleotide
aauuaccccuauccuugga

SEQ ID NO: 468830 - RNA, 19 nt, Artificial Sequence
  Description of Artificial Sequence: Synthetic oligonucleotide
uacugucugaggcuccgca

SEQ ID NO: 468831 - RNA, 19 nt, Artificial Sequence
  Description of Artificial Sequence: Synthetic oligonucleotide
gaaauuccuaucaaggaau

SEQ ID NO: 468832 - RNA, 19 nt, Artificial Sequence
  Description of Artificial Sequence: Synthetic oligonucleotide
uccgcagaccaguucacac

SEQ ID NO: 468833 - RNA, 19 nt, Artificial Sequence
  Description of Artificial Sequence: Synthetic oligonucleotide
aucgugaaacaagucccac

SEQ ID NO: 468834 - RNA, 19 nt, Artificial Sequence
  Description of Artificial Sequence: Synthetic oligonucleotide
acaguucccuccaaauggg

SEQ ID NO: 468835 - RNA, 19 nt, Artificial Sequence
  Description of Artificial Sequence: Synthetic oligonucleotide
guauguucaagacccagcu

SEQ ID NO: 468836 - RNA, 19 nt, Artificial Sequence
  Description of Artificial Sequence: Synthetic oligonucleotide
ucggggcaggacuuuauga

SEQ ID NO: 468837 - RNA, 19 nt, Artificial Sequence
  Description of Artificial Sequence: Synthetic oligonucleotide
augugauccggcauucggg

SEQ ID NO: 468838 - RNA, 19 nt, Artificial Sequence
  Description of Artificial Sequence: Synthetic oligonucleotide
caauuaccccuauccuugg

SEQ ID NO: 468839 - RNA, 19 nt, Artificial Sequence
  Description of Artificial Sequence: Synthetic oligonucleotide
aguuaaauucauaguuaca

SEQ ID NO: 468840 - RNA, 19 nt, Artificial Sequence
  Description of Artificial Sequence: Synthetic oligonucleotide
uucggggcaggacuuuaug

SEQ ID NO: 468841 - RNA, 19 nt, Artificial Sequence
  Description of Artificial Sequence: Synthetic oligonucleotide
gaugcaagauuugaugugu

SEQ ID NO: 468842 - RNA, 19 nt, Artificial Sequence
  Description of Artificial Sequence: Synthetic oligonucleotide
auagcgacacucucccacu

SEQ ID NO: 468843 - RNA, 19 nt, Artificial Sequence
  Description of Artificial Sequence: Synthetic oligonucleotide
ucgccuggauucauuucag

SEQ ID NO: 468844 - RNA, 19 nt, Artificial Sequence
  Description of Artificial Sequence: Synthetic oligonucleotide
uuccccauagcgacacucu

SEQ ID NO: 468845 - RNA, 19 nt, Artificial Sequence
  Description of Artificial Sequence: Synthetic oligonucleotide
gcugaaaacagauggcgca

SEQ ID NO: 468846 - RNA, 19 nt, Artificial Sequence
  Description of Artificial Sequence: Synthetic oligonucleotide
gagggauagaggagcaggc

SEQ ID NO: 468847 - RNA, 19 nt, Artificial Sequence
  Description of Artificial Sequence: Synthetic oligonucleotide
cucuagcauacagacagac

SEQ ID NO: 468848 - RNA, 19 nt, Artificial Sequence
  Description of Artificial Sequence: Synthetic oligonucleotide
aaccuccguaauagguccc

SEQ ID NO: 468849 - RNA, 19 nt, Artificial Sequence
  Description of Artificial Sequence: Synthetic oligonucleotide
guagcagucacuucuuccu

SEQ ID NO: 468850 - RNA, 19 nt, Artificial Sequence
  Description of Artificial Sequence: Synthetic oligonucleotide
accuccguaauaggucccc

SEQ ID NO: 468851 - RNA, 19 nt, Artificial Sequence
  Description of Artificial Sequence: Synthetic oligonucleotide
ugcaguuggacaggauccc

SEQ ID NO: 468852 - RNA, 19 nt, Artificial Sequence
  Description of Artificial Sequence: Synthetic oligonucleotide
caguacggccacaguaggg

SEQ ID NO: 468853 - RNA, 19 nt, Artificial Sequence
  Description of Artificial Sequence: Synthetic oligonucleotide
cuccucuaguacaauccac

SEQ ID NO: 468854 - RNA, 19 nt, Artificial Sequence
  Description of Artificial Sequence: Synthetic oligonucleotide
ugaccuguuuucguccagc

SEQ ID NO: 468855 - RNA, 19 nt, Artificial Sequence
  Description of Artificial Sequence: Synthetic oligonucleotide
caucucgcccagcucaaag

SEQ ID NO: 468856 - RNA, 19 nt, Artificial Sequence
  Description of Artificial Sequence: Synthetic oligonucleotide
acaacacacucuuggggaa

SEQ ID NO: 468857 - RNA, 19 nt, Artificial Sequence
  Description of Artificial Sequence: Synthetic oligonucleotide
ugggccucgaugcaagauu

SEQ ID NO: 468858 - RNA, 19 nt, Artificial Sequence
  Description of Artificial Sequence: Synthetic oligonucleotide
gcgcaacaaaccuacacug

SEQ ID NO: 468859 - RNA, 19 nt, Artificial Sequence
  Description of Artificial Sequence: Synthetic oligonucleotide
cuacgcugcacagcaaaag

SEQ ID NO: 468860 - RNA, 19 nt, Artificial Sequence
  Description of Artificial Sequence: Synthetic oligonucleotide
gagagacuugaggaagcag

SEQ ID NO: 468861 - RNA, 19 nt, Artificial Sequence
  Description of Artificial Sequence: Synthetic oligonucleotide
uuaaccucuauggcugauc

SEQ ID NO: 468862 - RNA, 19 nt, Artificial Sequence
  Description of Artificial Sequence: Synthetic oligonucleotide
uuuccccauagcgacacuc

SEQ ID NO: 468863 - RNA, 19 nt, Artificial Sequence
  Description of Artificial Sequence: Synthetic oligonucleotide
cagcggucuccauaaacac

SEQ ID NO: 468864 - RNA, 19 nt, Artificial Sequence
  Description of Artificial Sequence: Synthetic oligonucleotide
caagugauccaacucccga

SEQ ID NO: 468865 - RNA, 19 nt, Artificial Sequence
  Description of Artificial Sequence: Synthetic oligonucleotide
guuuccgggacgccgcagc

SEQ ID NO: 468866 - RNA, 19 nt, Artificial Sequence
  Description of Artificial Sequence: Synthetic oligonucleotide
acccagcuuguacugauaa

SEQ ID NO: 468867 - RNA, 19 nt, Artificial Sequence
  Description of Artificial Sequence: Synthetic oligonucleotide
uccuugcuacgcugcacag

SEQ ID NO: 468868 - RNA, 19 nt, Artificial Sequence
  Description of Artificial Sequence: Synthetic oligonucleotide
gagggaugguuuugcacuc

SEQ ID NO: 468869 - RNA, 19 nt, Artificial Sequence
  Description of Artificial Sequence: Synthetic oligonucleotide
agucuccguggagauacac

SEQ ID NO: 468870 - RNA, 19 nt, Artificial Sequence
  Description of Artificial Sequence: Synthetic oligonucleotide
accccuauccuuggacccc

SEQ ID NO: 468871 - RNA, 19 nt, Artificial Sequence
  Description of Artificial Sequence: Synthetic oligonucleotide
auagguccccucaaacgag

SEQ ID NO: 468872 - RNA, 19 nt, Artificial Sequence
  Description of Artificial Sequence: Synthetic oligonucleotide
agcucccacguccuucauc

SEQ ID NO: 468873 - RNA, 19 nt, Artificial Sequence
  Description of Artificial Sequence: Synthetic oligonucleotide
cuauggcuacugcaaauga

SEQ ID NO: 468874 - RNA, 19 nt, Artificial Sequence
  Description of Artificial Sequence: Synthetic oligonucleotide
cauuugcggauacacuuga

SEQ ID NO: 468875 - RNA, 19 nt, Artificial Sequence
  Description of Artificial Sequence: Synthetic oligonucleotide
ggacuuuaugaucuugcuc

SEQ ID NO: 468876 - RNA, 19 nt, Artificial Sequence
  Description of Artificial Sequence: Synthetic oligonucleotide
guugugaccucugggcagc

SEQ ID NO: 468877 - RNA, 19 nt, Artificial Sequence
  Description of Artificial Sequence: Synthetic oligonucleotide
acgcaagcugcuauagauc

SEQ ID NO: 468878 - RNA, 19 nt, Artificial Sequence
  Description of Artificial Sequence: Synthetic oligonucleotide
ggcaguacggccacaguag

SEQ ID NO: 468879 - RNA, 19 nt, Artificial Sequence
  Description of Artificial Sequence: Synthetic oligonucleotide
aguucacacgccacgcaag

SEQ ID NO: 468880 - RNA, 19 nt, Artificial Sequence
  Description of Artificial Sequence: Synthetic oligonucleotide
aaaggggucuauggcuacu

SEQ ID NO: 468881 - RNA, 19 nt, Artificial Sequence
  Description of Artificial Sequence: Synthetic oligonucleotide
cuagaccauaaaacauuca

SEQ ID NO: 468882 - RNA, 19 nt, Artificial Sequence
  Description of Artificial Sequence: Synthetic oligonucleotide
ugcuuagcacuucuccauu

SEQ ID NO: 468883 - RNA, 19 nt, Artificial Sequence
  Description of Artificial Sequence: Synthetic oligonucleotide
ggcuacugcaaaugacucc

SEQ ID NO: 468884 - RNA, 19 nt, Artificial Sequence
  Description of Artificial Sequence: Synthetic oligonucleotide
caucgugaaacaaguccca

SEQ ID NO: 468885 - RNA, 19 nt, Artificial Sequence
  Description of Artificial Sequence: Synthetic oligonucleotide
agagccacgcacugccaca

SEQ ID NO: 468886 - RNA, 19 nt, Artificial Sequence
  Description of Artificial Sequence: Synthetic oligonucleotide
cccauagcgacacucuccc

SEQ ID NO: 468887 - RNA, 19 nt, Artificial Sequence
  Description of Artificial Sequence: Synthetic oligonucleotide
uagcgacacucucccacug

SEQ ID NO: 468888 - RNA, 19 nt, Artificial Sequence
  Description of Artificial Sequence: Synthetic oligonucleotide
caguucccuccaaaugggc

SEQ ID NO: 468889 - RNA, 19 nt, Artificial Sequence
  Description of Artificial Sequence: Synthetic oligonucleotide
cgugaaacaagucccacuc

SEQ ID NO: 468890 - RNA, 19 nt, Artificial Sequence
  Description of Artificial Sequence: Synthetic oligonucleotide
aaacuaacuuuaagauuua

SEQ ID NO: 468891 - RNA, 19 nt, Artificial Sequence
  Description of Artificial Sequence: Synthetic oligonucleotide
cuggaguuugagaggccug

SEQ ID NO: 468892 - RNA, 19 nt, Artificial Sequence
  Description of Artificial Sequence: Synthetic oligonucleotide
agcuagggcagcgacugug

SEQ ID NO: 468893 - RNA, 19 nt, Artificial Sequence
  Description of Artificial Sequence: Synthetic oligonucleotide
ugauggaaugaggcagaca

SEQ ID NO: 468894 - RNA, 19 nt, Artificial Sequence
  Description of Artificial Sequence: Synthetic oligonucleotide
uucguugggcccgguaucu

SEQ ID NO: 468895 - RNA, 19 nt, Artificial Sequence
  Description of Artificial Sequence: Synthetic oligonucleotide
cauccauugggugcaggac

SEQ ID NO: 468896 - RNA, 19 nt, Artificial Sequence
  Description of Artificial Sequence: Synthetic oligonucleotide
gguucuugacucagcuucg

SEQ ID NO: 468897 - RNA, 19 nt, Artificial Sequence
  Description of Artificial Sequence: Synthetic oligonucleotide
gccuggauucauuucagca

SEQ ID NO: 468898 - RNA, 19 nt, Artificial Sequence
  Description of Artificial Sequence: Synthetic oligonucleotide
uguaguggaaaggggucua

SEQ ID NO: 468899 - RNA, 19 nt, Artificial Sequence
  Description of Artificial Sequence: Synthetic oligonucleotide
agcacacucggugcuuuuc

SEQ ID NO: 468900 - RNA, 19 nt, Artificial Sequence
  Description of Artificial Sequence: Synthetic oligonucleotide
cauucacccaauccucuga

SEQ ID NO: 468901 - RNA, 19 nt, Artificial Sequence
  Description of Artificial Sequence: Synthetic oligonucleotide
uguuuucguccagccgccg

SEQ ID NO: 468902 - RNA, 19 nt, Artificial Sequence
  Description of Artificial Sequence: Synthetic oligonucleotide
gcagccuccgccauuacug

SEQ ID NO: 468903 - RNA, 19 nt, Artificial Sequence
  Description of Artificial Sequence: Synthetic oligonucleotide
gcaguacggccacaguagg

SEQ ID NO: 468904 - RNA, 19 nt, Artificial Sequence
  Description of Artificial Sequence: Synthetic oligonucleotide
ugcccuccccuuucuguag

SEQ ID NO: 468905 - RNA, 19 nt, Artificial Sequence
  Description of Artificial Sequence: Synthetic oligonucleotide
ccucaacugaaaaggcuag

SEQ ID NO: 468906 - RNA, 19 nt, Artificial Sequence
  Description of Artificial Sequence: Synthetic oligonucleotide
cuucguugggcccgguauc

SEQ ID NO: 468907 - RNA, 19 nt, Artificial Sequence
  Description of Artificial Sequence: Synthetic oligonucleotide
caauccucugaaccugcuc

SEQ ID NO: 468908 - RNA, 19 nt, Artificial Sequence
  Description of Artificial Sequence: Synthetic oligonucleotide
guaucgacaguuaucuccu

SEQ ID NO: 468909 - RNA, 19 nt, Artificial Sequence
  Description of Artificial Sequence: Synthetic oligonucleotide
ucguugucaaagggguugu

SEQ ID NO: 468910 - RNA, 19 nt, Artificial Sequence
  Description of Artificial Sequence: Synthetic oligonucleotide
cuuugucugcgccacagcu

SEQ ID NO: 468911 - RNA, 19 nt, Artificial Sequence
  Description of Artificial Sequence: Synthetic oligonucleotide
gcuagaccauaaaacauuc

SEQ ID NO: 468912 - RNA, 19 nt, Artificial Sequence
  Description of Artificial Sequence: Synthetic oligonucleotide
aggguacgcaugcuuguaa

SEQ ID NO: 468913 - RNA, 19 nt, Artificial Sequence
  Description of Artificial Sequence: Synthetic oligonucleotide
acggccaucaggguacgca

SEQ ID NO: 468914 - RNA, 19 nt, Artificial Sequence
  Description of Artificial Sequence: Synthetic oligonucleotide
cacgcaagcugcuauagau

SEQ ID NO: 468915 - RNA, 19 nt, Artificial Sequence
  Description of Artificial Sequence: Synthetic oligonucleotide
ggucaugggaguaucgaca

SEQ ID NO: 468916 - RNA, 19 nt, Artificial Sequence
  Description of Artificial Sequence: Synthetic oligonucleotide
cuccguaauagguccccuc

SEQ ID NO: 468917 - RNA, 19 nt, Artificial Sequence
  Description of Artificial Sequence: Synthetic oligonucleotide
cuucgccuggauucauuuc

SEQ ID NO: 468918 - RNA, 19 nt, Artificial Sequence
  Description of Artificial Sequence: Synthetic oligonucleotide
ggacaagcaggucauuuaa

SEQ ID NO: 468919 - RNA, 19 nt, Artificial Sequence
  Description of Artificial Sequence: Synthetic oligonucleotide
uuguuuccgggacgccgca

SEQ ID NO: 468920 - RNA, 19 nt, Artificial Sequence
  Description of Artificial Sequence: Synthetic oligonucleotide
ugucagcucgucgucccca

SEQ ID NO: 468921 - RNA, 19 nt, Artificial Sequence
  Description of Artificial Sequence: Synthetic oligonucleotide
cagaaccuccguaauaggu

SEQ ID NO: 468922 - RNA, 19 nt, Artificial Sequence
  Description of Artificial Sequence: Synthetic oligonucleotide
acauaccauguccuugcua

SEQ ID NO: 468923 - RNA, 19 nt, Artificial Sequence
  Description of Artificial Sequence: Synthetic oligonucleotide
ccauuugcggauacacuug

SEQ ID NO: 468924 - RNA, 19 nt, Artificial Sequence
  Description of Artificial Sequence: Synthetic oligonucleotide
cucaaacgaggacaaaggu

SEQ ID NO: 468925 - RNA, 19 nt, Artificial Sequence
  Description of Artificial Sequence: Synthetic oligonucleotide
guuagaugugauccggcau

SEQ ID NO: 468926 - RNA, 19 nt, Artificial Sequence
  Description of Artificial Sequence: Synthetic oligonucleotide
gcgacuguggggaucgggg

SEQ ID NO: 468927 - RNA, 19 nt, Artificial Sequence
  Description of Artificial Sequence: Synthetic oligonucleotide
gugauccggcauucggggc

SEQ ID NO: 468928 - RNA, 19 nt, Artificial Sequence
  Description of Artificial Sequence: Synthetic oligonucleotide
caacuuaacuuuugcuugu

SEQ ID NO: 468929 - RNA, 19 nt, Artificial Sequence
  Description of Artificial Sequence: Synthetic oligonucleotide
cuccccuuucuguagugga

SEQ ID NO: 468930 - RNA, 19 nt, Artificial Sequence
  Description of Artificial Sequence: Synthetic oligonucleotide
uacuugcacacgacaccau

SEQ ID NO: 468931 - RNA, 19 nt, Artificial Sequence
  Description of Artificial Sequence: Synthetic oligonucleotide
ccgcagaccaguucacacg

SEQ ID NO: 468932 - RNA, 19 nt, Artificial Sequence
  Description of Artificial Sequence: Synthetic oligonucleotide
agcggucuccauaaacaca

SEQ ID NO: 468933 - RNA, 19 nt, Artificial Sequence
  Description of Artificial Sequence: Synthetic oligonucleotide
agcagcgagggaugguuuu

SEQ ID NO: 468934 - RNA, 19 nt, Artificial Sequence
  Description of Artificial Sequence: Synthetic oligonucleotide
caguugcaaaguuuggggu

SEQ ID NO: 468935 - RNA, 19 nt, Artificial Sequence
  Description of Artificial Sequence: Synthetic oligonucleotide
acacgacaccauauggacu

SEQ ID NO: 468936 - RNA, 19 nt, Artificial Sequence
  Description of Artificial Sequence: Synthetic oligonucleotide
gcagcggucuccauaaaca

SEQ ID NO: 468937 - RNA, 19 nt, Artificial Sequence
  Description of Artificial Sequence: Synthetic oligonucleotide
aacaucucgcccagcucaa

SEQ ID NO: 468938 - RNA, 19 nt, Artificial Sequence
  Description of Artificial Sequence: Synthetic oligonucleotide
ccuuggaccccaaagcaca

SEQ ID NO: 468939 - RNA, 19 nt, Artificial Sequence
  Description of Artificial Sequence: Synthetic oligonucleotide
ucucuacggccaucagggu

SEQ ID NO: 468940 - RNA, 19 nt, Artificial Sequence
  Description of Artificial Sequence: Synthetic oligonucleotide
gcuacugucugaggcuccg

SEQ ID NO: 468941 - RNA, 19 nt, Artificial Sequence
  Description of Artificial Sequence: Synthetic oligonucleotide
agcucgucguccccaccug

SEQ ID NO: 468942 - RNA, 19 nt, Artificial Sequence
  Description of Artificial Sequence: Synthetic oligonucleotide
gcaagugauccaacucccg

SEQ ID NO: 468943 - RNA, 19 nt, Artificial Sequence
  Description of Artificial Sequence: Synthetic oligonucleotide
cagauggcgcaacaaaccu

SEQ ID NO: 468944 - RNA, 19 nt, Artificial Sequence
  Description of Artificial Sequence: Synthetic oligonucleotide
ccccauagcgacacucucc

SEQ ID NO: 468945 - RNA, 19 nt, Artificial Sequence
  Description of Artificial Sequence: Synthetic oligonucleotide
uguuuccgggacgccgcag

SEQ ID NO: 468946 - RNA, 19 nt, Artificial Sequence
  Description of Artificial Sequence: Synthetic oligonucleotide
ggggucuauggcuacugca

SEQ ID NO: 468947 - RNA, 19 nt, Artificial Sequence
  Description of Artificial Sequence: Synthetic oligonucleotide
agcauccauugggugcagg

SEQ ID NO: 468948 - RNA, 19 nt, Artificial Sequence
  Description of Artificial Sequence: Synthetic oligonucleotide
cagcgagggaugguuuugc

SEQ ID NO: 468949 - RNA, 19 nt, Artificial Sequence
  Description of Artificial Sequence: Synthetic oligonucleotide
gcuagggcagcgacugugg

SEQ ID NO: 468950 - RNA, 19 nt, Artificial Sequence
  Description of Artificial Sequence: Synthetic oligonucleotide
cucuacggccaucagggua

SEQ ID NO: 468951 - RNA, 19 nt, Artificial Sequence
  Description of Artificial Sequence: Synthetic oligonucleotide
cugcacgccuuguugcuca

SEQ ID NO: 468952 - RNA, 19 nt, Artificial Sequence
  Description of Artificial Sequence: Synthetic oligonucleotide
gacaguuaucuccuuccuu

SEQ ID NO: 468953 - RNA, 19 nt, Artificial Sequence
  Description of Artificial Sequence: Synthetic oligonucleotide
ggugaccuguuuucgucca

SEQ ID NO: 468954 - RNA, 19 nt, Artificial Sequence
  Description of Artificial Sequence: Synthetic oligonucleotide
cuuggucacugagcccugc

SEQ ID NO: 468955 - RNA, 19 nt, Artificial Sequence
  Description of Artificial Sequence: Synthetic oligonucleotide
gguacgcaugcuuguaaaa

SEQ ID NO: 468956 - RNA, 19 nt, Artificial Sequence
  Description of Artificial Sequence: Synthetic oligonucleotide
gucuccguggagauacaca

SEQ ID NO: 468957 - RNA, 19 nt, Artificial Sequence
  Description of Artificial Sequence: Synthetic oligonucleotide
cccuuucuguaguggaaag

SEQ ID NO: 468958 - RNA, 19 nt, Artificial Sequence
  Description of Artificial Sequence: Synthetic oligonucleotide
gagccacgcacugccacac

SEQ ID NO: 468959 - RNA, 19 nt, Artificial Sequence
  Description of Artificial Sequence: Synthetic oligonucleotide
caugggaguaucgacaguu

SEQ ID NO: 468960 - RNA, 19 nt, Artificial Sequence
  Description of Artificial Sequence: Synthetic oligonucleotide
uacaaaccccaugcauaaa

SEQ ID NO: 468961 - RNA, 19 nt, Artificial Sequence
  Description of Artificial Sequence: Synthetic oligonucleotide
cccaugcauaaaauaucug

SEQ ID NO: 468962 - RNA, 19 nt, Artificial Sequence
  Description of Artificial Sequence: Synthetic oligonucleotide
acgccacgcaagcugcuau

SEQ ID NO: 468963 - RNA, 19 nt, Artificial Sequence
  Description of Artificial Sequence: Synthetic oligonucleotide
ggacagcuacugucugagg

SEQ ID NO: 468964 - RNA, 19 nt, Artificial Sequence
  Description of Artificial Sequence: Synthetic oligonucleotide
gcgagggaugguuuugcac

SEQ ID NO: 468965 - RNA, 19 nt, Artificial Sequence
  Description of Artificial Sequence: Synthetic oligonucleotide
gucuauggcuacugcaaau

SEQ ID NO: 468966 - RNA, 19 nt, Artificial Sequence
  Description of Artificial Sequence: Synthetic oligonucleotide
ggucuauggcuacugcaaa

SEQ ID NO: 468967 - RNA, 19 nt, Artificial Sequence
  Description of Artificial Sequence: Synthetic oligonucleotide
uccuucguugggcccggua

SEQ ID NO: 468968 - RNA, 19 nt, Artificial Sequence
  Description of Artificial Sequence: Synthetic oligonucleotide
gcacacgacaccauaugga

SEQ ID NO: 468969 - RNA, 19 nt, Artificial Sequence
  Description of Artificial Sequence: Synthetic oligonucleotide
gggucuauggcuacugcaa

SEQ ID NO: 468970 - RNA, 19 nt, Artificial Sequence
  Description of Artificial Sequence: Synthetic oligonucleotide
cccaauccucugaaccugc

SEQ ID NO: 468971 - RNA, 19 nt, Artificial Sequence
  Description of Artificial Sequence: Synthetic oligonucleotide
uaucgacaguuaucuccuu

SEQ ID NO: 468972 - RNA, 19 nt, Artificial Sequence
  Description of Artificial Sequence: Synthetic oligonucleotide
agauggcgcaacaaaccua

SEQ ID NO: 468973 - RNA, 19 nt, Artificial Sequence
  Description of Artificial Sequence: Synthetic oligonucleotide
cugaggcuccgcagaccag

SEQ ID NO: 468974 - RNA, 19 nt, Artificial Sequence
  Description of Artificial Sequence: Synthetic oligonucleotide
cuccguggagauacacaca

SEQ ID NO: 468975 - RNA, 19 nt, Artificial Sequence
  Description of Artificial Sequence: Synthetic oligonucleotide
uccggcauucggggcagga

SEQ ID NO: 468976 - RNA, 19 nt, Artificial Sequence
  Description of Artificial Sequence: Synthetic oligonucleotide
acgcacugccacacagcac

SEQ ID NO: 468977 - RNA, 19 nt, Artificial Sequence
  Description of Artificial Sequence: Synthetic oligonucleotide
cuccauuugcggauacacu

SEQ ID NO: 468978 - RNA, 19 nt, Artificial Sequence
  Description of Artificial Sequence: Synthetic oligonucleotide
gggcaguacggccacagua

SEQ ID NO: 468979 - RNA, 19 nt, Artificial Sequence
  Description of Artificial Sequence: Synthetic oligonucleotide
gaacacaaccuggcugaaa

SEQ ID NO: 468980 - RNA, 19 nt, Artificial Sequence
  Description of Artificial Sequence: Synthetic oligonucleotide
ggguacgcaugcuuguaaa

SEQ ID NO: 468981 - RNA, 19 nt, Artificial Sequence
  Description of Artificial Sequence: Synthetic oligonucleotide
agggaugguuuugcacuca

SEQ ID NO: 468982 - RNA, 19 nt, Artificial Sequence
  Description of Artificial Sequence: Synthetic oligonucleotide
gcagacacccacagaacca

SEQ ID NO: 468983 - RNA, 19 nt, Artificial Sequence
  Description of Artificial Sequence: Synthetic oligonucleotide
ggguaguagugaucacaac

SEQ ID NO: 468984 - RNA, 19 nt, Artificial Sequence
  Description of Artificial Sequence: Synthetic oligonucleotide
ccauguccuugcuacgcug

SEQ ID NO: 468985 - RNA, 19 nt, Artificial Sequence
  Description of Artificial Sequence: Synthetic oligonucleotide
cuuccuuuacaaaccccau

SEQ ID NO: 468986 - RNA, 19 nt, Artificial Sequence
  Description of Artificial Sequence: Synthetic oligonucleotide
cacuucuccauuugcggau

SEQ ID NO: 468987 - RNA, 19 nt, Artificial Sequence
  Description of Artificial Sequence: Synthetic oligonucleotide
gccacgcaagcugcuauag

SEQ ID NO: 468988 - RNA, 19 nt, Artificial Sequence
  Description of Artificial Sequence: Synthetic oligonucleotide
cccacauaccauguccuug

SEQ ID NO: 468989 - RNA, 19 nt, Artificial Sequence
  Description of Artificial Sequence: Synthetic oligonucleotide
uccucugaaccugcuccua

SEQ ID NO: 468990 - RNA, 19 nt, Artificial Sequence
  Description of Artificial Sequence: Synthetic oligonucleotide
augggccucgaugcaagau

SEQ ID NO: 468991 - RNA, 19 nt, Artificial Sequence
  Description of Artificial Sequence: Synthetic oligonucleotide
ucguugggcccgguaucug

SEQ ID NO: 468992 - RNA, 19 nt, Artificial Sequence
  Description of Artificial Sequence: Synthetic oligonucleotide
cuguuguuuccgggacgcc

SEQ ID NO: 468993 - RNA, 19 nt, Artificial Sequence
  Description of Artificial Sequence: Synthetic oligonucleotide
gccucgaugcaagauuuga

SEQ ID NO: 468994 - RNA, 19 nt, Artificial Sequence
  Description of Artificial Sequence: Synthetic oligonucleotide
cccuggguaguagugauca

SEQ ID NO: 468995 - RNA, 19 nt, Artificial Sequence
  Description of Artificial Sequence: Synthetic oligonucleotide
cuacggccaucaggguacg

SEQ ID NO: 468996 - RNA, 19 nt, Artificial Sequence
  Description of Artificial Sequence: Synthetic oligonucleotide
uuccgggacgccgcagccu

SEQ ID NO: 468997 - RNA, 19 nt, Artificial Sequence
  Description of Artificial Sequence: Synthetic oligonucleotide
ggcuagaccauaaaacauu

SEQ ID NO: 468998 - RNA, 19 nt, Artificial Sequence
  Description of Artificial Sequence: Synthetic oligonucleotide
augggaguaucgacaguua

SEQ ID NO: 468999 - RNA, 19 nt, Artificial Sequence
  Description of Artificial Sequence: Synthetic oligonucleotide
cuguaguggaaaggggucu

SEQ ID NO: 469000 - RNA, 19 nt, Artificial Sequence
  Description of Artificial Sequence: Synthetic oligonucleotide
ccuaugagagccacgcacu

SEQ ID NO: 469001 - RNA, 19 nt, Artificial Sequence
  Description of Artificial Sequence: Synthetic oligonucleotide
guacggccacaguagggcu

SEQ ID NO: 469002 - RNA, 19 nt, Artificial Sequence
  Description of Artificial Sequence: Synthetic oligonucleotide
cgagggaugguuuugcacu

SEQ ID NO: 469003 - RNA, 19 nt, Artificial Sequence
  Description of Artificial Sequence: Synthetic oligonucleotide
aagggacaagcaggucauu

SEQ ID NO: 469004 - RNA, 19 nt, Artificial Sequence
  Description of Artificial Sequence: Synthetic oligonucleotide
gcagcgagggaugguuuug

SEQ ID NO: 469005 - RNA, 19 nt, Artificial Sequence
  Description of Artificial Sequence: Synthetic oligonucleotide
agccuccgccauuacuguu

SEQ ID NO: 469006 - RNA, 19 nt, Artificial Sequence
  Description of Artificial Sequence: Synthetic oligonucleotide
acgacaccauauggacugu

SEQ ID NO: 469007 - RNA, 19 nt, Artificial Sequence
  Description of Artificial Sequence: Synthetic oligonucleotide
gcucgucguccccaccugc

SEQ ID NO: 469008 - RNA, 19 nt, Artificial Sequence
  Description of Artificial Sequence: Synthetic oligonucleotide
ugcacgccuuguugcucau

SEQ ID NO: 469009 - RNA, 19 nt, Artificial Sequence
  Description of Artificial Sequence: Synthetic oligonucleotide
agccacgcacugccacaca

SEQ ID NO: 469010 - RNA, 19 nt, Artificial Sequence
  Description of Artificial Sequence: Synthetic oligonucleotide
guucaagacccagcuugua

SEQ ID NO: 469011 - RNA, 19 nt, Artificial Sequence
  Description of Artificial Sequence: Synthetic oligonucleotide
gcucaucgugaaacaaguc

SEQ ID NO: 469012 - RNA, 19 nt, Artificial Sequence
  Description of Artificial Sequence: Synthetic oligonucleotide
cuccgcagaccaguucaca

SEQ ID NO: 469013 - RNA, 19 nt, Artificial Sequence
  Description of Artificial Sequence: Synthetic oligonucleotide
ccggagcuagggcagcgac

SEQ ID NO: 469014 - RNA, 19 nt, Artificial Sequence
  Description of Artificial Sequence: Synthetic oligonucleotide
ggcuugcuguguucauauc

SEQ ID NO: 469015 - RNA, 19 nt, Artificial Sequence
  Description of Artificial Sequence: Synthetic oligonucleotide
cccaauuaccccuauccuu

SEQ ID NO: 469016 - RNA, 19 nt, Artificial Sequence
  Description of Artificial Sequence: Synthetic oligonucleotide
gacccagcuuguacugaua

SEQ ID NO: 469017 - RNA, 19 nt, Artificial Sequence
  Description of Artificial Sequence: Synthetic oligonucleotide
auggcgcaacaaaccuaca

SEQ ID NO: 469018 - RNA, 19 nt, Artificial Sequence
  Description of Artificial Sequence: Synthetic oligonucleotide
cguggagauacacacaguu

SEQ ID NO: 469019 - RNA, 19 nt, Artificial Sequence
  Description of Artificial Sequence: Synthetic oligonucleotide
gcagaccaguucacacgcc

SEQ ID NO: 469020 - RNA, 19 nt, Artificial Sequence
  Description of Artificial Sequence: Synthetic oligonucleotide
gagucuccguggagauaca

SEQ ID NO: 469021 - RNA, 19 nt, Artificial Sequence
  Description of Artificial Sequence: Synthetic oligonucleotide
cgccuggauucauuucagc

SEQ ID NO: 469022 - RNA, 19 nt, Artificial Sequence
  Description of Artificial Sequence: Synthetic oligonucleotide
aggagucuccguggagaua

SEQ ID NO: 469023 - RNA, 19 nt, Artificial Sequence
  Description of Artificial Sequence: Synthetic oligonucleotide
cacauaccauguccuugcu

SEQ ID NO: 469024 - RNA, 19 nt, Artificial Sequence
  Description of Artificial Sequence: Synthetic oligonucleotide
gcuucgccuggauucauuu

SEQ ID NO: 469025 - RNA, 19 nt, Artificial Sequence
  Description of Artificial Sequence: Synthetic oligonucleotide
ccaguucacacgccacgca

SEQ ID NO: 469026 - RNA, 19 nt, Artificial Sequence
  Description of Artificial Sequence: Synthetic oligonucleotide
guaguggaaaggggucuau

SEQ ID NO: 469027 - RNA, 19 nt, Artificial Sequence
  Description of Artificial Sequence: Synthetic oligonucleotide
gcuccuucguugggcccgg

SEQ ID NO: 469028 - RNA, 19 nt, Artificial Sequence
  Description of Artificial Sequence: Synthetic oligonucleotide
gcccgguaucugcuugaug

SEQ ID NO: 469029 - RNA, 19 nt, Artificial Sequence
  Description of Artificial Sequence: Synthetic oligonucleotide
caggguacgcaugcuugua

SEQ ID NO: 469030 - RNA, 19 nt, Artificial Sequence
  Description of Artificial Sequence: Synthetic oligonucleotide
gggcccgguaucugcuuga

SEQ ID NO: 469031 - RNA, 19 nt, Artificial Sequence
  Description of Artificial Sequence: Synthetic oligonucleotide
auccggcauucggggcagg

SEQ ID NO: 469032 - RNA, 19 nt, Artificial Sequence
  Description of Artificial Sequence: Synthetic oligonucleotide
ccuucguugggcccgguau

SEQ ID NO: 469033 - RNA, 19 nt, Artificial Sequence
  Description of Artificial Sequence: Synthetic oligonucleotide
cgguaucugcuugaugcuc

SEQ ID NO: 469034 - RNA, 19 nt, Artificial Sequence
  Description of Artificial Sequence: Synthetic oligonucleotide
caguagggcugcccaggua

SEQ ID NO: 469035 - RNA, 19 nt, Artificial Sequence
  Description of Artificial Sequence: Synthetic oligonucleotide
ccucgaugcaagauuugau

SEQ ID NO: 469036 - RNA, 19 nt, Artificial Sequence
  Description of Artificial Sequence: Synthetic oligonucleotide
ccguaauagguccccucaa

SEQ ID NO: 469037 - RNA, 19 nt, Artificial Sequence
  Description of Artificial Sequence: Synthetic oligonucleotide
ccacgcaagcugcuauaga

SEQ ID NO: 469038 - RNA, 19 nt, Artificial Sequence
  Description of Artificial Sequence: Synthetic oligonucleotide
cgcaacaaaccuacacugu

SEQ ID NO: 469039 - RNA, 19 nt, Artificial Sequence
  Description of Artificial Sequence: Synthetic oligonucleotide
cucccacguccuucaucaa

SEQ ID NO: 469040 - RNA, 19 nt, Artificial Sequence
  Description of Artificial Sequence: Synthetic oligonucleotide
cacgccacgcaagcugcua

SEQ ID NO: 469041 - RNA, 19 nt, Artificial Sequence
  Description of Artificial Sequence: Synthetic oligonucleotide
gggccucgaugcaagauuu

SEQ ID NO: 469042 - RNA, 19 nt, Artificial Sequence
  Description of Artificial Sequence: Synthetic oligonucleotide
ccauagcgacacucuccca

SEQ ID NO: 469043 - RNA, 19 nt, Artificial Sequence
  Description of Artificial Sequence: Synthetic oligonucleotide
ccgguaucugcuugaugcu

SEQ ID NO: 469044 - RNA, 19 nt, Artificial Sequence
  Description of Artificial Sequence: Synthetic oligonucleotide
gcacgccuuguugcucaug

SEQ ID NO: 469045 - RNA, 19 nt, Artificial Sequence
  Description of Artificial Sequence: Synthetic oligonucleotide
ccgggacgccgcagccucc

SEQ ID NO: 469046 - RNA, 19 nt, Artificial Sequence
  Description of Artificial Sequence: Synthetic oligonucleotide
ccccuauccuuggacccca

SEQ ID NO: 469047 - RNA, 19 nt, Artificial Sequence
  Description of Artificial Sequence: Synthetic oligonucleotide
cuccgccauuacuguuuau

SEQ ID NO: 469048 - RNA, 19 nt, Artificial Sequence
  Description of Artificial Sequence: Synthetic oligonucleotide
cgccacgcaagcugcuaua

SEQ ID NO: 469049 - RNA, 19 nt, Artificial Sequence
  Description of Artificial Sequence: Synthetic oligonucleotide
ccuccguaauagguccccu

SEQ ID NO: 469050 - RNA, 19 nt, Artificial Sequence
  Description of Artificial Sequence: Synthetic oligonucleotide
cccuauccuuggaccccaa

SEQ ID NO: 469051 - RNA, 19 nt, Artificial Sequence
  Description of Artificial Sequence: Synthetic oligonucleotide
gcgccacagcuggcuccuu

SEQ ID NO: 469052 - RNA, 19 nt, Artificial Sequence
  Description of Artificial Sequence: Synthetic oligonucleotide
uccaaaauggaauaaaggc

SEQ ID NO: 469053 - RNA, 19 nt, Artificial Sequence
  Description of Artificial Sequence: Synthetic oligonucleotide
acuuccaucgccuaagucg

SEQ ID NO: 469054 - RNA, 19 nt, Artificial Sequence
  Description of Artificial Sequence: Synthetic oligonucleotide
uggaccauaaccaugcucc

SEQ ID NO: 469055 - RNA, 19 nt, Artificial Sequence
  Description of Artificial Sequence: Synthetic oligonucleotide
acauauuaugcuuugaugu

SEQ ID NO: 469056 - RNA, 19 nt, Artificial Sequence
  Description of Artificial Sequence: Synthetic oligonucleotide
ugucuuaaaaucccaaccc

SEQ ID NO: 469057 - RNA, 19 nt, Artificial Sequence
  Description of Artificial Sequence: Synthetic oligonucleotide
aacauauuaugcuuugaug

SEQ ID NO: 469058 - RNA, 19 nt, Artificial Sequence
  Description of Artificial Sequence: Synthetic oligonucleotide
uaucucucagauuagaaca

SEQ ID NO: 469059 - RNA, 19 nt, Artificial Sequence
  Description of Artificial Sequence: Synthetic oligonucleotide
uccuuuaucucucagauua

SEQ ID NO: 469060 - RNA, 19 nt, Artificial Sequence
  Description of Artificial Sequence: Synthetic oligonucleotide
aaugcucuggagugcaagc

SEQ ID NO: 469061 - RNA, 19 nt, Artificial Sequence
  Description of Artificial Sequence: Synthetic oligonucleotide
auaaccaugcuccaaacca

SEQ ID NO: 469062 - RNA, 19 nt, Artificial Sequence
  Description of Artificial Sequence: Synthetic oligonucleotide
auacaaaccuuccaaaaug

SEQ ID NO: 469063 - RNA, 19 nt, Artificial Sequence
  Description of Artificial Sequence: Synthetic oligonucleotide
agcuaaaggagacuguuuc

SEQ ID NO: 469064 - RNA, 19 nt, Artificial Sequence
  Description of Artificial Sequence: Synthetic oligonucleotide
agugcaagcaaacaagaug

SEQ ID NO: 469065 - RNA, 19 nt, Artificial Sequence
  Description of Artificial Sequence: Synthetic oligonucleotide
agcacaucgaaagaguagc

SEQ ID NO: 469066 - RNA, 19 nt, Artificial Sequence
  Description of Artificial Sequence: Synthetic oligonucleotide
gagaaaucgagccugcagc

SEQ ID NO: 469067 - RNA, 19 nt, Artificial Sequence
  Description of Artificial Sequence: Synthetic oligonucleotide
ucagauuagaacaaacaua

SEQ ID NO: 469068 - RNA, 19 nt, Artificial Sequence
  Description of Artificial Sequence: Synthetic oligonucleotide
acuagucuagaacacuaac

SEQ ID NO: 469069 - RNA, 19 nt, Artificial Sequence
  Description of Artificial Sequence: Synthetic oligonucleotide
uguacuucgagagacugag

SEQ ID NO: 469070 - RNA, 19 nt, Artificial Sequence
  Description of Artificial Sequence: Synthetic oligonucleotide
uggagugcaagcaaacaag

SEQ ID NO: 469071 - RNA, 19 nt, Artificial Sequence
  Description of Artificial Sequence: Synthetic oligonucleotide
aaaucgagccugcagcgag

SEQ ID NO: 469072 - RNA, 19 nt, Artificial Sequence
  Description of Artificial Sequence: Synthetic oligonucleotide
acccuagcacaccagaacc

SEQ ID NO: 469073 - RNA, 19 nt, Artificial Sequence
  Description of Artificial Sequence: Synthetic oligonucleotide
uggaggacgagaaaucgag

SEQ ID NO: 469074 - RNA, 19 nt, Artificial Sequence
  Description of Artificial Sequence: Synthetic oligonucleotide
uggccuaucauaauuugca

SEQ ID NO: 469075 - RNA, 19 nt, Artificial Sequence
  Description of Artificial Sequence: Synthetic oligonucleotide
uccugaauggcacaacuca

SEQ ID NO: 469076 - RNA, 19 nt, Artificial Sequence
  Description of Artificial Sequence: Synthetic oligonucleotide
ugcaaaaucccagaaggag

SEQ ID NO: 469077 - RNA, 19 nt, Artificial Sequence
  Description of Artificial Sequence: Synthetic oligonucleotide
cuuugugagacacccaacc

SEQ ID NO: 469078 - RNA, 19 nt, Artificial Sequence
  Description of Artificial Sequence: Synthetic oligonucleotide
aaacaagaugaucaguuuu

SEQ ID NO: 469079 - RNA, 19 nt, Artificial Sequence
  Description of Artificial Sequence: Synthetic oligonucleotide
auuguuucggacaggaagg

SEQ ID NO: 469080 - RNA, 19 nt, Artificial Sequence
  Description of Artificial Sequence: Synthetic oligonucleotide
aacuccaagguaaugagga

SEQ ID NO: 469081 - RNA, 19 nt, Artificial Sequence
  Description of Artificial Sequence: Synthetic oligonucleotide
agaaaucgagccugcagcg

SEQ ID NO: 469082 - RNA, 19 nt, Artificial Sequence
  Description of Artificial Sequence: Synthetic oligonucleotide
cacuaacucacacagcucc

SEQ ID NO: 469083 - RNA, 19 nt, Artificial Sequence
  Description of Artificial Sequence: Synthetic oligonucleotide
aaauuggaggacgagaaau

SEQ ID NO: 469084 - RNA, 19 nt, Artificial Sequence
  Description of Artificial Sequence: Synthetic oligonucleotide
uuuuacuagucuagaacac

SEQ ID NO: 469085 - RNA, 19 nt, Artificial Sequence
  Description of Artificial Sequence: Synthetic oligonucleotide
ugguguuggaagcccaucg

SEQ ID NO: 469086 - RNA, 19 nt, Artificial Sequence
  Description of Artificial Sequence: Synthetic oligonucleotide
aagguaaugaggagucagc

SEQ ID NO: 469087 - RNA, 19 nt, Artificial Sequence
  Description of Artificial Sequence: Synthetic oligonucleotide
uccccuuuaggccagagaa

SEQ ID NO: 469088 - RNA, 19 nt, Artificial Sequence
  Description of Artificial Sequence: Synthetic oligonucleotide
uuuguagauccccaguggu

SEQ ID NO: 469089 - RNA, 19 nt, Artificial Sequence
  Description of Artificial Sequence: Synthetic oligonucleotide
ucuuaaaaucccaacccaa

SEQ ID NO: 469090 - RNA, 19 nt, Artificial Sequence
  Description of Artificial Sequence: Synthetic oligonucleotide
uuucggacaggaaggagcc

SEQ ID NO: 469091 - RNA, 19 nt, Artificial Sequence
  Description of Artificial Sequence: Synthetic oligonucleotide
aguuuacuuaguccccacc

SEQ ID NO: 469092 - RNA, 19 nt, Artificial Sequence
  Description of Artificial Sequence: Synthetic oligonucleotide
guuuacuuaguccccaccc

SEQ ID NO: 469093 - RNA, 19 nt, Artificial Sequence
  Description of Artificial Sequence: Synthetic oligonucleotide
cuuguaucucccuuucucc

SEQ ID NO: 469094 - RNA, 19 nt, Artificial Sequence
  Description of Artificial Sequence: Synthetic oligonucleotide
uguuugagcucacggaucu

SEQ ID NO: 469095 - RNA, 19 nt, Artificial Sequence
  Description of Artificial Sequence: Synthetic oligonucleotide
uuuacuuaguccccaccca

SEQ ID NO: 469096 - RNA, 19 nt, Artificial Sequence
  Description of Artificial Sequence: Synthetic oligonucleotide
uguagauccccaguggucc

SEQ ID NO: 469097 - RNA, 19 nt, Artificial Sequence
  Description of Artificial Sequence: Synthetic oligonucleotide
ugggaauucgguuucuucu

SEQ ID NO: 469098 - RNA, 19 nt, Artificial Sequence
  Description of Artificial Sequence: Synthetic oligonucleotide
uaaccaugcuccaaaccag

SEQ ID NO: 469099 - RNA, 19 nt, Artificial Sequence
  Description of Artificial Sequence: Synthetic oligonucleotide
agguaaugaggagucagcc

SEQ ID NO: 469100 - RNA, 19 nt, Artificial Sequence
  Description of Artificial Sequence: Synthetic oligonucleotide
cuuccaucgccuaagucgc

SEQ ID NO: 469101 - RNA, 19 nt, Artificial Sequence
  Description of Artificial Sequence: Synthetic oligonucleotide
cugagaaugcucuggagug

SEQ ID NO: 469102 - RNA, 19 nt, Artificial Sequence
  Description of Artificial Sequence: Synthetic oligonucleotide
auauuaugcuuugauguag

SEQ ID NO: 469103 - RNA, 19 nt, Artificial Sequence
  Description of Artificial Sequence: Synthetic oligonucleotide
auuucggccugucuuggcg

SEQ ID NO: 469104 - RNA, 19 nt, Artificial Sequence
  Description of Artificial Sequence: Synthetic oligonucleotide
uccgaguccaggaagcagc

SEQ ID NO: 469105 - RNA, 19 nt, Artificial Sequence
  Description of Artificial Sequence: Synthetic oligonucleotide
auacgauccagccagcccu

SEQ ID NO: 469106 - RNA, 19 nt, Artificial Sequence
  Description of Artificial Sequence: Synthetic oligonucleotide
ucgaacaggagcucuaggu

SEQ ID NO: 469107 - RNA, 19 nt, Artificial Sequence
  Description of Artificial Sequence: Synthetic oligonucleotide
uuuucaccuacccuagcac

SEQ ID NO: 469108 - RNA, 19 nt, Artificial Sequence
  Description of Artificial Sequence: Synthetic oligonucleotide
uuacuagucuagaacacua

SEQ ID NO: 469109 - RNA, 19 nt, Artificial Sequence
  Description of Artificial Sequence: Synthetic oligonucleotide
cagggagcaauucaggcag

SEQ ID NO: 469110 - RNA, 19 nt, Artificial Sequence
  Description of Artificial Sequence: Synthetic oligonucleotide
aucugcaaaaucccagaag

SEQ ID NO: 469111 - RNA, 19 nt, Artificial Sequence
  Description of Artificial Sequence: Synthetic oligonucleotide
uuuacuagucuagaacacu

SEQ ID NO: 469112 - RNA, 19 nt, Artificial Sequence
  Description of Artificial Sequence: Synthetic oligonucleotide
gaaggaccgugucauaccc

SEQ ID NO: 469113 - RNA, 19 nt, Artificial Sequence
  Description of Artificial Sequence: Synthetic oligonucleotide
acuguuucgaacaggagcu

SEQ ID NO: 469114 - RNA, 19 nt, Artificial Sequence
  Description of Artificial Sequence: Synthetic oligonucleotide
aacuuccaucgccuaaguc

SEQ ID NO: 469115 - RNA, 19 nt, Artificial Sequence
  Description of Artificial Sequence: Synthetic oligonucleotide
accacaccgucucugacuc

SEQ ID NO: 469116 - RNA, 19 nt, Artificial Sequence
  Description of Artificial Sequence: Synthetic oligonucleotide
cagauuagaacaaacauau

SEQ ID NO: 469117 - RNA, 19 nt, Artificial Sequence
  Description of Artificial Sequence: Synthetic oligonucleotide
aaacuccaagguaaugagg

SEQ ID NO: 469118 - RNA, 19 nt, Artificial Sequence
  Description of Artificial Sequence: Synthetic oligonucleotide
uuucaccuacccuagcaca

SEQ ID NO: 469119 - RNA, 19 nt, Artificial Sequence
  Description of Artificial Sequence: Synthetic oligonucleotide
uggcguggaaaaugcagcg

SEQ ID NO: 469120 - RNA, 19 nt, Artificial Sequence
  Description of Artificial Sequence: Synthetic oligonucleotide
gaacaggagcucuagguuc

SEQ ID NO: 469121 - RNA, 19 nt, Artificial Sequence
  Description of Artificial Sequence: Synthetic oligonucleotide
ugcacucccaagcuuugag

SEQ ID NO: 469122 - RNA, 19 nt, Artificial Sequence
  Description of Artificial Sequence: Synthetic oligonucleotide
cuaccacugucuuaaaauc

SEQ ID NO: 469123 - RNA, 19 nt, Artificial Sequence
  Description of Artificial Sequence: Synthetic oligonucleotide
ugguuuucaccuacccuag

SEQ ID NO: 469124 - RNA, 19 nt, Artificial Sequence
  Description of Artificial Sequence: Synthetic oligonucleotide
guuucggacaggaaggagc

SEQ ID NO: 469125 - RNA, 19 nt, Artificial Sequence
  Description of Artificial Sequence: Synthetic oligonucleotide
cauaaccaugcuccaaacc

SEQ ID NO: 469126 - RNA, 19 nt, Artificial Sequence
  Description of Artificial Sequence: Synthetic oligonucleotide
ugcucuaccacugucuuaa

SEQ ID NO: 469127 - RNA, 19 nt, Artificial Sequence
  Description of Artificial Sequence: Synthetic oligonucleotide
cauuguuucucuagagcug

SEQ ID NO: 469128 - RNA, 19 nt, Artificial Sequence
  Description of Artificial Sequence: Synthetic oligonucleotide
uucgagagacugagaaugc

SEQ ID NO: 469129 - RNA, 19 nt, Artificial Sequence
  Description of Artificial Sequence: Synthetic oligonucleotide
uccuaucuuaaggacuggg

SEQ ID NO: 469130 - RNA, 19 nt, Artificial Sequence
  Description of Artificial Sequence: Synthetic oligonucleotide
uucccauggggaaucacac

SEQ ID NO: 469131 - RNA, 19 nt, Artificial Sequence
  Description of Artificial Sequence: Synthetic oligonucleotide
uuacuuaguccccacccaa

SEQ ID NO: 469132 - RNA, 19 nt, Artificial Sequence
  Description of Artificial Sequence: Synthetic oligonucleotide
cacgcucaugaccacaccg

SEQ ID NO: 469133 - RNA, 19 nt, Artificial Sequence
  Description of Artificial Sequence: Synthetic oligonucleotide
uacccuagcacaccagaac

SEQ ID NO: 469134 - RNA, 19 nt, Artificial Sequence
  Description of Artificial Sequence: Synthetic oligonucleotide
cuggccuaucauaauuugc

SEQ ID NO: 469135 - RNA, 19 nt, Artificial Sequence
  Description of Artificial Sequence: Synthetic oligonucleotide
accgacaaauuggaggacg

SEQ ID NO: 469136 - RNA, 19 nt, Artificial Sequence
  Description of Artificial Sequence: Synthetic oligonucleotide
gaccgugucauacccuucc

SEQ ID NO: 469137 - RNA, 19 nt, Artificial Sequence
  Description of Artificial Sequence: Synthetic oligonucleotide
ugcuauuuauuuuccuaaa

SEQ ID NO: 469138 - RNA, 19 nt, Artificial Sequence
  Description of Artificial Sequence: Synthetic oligonucleotide
uuggaggacgagaaaucga

SEQ ID NO: 469139 - RNA, 19 nt, Artificial Sequence
  Description of Artificial Sequence: Synthetic oligonucleotide
ucugaguugucauguugga

SEQ ID NO: 469140 - RNA, 19 nt, Artificial Sequence
  Description of Artificial Sequence: Synthetic oligonucleotide
acaaauuggaggacgagaa

SEQ ID NO: 469141 - RNA, 19 nt, Artificial Sequence
  Description of Artificial Sequence: Synthetic oligonucleotide
guuuucaccuacccuagca

SEQ ID NO: 469142 - RNA, 19 nt, Artificial Sequence
  Description of Artificial Sequence: Synthetic oligonucleotide
cauacgauccagccagccc

SEQ ID NO: 469143 - RNA, 19 nt, Artificial Sequence
  Description of Artificial Sequence: Synthetic oligonucleotide
agcuguuugagcucacgga

SEQ ID NO: 469144 - RNA, 19 nt, Artificial Sequence
  Description of Artificial Sequence: Synthetic oligonucleotide
uccagccagcccuacaccc

SEQ ID NO: 469145 - RNA, 19 nt, Artificial Sequence
  Description of Artificial Sequence: Synthetic oligonucleotide
guuggaagcccaucgcccc

SEQ ID NO: 469146 - RNA, 19 nt, Artificial Sequence
  Description of Artificial Sequence: Synthetic oligonucleotide
gcuaaaggagacuguuucg

SEQ ID NO: 469147 - RNA, 19 nt, Artificial Sequence
  Description of Artificial Sequence: Synthetic oligonucleotide
uuggacuuuugacauucuc

SEQ ID NO: 469148 - RNA, 19 nt, Artificial Sequence
  Description of Artificial Sequence: Synthetic oligonucleotide
aagcucuagucugaguugu

SEQ ID NO: 469149 - RNA, 19 nt, Artificial Sequence
  Description of Artificial Sequence: Synthetic oligonucleotide
uccuuuuacuagucuagaa

SEQ ID NO: 469150 - RNA, 19 nt, Artificial Sequence
  Description of Artificial Sequence: Synthetic oligonucleotide
aucugaagaauggggcuac

SEQ ID NO: 469151 - RNA, 19 nt, Artificial Sequence
  Description of Artificial Sequence: Synthetic oligonucleotide
ucuagagcuggccuaucau

SEQ ID NO: 469152 - RNA, 19 nt, Artificial Sequence
  Description of Artificial Sequence: Synthetic oligonucleotide
cuagguuccagucucagcu

SEQ ID NO: 469153 - RNA, 19 nt, Artificial Sequence
  Description of Artificial Sequence: Synthetic oligonucleotide
uacuagucuagaacacuaa

SEQ ID NO: 469154 - RNA, 19 nt, Artificial Sequence
  Description of Artificial Sequence: Synthetic oligonucleotide
uuucgaacaggagcucuag

SEQ ID NO: 469155 - RNA, 19 nt, Artificial Sequence
  Description of Artificial Sequence: Synthetic oligonucleotide
uuguagauccccagugguc

SEQ ID NO: 469156 - RNA, 19 nt, Artificial Sequence
  Description of Artificial Sequence: Synthetic oligonucleotide
aucgccuaagucgcggggc

SEQ ID NO: 469157 - RNA, 19 nt, Artificial Sequence
  Description of Artificial Sequence: Synthetic oligonucleotide
cuggcggccuuccagcucg

SEQ ID NO: 469158 - RNA, 19 nt, Artificial Sequence
  Description of Artificial Sequence: Synthetic oligonucleotide
gguaaugaggagucagccc

SEQ ID NO: 469159 - RNA, 19 nt, Artificial Sequence
  Description of Artificial Sequence: Synthetic oligonucleotide
uaccccagccuccuuuucc

SEQ ID NO: 469160 - RNA, 19 nt, Artificial Sequence
  Description of Artificial Sequence: Synthetic oligonucleotide
acccacgccaagucccucc

SEQ ID NO: 469161 - RNA, 19 nt, Artificial Sequence
  Description of Artificial Sequence: Synthetic oligonucleotide
cuuccaggguauccaagcc

SEQ ID NO: 469162 - RNA, 19 nt, Artificial Sequence
  Description of Artificial Sequence: Synthetic oligonucleotide
cacaucgaaagaguagcag

SEQ ID NO: 469163 - RNA, 19 nt, Artificial Sequence
  Description of Artificial Sequence: Synthetic oligonucleotide
uacuuaguccccacccaac

SEQ ID NO: 469164 - RNA, 19 nt, Artificial Sequence
  Description of Artificial Sequence: Synthetic oligonucleotide
agcgagagauugaagagcu

SEQ ID NO: 469165 - RNA, 19 nt, Artificial Sequence
  Description of Artificial Sequence: Synthetic oligonucleotide
uccccagugguccuuugga

SEQ ID NO: 469166 - RNA, 19 nt, Artificial Sequence
  Description of Artificial Sequence: Synthetic oligonucleotide
cauauuaugcuuugaugua

SEQ ID NO: 469167 - RNA, 19 nt, Artificial Sequence
  Description of Artificial Sequence: Synthetic oligonucleotide
uguuucgaacaggagcucu

SEQ ID NO: 469168 - RNA, 19 nt, Artificial Sequence
  Description of Artificial Sequence: Synthetic oligonucleotide
cuucccaguuuacuuaguc

SEQ ID NO: 469169 - RNA, 19 nt, Artificial Sequence
  Description of Artificial Sequence: Synthetic oligonucleotide
uucaggggccggauuucgg

SEQ ID NO: 469170 - RNA, 19 nt, Artificial Sequence
  Description of Artificial Sequence: Synthetic oligonucleotide
uuggauccagaagcuaaag

SEQ ID NO: 469171 - RNA, 19 nt, Artificial Sequence
  Description of Artificial Sequence: Synthetic oligonucleotide
uugaaccugaagcccugca

SEQ ID NO: 469172 - RNA, 19 nt, Artificial Sequence
  Description of Artificial Sequence: Synthetic oligonucleotide
ugagaaugcucuggagugc

SEQ ID NO: 469173 - RNA, 19 nt, Artificial Sequence
  Description of Artificial Sequence: Synthetic oligonucleotide
cacucucaugcuaugucac

SEQ ID NO: 469174 - RNA, 19 nt, Artificial Sequence
  Description of Artificial Sequence: Synthetic oligonucleotide
uccuuaagcgccagguuuu

SEQ ID NO: 469175 - RNA, 19 nt, Artificial Sequence
  Description of Artificial Sequence: Synthetic oligonucleotide
uccaucgccuaagucgcgg

SEQ ID NO: 469176 - RNA, 19 nt, Artificial Sequence
  Description of Artificial Sequence: Synthetic oligonucleotide
agcccuuagucugcagucc

SEQ ID NO: 469177 - RNA, 19 nt, Artificial Sequence
  Description of Artificial Sequence: Synthetic oligonucleotide
aguggcgaccccuccuccg

SEQ ID NO: 469178 - RNA, 19 nt, Artificial Sequence
  Description of Artificial Sequence: Synthetic oligonucleotide
auggcacaacucaggaggc

SEQ ID NO: 469179 - RNA, 19 nt, Artificial Sequence
  Description of Artificial Sequence: Synthetic oligonucleotide
uguuucggacaggaaggag

SEQ ID NO: 469180 - RNA, 19 nt, Artificial Sequence
  Description of Artificial Sequence: Synthetic oligonucleotide
ucauacgauccagccagcc

SEQ ID NO: 469181 - RNA, 19 nt, Artificial Sequence
  Description of Artificial Sequence: Synthetic oligonucleotide
gacuuuugacauucucauc

SEQ ID NO: 469182 - RNA, 19 nt, Artificial Sequence
  Description of Artificial Sequence: Synthetic oligonucleotide
aucgaaagaguagcagcag

SEQ ID NO: 469183 - RNA, 19 nt, Artificial Sequence
  Description of Artificial Sequence: Synthetic oligonucleotide
cagcgagagauugaagagc

SEQ ID NO: 469184 - RNA, 19 nt, Artificial Sequence
  Description of Artificial Sequence: Synthetic oligonucleotide
uaaggugcucuaccacugu

SEQ ID NO: 469185 - RNA, 19 nt, Artificial Sequence
  Description of Artificial Sequence: Synthetic oligonucleotide
ucgggagugggcccggcgc

SEQ ID NO: 469186 - RNA, 19 nt, Artificial Sequence
  Description of Artificial Sequence: Synthetic oligonucleotide
cacgccaagucccuccacc

SEQ ID NO: 469187 - RNA, 19 nt, Artificial Sequence
  Description of Artificial Sequence: Synthetic oligonucleotide
ggagauaaggacacaggug

SEQ ID NO: 469188 - RNA, 19 nt, Artificial Sequence
  Description of Artificial Sequence: Synthetic oligonucleotide
gcuagcuucugccaacagc

SEQ ID NO: 469189 - RNA, 19 nt, Artificial Sequence
  Description of Artificial Sequence: Synthetic oligonucleotide
ucgccuaagucgcggggcc

SEQ ID NO: 469190 - RNA, 19 nt, Artificial Sequence
  Description of Artificial Sequence: Synthetic oligonucleotide
ggggauaaggugcucuacc

SEQ ID NO: 469191 - RNA, 19 nt, Artificial Sequence
  Description of Artificial Sequence: Synthetic oligonucleotide
agacaaaauauguccccuu

SEQ ID NO: 469192 - RNA, 19 nt, Artificial Sequence
  Description of Artificial Sequence: Synthetic oligonucleotide
aggagcucuagguuccagu

SEQ ID NO: 469193 - RNA, 19 nt, Artificial Sequence
  Description of Artificial Sequence: Synthetic oligonucleotide
acucucaugcuaugucacu

SEQ ID NO: 469194 - RNA, 19 nt, Artificial Sequence
  Description of Artificial Sequence: Synthetic oligonucleotide
cuguuugagcucacggauc

SEQ ID NO: 469195 - RNA, 19 nt, Artificial Sequence
  Description of Artificial Sequence: Synthetic oligonucleotide
aagucgcggggcccgcacg

SEQ ID NO: 469196 - RNA, 19 nt, Artificial Sequence
  Description of Artificial Sequence: Synthetic oligonucleotide
cagcuaccaggucuggagg

SEQ ID NO: 469197 - RNA, 19 nt, Artificial Sequence
  Description of Artificial Sequence: Synthetic oligonucleotide
ugcacgccguccccgcugg

SEQ ID NO: 469198 - RNA, 19 nt, Artificial Sequence
  Description of Artificial Sequence: Synthetic oligonucleotide
uaaaggcuugaagcucuag

SEQ ID NO: 469199 - RNA, 19 nt, Artificial Sequence
  Description of Artificial Sequence: Synthetic oligonucleotide
gauuucggccugucuuggc

SEQ ID NO: 469200 - RNA, 19 nt, Artificial Sequence
  Description of Artificial Sequence: Synthetic oligonucleotide
cagcugcuauuuauuuucc

SEQ ID NO: 469201 - RNA, 19 nt, Artificial Sequence
  Description of Artificial Sequence: Synthetic oligonucleotide
cugcuccuaucuuaaggac

SEQ ID NO: 469202 - RNA, 19 nt, Artificial Sequence
  Description of Artificial Sequence: Synthetic oligonucleotide
agucugguuuucaccuacc

SEQ ID NO: 469203 - RNA, 19 nt, Artificial Sequence
  Description of Artificial Sequence: Synthetic oligonucleotide
cacccaaccacaccccuug

SEQ ID NO: 469204 - RNA, 19 nt, Artificial Sequence
  Description of Artificial Sequence: Synthetic oligonucleotide
cuggagugcaagcaaacaa

SEQ ID NO: 469205 - RNA, 19 nt, Artificial Sequence
  Description of Artificial Sequence: Synthetic oligonucleotide
ccaagccuccacaucaagg

SEQ ID NO: 469206 - RNA, 19 nt, Artificial Sequence
  Description of Artificial Sequence: Synthetic oligonucleotide
agguuccagucucagcugu

SEQ ID NO: 469207 - RNA, 19 nt, Artificial Sequence
  Description of Artificial Sequence: Synthetic oligonucleotide
gagaaugcucuggagugca

SEQ ID NO: 469208 - RNA, 19 nt, Artificial Sequence
  Description of Artificial Sequence: Synthetic oligonucleotide
cuccugaauggcacaacuc

SEQ ID NO: 469209 - RNA, 19 nt, Artificial Sequence
  Description of Artificial Sequence: Synthetic oligonucleotide
cauacccuuccaccuuccg

SEQ ID NO: 469210 - RNA, 19 nt, Artificial Sequence
  Description of Artificial Sequence: Synthetic oligonucleotide
gcaggccuggaccauaacc

SEQ ID NO: 469211 - RNA, 19 nt, Artificial Sequence
  Description of Artificial Sequence: Synthetic oligonucleotide
gcuccuaucuuaaggacug

SEQ ID NO: 469212 - RNA, 19 nt, Artificial Sequence
  Description of Artificial Sequence: Synthetic oligonucleotide
guccauaccagggcccugg

SEQ ID NO: 469213 - RNA, 19 nt, Artificial Sequence
  Description of Artificial Sequence: Synthetic oligonucleotide
accugaagcccugcacacc

SEQ ID NO: 469214 - RNA, 19 nt, Artificial Sequence
  Description of Artificial Sequence: Synthetic oligonucleotide
ucgagagacugagaaugcu

SEQ ID NO: 469215 - RNA, 19 nt, Artificial Sequence
  Description of Artificial Sequence: Synthetic oligonucleotide
agcgacagggcauccugca

SEQ ID NO: 469216 - RNA, 19 nt, Artificial Sequence
  Description of Artificial Sequence: Synthetic oligonucleotide
gucuuggcgcccauugggg

SEQ ID NO: 469217 - RNA, 19 nt, Artificial Sequence
  Description of Artificial Sequence: Synthetic oligonucleotide
agucgcggggcccgcacgg

SEQ ID NO: 469218 - RNA, 19 nt, Artificial Sequence
  Description of Artificial Sequence: Synthetic oligonucleotide
aggaccgugucauacccuu

SEQ ID NO: 469219 - RNA, 19 nt, Artificial Sequence
  Description of Artificial Sequence: Synthetic oligonucleotide
gguguuggaagcccaucgc

SEQ ID NO: 469220 - RNA, 19 nt, Artificial Sequence
  Description of Artificial Sequence: Synthetic oligonucleotide
caauucaggcaggcguugg

SEQ ID NO: 469221 - RNA, 19 nt, Artificial Sequence
  Description of Artificial Sequence: Synthetic oligonucleotide
uuccaucgccuaagucgcg

SEQ ID NO: 469222 - RNA, 19 nt, Artificial Sequence
  Description of Artificial Sequence: Synthetic oligonucleotide
gugggaauucgguuucuuc

SEQ ID NO: 469223 - RNA, 19 nt, Artificial Sequence
  Description of Artificial Sequence: Synthetic oligonucleotide
uucgcccagugccaggcaa

SEQ ID NO: 469224 - RNA, 19 nt, Artificial Sequence
  Description of Artificial Sequence: Synthetic oligonucleotide
caucgccuaagucgcgggg

SEQ ID NO: 469225 - RNA, 19 nt, Artificial Sequence
  Description of Artificial Sequence: Synthetic oligonucleotide
cgugucauacccuuccacc

SEQ ID NO: 469226 - RNA, 19 nt, Artificial Sequence
  Description of Artificial Sequence: Synthetic oligonucleotide
cagcccuuagucugcaguc

SEQ ID NO: 469227 - RNA, 19 nt, Artificial Sequence
  Description of Artificial Sequence: Synthetic oligonucleotide
ggacgagaaaucgagccug

SEQ ID NO: 469228 - RNA, 19 nt, Artificial Sequence
  Description of Artificial Sequence: Synthetic oligonucleotide
gucauacccuuccaccuuc

SEQ ID NO: 469229 - RNA, 19 nt, Artificial Sequence
  Description of Artificial Sequence: Synthetic oligonucleotide
ggauaaggugcucuaccac

SEQ ID NO: 469230 - RNA, 19 nt, Artificial Sequence
  Description of Artificial Sequence: Synthetic oligonucleotide
ucggcuagcuucugccaac

SEQ ID NO: 469231 - RNA, 19 nt, Artificial Sequence
  Description of Artificial Sequence: Synthetic oligonucleotide
aggggaaggaccgugucau

SEQ ID NO: 469232 - RNA, 19 nt, Artificial Sequence
  Description of Artificial Sequence: Synthetic oligonucleotide
ggcgccugagcccacugcg

SEQ ID NO: 469233 - RNA, 19 nt, Artificial Sequence
  Description of Artificial Sequence: Synthetic oligonucleotide
caguuuacuuaguccccac

SEQ ID NO: 469234 - RNA, 19 nt, Artificial Sequence
  Description of Artificial Sequence: Synthetic oligonucleotide
gagacaaaauauguccccu

SEQ ID NO: 469235 - RNA, 19 nt, Artificial Sequence
  Description of Artificial Sequence: Synthetic oligonucleotide
gcaaaaucccagaaggaga

SEQ ID NO: 469236 - RNA, 19 nt, Artificial Sequence
  Description of Artificial Sequence: Synthetic oligonucleotide
ucgcgcaccgcccgggaug

SEQ ID NO: 469237 - RNA, 19 nt, Artificial Sequence
  Description of Artificial Sequence: Synthetic oligonucleotide
cuugggucccgaacagcug

SEQ ID NO: 469238 - RNA, 19 nt, Artificial Sequence
  Description of Artificial Sequence: Synthetic oligonucleotide
ggagcuagagccacuucag

SEQ ID NO: 469239 - RNA, 19 nt, Artificial Sequence
  Description of Artificial Sequence: Synthetic oligonucleotide
uucucuagagcuggccuau

SEQ ID NO: 469240 - RNA, 19 nt, Artificial Sequence
  Description of Artificial Sequence: Synthetic oligonucleotide
accccuugcuggugcuacc

SEQ ID NO: 469241 - RNA, 19 nt, Artificial Sequence
  Description of Artificial Sequence: Synthetic oligonucleotide
gggauaaggugcucuacca

SEQ ID NO: 469242 - RNA, 19 nt, Artificial Sequence
  Description of Artificial Sequence: Synthetic oligonucleotide
gaagcuaaaggagacuguu

SEQ ID NO: 469243 - RNA, 19 nt, Artificial Sequence
  Description of Artificial Sequence: Synthetic oligonucleotide
cuuaguccccacccaacca

SEQ ID NO: 469244 - RNA, 19 nt, Artificial Sequence
  Description of Artificial Sequence: Synthetic oligonucleotide
cccgguaccuuguaucucc

SEQ ID NO: 469245 - RNA, 19 nt, Artificial Sequence
  Description of Artificial Sequence: Synthetic oligonucleotide
uaagucgcggggcccgcac

SEQ ID NO: 469246 - RNA, 19 nt, Artificial Sequence
  Description of Artificial Sequence: Synthetic oligonucleotide
ucccauggggaaucacacu

SEQ ID NO: 469247 - RNA, 19 nt, Artificial Sequence
  Description of Artificial Sequence: Synthetic oligonucleotide
gcugcuauuuauuuuccua

SEQ ID NO: 469248 - RNA, 19 nt, Artificial Sequence
  Description of Artificial Sequence: Synthetic oligonucleotide
cuuaagcgccagguuuucc

SEQ ID NO: 469249 - RNA, 19 nt, Artificial Sequence
  Description of Artificial Sequence: Synthetic oligonucleotide
acgccaagucccuccaccu

SEQ ID NO: 469250 - RNA, 19 nt, Artificial Sequence
  Description of Artificial Sequence: Synthetic oligonucleotide
agagcuggccuaucauaau

SEQ ID NO: 469251 - RNA, 19 nt, Artificial Sequence
  Description of Artificial Sequence: Synthetic oligonucleotide
ggagacuguuucgaacagg

SEQ ID NO: 469252 - RNA, 19 nt, Artificial Sequence
  Description of Artificial Sequence: Synthetic oligonucleotide
gguccuuuaucucucagau

SEQ ID NO: 469253 - RNA, 19 nt, Artificial Sequence
  Description of Artificial Sequence: Synthetic oligonucleotide
cucuagguuccagucucag

SEQ ID NO: 469254 - RNA, 19 nt, Artificial Sequence
  Description of Artificial Sequence: Synthetic oligonucleotide
ggccuaucauaauuugcac

SEQ ID NO: 469255 - RNA, 19 nt, Artificial Sequence
  Description of Artificial Sequence: Synthetic oligonucleotide
cuugaaccugaagcccugc

SEQ ID NO: 469256 - RNA, 19 nt, Artificial Sequence
  Description of Artificial Sequence: Synthetic oligonucleotide
uccgggugggaauucgguu

SEQ ID NO: 469257 - RNA, 19 nt, Artificial Sequence
  Description of Artificial Sequence: Synthetic oligonucleotide
aaucgagccugcagcgaga

SEQ ID NO: 469258 - RNA, 19 nt, Artificial Sequence
  Description of Artificial Sequence: Synthetic oligonucleotide
cuguacuucgagagacuga

SEQ ID NO: 469259 - RNA, 19 nt, Artificial Sequence
  Description of Artificial Sequence: Synthetic oligonucleotide
cucuagagcuggccuauca

SEQ ID NO: 469260 - RNA, 19 nt, Artificial Sequence
  Description of Artificial Sequence: Synthetic oligonucleotide
ggagugcaagcaaacaaga

SEQ ID NO: 469261 - RNA, 19 nt, Artificial Sequence
  Description of Artificial Sequence: Synthetic oligonucleotide
acuugaaccugaagcccug

SEQ ID NO: 469262 - RNA, 19 nt, Artificial Sequence
  Description of Artificial Sequence: Synthetic oligonucleotide
caaauuggaggacgagaaa

SEQ ID NO: 469263 - RNA, 19 nt, Artificial Sequence
  Description of Artificial Sequence: Synthetic oligonucleotide
gaccacaccgucucugacu

SEQ ID NO: 469264 - RNA, 19 nt, Artificial Sequence
  Description of Artificial Sequence: Synthetic oligonucleotide
ggaaaaugcagcgcccuca

SEQ ID NO: 469265 - RNA, 19 nt, Artificial Sequence
  Description of Artificial Sequence: Synthetic oligonucleotide
agguguccuuuuacuaguc

SEQ ID NO: 469266 - RNA, 19 nt, Artificial Sequence
  Description of Artificial Sequence: Synthetic oligonucleotide
caggcguuggcguggaaaa

SEQ ID NO: 469267 - RNA, 19 nt, Artificial Sequence
  Description of Artificial Sequence: Synthetic oligonucleotide
ggauuucggccugucuugg

SEQ ID NO: 469268 - RNA, 19 nt, Artificial Sequence
  Description of Artificial Sequence: Synthetic oligonucleotide
ggcguuggcguggaaaaug

SEQ ID NO: 469269 - RNA, 19 nt, Artificial Sequence
  Description of Artificial Sequence: Synthetic oligonucleotide
uggggcuaccucugcucug

SEQ ID NO: 469270 - RNA, 19 nt, Artificial Sequence
  Description of Artificial Sequence: Synthetic oligonucleotide
aggggccggauuucggccu

SEQ ID NO: 469271 - RNA, 19 nt, Artificial Sequence
  Description of Artificial Sequence: Synthetic oligonucleotide
cuacacccagacagguguc

SEQ ID NO: 469272 - RNA, 19 nt, Artificial Sequence
  Description of Artificial Sequence: Synthetic oligonucleotide
uacgauccagccagcccua

SEQ ID NO: 469273 - RNA, 19 nt, Artificial Sequence
  Description of Artificial Sequence: Synthetic oligonucleotide
aaggaccgugucauacccu

SEQ ID NO: 469274 - RNA, 19 nt, Artificial Sequence
  Description of Artificial Sequence: Synthetic oligonucleotide
acgcucaugaccacaccgu

SEQ ID NO: 469275 - RNA, 19 nt, Artificial Sequence
  Description of Artificial Sequence: Synthetic oligonucleotide
uccauaccagggcccuggu

SEQ ID NO: 469276 - RNA, 19 nt, Artificial Sequence
  Description of Artificial Sequence: Synthetic oligonucleotide
cucuaccacugucuuaaaa

SEQ ID NO: 469277 - RNA, 19 nt, Artificial Sequence
  Description of Artificial Sequence: Synthetic oligonucleotide
ggcacaacucaggaggcac

SEQ ID NO: 469278 - RNA, 19 nt, Artificial Sequence
  Description of Artificial Sequence: Synthetic oligonucleotide
cuccuaucuuaaggacugg

SEQ ID NO: 469279 - RNA, 19 nt, Artificial Sequence
  Description of Artificial Sequence: Synthetic oligonucleotide
gguuuucaccuacccuagc

SEQ ID NO: 469280 - RNA, 19 nt, Artificial Sequence
  Description of Artificial Sequence: Synthetic oligonucleotide
gcagcgcccucagucaucg

SEQ ID NO: 469281 - RNA, 19 nt, Artificial Sequence
  Description of Artificial Sequence: Synthetic oligonucleotide
uguccccuuuaggccagag

SEQ ID NO: 469282 - RNA, 19 nt, Artificial Sequence
  Description of Artificial Sequence: Synthetic oligonucleotide
cucgggagugggcccggcg

SEQ ID NO: 469283 - RNA, 19 nt, Artificial Sequence
  Description of Artificial Sequence: Synthetic oligonucleotide
ggguauccaagccuccaca

SEQ ID NO: 469284 - RNA, 19 nt, Artificial Sequence
  Description of Artificial Sequence: Synthetic oligonucleotide
agcuggccuaucauaauuu

SEQ ID NO: 469285 - RNA, 19 nt, Artificial Sequence
  Description of Artificial Sequence: Synthetic oligonucleotide
caucugaagaauggggcua

SEQ ID NO: 469286 - RNA, 19 nt, Artificial Sequence
  Description of Artificial Sequence: Synthetic oligonucleotide
gcccuuagucugcaguccc

SEQ ID NO: 469287 - RNA, 19 nt, Artificial Sequence
  Description of Artificial Sequence: Synthetic oligonucleotide
ugcagcgcccucagucauc

SEQ ID NO: 469288 - RNA, 19 nt, Artificial Sequence
  Description of Artificial Sequence: Synthetic oligonucleotide
agcucuagucugaguuguc

SEQ ID NO: 469289 - RNA, 19 nt, Artificial Sequence
  Description of Artificial Sequence: Synthetic oligonucleotide
aggcuaggggcaacugauc

SEQ ID NO: 469290 - RNA, 19 nt, Artificial Sequence
  Description of Artificial Sequence: Synthetic oligonucleotide
cagguguccuuuuacuagu

SEQ ID NO: 469291 - RNA, 19 nt, Artificial Sequence
  Description of Artificial Sequence: Synthetic oligonucleotide
accgucucugacucccuuu

SEQ ID NO: 469292 - RNA, 19 nt, Artificial Sequence
  Description of Artificial Sequence: Synthetic oligonucleotide
ucgccccaucugcaaaauc

SEQ ID NO: 469293 - RNA, 19 nt, Artificial Sequence
  Description of Artificial Sequence: Synthetic oligonucleotide
ccgguugagcuguuugagc

SEQ ID NO: 469294 - RNA, 19 nt, Artificial Sequence
  Description of Artificial Sequence: Synthetic oligonucleotide
caggggaaggaccguguca

SEQ ID NO: 469295 - RNA, 19 nt, Artificial Sequence
  Description of Artificial Sequence: Synthetic oligonucleotide
agauuagaacaaacauauu

SEQ ID NO: 469296 - RNA, 19 nt, Artificial Sequence
  Description of Artificial Sequence: Synthetic oligonucleotide
ggaggacgagaaaucgagc

SEQ ID NO: 469297 - RNA, 19 nt, Artificial Sequence
  Description of Artificial Sequence: Synthetic oligonucleotide
gguccucgcgcaccgcccg

SEQ ID NO: 469298 - RNA, 19 nt, Artificial Sequence
  Description of Artificial Sequence: Synthetic oligonucleotide
gaacuuccaucgccuaagu

SEQ ID NO: 469299 - RNA, 19 nt, Artificial Sequence
  Description of Artificial Sequence: Synthetic oligonucleotide
gaccgacaaauuggaggac

SEQ ID NO: 469300 - RNA, 19 nt, Artificial Sequence
  Description of Artificial Sequence: Synthetic oligonucleotide
agggagcaauucaggcagg

SEQ ID NO: 469301 - RNA, 19 nt, Artificial Sequence
  Description of Artificial Sequence: Synthetic oligonucleotide
cucggcuagcuucugccaa

SEQ ID NO: 469302 - RNA, 19 nt, Artificial Sequence
  Description of Artificial Sequence: Synthetic oligonucleotide
gccgguugagcuguuugag

SEQ ID NO: 469303 - RNA, 19 nt, Artificial Sequence
  Description of Artificial Sequence: Synthetic oligonucleotide
caucgccccaucugcaaaa

SEQ ID NO: 469304 - RNA, 19 nt, Artificial Sequence
  Description of Artificial Sequence: Synthetic oligonucleotide
guuucgaacaggagcucua

SEQ ID NO: 469305 - RNA, 19 nt, Artificial Sequence
  Description of Artificial Sequence: Synthetic oligonucleotide
gcguuggcguggaaaaugc

SEQ ID NO: 469306 - RNA, 19 nt, Artificial Sequence
  Description of Artificial Sequence: Synthetic oligonucleotide
ggagaccgacaaauuggag

SEQ ID NO: 469307 - RNA, 19 nt, Artificial Sequence
  Description of Artificial Sequence: Synthetic oligonucleotide
acgagaaaucgagccugca

SEQ ID NO: 469308 - RNA, 19 nt, Artificial Sequence
  Description of Artificial Sequence: Synthetic oligonucleotide
caccccuugcuggugcuac

SEQ ID NO: 469309 - RNA, 19 nt, Artificial Sequence
  Description of Artificial Sequence: Synthetic oligonucleotide
guaccuuguaucucccuuu

SEQ ID NO: 469310 - RNA, 19 nt, Artificial Sequence
  Description of Artificial Sequence: Synthetic oligonucleotide
ggcguggaaaaugcagcgc

SEQ ID NO: 469311 - RNA, 19 nt, Artificial Sequence
  Description of Artificial Sequence: Synthetic oligonucleotide
caguggcgaccccuccucc

SEQ ID NO: 469312 - RNA, 19 nt, Artificial Sequence
  Description of Artificial Sequence: Synthetic oligonucleotide
ucuccgcgcucagggagca

SEQ ID NO: 469313 - RNA, 19 nt, Artificial Sequence
  Description of Artificial Sequence: Synthetic oligonucleotide
acgauccagccagcccuac

SEQ ID NO: 469314 - RNA, 19 nt, Artificial Sequence
  Description of Artificial Sequence: Synthetic oligonucleotide
gcaagagcaagggcccucc

SEQ ID NO: 469315 - RNA, 19 nt, Artificial Sequence
  Description of Artificial Sequence: Synthetic oligonucleotide
cucuagucugaguugucau

SEQ ID NO: 469316 - RNA, 19 nt, Artificial Sequence
  Description of Artificial Sequence: Synthetic oligonucleotide
cccacgcucaugaccacac

SEQ ID NO: 469317 - RNA, 19 nt, Artificial Sequence
  Description of Artificial Sequence: Synthetic oligonucleotide
uggcgaccccuccuccgac

SEQ ID NO: 469318 - RNA, 19 nt, Artificial Sequence
  Description of Artificial Sequence: Synthetic oligonucleotide
ggaccauaaccaugcucca

SEQ ID NO: 469319 - RNA, 19 nt, Artificial Sequence
  Description of Artificial Sequence: Synthetic oligonucleotide
uucggacaggaaggagccu

SEQ ID NO: 469320 - RNA, 19 nt, Artificial Sequence
  Description of Artificial Sequence: Synthetic oligonucleotide
gggccuguacuugaaccug

SEQ ID NO: 469321 - RNA, 19 nt, Artificial Sequence
  Description of Artificial Sequence: Synthetic oligonucleotide
cggauuucggccugucuug

SEQ ID NO: 469322 - RNA, 19 nt, Artificial Sequence
  Description of Artificial Sequence: Synthetic oligonucleotide
guggcgaccccuccuccga

SEQ ID NO: 469323 - RNA, 19 nt, Artificial Sequence
  Description of Artificial Sequence: Synthetic oligonucleotide
guggaaaaugcagcgcccu

SEQ ID NO: 469324 - RNA, 19 nt, Artificial Sequence
  Description of Artificial Sequence: Synthetic oligonucleotide
gcgcccucagucaucgggg

SEQ ID NO: 469325 - RNA, 19 nt, Artificial Sequence
  Description of Artificial Sequence: Synthetic oligonucleotide
gcaauucaggcaggcguug

SEQ ID NO: 469326 - RNA, 19 nt, Artificial Sequence
  Description of Artificial Sequence: Synthetic oligonucleotide
gccuaagucgcggggcccg

SEQ ID NO: 469327 - RNA, 19 nt, Artificial Sequence
  Description of Artificial Sequence: Synthetic oligonucleotide
ccuacccuagcacaccaga

SEQ ID NO: 469328 - RNA, 19 nt, Artificial Sequence
  Description of Artificial Sequence: Synthetic oligonucleotide
caggguauccaagccucca

SEQ ID NO: 469329 - RNA, 19 nt, Artificial Sequence
  Description of Artificial Sequence: Synthetic oligonucleotide
ccgacaaauuggaggacga

SEQ ID NO: 469330 - RNA, 19 nt, Artificial Sequence
  Description of Artificial Sequence: Synthetic oligonucleotide
ucucuagagcuggccuauc

SEQ ID NO: 469331 - RNA, 19 nt, Artificial Sequence
  Description of Artificial Sequence: Synthetic oligonucleotide
cccauuguuucggacagga

SEQ ID NO: 469332 - RNA, 19 nt, Artificial Sequence
  Description of Artificial Sequence: Synthetic oligonucleotide
gcgccgguugagcuguuug

SEQ ID NO: 469333 - RNA, 19 nt, Artificial Sequence
  Description of Artificial Sequence: Synthetic oligonucleotide
guagauccccagugguccu

SEQ ID NO: 469334 - RNA, 19 nt, Artificial Sequence
  Description of Artificial Sequence: Synthetic oligonucleotide
cgcuccgaguccaggaagc

SEQ ID NO: 469335 - RNA, 19 nt, Artificial Sequence
  Description of Artificial Sequence: Synthetic oligonucleotide
caccgcccgggaugcuugg

SEQ ID NO: 469336 - RNA, 19 nt, Artificial Sequence
  Description of Artificial Sequence: Synthetic oligonucleotide
gguguccuuuuacuagucu

SEQ ID NO: 469337 - RNA, 19 nt, Artificial Sequence
  Description of Artificial Sequence: Synthetic oligonucleotide
ucggccugucuuggcgccc

SEQ ID NO: 469338 - RNA, 19 nt, Artificial Sequence
  Description of Artificial Sequence: Synthetic oligonucleotide
uagauccccagugguccuu

SEQ ID NO: 469339 - RNA, 19 nt, Artificial Sequence
  Description of Artificial Sequence: Synthetic oligonucleotide
aucgccccaucugcaaaau

SEQ ID NO: 469340 - RNA, 19 nt, Artificial Sequence
  Description of Artificial Sequence: Synthetic oligonucleotide
caccgcggggaccccacuc

SEQ ID NO: 469341 - RNA, 19 nt, Artificial Sequence
  Description of Artificial Sequence: Synthetic oligonucleotide
cccagucuuuguagauccc

SEQ ID NO: 469342 - RNA, 19 nt, Artificial Sequence
  Description of Artificial Sequence: Synthetic oligonucleotide
guacuucgagagacugaga

SEQ ID NO: 469343 - RNA, 19 nt, Artificial Sequence
  Description of Artificial Sequence: Synthetic oligonucleotide
gcagaccacucucaugcua

SEQ ID NO: 469344 - RNA, 19 nt, Artificial Sequence
  Description of Artificial Sequence: Synthetic oligonucleotide
ccgguaccuuguaucuccc

SEQ ID NO: 469345 - RNA, 19 nt, Artificial Sequence
  Description of Artificial Sequence: Synthetic oligonucleotide
ccgcccgguaccuuguauc

SEQ ID NO: 469346 - RNA, 19 nt, Artificial Sequence
  Description of Artificial Sequence: Synthetic oligonucleotide
ggcgaccccuccuccgacc

SEQ ID NO: 469347 - RNA, 19 nt, Artificial Sequence
  Description of Artificial Sequence: Synthetic oligonucleotide
cagucuccgcgcucaggga

SEQ ID NO: 469348 - RNA, 19 nt, Artificial Sequence
  Description of Artificial Sequence: Synthetic oligonucleotide
agcucgggagugggcccgg

SEQ ID NO: 469349 - RNA, 19 nt, Artificial Sequence
  Description of Artificial Sequence: Synthetic oligonucleotide
cuccgggugggaauucggu

SEQ ID NO: 469350 - RNA, 19 nt, Artificial Sequence
  Description of Artificial Sequence: Synthetic oligonucleotide
cuaccugcccugccagcaa

SEQ ID NO: 469351 - RNA, 19 nt, Artificial Sequence
  Description of Artificial Sequence: Synthetic oligonucleotide
gcucggcuagcuucugcca

SEQ ID NO: 469352 - RNA, 19 nt, Artificial Sequence
  Description of Artificial Sequence: Synthetic oligonucleotide
gucgcggggcccgcacggg

SEQ ID NO: 469353 - RNA, 19 nt, Artificial Sequence
  Description of Artificial Sequence: Synthetic oligonucleotide
cugaguugucauguuggau

SEQ ID NO: 469354 - RNA, 19 nt, Artificial Sequence
  Description of Artificial Sequence: Synthetic oligonucleotide
cccuugcuggugcuacccc

SEQ ID NO: 469355 - RNA, 19 nt, Artificial Sequence
  Description of Artificial Sequence: Synthetic oligonucleotide
cgguugagcuguuugagcu

SEQ ID NO: 469356 - RNA, 19 nt, Artificial Sequence
  Description of Artificial Sequence: Synthetic oligonucleotide
uggcgcgcugcacgccguc

SEQ ID NO: 469357 - RNA, 19 nt, Artificial Sequence
  Description of Artificial Sequence: Synthetic oligonucleotide
cgacaaauuggaggacgag

SEQ ID NO: 469358 - RNA, 19 nt, Artificial Sequence
  Description of Artificial Sequence: Synthetic oligonucleotide
gggcgagcucgggaguggg

SEQ ID NO: 469359 - RNA, 19 nt, Artificial Sequence
  Description of Artificial Sequence: Synthetic oligonucleotide
ggcgcuccgaguccaggaa

SEQ ID NO: 469360 - RNA, 19 nt, Artificial Sequence
  Description of Artificial Sequence: Synthetic oligonucleotide
ggggccggauuucggccug

SEQ ID NO: 469361 - RNA, 19 nt, Artificial Sequence
  Description of Artificial Sequence: Synthetic oligonucleotide
cacuggcgcgcugcacgcc

SEQ ID NO: 469362 - RNA, 19 nt, Artificial Sequence
  Description of Artificial Sequence: Synthetic oligonucleotide
gccgaagcagcuaccaggu

SEQ ID NO: 469363 - RNA, 19 nt, Artificial Sequence
  Description of Artificial Sequence: Synthetic oligonucleotide
ccacgcucaugaccacacc

SEQ ID NO: 469364 - RNA, 19 nt, Artificial Sequence
  Description of Artificial Sequence: Synthetic oligonucleotide
cgcucaugaccacaccguc

SEQ ID NO: 469365 - RNA, 19 nt, Artificial Sequence
  Description of Artificial Sequence: Synthetic oligonucleotide
gcgccuugagcugguguug

SEQ ID NO: 469366 - RNA, 19 nt, Artificial Sequence
  Description of Artificial Sequence: Synthetic oligonucleotide
cugcacucccaagcuuuga

SEQ ID NO: 469367 - RNA, 19 nt, Artificial Sequence
  Description of Artificial Sequence: Synthetic oligonucleotide
gcgagagauugaagagcug

SEQ ID NO: 469368 - RNA, 19 nt, Artificial Sequence
  Description of Artificial Sequence: Synthetic oligonucleotide
ccuuaagcgccagguuuuc

SEQ ID NO: 469369 - RNA, 19 nt, Artificial Sequence
  Description of Artificial Sequence: Synthetic oligonucleotide
ugccgcccgguaccuugua

SEQ ID NO: 469370 - RNA, 19 nt, Artificial Sequence
  Description of Artificial Sequence: Synthetic oligonucleotide
gggcccggcgccugagccc

SEQ ID NO: 469371 - RNA, 19 nt, Artificial Sequence
  Description of Artificial Sequence: Synthetic oligonucleotide
gccgccggagccaccgcgg

SEQ ID NO: 469372 - RNA, 19 nt, Artificial Sequence
  Description of Artificial Sequence: Synthetic oligonucleotide
cagcgcccucagucaucgg

SEQ ID NO: 469373 - RNA, 19 nt, Artificial Sequence
  Description of Artificial Sequence: Synthetic oligonucleotide
cuaagucgcggggcccgca

SEQ ID NO: 469374 - RNA, 19 nt, Artificial Sequence
  Description of Artificial Sequence: Synthetic oligonucleotide
aggagcgccuugagcuggu

SEQ ID NO: 469375 - RNA, 19 nt, Artificial Sequence
  Description of Artificial Sequence: Synthetic oligonucleotide
cccuaccugcccugccagc

SEQ ID NO: 469376 - RNA, 19 nt, Artificial Sequence
  Description of Artificial Sequence: Synthetic oligonucleotide
ucccuccgggugggaauuc

SEQ ID NO: 469377 - RNA, 19 nt, Artificial Sequence
  Description of Artificial Sequence: Synthetic oligonucleotide
gcaccgcccgggaugcuug

SEQ ID NO: 469378 - RNA, 19 nt, Artificial Sequence
  Description of Artificial Sequence: Synthetic oligonucleotide
ccccuuuaggccagagaaa

SEQ ID NO: 469379 - RNA, 19 nt, Artificial Sequence
  Description of Artificial Sequence: Synthetic oligonucleotide
ccggauuucggccugucuu

SEQ ID NO: 469380 - RNA, 19 nt, Artificial Sequence
  Description of Artificial Sequence: Synthetic oligonucleotide
caccagcgggcagcccacc

SEQ ID NO: 469381 - RNA, 19 nt, Artificial Sequence
  Description of Artificial Sequence: Synthetic oligonucleotide
ccauuguuucggacaggaa

SEQ ID NO: 469382 - RNA, 19 nt, Artificial Sequence
  Description of Artificial Sequence: Synthetic oligonucleotide
cgucucugacucccuuuac

SEQ ID NO: 469383 - RNA, 19 nt, Artificial Sequence
  Description of Artificial Sequence: Synthetic oligonucleotide
ggaccgugucauacccuuc

SEQ ID NO: 469384 - RNA, 19 nt, Artificial Sequence
  Description of Artificial Sequence: Synthetic oligonucleotide
gcgccugagcccacugcgc

SEQ ID NO: 469385 - RNA, 19 nt, Artificial Sequence
  Description of Artificial Sequence: Synthetic oligonucleotide
cccuagcacaccagaaccu

SEQ ID NO: 469386 - RNA, 19 nt, Artificial Sequence
  Description of Artificial Sequence: Synthetic oligonucleotide
ccgucucugacucccuuua

SEQ ID NO: 469387 - RNA, 19 nt, Artificial Sequence
  Description of Artificial Sequence: Synthetic oligonucleotide
ccuaagucgcggggcccgc

SEQ ID NO: 469388 - RNA, 19 nt, Artificial Sequence
  Description of Artificial Sequence: Synthetic oligonucleotide
ccccuggguucucccacac

SEQ ID NO: 469389 - RNA, 19 nt, Artificial Sequence
  Description of Artificial Sequence: Synthetic oligonucleotide
ccaucgccccaucugcaaa

SEQ ID NO: 469390 - RNA, 19 nt, Artificial Sequence
  Description of Artificial Sequence: Synthetic oligonucleotide
ggcgcgcugcacgccgucc

SEQ ID NO: 469391 - RNA, 19 nt, Artificial Sequence
  Description of Artificial Sequence: Synthetic oligonucleotide
cguuggcguggaaaaugca

SEQ ID NO: 469392 - RNA, 19 nt, Artificial Sequence
  Description of Artificial Sequence: Synthetic oligonucleotide
ccgggugggaauucgguuu

SEQ ID NO: 469393 - RNA, 19 nt, Artificial Sequence
  Description of Artificial Sequence: Synthetic oligonucleotide
cgccgguugagcuguuuga

SEQ ID NO: 469394 - RNA, 19 nt, Artificial Sequence
  Description of Artificial Sequence: Synthetic oligonucleotide
cccacgccaagucccucca

SEQ ID NO: 469395 - RNA, 19 nt, Artificial Sequence
  Description of Artificial Sequence: Synthetic oligonucleotide
gcccgguaccuuguaucuc

SEQ ID NO: 469396 - RNA, 19 nt, Artificial Sequence
  Description of Artificial Sequence: Synthetic oligonucleotide
gccggauuucggccugucu

SEQ ID NO: 469397 - RNA, 19 nt, Artificial Sequence
  Description of Artificial Sequence: Synthetic oligonucleotide
ccacgccaagucccuccac

SEQ ID NO: 469398 - RNA, 19 nt, Artificial Sequence
  Description of Artificial Sequence: Synthetic oligonucleotide
cgcgcaccgcccgggaugc

SEQ ID NO: 469399 - RNA, 19 nt, Artificial Sequence
  Description of Artificial Sequence: Synthetic oligonucleotide
ccuagcacaccagaaccuu

SEQ ID NO: 469400 - RNA, 19 nt, Artificial Sequence
  Description of Artificial Sequence: Synthetic oligonucleotide
gucccuccgggugggaauu

SEQ ID NO: 469401 - RNA, 19 nt, Artificial Sequence
  Description of Artificial Sequence: Synthetic oligonucleotide
cccuuagucugcagucccu

SEQ ID NO: 469402 - RNA, 19 nt, Artificial Sequence
  Description of Artificial Sequence: Synthetic oligonucleotide
ccgggaugcuugggucccg

SEQ ID NO: 469403 - RNA, 19 nt, Artificial Sequence
  Description of Artificial Sequence: Synthetic oligonucleotide
cggcgccugagcccacugc

SEQ ID NO: 469404 - RNA, 19 nt, Artificial Sequence
  Description of Artificial Sequence: Synthetic oligonucleotide
cgccuaagucgcggggccc

SEQ ID NO: 469405 - RNA, 19 nt, Artificial Sequence
  Description of Artificial Sequence: Synthetic oligonucleotide
ccggcgccugagcccacug

SEQ ID NO: 469406 - RNA, 19 nt, Artificial Sequence
  Description of Artificial Sequence: Synthetic oligonucleotide
cgcccgguaccuuguaucu

SEQ ID NO: 469407 - RNA, 19 nt, Artificial Sequence
  Description of Artificial Sequence: Synthetic oligonucleotide
ccccacgcucaugaccaca

SEQ ID NO: 469408 - RNA, 19 nt, Artificial Sequence
  Description of Artificial Sequence: Synthetic oligonucleotide
ccacccacgccaagucccu

SEQ ID NO: 469409 - RNA, 19 nt, Artificial Sequence
  Description of Artificial Sequence: Synthetic oligonucleotide
gccgcccgguaccuuguau

SEQ ID NO: 469410 - RNA, 19 nt, Artificial Sequence
  Description of Artificial Sequence: Synthetic oligonucleotide
ggcaggcguuggcguggaa

SEQ ID NO: 469411 - RNA, 19 nt, Artificial Sequence
  Description of Artificial Sequence: Synthetic oligonucleotide
gggccggauuucggccugu

SEQ ID NO: 469412 - RNA, 19 nt, Artificial Sequence
  Description of Artificial Sequence: Synthetic oligonucleotide
ccaccgcggggaccccacu

SEQ ID NO: 469413 - RNA, 19 nt, Artificial Sequence
  Description of Artificial Sequence: Synthetic oligonucleotide
cgcaccgcccgggaugcuu

SEQ ID NO: 469414 - RNA, 19 nt, Artificial Sequence
  Description of Artificial Sequence: Synthetic oligonucleotide
ccgccugcaggcgccgguu

SEQ ID NO: 469415 - RNA, 19 nt, Artificial Sequence
  Description of Artificial Sequence: Synthetic oligonucleotide
cccggcgccugagcccacu

SEQ ID NO: 469416 - RNA, 19 nt, Artificial Sequence
  Description of Artificial Sequence: Synthetic oligonucleotide
gcgcaccgcccgggaugcu

SEQ ID NO: 469417 - RNA, 19 nt, Artificial Sequence
  Description of Artificial Sequence: Synthetic oligonucleotide
aauacaauuaguuucccug

SEQ ID NO: 469418 - RNA, 19 nt, Artificial Sequence
  Description of Artificial Sequence: Synthetic oligonucleotide
uagauaauuacaaacacuc

SEQ ID NO: 469419 - RNA, 19 nt, Artificial Sequence
  Description of Artificial Sequence: Synthetic oligonucleotide
uuuauuaaggcgcgcagcg

SEQ ID NO: 469420 - RNA, 19 nt, Artificial Sequence
  Description of Artificial Sequence: Synthetic oligonucleotide
cugauuauaacccauaauc

SEQ ID NO: 469421 - RNA, 19 nt, Artificial Sequence
  Description of Artificial Sequence: Synthetic oligonucleotide
aacuuaaagauuaaaagcu

SEQ ID NO: 469422 - RNA, 19 nt, Artificial Sequence
  Description of Artificial Sequence: Synthetic oligonucleotide
cuauaauagauguugcugg

SEQ ID NO: 469423 - RNA, 19 nt, Artificial Sequence
  Description of Artificial Sequence: Synthetic oligonucleotide
auauaguuagcuuuagguc

SEQ ID NO: 469424 - RNA, 19 nt, Artificial Sequence
  Description of Artificial Sequence: Synthetic oligonucleotide
auuccagacauguuaaugg

SEQ ID NO: 469425 - RNA, 19 nt, Artificial Sequence
  Description of Artificial Sequence: Synthetic oligonucleotide
cuuugaauggucaacauuc

SEQ ID NO: 469426 - RNA, 19 nt, Artificial Sequence
  Description of Artificial Sequence: Synthetic oligonucleotide
aaaauucccaggcgaauac

SEQ ID NO: 469427 - RNA, 19 nt, Artificial Sequence
  Description of Artificial Sequence: Synthetic oligonucleotide
uuuaauucugcuuugcagu

SEQ ID NO: 469428 - RNA, 19 nt, Artificial Sequence
  Description of Artificial Sequence: Synthetic oligonucleotide
uuauaacccauaaucagug

SEQ ID NO: 469429 - RNA, 19 nt, Artificial Sequence
  Description of Artificial Sequence: Synthetic oligonucleotide
uuauagucaauuaacuccu

SEQ ID NO: 469430 - RNA, 19 nt, Artificial Sequence
  Description of Artificial Sequence: Synthetic oligonucleotide
aaaucagggagagucagac

SEQ ID NO: 469431 - RNA, 19 nt, Artificial Sequence
  Description of Artificial Sequence: Synthetic oligonucleotide
ucuacuuccauuuuauuaa

SEQ ID NO: 469432 - RNA, 19 nt, Artificial Sequence
  Description of Artificial Sequence: Synthetic oligonucleotide
aguacuuucuuucugccag

SEQ ID NO: 469433 - RNA, 19 nt, Artificial Sequence
  Description of Artificial Sequence: Synthetic oligonucleotide
uauucgaucacucuuugaa

SEQ ID NO: 469434 - RNA, 19 nt, Artificial Sequence
  Description of Artificial Sequence: Synthetic oligonucleotide
aauacuaaacuggucaaug

SEQ ID NO: 469435 - RNA, 19 nt, Artificial Sequence
  Description of Artificial Sequence: Synthetic oligonucleotide
uuuagguccagucugguau

SEQ ID NO: 469436 - RNA, 19 nt, Artificial Sequence
  Description of Artificial Sequence: Synthetic oligonucleotide
aaccgcuucugccaaauuc

SEQ ID NO: 469437 - RNA, 19 nt, Artificial Sequence
  Description of Artificial Sequence: Synthetic oligonucleotide
aacucgauuuaaaagaucu

SEQ ID NO: 469438 - RNA, 19 nt, Artificial Sequence
  Description of Artificial Sequence: Synthetic oligonucleotide
aauuacagucugcauuuag

SEQ ID NO: 469439 - RNA, 19 nt, Artificial Sequence
  Description of Artificial Sequence: Synthetic oligonucleotide
acucuuauggaaaucaggg

SEQ ID NO: 469440 - RNA, 19 nt, Artificial Sequence
  Description of Artificial Sequence: Synthetic oligonucleotide
uguagcucagaccucagcu

SEQ ID NO: 469441 - RNA, 19 nt, Artificial Sequence
  Description of Artificial Sequence: Synthetic oligonucleotide
auacuaaacuggucaaugg

SEQ ID NO: 469442 - RNA, 19 nt, Artificial Sequence
  Description of Artificial Sequence: Synthetic oligonucleotide
uugcuauaggguaucuucg

SEQ ID NO: 469443 - RNA, 19 nt, Artificial Sequence
  Description of Artificial Sequence: Synthetic oligonucleotide
caggcgaauacuaaacugg

SEQ ID NO: 469444 - RNA, 19 nt, Artificial Sequence
  Description of Artificial Sequence: Synthetic oligonucleotide
uucgaucacucuuugaaug

SEQ ID NO: 469445 - RNA, 19 nt, Artificial Sequence
  Description of Artificial Sequence: Synthetic oligonucleotide
cuuucugccagaguaaccg

SEQ ID NO: 469446 - RNA, 19 nt, Artificial Sequence
  Description of Artificial Sequence: Synthetic oligonucleotide
uuagacuggaguauccgug

SEQ ID NO: 469447 - RNA, 19 nt, Artificial Sequence
  Description of Artificial Sequence: Synthetic oligonucleotide
uaagucagcaggacaauca

SEQ ID NO: 469448 - RNA, 19 nt, Artificial Sequence
  Description of Artificial Sequence: Synthetic oligonucleotide
uuagcuuuagguccagucu

SEQ ID NO: 469449 - RNA, 19 nt, Artificial Sequence
  Description of Artificial Sequence: Synthetic oligonucleotide
uccuuuaagcuguuuauca

SEQ ID NO: 469450 - RNA, 19 nt, Artificial Sequence
  Description of Artificial Sequence: Synthetic oligonucleotide
ccuaaauacaauuaguuuc

SEQ ID NO: 469451 - RNA, 19 nt, Artificial Sequence
  Description of Artificial Sequence: Synthetic oligonucleotide
uaacccauaaucaguguca

SEQ ID NO: 469452 - RNA, 19 nt, Artificial Sequence
  Description of Artificial Sequence: Synthetic oligonucleotide
uuguguacuguuccgagca

SEQ ID NO: 469453 - RNA, 19 nt, Artificial Sequence
  Description of Artificial Sequence: Synthetic oligonucleotide
aguggaaguagagugcacc

SEQ ID NO: 469454 - RNA, 19 nt, Artificial Sequence
  Description of Artificial Sequence: Synthetic oligonucleotide
auuauucgugacuucucac

SEQ ID NO: 469455 - RNA, 19 nt, Artificial Sequence
  Description of Artificial Sequence: Synthetic oligonucleotide
aagacucuaagcucgacuu

SEQ ID NO: 469456 - RNA, 19 nt, Artificial Sequence
  Description of Artificial Sequence: Synthetic oligonucleotide
ugaauggucaacauuccau

SEQ ID NO: 469457 - RNA, 19 nt, Artificial Sequence
  Description of Artificial Sequence: Synthetic oligonucleotide
uuagagacucuuauggaaa

SEQ ID NO: 469458 - RNA, 19 nt, Artificial Sequence
  Description of Artificial Sequence: Synthetic oligonucleotide
ucgaucacucuuugaaugg

SEQ ID NO: 469459 - RNA, 19 nt, Artificial Sequence
  Description of Artificial Sequence: Synthetic oligonucleotide
auacgguuggucauggugc

SEQ ID NO: 469460 - RNA, 19 nt, Artificial Sequence
  Description of Artificial Sequence: Synthetic oligonucleotide
ugugcugaggcucucuagc

SEQ ID NO: 469461 - RNA, 19 nt, Artificial Sequence
  Description of Artificial Sequence: Synthetic oligonucleotide
uuugaauggucaacauucc

SEQ ID NO: 469462 - RNA, 19 nt, Artificial Sequence
  Description of Artificial Sequence: Synthetic oligonucleotide
aacauuucgaaggcguguc

SEQ ID NO: 469463 - RNA, 19 nt, Artificial Sequence
  Description of Artificial Sequence: Synthetic oligonucleotide
uaucuaggccuucaaaacu

SEQ ID NO: 469464 - RNA, 19 nt, Artificial Sequence
  Description of Artificial Sequence: Synthetic oligonucleotide
cuaagcucgacuuguguag

SEQ ID NO: 469465 - RNA, 19 nt, Artificial Sequence
  Description of Artificial Sequence: Synthetic oligonucleotide
uuauuccuaaauacaauua

SEQ ID NO: 469466 - RNA, 19 nt, Artificial Sequence
  Description of Artificial Sequence: Synthetic oligonucleotide
cuuagaagacucuaagcuc

SEQ ID NO: 469467 - RNA, 19 nt, Artificial Sequence
  Description of Artificial Sequence: Synthetic oligonucleotide
uuauucgugacuucucacu

SEQ ID NO: 469468 - RNA, 19 nt, Artificial Sequence
  Description of Artificial Sequence: Synthetic oligonucleotide
uguaacuguucucuugcug

SEQ ID NO: 469469 - RNA, 19 nt, Artificial Sequence
  Description of Artificial Sequence: Synthetic oligonucleotide
uucaggauagucaggauuu

SEQ ID NO: 469470 - RNA, 19 nt, Artificial Sequence
  Description of Artificial Sequence: Synthetic oligonucleotide
uauaggguaucuucggaga

SEQ ID NO: 469471 - RNA, 19 nt, Artificial Sequence
  Description of Artificial Sequence: Synthetic oligonucleotide
uagcuuuagguccagucug

SEQ ID NO: 469472 - RNA, 19 nt, Artificial Sequence
  Description of Artificial Sequence: Synthetic oligonucleotide
agcggcucaguucacuugc

SEQ ID NO: 469473 - RNA, 19 nt, Artificial Sequence
  Description of Artificial Sequence: Synthetic oligonucleotide
ugaucaacucgauuuaaaa

SEQ ID NO: 469474 - RNA, 19 nt, Artificial Sequence
  Description of Artificial Sequence: Synthetic oligonucleotide
gaaacagucuuguguacug

SEQ ID NO: 469475 - RNA, 19 nt, Artificial Sequence
  Description of Artificial Sequence: Synthetic oligonucleotide
agaccaaggaguucuuuuc

SEQ ID NO: 469476 - RNA, 19 nt, Artificial Sequence
  Description of Artificial Sequence: Synthetic oligonucleotide
ugcuauaggguaucuucgg

SEQ ID NO: 469477 - RNA, 19 nt, Artificial Sequence
  Description of Artificial Sequence: Synthetic oligonucleotide
ucccauacauuccugccag

SEQ ID NO: 469478 - RNA, 19 nt, Artificial Sequence
  Description of Artificial Sequence: Synthetic oligonucleotide
cuauaggguaucuucggag

SEQ ID NO: 469479 - RNA, 19 nt, Artificial Sequence
  Description of Artificial Sequence: Synthetic oligonucleotide
ucuagggcaacuguacuag

SEQ ID NO: 469480 - RNA, 19 nt, Artificial Sequence
  Description of Artificial Sequence: Synthetic oligonucleotide
acuucucacucuguaaggc

SEQ ID NO: 469481 - RNA, 19 nt, Artificial Sequence
  Description of Artificial Sequence: Synthetic oligonucleotide
uagucaauuaacuccugcu

SEQ ID NO: 469482 - RNA, 19 nt, Artificial Sequence
  Description of Artificial Sequence: Synthetic oligonucleotide
cuggacuucauuucugagc

SEQ ID NO: 469483 - RNA, 19 nt, Artificial Sequence
  Description of Artificial Sequence: Synthetic oligonucleotide
cagagaauaacuuaaagau

SEQ ID NO: 469484 - RNA, 19 nt, Artificial Sequence
  Description of Artificial Sequence: Synthetic oligonucleotide
ucuuuagacuggaguaucc

SEQ ID NO: 469485 - RNA, 19 nt, Artificial Sequence
  Description of Artificial Sequence: Synthetic oligonucleotide
auaucuagggcaacuguac

SEQ ID NO: 469486 - RNA, 19 nt, Artificial Sequence
  Description of Artificial Sequence: Synthetic oligonucleotide
acuggaguauccguguagc

SEQ ID NO: 469487 - RNA, 19 nt, Artificial Sequence
  Description of Artificial Sequence: Synthetic oligonucleotide
gacucuuauggaaaucagg

SEQ ID NO: 469488 - RNA, 19 nt, Artificial Sequence
  Description of Artificial Sequence: Synthetic oligonucleotide
uauuaaggcgcgcagcgaa

SEQ ID NO: 469489 - RNA, 19 nt, Artificial Sequence
  Description of Artificial Sequence: Synthetic oligonucleotide
ucuaggccuucaaaacugg

SEQ ID NO: 469490 - RNA, 19 nt, Artificial Sequence
  Description of Artificial Sequence: Synthetic oligonucleotide
ugugacgaaggucuaggga

SEQ ID NO: 469491 - RNA, 19 nt, Artificial Sequence
  Description of Artificial Sequence: Synthetic oligonucleotide
cuucggacaaacugugacg

SEQ ID NO: 469492 - RNA, 19 nt, Artificial Sequence
  Description of Artificial Sequence: Synthetic oligonucleotide
auacaauuaguuucccuga

SEQ ID NO: 469493 - RNA, 19 nt, Artificial Sequence
  Description of Artificial Sequence: Synthetic oligonucleotide
uaaucagugucaccuaaaa

SEQ ID NO: 469494 - RNA, 19 nt, Artificial Sequence
  Description of Artificial Sequence: Synthetic oligonucleotide
guaacuguucucuugcuga

SEQ ID NO: 469495 - RNA, 19 nt, Artificial Sequence
  Description of Artificial Sequence: Synthetic oligonucleotide
auuuagagacucuuaugga

SEQ ID NO: 469496 - RNA, 19 nt, Artificial Sequence
  Description of Artificial Sequence: Synthetic oligonucleotide
aacccauaaucagugucac

SEQ ID NO: 469497 - RNA, 19 nt, Artificial Sequence
  Description of Artificial Sequence: Synthetic oligonucleotide
ucuagcauggucugcuucu

SEQ ID NO: 469498 - RNA, 19 nt, Artificial Sequence
  Description of Artificial Sequence: Synthetic oligonucleotide
agcacuuaggugcuggucu

SEQ ID NO: 469499 - RNA, 19 nt, Artificial Sequence
  Description of Artificial Sequence: Synthetic oligonucleotide
acuaaacuggucaauggag

SEQ ID NO: 469500 - RNA, 19 nt, Artificial Sequence
  Description of Artificial Sequence: Synthetic oligonucleotide
gacuucucacucuguaagg

SEQ ID NO: 469501 - RNA, 19 nt, Artificial Sequence
  Description of Artificial Sequence: Synthetic oligonucleotide
aaauauagaaaggucugua

SEQ ID NO: 469502 - RNA, 19 nt, Artificial Sequence
  Description of Artificial Sequence: Synthetic oligonucleotide
aaagccauauagauaauua

SEQ ID NO: 469503 - RNA, 19 nt, Artificial Sequence
  Description of Artificial Sequence: Synthetic oligonucleotide
uauccguguagcuuucugc

SEQ ID NO: 469504 - RNA, 19 nt, Artificial Sequence
  Description of Artificial Sequence: Synthetic oligonucleotide
uauucgugacuucucacuc

SEQ ID NO: 469505 - RNA, 19 nt, Artificial Sequence
  Description of Artificial Sequence: Synthetic oligonucleotide
agauuagacagcucaugug

SEQ ID NO: 469506 - RNA, 19 nt, Artificial Sequence
  Description of Artificial Sequence: Synthetic oligonucleotide
cucgauuuaaaagaucuuc

SEQ ID NO: 469507 - RNA, 19 nt, Artificial Sequence
  Description of Artificial Sequence: Synthetic oligonucleotide
aauuaguuucccugauuau

SEQ ID NO: 469508 - RNA, 19 nt, Artificial Sequence
  Description of Artificial Sequence: Synthetic oligonucleotide
agcaaaccaagacaugaug

SEQ ID NO: 469509 - RNA, 19 nt, Artificial Sequence
  Description of Artificial Sequence: Synthetic oligonucleotide
uuuagacuggaguauccgu

SEQ ID NO: 469510 - RNA, 19 nt, Artificial Sequence
  Description of Artificial Sequence: Synthetic oligonucleotide
agugcuuccgugcgggaac

SEQ ID NO: 469511 - RNA, 19 nt, Artificial Sequence
  Description of Artificial Sequence: Synthetic oligonucleotide
guaguucccgaguuauucg

SEQ ID NO: 469512 - RNA, 19 nt, Artificial Sequence
  Description of Artificial Sequence: Synthetic oligonucleotide
auagauaauuacaaacacu

SEQ ID NO: 469513 - RNA, 19 nt, Artificial Sequence
  Description of Artificial Sequence: Synthetic oligonucleotide
cauacgguuggucauggug

SEQ ID NO: 469514 - RNA, 19 nt, Artificial Sequence
  Description of Artificial Sequence: Synthetic oligonucleotide
cuuucgaaccuucccauac

SEQ ID NO: 469515 - RNA, 19 nt, Artificial Sequence
  Description of Artificial Sequence: Synthetic oligonucleotide
uugcuuagaugcuuucugc

SEQ ID NO: 469516 - RNA, 19 nt, Artificial Sequence
  Description of Artificial Sequence: Synthetic oligonucleotide
uuagaugcuuucugccuag

SEQ ID NO: 469517 - RNA, 19 nt, Artificial Sequence
  Description of Artificial Sequence: Synthetic oligonucleotide
aggucuguacacuuuccuc

SEQ ID NO: 469518 - RNA, 19 nt, Artificial Sequence
  Description of Artificial Sequence: Synthetic oligonucleotide
gaaauauaguuagcuuuag

SEQ ID NO: 469519 - RNA, 19 nt, Artificial Sequence
  Description of Artificial Sequence: Synthetic oligonucleotide
ucuaagcucgacuugugua

SEQ ID NO: 469520 - RNA, 19 nt, Artificial Sequence
  Description of Artificial Sequence: Synthetic oligonucleotide
uucggacaaacugugacga

SEQ ID NO: 469521 - RNA, 19 nt, Artificial Sequence
  Description of Artificial Sequence: Synthetic oligonucleotide
ucaacuugggcucguaguu

SEQ ID NO: 469522 - RNA, 19 nt, Artificial Sequence
  Description of Artificial Sequence: Synthetic oligonucleotide
aaauucugacguucuacuu

SEQ ID NO: 469523 - RNA, 19 nt, Artificial Sequence
  Description of Artificial Sequence: Synthetic oligonucleotide
acaaacugugacgaagguc

SEQ ID NO: 469524 - RNA, 19 nt, Artificial Sequence
  Description of Artificial Sequence: Synthetic oligonucleotide
uguguagcuugacuugcug

SEQ ID NO: 469525 - RNA, 19 nt, Artificial Sequence
  Description of Artificial Sequence: Synthetic oligonucleotide
ugcagaucccagcucagga

SEQ ID NO: 469526 - RNA, 19 nt, Artificial Sequence
  Description of Artificial Sequence: Synthetic oligonucleotide
ugccagcuaagacaguggc

SEQ ID NO: 469527 - RNA, 19 nt, Artificial Sequence
  Description of Artificial Sequence: Synthetic oligonucleotide
uguacacuuuccucucucc

SEQ ID NO: 469528 - RNA, 19 nt, Artificial Sequence
  Description of Artificial Sequence: Synthetic oligonucleotide
uugaucaacucgauuuaaa

SEQ ID NO: 469529 - RNA, 19 nt, Artificial Sequence
  Description of Artificial Sequence: Synthetic oligonucleotide
aaguagagugcaccugcug

SEQ ID NO: 469530 - RNA, 19 nt, Artificial Sequence
  Description of Artificial Sequence: Synthetic oligonucleotide
gagacucuuauggaaauca

SEQ ID NO: 469531 - RNA, 19 nt, Artificial Sequence
  Description of Artificial Sequence: Synthetic oligonucleotide
ucuggugaguaagucagca

SEQ ID NO: 469532 - RNA, 19 nt, Artificial Sequence
  Description of Artificial Sequence: Synthetic oligonucleotide
gcgaauacuaaacugguca

SEQ ID NO: 469533 - RNA, 19 nt, Artificial Sequence
  Description of Artificial Sequence: Synthetic oligonucleotide
uuccuucggacaaacugug

SEQ ID NO: 469534 - RNA, 19 nt, Artificial Sequence
  Description of Artificial Sequence: Synthetic oligonucleotide
uucccgaguuauucgauca

SEQ ID NO: 469535 - RNA, 19 nt, Artificial Sequence
  Description of Artificial Sequence: Synthetic oligonucleotide
agccgaauuuguuaaauua

SEQ ID NO: 469536 - RNA, 19 nt, Artificial Sequence
  Description of Artificial Sequence: Synthetic oligonucleotide
ugucggauguuaucagcag

SEQ ID NO: 469537 - RNA, 19 nt, Artificial Sequence
  Description of Artificial Sequence: Synthetic oligonucleotide
agucaauuaacuccugcuu

SEQ ID NO: 469538 - RNA, 19 nt, Artificial Sequence
  Description of Artificial Sequence: Synthetic oligonucleotide
uauagucaauuaacuccug

SEQ ID NO: 469539 - RNA, 19 nt, Artificial Sequence
  Description of Artificial Sequence: Synthetic oligonucleotide
gcuauaauagauguugcug

SEQ ID NO: 469540 - RNA, 19 nt, Artificial Sequence
  Description of Artificial Sequence: Synthetic oligonucleotide
cuuguguacuguuccgagc

SEQ ID NO: 469541 - RNA, 19 nt, Artificial Sequence
  Description of Artificial Sequence: Synthetic oligonucleotide
uuucgaaccuucccauaca

SEQ ID NO: 469542 - RNA, 19 nt, Artificial Sequence
  Description of Artificial Sequence: Synthetic oligonucleotide
auccguguagcuuucugcu

SEQ ID NO: 469543 - RNA, 19 nt, Artificial Sequence
  Description of Artificial Sequence: Synthetic oligonucleotide
gaaguaaggaggccauuuc

SEQ ID NO: 469544 - RNA, 19 nt, Artificial Sequence
  Description of Artificial Sequence: Synthetic oligonucleotide
uacaauuaguuucccugau

SEQ ID NO: 469545 - RNA, 19 nt, Artificial Sequence
  Description of Artificial Sequence: Synthetic oligonucleotide
guaaggaggccauuuccug

SEQ ID NO: 469546 - RNA, 19 nt, Artificial Sequence
  Description of Artificial Sequence: Synthetic oligonucleotide
agucugguauguugaaucu

SEQ ID NO: 469547 - RNA, 19 nt, Artificial Sequence
  Description of Artificial Sequence: Synthetic oligonucleotide
auuaguuucccugauuaua

SEQ ID NO: 469548 - RNA, 19 nt, Artificial Sequence
  Description of Artificial Sequence: Synthetic oligonucleotide
gacuggaguauccguguag

SEQ ID NO: 469549 - RNA, 19 nt, Artificial Sequence
  Description of Artificial Sequence: Synthetic oligonucleotide
cuagcugaaagaccaagga

SEQ ID NO: 469550 - RNA, 19 nt, Artificial Sequence
  Description of Artificial Sequence: Synthetic oligonucleotide
uauaacccauaaucagugu

SEQ ID NO: 469551 - RNA, 19 nt, Artificial Sequence
  Description of Artificial Sequence: Synthetic oligonucleotide
ugguuuagggacuggacuu

SEQ ID NO: 469552 - RNA, 19 nt, Artificial Sequence
  Description of Artificial Sequence: Synthetic oligonucleotide
acucuuugaauggucaaca

SEQ ID NO: 469553 - RNA, 19 nt, Artificial Sequence
  Description of Artificial Sequence: Synthetic oligonucleotide
uggaugagugucuccguca

SEQ ID NO: 469554 - RNA, 19 nt, Artificial Sequence
  Description of Artificial Sequence: Synthetic oligonucleotide
uuagguccagucugguaug

SEQ ID NO: 469555 - RNA, 19 nt, Artificial Sequence
  Description of Artificial Sequence: Synthetic oligonucleotide
agcuagcagccuuucgaac

SEQ ID NO: 469556 - RNA, 19 nt, Artificial Sequence
  Description of Artificial Sequence: Synthetic oligonucleotide
uuauucgaucacucuuuga

SEQ ID NO: 469557 - RNA, 19 nt, Artificial Sequence
  Description of Artificial Sequence: Synthetic oligonucleotide
uccuggaucccacuuucac

SEQ ID NO: 469558 - RNA, 19 nt, Artificial Sequence
  Description of Artificial Sequence: Synthetic oligonucleotide
uucgaaccuucccauacau

SEQ ID NO: 469559 - RNA, 19 nt, Artificial Sequence
  Description of Artificial Sequence: Synthetic oligonucleotide
acccauaaucagugucacc

SEQ ID NO: 469560 - RNA, 19 nt, Artificial Sequence
  Description of Artificial Sequence: Synthetic oligonucleotide
gcuagcagccuuucgaacc

SEQ ID NO: 469561 - RNA, 19 nt, Artificial Sequence
  Description of Artificial Sequence: Synthetic oligonucleotide
uagggcaacuguacuagaa

SEQ ID NO: 469562 - RNA, 19 nt, Artificial Sequence
  Description of Artificial Sequence: Synthetic oligonucleotide
auucgaucacucuuugaau

SEQ ID NO: 469563 - RNA, 19 nt, Artificial Sequence
  Description of Artificial Sequence: Synthetic oligonucleotide
cucugcauuugucuguaac

SEQ ID NO: 469564 - RNA, 19 nt, Artificial Sequence
  Description of Artificial Sequence: Synthetic oligonucleotide
cauuauucgugacuucuca

SEQ ID NO: 469565 - RNA, 19 nt, Artificial Sequence
  Description of Artificial Sequence: Synthetic oligonucleotide
gcuuagaagacucuaagcu

SEQ ID NO: 469566 - RNA, 19 nt, Artificial Sequence
  Description of Artificial Sequence: Synthetic oligonucleotide
ugauuccguaguuucugga

SEQ ID NO: 469567 - RNA, 19 nt, Artificial Sequence
  Description of Artificial Sequence: Synthetic oligonucleotide
cauggugcauuucugguga

SEQ ID NO: 469568 - RNA, 19 nt, Artificial Sequence
  Description of Artificial Sequence: Synthetic oligonucleotide
uugccuuauuuaauucuuc

SEQ ID NO: 469569 - RNA, 19 nt, Artificial Sequence
  Description of Artificial Sequence: Synthetic oligonucleotide
aucuaggccuucaaaacug

SEQ ID NO: 469570 - RNA, 19 nt, Artificial Sequence
  Description of Artificial Sequence: Synthetic oligonucleotide
aggaacauuucgaaggcgu

SEQ ID NO: 469571 - RNA, 19 nt, Artificial Sequence
  Description of Artificial Sequence: Synthetic oligonucleotide
cuucaugcagucucuccug

SEQ ID NO: 469572 - RNA, 19 nt, Artificial Sequence
  Description of Artificial Sequence: Synthetic oligonucleotide
ggacaaacugugacgaagg

SEQ ID NO: 469573 - RNA, 19 nt, Artificial Sequence
  Description of Artificial Sequence: Synthetic oligonucleotide
aaauucccaggcgaauacu

SEQ ID NO: 469574 - RNA, 19 nt, Artificial Sequence
  Description of Artificial Sequence: Synthetic oligonucleotide
cauuuuauuaaggcgcgca

SEQ ID NO: 469575 - RNA, 19 nt, Artificial Sequence
  Description of Artificial Sequence: Synthetic oligonucleotide
ugcucuugccuuauuuaau

SEQ ID NO: 469576 - RNA, 19 nt, Artificial Sequence
  Description of Artificial Sequence: Synthetic oligonucleotide
uucuguaggcuacugccuu

SEQ ID NO: 469577 - RNA, 19 nt, Artificial Sequence
  Description of Artificial Sequence: Synthetic oligonucleotide
agucagacaccagagaaua

SEQ ID NO: 469578 - RNA, 19 nt, Artificial Sequence
  Description of Artificial Sequence: Synthetic oligonucleotide
auucgugacuucucacucu

SEQ ID NO: 469579 - RNA, 19 nt, Artificial Sequence
  Description of Artificial Sequence: Synthetic oligonucleotide
auggucaacauuccauuuu

SEQ ID NO: 469580 - RNA, 19 nt, Artificial Sequence
  Description of Artificial Sequence: Synthetic oligonucleotide
ucaggacaauggcaggcac

SEQ ID NO: 469581 - RNA, 19 nt, Artificial Sequence
  Description of Artificial Sequence: Synthetic oligonucleotide
ucagcugaugcagucggcu

SEQ ID NO: 469582 - RNA, 19 nt, Artificial Sequence
  Description of Artificial Sequence: Synthetic oligonucleotide
uuagggacuggacuucauu

SEQ ID NO: 469583 - RNA, 19 nt, Artificial Sequence
  Description of Artificial Sequence: Synthetic oligonucleotide
aagcuucccgggacgaaac

SEQ ID NO: 469584 - RNA, 19 nt, Artificial Sequence
  Description of Artificial Sequence: Synthetic oligonucleotide
gacagcucaugugaccugc

SEQ ID NO: 469585 - RNA, 19 nt, Artificial Sequence
  Description of Artificial Sequence: Synthetic oligonucleotide
aaagcuucccgggacgaaa

SEQ ID NO: 469586 - RNA, 19 nt, Artificial Sequence
  Description of Artificial Sequence: Synthetic oligonucleotide
ugucuccgucagcugaugc

SEQ ID NO: 469587 - RNA, 19 nt, Artificial Sequence
  Description of Artificial Sequence: Synthetic oligonucleotide
agagacucuuauggaaauc

SEQ ID NO: 469588 - RNA, 19 nt, Artificial Sequence
  Description of Artificial Sequence: Synthetic oligonucleotide
agcuugauucuguaggcua

SEQ ID NO: 469589 - RNA, 19 nt, Artificial Sequence
  Description of Artificial Sequence: Synthetic oligonucleotide
aaacagucuuguguacugu

SEQ ID NO: 469590 - RNA, 19 nt, Artificial Sequence
  Description of Artificial Sequence: Synthetic oligonucleotide
ucacuaaccugcugagccu

SEQ ID NO: 469591 - RNA, 19 nt, Artificial Sequence
  Description of Artificial Sequence: Synthetic oligonucleotide
uagaagacucuaagcucga

SEQ ID NO: 469592 - RNA, 19 nt, Artificial Sequence
  Description of Artificial Sequence: Synthetic oligonucleotide
cauaucuagggcaacugua

SEQ ID NO: 469593 - RNA, 19 nt, Artificial Sequence
  Description of Artificial Sequence: Synthetic oligonucleotide
auaguuagcuuuaggucca

SEQ ID NO: 469594 - RNA, 19 nt, Artificial Sequence
  Description of Artificial Sequence: Synthetic oligonucleotide
auaggguaucuucggagaa

SEQ ID NO: 469595 - RNA, 19 nt, Artificial Sequence
  Description of Artificial Sequence: Synthetic oligonucleotide
cugugacgaaggucuaggg

SEQ ID NO: 469596 - RNA, 19 nt, Artificial Sequence
  Description of Artificial Sequence: Synthetic oligonucleotide
uaagcucgacuuguguagc

SEQ ID NO: 469597 - RNA, 19 nt, Artificial Sequence
  Description of Artificial Sequence: Synthetic oligonucleotide
aauucccaggcgaauacua

SEQ ID NO: 469598 - RNA, 19 nt, Artificial Sequence
  Description of Artificial Sequence: Synthetic oligonucleotide
uacgguuggucauggugca

SEQ ID NO: 469599 - RNA, 19 nt, Artificial Sequence
  Description of Artificial Sequence: Synthetic oligonucleotide
cucuugccuuauuuaauuc

SEQ ID NO: 469600 - RNA, 19 nt, Artificial Sequence
  Description of Artificial Sequence: Synthetic oligonucleotide
cuagcuaucuggucuugca

SEQ ID NO: 469601 - RNA, 19 nt, Artificial Sequence
  Description of Artificial Sequence: Synthetic oligonucleotide
gcggagauuagacagcuca

SEQ ID NO: 469602 - RNA, 19 nt, Artificial Sequence
  Description of Artificial Sequence: Synthetic oligonucleotide
gcauuuagagacucuuaug

SEQ ID NO: 469603 - RNA, 19 nt, Artificial Sequence
  Description of Artificial Sequence: Synthetic oligonucleotide
auuaaggcgcgcagcgaac

SEQ ID NO: 469604 - RNA, 19 nt, Artificial Sequence
  Description of Artificial Sequence: Synthetic oligonucleotide
cuuccgugcgggaacucag

SEQ ID NO: 469605 - RNA, 19 nt, Artificial Sequence
  Description of Artificial Sequence: Synthetic oligonucleotide
uuauuaaggcgcgcagcga

SEQ ID NO: 469606 - RNA, 19 nt, Artificial Sequence
  Description of Artificial Sequence: Synthetic oligonucleotide
caucaacuugggcucguag

SEQ ID NO: 469607 - RNA, 19 nt, Artificial Sequence
  Description of Artificial Sequence: Synthetic oligonucleotide
acuguuccgagcacuuagg

SEQ ID NO: 469608 - RNA, 19 nt, Artificial Sequence
  Description of Artificial Sequence: Synthetic oligonucleotide
uguguacuguuccgagcac

SEQ ID NO: 469609 - RNA, 19 nt, Artificial Sequence
  Description of Artificial Sequence: Synthetic oligonucleotide
augucggauguuaucagca

SEQ ID NO: 469610 - RNA, 19 nt, Artificial Sequence
  Description of Artificial Sequence: Synthetic oligonucleotide
uccuuucugagagcuguug

SEQ ID NO: 469611 - RNA, 19 nt, Artificial Sequence
  Description of Artificial Sequence: Synthetic oligonucleotide
agcuuuagguccagucugg

SEQ ID NO: 469612 - RNA, 19 nt, Artificial Sequence
  Description of Artificial Sequence: Synthetic oligonucleotide
cacguaauggaauuccugu

SEQ ID NO: 469613 - RNA, 19 nt, Artificial Sequence
  Description of Artificial Sequence: Synthetic oligonucleotide
aguguguucuuuguucuau

SEQ ID NO: 469614 - RNA, 19 nt, Artificial Sequence
  Description of Artificial Sequence: Synthetic oligonucleotide
accgcuucugccaaauucu

SEQ ID NO: 469615 - RNA, 19 nt, Artificial Sequence
  Description of Artificial Sequence: Synthetic oligonucleotide
uucccgggacgaaacaguc

SEQ ID NO: 469616 - RNA, 19 nt, Artificial Sequence
  Description of Artificial Sequence: Synthetic oligonucleotide
ugccagaguaaccgcuucu

SEQ ID NO: 469617 - RNA, 19 nt, Artificial Sequence
  Description of Artificial Sequence: Synthetic oligonucleotide
uccgcuucaugcagucucu

SEQ ID NO: 469618 - RNA, 19 nt, Artificial Sequence
  Description of Artificial Sequence: Synthetic oligonucleotide
uuaaggcgcgcagcgaacu

SEQ ID NO: 469619 - RNA, 19 nt, Artificial Sequence
  Description of Artificial Sequence: Synthetic oligonucleotide
cagccuuucgaaccuuccc

SEQ ID NO: 469620 - RNA, 19 nt, Artificial Sequence
  Description of Artificial Sequence: Synthetic oligonucleotide
agacucuuauggaaaucag

SEQ ID NO: 469621 - RNA, 19 nt, Artificial Sequence
  Description of Artificial Sequence: Synthetic oligonucleotide
uggaguauccguguagcuu

SEQ ID NO: 469622 - RNA, 19 nt, Artificial Sequence
  Description of Artificial Sequence: Synthetic oligonucleotide
ucccugauuauaacccaua

SEQ ID NO: 469623 - RNA, 19 nt, Artificial Sequence
  Description of Artificial Sequence: Synthetic oligonucleotide
gaguuauucgaucacucuu

SEQ ID NO: 469624 - RNA, 19 nt, Artificial Sequence
  Description of Artificial Sequence: Synthetic oligonucleotide
acguaauggaauuccuguu

SEQ ID NO: 469625 - RNA, 19 nt, Artificial Sequence
  Description of Artificial Sequence: Synthetic oligonucleotide
uucauccgguccagcuccg

SEQ ID NO: 469626 - RNA, 19 nt, Artificial Sequence
  Description of Artificial Sequence: Synthetic oligonucleotide
gugaucuugcauuauucgu

SEQ ID NO: 469627 - RNA, 19 nt, Artificial Sequence
  Description of Artificial Sequence: Synthetic oligonucleotide
agagccgaauuuguuaaau

SEQ ID NO: 469628 - RNA, 19 nt, Artificial Sequence
  Description of Artificial Sequence: Synthetic oligonucleotide
ucccgaguuauucgaucac

SEQ ID NO: 469629 - RNA, 19 nt, Artificial Sequence
  Description of Artificial Sequence: Synthetic oligonucleotide
gccauauagauaauuacaa

SEQ ID NO: 469630 - RNA, 19 nt, Artificial Sequence
  Description of Artificial Sequence: Synthetic oligonucleotide
gaucccacuuucacauuug

SEQ ID NO: 469631 - RNA, 19 nt, Artificial Sequence
  Description of Artificial Sequence: Synthetic oligonucleotide
ugucaauuccagacauguu

SEQ ID NO: 469632 - RNA, 19 nt, Artificial Sequence
  Description of Artificial Sequence: Synthetic oligonucleotide
gauuccguaguuucuggau

SEQ ID NO: 469633 - RNA, 19 nt, Artificial Sequence
  Description of Artificial Sequence: Synthetic oligonucleotide
gaucacucuuugaaugguc

SEQ ID NO: 469634 - RNA, 19 nt, Artificial Sequence
  Description of Artificial Sequence: Synthetic oligonucleotide
cuugggcucguaguucccg

SEQ ID NO: 469635 - RNA, 19 nt, Artificial Sequence
  Description of Artificial Sequence: Synthetic oligonucleotide
ccuucggacaaacugugac

SEQ ID NO: 469636 - RNA, 19 nt, Artificial Sequence
  Description of Artificial Sequence: Synthetic oligonucleotide
ccagauuaguuucuguguc

SEQ ID NO: 469637 - RNA, 19 nt, Artificial Sequence
  Description of Artificial Sequence: Synthetic oligonucleotide
uugccauacgguuggucau

SEQ ID NO: 469638 - RNA, 19 nt, Artificial Sequence
  Description of Artificial Sequence: Synthetic oligonucleotide
uccuucggacaaacuguga

SEQ ID NO: 469639 - RNA, 19 nt, Artificial Sequence
  Description of Artificial Sequence: Synthetic oligonucleotide
gagcuagcagccuuucgaa

SEQ ID NO: 469640 - RNA, 19 nt, Artificial Sequence
  Description of Artificial Sequence: Synthetic oligonucleotide
uuuagggacuggacuucau

SEQ ID NO: 469641 - RNA, 19 nt, Artificial Sequence
  Description of Artificial Sequence: Synthetic oligonucleotide
ugggcucguaguucccgag

SEQ ID NO: 469642 - RNA, 19 nt, Artificial Sequence
  Description of Artificial Sequence: Synthetic oligonucleotide
uuccgagcacuuaggugcu

SEQ ID NO: 469643 - RNA, 19 nt, Artificial Sequence
  Description of Artificial Sequence: Synthetic oligonucleotide
ccgaauuuguuaaauuaca

SEQ ID NO: 469644 - RNA, 19 nt, Artificial Sequence
  Description of Artificial Sequence: Synthetic oligonucleotide
agcuaagacaguggcauuu

SEQ ID NO: 469645 - RNA, 19 nt, Artificial Sequence
  Description of Artificial Sequence: Synthetic oligonucleotide
guaagucagcaggacaauc

SEQ ID NO: 469646 - RNA, 19 nt, Artificial Sequence
  Description of Artificial Sequence: Synthetic oligonucleotide
ggacgaaacagucuugugu

SEQ ID NO: 469647 - RNA, 19 nt, Artificial Sequence
  Description of Artificial Sequence: Synthetic oligonucleotide
ugccauacgguuggucaug

SEQ ID NO: 469648 - RNA, 19 nt, Artificial Sequence
  Description of Artificial Sequence: Synthetic oligonucleotide
agaugcauguucaguggca

SEQ ID NO: 469649 - RNA, 19 nt, Artificial Sequence
  Description of Artificial Sequence: Synthetic oligonucleotide
aggcgaauacuaaacuggu

SEQ ID NO: 469650 - RNA, 19 nt, Artificial Sequence
  Description of Artificial Sequence: Synthetic oligonucleotide
gacucuaagcucgacuugu

SEQ ID NO: 469651 - RNA, 19 nt, Artificial Sequence
  Description of Artificial Sequence: Synthetic oligonucleotide
gucugguauguugaaucug

SEQ ID NO: 469652 - RNA, 19 nt, Artificial Sequence
  Description of Artificial Sequence: Synthetic oligonucleotide
cucugacuggcugcuauug

SEQ ID NO: 469653 - RNA, 19 nt, Artificial Sequence
  Description of Artificial Sequence: Synthetic oligonucleotide
ccuucccauacauuccugc

SEQ ID NO: 469654 - RNA, 19 nt, Artificial Sequence
  Description of Artificial Sequence: Synthetic oligonucleotide
ggugaaguucaggauaguc

SEQ ID NO: 469655 - RNA, 19 nt, Artificial Sequence
  Description of Artificial Sequence: Synthetic oligonucleotide
gcugauuccguaguuucug

SEQ ID NO: 469656 - RNA, 19 nt, Artificial Sequence
  Description of Artificial Sequence: Synthetic oligonucleotide
uugcauuauucgugacuuc

SEQ ID NO: 469657 - RNA, 19 nt, Artificial Sequence
  Description of Artificial Sequence: Synthetic oligonucleotide
guauguugaaucuguguuu

SEQ ID NO: 469658 - RNA, 19 nt, Artificial Sequence
  Description of Artificial Sequence: Synthetic oligonucleotide
ucccgggacgaaacagucu

SEQ ID NO: 469659 - RNA, 19 nt, Artificial Sequence
  Description of Artificial Sequence: Synthetic oligonucleotide
cuugcauuauucgugacuu

SEQ ID NO: 469660 - RNA, 19 nt, Artificial Sequence
  Description of Artificial Sequence: Synthetic oligonucleotide
ggcgcucuagcugaaagac

SEQ ID NO: 469661 - RNA, 19 nt, Artificial Sequence
  Description of Artificial Sequence: Synthetic oligonucleotide
gacaauggcaggcacucuu

SEQ ID NO: 469662 - RNA, 19 nt, Artificial Sequence
  Description of Artificial Sequence: Synthetic oligonucleotide
uaaggcgcgcagcgaacuc

SEQ ID NO: 469663 - RNA, 19 nt, Artificial Sequence
  Description of Artificial Sequence: Synthetic oligonucleotide
auggugcauuucuggugag

SEQ ID NO: 469664 - RNA, 19 nt, Artificial Sequence
  Description of Artificial Sequence: Synthetic oligonucleotide
ucgaaccuucccauacauu

SEQ ID NO: 469665 - RNA, 19 nt, Artificial Sequence
  Description of Artificial Sequence: Synthetic oligonucleotide
gaguaaccgcuucugccaa

SEQ ID NO: 469666 - RNA, 19 nt, Artificial Sequence
  Description of Artificial Sequence: Synthetic oligonucleotide
cucuugcuuagaugcuuuc

SEQ ID NO: 469667 - RNA, 19 nt, Artificial Sequence
  Description of Artificial Sequence: Synthetic oligonucleotide
gcagagccgaauuuguuaa

SEQ ID NO: 469668 - RNA, 19 nt, Artificial Sequence
  Description of Artificial Sequence: Synthetic oligonucleotide
ggaacauuucgaaggcgug

SEQ ID NO: 469669 - RNA, 19 nt, Artificial Sequence
  Description of Artificial Sequence: Synthetic oligonucleotide
aggcggagauuagacagcu

SEQ ID NO: 469670 - RNA, 19 nt, Artificial Sequence
  Description of Artificial Sequence: Synthetic oligonucleotide
uucugacguucuacuucca

SEQ ID NO: 469671 - RNA, 19 nt, Artificial Sequence
  Description of Artificial Sequence: Synthetic oligonucleotide
gcuauaggguaucuucgga

SEQ ID NO: 469672 - RNA, 19 nt, Artificial Sequence
  Description of Artificial Sequence: Synthetic oligonucleotide
cucgacuuguguagcuuga

SEQ ID NO: 469673 - RNA, 19 nt, Artificial Sequence
  Description of Artificial Sequence: Synthetic oligonucleotide
ggugaguaagucagcagga

SEQ ID NO: 469674 - RNA, 19 nt, Artificial Sequence
  Description of Artificial Sequence: Synthetic oligonucleotide
gaauacuaaacuggucaau

SEQ ID NO: 469675 - RNA, 19 nt, Artificial Sequence
  Description of Artificial Sequence: Synthetic oligonucleotide
ucggacaaacugugacgaa

SEQ ID NO: 469676 - RNA, 19 nt, Artificial Sequence
  Description of Artificial Sequence: Synthetic oligonucleotide
ccacguaauggaauuccug

SEQ ID NO: 469677 - RNA, 19 nt, Artificial Sequence
  Description of Artificial Sequence: Synthetic oligonucleotide
cacuaaccugcugagccuc

SEQ ID NO: 469678 - RNA, 19 nt, Artificial Sequence
  Description of Artificial Sequence: Synthetic oligonucleotide
gcgggaacucagcaccugg

SEQ ID NO: 469679 - RNA, 19 nt, Artificial Sequence
  Description of Artificial Sequence: Synthetic oligonucleotide
uaguuagcuuuagguccag

SEQ ID NO: 469680 - RNA, 19 nt, Artificial Sequence
  Description of Artificial Sequence: Synthetic oligonucleotide
caacuugggcucguaguuc

SEQ ID NO: 469681 - RNA, 19 nt, Artificial Sequence
  Description of Artificial Sequence: Synthetic oligonucleotide
uccguguagcuuucugcuu

SEQ ID NO: 469682 - RNA, 19 nt, Artificial Sequence
  Description of Artificial Sequence: Synthetic oligonucleotide
ccgaguuauucgaucacuc

SEQ ID NO: 469683 - RNA, 19 nt, Artificial Sequence
  Description of Artificial Sequence: Synthetic oligonucleotide
guuuagggacuggacuuca

SEQ ID NO: 469684 - RNA, 19 nt, Artificial Sequence
  Description of Artificial Sequence: Synthetic oligonucleotide
uggugcauuucuggugagu

SEQ ID NO: 469685 - RNA, 19 nt, Artificial Sequence
  Description of Artificial Sequence: Synthetic oligonucleotide
ccagaguaaccgcuucugc

SEQ ID NO: 469686 - RNA, 19 nt, Artificial Sequence
  Description of Artificial Sequence: Synthetic oligonucleotide
gcagcgaacucacucugca

SEQ ID NO: 469687 - RNA, 19 nt, Artificial Sequence
  Description of Artificial Sequence: Synthetic oligonucleotide
uguaggcuacugccuucau

SEQ ID NO: 469688 - RNA, 19 nt, Artificial Sequence
  Description of Artificial Sequence: Synthetic oligonucleotide
acucuaagcucgacuugug

SEQ ID NO: 469689 - RNA, 19 nt, Artificial Sequence
  Description of Artificial Sequence: Synthetic oligonucleotide
gagcacuuaggugcugguc

SEQ ID NO: 469690 - RNA, 19 nt, Artificial Sequence
  Description of Artificial Sequence: Synthetic oligonucleotide
agcuucccgggacgaaaca

SEQ ID NO: 469691 - RNA, 19 nt, Artificial Sequence
  Description of Artificial Sequence: Synthetic oligonucleotide
agcucuugcuuagaugcuu

SEQ ID NO: 469692 - RNA, 19 nt, Artificial Sequence
  Description of Artificial Sequence: Synthetic oligonucleotide
cuuuagguccagucuggua

SEQ ID NO: 469693 - RNA, 19 nt, Artificial Sequence
  Description of Artificial Sequence: Synthetic oligonucleotide
ucguaguucccgaguuauu

SEQ ID NO: 469694 - RNA, 19 nt, Artificial Sequence
  Description of Artificial Sequence: Synthetic oligonucleotide
aguaaccgcuucugccaaa

SEQ ID NO: 469695 - RNA, 19 nt, Artificial Sequence
  Description of Artificial Sequence: Synthetic oligonucleotide
gggacgaaacagucuugug

SEQ ID NO: 469696 - RNA, 19 nt, Artificial Sequence
  Description of Artificial Sequence: Synthetic oligonucleotide
gcauuuugaugucggaugu

SEQ ID NO: 469697 - RNA, 19 nt, Artificial Sequence
  Description of Artificial Sequence: Synthetic oligonucleotide
uagguccagucugguaugu

SEQ ID NO: 469698 - RNA, 19 nt, Artificial Sequence
  Description of Artificial Sequence: Synthetic oligonucleotide
ugcgggaacucagcaccug

SEQ ID NO: 469699 - RNA, 19 nt, Artificial Sequence
  Description of Artificial Sequence: Synthetic oligonucleotide
cgucagcugaugcagucgg

SEQ ID NO: 469700 - RNA, 19 nt, Artificial Sequence
  Description of Artificial Sequence: Synthetic oligonucleotide
ucaggauagucaggauuuu

SEQ ID NO: 469701 - RNA, 19 nt, Artificial Sequence
  Description of Artificial Sequence: Synthetic oligonucleotide
aggcgcgcagcgaacucac

SEQ ID NO: 469702 - RNA, 19 nt, Artificial Sequence
  Description of Artificial Sequence: Synthetic oligonucleotide
gccagauuaguuucugugu

SEQ ID NO: 469703 - RNA, 19 nt, Artificial Sequence
  Description of Artificial Sequence: Synthetic oligonucleotide
cuagggcaacuguacuaga

SEQ ID NO: 469704 - RNA, 19 nt, Artificial Sequence
  Description of Artificial Sequence: Synthetic oligonucleotide
gagccgaauuuguuaaauu

SEQ ID NO: 469705 - RNA, 19 nt, Artificial Sequence
  Description of Artificial Sequence: Synthetic oligonucleotide
aucaugacccagaggugaa

SEQ ID NO: 469706 - RNA, 19 nt, Artificial Sequence
  Description of Artificial Sequence: Synthetic oligonucleotide
gccagaguaaccgcuucug

SEQ ID NO: 469707 - RNA, 19 nt, Artificial Sequence
  Description of Artificial Sequence: Synthetic oligonucleotide
cuucccgggacgaaacagu

SEQ ID NO: 469708 - RNA, 19 nt, Artificial Sequence
  Description of Artificial Sequence: Synthetic oligonucleotide
gguuuagggacuggacuuc

SEQ ID NO: 469709 - RNA, 19 nt, Artificial Sequence
  Description of Artificial Sequence: Synthetic oligonucleotide
aguauccguguagcuuucu

SEQ ID NO: 469710 - RNA, 19 nt, Artificial Sequence
  Description of Artificial Sequence: Synthetic oligonucleotide
gccauacgguuggucaugg

SEQ ID NO: 469711 - RNA, 19 nt, Artificial Sequence
  Description of Artificial Sequence: Synthetic oligonucleotide
cggacaaacugugacgaag

SEQ ID NO: 469712 - RNA, 19 nt, Artificial Sequence
  Description of Artificial Sequence: Synthetic oligonucleotide
cuguaggcuacugccuuca

SEQ ID NO: 469713 - RNA, 19 nt, Artificial Sequence
  Description of Artificial Sequence: Synthetic oligonucleotide
gauuaguuucugugucauu

SEQ ID NO: 469714 - RNA, 19 nt, Artificial Sequence
  Description of Artificial Sequence: Synthetic oligonucleotide
ccgcacuuugaggacagcc

SEQ ID NO: 469715 - RNA, 19 nt, Artificial Sequence
  Description of Artificial Sequence: Synthetic oligonucleotide
cucuaagcucgacuugugu

SEQ ID NO: 469716 - RNA, 19 nt, Artificial Sequence
  Description of Artificial Sequence: Synthetic oligonucleotide
gagcuugauucuguaggcu

SEQ ID NO: 469717 - RNA, 19 nt, Artificial Sequence
  Description of Artificial Sequence: Synthetic oligonucleotide
uggaucccacuuucacauu

SEQ ID NO: 469718 - RNA, 19 nt, Artificial Sequence
  Description of Artificial Sequence: Synthetic oligonucleotide
gcauguucaguggcaugag

SEQ ID NO: 469719 - RNA, 19 nt, Artificial Sequence
  Description of Artificial Sequence: Synthetic oligonucleotide
ggcgaauacuaaacugguc

SEQ ID NO: 469720 - RNA, 19 nt, Artificial Sequence
  Description of Artificial Sequence: Synthetic oligonucleotide
accucagcugauggaccug

SEQ ID NO: 469721 - RNA, 19 nt, Artificial Sequence
  Description of Artificial Sequence: Synthetic oligonucleotide
gcucuugccuuauuuaauu

SEQ ID NO: 469722 - RNA, 19 nt, Artificial Sequence
  Description of Artificial Sequence: Synthetic oligonucleotide
cgaauacuaaacuggucaa

SEQ ID NO: 469723 - RNA, 19 nt, Artificial Sequence
  Description of Artificial Sequence: Synthetic oligonucleotide
cucguaguucccgaguuau

SEQ ID NO: 469724 - RNA, 19 nt, Artificial Sequence
  Description of Artificial Sequence: Synthetic oligonucleotide
ccuagcuaucuggucuugc

SEQ ID NO: 469725 - RNA, 19 nt, Artificial Sequence
  Description of Artificial Sequence: Synthetic oligonucleotide
ucccuucaccacugucaau

SEQ ID NO: 469726 - RNA, 19 nt, Artificial Sequence
  Description of Artificial Sequence: Synthetic oligonucleotide
gcgcagcgaacucacucug

SEQ ID NO: 469727 - RNA, 19 nt, Artificial Sequence
  Description of Artificial Sequence: Synthetic oligonucleotide
gcuaucuggucuugcagau

SEQ ID NO: 469728 - RNA, 19 nt, Artificial Sequence
  Description of Artificial Sequence: Synthetic oligonucleotide
gcgcgcagcgaacucacuc

SEQ ID NO: 469729 - RNA, 19 nt, Artificial Sequence
  Description of Artificial Sequence: Synthetic oligonucleotide
cagagccgaauuuguuaaa

SEQ ID NO: 469730 - RNA, 19 nt, Artificial Sequence
  Description of Artificial Sequence: Synthetic oligonucleotide
cuggaguauccguguagcu

SEQ ID NO: 469731 - RNA, 19 nt, Artificial Sequence
  Description of Artificial Sequence: Synthetic oligonucleotide
ccugccagauuaguuucug

SEQ ID NO: 469732 - RNA, 19 nt, Artificial Sequence
  Description of Artificial Sequence: Synthetic oligonucleotide
uccgagcacuuaggugcug

SEQ ID NO: 469733 - RNA, 19 nt, Artificial Sequence
  Description of Artificial Sequence: Synthetic oligonucleotide
cccugauuauaacccauaa

SEQ ID NO: 469734 - RNA, 19 nt, Artificial Sequence
  Description of Artificial Sequence: Synthetic oligonucleotide
guaaccgcuucugccaaau

SEQ ID NO: 469735 - RNA, 19 nt, Artificial Sequence
  Description of Artificial Sequence: Synthetic oligonucleotide
gcgcucuagcugaaagacc

SEQ ID NO: 469736 - RNA, 19 nt, Artificial Sequence
  Description of Artificial Sequence: Synthetic oligonucleotide
ggauccguugcugggccca

SEQ ID NO: 469737 - RNA, 19 nt, Artificial Sequence
  Description of Artificial Sequence: Synthetic oligonucleotide
gcugaaagaccaaggaguu

SEQ ID NO: 469738 - RNA, 19 nt, Artificial Sequence
  Description of Artificial Sequence: Synthetic oligonucleotide
ccgugcgggaacucagcac

SEQ ID NO: 469739 - RNA, 19 nt, Artificial Sequence
  Description of Artificial Sequence: Synthetic oligonucleotide
ggcgugucccuucaccacu

SEQ ID NO: 469740 - RNA, 19 nt, Artificial Sequence
  Description of Artificial Sequence: Synthetic oligonucleotide
ccugauuauaacccauaau

SEQ ID NO: 469741 - RNA, 19 nt, Artificial Sequence
  Description of Artificial Sequence: Synthetic oligonucleotide
agucggcuuucuagcucug

SEQ ID NO: 469742 - RNA, 19 nt, Artificial Sequence
  Description of Artificial Sequence: Synthetic oligonucleotide
cgcagcgaacucacucugc

SEQ ID NO: 469743 - RNA, 19 nt, Artificial Sequence
  Description of Artificial Sequence: Synthetic oligonucleotide
ccauaucuagggcaacugu

SEQ ID NO: 469744 - RNA, 19 nt, Artificial Sequence
  Description of Artificial Sequence: Synthetic oligonucleotide
ccgggacgaaacagucuug

SEQ ID NO: 469745 - RNA, 19 nt, Artificial Sequence
  Description of Artificial Sequence: Synthetic oligonucleotide
ccuccacguaauggaauuc

SEQ ID NO: 469746 - RNA, 19 nt, Artificial Sequence
  Description of Artificial Sequence: Synthetic oligonucleotide
gccuuucgaaccuucccau

SEQ ID NO: 469747 - RNA, 19 nt, Artificial Sequence
  Description of Artificial Sequence: Synthetic oligonucleotide
ugcuuccgugcgggaacuc

SEQ ID NO: 469748 - RNA, 19 nt, Artificial Sequence
  Description of Artificial Sequence: Synthetic oligonucleotide
acgguuggucauggugcau

SEQ ID NO: 469749 - RNA, 19 nt, Artificial Sequence
  Description of Artificial Sequence: Synthetic oligonucleotide
ggcucguaguucccgaguu

SEQ ID NO: 469750 - RNA, 19 nt, Artificial Sequence
  Description of Artificial Sequence: Synthetic oligonucleotide
gcucguaguucccgaguua

SEQ ID NO: 469751 - RNA, 19 nt, Artificial Sequence
  Description of Artificial Sequence: Synthetic oligonucleotide
cgaguuauucgaucacucu

SEQ ID NO: 469752 - RNA, 19 nt, Artificial Sequence
  Description of Artificial Sequence: Synthetic oligonucleotide
gguuggucauggugcauuu

SEQ ID NO: 469753 - RNA, 19 nt, Artificial Sequence
  Description of Artificial Sequence: Synthetic oligonucleotide
cuccgucagcugaugcagu

SEQ ID NO: 469754 - RNA, 19 nt, Artificial Sequence
  Description of Artificial Sequence: Synthetic oligonucleotide
cccaggcgaauacuaaacu

SEQ ID NO: 469755 - RNA, 19 nt, Artificial Sequence
  Description of Artificial Sequence: Synthetic oligonucleotide
cagcgaacucacucugcau

SEQ ID NO: 469756 - RNA, 19 nt, Artificial Sequence
  Description of Artificial Sequence: Synthetic oligonucleotide
ccuuucgaaccuucccaua

SEQ ID NO: 469757 - RNA, 19 nt, Artificial Sequence
  Description of Artificial Sequence: Synthetic oligonucleotide
gccuagcuaucuggucuug

SEQ ID NO: 469758 - RNA, 19 nt, Artificial Sequence
  Description of Artificial Sequence: Synthetic oligonucleotide
cccgggacgaaacagucuu

SEQ ID NO: 469759 - RNA, 19 nt, Artificial Sequence
  Description of Artificial Sequence: Synthetic oligonucleotide
gggcucguaguucccgagu

SEQ ID NO: 469760 - RNA, 19 nt, Artificial Sequence
  Description of Artificial Sequence: Synthetic oligonucleotide
cgaaacagucuuguguacu

SEQ ID NO: 469761 - RNA, 19 nt, Artificial Sequence
  Description of Artificial Sequence: Synthetic oligonucleotide
gugcuuccgugcgggaacu

SEQ ID NO: 469762 - RNA, 19 nt, Artificial Sequence
  Description of Artificial Sequence: Synthetic oligonucleotide
gcuuuagguccagucuggu

SEQ ID NO: 469763 - RNA, 19 nt, Artificial Sequence
  Description of Artificial Sequence: Synthetic oligonucleotide
cagcuaagacaguggcauu

SEQ ID NO: 469764 - RNA, 19 nt, Artificial Sequence
  Description of Artificial Sequence: Synthetic oligonucleotide
ggcggagauuagacagcuc

SEQ ID NO: 469765 - RNA, 19 nt, Artificial Sequence
  Description of Artificial Sequence: Synthetic oligonucleotide
cccgaguuauucgaucacu

SEQ ID NO: 469766 - RNA, 19 nt, Artificial Sequence
  Description of Artificial Sequence: Synthetic oligonucleotide
cgcgcagcgaacucacucu

SEQ ID NO: 469767 - RNA, 19 nt, Artificial Sequence
  Description of Artificial Sequence: Synthetic oligonucleotide
gcucugacuggcugcuauu

SEQ ID NO: 469768 - RNA, 19 nt, Artificial Sequence
  Description of Artificial Sequence: Synthetic oligonucleotide
gccgcacuuugaggacagc

SEQ ID NO: 469769 - RNA, 19 nt, Artificial Sequence
  Description of Artificial Sequence: Synthetic oligonucleotide
cggagauuagacagcucau

SEQ ID NO: 469770 - RNA, 19 nt, Artificial Sequence
  Description of Artificial Sequence: Synthetic oligonucleotide
cgaucacucuuugaauggu

SEQ ID NO: 469771 - RNA, 19 nt, Artificial Sequence
  Description of Artificial Sequence: Synthetic oligonucleotide
cgggacgaaacagucuugu

SEQ ID NO: 469772 - RNA, 19 nt, Artificial Sequence
  Description of Artificial Sequence: Synthetic oligonucleotide
ccccuugaucaacucgauu

SEQ ID NO: 469773 - RNA, 19 nt, Artificial Sequence
  Description of Artificial Sequence: Synthetic oligonucleotide
ggcgcgcagcgaacucacu

SEQ ID NO: 469774 - RNA, 19 nt, Artificial Sequence
  Description of Artificial Sequence: Synthetic oligonucleotide
agaacugaaggucagcggc

SEQ ID NO: 469775 - RNA, 19 nt, Artificial Sequence
  Description of Artificial Sequence: Synthetic oligonucleotide
ugauccaggaucuugaaug

SEQ ID NO: 469776 - RNA, 19 nt, Artificial Sequence
  Description of Artificial Sequence: Synthetic oligonucleotide
auaaccacaggcuccacgc

SEQ ID NO: 469777 - RNA, 19 nt, Artificial Sequence
  Description of Artificial Sequence: Synthetic oligonucleotide
uuggauaucagaccggagc

SEQ ID NO: 469778 - RNA, 19 nt, Artificial Sequence
  Description of Artificial Sequence: Synthetic oligonucleotide
aagcauuuguacccagucc

SEQ ID NO: 469779 - RNA, 19 nt, Artificial Sequence
  Description of Artificial Sequence: Synthetic oligonucleotide
caagaaaucggucaugccc

SEQ ID NO: 469780 - RNA, 19 nt, Artificial Sequence
  Description of Artificial Sequence: Synthetic oligonucleotide
ugagguuucaccuuucgcu

SEQ ID NO: 469781 - RNA, 19 nt, Artificial Sequence
  Description of Artificial Sequence: Synthetic oligonucleotide
caugcgacgaauucggccg

SEQ ID NO: 469782 - RNA, 19 nt, Artificial Sequence
  Description of Artificial Sequence: Synthetic oligonucleotide
auagucgucagccagcuca

SEQ ID NO: 469783 - RNA, 19 nt, Artificial Sequence
  Description of Artificial Sequence: Synthetic oligonucleotide
aaauuuguccggaugaugu

SEQ ID NO: 469784 - RNA, 19 nt, Artificial Sequence
  Description of Artificial Sequence: Synthetic oligonucleotide
aucggcugaagcuccaucc

SEQ ID NO: 469785 - RNA, 19 nt, Artificial Sequence
  Description of Artificial Sequence: Synthetic oligonucleotide
ugcaguguagcacaugcgc

SEQ ID NO: 469786 - RNA, 19 nt, Artificial Sequence
  Description of Artificial Sequence: Synthetic oligonucleotide
auugucuugcgucucuugg

SEQ ID NO: 469787 - RNA, 19 nt, Artificial Sequence
  Description of Artificial Sequence: Synthetic oligonucleotide
acaugcgacgaauucggcc

SEQ ID NO: 469788 - RNA, 19 nt, Artificial Sequence
  Description of Artificial Sequence: Synthetic oligonucleotide
agcaguguagguucagggc

SEQ ID NO: 469789 - RNA, 19 nt, Artificial Sequence
  Description of Artificial Sequence: Synthetic oligonucleotide
aauuuguccggaugauguc

SEQ ID NO: 469790 - RNA, 19 nt, Artificial Sequence
  Description of Artificial Sequence: Synthetic oligonucleotide
ucgcuuuuggauaucagac

SEQ ID NO: 469791 - RNA, 19 nt, Artificial Sequence
  Description of Artificial Sequence: Synthetic oligonucleotide
agcauuuguacccagucca

SEQ ID NO: 469792 - RNA, 19 nt, Artificial Sequence
  Description of Artificial Sequence: Synthetic oligonucleotide
uuccaagaccaccugaagc

SEQ ID NO: 469793 - RNA, 19 nt, Artificial Sequence
  Description of Artificial Sequence: Synthetic oligonucleotide
aauucuaaauuuguccgga

SEQ ID NO: 469794 - RNA, 19 nt, Artificial Sequence
  Description of Artificial Sequence: Synthetic oligonucleotide
aagaacuccgguggcaggc

SEQ ID NO: 469795 - RNA, 19 nt, Artificial Sequence
  Description of Artificial Sequence: Synthetic oligonucleotide
auuuguacccaguccagag

SEQ ID NO: 469796 - RNA, 19 nt, Artificial Sequence
  Description of Artificial Sequence: Synthetic oligonucleotide
cauggagaaauucuggcac

SEQ ID NO: 469797 - RNA, 19 nt, Artificial Sequence
  Description of Artificial Sequence: Synthetic oligonucleotide
auuuguccggaugaugucc

SEQ ID NO: 469798 - RNA, 19 nt, Artificial Sequence
  Description of Artificial Sequence: Synthetic oligonucleotide
ggcauugcaacagugaugg

SEQ ID NO: 469799 - RNA, 19 nt, Artificial Sequence
  Description of Artificial Sequence: Synthetic oligonucleotide
gcugguggaagaaagaucg

SEQ ID NO: 469800 - RNA, 19 nt, Artificial Sequence
  Description of Artificial Sequence: Synthetic oligonucleotide
cagugaagcauuuguaccc

SEQ ID NO: 469801 - RNA, 19 nt, Artificial Sequence
  Description of Artificial Sequence: Synthetic oligonucleotide
uguuuguagugccagcacu

SEQ ID NO: 469802 - RNA, 19 nt, Artificial Sequence
  Description of Artificial Sequence: Synthetic oligonucleotide
ucgggaaccaccuucggga

SEQ ID NO: 469803 - RNA, 19 nt, Artificial Sequence
  Description of Artificial Sequence: Synthetic oligonucleotide
uguauggguugccauccgg

SEQ ID NO: 469804 - RNA, 19 nt, Artificial Sequence
  Description of Artificial Sequence: Synthetic oligonucleotide
gauguugcuggauccacug

SEQ ID NO: 469805 - RNA, 19 nt, Artificial Sequence
  Description of Artificial Sequence: Synthetic oligonucleotide
cugcauaagaagcugcccc

SEQ ID NO: 469806 - RNA, 19 nt, Artificial Sequence
  Description of Artificial Sequence: Synthetic oligonucleotide
ugagagaacugaaggucag

SEQ ID NO: 469807 - RNA, 19 nt, Artificial Sequence
  Description of Artificial Sequence: Synthetic oligonucleotide
cuuucgcuggcucugaaug

SEQ ID NO: 469808 - RNA, 19 nt, Artificial Sequence
  Description of Artificial Sequence: Synthetic oligonucleotide
uggggaagcauucucccgc

SEQ ID NO: 469809 - RNA, 19 nt, Artificial Sequence
  Description of Artificial Sequence: Synthetic oligonucleotide
ugcaagaaaucggucaugc

SEQ ID NO: 469810 - RNA, 19 nt, Artificial Sequence
  Description of Artificial Sequence: Synthetic oligonucleotide
gauaucagaccggagcugc

SEQ ID NO: 469811 - RNA, 19 nt, Artificial Sequence
  Description of Artificial Sequence: Synthetic oligonucleotide
aaauccggaugacccgugg

SEQ ID NO: 469812 - RNA, 19 nt, Artificial Sequence
  Description of Artificial Sequence: Synthetic oligonucleotide
ugaugccugcaagaaaucg

SEQ ID NO: 469813 - RNA, 19 nt, Artificial Sequence
  Description of Artificial Sequence: Synthetic oligonucleotide
ugaaucaacagugguagaa

SEQ ID NO: 469814 - RNA, 19 nt, Artificial Sequence
  Description of Artificial Sequence: Synthetic oligonucleotide
gaagcauuuguacccaguc

SEQ ID NO: 469815 - RNA, 19 nt, Artificial Sequence
  Description of Artificial Sequence: Synthetic oligonucleotide
aggcauaccgcugagguag

SEQ ID NO: 469816 - RNA, 19 nt, Artificial Sequence
  Description of Artificial Sequence: Synthetic oligonucleotide
aauucggccguugaugaca

SEQ ID NO: 469817 - RNA, 19 nt, Artificial Sequence
  Description of Artificial Sequence: Synthetic oligonucleotide
uugaacuuccauuggcucu

SEQ ID NO: 469818 - RNA, 19 nt, Artificial Sequence
  Description of Artificial Sequence: Synthetic oligonucleotide
uuuuggauaucagaccgga

SEQ ID NO: 469819 - RNA, 19 nt, Artificial Sequence
  Description of Artificial Sequence: Synthetic oligonucleotide
cauugcaacagugauggug

SEQ ID NO: 469820 - RNA, 19 nt, Artificial Sequence
  Description of Artificial Sequence: Synthetic oligonucleotide
aaaucggucaugcccugga

SEQ ID NO: 469821 - RNA, 19 nt, Artificial Sequence
  Description of Artificial Sequence: Synthetic oligonucleotide
guaguuggggucuuccugc

SEQ ID NO: 469822 - RNA, 19 nt, Artificial Sequence
  Description of Artificial Sequence: Synthetic oligonucleotide
cucccguacauauucuucc

SEQ ID NO: 469823 - RNA, 19 nt, Artificial Sequence
  Description of Artificial Sequence: Synthetic oligonucleotide
ugcccaagguucugcaucg

SEQ ID NO: 469824 - RNA, 19 nt, Artificial Sequence
  Description of Artificial Sequence: Synthetic oligonucleotide
uguguuuguagugccagca

SEQ ID NO: 469825 - RNA, 19 nt, Artificial Sequence
  Description of Artificial Sequence: Synthetic oligonucleotide
cuuuuggauaucagaccgg

SEQ ID NO: 469826 - RNA, 19 nt, Artificial Sequence
  Description of Artificial Sequence: Synthetic oligonucleotide
ugcauaagaagcugcccca

SEQ ID NO: 469827 - RNA, 19 nt, Artificial Sequence
  Description of Artificial Sequence: Synthetic oligonucleotide
gaugggaaggccgagccug

SEQ ID NO: 469828 - RNA, 19 nt, Artificial Sequence
  Description of Artificial Sequence: Synthetic oligonucleotide
agacaugcgacgaauucgg

SEQ ID NO: 469829 - RNA, 19 nt, Artificial Sequence
  Description of Artificial Sequence: Synthetic oligonucleotide
gugcaucauaaccacaggc

SEQ ID NO: 469830 - RNA, 19 nt, Artificial Sequence
  Description of Artificial Sequence: Synthetic oligonucleotide
guacauauucuuccagccc

SEQ ID NO: 469831 - RNA, 19 nt, Artificial Sequence
  Description of Artificial Sequence: Synthetic oligonucleotide
uuuggauaucagaccggag

SEQ ID NO: 469832 - RNA, 19 nt, Artificial Sequence
  Description of Artificial Sequence: Synthetic oligonucleotide
ugcuggauccacugaggcg

SEQ ID NO: 469833 - RNA, 19 nt, Artificial Sequence
  Description of Artificial Sequence: Synthetic oligonucleotide
gauaauagggacccauucu

SEQ ID NO: 469834 - RNA, 19 nt, Artificial Sequence
  Description of Artificial Sequence: Synthetic oligonucleotide
aaggccgagccuguggagg

SEQ ID NO: 469835 - RNA, 19 nt, Artificial Sequence
  Description of Artificial Sequence: Synthetic oligonucleotide
auaagaagcugccccacaa

SEQ ID NO: 469836 - RNA, 19 nt, Artificial Sequence
  Description of Artificial Sequence: Synthetic oligonucleotide
uugucuugcgucucuuggc

SEQ ID NO: 469837 - RNA, 19 nt, Artificial Sequence
  Description of Artificial Sequence: Synthetic oligonucleotide
uuuguagugccagcacuag

SEQ ID NO: 469838 - RNA, 19 nt, Artificial Sequence
  Description of Artificial Sequence: Synthetic oligonucleotide
caagguucugcaucggcug

SEQ ID NO: 469839 - RNA, 19 nt, Artificial Sequence
  Description of Artificial Sequence: Synthetic oligonucleotide
acccggcugaaccugcacc

SEQ ID NO: 469840 - RNA, 19 nt, Artificial Sequence
  Description of Artificial Sequence: Synthetic oligonucleotide
caguguagcacaugcgcag

SEQ ID NO: 469841 - RNA, 19 nt, Artificial Sequence
  Description of Artificial Sequence: Synthetic oligonucleotide
aggcucuccggaccuaagc

SEQ ID NO: 469842 - RNA, 19 nt, Artificial Sequence
  Description of Artificial Sequence: Synthetic oligonucleotide
guugccauccggauguugc

SEQ ID NO: 469843 - RNA, 19 nt, Artificial Sequence
  Description of Artificial Sequence: Synthetic oligonucleotide
ucggucaugcccuggagaa

SEQ ID NO: 469844 - RNA, 19 nt, Artificial Sequence
  Description of Artificial Sequence: Synthetic oligonucleotide
agguaggcgucgcucaggg

SEQ ID NO: 469845 - RNA, 19 nt, Artificial Sequence
  Description of Artificial Sequence: Synthetic oligonucleotide
gaagaacuccgguggcagg

SEQ ID NO: 469846 - RNA, 19 nt, Artificial Sequence
  Description of Artificial Sequence: Synthetic oligonucleotide
aacguaucugaggauggca

SEQ ID NO: 469847 - RNA, 19 nt, Artificial Sequence
  Description of Artificial Sequence: Synthetic oligonucleotide
gcaguguagguucagggcc

SEQ ID NO: 469848 - RNA, 19 nt, Artificial Sequence
  Description of Artificial Sequence: Synthetic oligonucleotide
auaccgcugagguaggcgu

SEQ ID NO: 469849 - RNA, 19 nt, Artificial Sequence
  Description of Artificial Sequence: Synthetic oligonucleotide
uccggauguugccaggugu

SEQ ID NO: 469850 - RNA, 19 nt, Artificial Sequence
  Description of Artificial Sequence: Synthetic oligonucleotide
uaggcgucgcucaggggcg

SEQ ID NO: 469851 - RNA, 19 nt, Artificial Sequence
  Description of Artificial Sequence: Synthetic oligonucleotide
gucgcuuuuggauaucaga

SEQ ID NO: 469852 - RNA, 19 nt, Artificial Sequence
  Description of Artificial Sequence: Synthetic oligonucleotide
ugaccacccagguagugcu

SEQ ID NO: 469853 - RNA, 19 nt, Artificial Sequence
  Description of Artificial Sequence: Synthetic oligonucleotide
aacccugcgaacguaucug

SEQ ID NO: 469854 - RNA, 19 nt, Artificial Sequence
  Description of Artificial Sequence: Synthetic oligonucleotide
ucucccguacauauucuuc

SEQ ID NO: 469855 - RNA, 19 nt, Artificial Sequence
  Description of Artificial Sequence: Synthetic oligonucleotide
aauccggaugacccgugga

SEQ ID NO: 469856 - RNA, 19 nt, Artificial Sequence
  Description of Artificial Sequence: Synthetic oligonucleotide
ucugugaugccugcaagaa

SEQ ID NO: 469857 - RNA, 19 nt, Artificial Sequence
  Description of Artificial Sequence: Synthetic oligonucleotide
ucacccugcauugucuugc

SEQ ID NO: 469858 - RNA, 19 nt, Artificial Sequence
  Description of Artificial Sequence: Synthetic oligonucleotide
acgaauucggccguugaug

SEQ ID NO: 469859 - RNA, 19 nt, Artificial Sequence
  Description of Artificial Sequence: Synthetic oligonucleotide
ugcugguggaagaaagauc

SEQ ID NO: 469860 - RNA, 19 nt, Artificial Sequence
  Description of Artificial Sequence: Synthetic oligonucleotide
ucggccguugaugacagca

SEQ ID NO: 469861 - RNA, 19 nt, Artificial Sequence
  Description of Artificial Sequence: Synthetic oligonucleotide
cuccacgagacaugcgacg

SEQ ID NO: 469862 - RNA, 19 nt, Artificial Sequence
  Description of Artificial Sequence: Synthetic oligonucleotide
aauccacugucugugcagu

SEQ ID NO: 469863 - RNA, 19 nt, Artificial Sequence
  Description of Artificial Sequence: Synthetic oligonucleotide
aucugaggauggcaucagg

SEQ ID NO: 469864 - RNA, 19 nt, Artificial Sequence
  Description of Artificial Sequence: Synthetic oligonucleotide
guccacacccggcugaacc

SEQ ID NO: 469865 - RNA, 19 nt, Artificial Sequence
  Description of Artificial Sequence: Synthetic oligonucleotide
agcaagcgggcuccaaauc

SEQ ID NO: 469866 - RNA, 19 nt, Artificial Sequence
  Description of Artificial Sequence: Synthetic oligonucleotide
cugguuacacagcuccagc

SEQ ID NO: 469867 - RNA, 19 nt, Artificial Sequence
  Description of Artificial Sequence: Synthetic oligonucleotide
gaccagugggagcacucgg

SEQ ID NO: 469868 - RNA, 19 nt, Artificial Sequence
  Description of Artificial Sequence: Synthetic oligonucleotide
cugagguuucaccuuucgc

SEQ ID NO: 469869 - RNA, 19 nt, Artificial Sequence
  Description of Artificial Sequence: Synthetic oligonucleotide
cucgggaaccaccuucggg

SEQ ID NO: 469870 - RNA, 19 nt, Artificial Sequence
  Description of Artificial Sequence: Synthetic oligonucleotide
gacauggcuucuucugcug

SEQ ID NO: 469871 - RNA, 19 nt, Artificial Sequence
  Description of Artificial Sequence: Synthetic oligonucleotide
ggauaauagggacccauuc

SEQ ID NO: 469872 - RNA, 19 nt, Artificial Sequence
  Description of Artificial Sequence: Synthetic oligonucleotide
aggggaaguucuuucugcu

SEQ ID NO: 469873 - RNA, 19 nt, Artificial Sequence
  Description of Artificial Sequence: Synthetic oligonucleotide
uggauaauagggacccauu

SEQ ID NO: 469874 - RNA, 19 nt, Artificial Sequence
  Description of Artificial Sequence: Synthetic oligonucleotide
cugcgaacguaucugagga

SEQ ID NO: 469875 - RNA, 19 nt, Artificial Sequence
  Description of Artificial Sequence: Synthetic oligonucleotide
uccacgagacaugcgacga

SEQ ID NO: 469876 - RNA, 19 nt, Artificial Sequence
  Description of Artificial Sequence: Synthetic oligonucleotide
cauaccgcugagguaggcg

SEQ ID NO: 469877 - RNA, 19 nt, Artificial Sequence
  Description of Artificial Sequence: Synthetic oligonucleotide
uauggguugccauccggau

SEQ ID NO: 469878 - RNA, 19 nt, Artificial Sequence
  Description of Artificial Sequence: Synthetic oligonucleotide
ucauagucgucagccagcu

SEQ ID NO: 469879 - RNA, 19 nt, Artificial Sequence
  Description of Artificial Sequence: Synthetic oligonucleotide
accuaagccuccaggacuc

SEQ ID NO: 469880 - RNA, 19 nt, Artificial Sequence
  Description of Artificial Sequence: Synthetic oligonucleotide
gaggcguuggaugaaggca

SEQ ID NO: 469881 - RNA, 19 nt, Artificial Sequence
  Description of Artificial Sequence: Synthetic oligonucleotide
aggcguuggaugaaggcag

SEQ ID NO: 469882 - RNA, 19 nt, Artificial Sequence
  Description of Artificial Sequence: Synthetic oligonucleotide
cguacauauucuuccagcc

SEQ ID NO: 469883 - RNA, 19 nt, Artificial Sequence
  Description of Artificial Sequence: Synthetic oligonucleotide
gcaagcgggcuccaaaucc

SEQ ID NO: 469884 - RNA, 19 nt, Artificial Sequence
  Description of Artificial Sequence: Synthetic oligonucleotide
ggaagaaagaucgcagcug

SEQ ID NO: 469885 - RNA, 19 nt, Artificial Sequence
  Description of Artificial Sequence: Synthetic oligonucleotide
guaucugaggauggcauca

SEQ ID NO: 469886 - RNA, 19 nt, Artificial Sequence
  Description of Artificial Sequence: Synthetic oligonucleotide
aucggucaugcccuggaga

SEQ ID NO: 469887 - RNA, 19 nt, Artificial Sequence
  Description of Artificial Sequence: Synthetic oligonucleotide
ugcagucgcuuuuggauau

SEQ ID NO: 469888 - RNA, 19 nt, Artificial Sequence
  Description of Artificial Sequence: Synthetic oligonucleotide
gaaaucggucaugcccugg

SEQ ID NO: 469889 - RNA, 19 nt, Artificial Sequence
  Description of Artificial Sequence: Synthetic oligonucleotide
ugaacuuccauuggcucuu

SEQ ID NO: 469890 - RNA, 19 nt, Artificial Sequence
  Description of Artificial Sequence: Synthetic oligonucleotide
agugaagcauuuguaccca

SEQ ID NO: 469891 - RNA, 19 nt, Artificial Sequence
  Description of Artificial Sequence: Synthetic oligonucleotide
auucuaaauuuguccggau

SEQ ID NO: 469892 - RNA, 19 nt, Artificial Sequence
  Description of Artificial Sequence: Synthetic oligonucleotide
cugaggcguuggaugaagg

SEQ ID NO: 469893 - RNA, 19 nt, Artificial Sequence
  Description of Artificial Sequence: Synthetic oligonucleotide
gggaaauccggaugacccg

SEQ ID NO: 469894 - RNA, 19 nt, Artificial Sequence
  Description of Artificial Sequence: Synthetic oligonucleotide
agcccagugaucaauguau

SEQ ID NO: 469895 - RNA, 19 nt, Artificial Sequence
  Description of Artificial Sequence: Synthetic oligonucleotide
ugugggcuccugaccaccc

SEQ ID NO: 469896 - RNA, 19 nt, Artificial Sequence
  Description of Artificial Sequence: Synthetic oligonucleotide
gaacguaucugaggauggc

SEQ ID NO: 469897 - RNA, 19 nt, Artificial Sequence
  Description of Artificial Sequence: Synthetic oligonucleotide
cuccggcugccuuagcugc

SEQ ID NO: 469898 - RNA, 19 nt, Artificial Sequence
  Description of Artificial Sequence: Synthetic oligonucleotide
ucacuccacgagacaugcg

SEQ ID NO: 469899 - RNA, 19 nt, Artificial Sequence
  Description of Artificial Sequence: Synthetic oligonucleotide
agggccgagcuccggcugc

SEQ ID NO: 469900 - RNA, 19 nt, Artificial Sequence
  Description of Artificial Sequence: Synthetic oligonucleotide
gaucaauguauggguugcc

SEQ ID NO: 469901 - RNA, 19 nt, Artificial Sequence
  Description of Artificial Sequence: Synthetic oligonucleotide
ccugcgaacguaucugagg

SEQ ID NO: 469902 - RNA, 19 nt, Artificial Sequence
  Description of Artificial Sequence: Synthetic oligonucleotide
acuccacgagacaugcgac

SEQ ID NO: 469903 - RNA, 19 nt, Artificial Sequence
  Description of Artificial Sequence: Synthetic oligonucleotide
agaaaucggucaugcccug

SEQ ID NO: 469904 - RNA, 19 nt, Artificial Sequence
  Description of Artificial Sequence: Synthetic oligonucleotide
cauugucuugcgucucuug

SEQ ID NO: 469905 - RNA, 19 nt, Artificial Sequence
  Description of Artificial Sequence: Synthetic oligonucleotide
gaccuaagccuccaggacu

SEQ ID NO: 469906 - RNA, 19 nt, Artificial Sequence
  Description of Artificial Sequence: Synthetic oligonucleotide
ucggggcuugucagggccg

SEQ ID NO: 469907 - RNA, 19 nt, Artificial Sequence
  Description of Artificial Sequence: Synthetic oligonucleotide
uccacugucugugcagugu

SEQ ID NO: 469908 - RNA, 19 nt, Artificial Sequence
  Description of Artificial Sequence: Synthetic oligonucleotide
uccggaugacccguggaug

SEQ ID NO: 469909 - RNA, 19 nt, Artificial Sequence
  Description of Artificial Sequence: Synthetic oligonucleotide
cugaccacccagguagugc

SEQ ID NO: 469910 - RNA, 19 nt, Artificial Sequence
  Description of Artificial Sequence: Synthetic oligonucleotide
aagaccaccugaagccuca

SEQ ID NO: 469911 - RNA, 19 nt, Artificial Sequence
  Description of Artificial Sequence: Synthetic oligonucleotide
ccguacauauucuuccagc

SEQ ID NO: 469912 - RNA, 19 nt, Artificial Sequence
  Description of Artificial Sequence: Synthetic oligonucleotide
agcacucccuguaccaccg

SEQ ID NO: 469913 - RNA, 19 nt, Artificial Sequence
  Description of Artificial Sequence: Synthetic oligonucleotide
caccacccggcugugaucc

SEQ ID NO: 469914 - RNA, 19 nt, Artificial Sequence
  Description of Artificial Sequence: Synthetic oligonucleotide
gggucuguccaugaccugg

SEQ ID NO: 469915 - RNA, 19 nt, Artificial Sequence
  Description of Artificial Sequence: Synthetic oligonucleotide
gaauucggccguugaugac

SEQ ID NO: 469916 - RNA, 19 nt, Artificial Sequence
  Description of Artificial Sequence: Synthetic oligonucleotide
guguuuguagugccagcac

SEQ ID NO: 469917 - RNA, 19 nt, Artificial Sequence
  Description of Artificial Sequence: Synthetic oligonucleotide
caccagaaggggacccugg

SEQ ID NO: 469918 - RNA, 19 nt, Artificial Sequence
  Description of Artificial Sequence: Synthetic oligonucleotide
gaaggccgagccuguggag

SEQ ID NO: 469919 - RNA, 19 nt, Artificial Sequence
  Description of Artificial Sequence: Synthetic oligonucleotide
gugaagcauuuguacccag

SEQ ID NO: 469920 - RNA, 19 nt, Artificial Sequence
  Description of Artificial Sequence: Synthetic oligonucleotide
auccggaugacccguggau

SEQ ID NO: 469921 - RNA, 19 nt, Artificial Sequence
  Description of Artificial Sequence: Synthetic oligonucleotide
gcugagguuucaccuuucg

SEQ ID NO: 469922 - RNA, 19 nt, Artificial Sequence
  Description of Artificial Sequence: Synthetic oligonucleotide
cauuggggaagcgcugggg

SEQ ID NO: 469923 - RNA, 19 nt, Artificial Sequence
  Description of Artificial Sequence: Synthetic oligonucleotide
ggcucuccggaccuaagcc

SEQ ID NO: 469924 - RNA, 19 nt, Artificial Sequence
  Description of Artificial Sequence: Synthetic oligonucleotide
ugcgucucuuggcaggcau

SEQ ID NO: 469925 - RNA, 19 nt, Artificial Sequence
  Description of Artificial Sequence: Synthetic oligonucleotide
uucgcuggcucugaauguc

SEQ ID NO: 469926 - RNA, 19 nt, Artificial Sequence
  Description of Artificial Sequence: Synthetic oligonucleotide
acuagcugaagcaguggca

SEQ ID NO: 469927 - RNA, 19 nt, Artificial Sequence
  Description of Artificial Sequence: Synthetic oligonucleotide
cauccuguucaucucggga

SEQ ID NO: 469928 - RNA, 19 nt, Artificial Sequence
  Description of Artificial Sequence: Synthetic oligonucleotide
cuugcgucucuuggcaggc

SEQ ID NO: 469929 - RNA, 19 nt, Artificial Sequence
  Description of Artificial Sequence: Synthetic oligonucleotide
gaugacccguggauggcug

SEQ ID NO: 469930 - RNA, 19 nt, Artificial Sequence
  Description of Artificial Sequence: Synthetic oligonucleotide
cugaauguccugcuggaua

SEQ ID NO: 469931 - RNA, 19 nt, Artificial Sequence
  Description of Artificial Sequence: Synthetic oligonucleotide
agugaucaauguauggguu

SEQ ID NO: 469932 - RNA, 19 nt, Artificial Sequence
  Description of Artificial Sequence: Synthetic oligonucleotide
auuggcucuucaggaagug

SEQ ID NO: 469933 - RNA, 19 nt, Artificial Sequence
  Description of Artificial Sequence: Synthetic oligonucleotide
gugggaaauccggaugacc

SEQ ID NO: 469934 - RNA, 19 nt, Artificial Sequence
  Description of Artificial Sequence: Synthetic oligonucleotide
ucgggacauggcuucuucu

SEQ ID NO: 469935 - RNA, 19 nt, Artificial Sequence
  Description of Artificial Sequence: Synthetic oligonucleotide
cacucgggacaccacccgg

SEQ ID NO: 469936 - RNA, 19 nt, Artificial Sequence
  Description of Artificial Sequence: Synthetic oligonucleotide
aaaugcccggugggcauug

SEQ ID NO: 469937 - RNA, 19 nt, Artificial Sequence
  Description of Artificial Sequence: Synthetic oligonucleotide
gcuggggaagcauucuccc

SEQ ID NO: 469938 - RNA, 19 nt, Artificial Sequence
  Description of Artificial Sequence: Synthetic oligonucleotide
agccugggaugcugccucc

SEQ ID NO: 469939 - RNA, 19 nt, Artificial Sequence
  Description of Artificial Sequence: Synthetic oligonucleotide
accgcugagguaggcgucg

SEQ ID NO: 469940 - RNA, 19 nt, Artificial Sequence
  Description of Artificial Sequence: Synthetic oligonucleotide
cagggccaagcacucaaac

SEQ ID NO: 469941 - RNA, 19 nt, Artificial Sequence
  Description of Artificial Sequence: Synthetic oligonucleotide
gucuugcgucucuuggcag

SEQ ID NO: 469942 - RNA, 19 nt, Artificial Sequence
  Description of Artificial Sequence: Synthetic oligonucleotide
gcgaacguaucugaggaug

SEQ ID NO: 469943 - RNA, 19 nt, Artificial Sequence
  Description of Artificial Sequence: Synthetic oligonucleotide
caagcgggcuccaaaucca

SEQ ID NO: 469944 - RNA, 19 nt, Artificial Sequence
  Description of Artificial Sequence: Synthetic oligonucleotide
cagagcuccaaagaaucca

SEQ ID NO: 469945 - RNA, 19 nt, Artificial Sequence
  Description of Artificial Sequence: Synthetic oligonucleotide
caagcuccaucugcugucc

SEQ ID NO: 469946 - RNA, 19 nt, Artificial Sequence
  Description of Artificial Sequence: Synthetic oligonucleotide
ccggaugacccguggaugg

SEQ ID NO: 469947 - RNA, 19 nt, Artificial Sequence
  Description of Artificial Sequence: Synthetic oligonucleotide
aggcauugcaacagugaug

SEQ ID NO: 469948 - RNA, 19 nt, Artificial Sequence
  Description of Artificial Sequence: Synthetic oligonucleotide
gaaauccggaugacccgug

SEQ ID NO: 469949 - RNA, 19 nt, Artificial Sequence
  Description of Artificial Sequence: Synthetic oligonucleotide
auucggccguugaugacag

SEQ ID NO: 469950 - RNA, 19 nt, Artificial Sequence
  Description of Artificial Sequence: Synthetic oligonucleotide
aggacaggcugcauaagaa

SEQ ID NO: 469951 - RNA, 19 nt, Artificial Sequence
  Description of Artificial Sequence: Synthetic oligonucleotide
guucacuccacgagacaug

SEQ ID NO: 469952 - RNA, 19 nt, Artificial Sequence
  Description of Artificial Sequence: Synthetic oligonucleotide
guauggguugccauccgga

SEQ ID NO: 469953 - RNA, 19 nt, Artificial Sequence
  Description of Artificial Sequence: Synthetic oligonucleotide
agaccggagcugcugccug

SEQ ID NO: 469954 - RNA, 19 nt, Artificial Sequence
  Description of Artificial Sequence: Synthetic oligonucleotide
acguaucugaggauggcau

SEQ ID NO: 469955 - RNA, 19 nt, Artificial Sequence
  Description of Artificial Sequence: Synthetic oligonucleotide
guuuguagugccagcacua

SEQ ID NO: 469956 - RNA, 19 nt, Artificial Sequence
  Description of Artificial Sequence: Synthetic oligonucleotide
ugccugcaagaaaucgguc

SEQ ID NO: 469957 - RNA, 19 nt, Artificial Sequence
  Description of Artificial Sequence: Synthetic oligonucleotide
cucccuguuccaccagaag

SEQ ID NO: 469958 - RNA, 19 nt, Artificial Sequence
  Description of Artificial Sequence: Synthetic oligonucleotide
ggcuccacgcucugguggg

SEQ ID NO: 469959 - RNA, 19 nt, Artificial Sequence
  Description of Artificial Sequence: Synthetic oligonucleotide
gucagggccgagcuccggc

SEQ ID NO: 469960 - RNA, 19 nt, Artificial Sequence
  Description of Artificial Sequence: Synthetic oligonucleotide
gcaagaaaucggucaugcc

SEQ ID NO: 469961 - RNA, 19 nt, Artificial Sequence
  Description of Artificial Sequence: Synthetic oligonucleotide
uggcucugaauguccugcu

SEQ ID NO: 469962 - RNA, 19 nt, Artificial Sequence
  Description of Artificial Sequence: Synthetic oligonucleotide
auccggauguugccaggug

SEQ ID NO: 469963 - RNA, 19 nt, Artificial Sequence
  Description of Artificial Sequence: Synthetic oligonucleotide
ugcaucggcugaagcucca

SEQ ID NO: 469964 - RNA, 19 nt, Artificial Sequence
  Description of Artificial Sequence: Synthetic oligonucleotide
caguguagguucagggcca

SEQ ID NO: 469965 - RNA, 19 nt, Artificial Sequence
  Description of Artificial Sequence: Synthetic oligonucleotide
acccugcgaacguaucuga

SEQ ID NO: 469966 - RNA, 19 nt, Artificial Sequence
  Description of Artificial Sequence: Synthetic oligonucleotide
ggcugaaccugcaccaaag

SEQ ID NO: 469967 - RNA, 19 nt, Artificial Sequence
  Description of Artificial Sequence: Synthetic oligonucleotide
uggcaggcucuccggaccu

SEQ ID NO: 469968 - RNA, 19 nt, Artificial Sequence
  Description of Artificial Sequence: Synthetic oligonucleotide
uccggaccuaagccuccag

SEQ ID NO: 469969 - RNA, 19 nt, Artificial Sequence
  Description of Artificial Sequence: Synthetic oligonucleotide
ggauccacugaggcguugg

SEQ ID NO: 469970 - RNA, 19 nt, Artificial Sequence
  Description of Artificial Sequence: Synthetic oligonucleotide
cuggaagugcccguggaga

SEQ ID NO: 469971 - RNA, 19 nt, Artificial Sequence
  Description of Artificial Sequence: Synthetic oligonucleotide
ugccauccggauguugcca

SEQ ID NO: 469972 - RNA, 19 nt, Artificial Sequence
  Description of Artificial Sequence: Synthetic oligonucleotide
ugcgaacguaucugaggau

SEQ ID NO: 469973 - RNA, 19 nt, Artificial Sequence
  Description of Artificial Sequence: Synthetic oligonucleotide
ccaagcacucaaacaggcc

SEQ ID NO: 469974 - RNA, 19 nt, Artificial Sequence
  Description of Artificial Sequence: Synthetic oligonucleotide
cacaaggacaggcugcaua

SEQ ID NO: 469975 - RNA, 19 nt, Artificial Sequence
  Description of Artificial Sequence: Synthetic oligonucleotide
agucgcuuuuggauaucag

SEQ ID NO: 469976 - RNA, 19 nt, Artificial Sequence
  Description of Artificial Sequence: Synthetic oligonucleotide
gacaugcgacgaauucggc

SEQ ID NO: 469977 - RNA, 19 nt, Artificial Sequence
  Description of Artificial Sequence: Synthetic oligonucleotide
accaggcauugcaacagug

SEQ ID NO: 469978 - RNA, 19 nt, Artificial Sequence
  Description of Artificial Sequence: Synthetic oligonucleotide
agucgucagccagcucacc

SEQ ID NO: 469979 - RNA, 19 nt, Artificial Sequence
  Description of Artificial Sequence: Synthetic oligonucleotide
aaugcccggugggcauugg

SEQ ID NO: 469980 - RNA, 19 nt, Artificial Sequence
  Description of Artificial Sequence: Synthetic oligonucleotide
cagggucuguccaugaccu

SEQ ID NO: 469981 - RNA, 19 nt, Artificial Sequence
  Description of Artificial Sequence: Synthetic oligonucleotide
ggcugcauaagaagcugcc

SEQ ID NO: 469982 - RNA, 19 nt, Artificial Sequence
  Description of Artificial Sequence: Synthetic oligonucleotide
cacccggcugugauccagg

SEQ ID NO: 469983 - RNA, 19 nt, Artificial Sequence
  Description of Artificial Sequence: Synthetic oligonucleotide
cucgggacauggcuucuuc

SEQ ID NO: 469984 - RNA, 19 nt, Artificial Sequence
  Description of Artificial Sequence: Synthetic oligonucleotide
cccuguaccaccgagguga

SEQ ID NO: 469985 - RNA, 19 nt, Artificial Sequence
  Description of Artificial Sequence: Synthetic oligonucleotide
caccgaggugaagaacucc

SEQ ID NO: 469986 - RNA, 19 nt, Artificial Sequence
  Description of Artificial Sequence: Synthetic oligonucleotide
aacuccgguggcaggcucu

SEQ ID NO: 469987 - RNA, 19 nt, Artificial Sequence
  Description of Artificial Sequence: Synthetic oligonucleotide
uguugccaggugugggcuc

SEQ ID NO: 469988 - RNA, 19 nt, Artificial Sequence
  Description of Artificial Sequence: Synthetic oligonucleotide
uaccgcugagguaggcguc

SEQ ID NO: 469989 - RNA, 19 nt, Artificial Sequence
  Description of Artificial Sequence: Synthetic oligonucleotide
cugcaagaaaucggucaug

SEQ ID NO: 469990 - RNA, 19 nt, Artificial Sequence
  Description of Artificial Sequence: Synthetic oligonucleotide
caucggcugaagcuccauc

SEQ ID NO: 469991 - RNA, 19 nt, Artificial Sequence
  Description of Artificial Sequence: Synthetic oligonucleotide
cgggcaaucaccacccgag

SEQ ID NO: 469992 - RNA, 19 nt, Artificial Sequence
  Description of Artificial Sequence: Synthetic oligonucleotide
gcugcauaagaagcugccc

SEQ ID NO: 469993 - RNA, 19 nt, Artificial Sequence
  Description of Artificial Sequence: Synthetic oligonucleotide
ggagccauuccuggagucc

SEQ ID NO: 469994 - RNA, 19 nt, Artificial Sequence
  Description of Artificial Sequence: Synthetic oligonucleotide
cugcagucgcuuuuggaua

SEQ ID NO: 469995 - RNA, 19 nt, Artificial Sequence
  Description of Artificial Sequence: Synthetic oligonucleotide
gacgaauucggccguugau

SEQ ID NO: 469996 - RNA, 19 nt, Artificial Sequence
  Description of Artificial Sequence: Synthetic oligonucleotide
gcauuuguacccaguccag

SEQ ID NO: 469997 - RNA, 19 nt, Artificial Sequence
  Description of Artificial Sequence: Synthetic oligonucleotide
ggauggguucacuccacga

SEQ ID NO: 469998 - RNA, 19 nt, Artificial Sequence
  Description of Artificial Sequence: Synthetic oligonucleotide
ggaccagugggagcacucg

SEQ ID NO: 469999 - RNA, 19 nt, Artificial Sequence
  Description of Artificial Sequence: Synthetic oligonucleotide
gcaggcauaccgcugaggu

SEQ ID NO: 470000 - RNA, 19 nt, Artificial Sequence
  Description of Artificial Sequence: Synthetic oligonucleotide
aaacucucccguacauauu

SEQ ID NO: 470001 - RNA, 19 nt, Artificial Sequence
  Description of Artificial Sequence: Synthetic oligonucleotide
gagguucaggggaaguucu

SEQ ID NO: 470002 - RNA, 19 nt, Artificial Sequence
  Description of Artificial Sequence: Synthetic oligonucleotide
ggauaucagaccggagcug

SEQ ID NO: 470003 - RNA, 19 nt, Artificial Sequence
  Description of Artificial Sequence: Synthetic oligonucleotide
cccguggagaagcaucacc

SEQ ID NO: 470004 - RNA, 19 nt, Artificial Sequence
  Description of Artificial Sequence: Synthetic oligonucleotide
gaacuccgguggcaggcuc

SEQ ID NO: 470005 - RNA, 19 nt, Artificial Sequence
  Description of Artificial Sequence: Synthetic oligonucleotide
ccugguuacacagcuccag

SEQ ID NO: 470006 - RNA, 19 nt, Artificial Sequence
  Description of Artificial Sequence: Synthetic oligonucleotide
augcgacgaauucggccgu

SEQ ID NO: 470007 - RNA, 19 nt, Artificial Sequence
  Description of Artificial Sequence: Synthetic oligonucleotide
uccacgcucuggugggaaa

SEQ ID NO: 470008 - RNA, 19 nt, Artificial Sequence
  Description of Artificial Sequence: Synthetic oligonucleotide
gcacucgggacaccacccg

SEQ ID NO: 470009 - RNA, 19 nt, Artificial Sequence
  Description of Artificial Sequence: Synthetic oligonucleotide
ccgaggugaagaacuccgg

SEQ ID NO: 470010 - RNA, 19 nt, Artificial Sequence
  Description of Artificial Sequence: Synthetic oligonucleotide
gaagccucagucccaucau

SEQ ID NO: 470011 - RNA, 19 nt, Artificial Sequence
  Description of Artificial Sequence: Synthetic oligonucleotide
gcagagcuccaaagaaucc

SEQ ID NO: 470012 - RNA, 19 nt, Artificial Sequence
  Description of Artificial Sequence: Synthetic oligonucleotide
ccggaccuaagccuccagg

SEQ ID NO: 470013 - RNA, 19 nt, Artificial Sequence
  Description of Artificial Sequence: Synthetic oligonucleotide
ccggauguugccaggugug

SEQ ID NO: 470014 - RNA, 19 nt, Artificial Sequence
  Description of Artificial Sequence: Synthetic oligonucleotide
cccguacauauucuuccag

SEQ ID NO: 470015 - RNA, 19 nt, Artificial Sequence
  Description of Artificial Sequence: Synthetic oligonucleotide
gcucucggggcuugucagg

SEQ ID NO: 470016 - RNA, 19 nt, Artificial Sequence
  Description of Artificial Sequence: Synthetic oligonucleotide
ggggaucaccaacccugcg

SEQ ID NO: 470017 - RNA, 19 nt, Artificial Sequence
  Description of Artificial Sequence: Synthetic oligonucleotide
cucccuguaccaccgaggu

SEQ ID NO: 470018 - RNA, 19 nt, Artificial Sequence
  Description of Artificial Sequence: Synthetic oligonucleotide
auaucagaccggagcugcu

SEQ ID NO: 470019 - RNA, 19 nt, Artificial Sequence
  Description of Artificial Sequence: Synthetic oligonucleotide
caggcucuccggaccuaag

SEQ ID NO: 470020 - RNA, 19 nt, Artificial Sequence
  Description of Artificial Sequence: Synthetic oligonucleotide
cccaagguucugcaucggc

SEQ ID NO: 470021 - RNA, 19 nt, Artificial Sequence
  Description of Artificial Sequence: Synthetic oligonucleotide
gagcagagcuccaaagaau

SEQ ID NO: 470022 - RNA, 19 nt, Artificial Sequence
  Description of Artificial Sequence: Synthetic oligonucleotide
cacaggcuccacgcucugg

SEQ ID NO: 470023 - RNA, 19 nt, Artificial Sequence
  Description of Artificial Sequence: Synthetic oligonucleotide
cgaauucggccguugauga

SEQ ID NO: 470024 - RNA, 19 nt, Artificial Sequence
  Description of Artificial Sequence: Synthetic oligonucleotide
ccgaguuggugcuguuggg

SEQ ID NO: 470025 - RNA, 19 nt, Artificial Sequence
  Description of Artificial Sequence: Synthetic oligonucleotide
accaacccugcgaacguau

SEQ ID NO: 470026 - RNA, 19 nt, Artificial Sequence
  Description of Artificial Sequence: Synthetic oligonucleotide
aaucaccacccgaguuggu

SEQ ID NO: 470027 - RNA, 19 nt, Artificial Sequence
  Description of Artificial Sequence: Synthetic oligonucleotide
gucucuuggcaggcauacc

SEQ ID NO: 470028 - RNA, 19 nt, Artificial Sequence
  Description of Artificial Sequence: Synthetic oligonucleotide
cagucgcuuuuggauauca

SEQ ID NO: 470029 - RNA, 19 nt, Artificial Sequence
  Description of Artificial Sequence: Synthetic oligonucleotide
ggccgggcaaucaccaccc

SEQ ID NO: 470030 - RNA, 19 nt, Artificial Sequence
  Description of Artificial Sequence: Synthetic oligonucleotide
caacccugcgaacguaucu

SEQ ID NO: 470031 - RNA, 19 nt, Artificial Sequence
  Description of Artificial Sequence: Synthetic oligonucleotide
cugcccggcucacugccuc

SEQ ID NO: 470032 - RNA, 19 nt, Artificial Sequence
  Description of Artificial Sequence: Synthetic oligonucleotide
gggccagugaagcauuugu

SEQ ID NO: 470033 - RNA, 19 nt, Artificial Sequence
  Description of Artificial Sequence: Synthetic oligonucleotide
ucgcucaggggcggcugag

SEQ ID NO: 470034 - RNA, 19 nt, Artificial Sequence
  Description of Artificial Sequence: Synthetic oligonucleotide
gguucacuccacgagacau

SEQ ID NO: 470035 - RNA, 19 nt, Artificial Sequence
  Description of Artificial Sequence: Synthetic oligonucleotide
cguaucugaggauggcauc

SEQ ID NO: 470036 - RNA, 19 nt, Artificial Sequence
  Description of Artificial Sequence: Synthetic oligonucleotide
cacgcucuggugggaaauc

SEQ ID NO: 470037 - RNA, 19 nt, Artificial Sequence
  Description of Artificial Sequence: Synthetic oligonucleotide
aggccugaccagagccugg

SEQ ID NO: 470038 - RNA, 19 nt, Artificial Sequence
  Description of Artificial Sequence: Synthetic oligonucleotide
guugggaagccaggcaccu

SEQ ID NO: 470039 - RNA, 19 nt, Artificial Sequence
  Description of Artificial Sequence: Synthetic oligonucleotide
cagcccagugaucaaugua

SEQ ID NO: 470040 - RNA, 19 nt, Artificial Sequence
  Description of Artificial Sequence: Synthetic oligonucleotide
ccugcagucgcuuuuggau

SEQ ID NO: 470041 - RNA, 19 nt, Artificial Sequence
  Description of Artificial Sequence: Synthetic oligonucleotide
cccugcgaacguaucugag

SEQ ID NO: 470042 - RNA, 19 nt, Artificial Sequence
  Description of Artificial Sequence: Synthetic oligonucleotide
accuuucgcuggcucugaa

SEQ ID NO: 470043 - RNA, 19 nt, Artificial Sequence
  Description of Artificial Sequence: Synthetic oligonucleotide
uucggccguugaugacagc

SEQ ID NO: 470044 - RNA, 19 nt, Artificial Sequence
  Description of Artificial Sequence: Synthetic oligonucleotide
ugcccggcucacugccucu

SEQ ID NO: 470045 - RNA, 19 nt, Artificial Sequence
  Description of Artificial Sequence: Synthetic oligonucleotide
gcccagugaucaauguaug

SEQ ID NO: 470046 - RNA, 19 nt, Artificial Sequence
  Description of Artificial Sequence: Synthetic oligonucleotide
gaucgcagcuguggcugga

SEQ ID NO: 470047 - RNA, 19 nt, Artificial Sequence
  Description of Artificial Sequence: Synthetic oligonucleotide
ggaaauccggaugacccgu

SEQ ID NO: 470048 - RNA, 19 nt, Artificial Sequence
  Description of Artificial Sequence: Synthetic oligonucleotide
cacccggcugaaccugcac

SEQ ID NO: 470049 - RNA, 19 nt, Artificial Sequence
  Description of Artificial Sequence: Synthetic oligonucleotide
uugcgucucuuggcaggca

SEQ ID NO: 470050 - RNA, 19 nt, Artificial Sequence
  Description of Artificial Sequence: Synthetic oligonucleotide
gcucaccaaggauggguuc

SEQ ID NO: 470051 - RNA, 19 nt, Artificial Sequence
  Description of Artificial Sequence: Synthetic oligonucleotide
gacccguggauggcuggca

SEQ ID NO: 470052 - RNA, 19 nt, Artificial Sequence
  Description of Artificial Sequence: Synthetic oligonucleotide
guggaccucgggacauggc

SEQ ID NO: 470053 - RNA, 19 nt, Artificial Sequence
  Description of Artificial Sequence: Synthetic oligonucleotide
caggcauaccgcugaggua

SEQ ID NO: 470054 - RNA, 19 nt, Artificial Sequence
  Description of Artificial Sequence: Synthetic oligonucleotide
ccaagguucugcaucggcu

SEQ ID NO: 470055 - RNA, 19 nt, Artificial Sequence
  Description of Artificial Sequence: Synthetic oligonucleotide
caaggccgcucaccaucug

SEQ ID NO: 470056 - RNA, 19 nt, Artificial Sequence
  Description of Artificial Sequence: Synthetic oligonucleotide
uccagcaagcgggcuccaa

SEQ ID NO: 470057 - RNA, 19 nt, Artificial Sequence
  Description of Artificial Sequence: Synthetic oligonucleotide
gucgcucaggggcggcuga

SEQ ID NO: 470058 - RNA, 19 nt, Artificial Sequence
  Description of Artificial Sequence: Synthetic oligonucleotide
ccugcauugucuugcgucu

SEQ ID NO: 470059 - RNA, 19 nt, Artificial Sequence
  Description of Artificial Sequence: Synthetic oligonucleotide
guguagguucagggccaag

SEQ ID NO: 470060 - RNA, 19 nt, Artificial Sequence
  Description of Artificial Sequence: Synthetic oligonucleotide
cucaggcucucggggcuug

SEQ ID NO: 470061 - RNA, 19 nt, Artificial Sequence
  Description of Artificial Sequence: Synthetic oligonucleotide
ccaccgaggugaagaacuc

SEQ ID NO: 470062 - RNA, 19 nt, Artificial Sequence
  Description of Artificial Sequence: Synthetic oligonucleotide
cagcaagcgggcuccaaau

SEQ ID NO: 470063 - RNA, 19 nt, Artificial Sequence
  Description of Artificial Sequence: Synthetic oligonucleotide
gaccaccugaagccucagu

SEQ ID NO: 470064 - RNA, 19 nt, Artificial Sequence
  Description of Artificial Sequence: Synthetic oligonucleotide
accacccgaguuggugcug

SEQ ID NO: 470065 - RNA, 19 nt, Artificial Sequence
  Description of Artificial Sequence: Synthetic oligonucleotide
cuguaccaccgaggugaag

SEQ ID NO: 470066 - RNA, 19 nt, Artificial Sequence
  Description of Artificial Sequence: Synthetic oligonucleotide
ucaggcucucggggcuugu

SEQ ID NO: 470067 - RNA, 19 nt, Artificial Sequence
  Description of Artificial Sequence: Synthetic oligonucleotide
ccaagcaguguagguucag

SEQ ID NO: 470068 - RNA, 19 nt, Artificial Sequence
  Description of Artificial Sequence: Synthetic oligonucleotide
cacgagacaugcgacgaau

SEQ ID NO: 470069 - RNA, 19 nt, Artificial Sequence
  Description of Artificial Sequence: Synthetic oligonucleotide
gcccucacccugcauuguc

SEQ ID NO: 470070 - RNA, 19 nt, Artificial Sequence
  Description of Artificial Sequence: Synthetic oligonucleotide
cuguuguagcuguguuugu

SEQ ID NO: 470071 - RNA, 19 nt, Artificial Sequence
  Description of Artificial Sequence: Synthetic oligonucleotide
ugcgacgaauucggccguu

SEQ ID NO: 470072 - RNA, 19 nt, Artificial Sequence
  Description of Artificial Sequence: Synthetic oligonucleotide
cggauguugccaggugugg

SEQ ID NO: 470073 - RNA, 19 nt, Artificial Sequence
  Description of Artificial Sequence: Synthetic oligonucleotide
cggccguugaugacagcag

SEQ ID NO: 470074 - RNA, 19 nt, Artificial Sequence
  Description of Artificial Sequence: Synthetic oligonucleotide
accacccggcugugaucca

SEQ ID NO: 470075 - RNA, 19 nt, Artificial Sequence
  Description of Artificial Sequence: Synthetic oligonucleotide
gcgacgaauucggccguug

SEQ ID NO: 470076 - RNA, 19 nt, Artificial Sequence
  Description of Artificial Sequence: Synthetic oligonucleotide
gggaccagugggagcacuc

SEQ ID NO: 470077 - RNA, 19 nt, Artificial Sequence
  Description of Artificial Sequence: Synthetic oligonucleotide
cauccggauguugccaggu

SEQ ID NO: 470078 - RNA, 19 nt, Artificial Sequence
  Description of Artificial Sequence: Synthetic oligonucleotide
ccgagccuguggaggagug

SEQ ID NO: 470079 - RNA, 19 nt, Artificial Sequence
  Description of Artificial Sequence: Synthetic oligonucleotide
acacccggcugaaccugca

SEQ ID NO: 470080 - RNA, 19 nt, Artificial Sequence
  Description of Artificial Sequence: Synthetic oligonucleotide
gccugggaugcugccuccg

SEQ ID NO: 470081 - RNA, 19 nt, Artificial Sequence
  Description of Artificial Sequence: Synthetic oligonucleotide
caccacccgaguuggugcu

SEQ ID NO: 470082 - RNA, 19 nt, Artificial Sequence
  Description of Artificial Sequence: Synthetic oligonucleotide
gcauaccgcugagguaggc

SEQ ID NO: 470083 - RNA, 19 nt, Artificial Sequence
  Description of Artificial Sequence: Synthetic oligonucleotide
gccgggcaaucaccacccg

SEQ ID NO: 470084 - RNA, 19 nt, Artificial Sequence
  Description of Artificial Sequence: Synthetic oligonucleotide
cggcugaagcuccauccug

SEQ ID NO: 470085 - RNA, 19 nt, Artificial Sequence
  Description of Artificial Sequence: Synthetic oligonucleotide
ggaugggaaggccgagccu

SEQ ID NO: 470086 - RNA, 19 nt, Artificial Sequence
  Description of Artificial Sequence: Synthetic oligonucleotide
ccugaccacccagguagug

SEQ ID NO: 470087 - RNA, 19 nt, Artificial Sequence
  Description of Artificial Sequence: Synthetic oligonucleotide
caccuuucgcuggcucuga

SEQ ID NO: 470088 - RNA, 19 nt, Artificial Sequence
  Description of Artificial Sequence: Synthetic oligonucleotide
gguucaggggaaguucuuu

SEQ ID NO: 470089 - RNA, 19 nt, Artificial Sequence
  Description of Artificial Sequence: Synthetic oligonucleotide
ccuaagccuccaggacucc

SEQ ID NO: 470090 - RNA, 19 nt, Artificial Sequence
  Description of Artificial Sequence: Synthetic oligonucleotide
ggggcccucacccugcauu

SEQ ID NO: 470091 - RNA, 19 nt, Artificial Sequence
  Description of Artificial Sequence: Synthetic oligonucleotide
ccacccggcugugauccag

SEQ ID NO: 470092 - RNA, 19 nt, Artificial Sequence
  Description of Artificial Sequence: Synthetic oligonucleotide
ccacacccggcugaaccug

SEQ ID NO: 470093 - RNA, 19 nt, Artificial Sequence
  Description of Artificial Sequence: Synthetic oligonucleotide
caggggcggcugagguuuc

SEQ ID NO: 470094 - RNA, 19 nt, Artificial Sequence
  Description of Artificial Sequence: Synthetic oligonucleotide
aggggcggcugagguuuca

SEQ ID NO: 470095 - RNA, 19 nt, Artificial Sequence
  Description of Artificial Sequence: Synthetic oligonucleotide
cuccacgcucuggugggaa

SEQ ID NO: 470096 - RNA, 19 nt, Artificial Sequence
  Description of Artificial Sequence: Synthetic oligonucleotide
gcuggauaauagggaccca

SEQ ID NO: 470097 - RNA, 19 nt, Artificial Sequence
  Description of Artificial Sequence: Synthetic oligonucleotide
ccgggcaaucaccacccga

SEQ ID NO: 470098 - RNA, 19 nt, Artificial Sequence
  Description of Artificial Sequence: Synthetic oligonucleotide
cagaccggagcugcugccu

SEQ ID NO: 470099 - RNA, 19 nt, Artificial Sequence
  Description of Artificial Sequence: Synthetic oligonucleotide
ggggcggcugagguuucac

SEQ ID NO: 470100 - RNA, 19 nt, Artificial Sequence
  Description of Artificial Sequence: Synthetic oligonucleotide
ggguggaccucgggacaug

SEQ ID NO: 470101 - RNA, 19 nt, Artificial Sequence
  Description of Artificial Sequence: Synthetic oligonucleotide
cggaugacccguggauggc

SEQ ID NO: 470102 - RNA, 19 nt, Artificial Sequence
  Description of Artificial Sequence: Synthetic oligonucleotide
caccaacccugcgaacgua

SEQ ID NO: 470103 - RNA, 19 nt, Artificial Sequence
  Description of Artificial Sequence: Synthetic oligonucleotide
cgacgaauucggccguuga

SEQ ID NO: 470104 - RNA, 19 nt, Artificial Sequence
  Description of Artificial Sequence: Synthetic oligonucleotide
gcagucgcuuuuggauauc

SEQ ID NO: 470105 - RNA, 19 nt, Artificial Sequence
  Description of Artificial Sequence: Synthetic oligonucleotide
ggggcuugucagggccgag

SEQ ID NO: 470106 - RNA, 19 nt, Artificial Sequence
  Description of Artificial Sequence: Synthetic oligonucleotide
gccugaccagagccuggga

SEQ ID NO: 470107 - RNA, 19 nt, Artificial Sequence
  Description of Artificial Sequence: Synthetic oligonucleotide
ccacgagacaugcgacgaa

SEQ ID NO: 470108 - RNA, 19 nt, Artificial Sequence
  Description of Artificial Sequence: Synthetic oligonucleotide
gcacucccuguaccaccga

SEQ ID NO: 470109 - RNA, 19 nt, Artificial Sequence
  Description of Artificial Sequence: Synthetic oligonucleotide
caaaugcccggugggcauu

SEQ ID NO: 470110 - RNA, 19 nt, Artificial Sequence
  Description of Artificial Sequence: Synthetic oligonucleotide
ccgagcuccggcugccuua

SEQ ID NO: 470111 - RNA, 19 nt, Artificial Sequence
  Description of Artificial Sequence: Synthetic oligonucleotide
gcauugcaacagugauggu

SEQ ID NO: 470112 - RNA, 19 nt, Artificial Sequence
  Description of Artificial Sequence: Synthetic oligonucleotide
ggacaccacccggcuguga

SEQ ID NO: 470113 - RNA, 19 nt, Artificial Sequence
  Description of Artificial Sequence: Synthetic oligonucleotide
cuccagcaagcgggcucca

SEQ ID NO: 470114 - RNA, 19 nt, Artificial Sequence
  Description of Artificial Sequence: Synthetic oligonucleotide
gggguggaccucgggacau

SEQ ID NO: 470115 - RNA, 19 nt, Artificial Sequence
  Description of Artificial Sequence: Synthetic oligonucleotide
cgucgcucaggggcggcug

SEQ ID NO: 470116 - RNA, 19 nt, Artificial Sequence
  Description of Artificial Sequence: Synthetic oligonucleotide
ccggcugaaccugcaccaa

SEQ ID NO: 470117 - RNA, 19 nt, Artificial Sequence
  Description of Artificial Sequence: Synthetic oligonucleotide
gcaucggcugaagcuccau

SEQ ID NO: 470118 - RNA, 19 nt, Artificial Sequence
  Description of Artificial Sequence: Synthetic oligonucleotide
ccacgcucuggugggaaau

SEQ ID NO: 470119 - RNA, 19 nt, Artificial Sequence
  Description of Artificial Sequence: Synthetic oligonucleotide
cccggcugugauccaggau

SEQ ID NO: 470120 - RNA, 19 nt, Artificial Sequence
  Description of Artificial Sequence: Synthetic oligonucleotide
gcgucgcucaggggcggcu

SEQ ID NO: 470121 - RNA, 19 nt, Artificial Sequence
  Description of Artificial Sequence: Synthetic oligonucleotide
gauaauagcccauaggugg

SEQ ID NO: 470122 - RNA, 19 nt, Artificial Sequence
  Description of Artificial Sequence: Synthetic oligonucleotide
auaguuuggguuuacaccc

SEQ ID NO: 470123 - RNA, 19 nt, Artificial Sequence
  Description of Artificial Sequence: Synthetic oligonucleotide
caagcaaccaauaaaagcc

SEQ ID NO: 470124 - RNA, 19 nt, Artificial Sequence
  Description of Artificial Sequence: Synthetic oligonucleotide
acaagcaaccaauaaaagc

SEQ ID NO: 470125 - RNA, 19 nt, Artificial Sequence
  Description of Artificial Sequence: Synthetic oligonucleotide
aauauagggguucacggag

SEQ ID NO: 470126 - RNA, 19 nt, Artificial Sequence
  Description of Artificial Sequence: Synthetic oligonucleotide
uggauaauagcccauaggu

SEQ ID NO: 470127 - RNA, 19 nt, Artificial Sequence
  Description of Artificial Sequence: Synthetic oligonucleotide
ugagcuaacauucuggagu

SEQ ID NO: 470128 - RNA, 19 nt, Artificial Sequence
  Description of Artificial Sequence: Synthetic oligonucleotide
uaagcuaccagguaaaagu

SEQ ID NO: 470129 - RNA, 19 nt, Artificial Sequence
  Description of Artificial Sequence: Synthetic oligonucleotide
acuacuugugacuucuucc

SEQ ID NO: 470130 - RNA, 19 nt, Artificial Sequence
  Description of Artificial Sequence: Synthetic oligonucleotide
uuuuaugcugcucagccag

SEQ ID NO: 470131 - RNA, 19 nt, Artificial Sequence
  Description of Artificial Sequence: Synthetic oligonucleotide
aaagguagguugugggucc

SEQ ID NO: 470132 - RNA, 19 nt, Artificial Sequence
  Description of Artificial Sequence: Synthetic oligonucleotide
auauucagugaacuggacc

SEQ ID NO: 470133 - RNA, 19 nt, Artificial Sequence
  Description of Artificial Sequence: Synthetic oligonucleotide
uaacuaaacaaccaccuca

SEQ ID NO: 470134 - RNA, 19 nt, Artificial Sequence
  Description of Artificial Sequence: Synthetic oligonucleotide
aguaagucuauauauauaa

SEQ ID NO: 470135 - RNA, 19 nt, Artificial Sequence
  Description of Artificial Sequence: Synthetic oligonucleotide
aagacuguggccguguggc

SEQ ID NO: 470136 - RNA, 19 nt, Artificial Sequence
  Description of Artificial Sequence: Synthetic oligonucleotide
uuggccuuaaauccaacgg

SEQ ID NO: 470137 - RNA, 19 nt, Artificial Sequence
  Description of Artificial Sequence: Synthetic oligonucleotide
auuugcauccuaccuaccc

SEQ ID NO: 470138 - RNA, 19 nt, Artificial Sequence
  Description of Artificial Sequence: Synthetic oligonucleotide
uauaaauucugguuuggug

SEQ ID NO: 470139 - RNA, 19 nt, Artificial Sequence
  Description of Artificial Sequence: Synthetic oligonucleotide
acacgugugcgucacaucc

SEQ ID NO: 470140 - RNA, 19 nt, Artificial Sequence
  Description of Artificial Sequence: Synthetic oligonucleotide
cauuagacaucuuugcugc

SEQ ID NO: 470141 - RNA, 19 nt, Artificial Sequence
  Description of Artificial Sequence: Synthetic oligonucleotide
ugcaaaugcccaaacauca

SEQ ID NO: 470142 - RNA, 19 nt, Artificial Sequence
  Description of Artificial Sequence: Synthetic oligonucleotide
gaggguagaaaccugcagg

SEQ ID NO: 470143 - RNA, 19 nt, Artificial Sequence
  Description of Artificial Sequence: Synthetic oligonucleotide
acccauauauagcacagac

SEQ ID NO: 470144 - RNA, 19 nt, Artificial Sequence
  Description of Artificial Sequence: Synthetic oligonucleotide
aguuauacccauauauagc

SEQ ID NO: 470145 - RNA, 19 nt, Artificial Sequence
  Description of Artificial Sequence: Synthetic oligonucleotide
guuauacccauauauagca

SEQ ID NO: 470146 - RNA, 19 nt, Artificial Sequence
  Description of Artificial Sequence: Synthetic oligonucleotide
cugaagugccccaauaugg

SEQ ID NO: 470147 - RNA, 19 nt, Artificial Sequence
  Description of Artificial Sequence: Synthetic oligonucleotide
auaaaagccagacacuaga

SEQ ID NO: 470148 - RNA, 19 nt, Artificial Sequence
  Description of Artificial Sequence: Synthetic oligonucleotide
guauacuaccuguagaccc

SEQ ID NO: 470149 - RNA, 19 nt, Artificial Sequence
  Description of Artificial Sequence: Synthetic oligonucleotide
uauacccauauauagcaca

SEQ ID NO: 470150 - RNA, 19 nt, Artificial Sequence
  Description of Artificial Sequence: Synthetic oligonucleotide
ucguggauagcucaguuga

SEQ ID NO: 470151 - RNA, 19 nt, Artificial Sequence
  Description of Artificial Sequence: Synthetic oligonucleotide
ucugcacucauggugaggg

SEQ ID NO: 470152 - RNA, 19 nt, Artificial Sequence
  Description of Artificial Sequence: Synthetic oligonucleotide
uuugccuuauaccaggcaa

SEQ ID NO: 470153 - RNA, 19 nt, Artificial Sequence
  Description of Artificial Sequence: Synthetic oligonucleotide
uguagacccacccuguccc

SEQ ID NO: 470154 - RNA, 19 nt, Artificial Sequence
  Description of Artificial Sequence: Synthetic oligonucleotide
cacauugacucaaaggaag

SEQ ID NO: 470155 - RNA, 19 nt, Artificial Sequence
  Description of Artificial Sequence: Synthetic oligonucleotide
uguaggaccgccaggauaa

SEQ ID NO: 470156 - RNA, 19 nt, Artificial Sequence
  Description of Artificial Sequence: Synthetic oligonucleotide
agguugcaaauucugaguc

SEQ ID NO: 470157 - RNA, 19 nt, Artificial Sequence
  Description of Artificial Sequence: Synthetic oligonucleotide
aucacacaagaucaguguc

SEQ ID NO: 470158 - RNA, 19 nt, Artificial Sequence
  Description of Artificial Sequence: Synthetic oligonucleotide
aaauucugagucugccuag

SEQ ID NO: 470159 - RNA, 19 nt, Artificial Sequence
  Description of Artificial Sequence: Synthetic oligonucleotide
ucaggaaauaguuuggguu

SEQ ID NO: 470160 - RNA, 19 nt, Artificial Sequence
  Description of Artificial Sequence: Synthetic oligonucleotide
uuuaaugcuggguucgaga

SEQ ID NO: 470161 - RNA, 19 nt, Artificial Sequence
  Description of Artificial Sequence: Synthetic oligonucleotide
aucagguguaucuaggcug

SEQ ID NO: 470162 - RNA, 19 nt, Artificial Sequence
  Description of Artificial Sequence: Synthetic oligonucleotide
ucuggauugcaaaugccca

SEQ ID NO: 470163 - RNA, 19 nt, Artificial Sequence
  Description of Artificial Sequence: Synthetic oligonucleotide
aacuaaacaaccaccucag

SEQ ID NO: 470164 - RNA, 19 nt, Artificial Sequence
  Description of Artificial Sequence: Synthetic oligonucleotide
aguauacuaccuguagacc

SEQ ID NO: 470165 - RNA, 19 nt, Artificial Sequence
  Description of Artificial Sequence: Synthetic oligonucleotide
caguauacuaccuguagac

SEQ ID NO: 470166 - RNA, 19 nt, Artificial Sequence
  Description of Artificial Sequence: Synthetic oligonucleotide
ugaaccuacaaggaggcug

SEQ ID NO: 470167 - RNA, 19 nt, Artificial Sequence
  Description of Artificial Sequence: Synthetic oligonucleotide
uggcacuuauuccagagac

SEQ ID NO: 470168 - RNA, 19 nt, Artificial Sequence
  Description of Artificial Sequence: Synthetic oligonucleotide
uauacuaccuguagaccca

SEQ ID NO: 470169 - RNA, 19 nt, Artificial Sequence
  Description of Artificial Sequence: Synthetic oligonucleotide
aggagaucugcacauugac

SEQ ID NO: 470170 - RNA, 19 nt, Artificial Sequence
  Description of Artificial Sequence: Synthetic oligonucleotide
gaugguacguaaaugcccc

SEQ ID NO: 470171 - RNA, 19 nt, Artificial Sequence
  Description of Artificial Sequence: Synthetic oligonucleotide
ucacacaagaucaguguca

SEQ ID NO: 470172 - RNA, 19 nt, Artificial Sequence
  Description of Artificial Sequence: Synthetic oligonucleotide
guaauuggguucuuaaaca

SEQ ID NO: 470173 - RNA, 19 nt, Artificial Sequence
  Description of Artificial Sequence: Synthetic oligonucleotide
uacuacaugugaaggaccu

SEQ ID NO: 470174 - RNA, 19 nt, Artificial Sequence
  Description of Artificial Sequence: Synthetic oligonucleotide
cucagccagacaaagguag

SEQ ID NO: 470175 - RNA, 19 nt, Artificial Sequence
  Description of Artificial Sequence: Synthetic oligonucleotide
cuuggccuuaaauccaacg

SEQ ID NO: 470176 - RNA, 19 nt, Artificial Sequence
  Description of Artificial Sequence: Synthetic oligonucleotide
aaagggccaauuuaaugaa

SEQ ID NO: 470177 - RNA, 19 nt, Artificial Sequence
  Description of Artificial Sequence: Synthetic oligonucleotide
uggccuuaaauccaacgga

SEQ ID NO: 470178 - RNA, 19 nt, Artificial Sequence
  Description of Artificial Sequence: Synthetic oligonucleotide
ucuauggguggugaguagg

SEQ ID NO: 470179 - RNA, 19 nt, Artificial Sequence
  Description of Artificial Sequence: Synthetic oligonucleotide
aagucuagcuccguuagca

SEQ ID NO: 470180 - RNA, 19 nt, Artificial Sequence
  Description of Artificial Sequence: Synthetic oligonucleotide
uuaacuagcccaguguccu

SEQ ID NO: 470181 - RNA, 19 nt, Artificial Sequence
  Description of Artificial Sequence: Synthetic oligonucleotide
ugaagugccccaauaugga

SEQ ID NO: 470182 - RNA, 19 nt, Artificial Sequence
  Description of Artificial Sequence: Synthetic oligonucleotide
uggguucgagaaaacaagc

SEQ ID NO: 470183 - RNA, 19 nt, Artificial Sequence
  Description of Artificial Sequence: Synthetic oligonucleotide
cuggguucgagaaaacaag

SEQ ID NO: 470184 - RNA, 19 nt, Artificial Sequence
  Description of Artificial Sequence: Synthetic oligonucleotide
guggauaauagcccauagg

SEQ ID NO: 470185 - RNA, 19 nt, Artificial Sequence
  Description of Artificial Sequence: Synthetic oligonucleotide
aauaucagcagagggcagu

SEQ ID NO: 470186 - RNA, 19 nt, Artificial Sequence
  Description of Artificial Sequence: Synthetic oligonucleotide
acauugacucaaaggaagc

SEQ ID NO: 470187 - RNA, 19 nt, Artificial Sequence
  Description of Artificial Sequence: Synthetic oligonucleotide
cacgugggcauauucacag

SEQ ID NO: 470188 - RNA, 19 nt, Artificial Sequence
  Description of Artificial Sequence: Synthetic oligonucleotide
uaccuguagacccacccug

SEQ ID NO: 470189 - RNA, 19 nt, Artificial Sequence
  Description of Artificial Sequence: Synthetic oligonucleotide
aguaagagacccucuccag

SEQ ID NO: 470190 - RNA, 19 nt, Artificial Sequence
  Description of Artificial Sequence: Synthetic oligonucleotide
aaacuacaaacugggacca

SEQ ID NO: 470191 - RNA, 19 nt, Artificial Sequence
  Description of Artificial Sequence: Synthetic oligonucleotide
caccucuaacuaaacaacc

SEQ ID NO: 470192 - RNA, 19 nt, Artificial Sequence
  Description of Artificial Sequence: Synthetic oligonucleotide
acuacaaacugggaccagg

SEQ ID NO: 470193 - RNA, 19 nt, Artificial Sequence
  Description of Artificial Sequence: Synthetic oligonucleotide
ucagguguaucuaggcugu

SEQ ID NO: 470194 - RNA, 19 nt, Artificial Sequence
  Description of Artificial Sequence: Synthetic oligonucleotide
guugcaaauucugagucug

SEQ ID NO: 470195 - RNA, 19 nt, Artificial Sequence
  Description of Artificial Sequence: Synthetic oligonucleotide
ucuagcuccguuagcacaa

SEQ ID NO: 470196 - RNA, 19 nt, Artificial Sequence
  Description of Artificial Sequence: Synthetic oligonucleotide
guaucuaggcuguagcuuc

SEQ ID NO: 470197 - RNA, 19 nt, Artificial Sequence
  Description of Artificial Sequence: Synthetic oligonucleotide
uuuacacccuggcugggca

SEQ ID NO: 470198 - RNA, 19 nt, Artificial Sequence
  Description of Artificial Sequence: Synthetic oligonucleotide
ugaguagguugcaaauucu

SEQ ID NO: 470199 - RNA, 19 nt, Artificial Sequence
  Description of Artificial Sequence: Synthetic oligonucleotide
agauguaggcuuugcagcu

SEQ ID NO: 470200 - RNA, 19 nt, Artificial Sequence
  Description of Artificial Sequence: Synthetic oligonucleotide
acaaaaguagacagacagg

SEQ ID NO: 470201 - RNA, 19 nt, Artificial Sequence
  Description of Artificial Sequence: Synthetic oligonucleotide
ugguacuacaugugaagga

SEQ ID NO: 470202 - RNA, 19 nt, Artificial Sequence
  Description of Artificial Sequence: Synthetic oligonucleotide
uuauacccauauauagcac

SEQ ID NO: 470203 - RNA, 19 nt, Artificial Sequence
  Description of Artificial Sequence: Synthetic oligonucleotide
ggggaugguacguaaaugc

SEQ ID NO: 470204 - RNA, 19 nt, Artificial Sequence
  Description of Artificial Sequence: Synthetic oligonucleotide
auaccaggcaacucuugag

SEQ ID NO: 470205 - RNA, 19 nt, Artificial Sequence
  Description of Artificial Sequence: Synthetic oligonucleotide
uuuccucuaguaguggggc

SEQ ID NO: 470206 - RNA, 19 nt, Artificial Sequence
  Description of Artificial Sequence: Synthetic oligonucleotide
auguaggcuuugcagcugg

SEQ ID NO: 470207 - RNA, 19 nt, Artificial Sequence
  Description of Artificial Sequence: Synthetic oligonucleotide
auaauagcccauagguggg

SEQ ID NO: 470208 - RNA, 19 nt, Artificial Sequence
  Description of Artificial Sequence: Synthetic oligonucleotide
gugauaggaggccaugcag

SEQ ID NO: 470209 - RNA, 19 nt, Artificial Sequence
  Description of Artificial Sequence: Synthetic oligonucleotide
cugucccucagaaaagaag

SEQ ID NO: 470210 - RNA, 19 nt, Artificial Sequence
  Description of Artificial Sequence: Synthetic oligonucleotide
acaaagguagguugugggu

SEQ ID NO: 470211 - RNA, 19 nt, Artificial Sequence
  Description of Artificial Sequence: Synthetic oligonucleotide
cuggccccagaaaauauag

SEQ ID NO: 470212 - RNA, 19 nt, Artificial Sequence
  Description of Artificial Sequence: Synthetic oligonucleotide
gacggguuccccaugcacg

SEQ ID NO: 470213 - RNA, 19 nt, Artificial Sequence
  Description of Artificial Sequence: Synthetic oligonucleotide
guagugugagaccaggaga

SEQ ID NO: 470214 - RNA, 19 nt, Artificial Sequence
  Description of Artificial Sequence: Synthetic oligonucleotide
uucguggauagcucaguug

SEQ ID NO: 470215 - RNA, 19 nt, Artificial Sequence
  Description of Artificial Sequence: Synthetic oligonucleotide
uugccuuauaccaggcaac

SEQ ID NO: 470216 - RNA, 19 nt, Artificial Sequence
  Description of Artificial Sequence: Synthetic oligonucleotide
guaaaaguuauacccauau

SEQ ID NO: 470217 - RNA, 19 nt, Artificial Sequence
  Description of Artificial Sequence: Synthetic oligonucleotide
agccuagugucacaguucu

SEQ ID NO: 470218 - RNA, 19 nt, Artificial Sequence
  Description of Artificial Sequence: Synthetic oligonucleotide
ugcaucacugcuggggagg

SEQ ID NO: 470219 - RNA, 19 nt, Artificial Sequence
  Description of Artificial Sequence: Synthetic oligonucleotide
uuuuaaugcuggguucgag

SEQ ID NO: 470220 - RNA, 19 nt, Artificial Sequence
  Description of Artificial Sequence: Synthetic oligonucleotide
acuuauuccagagacucau

SEQ ID NO: 470221 - RNA, 19 nt, Artificial Sequence
  Description of Artificial Sequence: Synthetic oligonucleotide
acucucaguaagcuaccag

SEQ ID NO: 470222 - RNA, 19 nt, Artificial Sequence
  Description of Artificial Sequence: Synthetic oligonucleotide
uggauagcucaguugauuu

SEQ ID NO: 470223 - RNA, 19 nt, Artificial Sequence
  Description of Artificial Sequence: Synthetic oligonucleotide
auauggaagcaagucaacu

SEQ ID NO: 470224 - RNA, 19 nt, Artificial Sequence
  Description of Artificial Sequence: Synthetic oligonucleotide
cuaccuaccccaagugacc

SEQ ID NO: 470225 - RNA, 19 nt, Artificial Sequence
  Description of Artificial Sequence: Synthetic oligonucleotide
cuaacuaaacaaccaccuc

SEQ ID NO: 470226 - RNA, 19 nt, Artificial Sequence
  Description of Artificial Sequence: Synthetic oligonucleotide
aaaaguagacagacagggu

SEQ ID NO: 470227 - RNA, 19 nt, Artificial Sequence
  Description of Artificial Sequence: Synthetic oligonucleotide
auacccauauauagcacag

SEQ ID NO: 470228 - RNA, 19 nt, Artificial Sequence
  Description of Artificial Sequence: Synthetic oligonucleotide
gucauggucauuccuucug

SEQ ID NO: 470229 - RNA, 19 nt, Artificial Sequence
  Description of Artificial Sequence: Synthetic oligonucleotide
guaagcuaccagguaaaag

SEQ ID NO: 470230 - RNA, 19 nt, Artificial Sequence
  Description of Artificial Sequence: Synthetic oligonucleotide
gaguagguugcaaauucug

SEQ ID NO: 470231 - RNA, 19 nt, Artificial Sequence
  Description of Artificial Sequence: Synthetic oligonucleotide
gguguaucuaggcuguagc

SEQ ID NO: 470232 - RNA, 19 nt, Artificial Sequence
  Description of Artificial Sequence: Synthetic oligonucleotide
ggacacaguguccacgugg

SEQ ID NO: 470233 - RNA, 19 nt, Artificial Sequence
  Description of Artificial Sequence: Synthetic oligonucleotide
ucugcguaacagcaucuuc

SEQ ID NO: 470234 - RNA, 19 nt, Artificial Sequence
  Description of Artificial Sequence: Synthetic oligonucleotide
agacucaugugcuuaggau

SEQ ID NO: 470235 - RNA, 19 nt, Artificial Sequence
  Description of Artificial Sequence: Synthetic oligonucleotide
agcucguucuagcugucag

SEQ ID NO: 470236 - RNA, 19 nt, Artificial Sequence
  Description of Artificial Sequence: Synthetic oligonucleotide
cauugcccuccacugaugc

SEQ ID NO: 470237 - RNA, 19 nt, Artificial Sequence
  Description of Artificial Sequence: Synthetic oligonucleotide
acuagagccucugcguaac

SEQ ID NO: 470238 - RNA, 19 nt, Artificial Sequence
  Description of Artificial Sequence: Synthetic oligonucleotide
agcuccguuagcacaagcg

SEQ ID NO: 470239 - RNA, 19 nt, Artificial Sequence
  Description of Artificial Sequence: Synthetic oligonucleotide
uccccaugcacgaugggaa

SEQ ID NO: 470240 - RNA, 19 nt, Artificial Sequence
  Description of Artificial Sequence: Synthetic oligonucleotide
cuaaacaaccaccucaggu

SEQ ID NO: 470241 - RNA, 19 nt, Artificial Sequence
  Description of Artificial Sequence: Synthetic oligonucleotide
ucgagaaaacaagcaacca

SEQ ID NO: 470242 - RNA, 19 nt, Artificial Sequence
  Description of Artificial Sequence: Synthetic oligonucleotide
caaagguagguuguggguc

SEQ ID NO: 470243 - RNA, 19 nt, Artificial Sequence
  Description of Artificial Sequence: Synthetic oligonucleotide
uugcaaauucugagucugc

SEQ ID NO: 470244 - RNA, 19 nt, Artificial Sequence
  Description of Artificial Sequence: Synthetic oligonucleotide
caaggaggcuguuaugauc

SEQ ID NO: 470245 - RNA, 19 nt, Artificial Sequence
  Description of Artificial Sequence: Synthetic oligonucleotide
agugaccuauuccaucccu

SEQ ID NO: 470246 - RNA, 19 nt, Artificial Sequence
  Description of Artificial Sequence: Synthetic oligonucleotide
uguuaugaucugccacucu

SEQ ID NO: 470247 - RNA, 19 nt, Artificial Sequence
  Description of Artificial Sequence: Synthetic oligonucleotide
aacugccccuuccggacag

SEQ ID NO: 470248 - RNA, 19 nt, Artificial Sequence
  Description of Artificial Sequence: Synthetic oligonucleotide
cugagcuaacauucuggag

SEQ ID NO: 470249 - RNA, 19 nt, Artificial Sequence
  Description of Artificial Sequence: Synthetic oligonucleotide
ugacucaaaggaagcuaga

SEQ ID NO: 470250 - RNA, 19 nt, Artificial Sequence
  Description of Artificial Sequence: Synthetic oligonucleotide
ggguuuacacccuggcugg

SEQ ID NO: 470251 - RNA, 19 nt, Artificial Sequence
  Description of Artificial Sequence: Synthetic oligonucleotide
gaggaggguagaaaccugc

SEQ ID NO: 470252 - RNA, 19 nt, Artificial Sequence
  Description of Artificial Sequence: Synthetic oligonucleotide
ugcaugcagguacacugga

SEQ ID NO: 470253 - RNA, 19 nt, Artificial Sequence
  Description of Artificial Sequence: Synthetic oligonucleotide
ugcguaacagcaucuucuc

SEQ ID NO: 470254 - RNA, 19 nt, Artificial Sequence
  Description of Artificial Sequence: Synthetic oligonucleotide
cucguucuagcugucagug

SEQ ID NO: 470255 - RNA, 19 nt, Artificial Sequence
  Description of Artificial Sequence: Synthetic oligonucleotide
aguagguugcaaauucuga

SEQ ID NO: 470256 - RNA, 19 nt, Artificial Sequence
  Description of Artificial Sequence: Synthetic oligonucleotide
ugaccuauuccaucccuau

SEQ ID NO: 470257 - RNA, 19 nt, Artificial Sequence
  Description of Artificial Sequence: Synthetic oligonucleotide
uucucuauggguggugagu

SEQ ID NO: 470258 - RNA, 19 nt, Artificial Sequence
  Description of Artificial Sequence: Synthetic oligonucleotide
aacaaccaccucaggugac

SEQ ID NO: 470259 - RNA, 19 nt, Artificial Sequence
  Description of Artificial Sequence: Synthetic oligonucleotide
uguaggcuuugcagcuggg

SEQ ID NO: 470260 - RNA, 19 nt, Artificial Sequence
  Description of Artificial Sequence: Synthetic oligonucleotide
uggugaguagguugcaaau

SEQ ID NO: 470261 - RNA, 19 nt, Artificial Sequence
  Description of Artificial Sequence: Synthetic oligonucleotide
ucuaggcuguagcuucucu

SEQ ID NO: 470262 - RNA, 19 nt, Artificial Sequence
  Description of Artificial Sequence: Synthetic oligonucleotide
uccguuagcacaagcgcuu

SEQ ID NO: 470263 - RNA, 19 nt, Artificial Sequence
  Description of Artificial Sequence: Synthetic oligonucleotide
uccucuaguaguggggcug

SEQ ID NO: 470264 - RNA, 19 nt, Artificial Sequence
  Description of Artificial Sequence: Synthetic oligonucleotide
aguuuggguuuacacccug

SEQ ID NO: 470265 - RNA, 19 nt, Artificial Sequence
  Description of Artificial Sequence: Synthetic oligonucleotide
cuuauuccagagacucaug

SEQ ID NO: 470266 - RNA, 19 nt, Artificial Sequence
  Description of Artificial Sequence: Synthetic oligonucleotide
uguaggcgccaucugcacu

SEQ ID NO: 470267 - RNA, 19 nt, Artificial Sequence
  Description of Artificial Sequence: Synthetic oligonucleotide
auugacucaaaggaagcua

SEQ ID NO: 470268 - RNA, 19 nt, Artificial Sequence
  Description of Artificial Sequence: Synthetic oligonucleotide
gguggauaauagcccauag

SEQ ID NO: 470269 - RNA, 19 nt, Artificial Sequence
  Description of Artificial Sequence: Synthetic oligonucleotide
aacuagcccaguguccucu

SEQ ID NO: 470270 - RNA, 19 nt, Artificial Sequence
  Description of Artificial Sequence: Synthetic oligonucleotide
gggacaauggcaaaacuuc

SEQ ID NO: 470271 - RNA, 19 nt, Artificial Sequence
  Description of Artificial Sequence: Synthetic oligonucleotide
gguucgagaaaacaagcaa

SEQ ID NO: 470272 - RNA, 19 nt, Artificial Sequence
  Description of Artificial Sequence: Synthetic oligonucleotide
ucaguugauuucugcuccu

SEQ ID NO: 470273 - RNA, 19 nt, Artificial Sequence
  Description of Artificial Sequence: Synthetic oligonucleotide
uuguuucccaggcccaauc

SEQ ID NO: 470274 - RNA, 19 nt, Artificial Sequence
  Description of Artificial Sequence: Synthetic oligonucleotide
cauauauagcacagacaca

SEQ ID NO: 470275 - RNA, 19 nt, Artificial Sequence
  Description of Artificial Sequence: Synthetic oligonucleotide
uaccccaagugaccuauuc

SEQ ID NO: 470276 - RNA, 19 nt, Artificial Sequence
  Description of Artificial Sequence: Synthetic oligonucleotide
uacaugugaaggaccuguc

SEQ ID NO: 470277 - RNA, 19 nt, Artificial Sequence
  Description of Artificial Sequence: Synthetic oligonucleotide
ccuaccuaccccaagugac

SEQ ID NO: 470278 - RNA, 19 nt, Artificial Sequence
  Description of Artificial Sequence: Synthetic oligonucleotide
guaggcgccaucugcacuc

SEQ ID NO: 470279 - RNA, 19 nt, Artificial Sequence
  Description of Artificial Sequence: Synthetic oligonucleotide
ugguagugugagaccagga

SEQ ID NO: 470280 - RNA, 19 nt, Artificial Sequence
  Description of Artificial Sequence: Synthetic oligonucleotide
accccaguaagagacccuc

SEQ ID NO: 470281 - RNA, 19 nt, Artificial Sequence
  Description of Artificial Sequence: Synthetic oligonucleotide
ucucuauggguggugagua

SEQ ID NO: 470282 - RNA, 19 nt, Artificial Sequence
  Description of Artificial Sequence: Synthetic oligonucleotide
ucucccuacugaagugccc

SEQ ID NO: 470283 - RNA, 19 nt, Artificial Sequence
  Description of Artificial Sequence: Synthetic oligonucleotide
ggauaauagcccauaggug

SEQ ID NO: 470284 - RNA, 19 nt, Artificial Sequence
  Description of Artificial Sequence: Synthetic oligonucleotide
ggagcaauaucagcagagg

SEQ ID NO: 470285 - RNA, 19 nt, Artificial Sequence
  Description of Artificial Sequence: Synthetic oligonucleotide
accucuaacuaaacaacca

SEQ ID NO: 470286 - RNA, 19 nt, Artificial Sequence
  Description of Artificial Sequence: Synthetic oligonucleotide
gugcgucacauccuugaag

SEQ ID NO: 470287 - RNA, 19 nt, Artificial Sequence
  Description of Artificial Sequence: Synthetic oligonucleotide
gacacuagagccucugcgu

SEQ ID NO: 470288 - RNA, 19 nt, Artificial Sequence
  Description of Artificial Sequence: Synthetic oligonucleotide
agccagguacacaccaggc

SEQ ID NO: 470289 - RNA, 19 nt, Artificial Sequence
  Description of Artificial Sequence: Synthetic oligonucleotide
gugguagugugagaccagg

SEQ ID NO: 470290 - RNA, 19 nt, Artificial Sequence
  Description of Artificial Sequence: Synthetic oligonucleotide
cucccuacugaagugcccc

SEQ ID NO: 470291 - RNA, 19 nt, Artificial Sequence
  Description of Artificial Sequence: Synthetic oligonucleotide
aaucucuugcuugccagua

SEQ ID NO: 470292 - RNA, 19 nt, Artificial Sequence
  Description of Artificial Sequence: Synthetic oligonucleotide
uaguuuggguuuacacccu

SEQ ID NO: 470293 - RNA, 19 nt, Artificial Sequence
  Description of Artificial Sequence: Synthetic oligonucleotide
ggaugguacguaaaugccc

SEQ ID NO: 470294 - RNA, 19 nt, Artificial Sequence
  Description of Artificial Sequence: Synthetic oligonucleotide
ugccuuauaccaggcaacu

SEQ ID NO: 470295 - RNA, 19 nt, Artificial Sequence
  Description of Artificial Sequence: Synthetic oligonucleotide
ugucacaguucucccuacu

SEQ ID NO: 470296 - RNA, 19 nt, Artificial Sequence
  Description of Artificial Sequence: Synthetic oligonucleotide
cacuacuugugacuucuuc

SEQ ID NO: 470297 - RNA, 19 nt, Artificial Sequence
  Description of Artificial Sequence: Synthetic oligonucleotide
guacuacaugugaaggacc

SEQ ID NO: 470298 - RNA, 19 nt, Artificial Sequence
  Description of Artificial Sequence: Synthetic oligonucleotide
gccagacaaagguagguug

SEQ ID NO: 470299 - RNA, 19 nt, Artificial Sequence
  Description of Artificial Sequence: Synthetic oligonucleotide
auaggaggccaugcagugg

SEQ ID NO: 470300 - RNA, 19 nt, Artificial Sequence
  Description of Artificial Sequence: Synthetic oligonucleotide
auacuaccuguagacccac

SEQ ID NO: 470301 - RNA, 19 nt, Artificial Sequence
  Description of Artificial Sequence: Synthetic oligonucleotide
ugugcgucacauccuugaa

SEQ ID NO: 470302 - RNA, 19 nt, Artificial Sequence
  Description of Artificial Sequence: Synthetic oligonucleotide
uggauugcaaaugcccaaa

SEQ ID NO: 470303 - RNA, 19 nt, Artificial Sequence
  Description of Artificial Sequence: Synthetic oligonucleotide
gguguaauuggguucuuaa

SEQ ID NO: 470304 - RNA, 19 nt, Artificial Sequence
  Description of Artificial Sequence: Synthetic oligonucleotide
ccucuaacuaaacaaccac

SEQ ID NO: 470305 - RNA, 19 nt, Artificial Sequence
  Description of Artificial Sequence: Synthetic oligonucleotide
ugcugacacuccuggaccu

SEQ ID NO: 470306 - RNA, 19 nt, Artificial Sequence
  Description of Artificial Sequence: Synthetic oligonucleotide
gcuccguuagcacaagcgc

SEQ ID NO: 470307 - RNA, 19 nt, Artificial Sequence
  Description of Artificial Sequence: Synthetic oligonucleotide
auagggagcaaagcacaug

SEQ ID NO: 470308 - RNA, 19 nt, Artificial Sequence
  Description of Artificial Sequence: Synthetic oligonucleotide
aacuacaaacugggaccag

SEQ ID NO: 470309 - RNA, 19 nt, Artificial Sequence
  Description of Artificial Sequence: Synthetic oligonucleotide
gcacuuauuccagagacuc

SEQ ID NO: 470310 - RNA, 19 nt, Artificial Sequence
  Description of Artificial Sequence: Synthetic oligonucleotide
gaagugccccaauauggaa

SEQ ID NO: 470311 - RNA, 19 nt, Artificial Sequence
  Description of Artificial Sequence: Synthetic oligonucleotide
agguguaucuaggcuguag

SEQ ID NO: 470312 - RNA, 19 nt, Artificial Sequence
  Description of Artificial Sequence: Synthetic oligonucleotide
guagguuguggguccugag

SEQ ID NO: 470313 - RNA, 19 nt, Artificial Sequence
  Description of Artificial Sequence: Synthetic oligonucleotide
ggcaaaacuuccaacccug

SEQ ID NO: 470314 - RNA, 19 nt, Artificial Sequence
  Description of Artificial Sequence: Synthetic oligonucleotide
cuacaaggaggcuguuaug

SEQ ID NO: 470315 - RNA, 19 nt, Artificial Sequence
  Description of Artificial Sequence: Synthetic oligonucleotide
ugagucugccuaguucgug

SEQ ID NO: 470316 - RNA, 19 nt, Artificial Sequence
  Description of Artificial Sequence: Synthetic oligonucleotide
caagucuagcuccguuagc

SEQ ID NO: 470317 - RNA, 19 nt, Artificial Sequence
  Description of Artificial Sequence: Synthetic oligonucleotide
acacuagagccucugcgua

SEQ ID NO: 470318 - RNA, 19 nt, Artificial Sequence
  Description of Artificial Sequence: Synthetic oligonucleotide
cucuauggguggugaguag

SEQ ID NO: 470319 - RNA, 19 nt, Artificial Sequence
  Description of Artificial Sequence: Synthetic oligonucleotide
cauuugcauccuaccuacc

SEQ ID NO: 470320 - RNA, 19 nt, Artificial Sequence
  Description of Artificial Sequence: Synthetic oligonucleotide
guaagucuauauauauaaa

SEQ ID NO: 470321 - RNA, 19 nt, Artificial Sequence
  Description of Artificial Sequence: Synthetic oligonucleotide
cugcguaacagcaucuucu

SEQ ID NO: 470322 - RNA, 19 nt, Artificial Sequence
  Description of Artificial Sequence: Synthetic oligonucleotide
gaccuauuccaucccuauc

SEQ ID NO: 470323 - RNA, 19 nt, Artificial Sequence
  Description of Artificial Sequence: Synthetic oligonucleotide
caucacacaagaucagugu

SEQ ID NO: 470324 - RNA, 19 nt, Artificial Sequence
  Description of Artificial Sequence: Synthetic oligonucleotide
cagacacuagagccucugc

SEQ ID NO: 470325 - RNA, 19 nt, Artificial Sequence
  Description of Artificial Sequence: Synthetic oligonucleotide
uacccauauauagcacaga

SEQ ID NO: 470326 - RNA, 19 nt, Artificial Sequence
  Description of Artificial Sequence: Synthetic oligonucleotide
uaccuaccccaagugaccu

SEQ ID NO: 470327 - RNA, 19 nt, Artificial Sequence
  Description of Artificial Sequence: Synthetic oligonucleotide
acagugauaggaggccaug

SEQ ID NO: 470328 - RNA, 19 nt, Artificial Sequence
  Description of Artificial Sequence: Synthetic oligonucleotide
gaccauucaggaaauaguu

SEQ ID NO: 470329 - RNA, 19 nt, Artificial Sequence
  Description of Artificial Sequence: Synthetic oligonucleotide
gggaugguacguaaaugcc

SEQ ID NO: 470330 - RNA, 19 nt, Artificial Sequence
  Description of Artificial Sequence: Synthetic oligonucleotide
cagccuagugucacaguuc

SEQ ID NO: 470331 - RNA, 19 nt, Artificial Sequence
  Description of Artificial Sequence: Synthetic oligonucleotide
ccaguaagagacccucucc

SEQ ID NO: 470332 - RNA, 19 nt, Artificial Sequence
  Description of Artificial Sequence: Synthetic oligonucleotide
ggacaguauuuccagggga

SEQ ID NO: 470333 - RNA, 19 nt, Artificial Sequence
  Description of Artificial Sequence: Synthetic oligonucleotide
cagaaaauauagggguuca

SEQ ID NO: 470334 - RNA, 19 nt, Artificial Sequence
  Description of Artificial Sequence: Synthetic oligonucleotide
gcuguuaugaucugccacu

SEQ ID NO: 470335 - RNA, 19 nt, Artificial Sequence
  Description of Artificial Sequence: Synthetic oligonucleotide
caggaaauaguuuggguuu

SEQ ID NO: 470336 - RNA, 19 nt, Artificial Sequence
  Description of Artificial Sequence: Synthetic oligonucleotide
guuuacacccuggcugggc

SEQ ID NO: 470337 - RNA, 19 nt, Artificial Sequence
  Description of Artificial Sequence: Synthetic oligonucleotide
guggguggugucauugccc

SEQ ID NO: 470338 - RNA, 19 nt, Artificial Sequence
  Description of Artificial Sequence: Synthetic oligonucleotide
ggguccugagcuaacauuc

SEQ ID NO: 470339 - RNA, 19 nt, Artificial Sequence
  Description of Artificial Sequence: Synthetic oligonucleotide
aggcuguuaugaucugcca

SEQ ID NO: 470340 - RNA, 19 nt, Artificial Sequence
  Description of Artificial Sequence: Synthetic oligonucleotide
cccaauauggaagcaaguc

SEQ ID NO: 470341 - RNA, 19 nt, Artificial Sequence
  Description of Artificial Sequence: Synthetic oligonucleotide
acuacaugugaaggaccug

SEQ ID NO: 470342 - RNA, 19 nt, Artificial Sequence
  Description of Artificial Sequence: Synthetic oligonucleotide
aucugcacucauggugagg

SEQ ID NO: 470343 - RNA, 19 nt, Artificial Sequence
  Description of Artificial Sequence: Synthetic oligonucleotide
aggaccccaguaagagacc

SEQ ID NO: 470344 - RNA, 19 nt, Artificial Sequence
  Description of Artificial Sequence: Synthetic oligonucleotide
agcaaagcacauggggcca

SEQ ID NO: 470345 - RNA, 19 nt, Artificial Sequence
  Description of Artificial Sequence: Synthetic oligonucleotide
ggauagcucaguugauuuc

SEQ ID NO: 470346 - RNA, 19 nt, Artificial Sequence
  Description of Artificial Sequence: Synthetic oligonucleotide
cuggauugcaaaugcccaa

SEQ ID NO: 470347 - RNA, 19 nt, Artificial Sequence
  Description of Artificial Sequence: Synthetic oligonucleotide
ugguggauaauagcccaua

SEQ ID NO: 470348 - RNA, 19 nt, Artificial Sequence
  Description of Artificial Sequence: Synthetic oligonucleotide
agugguagugugagaccag

SEQ ID NO: 470349 - RNA, 19 nt, Artificial Sequence
  Description of Artificial Sequence: Synthetic oligonucleotide
caugcacgaugggaagggg

SEQ ID NO: 470350 - RNA, 19 nt, Artificial Sequence
  Description of Artificial Sequence: Synthetic oligonucleotide
cuuugccuuauaccaggca

SEQ ID NO: 470351 - RNA, 19 nt, Artificial Sequence
  Description of Artificial Sequence: Synthetic oligonucleotide
agacccacccugucccuca

SEQ ID NO: 470352 - RNA, 19 nt, Artificial Sequence
  Description of Artificial Sequence: Synthetic oligonucleotide
ugcugcaugcagguacacu

SEQ ID NO: 470353 - RNA, 19 nt, Artificial Sequence
  Description of Artificial Sequence: Synthetic oligonucleotide
agcuaacauucuggagugg

SEQ ID NO: 470354 - RNA, 19 nt, Artificial Sequence
  Description of Artificial Sequence: Synthetic oligonucleotide
ggauugcaaaugcccaaac

SEQ ID NO: 470355 - RNA, 19 nt, Artificial Sequence
  Description of Artificial Sequence: Synthetic oligonucleotide
cuacaugugaaggaccugu

SEQ ID NO: 470356 - RNA, 19 nt, Artificial Sequence
  Description of Artificial Sequence: Synthetic oligonucleotide
uagcugucaguguggcccu

SEQ ID NO: 470357 - RNA, 19 nt, Artificial Sequence
  Description of Artificial Sequence: Synthetic oligonucleotide
cugcacucauggugagggg

SEQ ID NO: 470358 - RNA, 19 nt, Artificial Sequence
  Description of Artificial Sequence: Synthetic oligonucleotide
gcaacugccccuuccggac

SEQ ID NO: 470359 - RNA, 19 nt, Artificial Sequence
  Description of Artificial Sequence: Synthetic oligonucleotide
gacacgugugcgucacauc

SEQ ID NO: 470360 - RNA, 19 nt, Artificial Sequence
  Description of Artificial Sequence: Synthetic oligonucleotide
augguacguaaaugccccu

SEQ ID NO: 470361 - RNA, 19 nt, Artificial Sequence
  Description of Artificial Sequence: Synthetic oligonucleotide
aggaaauaguuuggguuua

SEQ ID NO: 470362 - RNA, 19 nt, Artificial Sequence
  Description of Artificial Sequence: Synthetic oligonucleotide
gacucaaaggaagcuagau

SEQ ID NO: 470363 - RNA, 19 nt, Artificial Sequence
  Description of Artificial Sequence: Synthetic oligonucleotide
ucccuacugaagugcccca

SEQ ID NO: 470364 - RNA, 19 nt, Artificial Sequence
  Description of Artificial Sequence: Synthetic oligonucleotide
cagguacacaccaggcaca

SEQ ID NO: 470365 - RNA, 19 nt, Artificial Sequence
  Description of Artificial Sequence: Synthetic oligonucleotide
guuagcacaagcgcuugua

SEQ ID NO: 470366 - RNA, 19 nt, Artificial Sequence
  Description of Artificial Sequence: Synthetic oligonucleotide
ugccacucucaguaagcua

SEQ ID NO: 470367 - RNA, 19 nt, Artificial Sequence
  Description of Artificial Sequence: Synthetic oligonucleotide
cuaacauucuggagugggu

SEQ ID NO: 470368 - RNA, 19 nt, Artificial Sequence
  Description of Artificial Sequence: Synthetic oligonucleotide
ggugucauugcccuccacu

SEQ ID NO: 470369 - RNA, 19 nt, Artificial Sequence
  Description of Artificial Sequence: Synthetic oligonucleotide
ccuuauaccaggcaacucu

SEQ ID NO: 470370 - RNA, 19 nt, Artificial Sequence
  Description of Artificial Sequence: Synthetic oligonucleotide
uuguggguccugagcuaac

SEQ ID NO: 470371 - RNA, 19 nt, Artificial Sequence
  Description of Artificial Sequence: Synthetic oligonucleotide
ugguacguaaaugccccuu

SEQ ID NO: 470372 - RNA, 19 nt, Artificial Sequence
  Description of Artificial Sequence: Synthetic oligonucleotide
uaacuagcccaguguccuc

SEQ ID NO: 470373 - RNA, 19 nt, Artificial Sequence
  Description of Artificial Sequence: Synthetic oligonucleotide
ccuagaguaagucuauaua

SEQ ID NO: 470374 - RNA, 19 nt, Artificial Sequence
  Description of Artificial Sequence: Synthetic oligonucleotide
gcuggguucgagaaaacaa

SEQ ID NO: 470375 - RNA, 19 nt, Artificial Sequence
  Description of Artificial Sequence: Synthetic oligonucleotide
ugguguaauuggguucuua

SEQ ID NO: 470376 - RNA, 19 nt, Artificial Sequence
  Description of Artificial Sequence: Synthetic oligonucleotide
ugacuaccagggccuuuaa

SEQ ID NO: 470377 - RNA, 19 nt, Artificial Sequence
  Description of Artificial Sequence: Synthetic oligonucleotide
acggagauguggccagaaa

SEQ ID NO: 470378 - RNA, 19 nt, Artificial Sequence
  Description of Artificial Sequence: Synthetic oligonucleotide
accaagacuguggccgugu

SEQ ID NO: 470379 - RNA, 19 nt, Artificial Sequence
  Description of Artificial Sequence: Synthetic oligonucleotide
ggguucgagaaaacaagca

SEQ ID NO: 470380 - RNA, 19 nt, Artificial Sequence
  Description of Artificial Sequence: Synthetic oligonucleotide
acgugggcauauucacaga

SEQ ID NO: 470381 - RNA, 19 nt, Artificial Sequence
  Description of Artificial Sequence: Synthetic oligonucleotide
cccauauauagcacagaca

SEQ ID NO: 470382 - RNA, 19 nt, Artificial Sequence
  Description of Artificial Sequence: Synthetic oligonucleotide
gccucugcguaacagcauc

SEQ ID NO: 470383 - RNA, 19 nt, Artificial Sequence
  Description of Artificial Sequence: Synthetic oligonucleotide
cuauggguggugaguaggu

SEQ ID NO: 470384 - RNA, 19 nt, Artificial Sequence
  Description of Artificial Sequence: Synthetic oligonucleotide
ccaggcaacucuugaggac

SEQ ID NO: 470385 - RNA, 19 nt, Artificial Sequence
  Description of Artificial Sequence: Synthetic oligonucleotide
ggguuccccaugcacgaug

SEQ ID NO: 470386 - RNA, 19 nt, Artificial Sequence
  Description of Artificial Sequence: Synthetic oligonucleotide
cccaguaagagacccucuc

SEQ ID NO: 470387 - RNA, 19 nt, Artificial Sequence
  Description of Artificial Sequence: Synthetic oligonucleotide
accuguagacccacccugu

SEQ ID NO: 470388 - RNA, 19 nt, Artificial Sequence
  Description of Artificial Sequence: Synthetic oligonucleotide
gguugcaaauucugagucu

SEQ ID NO: 470389 - RNA, 19 nt, Artificial Sequence
  Description of Artificial Sequence: Synthetic oligonucleotide
cauugacucaaaggaagcu

SEQ ID NO: 470390 - RNA, 19 nt, Artificial Sequence
  Description of Artificial Sequence: Synthetic oligonucleotide
ggacggguuccccaugcac

SEQ ID NO: 470391 - RNA, 19 nt, Artificial Sequence
  Description of Artificial Sequence: Synthetic oligonucleotide
cuagcuccguuagcacaag

SEQ ID NO: 470392 - RNA, 19 nt, Artificial Sequence
  Description of Artificial Sequence: Synthetic oligonucleotide
gcauccuaccuaccccaag

SEQ ID NO: 470393 - RNA, 19 nt, Artificial Sequence
  Description of Artificial Sequence: Synthetic oligonucleotide
cacuagagccucugcguaa

SEQ ID NO: 470394 - RNA, 19 nt, Artificial Sequence
  Description of Artificial Sequence: Synthetic oligonucleotide
cuucuggccccagaaaaua

SEQ ID NO: 470395 - RNA, 19 nt, Artificial Sequence
  Description of Artificial Sequence: Synthetic oligonucleotide
aggacggguuccccaugca

SEQ ID NO: 470396 - RNA, 19 nt, Artificial Sequence
  Description of Artificial Sequence: Synthetic oligonucleotide
ggaagccuagccuccagcu

SEQ ID NO: 470397 - RNA, 19 nt, Artificial Sequence
  Description of Artificial Sequence: Synthetic oligonucleotide
gacucuuggccugguacua

SEQ ID NO: 470398 - RNA, 19 nt, Artificial Sequence
  Description of Artificial Sequence: Synthetic oligonucleotide
uggugucauugcccuccac

SEQ ID NO: 470399 - RNA, 19 nt, Artificial Sequence
  Description of Artificial Sequence: Synthetic oligonucleotide
augaaccuacaaggaggcu

SEQ ID NO: 470400 - RNA, 19 nt, Artificial Sequence
  Description of Artificial Sequence: Synthetic oligonucleotide
gccagacugauaggugggg

SEQ ID NO: 470401 - RNA, 19 nt, Artificial Sequence
  Description of Artificial Sequence: Synthetic oligonucleotide
uagacccacccugucccuc

SEQ ID NO: 470402 - RNA, 19 nt, Artificial Sequence
  Description of Artificial Sequence: Synthetic oligonucleotide
ggaggaggguagaaaccug

SEQ ID NO: 470403 - RNA, 19 nt, Artificial Sequence
  Description of Artificial Sequence: Synthetic oligonucleotide
caucccuaucuccaccucu

SEQ ID NO: 470404 - RNA, 19 nt, Artificial Sequence
  Description of Artificial Sequence: Synthetic oligonucleotide
cauagggagcaaagcacau

SEQ ID NO: 470405 - RNA, 19 nt, Artificial Sequence
  Description of Artificial Sequence: Synthetic oligonucleotide
cugacacuccuggaccuca

SEQ ID NO: 470406 - RNA, 19 nt, Artificial Sequence
  Description of Artificial Sequence: Synthetic oligonucleotide
accuacaaggaggcuguua

SEQ ID NO: 470407 - RNA, 19 nt, Artificial Sequence
  Description of Artificial Sequence: Synthetic oligonucleotide
ccuacaaggaggcuguuau

SEQ ID NO: 470408 - RNA, 19 nt, Artificial Sequence
  Description of Artificial Sequence: Synthetic oligonucleotide
gguagguuguggguccuga

SEQ ID NO: 470409 - RNA, 19 nt, Artificial Sequence
  Description of Artificial Sequence: Synthetic oligonucleotide
ucuugacuaccagggccuu

SEQ ID NO: 470410 - RNA, 19 nt, Artificial Sequence
  Description of Artificial Sequence: Synthetic oligonucleotide
aguguccacgugggcauau

SEQ ID NO: 470411 - RNA, 19 nt, Artificial Sequence
  Description of Artificial Sequence: Synthetic oligonucleotide
gugaccuauuccaucccua

SEQ ID NO: 470412 - RNA, 19 nt, Artificial Sequence
  Description of Artificial Sequence: Synthetic oligonucleotide
guucguggauagcucaguu

SEQ ID NO: 470413 - RNA, 19 nt, Artificial Sequence
  Description of Artificial Sequence: Synthetic oligonucleotide
cccuaucuccaccucuaac

SEQ ID NO: 470414 - RNA, 19 nt, Artificial Sequence
  Description of Artificial Sequence: Synthetic oligonucleotide
guacguaaaugccccuuuu

SEQ ID NO: 470415 - RNA, 19 nt, Artificial Sequence
  Description of Artificial Sequence: Synthetic oligonucleotide
uaggcgccaucugcacuca

SEQ ID NO: 470416 - RNA, 19 nt, Artificial Sequence
  Description of Artificial Sequence: Synthetic oligonucleotide
ccuuaaauccaacggaauu

SEQ ID NO: 470417 - RNA, 19 nt, Artificial Sequence
  Description of Artificial Sequence: Synthetic oligonucleotide
guaggaccgccaggauaag

SEQ ID NO: 470418 - RNA, 19 nt, Artificial Sequence
  Description of Artificial Sequence: Synthetic oligonucleotide
cuagagccucugcguaaca

SEQ ID NO: 470419 - RNA, 19 nt, Artificial Sequence
  Description of Artificial Sequence: Synthetic oligonucleotide
gucaucccugauggcacca

SEQ ID NO: 470420 - RNA, 19 nt, Artificial Sequence
  Description of Artificial Sequence: Synthetic oligonucleotide
gaaaggagaucugcacauu

SEQ ID NO: 470421 - RNA, 19 nt, Artificial Sequence
  Description of Artificial Sequence: Synthetic oligonucleotide
agguagguuguggguccug

SEQ ID NO: 470422 - RNA, 19 nt, Artificial Sequence
  Description of Artificial Sequence: Synthetic oligonucleotide
gguacguaaaugccccuuu

SEQ ID NO: 470423 - RNA, 19 nt, Artificial Sequence
  Description of Artificial Sequence: Synthetic oligonucleotide
accuaccccaagugaccua

SEQ ID NO: 470424 - RNA, 19 nt, Artificial Sequence
  Description of Artificial Sequence: Synthetic oligonucleotide
guagguggggcuccacuuu

SEQ ID NO: 470425 - RNA, 19 nt, Artificial Sequence
  Description of Artificial Sequence: Synthetic oligonucleotide
caacugccccuuccggaca

SEQ ID NO: 470426 - RNA, 19 nt, Artificial Sequence
  Description of Artificial Sequence: Synthetic oligonucleotide
gccaggcaagacagcagag

SEQ ID NO: 470427 - RNA, 19 nt, Artificial Sequence
  Description of Artificial Sequence: Synthetic oligonucleotide
cacagugauaggaggccau

SEQ ID NO: 470428 - RNA, 19 nt, Artificial Sequence
  Description of Artificial Sequence: Synthetic oligonucleotide
caccaagacuguggccgug

SEQ ID NO: 470429 - RNA, 19 nt, Artificial Sequence
  Description of Artificial Sequence: Synthetic oligonucleotide
ggucauggucauuccuucu

SEQ ID NO: 470430 - RNA, 19 nt, Artificial Sequence
  Description of Artificial Sequence: Synthetic oligonucleotide
ccuuggccuuaaauccaac

SEQ ID NO: 470431 - RNA, 19 nt, Artificial Sequence
  Description of Artificial Sequence: Synthetic oligonucleotide
cugagucugccuaguucgu

SEQ ID NO: 470432 - RNA, 19 nt, Artificial Sequence
  Description of Artificial Sequence: Synthetic oligonucleotide
ggaagugaaagggccaauu

SEQ ID NO: 470433 - RNA, 19 nt, Artificial Sequence
  Description of Artificial Sequence: Synthetic oligonucleotide
cugguggauaauagcccau

SEQ ID NO: 470434 - RNA, 19 nt, Artificial Sequence
  Description of Artificial Sequence: Synthetic oligonucleotide
agccucugcguaacagcau

SEQ ID NO: 470435 - RNA, 19 nt, Artificial Sequence
  Description of Artificial Sequence: Synthetic oligonucleotide
ccacgugggcauauucaca

SEQ ID NO: 470436 - RNA, 19 nt, Artificial Sequence
  Description of Artificial Sequence: Synthetic oligonucleotide
guagacccacccugucccu

SEQ ID NO: 470437 - RNA, 19 nt, Artificial Sequence
  Description of Artificial Sequence: Synthetic oligonucleotide
ggcaacucuugaggacccc

SEQ ID NO: 470438 - RNA, 19 nt, Artificial Sequence
  Description of Artificial Sequence: Synthetic oligonucleotide
agccuagccuccagcucgu

SEQ ID NO: 470439 - RNA, 19 nt, Artificial Sequence
  Description of Artificial Sequence: Synthetic oligonucleotide
gccuuauaccaggcaacuc

SEQ ID NO: 470440 - RNA, 19 nt, Artificial Sequence
  Description of Artificial Sequence: Synthetic oligonucleotide
ggcacuuauuccagagacu

SEQ ID NO: 470441 - RNA, 19 nt, Artificial Sequence
  Description of Artificial Sequence: Synthetic oligonucleotide
gugcugcaugcagguacac

SEQ ID NO: 470442 - RNA, 19 nt, Artificial Sequence
  Description of Artificial Sequence: Synthetic oligonucleotide
cccuagaguaagucuauau

SEQ ID NO: 470443 - RNA, 19 nt, Artificial Sequence
  Description of Artificial Sequence: Synthetic oligonucleotide
guguccucuuugccuuaua

SEQ ID NO: 470444 - RNA, 19 nt, Artificial Sequence
  Description of Artificial Sequence: Synthetic oligonucleotide
gcaugcagguacacuggaa

SEQ ID NO: 470445 - RNA, 19 nt, Artificial Sequence
  Description of Artificial Sequence: Synthetic oligonucleotide
cccacuacuugugacuucu

SEQ ID NO: 470446 - RNA, 19 nt, Artificial Sequence
  Description of Artificial Sequence: Synthetic oligonucleotide
gccccuuccggacagccau

SEQ ID NO: 470447 - RNA, 19 nt, Artificial Sequence
  Description of Artificial Sequence: Synthetic oligonucleotide
cccugucccucagaaaaga

SEQ ID NO: 470448 - RNA, 19 nt, Artificial Sequence
  Description of Artificial Sequence: Synthetic oligonucleotide
gccuuaaauccaacggaau

SEQ ID NO: 470449 - RNA, 19 nt, Artificial Sequence
  Description of Artificial Sequence: Synthetic oligonucleotide
cucugcguaacagcaucuu

SEQ ID NO: 470450 - RNA, 19 nt, Artificial Sequence
  Description of Artificial Sequence: Synthetic oligonucleotide
cccaagugaccuauuccau

SEQ ID NO: 470451 - RNA, 19 nt, Artificial Sequence
  Description of Artificial Sequence: Synthetic oligonucleotide
ccuaccccaagugaccuau

SEQ ID NO: 470452 - RNA, 19 nt, Artificial Sequence
  Description of Artificial Sequence: Synthetic oligonucleotide
gggacacgugugcgucaca

SEQ ID NO: 470453 - RNA, 19 nt, Artificial Sequence
  Description of Artificial Sequence: Synthetic oligonucleotide
cuugacuaccagggccuuu

SEQ ID NO: 470454 - RNA, 19 nt, Artificial Sequence
  Description of Artificial Sequence: Synthetic oligonucleotide
cagguguaucuaggcugua

SEQ ID NO: 470455 - RNA, 19 nt, Artificial Sequence
  Description of Artificial Sequence: Synthetic oligonucleotide
ccacccugucccucagaaa

SEQ ID NO: 470456 - RNA, 19 nt, Artificial Sequence
  Description of Artificial Sequence: Synthetic oligonucleotide
cuaccccaagugaccuauu

SEQ ID NO: 470457 - RNA, 19 nt, Artificial Sequence
  Description of Artificial Sequence: Synthetic oligonucleotide
cccuacugaagugccccaa

SEQ ID NO: 470458 - RNA, 19 nt, Artificial Sequence
  Description of Artificial Sequence: Synthetic oligonucleotide
ccucuaguaguggggcugu

SEQ ID NO: 470459 - RNA, 19 nt, Artificial Sequence
  Description of Artificial Sequence: Synthetic oligonucleotide
ccccaguaagagacccucu

SEQ ID NO: 470460 - RNA, 19 nt, Artificial Sequence
  Description of Artificial Sequence: Synthetic oligonucleotide
cggguuccccaugcacgau

SEQ ID NO: 470461 - RNA, 19 nt, Artificial Sequence
  Description of Artificial Sequence: Synthetic oligonucleotide
aacgguauauauuugcccc

SEQ ID NO: 470462 - RNA, 19 nt, Artificial Sequence
  Description of Artificial Sequence: Synthetic oligonucleotide
aaacgguauauauuugccc

SEQ ID NO: 470463 - RNA, 19 nt, Artificial Sequence
  Description of Artificial Sequence: Synthetic oligonucleotide
ucaaagggugcccaaaugg

SEQ ID NO: 470464 - RNA, 19 nt, Artificial Sequence
  Description of Artificial Sequence: Synthetic oligonucleotide
uguuuuaagaucaccccgg

SEQ ID NO: 470465 - RNA, 19 nt, Artificial Sequence
  Description of Artificial Sequence: Synthetic oligonucleotide
uuuaagaucaccccggaaa

SEQ ID NO: 470466 - RNA, 19 nt, Artificial Sequence
  Description of Artificial Sequence: Synthetic oligonucleotide
aaagcuguuugcgacacgc

SEQ ID NO: 470467 - RNA, 19 nt, Artificial Sequence
  Description of Artificial Sequence: Synthetic oligonucleotide
uuguuuuaagaucaccccg

SEQ ID NO: 470468 - RNA, 19 nt, Artificial Sequence
  Description of Artificial Sequence: Synthetic oligonucleotide
aaagggaguguguaugucg

SEQ ID NO: 470469 - RNA, 19 nt, Artificial Sequence
  Description of Artificial Sequence: Synthetic oligonucleotide
aaaacgguauauauuugcc

SEQ ID NO: 470470 - RNA, 19 nt, Artificial Sequence
  Description of Artificial Sequence: Synthetic oligonucleotide
auaaauuuguugaugggac

SEQ ID NO: 470471 - RNA, 19 nt, Artificial Sequence
  Description of Artificial Sequence: Synthetic oligonucleotide
ugcaacuaggaaaagauau

SEQ ID NO: 470472 - RNA, 19 nt, Artificial Sequence
  Description of Artificial Sequence: Synthetic oligonucleotide
uccgguuuuauugucaccg

SEQ ID NO: 470473 - RNA, 19 nt, Artificial Sequence
  Description of Artificial Sequence: Synthetic oligonucleotide
caaaacgguauauauuugc

SEQ ID NO: 470474 - RNA, 19 nt, Artificial Sequence
  Description of Artificial Sequence: Synthetic oligonucleotide
aaacagagaauucuccggu

SEQ ID NO: 470475 - RNA, 19 nt, Artificial Sequence
  Description of Artificial Sequence: Synthetic oligonucleotide
uuugcgacacgcaugggcc

SEQ ID NO: 470476 - RNA, 19 nt, Artificial Sequence
  Description of Artificial Sequence: Synthetic oligonucleotide
aacgugaagccccgguugc

SEQ ID NO: 470477 - RNA, 19 nt, Artificial Sequence
  Description of Artificial Sequence: Synthetic oligonucleotide
aauuuguugaugggacacc

SEQ ID NO: 470478 - RNA, 19 nt, Artificial Sequence
  Description of Artificial Sequence: Synthetic oligonucleotide
aauucuccgguuuuauugu

SEQ ID NO: 470479 - RNA, 19 nt, Artificial Sequence
  Description of Artificial Sequence: Synthetic oligonucleotide
gagaguuguaaauaucgug

SEQ ID NO: 470480 - RNA, 19 nt, Artificial Sequence
  Description of Artificial Sequence: Synthetic oligonucleotide
caaacagagaauucuccgg

SEQ ID NO: 470481 - RNA, 19 nt, Artificial Sequence
  Description of Artificial Sequence: Synthetic oligonucleotide
auaccacgcauucacgagc

SEQ ID NO: 470482 - RNA, 19 nt, Artificial Sequence
  Description of Artificial Sequence: Synthetic oligonucleotide
uuaagaucaccccggaaac

SEQ ID NO: 470483 - RNA, 19 nt, Artificial Sequence
  Description of Artificial Sequence: Synthetic oligonucleotide
uuuucgacugccgaucacg

SEQ ID NO: 470484 - RNA, 19 nt, Artificial Sequence
  Description of Artificial Sequence: Synthetic oligonucleotide
guggcugauguacaaaacg

SEQ ID NO: 470485 - RNA, 19 nt, Artificial Sequence
  Description of Artificial Sequence: Synthetic oligonucleotide
agcgcaaggaagucaaaac

SEQ ID NO: 470486 - RNA, 19 nt, Artificial Sequence
  Description of Artificial Sequence: Synthetic oligonucleotide
auuuguugaugggacaccc

SEQ ID NO: 470487 - RNA, 19 nt, Artificial Sequence
  Description of Artificial Sequence: Synthetic oligonucleotide
acggucaacguucucgggc

SEQ ID NO: 470488 - RNA, 19 nt, Artificial Sequence
  Description of Artificial Sequence: Synthetic oligonucleotide
augaagaccggcuccucgc

SEQ ID NO: 470489 - RNA, 19 nt, Artificial Sequence
  Description of Artificial Sequence: Synthetic oligonucleotide
agaguuguaaauaucgugu

SEQ ID NO: 470490 - RNA, 19 nt, Artificial Sequence
  Description of Artificial Sequence: Synthetic oligonucleotide
cacgucaguaccauuggcg

SEQ ID NO: 470491 - RNA, 19 nt, Artificial Sequence
  Description of Artificial Sequence: Synthetic oligonucleotide
aagaccggcuccucgccgc

SEQ ID NO: 470492 - RNA, 19 nt, Artificial Sequence
  Description of Artificial Sequence: Synthetic oligonucleotide
acggauaagcgagaagugc

SEQ ID NO: 470493 - RNA, 19 nt, Artificial Sequence
  Description of Artificial Sequence: Synthetic oligonucleotide
gaugcggacagcacaaucc

SEQ ID NO: 470494 - RNA, 19 nt, Artificial Sequence
  Description of Artificial Sequence: Synthetic oligonucleotide
gauaagcgagaagugcucg

SEQ ID NO: 470495 - RNA, 19 nt, Artificial Sequence
  Description of Artificial Sequence: Synthetic oligonucleotide
gaucuugcaccccugacga

SEQ ID NO: 470496 - RNA, 19 nt, Artificial Sequence
  Description of Artificial Sequence: Synthetic oligonucleotide
aauccagugagaguuguaa

SEQ ID NO: 470497 - RNA, 19 nt, Artificial Sequence
  Description of Artificial Sequence: Synthetic oligonucleotide
uaggggugcaacuaggaaa

SEQ ID NO: 470498 - RNA, 19 nt, Artificial Sequence
  Description of Artificial Sequence: Synthetic oligonucleotide
auaagcgagaagugcucgg

SEQ ID NO: 470499 - RNA, 19 nt, Artificial Sequence
  Description of Artificial Sequence: Synthetic oligonucleotide
caaaugguagccguggcag

SEQ ID NO: 470500 - RNA, 19 nt, Artificial Sequence
  Description of Artificial Sequence: Synthetic oligonucleotide
cuggcugcgcccaagacac

SEQ ID NO: 470501 - RNA, 19 nt, Artificial Sequence
  Description of Artificial Sequence: Synthetic oligonucleotide
ggaguuaaagcuguuugcg

SEQ ID NO: 470502 - RNA, 19 nt, Artificial Sequence
  Description of Artificial Sequence: Synthetic oligonucleotide
aguggcacggauaagcgag

SEQ ID NO: 470503 - RNA, 19 nt, Artificial Sequence
  Description of Artificial Sequence: Synthetic oligonucleotide
gaauggcuuggguagccgg

SEQ ID NO: 470504 - RNA, 19 nt, Artificial Sequence
  Description of Artificial Sequence: Synthetic oligonucleotide
auugucaccgguucacuca

SEQ ID NO: 470505 - RNA, 19 nt, Artificial Sequence
  Description of Artificial Sequence: Synthetic oligonucleotide
gucaguaccauuggcgugg

SEQ ID NO: 470506 - RNA, 19 nt, Artificial Sequence
  Description of Artificial Sequence: Synthetic oligonucleotide
acucaauacugucacuugu

SEQ ID NO: 470507 - RNA, 19 nt, Artificial Sequence
  Description of Artificial Sequence: Synthetic oligonucleotide
uuggucuuggcgcgcaaag

SEQ ID NO: 470508 - RNA, 19 nt, Artificial Sequence
  Description of Artificial Sequence: Synthetic oligonucleotide
gaguucgccgcuguggugg

SEQ ID NO: 470509 - RNA, 19 nt, Artificial Sequence
  Description of Artificial Sequence: Synthetic oligonucleotide
cauucacgagccaaggcug

SEQ ID NO: 470510 - RNA, 19 nt, Artificial Sequence
  Description of Artificial Sequence: Synthetic oligonucleotide
acacgucaguaccauuggc

SEQ ID NO: 470511 - RNA, 19 nt, Artificial Sequence
  Description of Artificial Sequence: Synthetic oligonucleotide
cauaccacgcauucacgag

SEQ ID NO: 470512 - RNA, 19 nt, Artificial Sequence
  Description of Artificial Sequence: Synthetic oligonucleotide
uaccacgcauucacgagcc

SEQ ID NO: 470513 - RNA, 19 nt, Artificial Sequence
  Description of Artificial Sequence: Synthetic oligonucleotide
cuggcgaacacgucugggg

SEQ ID NO: 470514 - RNA, 19 nt, Artificial Sequence
  Description of Artificial Sequence: Synthetic oligonucleotide
uccgugaaggccccugugc

SEQ ID NO: 470515 - RNA, 19 nt, Artificial Sequence
  Description of Artificial Sequence: Synthetic oligonucleotide
acgucaguaccauuggcgu

SEQ ID NO: 470516 - RNA, 19 nt, Artificial Sequence
  Description of Artificial Sequence: Synthetic oligonucleotide
uuuuaagaucaccccggaa

SEQ ID NO: 470517 - RNA, 19 nt, Artificial Sequence
  Description of Artificial Sequence: Synthetic oligonucleotide
uguaugugugcguccuuug

SEQ ID NO: 470518 - RNA, 19 nt, Artificial Sequence
  Description of Artificial Sequence: Synthetic oligonucleotide
ucacucaauacugucacuu

SEQ ID NO: 470519 - RNA, 19 nt, Artificial Sequence
  Description of Artificial Sequence: Synthetic oligonucleotide
aucuccgcgacaugcuccg

SEQ ID NO: 470520 - RNA, 19 nt, Artificial Sequence
  Description of Artificial Sequence: Synthetic oligonucleotide
acccucugcgcauaccacg

SEQ ID NO: 470521 - RNA, 19 nt, Artificial Sequence
  Description of Artificial Sequence: Synthetic oligonucleotide
guuaaagcuguuugcgaca

SEQ ID NO: 470522 - RNA, 19 nt, Artificial Sequence
  Description of Artificial Sequence: Synthetic oligonucleotide
uggauccguuugauggugg

SEQ ID NO: 470523 - RNA, 19 nt, Artificial Sequence
  Description of Artificial Sequence: Synthetic oligonucleotide
acacacgucaguaccauug

SEQ ID NO: 470524 - RNA, 19 nt, Artificial Sequence
  Description of Artificial Sequence: Synthetic oligonucleotide
uaagcgagaagugcucggc

SEQ ID NO: 470525 - RNA, 19 nt, Artificial Sequence
  Description of Artificial Sequence: Synthetic oligonucleotide
gugcggcucgcucaaaggg

SEQ ID NO: 470526 - RNA, 19 nt, Artificial Sequence
  Description of Artificial Sequence: Synthetic oligonucleotide
aacagagaauucuccgguu

SEQ ID NO: 470527 - RNA, 19 nt, Artificial Sequence
  Description of Artificial Sequence: Synthetic oligonucleotide
uccccaccaaacgugaagc

SEQ ID NO: 470528 - RNA, 19 nt, Artificial Sequence
  Description of Artificial Sequence: Synthetic oligonucleotide
gaucaccccggaaacgggg

SEQ ID NO: 470529 - RNA, 19 nt, Artificial Sequence
  Description of Artificial Sequence: Synthetic oligonucleotide
ucaccgguucacucaauac

SEQ ID NO: 470530 - RNA, 19 nt, Artificial Sequence
  Description of Artificial Sequence: Synthetic oligonucleotide
gaagaccggcuccucgccg

SEQ ID NO: 470531 - RNA, 19 nt, Artificial Sequence
  Description of Artificial Sequence: Synthetic oligonucleotide
cacgcauucacgagccaag

SEQ ID NO: 470532 - RNA, 19 nt, Artificial Sequence
  Description of Artificial Sequence: Synthetic oligonucleotide
ugauacccuccccuugccc

SEQ ID NO: 470533 - RNA, 19 nt, Artificial Sequence
  Description of Artificial Sequence: Synthetic oligonucleotide
accgguucacucaauacug

SEQ ID NO: 470534 - RNA, 19 nt, Artificial Sequence
  Description of Artificial Sequence: Synthetic oligonucleotide
auucacgagccaaggcugc

SEQ ID NO: 470535 - RNA, 19 nt, Artificial Sequence
  Description of Artificial Sequence: Synthetic oligonucleotide
acagagaauucuccgguuu

SEQ ID NO: 470536 - RNA, 19 nt, Artificial Sequence
  Description of Artificial Sequence: Synthetic oligonucleotide
ugcgcagugugaugugugc

SEQ ID NO: 470537 - RNA, 19 nt, Artificial Sequence
  Description of Artificial Sequence: Synthetic oligonucleotide
gcgcaaggaagucaaaacc

SEQ ID NO: 470538 - RNA, 19 nt, Artificial Sequence
  Description of Artificial Sequence: Synthetic oligonucleotide
gguaguuuggccgggcagg

SEQ ID NO: 470539 - RNA, 19 nt, Artificial Sequence
  Description of Artificial Sequence: Synthetic oligonucleotide
ucgggguuggcuguccccg

SEQ ID NO: 470540 - RNA, 19 nt, Artificial Sequence
  Description of Artificial Sequence: Synthetic oligonucleotide
augcggacagcacaaucca

SEQ ID NO: 470541 - RNA, 19 nt, Artificial Sequence
  Description of Artificial Sequence: Synthetic oligonucleotide
cacggauaagcgagaagug

SEQ ID NO: 470542 - RNA, 19 nt, Artificial Sequence
  Description of Artificial Sequence: Synthetic oligonucleotide
ugcggcucgcucaaagggu

SEQ ID NO: 470543 - RNA, 19 nt, Artificial Sequence
  Description of Artificial Sequence: Synthetic oligonucleotide
cucaaagggugcccaaaug

SEQ ID NO: 470544 - RNA, 19 nt, Artificial Sequence
  Description of Artificial Sequence: Synthetic oligonucleotide
agcuguuugcgacacgcau

SEQ ID NO: 470545 - RNA, 19 nt, Artificial Sequence
  Description of Artificial Sequence: Synthetic oligonucleotide
ugccgaucacguucaacug

SEQ ID NO: 470546 - RNA, 19 nt, Artificial Sequence
  Description of Artificial Sequence: Synthetic oligonucleotide
ugugcgggugccccguuga

SEQ ID NO: 470547 - RNA, 19 nt, Artificial Sequence
  Description of Artificial Sequence: Synthetic oligonucleotide
acuguuaaauccagugaga

SEQ ID NO: 470548 - RNA, 19 nt, Artificial Sequence
  Description of Artificial Sequence: Synthetic oligonucleotide
guuagguccagcgcaagga

SEQ ID NO: 470549 - RNA, 19 nt, Artificial Sequence
  Description of Artificial Sequence: Synthetic oligonucleotide
acacgcaugggccccucuc

SEQ ID NO: 470550 - RNA, 19 nt, Artificial Sequence
  Description of Artificial Sequence: Synthetic oligonucleotide
cuccgaggcaacagugucc

SEQ ID NO: 470551 - RNA, 19 nt, Artificial Sequence
  Description of Artificial Sequence: Synthetic oligonucleotide
gaugggacaccccuugaua

SEQ ID NO: 470552 - RNA, 19 nt, Artificial Sequence
  Description of Artificial Sequence: Synthetic oligonucleotide
guuuuaagaucaccccgga

SEQ ID NO: 470553 - RNA, 19 nt, Artificial Sequence
  Description of Artificial Sequence: Synthetic oligonucleotide
uagccucacccucugcgca

SEQ ID NO: 470554 - RNA, 19 nt, Artificial Sequence
  Description of Artificial Sequence: Synthetic oligonucleotide
gauacccuccccuugcccu

SEQ ID NO: 470555 - RNA, 19 nt, Artificial Sequence
  Description of Artificial Sequence: Synthetic oligonucleotide
uucacucaauacugucacu

SEQ ID NO: 470556 - RNA, 19 nt, Artificial Sequence
  Description of Artificial Sequence: Synthetic oligonucleotide
accggagucuugauguagg

SEQ ID NO: 470557 - RNA, 19 nt, Artificial Sequence
  Description of Artificial Sequence: Synthetic oligonucleotide
ugcgccgugcgccugugcu

SEQ ID NO: 470558 - RNA, 19 nt, Artificial Sequence
  Description of Artificial Sequence: Synthetic oligonucleotide
uuauugucaccgguucacu

SEQ ID NO: 470559 - RNA, 19 nt, Artificial Sequence
  Description of Artificial Sequence: Synthetic oligonucleotide
uccgcgacaugcuccgagc

SEQ ID NO: 470560 - RNA, 19 nt, Artificial Sequence
  Description of Artificial Sequence: Synthetic oligonucleotide
cugccgaucacguucaacu

SEQ ID NO: 470561 - RNA, 19 nt, Artificial Sequence
  Description of Artificial Sequence: Synthetic oligonucleotide
caccaaacgugaagccccg

SEQ ID NO: 470562 - RNA, 19 nt, Artificial Sequence
  Description of Artificial Sequence: Synthetic oligonucleotide
acugccgaucacguucaac

SEQ ID NO: 470563 - RNA, 19 nt, Artificial Sequence
  Description of Artificial Sequence: Synthetic oligonucleotide
ccuugcacggucaacguuc

SEQ ID NO: 470564 - RNA, 19 nt, Artificial Sequence
  Description of Artificial Sequence: Synthetic oligonucleotide
cacgcaugggccccucucc

SEQ ID NO: 470565 - RNA, 19 nt, Artificial Sequence
  Description of Artificial Sequence: Synthetic oligonucleotide
acgcauucacgagccaagg

SEQ ID NO: 470566 - RNA, 19 nt, Artificial Sequence
  Description of Artificial Sequence: Synthetic oligonucleotide
uugcgacacgcaugggccc

SEQ ID NO: 470567 - RNA, 19 nt, Artificial Sequence
  Description of Artificial Sequence: Synthetic oligonucleotide
gaugguaguuuggccgggc

SEQ ID NO: 470568 - RNA, 19 nt, Artificial Sequence
  Description of Artificial Sequence: Synthetic oligonucleotide
augguaguuuggccgggca

SEQ ID NO: 470569 - RNA, 19 nt, Artificial Sequence
  Description of Artificial Sequence: Synthetic oligonucleotide
uggguugugcgggugcccc

SEQ ID NO: 470570 - RNA, 19 nt, Artificial Sequence
  Description of Artificial Sequence: Synthetic oligonucleotide
gaguggcacggauaagcga

SEQ ID NO: 470571 - RNA, 19 nt, Artificial Sequence
  Description of Artificial Sequence: Synthetic oligonucleotide
gcgcauaccacgcauucac

SEQ ID NO: 470572 - RNA, 19 nt, Artificial Sequence
  Description of Artificial Sequence: Synthetic oligonucleotide
gcgaguggcacggauaagc

SEQ ID NO: 470573 - RNA, 19 nt, Artificial Sequence
  Description of Artificial Sequence: Synthetic oligonucleotide
gucacuugucaagagcgga

SEQ ID NO: 470574 - RNA, 19 nt, Artificial Sequence
  Description of Artificial Sequence: Synthetic oligonucleotide
ggguguggcgcgaagcugg

SEQ ID NO: 470575 - RNA, 19 nt, Artificial Sequence
  Description of Artificial Sequence: Synthetic oligonucleotide
cuugcgccccgucacgaug

SEQ ID NO: 470576 - RNA, 19 nt, Artificial Sequence
  Description of Artificial Sequence: Synthetic oligonucleotide
uucgccgcugugguggaug

SEQ ID NO: 470577 - RNA, 19 nt, Artificial Sequence
  Description of Artificial Sequence: Synthetic oligonucleotide
caccccguggcugauguac

SEQ ID NO: 470578 - RNA, 19 nt, Artificial Sequence
  Description of Artificial Sequence: Synthetic oligonucleotide
gguucacucaauacuguca

SEQ ID NO: 470579 - RNA, 19 nt, Artificial Sequence
  Description of Artificial Sequence: Synthetic oligonucleotide
agaucaccccggaaacggg

SEQ ID NO: 470580 - RNA, 19 nt, Artificial Sequence
  Description of Artificial Sequence: Synthetic oligonucleotide
gcauaccacgcauucacga

SEQ ID NO: 470581 - RNA, 19 nt, Artificial Sequence
  Description of Artificial Sequence: Synthetic oligonucleotide
cagacacacgucaguacca

SEQ ID NO: 470582 - RNA, 19 nt, Artificial Sequence
  Description of Artificial Sequence: Synthetic oligonucleotide
ugcgcauaccacgcauuca

SEQ ID NO: 470583 - RNA, 19 nt, Artificial Sequence
  Description of Artificial Sequence: Synthetic oligonucleotide
ucccuugcacggucaacgu

SEQ ID NO: 470584 - RNA, 19 nt, Artificial Sequence
  Description of Artificial Sequence: Synthetic oligonucleotide
cacggucaacguucucggg

SEQ ID NO: 470585 - RNA, 19 nt, Artificial Sequence
  Description of Artificial Sequence: Synthetic oligonucleotide
cuccgcgacaugcuccgag

SEQ ID NO: 470586 - RNA, 19 nt, Artificial Sequence
  Description of Artificial Sequence: Synthetic oligonucleotide
agagaauucuccgguuuua

SEQ ID NO: 470587 - RNA, 19 nt, Artificial Sequence
  Description of Artificial Sequence: Synthetic oligonucleotide
guuuggccgggcagguugg

SEQ ID NO: 470588 - RNA, 19 nt, Artificial Sequence
  Description of Artificial Sequence: Synthetic oligonucleotide
ggaggggugucuuaauaaa

SEQ ID NO: 470589 - RNA, 19 nt, Artificial Sequence
  Description of Artificial Sequence: Synthetic oligonucleotide
ggauccguuugaugguggc

SEQ ID NO: 470590 - RNA, 19 nt, Artificial Sequence
  Description of Artificial Sequence: Synthetic oligonucleotide
auguaugugugcguccuuu

SEQ ID NO: 470591 - RNA, 19 nt, Artificial Sequence
  Description of Artificial Sequence: Synthetic oligonucleotide
ggugcccaaaugguagccg

SEQ ID NO: 470592 - RNA, 19 nt, Artificial Sequence
  Description of Artificial Sequence: Synthetic oligonucleotide
caucccggucacugcaaac

SEQ ID NO: 470593 - RNA, 19 nt, Artificial Sequence
  Description of Artificial Sequence: Synthetic oligonucleotide
acacugagucuuaauuuaa

SEQ ID NO: 470594 - RNA, 19 nt, Artificial Sequence
  Description of Artificial Sequence: Synthetic oligonucleotide
uguuugcgacacgcauggg

SEQ ID NO: 470595 - RNA, 19 nt, Artificial Sequence
  Description of Artificial Sequence: Synthetic oligonucleotide
gcacggauaagcgagaagu

SEQ ID NO: 470596 - RNA, 19 nt, Artificial Sequence
  Description of Artificial Sequence: Synthetic oligonucleotide
ggggucacgauguaugugu

SEQ ID NO: 470597 - RNA, 19 nt, Artificial Sequence
  Description of Artificial Sequence: Synthetic oligonucleotide
gcuguuugcgacacgcaug

SEQ ID NO: 470598 - RNA, 19 nt, Artificial Sequence
  Description of Artificial Sequence: Synthetic oligonucleotide
gcccaaaugguagccgugg

SEQ ID NO: 470599 - RNA, 19 nt, Artificial Sequence
  Description of Artificial Sequence: Synthetic oligonucleotide
ugcugcgaguggcacggau

SEQ ID NO: 470600 - RNA, 19 nt, Artificial Sequence
  Description of Artificial Sequence: Synthetic oligonucleotide
uauuggucuuggcgcgcaa

SEQ ID NO: 470601 - RNA, 19 nt, Artificial Sequence
  Description of Artificial Sequence: Synthetic oligonucleotide
caccgguucacucaauacu

SEQ ID NO: 470602 - RNA, 19 nt, Artificial Sequence
  Description of Artificial Sequence: Synthetic oligonucleotide
cuccuugcgccccgucacg

SEQ ID NO: 470603 - RNA, 19 nt, Artificial Sequence
  Description of Artificial Sequence: Synthetic oligonucleotide
aagcuguuugcgacacgca

SEQ ID NO: 470604 - RNA, 19 nt, Artificial Sequence
  Description of Artificial Sequence: Synthetic oligonucleotide
cugcgaguggcacggauaa

SEQ ID NO: 470605 - RNA, 19 nt, Artificial Sequence
  Description of Artificial Sequence: Synthetic oligonucleotide
gaguggcguggcgugcugg

SEQ ID NO: 470606 - RNA, 19 nt, Artificial Sequence
  Description of Artificial Sequence: Synthetic oligonucleotide
uuuggccgggcagguuggg

SEQ ID NO: 470607 - RNA, 19 nt, Artificial Sequence
  Description of Artificial Sequence: Synthetic oligonucleotide
agacacacgucaguaccau

SEQ ID NO: 470608 - RNA, 19 nt, Artificial Sequence
  Description of Artificial Sequence: Synthetic oligonucleotide
gucaccgguucacucaaua

SEQ ID NO: 470609 - RNA, 19 nt, Artificial Sequence
  Description of Artificial Sequence: Synthetic oligonucleotide
aggggucacgauguaugug

SEQ ID NO: 470610 - RNA, 19 nt, Artificial Sequence
  Description of Artificial Sequence: Synthetic oligonucleotide
gcaacacugagucuuaauu

SEQ ID NO: 470611 - RNA, 19 nt, Artificial Sequence
  Description of Artificial Sequence: Synthetic oligonucleotide
cgaguggcacggauaagcg

SEQ ID NO: 470612 - RNA, 19 nt, Artificial Sequence
  Description of Artificial Sequence: Synthetic oligonucleotide
gcgcgcaaagccuugaucu

SEQ ID NO: 470613 - RNA, 19 nt, Artificial Sequence
  Description of Artificial Sequence: Synthetic oligonucleotide
cucggcggccgacaggauc

SEQ ID NO: 470614 - RNA, 19 nt, Artificial Sequence
  Description of Artificial Sequence: Synthetic oligonucleotide
ccgguuuuauugucaccgg

SEQ ID NO: 470615 - RNA, 19 nt, Artificial Sequence
  Description of Artificial Sequence: Synthetic oligonucleotide
gacgacccacgaucuccgc

SEQ ID NO: 470616 - RNA, 19 nt, Artificial Sequence
  Description of Artificial Sequence: Synthetic oligonucleotide
cucgccgcgcaccggaguc

SEQ ID NO: 470617 - RNA, 19 nt, Artificial Sequence
  Description of Artificial Sequence: Synthetic oligonucleotide
cccucugcgcauaccacgc

SEQ ID NO: 470618 - RNA, 19 nt, Artificial Sequence
  Description of Artificial Sequence: Synthetic oligonucleotide
agcgugggugaguggcgug

SEQ ID NO: 470619 - RNA, 19 nt, Artificial Sequence
  Description of Artificial Sequence: Synthetic oligonucleotide
ugcgaguggcacggauaag

SEQ ID NO: 470620 - RNA, 19 nt, Artificial Sequence
  Description of Artificial Sequence: Synthetic oligonucleotide
uccuugcgccccgucacga

SEQ ID NO: 470621 - RNA, 19 nt, Artificial Sequence
  Description of Artificial Sequence: Synthetic oligonucleotide
gugcgcagugugaugugug

SEQ ID NO: 470622 - RNA, 19 nt, Artificial Sequence
  Description of Artificial Sequence: Synthetic oligonucleotide
accaaacgugaagccccgg

SEQ ID NO: 470623 - RNA, 19 nt, Artificial Sequence
  Description of Artificial Sequence: Synthetic oligonucleotide
ugcaccccugacgacccac

SEQ ID NO: 470624 - RNA, 19 nt, Artificial Sequence
  Description of Artificial Sequence: Synthetic oligonucleotide
ggcguggaagucgcugucg

SEQ ID NO: 470625 - RNA, 19 nt, Artificial Sequence
  Description of Artificial Sequence: Synthetic oligonucleotide
gacccacgaucuccgcgac

SEQ ID NO: 470626 - RNA, 19 nt, Artificial Sequence
  Description of Artificial Sequence: Synthetic oligonucleotide
aucaccccggaaacgggga

SEQ ID NO: 470627 - RNA, 19 nt, Artificial Sequence
  Description of Artificial Sequence: Synthetic oligonucleotide
aguucgccgcuguggugga

SEQ ID NO: 470628 - RNA, 19 nt, Artificial Sequence
  Description of Artificial Sequence: Synthetic oligonucleotide
uugucacggccagggguca

SEQ ID NO: 470629 - RNA, 19 nt, Artificial Sequence
  Description of Artificial Sequence: Synthetic oligonucleotide
cugcgcccaagacacuguc

SEQ ID NO: 470630 - RNA, 19 nt, Artificial Sequence
  Description of Artificial Sequence: Synthetic oligonucleotide
agucauguucacgcucuuu

SEQ ID NO: 470631 - RNA, 19 nt, Artificial Sequence
  Description of Artificial Sequence: Synthetic oligonucleotide
gguauuggucuuggcgcgc

SEQ ID NO: 470632 - RNA, 19 nt, Artificial Sequence
  Description of Artificial Sequence: Synthetic oligonucleotide
cucgcucaaagggugccca

SEQ ID NO: 470633 - RNA, 19 nt, Artificial Sequence
  Description of Artificial Sequence: Synthetic oligonucleotide
cagcgcaaggaagucaaaa

SEQ ID NO: 470634 - RNA, 19 nt, Artificial Sequence
  Description of Artificial Sequence: Synthetic oligonucleotide
ggaugguaguuuggccggg

SEQ ID NO: 470635 - RNA, 19 nt, Artificial Sequence
  Description of Artificial Sequence: Synthetic oligonucleotide
ugucaccgguucacucaau

SEQ ID NO: 470636 - RNA, 19 nt, Artificial Sequence
  Description of Artificial Sequence: Synthetic oligonucleotide
uggcgcgcaaagccuugau

SEQ ID NO: 470637 - RNA, 19 nt, Artificial Sequence
  Description of Artificial Sequence: Synthetic oligonucleotide
ccaaaugguagccguggca

SEQ ID NO: 470638 - RNA, 19 nt, Artificial Sequence
  Description of Artificial Sequence: Synthetic oligonucleotide
gggacucacgucggggucc

SEQ ID NO: 470639 - RNA, 19 nt, Artificial Sequence
  Description of Artificial Sequence: Synthetic oligonucleotide
ccuccgaggcaacaguguc

SEQ ID NO: 470640 - RNA, 19 nt, Artificial Sequence
  Description of Artificial Sequence: Synthetic oligonucleotide
cugcguccgugaaggcccc

SEQ ID NO: 470641 - RNA, 19 nt, Artificial Sequence
  Description of Artificial Sequence: Synthetic oligonucleotide
accacgcauucacgagcca

SEQ ID NO: 470642 - RNA, 19 nt, Artificial Sequence
  Description of Artificial Sequence: Synthetic oligonucleotide
ggcgcgcaaagccuugauc

SEQ ID NO: 470643 - RNA, 19 nt, Artificial Sequence
  Description of Artificial Sequence: Synthetic oligonucleotide
cgcauaccacgcauucacg

SEQ ID NO: 470644 - RNA, 19 nt, Artificial Sequence
  Description of Artificial Sequence: Synthetic oligonucleotide
cuggguugugcgggugccc

SEQ ID NO: 470645 - RNA, 19 nt, Artificial Sequence
  Description of Artificial Sequence: Synthetic oligonucleotide
gugugcggcaggcgggaca

SEQ ID NO: 470646 - RNA, 19 nt, Artificial Sequence
  Description of Artificial Sequence: Synthetic oligonucleotide
ccccaccaaacgugaagcc

SEQ ID NO: 470647 - RNA, 19 nt, Artificial Sequence
  Description of Artificial Sequence: Synthetic oligonucleotide
ggaguucgccgcuguggug

SEQ ID NO: 470648 - RNA, 19 nt, Artificial Sequence
  Description of Artificial Sequence: Synthetic oligonucleotide
caaacgugaagccccgguu

SEQ ID NO: 470649 - RNA, 19 nt, Artificial Sequence
  Description of Artificial Sequence: Synthetic oligonucleotide
ggguccguccccaccaaac

SEQ ID NO: 470650 - RNA, 19 nt, Artificial Sequence
  Description of Artificial Sequence: Synthetic oligonucleotide
agggccgccccgugaagua

SEQ ID NO: 470651 - RNA, 19 nt, Artificial Sequence
  Description of Artificial Sequence: Synthetic oligonucleotide
cgccccgucacgaugaaga

SEQ ID NO: 470652 - RNA, 19 nt, Artificial Sequence
  Description of Artificial Sequence: Synthetic oligonucleotide
ggcucgcucaaagggugcc

SEQ ID NO: 470653 - RNA, 19 nt, Artificial Sequence
  Description of Artificial Sequence: Synthetic oligonucleotide
cagagaauucuccgguuuu

SEQ ID NO: 470654 - RNA, 19 nt, Artificial Sequence
  Description of Artificial Sequence: Synthetic oligonucleotide
ugucgggcccugcguccgu

SEQ ID NO: 470655 - RNA, 19 nt, Artificial Sequence
  Description of Artificial Sequence: Synthetic oligonucleotide
cgcauucacgagccaaggc

SEQ ID NO: 470656 - RNA, 19 nt, Artificial Sequence
  Description of Artificial Sequence: Synthetic oligonucleotide
gcggcucgcucaaagggug

SEQ ID NO: 470657 - RNA, 19 nt, Artificial Sequence
  Description of Artificial Sequence: Synthetic oligonucleotide
cuccucgccgcgcaccgga

SEQ ID NO: 470658 - RNA, 19 nt, Artificial Sequence
  Description of Artificial Sequence: Synthetic oligonucleotide
gcgcagugugaugugugcc

SEQ ID NO: 470659 - RNA, 19 nt, Artificial Sequence
  Description of Artificial Sequence: Synthetic oligonucleotide
uggcgcgaagcuggcgaac

SEQ ID NO: 470660 - RNA, 19 nt, Artificial Sequence
  Description of Artificial Sequence: Synthetic oligonucleotide
ccggugugcggcaggcggg

SEQ ID NO: 470661 - RNA, 19 nt, Artificial Sequence
  Description of Artificial Sequence: Synthetic oligonucleotide
guaguuuggccgggcaggu

SEQ ID NO: 470662 - RNA, 19 nt, Artificial Sequence
  Description of Artificial Sequence: Synthetic oligonucleotide
gcggccgacaggaucuccc

SEQ ID NO: 470663 - RNA, 19 nt, Artificial Sequence
  Description of Artificial Sequence: Synthetic oligonucleotide
gcgcaccggagucuugaug

SEQ ID NO: 470664 - RNA, 19 nt, Artificial Sequence
  Description of Artificial Sequence: Synthetic oligonucleotide
guggcgcgaagcuggcgaa

SEQ ID NO: 470665 - RNA, 19 nt, Artificial Sequence
  Description of Artificial Sequence: Synthetic oligonucleotide
cggauaagcgagaagugcu

SEQ ID NO: 470666 - RNA, 19 nt, Artificial Sequence
  Description of Artificial Sequence: Synthetic oligonucleotide
ggccgccccgugaaguagg

SEQ ID NO: 470667 - RNA, 19 nt, Artificial Sequence
  Description of Artificial Sequence: Synthetic oligonucleotide
gacacacgucaguaccauu

SEQ ID NO: 470668 - RNA, 19 nt, Artificial Sequence
  Description of Artificial Sequence: Synthetic oligonucleotide
cgcaccggagucuugaugu

SEQ ID NO: 470669 - RNA, 19 nt, Artificial Sequence
  Description of Artificial Sequence: Synthetic oligonucleotide
cagggcggccggguguggc

SEQ ID NO: 470670 - RNA, 19 nt, Artificial Sequence
  Description of Artificial Sequence: Synthetic oligonucleotide
gccccguugauggcggggc

SEQ ID NO: 470671 - RNA, 19 nt, Artificial Sequence
  Description of Artificial Sequence: Synthetic oligonucleotide
caccccugacgacccacga

SEQ ID NO: 470672 - RNA, 19 nt, Artificial Sequence
  Description of Artificial Sequence: Synthetic oligonucleotide
gcucgcucaaagggugccc

SEQ ID NO: 470673 - RNA, 19 nt, Artificial Sequence
  Description of Artificial Sequence: Synthetic oligonucleotide
gcccuccgaggcaacagug

SEQ ID NO: 470674 - RNA, 19 nt, Artificial Sequence
  Description of Artificial Sequence: Synthetic oligonucleotide
ccguugauggcggggcagc

SEQ ID NO: 470675 - RNA, 19 nt, Artificial Sequence
  Description of Artificial Sequence: Synthetic oligonucleotide
ucuccgcgacaugcuccga

SEQ ID NO: 470676 - RNA, 19 nt, Artificial Sequence
  Description of Artificial Sequence: Synthetic oligonucleotide
ccccgguugcccgagcccc

SEQ ID NO: 470677 - RNA, 19 nt, Artificial Sequence
  Description of Artificial Sequence: Synthetic oligonucleotide
cgacccacgaucuccgcga

SEQ ID NO: 470678 - RNA, 19 nt, Artificial Sequence
  Description of Artificial Sequence: Synthetic oligonucleotide
gcagcgucgaggggcccag

SEQ ID NO: 470679 - RNA, 19 nt, Artificial Sequence
  Description of Artificial Sequence: Synthetic oligonucleotide
cccguugauggcggggcag

SEQ ID NO: 470680 - RNA, 19 nt, Artificial Sequence
  Description of Artificial Sequence: Synthetic oligonucleotide
gacugccgaucacguucaa

SEQ ID NO: 470681 - RNA, 19 nt, Artificial Sequence
  Description of Artificial Sequence: Synthetic oligonucleotide
gccccgguugcccgagccc

SEQ ID NO: 470682 - RNA, 19 nt, Artificial Sequence
  Description of Artificial Sequence: Synthetic oligonucleotide
cugcgccgugcgccugugc

SEQ ID NO: 470683 - RNA, 19 nt, Artificial Sequence
  Description of Artificial Sequence: Synthetic oligonucleotide
cgcgacaugcuccgagcug

SEQ ID NO: 470684 - RNA, 19 nt, Artificial Sequence
  Description of Artificial Sequence: Synthetic oligonucleotide
gcgccgugcgccugugcug

SEQ ID NO: 470685 - RNA, 19 nt, Artificial Sequence
  Description of Artificial Sequence: Synthetic oligonucleotide
gcugcgaguggcacggaua

SEQ ID NO: 470686 - RNA, 19 nt, Artificial Sequence
  Description of Artificial Sequence: Synthetic oligonucleotide
gcgcgaagcuggcgaacac

SEQ ID NO: 470687 - RNA, 19 nt, Artificial Sequence
  Description of Artificial Sequence: Synthetic oligonucleotide
cgcccaagacacugucccc

SEQ ID NO: 470688 - RNA, 19 nt, Artificial Sequence
  Description of Artificial Sequence: Synthetic oligonucleotide
gccgccccgugaaguaggg

SEQ ID NO: 470689 - RNA, 19 nt, Artificial Sequence
  Description of Artificial Sequence: Synthetic oligonucleotide
ggccggggacucacgucgg

SEQ ID NO: 470690 - RNA, 19 nt, Artificial Sequence
  Description of Artificial Sequence: Synthetic oligonucleotide
cgccgugcgccugugcugg

SEQ ID NO: 470691 - RNA, 19 nt, Artificial Sequence
  Description of Artificial Sequence: Synthetic oligonucleotide
gacucacgucgggguccag

SEQ ID NO: 470692 - RNA, 19 nt, Artificial Sequence
  Description of Artificial Sequence: Synthetic oligonucleotide
uugcugcgaguggcacgga

SEQ ID NO: 470693 - RNA, 19 nt, Artificial Sequence
  Description of Artificial Sequence: Synthetic oligonucleotide
gcguccgugaaggccccug

SEQ ID NO: 470694 - RNA, 19 nt, Artificial Sequence
  Description of Artificial Sequence: Synthetic oligonucleotide
ggacucacgucggggucca

SEQ ID NO: 470695 - RNA, 19 nt, Artificial Sequence
  Description of Artificial Sequence: Synthetic oligonucleotide
ccacgcauucacgagccaa

SEQ ID NO: 470696 - RNA, 19 nt, Artificial Sequence
  Description of Artificial Sequence: Synthetic oligonucleotide
ugcguccgugaaggccccu

SEQ ID NO: 470697 - RNA, 19 nt, Artificial Sequence
  Description of Artificial Sequence: Synthetic oligonucleotide
gcaccggagucuugaugua

SEQ ID NO: 470698 - RNA, 19 nt, Artificial Sequence
  Description of Artificial Sequence: Synthetic oligonucleotide
cauuggcguggaagucgcu

SEQ ID NO: 470699 - RNA, 19 nt, Artificial Sequence
  Description of Artificial Sequence: Synthetic oligonucleotide
ggcggccgacaggaucucc

SEQ ID NO: 470700 - RNA, 19 nt, Artificial Sequence
  Description of Artificial Sequence: Synthetic oligonucleotide
cgaucacguucaacugcuc

SEQ ID NO: 470701 - RNA, 19 nt, Artificial Sequence
  Description of Artificial Sequence: Synthetic oligonucleotide
ccgguucacucaauacugu

SEQ ID NO: 470702 - RNA, 19 nt, Artificial Sequence
  Description of Artificial Sequence: Synthetic oligonucleotide
ccucugcgcauaccacgca

SEQ ID NO: 470703 - RNA, 19 nt, Artificial Sequence
  Description of Artificial Sequence: Synthetic oligonucleotide
ggucaacguucucgggcau

SEQ ID NO: 470704 - RNA, 19 nt, Artificial Sequence
  Description of Artificial Sequence: Synthetic oligonucleotide
ccggagucuugauguaggu

SEQ ID NO: 470705 - RNA, 19 nt, Artificial Sequence
  Description of Artificial Sequence: Synthetic oligonucleotide
cacgcgcaccuggauggua

SEQ ID NO: 470706 - RNA, 19 nt, Artificial Sequence
  Description of Artificial Sequence: Synthetic oligonucleotide
ccggguguggcgcgaagcu

SEQ ID NO: 470707 - RNA, 19 nt, Artificial Sequence
  Description of Artificial Sequence: Synthetic oligonucleotide
guugugcgggugccccguu

SEQ ID NO: 470708 - RNA, 19 nt, Artificial Sequence
  Description of Artificial Sequence: Synthetic oligonucleotide
ccgcgcaccggagucuuga

SEQ ID NO: 470709 - RNA, 19 nt, Artificial Sequence
  Description of Artificial Sequence: Synthetic oligonucleotide
cgacagcccgcccgccuug

SEQ ID NO: 470710 - RNA, 19 nt, Artificial Sequence
  Description of Artificial Sequence: Synthetic oligonucleotide
ggccaggggucacgaugua

SEQ ID NO: 470711 - RNA, 19 nt, Artificial Sequence
  Description of Artificial Sequence: Synthetic oligonucleotide
ccccguugauggcggggca

SEQ ID NO: 470712 - RNA, 19 nt, Artificial Sequence
  Description of Artificial Sequence: Synthetic oligonucleotide
gcgggacacucuggcucac

SEQ ID NO: 470713 - RNA, 19 nt, Artificial Sequence
  Description of Artificial Sequence: Synthetic oligonucleotide
ccgcgacaugcuccgagcu

SEQ ID NO: 470714 - RNA, 19 nt, Artificial Sequence
  Description of Artificial Sequence: Synthetic oligonucleotide
cacggccaggggucacgau

SEQ ID NO: 470715 - RNA, 19 nt, Artificial Sequence
  Description of Artificial Sequence: Synthetic oligonucleotide
ccgacaggaucucccgcuu

SEQ ID NO: 470716 - RNA, 19 nt, Artificial Sequence
  Description of Artificial Sequence: Synthetic oligonucleotide
cguccgugaaggccccugu

SEQ ID NO: 470717 - RNA, 19 nt, Artificial Sequence
  Description of Artificial Sequence: Synthetic oligonucleotide
gcgcaccuggaugguaguu

SEQ ID NO: 470718 - RNA, 19 nt, Artificial Sequence
  Description of Artificial Sequence: Synthetic oligonucleotide
ccggguccguccccaccaa

SEQ ID NO: 470719 - RNA, 19 nt, Artificial Sequence
  Description of Artificial Sequence: Synthetic oligonucleotide
ccucgccgcgcaccggagu

SEQ ID NO: 470720 - RNA, 19 nt, Artificial Sequence
  Description of Artificial Sequence: Synthetic oligonucleotide
ccgacagcccgcccgccuu

SEQ ID NO: 470721 - RNA, 19 nt, Artificial Sequence
  Description of Artificial Sequence: Synthetic oligonucleotide
cgacacgcaugggccccuc

SEQ ID NO: 470722 - RNA, 19 nt, Artificial Sequence
  Description of Artificial Sequence: Synthetic oligonucleotide
cggguccguccccaccaaa

SEQ ID NO: 470723 - RNA, 19 nt, Artificial Sequence
  Description of Artificial Sequence: Synthetic oligonucleotide
cgcgcaccggagucuugau

SEQ ID NO: 470724 - RNA, 19 nt, Artificial Sequence
  Description of Artificial Sequence: Synthetic oligonucleotide
aauggaauacaacagguuc

SEQ ID NO: 470725 - RNA, 19 nt, Artificial Sequence
  Description of Artificial Sequence: Synthetic oligonucleotide
aaagguauaccccagccac

SEQ ID NO: 470726 - RNA, 19 nt, Artificial Sequence
  Description of Artificial Sequence: Synthetic oligonucleotide
agagaaaagaucuuguccg

SEQ ID NO: 470727 - RNA, 19 nt, Artificial Sequence
  Description of Artificial Sequence: Synthetic oligonucleotide
aucaacaaggccuucaugg

SEQ ID NO: 470728 - RNA, 19 nt, Artificial Sequence
  Description of Artificial Sequence: Synthetic oligonucleotide
aaccaugccguacagacac

SEQ ID NO: 470729 - RNA, 19 nt, Artificial Sequence
  Description of Artificial Sequence: Synthetic oligonucleotide
gaaaggaagacuuaggguc

SEQ ID NO: 470730 - RNA, 19 nt, Artificial Sequence
  Description of Artificial Sequence: Synthetic oligonucleotide
aagacuuagggucaaacca

SEQ ID NO: 470731 - RNA, 19 nt, Artificial Sequence
  Description of Artificial Sequence: Synthetic oligonucleotide
auaacuacggaucaacaag

SEQ ID NO: 470732 - RNA, 19 nt, Artificial Sequence
  Description of Artificial Sequence: Synthetic oligonucleotide
gaugaggucugguaaaugg

SEQ ID NO: 470733 - RNA, 19 nt, Artificial Sequence
  Description of Artificial Sequence: Synthetic oligonucleotide
aagauaguccuacagcguc

SEQ ID NO: 470734 - RNA, 19 nt, Artificial Sequence
  Description of Artificial Sequence: Synthetic oligonucleotide
augaagauaguccuacagc

SEQ ID NO: 470735 - RNA, 19 nt, Artificial Sequence
  Description of Artificial Sequence: Synthetic oligonucleotide
ugaaguugacaucugaaug

SEQ ID NO: 470736 - RNA, 19 nt, Artificial Sequence
  Description of Artificial Sequence: Synthetic oligonucleotide
aaccaccugacguaagucc

SEQ ID NO: 470737 - RNA, 19 nt, Artificial Sequence
  Description of Artificial Sequence: Synthetic oligonucleotide
aaaccauucgccacaaggc

SEQ ID NO: 470738 - RNA, 19 nt, Artificial Sequence
  Description of Artificial Sequence: Synthetic oligonucleotide
uaacuacggaucaacaagg

SEQ ID NO: 470739 - RNA, 19 nt, Artificial Sequence
  Description of Artificial Sequence: Synthetic oligonucleotide
uguauagcuaccagaaacc

SEQ ID NO: 470740 - RNA, 19 nt, Artificial Sequence
  Description of Artificial Sequence: Synthetic oligonucleotide
ucuuguccgaauuuuaugc

SEQ ID NO: 470741 - RNA, 19 nt, Artificial Sequence
  Description of Artificial Sequence: Synthetic oligonucleotide
agcauucuaacuugaaaac

SEQ ID NO: 470742 - RNA, 19 nt, Artificial Sequence
  Description of Artificial Sequence: Synthetic oligonucleotide
uacaacguagaguaucugg

SEQ ID NO: 470743 - RNA, 19 nt, Artificial Sequence
  Description of Artificial Sequence: Synthetic oligonucleotide
ucugaaauuaaugaggcuc

SEQ ID NO: 470744 - RNA, 19 nt, Artificial Sequence
  Description of Artificial Sequence: Synthetic oligonucleotide
aacguagaguaucuggguc

SEQ ID NO: 470745 - RNA, 19 nt, Artificial Sequence
  Description of Artificial Sequence: Synthetic oligonucleotide
aagauugggaucuagccaa

SEQ ID NO: 470746 - RNA, 19 nt, Artificial Sequence
  Description of Artificial Sequence: Synthetic oligonucleotide
ugcauaccaaaccaugccg

SEQ ID NO: 470747 - RNA, 19 nt, Artificial Sequence
  Description of Artificial Sequence: Synthetic oligonucleotide
aagguauucagcucaguca

SEQ ID NO: 470748 - RNA, 19 nt, Artificial Sequence
  Description of Artificial Sequence: Synthetic oligonucleotide
caucugaaauuaaugaggc

SEQ ID NO: 470749 - RNA, 19 nt, Artificial Sequence
  Description of Artificial Sequence: Synthetic oligonucleotide
ucaaaauggcugacgaucc

SEQ ID NO: 470750 - RNA, 19 nt, Artificial Sequence
  Description of Artificial Sequence: Synthetic oligonucleotide
ucuagccaauacauuaggg

SEQ ID NO: 470751 - RNA, 19 nt, Artificial Sequence
  Description of Artificial Sequence: Synthetic oligonucleotide
cacucuccaaucaugaucc

SEQ ID NO: 470752 - RNA, 19 nt, Artificial Sequence
  Description of Artificial Sequence: Synthetic oligonucleotide
cauccuguaguucacgucg

SEQ ID NO: 470753 - RNA, 19 nt, Artificial Sequence
  Description of Artificial Sequence: Synthetic oligonucleotide
aaaacagcguuuggaaugg

SEQ ID NO: 470754 - RNA, 19 nt, Artificial Sequence
  Description of Artificial Sequence: Synthetic oligonucleotide
cugaauaggucuuuucccg

SEQ ID NO: 470755 - RNA, 19 nt, Artificial Sequence
  Description of Artificial Sequence: Synthetic oligonucleotide
uauguucagagcuauggga

SEQ ID NO: 470756 - RNA, 19 nt, Artificial Sequence
  Description of Artificial Sequence: Synthetic oligonucleotide
caaacaaccaugcccagcc

SEQ ID NO: 470757 - RNA, 19 nt, Artificial Sequence
  Description of Artificial Sequence: Synthetic oligonucleotide
auugggaucuagccaauac

SEQ ID NO: 470758 - RNA, 19 nt, Artificial Sequence
  Description of Artificial Sequence: Synthetic oligonucleotide
acuacggaucaacaaggcc

SEQ ID NO: 470759 - RNA, 19 nt, Artificial Sequence
  Description of Artificial Sequence: Synthetic oligonucleotide
cuguauagcuaccagaaac

SEQ ID NO: 470760 - RNA, 19 nt, Artificial Sequence
  Description of Artificial Sequence: Synthetic oligonucleotide
aaaaucggcaaacaaccau

SEQ ID NO: 470761 - RNA, 19 nt, Artificial Sequence
  Description of Artificial Sequence: Synthetic oligonucleotide
uacaugaggcugacgaugg

SEQ ID NO: 470762 - RNA, 19 nt, Artificial Sequence
  Description of Artificial Sequence: Synthetic oligonucleotide
aaaagguauaccccagcca

SEQ ID NO: 470763 - RNA, 19 nt, Artificial Sequence
  Description of Artificial Sequence: Synthetic oligonucleotide
ucuccaaucaugaucccca

SEQ ID NO: 470764 - RNA, 19 nt, Artificial Sequence
  Description of Artificial Sequence: Synthetic oligonucleotide
gaagacuuagggucaaacc

SEQ ID NO: 470765 - RNA, 19 nt, Artificial Sequence
  Description of Artificial Sequence: Synthetic oligonucleotide
ucugcauaccaaaccaugc

SEQ ID NO: 470766 - RNA, 19 nt, Artificial Sequence
  Description of Artificial Sequence: Synthetic oligonucleotide
auugcauaacaggaugucc

SEQ ID NO: 470767 - RNA, 19 nt, Artificial Sequence
  Description of Artificial Sequence: Synthetic oligonucleotide
caugauaucugcuucucug

SEQ ID NO: 470768 - RNA, 19 nt, Artificial Sequence
  Description of Artificial Sequence: Synthetic oligonucleotide
acauuagggauuuaaccug

SEQ ID NO: 470769 - RNA, 19 nt, Artificial Sequence
  Description of Artificial Sequence: Synthetic oligonucleotide
uacaacagguuccagucug

SEQ ID NO: 470770 - RNA, 19 nt, Artificial Sequence
  Description of Artificial Sequence: Synthetic oligonucleotide
aucaugcggaaaugcaucc

SEQ ID NO: 470771 - RNA, 19 nt, Artificial Sequence
  Description of Artificial Sequence: Synthetic oligonucleotide
ucuaacuugaaaacacaaa

SEQ ID NO: 470772 - RNA, 19 nt, Artificial Sequence
  Description of Artificial Sequence: Synthetic oligonucleotide
ugguaaauggaccguuggg

SEQ ID NO: 470773 - RNA, 19 nt, Artificial Sequence
  Description of Artificial Sequence: Synthetic oligonucleotide
agacuuacacucuccaauc

SEQ ID NO: 470774 - RNA, 19 nt, Artificial Sequence
  Description of Artificial Sequence: Synthetic oligonucleotide
aaucggcaaacaaccaugc

SEQ ID NO: 470775 - RNA, 19 nt, Artificial Sequence
  Description of Artificial Sequence: Synthetic oligonucleotide
aaauggaccguuggggaac

SEQ ID NO: 470776 - RNA, 19 nt, Artificial Sequence
  Description of Artificial Sequence: Synthetic oligonucleotide
aauacaacguagaguaucu

SEQ ID NO: 470777 - RNA, 19 nt, Artificial Sequence
  Description of Artificial Sequence: Synthetic oligonucleotide
ugauuguccagcagagucc

SEQ ID NO: 470778 - RNA, 19 nt, Artificial Sequence
  Description of Artificial Sequence: Synthetic oligonucleotide
ugcccaaaugcaaauauau

SEQ ID NO: 470779 - RNA, 19 nt, Artificial Sequence
  Description of Artificial Sequence: Synthetic oligonucleotide
auaucgaagauugggaucu

SEQ ID NO: 470780 - RNA, 19 nt, Artificial Sequence
  Description of Artificial Sequence: Synthetic oligonucleotide
agagcuaugggagacaaga

SEQ ID NO: 470781 - RNA, 19 nt, Artificial Sequence
  Description of Artificial Sequence: Synthetic oligonucleotide
agaugcaugaagaacagcu

SEQ ID NO: 470782 - RNA, 19 nt, Artificial Sequence
  Description of Artificial Sequence: Synthetic oligonucleotide
gaguaugcuaagcagggac

SEQ ID NO: 470783 - RNA, 19 nt, Artificial Sequence
  Description of Artificial Sequence: Synthetic oligonucleotide
aaccauucgccacaaggcu

SEQ ID NO: 470784 - RNA, 19 nt, Artificial Sequence
  Description of Artificial Sequence: Synthetic oligonucleotide
gaagauugggaucuagcca

SEQ ID NO: 470785 - RNA, 19 nt, Artificial Sequence
  Description of Artificial Sequence: Synthetic oligonucleotide
uagccaauacauuagggau

SEQ ID NO: 470786 - RNA, 19 nt, Artificial Sequence
  Description of Artificial Sequence: Synthetic oligonucleotide
guaagcauaguacugucuc

SEQ ID NO: 470787 - RNA, 19 nt, Artificial Sequence
  Description of Artificial Sequence: Synthetic oligonucleotide
uuucccggugaccauagug

SEQ ID NO: 470788 - RNA, 19 nt, Artificial Sequence
  Description of Artificial Sequence: Synthetic oligonucleotide
ugucauguggcuagggacu

SEQ ID NO: 470789 - RNA, 19 nt, Artificial Sequence
  Description of Artificial Sequence: Synthetic oligonucleotide
aauucuacaccagcuuaag

SEQ ID NO: 470790 - RNA, 19 nt, Artificial Sequence
  Description of Artificial Sequence: Synthetic oligonucleotide
aucuagccaauacauuagg

SEQ ID NO: 470791 - RNA, 19 nt, Artificial Sequence
  Description of Artificial Sequence: Synthetic oligonucleotide
agaaugaccuggucccacc

SEQ ID NO: 470792 - RNA, 19 nt, Artificial Sequence
  Description of Artificial Sequence: Synthetic oligonucleotide
aacuacggaucaacaaggc

SEQ ID NO: 470793 - RNA, 19 nt, Artificial Sequence
  Description of Artificial Sequence: Synthetic oligonucleotide
cauuagggauuuaaccugc

SEQ ID NO: 470794 - RNA, 19 nt, Artificial Sequence
  Description of Artificial Sequence: Synthetic oligonucleotide
aacgcgcuuacacugugug

SEQ ID NO: 470795 - RNA, 19 nt, Artificial Sequence
  Description of Artificial Sequence: Synthetic oligonucleotide
aauaggucuuuucccggug

SEQ ID NO: 470796 - RNA, 19 nt, Artificial Sequence
  Description of Artificial Sequence: Synthetic oligonucleotide
ugggaucuagccaauacau

SEQ ID NO: 470797 - RNA, 19 nt, Artificial Sequence
  Description of Artificial Sequence: Synthetic oligonucleotide
uuuaugcaaacaauagcuu

SEQ ID NO: 470798 - RNA, 19 nt, Artificial Sequence
  Description of Artificial Sequence: Synthetic oligonucleotide
ucgaagauugggaucuagc

SEQ ID NO: 470799 - RNA, 19 nt, Artificial Sequence
  Description of Artificial Sequence: Synthetic oligonucleotide
uggauguccuugaagcuug

SEQ ID NO: 470800 - RNA, 19 nt, Artificial Sequence
  Description of Artificial Sequence: Synthetic oligonucleotide
uucuguugcccucucaggu

SEQ ID NO: 470801 - RNA, 19 nt, Artificial Sequence
  Description of Artificial Sequence: Synthetic oligonucleotide
uccacgagacacaugggca

SEQ ID NO: 470802 - RNA, 19 nt, Artificial Sequence
  Description of Artificial Sequence: Synthetic oligonucleotide
ugucccaacgcgcuuacac

SEQ ID NO: 470803 - RNA, 19 nt, Artificial Sequence
  Description of Artificial Sequence: Synthetic oligonucleotide
uauagcuaccagaaaccac

SEQ ID NO: 470804 - RNA, 19 nt, Artificial Sequence
  Description of Artificial Sequence: Synthetic oligonucleotide
aacguggugaaggccacac

SEQ ID NO: 470805 - RNA, 19 nt, Artificial Sequence
  Description of Artificial Sequence: Synthetic oligonucleotide
gguaaauggaccguugggg

SEQ ID NO: 470806 - RNA, 19 nt, Artificial Sequence
  Description of Artificial Sequence: Synthetic oligonucleotide
agcguuuggaauggaauac

SEQ ID NO: 470807 - RNA, 19 nt, Artificial Sequence
  Description of Artificial Sequence: Synthetic oligonucleotide
aaugccgguuccuucuucu

SEQ ID NO: 470808 - RNA, 19 nt, Artificial Sequence
  Description of Artificial Sequence: Synthetic oligonucleotide
gaucaugaaaagguauacc

SEQ ID NO: 470809 - RNA, 19 nt, Artificial Sequence
  Description of Artificial Sequence: Synthetic oligonucleotide
cuagccaauacauuaggga

SEQ ID NO: 470810 - RNA, 19 nt, Artificial Sequence
  Description of Artificial Sequence: Synthetic oligonucleotide
gauuuaaccugcucgaagu

SEQ ID NO: 470811 - RNA, 19 nt, Artificial Sequence
  Description of Artificial Sequence: Synthetic oligonucleotide
gaucuagccaauacauuag

SEQ ID NO: 470812 - RNA, 19 nt, Artificial Sequence
  Description of Artificial Sequence: Synthetic oligonucleotide
ucugucauguggcuaggga

SEQ ID NO: 470813 - RNA, 19 nt, Artificial Sequence
  Description of Artificial Sequence: Synthetic oligonucleotide
ugcauaacaggauguccag

SEQ ID NO: 470814 - RNA, 19 nt, Artificial Sequence
  Description of Artificial Sequence: Synthetic oligonucleotide
uccuacagcguccacgaga

SEQ ID NO: 470815 - RNA, 19 nt, Artificial Sequence
  Description of Artificial Sequence: Synthetic oligonucleotide
aauguauguucagagcuau

SEQ ID NO: 470816 - RNA, 19 nt, Artificial Sequence
  Description of Artificial Sequence: Synthetic oligonucleotide
auucuacaccagcuuaagg

SEQ ID NO: 470817 - RNA, 19 nt, Artificial Sequence
  Description of Artificial Sequence: Synthetic oligonucleotide
ugaucaugaaaagguauac

SEQ ID NO: 470818 - RNA, 19 nt, Artificial Sequence
  Description of Artificial Sequence: Synthetic oligonucleotide
uaaugaggcuccuucauuu

SEQ ID NO: 470819 - RNA, 19 nt, Artificial Sequence
  Description of Artificial Sequence: Synthetic oligonucleotide
gcguccacgagacacaugg

SEQ ID NO: 470820 - RNA, 19 nt, Artificial Sequence
  Description of Artificial Sequence: Synthetic oligonucleotide
uagaguaucugggucuuag

SEQ ID NO: 470821 - RNA, 19 nt, Artificial Sequence
  Description of Artificial Sequence: Synthetic oligonucleotide
cacuguaggagcuguaaug

SEQ ID NO: 470822 - RNA, 19 nt, Artificial Sequence
  Description of Artificial Sequence: Synthetic oligonucleotide
caaucaugauccccaaagc

SEQ ID NO: 470823 - RNA, 19 nt, Artificial Sequence
  Description of Artificial Sequence: Synthetic oligonucleotide
cguaaguccagcuagcagg

SEQ ID NO: 470824 - RNA, 19 nt, Artificial Sequence
  Description of Artificial Sequence: Synthetic oligonucleotide
cauaucgaagauugggauc

SEQ ID NO: 470825 - RNA, 19 nt, Artificial Sequence
  Description of Artificial Sequence: Synthetic oligonucleotide
cugguaaauggaccguugg

SEQ ID NO: 470826 - RNA, 19 nt, Artificial Sequence
  Description of Artificial Sequence: Synthetic oligonucleotide
uaguccuacagcguccacg

SEQ ID NO: 470827 - RNA, 19 nt, Artificial Sequence
  Description of Artificial Sequence: Synthetic oligonucleotide
aggaccccaagucaugguc

SEQ ID NO: 470828 - RNA, 19 nt, Artificial Sequence
  Description of Artificial Sequence: Synthetic oligonucleotide
cugucauguggcuagggac

SEQ ID NO: 470829 - RNA, 19 nt, Artificial Sequence
  Description of Artificial Sequence: Synthetic oligonucleotide
aucggcaaacaaccaugcc

SEQ ID NO: 470830 - RNA, 19 nt, Artificial Sequence
  Description of Artificial Sequence: Synthetic oligonucleotide
uggcugacgauccucuccc

SEQ ID NO: 470831 - RNA, 19 nt, Artificial Sequence
  Description of Artificial Sequence: Synthetic oligonucleotide
uguccgaauuuuaugcaaa

SEQ ID NO: 470832 - RNA, 19 nt, Artificial Sequence
  Description of Artificial Sequence: Synthetic oligonucleotide
ucuaggcacucucuggaac

SEQ ID NO: 470833 - RNA, 19 nt, Artificial Sequence
  Description of Artificial Sequence: Synthetic oligonucleotide
guaaauggaccguugggga

SEQ ID NO: 470834 - RNA, 19 nt, Artificial Sequence
  Description of Artificial Sequence: Synthetic oligonucleotide
ugccgguuccuucuucugg

SEQ ID NO: 470835 - RNA, 19 nt, Artificial Sequence
  Description of Artificial Sequence: Synthetic oligonucleotide
uggaauacaacagguucca

SEQ ID NO: 470836 - RNA, 19 nt, Artificial Sequence
  Description of Artificial Sequence: Synthetic oligonucleotide
uucccaugaugccaggaga

SEQ ID NO: 470837 - RNA, 19 nt, Artificial Sequence
  Description of Artificial Sequence: Synthetic oligonucleotide
aguccuacagcguccacga

SEQ ID NO: 470838 - RNA, 19 nt, Artificial Sequence
  Description of Artificial Sequence: Synthetic oligonucleotide
ugugugucggugagguaag

SEQ ID NO: 470839 - RNA, 19 nt, Artificial Sequence
  Description of Artificial Sequence: Synthetic oligonucleotide
cucugcauaccaaaccaug

SEQ ID NO: 470840 - RNA, 19 nt, Artificial Sequence
  Description of Artificial Sequence: Synthetic oligonucleotide
guugcuugaaugcuuggga

SEQ ID NO: 470841 - RNA, 19 nt, Artificial Sequence
  Description of Artificial Sequence: Synthetic oligonucleotide
gugguaaguccucaucucc

SEQ ID NO: 470842 - RNA, 19 nt, Artificial Sequence
  Description of Artificial Sequence: Synthetic oligonucleotide
guaaguccagcuagcaggg

SEQ ID NO: 470843 - RNA, 19 nt, Artificial Sequence
  Description of Artificial Sequence: Synthetic oligonucleotide
aguuaggagacaccuccug

SEQ ID NO: 470844 - RNA, 19 nt, Artificial Sequence
  Description of Artificial Sequence: Synthetic oligonucleotide
aggucuaggcacucucugg

SEQ ID NO: 470845 - RNA, 19 nt, Artificial Sequence
  Description of Artificial Sequence: Synthetic oligonucleotide
uuaaugaggcuccuucauu

SEQ ID NO: 470846 - RNA, 19 nt, Artificial Sequence
  Description of Artificial Sequence: Synthetic oligonucleotide
agauaguccuacagcgucc

SEQ ID NO: 470847 - RNA, 19 nt, Artificial Sequence
  Description of Artificial Sequence: Synthetic oligonucleotide
ucauggucagccuaaugua

SEQ ID NO: 470848 - RNA, 19 nt, Artificial Sequence
  Description of Artificial Sequence: Synthetic oligonucleotide
acuuuggacuuggaaugcc

SEQ ID NO: 470849 - RNA, 19 nt, Artificial Sequence
  Description of Artificial Sequence: Synthetic oligonucleotide
gaagcucaggcuccagugc

SEQ ID NO: 470850 - RNA, 19 nt, Artificial Sequence
  Description of Artificial Sequence: Synthetic oligonucleotide
cuacggaucaacaaggccu

SEQ ID NO: 470851 - RNA, 19 nt, Artificial Sequence
  Description of Artificial Sequence: Synthetic oligonucleotide
cuuagggucaaaccaccug

SEQ ID NO: 470852 - RNA, 19 nt, Artificial Sequence
  Description of Artificial Sequence: Synthetic oligonucleotide
accuuuugagccuuuccca

SEQ ID NO: 470853 - RNA, 19 nt, Artificial Sequence
  Description of Artificial Sequence: Synthetic oligonucleotide
ucccaacgcgcuuacacug

SEQ ID NO: 470854 - RNA, 19 nt, Artificial Sequence
  Description of Artificial Sequence: Synthetic oligonucleotide
aacccagugaacaauucau

SEQ ID NO: 470855 - RNA, 19 nt, Artificial Sequence
  Description of Artificial Sequence: Synthetic oligonucleotide
ugacguaaguccagcuagc

SEQ ID NO: 470856 - RNA, 19 nt, Artificial Sequence
  Description of Artificial Sequence: Synthetic oligonucleotide
agcacguuugaucuucccu

SEQ ID NO: 470857 - RNA, 19 nt, Artificial Sequence
  Description of Artificial Sequence: Synthetic oligonucleotide
uuguccgaauuuuaugcaa

SEQ ID NO: 470858 - RNA, 19 nt, Artificial Sequence
  Description of Artificial Sequence: Synthetic oligonucleotide
guccacgagacacaugggc

SEQ ID NO: 470859 - RNA, 19 nt, Artificial Sequence
  Description of Artificial Sequence: Synthetic oligonucleotide
uggugaaguugacaucuga

SEQ ID NO: 470860 - RNA, 19 nt, Artificial Sequence
  Description of Artificial Sequence: Synthetic oligonucleotide
uaaauggaccguuggggaa

SEQ ID NO: 470861 - RNA, 19 nt, Artificial Sequence
  Description of Artificial Sequence: Synthetic oligonucleotide
uugagccuuucccaugaug

SEQ ID NO: 470862 - RNA, 19 nt, Artificial Sequence
  Description of Artificial Sequence: Synthetic oligonucleotide
ggauuuaaccugcucgaag

SEQ ID NO: 470863 - RNA, 19 nt, Artificial Sequence
  Description of Artificial Sequence: Synthetic oligonucleotide
uuuaaccugcucgaaguuc

SEQ ID NO: 470864 - RNA, 19 nt, Artificial Sequence
  Description of Artificial Sequence: Synthetic oligonucleotide
caucugaaugaagauaguc

SEQ ID NO: 470865 - RNA, 19 nt, Artificial Sequence
  Description of Artificial Sequence: Synthetic oligonucleotide
aacaaucagucaaauggaa

SEQ ID NO: 470866 - RNA, 19 nt, Artificial Sequence
  Description of Artificial Sequence: Synthetic oligonucleotide
cauaacuacggaucaacaa

SEQ ID NO: 470867 - RNA, 19 nt, Artificial Sequence
  Description of Artificial Sequence: Synthetic oligonucleotide
aauggaccguuggggaacg

SEQ ID NO: 470868 - RNA, 19 nt, Artificial Sequence
  Description of Artificial Sequence: Synthetic oligonucleotide
gccuaauguauguucagag

SEQ ID NO: 470869 - RNA, 19 nt, Artificial Sequence
  Description of Artificial Sequence: Synthetic oligonucleotide
uuagggauuuaaccugcuc

SEQ ID NO: 470870 - RNA, 19 nt, Artificial Sequence
  Description of Artificial Sequence: Synthetic oligonucleotide
ggaaaauguucuaggagag

SEQ ID NO: 470871 - RNA, 19 nt, Artificial Sequence
  Description of Artificial Sequence: Synthetic oligonucleotide
cugcucguugaucaugcgg

SEQ ID NO: 470872 - RNA, 19 nt, Artificial Sequence
  Description of Artificial Sequence: Synthetic oligonucleotide
aaguugacaucugaaugaa

SEQ ID NO: 470873 - RNA, 19 nt, Artificial Sequence
  Description of Artificial Sequence: Synthetic oligonucleotide
aaauggcugacgauccucu

SEQ ID NO: 470874 - RNA, 19 nt, Artificial Sequence
  Description of Artificial Sequence: Synthetic oligonucleotide
guacaugaggcugacgaug

SEQ ID NO: 470875 - RNA, 19 nt, Artificial Sequence
  Description of Artificial Sequence: Synthetic oligonucleotide
uccgaauuuuaugcaaaca

SEQ ID NO: 470876 - RNA, 19 nt, Artificial Sequence
  Description of Artificial Sequence: Synthetic oligonucleotide
uuaagggguggcuggcuug

SEQ ID NO: 470877 - RNA, 19 nt, Artificial Sequence
  Description of Artificial Sequence: Synthetic oligonucleotide
gagaaaagaucuuguccga

SEQ ID NO: 470878 - RNA, 19 nt, Artificial Sequence
  Description of Artificial Sequence: Synthetic oligonucleotide
ucuguacauuuugaucucc

SEQ ID NO: 470879 - RNA, 19 nt, Artificial Sequence
  Description of Artificial Sequence: Synthetic oligonucleotide
acguaaguccagcuagcag

SEQ ID NO: 470880 - RNA, 19 nt, Artificial Sequence
  Description of Artificial Sequence: Synthetic oligonucleotide
auaaaacccagugaacaau

SEQ ID NO: 470881 - RNA, 19 nt, Artificial Sequence
  Description of Artificial Sequence: Synthetic oligonucleotide
acgauccucucccagguga

SEQ ID NO: 470882 - RNA, 19 nt, Artificial Sequence
  Description of Artificial Sequence: Synthetic oligonucleotide
uuacacugugugucgguga

SEQ ID NO: 470883 - RNA, 19 nt, Artificial Sequence
  Description of Artificial Sequence: Synthetic oligonucleotide
ggaacagagucaucccugg

SEQ ID NO: 470884 - RNA, 19 nt, Artificial Sequence
  Description of Artificial Sequence: Synthetic oligonucleotide
ggaucuagccaauacauua

SEQ ID NO: 470885 - RNA, 19 nt, Artificial Sequence
  Description of Artificial Sequence: Synthetic oligonucleotide
ccuaauguauguucagagc

SEQ ID NO: 470886 - RNA, 19 nt, Artificial Sequence
  Description of Artificial Sequence: Synthetic oligonucleotide
gaucgugugcggccgguag

SEQ ID NO: 470887 - RNA, 19 nt, Artificial Sequence
  Description of Artificial Sequence: Synthetic oligonucleotide
uggcuagggacugaguaug

SEQ ID NO: 470888 - RNA, 19 nt, Artificial Sequence
  Description of Artificial Sequence: Synthetic oligonucleotide
gugacuuuggacuuggaau

SEQ ID NO: 470889 - RNA, 19 nt, Artificial Sequence
  Description of Artificial Sequence: Synthetic oligonucleotide
caucuucacacucugaaua

SEQ ID NO: 470890 - RNA, 19 nt, Artificial Sequence
  Description of Artificial Sequence: Synthetic oligonucleotide
cagcuuaagggguggcugg

SEQ ID NO: 470891 - RNA, 19 nt, Artificial Sequence
  Description of Artificial Sequence: Synthetic oligonucleotide
ggugagguaagcauaguac

SEQ ID NO: 470892 - RNA, 19 nt, Artificial Sequence
  Description of Artificial Sequence: Synthetic oligonucleotide
ugugcggccgguagaagaa

SEQ ID NO: 470893 - RNA, 19 nt, Artificial Sequence
  Description of Artificial Sequence: Synthetic oligonucleotide
aacugagaggaugccucuc

SEQ ID NO: 470894 - RNA, 19 nt, Artificial Sequence
  Description of Artificial Sequence: Synthetic oligonucleotide
acgcacgacgccauggccc

SEQ ID NO: 470895 - RNA, 19 nt, Artificial Sequence
  Description of Artificial Sequence: Synthetic oligonucleotide
gcacguuugaucuucccug

SEQ ID NO: 470896 - RNA, 19 nt, Artificial Sequence
  Description of Artificial Sequence: Synthetic oligonucleotide
cagccgaugaagagaauuc

SEQ ID NO: 470897 - RNA, 19 nt, Artificial Sequence
  Description of Artificial Sequence: Synthetic oligonucleotide
ggucuuagagaaaagaucu

SEQ ID NO: 470898 - RNA, 19 nt, Artificial Sequence
  Description of Artificial Sequence: Synthetic oligonucleotide
uacggaucaacaaggccuu

SEQ ID NO: 470899 - RNA, 19 nt, Artificial Sequence
  Description of Artificial Sequence: Synthetic oligonucleotide
gacuuacacucuccaauca

SEQ ID NO: 470900 - RNA, 19 nt, Artificial Sequence
  Description of Artificial Sequence: Synthetic oligonucleotide
agaucucuggagugccauc

SEQ ID NO: 470901 - RNA, 19 nt, Artificial Sequence
  Description of Artificial Sequence: Synthetic oligonucleotide
cuuguccgaauuuuaugca

SEQ ID NO: 470902 - RNA, 19 nt, Artificial Sequence
  Description of Artificial Sequence: Synthetic oligonucleotide
gaagaauggcuuucguugu

SEQ ID NO: 470903 - RNA, 19 nt, Artificial Sequence
  Description of Artificial Sequence: Synthetic oligonucleotide
cgaagauugggaucuagcc

SEQ ID NO: 470904 - RNA, 19 nt, Artificial Sequence
  Description of Artificial Sequence: Synthetic oligonucleotide
gacuuuggacuuggaaugc

SEQ ID NO: 470905 - RNA, 19 nt, Artificial Sequence
  Description of Artificial Sequence: Synthetic oligonucleotide
accguuggggaacgccagc

SEQ ID NO: 470906 - RNA, 19 nt, Artificial Sequence
  Description of Artificial Sequence: Synthetic oligonucleotide
guuuggaauggaauacaac

SEQ ID NO: 470907 - RNA, 19 nt, Artificial Sequence
  Description of Artificial Sequence: Synthetic oligonucleotide
gaagcuugcccagugguaa

SEQ ID NO: 470908 - RNA, 19 nt, Artificial Sequence
  Description of Artificial Sequence: Synthetic oligonucleotide
caugaugccaggagaucuc

SEQ ID NO: 470909 - RNA, 19 nt, Artificial Sequence
  Description of Artificial Sequence: Synthetic oligonucleotide
aguaugcuaagcagggaca

SEQ ID NO: 470910 - RNA, 19 nt, Artificial Sequence
  Description of Artificial Sequence: Synthetic oligonucleotide
ggggugaacuguaacacag

SEQ ID NO: 470911 - RNA, 19 nt, Artificial Sequence
  Description of Artificial Sequence: Synthetic oligonucleotide
caugccguacagacacagg

SEQ ID NO: 470912 - RNA, 19 nt, Artificial Sequence
  Description of Artificial Sequence: Synthetic oligonucleotide
auaacaggauguccagaau

SEQ ID NO: 470913 - RNA, 19 nt, Artificial Sequence
  Description of Artificial Sequence: Synthetic oligonucleotide
ugccguacagacacaggaa

SEQ ID NO: 470914 - RNA, 19 nt, Artificial Sequence
  Description of Artificial Sequence: Synthetic oligonucleotide
cauugcauaacaggauguc

SEQ ID NO: 470915 - RNA, 19 nt, Artificial Sequence
  Description of Artificial Sequence: Synthetic oligonucleotide
accaaaccaugccguacag

SEQ ID NO: 470916 - RNA, 19 nt, Artificial Sequence
  Description of Artificial Sequence: Synthetic oligonucleotide
agcuuaagggguggcuggc

SEQ ID NO: 470917 - RNA, 19 nt, Artificial Sequence
  Description of Artificial Sequence: Synthetic oligonucleotide
cuuacacugugugucggug

SEQ ID NO: 470918 - RNA, 19 nt, Artificial Sequence
  Description of Artificial Sequence: Synthetic oligonucleotide
ucguuguugcuugaaugcu

SEQ ID NO: 470919 - RNA, 19 nt, Artificial Sequence
  Description of Artificial Sequence: Synthetic oligonucleotide
gaaaagaucuuguccgaau

SEQ ID NO: 470920 - RNA, 19 nt, Artificial Sequence
  Description of Artificial Sequence: Synthetic oligonucleotide
ucagagcuaugggagacaa

SEQ ID NO: 470921 - RNA, 19 nt, Artificial Sequence
  Description of Artificial Sequence: Synthetic oligonucleotide
guaugcuaagcagggacac

SEQ ID NO: 470922 - RNA, 19 nt, Artificial Sequence
  Description of Artificial Sequence: Synthetic oligonucleotide
aaggaccccaagucauggu

SEQ ID NO: 470923 - RNA, 19 nt, Artificial Sequence
  Description of Artificial Sequence: Synthetic oligonucleotide
gcuguaaugcagccgauga

SEQ ID NO: 470924 - RNA, 19 nt, Artificial Sequence
  Description of Artificial Sequence: Synthetic oligonucleotide
guauagcuaccagaaacca

SEQ ID NO: 470925 - RNA, 19 nt, Artificial Sequence
  Description of Artificial Sequence: Synthetic oligonucleotide
agccaaaauacaacguaga

SEQ ID NO: 470926 - RNA, 19 nt, Artificial Sequence
  Description of Artificial Sequence: Synthetic oligonucleotide
agaguaucugggucuuaga

SEQ ID NO: 470927 - RNA, 19 nt, Artificial Sequence
  Description of Artificial Sequence: Synthetic oligonucleotide
aggggugaacuguaacaca

SEQ ID NO: 470928 - RNA, 19 nt, Artificial Sequence
  Description of Artificial Sequence: Synthetic oligonucleotide
ccuacagcguccacgagac

SEQ ID NO: 470929 - RNA, 19 nt, Artificial Sequence
  Description of Artificial Sequence: Synthetic oligonucleotide
gauaguccuacagcgucca

SEQ ID NO: 470930 - RNA, 19 nt, Artificial Sequence
  Description of Artificial Sequence: Synthetic oligonucleotide
uguaguucacgucguccuu

SEQ ID NO: 470931 - RNA, 19 nt, Artificial Sequence
  Description of Artificial Sequence: Synthetic oligonucleotide
gaaaugcccaaaugcaaau

SEQ ID NO: 470932 - RNA, 19 nt, Artificial Sequence
  Description of Artificial Sequence: Synthetic oligonucleotide
gcggaaaugcauccuguag

SEQ ID NO: 470933 - RNA, 19 nt, Artificial Sequence
  Description of Artificial Sequence: Synthetic oligonucleotide
acagcguuuggaauggaau

SEQ ID NO: 470934 - RNA, 19 nt, Artificial Sequence
  Description of Artificial Sequence: Synthetic oligonucleotide
accccaauuucagcagugg

SEQ ID NO: 470935 - RNA, 19 nt, Artificial Sequence
  Description of Artificial Sequence: Synthetic oligonucleotide
ggacugaguaugcuaagca

SEQ ID NO: 470936 - RNA, 19 nt, Artificial Sequence
  Description of Artificial Sequence: Synthetic oligonucleotide
caggucuaggcacucucug

SEQ ID NO: 470937 - RNA, 19 nt, Artificial Sequence
  Description of Artificial Sequence: Synthetic oligonucleotide
aacagcguuuggaauggaa

SEQ ID NO: 470938 - RNA, 19 nt, Artificial Sequence
  Description of Artificial Sequence: Synthetic oligonucleotide
aaguuaggagacaccuccu

SEQ ID NO: 470939 - RNA, 19 nt, Artificial Sequence
  Description of Artificial Sequence: Synthetic oligonucleotide
ugcggccgguagaagaagu

SEQ ID NO: 470940 - RNA, 19 nt, Artificial Sequence
  Description of Artificial Sequence: Synthetic oligonucleotide
ugugucccaacgcgcuuac

SEQ ID NO: 470941 - RNA, 19 nt, Artificial Sequence
  Description of Artificial Sequence: Synthetic oligonucleotide
auaguccuacagcguccac

SEQ ID NO: 470942 - RNA, 19 nt, Artificial Sequence
  Description of Artificial Sequence: Synthetic oligonucleotide
ccgaauuuuaugcaaacaa

SEQ ID NO: 470943 - RNA, 19 nt, Artificial Sequence
  Description of Artificial Sequence: Synthetic oligonucleotide
caagucauggucagccuaa

SEQ ID NO: 470944 - RNA, 19 nt, Artificial Sequence
  Description of Artificial Sequence: Synthetic oligonucleotide
cacagcacguuugaucuuc

SEQ ID NO: 470945 - RNA, 19 nt, Artificial Sequence
  Description of Artificial Sequence: Synthetic oligonucleotide
ugcggaaaugcauccugua

SEQ ID NO: 470946 - RNA, 19 nt, Artificial Sequence
  Description of Artificial Sequence: Synthetic oligonucleotide
ggcgaaguacaugaggcug

SEQ ID NO: 470947 - RNA, 19 nt, Artificial Sequence
  Description of Artificial Sequence: Synthetic oligonucleotide
agccgaugaagagaauucu

SEQ ID NO: 470948 - RNA, 19 nt, Artificial Sequence
  Description of Artificial Sequence: Synthetic oligonucleotide
acagcacguuugaucuucc

SEQ ID NO: 470949 - RNA, 19 nt, Artificial Sequence
  Description of Artificial Sequence: Synthetic oligonucleotide
aagguauaccccagccacu

SEQ ID NO: 470950 - RNA, 19 nt, Artificial Sequence
  Description of Artificial Sequence: Synthetic oligonucleotide
accauucgccacaaggcug

SEQ ID NO: 470951 - RNA, 19 nt, Artificial Sequence
  Description of Artificial Sequence: Synthetic oligonucleotide
uccacauaggaagguccca

SEQ ID NO: 470952 - RNA, 19 nt, Artificial Sequence
  Description of Artificial Sequence: Synthetic oligonucleotide
agcuguaaugcagccgaug

SEQ ID NO: 470953 - RNA, 19 nt, Artificial Sequence
  Description of Artificial Sequence: Synthetic oligonucleotide
cuagggacugaguaugcua

SEQ ID NO: 470954 - RNA, 19 nt, Artificial Sequence
  Description of Artificial Sequence: Synthetic oligonucleotide
gacguaaguccagcuagca

SEQ ID NO: 470955 - RNA, 19 nt, Artificial Sequence
  Description of Artificial Sequence: Synthetic oligonucleotide
acguuugaucuucccugug

SEQ ID NO: 470956 - RNA, 19 nt, Artificial Sequence
  Description of Artificial Sequence: Synthetic oligonucleotide
agccuuucccaugaugcca

SEQ ID NO: 470957 - RNA, 19 nt, Artificial Sequence
  Description of Artificial Sequence: Synthetic oligonucleotide
gcauucuaacuugaaaaca

SEQ ID NO: 470958 - RNA, 19 nt, Artificial Sequence
  Description of Artificial Sequence: Synthetic oligonucleotide
ggucuaggcacucucugga

SEQ ID NO: 470959 - RNA, 19 nt, Artificial Sequence
  Description of Artificial Sequence: Synthetic oligonucleotide
ggcauaucgaagauuggga

SEQ ID NO: 470960 - RNA, 19 nt, Artificial Sequence
  Description of Artificial Sequence: Synthetic oligonucleotide
cucggcaaaguugggcagc

SEQ ID NO: 470961 - RNA, 19 nt, Artificial Sequence
  Description of Artificial Sequence: Synthetic oligonucleotide
ggaagacuuagggucaaac

SEQ ID NO: 470962 - RNA, 19 nt, Artificial Sequence
  Description of Artificial Sequence: Synthetic oligonucleotide
ucggcaaaguugggcagca

SEQ ID NO: 470963 - RNA, 19 nt, Artificial Sequence
  Description of Artificial Sequence: Synthetic oligonucleotide
cuugaaugcuugggagggc

SEQ ID NO: 470964 - RNA, 19 nt, Artificial Sequence
  Description of Artificial Sequence: Synthetic oligonucleotide
auacaacguagaguaucug

SEQ ID NO: 470965 - RNA, 19 nt, Artificial Sequence
  Description of Artificial Sequence: Synthetic oligonucleotide
ggugacuuuggacuuggaa

SEQ ID NO: 470966 - RNA, 19 nt, Artificial Sequence
  Description of Artificial Sequence: Synthetic oligonucleotide
gugugcggccgguagaaga

SEQ ID NO: 470967 - RNA, 19 nt, Artificial Sequence
  Description of Artificial Sequence: Synthetic oligonucleotide
uguguucuguugcccucuc

SEQ ID NO: 470968 - RNA, 19 nt, Artificial Sequence
  Description of Artificial Sequence: Synthetic oligonucleotide
ggccucaugcugaaguuag

SEQ ID NO: 470969 - RNA, 19 nt, Artificial Sequence
  Description of Artificial Sequence: Synthetic oligonucleotide
agaaaauaacugagaggau

SEQ ID NO: 470970 - RNA, 19 nt, Artificial Sequence
  Description of Artificial Sequence: Synthetic oligonucleotide
cagcguuuggaauggaaua

SEQ ID NO: 470971 - RNA, 19 nt, Artificial Sequence
  Description of Artificial Sequence: Synthetic oligonucleotide
accugacguaaguccagcu

SEQ ID NO: 470972 - RNA, 19 nt, Artificial Sequence
  Description of Artificial Sequence: Synthetic oligonucleotide
uucauggcccagccccaga

SEQ ID NO: 470973 - RNA, 19 nt, Artificial Sequence
  Description of Artificial Sequence: Synthetic oligonucleotide
uccuguaguucacgucguc

SEQ ID NO: 470974 - RNA, 19 nt, Artificial Sequence
  Description of Artificial Sequence: Synthetic oligonucleotide
cuguaggagcuguaaugca

SEQ ID NO: 470975 - RNA, 19 nt, Artificial Sequence
  Description of Artificial Sequence: Synthetic oligonucleotide
gaccguuggggaacgccag

SEQ ID NO: 470976 - RNA, 19 nt, Artificial Sequence
  Description of Artificial Sequence: Synthetic oligonucleotide
gggucaaaccaccugacgu

SEQ ID NO: 470977 - RNA, 19 nt, Artificial Sequence
  Description of Artificial Sequence: Synthetic oligonucleotide
aucgugugcggccgguaga

SEQ ID NO: 470978 - RNA, 19 nt, Artificial Sequence
  Description of Artificial Sequence: Synthetic oligonucleotide
gaaugccgguuccuucuuc

SEQ ID NO: 470979 - RNA, 19 nt, Artificial Sequence
  Description of Artificial Sequence: Synthetic oligonucleotide
agccaauacauuagggauu

SEQ ID NO: 470980 - RNA, 19 nt, Artificial Sequence
  Description of Artificial Sequence: Synthetic oligonucleotide
cagugguaaguccucaucu

SEQ ID NO: 470981 - RNA, 19 nt, Artificial Sequence
  Description of Artificial Sequence: Synthetic oligonucleotide
cacgcacgacgccauggcc

SEQ ID NO: 470982 - RNA, 19 nt, Artificial Sequence
  Description of Artificial Sequence: Synthetic oligonucleotide
agcuagcaggggugaacug

SEQ ID NO: 470983 - RNA, 19 nt, Artificial Sequence
  Description of Artificial Sequence: Synthetic oligonucleotide
auuagggauuuaaccugcu

SEQ ID NO: 470984 - RNA, 19 nt, Artificial Sequence
  Description of Artificial Sequence: Synthetic oligonucleotide
cagcacguuugaucuuccc

SEQ ID NO: 470985 - RNA, 19 nt, Artificial Sequence
  Description of Artificial Sequence: Synthetic oligonucleotide
acgagacacaugggcacag

SEQ ID NO: 470986 - RNA, 19 nt, Artificial Sequence
  Description of Artificial Sequence: Synthetic oligonucleotide
cuaugggagacaagacuua

SEQ ID NO: 470987 - RNA, 19 nt, Artificial Sequence
  Description of Artificial Sequence: Synthetic oligonucleotide
cagaaugaccuggucccac

SEQ ID NO: 470988 - RNA, 19 nt, Artificial Sequence
  Description of Artificial Sequence: Synthetic oligonucleotide
cagagcuaugggagacaag

SEQ ID NO: 470989 - RNA, 19 nt, Artificial Sequence
  Description of Artificial Sequence: Synthetic oligonucleotide
gaauggaauacaacagguu

SEQ ID NO: 470990 - RNA, 19 nt, Artificial Sequence
  Description of Artificial Sequence: Synthetic oligonucleotide
ccuguaguucacgucgucc

SEQ ID NO: 470991 - RNA, 19 nt, Artificial Sequence
  Description of Artificial Sequence: Synthetic oligonucleotide
acuuagggucaaaccaccu

SEQ ID NO: 470992 - RNA, 19 nt, Artificial Sequence
  Description of Artificial Sequence: Synthetic oligonucleotide
ccagugaacaauucauuaa

SEQ ID NO: 470993 - RNA, 19 nt, Artificial Sequence
  Description of Artificial Sequence: Synthetic oligonucleotide
gcgcuuacacugugugucg

SEQ ID NO: 470994 - RNA, 19 nt, Artificial Sequence
  Description of Artificial Sequence: Synthetic oligonucleotide
ucgugugcggccgguagaa

SEQ ID NO: 470995 - RNA, 19 nt, Artificial Sequence
  Description of Artificial Sequence: Synthetic oligonucleotide
acgcgcuuacacugugugu

SEQ ID NO: 470996 - RNA, 19 nt, Artificial Sequence
  Description of Artificial Sequence: Synthetic oligonucleotide
gucaaaccaccugacguaa

SEQ ID NO: 470997 - RNA, 19 nt, Artificial Sequence
  Description of Artificial Sequence: Synthetic oligonucleotide
aagucauggucagccuaau

SEQ ID NO: 470998 - RNA, 19 nt, Artificial Sequence
  Description of Artificial Sequence: Synthetic oligonucleotide
caucugucauguggcuagg

SEQ ID NO: 470999 - RNA, 19 nt, Artificial Sequence
  Description of Artificial Sequence: Synthetic oligonucleotide
ccacgagacacaugggcac

SEQ ID NO: 471000 - RNA, 19 nt, Artificial Sequence
  Description of Artificial Sequence: Synthetic oligonucleotide
acaucugaaugaagauagu

SEQ ID NO: 471001 - RNA, 19 nt, Artificial Sequence
  Description of Artificial Sequence: Synthetic oligonucleotide
accagcuuaagggguggcu

SEQ ID NO: 471002 - RNA, 19 nt, Artificial Sequence
  Description of Artificial Sequence: Synthetic oligonucleotide
ccaggagaucucuggagug

SEQ ID NO: 471003 - RNA, 19 nt, Artificial Sequence
  Description of Artificial Sequence: Synthetic oligonucleotide
cauggucagccuaauguau

SEQ ID NO: 471004 - RNA, 19 nt, Artificial Sequence
  Description of Artificial Sequence: Synthetic oligonucleotide
augcggaaaugcauccugu

SEQ ID NO: 471005 - RNA, 19 nt, Artificial Sequence
  Description of Artificial Sequence: Synthetic oligonucleotide
cuguaaugcagccgaugaa

SEQ ID NO: 471006 - RNA, 19 nt, Artificial Sequence
  Description of Artificial Sequence: Synthetic oligonucleotide
caacguagaguaucugggu

SEQ ID NO: 471007 - RNA, 19 nt, Artificial Sequence
  Description of Artificial Sequence: Synthetic oligonucleotide
aaacagcguuuggaaugga

SEQ ID NO: 471008 - RNA, 19 nt, Artificial Sequence
  Description of Artificial Sequence: Synthetic oligonucleotide
acaacagguuccagucuga

SEQ ID NO: 471009 - RNA, 19 nt, Artificial Sequence
  Description of Artificial Sequence: Synthetic oligonucleotide
acagcguccacgagacaca

SEQ ID NO: 471010 - RNA, 19 nt, Artificial Sequence
  Description of Artificial Sequence: Synthetic oligonucleotide
acguggugaaggccacaca

SEQ ID NO: 471011 - RNA, 19 nt, Artificial Sequence
  Description of Artificial Sequence: Synthetic oligonucleotide
cugccgcggagccggaggc

SEQ ID NO: 471012 - RNA, 19 nt, Artificial Sequence
  Description of Artificial Sequence: Synthetic oligonucleotide
ggugaaggccacacaaaga

SEQ ID NO: 471013 - RNA, 19 nt, Artificial Sequence
  Description of Artificial Sequence: Synthetic oligonucleotide
cuccaugauaucugcuucu

SEQ ID NO: 471014 - RNA, 19 nt, Artificial Sequence
  Description of Artificial Sequence: Synthetic oligonucleotide
gcauaucgaagauugggau

SEQ ID NO: 471015 - RNA, 19 nt, Artificial Sequence
  Description of Artificial Sequence: Synthetic oligonucleotide
ggaauacaacagguuccag

SEQ ID NO: 471016 - RNA, 19 nt, Artificial Sequence
  Description of Artificial Sequence: Synthetic oligonucleotide
acugugucccaacgcgcuu

SEQ ID NO: 471017 - RNA, 19 nt, Artificial Sequence
  Description of Artificial Sequence: Synthetic oligonucleotide
ccauaacuacggaucaaca

SEQ ID NO: 471018 - RNA, 19 nt, Artificial Sequence
  Description of Artificial Sequence: Synthetic oligonucleotide
ggugaucgugugcggccgg

SEQ ID NO: 471019 - RNA, 19 nt, Artificial Sequence
  Description of Artificial Sequence: Synthetic oligonucleotide
ccagcuuaagggguggcug

SEQ ID NO: 471020 - RNA, 19 nt, Artificial Sequence
  Description of Artificial Sequence: Synthetic oligonucleotide
augcccaaaugcaaauaua

SEQ ID NO: 471021 - RNA, 19 nt, Artificial Sequence
  Description of Artificial Sequence: Synthetic oligonucleotide
gcauccuguaguucacguc

SEQ ID NO: 471022 - RNA, 19 nt, Artificial Sequence
  Description of Artificial Sequence: Synthetic oligonucleotide
gucccaacgcgcuuacacu

SEQ ID NO: 471023 - RNA, 19 nt, Artificial Sequence
  Description of Artificial Sequence: Synthetic oligonucleotide
gggugaucgugugcggccg

SEQ ID NO: 471024 - RNA, 19 nt, Artificial Sequence
  Description of Artificial Sequence: Synthetic oligonucleotide
ccaggagcaaacagcuauc

SEQ ID NO: 471025 - RNA, 19 nt, Artificial Sequence
  Description of Artificial Sequence: Synthetic oligonucleotide
gcugcucguugaucaugcg

SEQ ID NO: 471026 - RNA, 19 nt, Artificial Sequence
  Description of Artificial Sequence: Synthetic oligonucleotide
gggaacgccagcacgcuga

SEQ ID NO: 471027 - RNA, 19 nt, Artificial Sequence
  Description of Artificial Sequence: Synthetic oligonucleotide
acggaucaacaaggccuuc

SEQ ID NO: 471028 - RNA, 19 nt, Artificial Sequence
  Description of Artificial Sequence: Synthetic oligonucleotide
cacguuugaucuucccugu

SEQ ID NO: 471029 - RNA, 19 nt, Artificial Sequence
  Description of Artificial Sequence: Synthetic oligonucleotide
cagcguccggcuccccacg

SEQ ID NO: 471030 - RNA, 19 nt, Artificial Sequence
  Description of Artificial Sequence: Synthetic oligonucleotide
ccaugccguacagacacag

SEQ ID NO: 471031 - RNA, 19 nt, Artificial Sequence
  Description of Artificial Sequence: Synthetic oligonucleotide
ggugaccauagugcucugc

SEQ ID NO: 471032 - RNA, 19 nt, Artificial Sequence
  Description of Artificial Sequence: Synthetic oligonucleotide
cauuggugacuuuggacuu

SEQ ID NO: 471033 - RNA, 19 nt, Artificial Sequence
  Description of Artificial Sequence: Synthetic oligonucleotide
cgcgcuuacacuguguguc

SEQ ID NO: 471034 - RNA, 19 nt, Artificial Sequence
  Description of Artificial Sequence: Synthetic oligonucleotide
ccaccugacguaaguccag

SEQ ID NO: 471035 - RNA, 19 nt, Artificial Sequence
  Description of Artificial Sequence: Synthetic oligonucleotide
gagaucucuggagugccau

SEQ ID NO: 471036 - RNA, 19 nt, Artificial Sequence
  Description of Artificial Sequence: Synthetic oligonucleotide
auggaccguuggggaacgc

SEQ ID NO: 471037 - RNA, 19 nt, Artificial Sequence
  Description of Artificial Sequence: Synthetic oligonucleotide
guccuacagcguccacgag

SEQ ID NO: 471038 - RNA, 19 nt, Artificial Sequence
  Description of Artificial Sequence: Synthetic oligonucleotide
acacagcacguuugaucuu

SEQ ID NO: 471039 - RNA, 19 nt, Artificial Sequence
  Description of Artificial Sequence: Synthetic oligonucleotide
caaaauggcugacgauccu

SEQ ID NO: 471040 - RNA, 19 nt, Artificial Sequence
  Description of Artificial Sequence: Synthetic oligonucleotide
uaucgaagauugggaucua

SEQ ID NO: 471041 - RNA, 19 nt, Artificial Sequence
  Description of Artificial Sequence: Synthetic oligonucleotide
cacgagacacaugggcaca

SEQ ID NO: 471042 - RNA, 19 nt, Artificial Sequence
  Description of Artificial Sequence: Synthetic oligonucleotide
agccccagaaaugcccaaa

SEQ ID NO: 471043 - RNA, 19 nt, Artificial Sequence
  Description of Artificial Sequence: Synthetic oligonucleotide
uccagcuagcaggggugaa

SEQ ID NO: 471044 - RNA, 19 nt, Artificial Sequence
  Description of Artificial Sequence: Synthetic oligonucleotide
ugcagccgaugaagagaau

SEQ ID NO: 471045 - RNA, 19 nt, Artificial Sequence
  Description of Artificial Sequence: Synthetic oligonucleotide
gugcggccgguagaagaag

SEQ ID NO: 471046 - RNA, 19 nt, Artificial Sequence
  Description of Artificial Sequence: Synthetic oligonucleotide
gguaagcauaguacugucu

SEQ ID NO: 471047 - RNA, 19 nt, Artificial Sequence
  Description of Artificial Sequence: Synthetic oligonucleotide
ggaucaacaaggccuucau

SEQ ID NO: 471048 - RNA, 19 nt, Artificial Sequence
  Description of Artificial Sequence: Synthetic oligonucleotide
agauugggaucuagccaau

SEQ ID NO: 471049 - RNA, 19 nt, Artificial Sequence
  Description of Artificial Sequence: Synthetic oligonucleotide
ccacgcacgacgccauggc

SEQ ID NO: 471050 - RNA, 19 nt, Artificial Sequence
  Description of Artificial Sequence: Synthetic oligonucleotide
ggcuagggacugaguaugc

SEQ ID NO: 471051 - RNA, 19 nt, Artificial Sequence
  Description of Artificial Sequence: Synthetic oligonucleotide
gugugucggugagguaagc

SEQ ID NO: 471052 - RNA, 19 nt, Artificial Sequence
  Description of Artificial Sequence: Synthetic oligonucleotide
cuuaagggguggcuggcuu

SEQ ID NO: 471053 - RNA, 19 nt, Artificial Sequence
  Description of Artificial Sequence: Synthetic oligonucleotide
cccaauuucagcaguggau

SEQ ID NO: 471054 - RNA, 19 nt, Artificial Sequence
  Description of Artificial Sequence: Synthetic oligonucleotide
gcuagcaggggugaacugu

SEQ ID NO: 471055 - RNA, 19 nt, Artificial Sequence
  Description of Artificial Sequence: Synthetic oligonucleotide
gccucaugcugaaguuagg

SEQ ID NO: 471056 - RNA, 19 nt, Artificial Sequence
  Description of Artificial Sequence: Synthetic oligonucleotide
ccaacgcgcuuacacugug

SEQ ID NO: 471057 - RNA, 19 nt, Artificial Sequence
  Description of Artificial Sequence: Synthetic oligonucleotide
ccagcuagcaggggugaac

SEQ ID NO: 471058 - RNA, 19 nt, Artificial Sequence
  Description of Artificial Sequence: Synthetic oligonucleotide
aggaagacuuagggucaaa

SEQ ID NO: 471059 - RNA, 19 nt, Artificial Sequence
  Description of Artificial Sequence: Synthetic oligonucleotide
ccugacguaaguccagcua

SEQ ID NO: 471060 - RNA, 19 nt, Artificial Sequence
  Description of Artificial Sequence: Synthetic oligonucleotide
cccacgcacgacgccaugg

SEQ ID NO: 471061 - RNA, 19 nt, Artificial Sequence
  Description of Artificial Sequence: Synthetic oligonucleotide
auucgccacaaggcuggau

SEQ ID NO: 471062 - RNA, 19 nt, Artificial Sequence
  Description of Artificial Sequence: Synthetic oligonucleotide
cauggcccuucuccccguc

SEQ ID NO: 471063 - RNA, 19 nt, Artificial Sequence
  Description of Artificial Sequence: Synthetic oligonucleotide
gggauuuaaccugcucgaa

SEQ ID NO: 471064 - RNA, 19 nt, Artificial Sequence
  Description of Artificial Sequence: Synthetic oligonucleotide
ccccaauuucagcagugga

SEQ ID NO: 471065 - RNA, 19 nt, Artificial Sequence
  Description of Artificial Sequence: Synthetic oligonucleotide
gcuggcaaccaggagcaaa

SEQ ID NO: 471066 - RNA, 19 nt, Artificial Sequence
  Description of Artificial Sequence: Synthetic oligonucleotide
gccgaugaagagaauucua

SEQ ID NO: 471067 - RNA, 19 nt, Artificial Sequence
  Description of Artificial Sequence: Synthetic oligonucleotide
cuuggaaugccgguuccuu

SEQ ID NO: 471068 - RNA, 19 nt, Artificial Sequence
  Description of Artificial Sequence: Synthetic oligonucleotide
cugugucccaacgcgcuua

SEQ ID NO: 471069 - RNA, 19 nt, Artificial Sequence
  Description of Artificial Sequence: Synthetic oligonucleotide
ggccgguagaagaagucua

SEQ ID NO: 471070 - RNA, 19 nt, Artificial Sequence
  Description of Artificial Sequence: Synthetic oligonucleotide
gcuuacacugugugucggu

SEQ ID NO: 471071 - RNA, 19 nt, Artificial Sequence
  Description of Artificial Sequence: Synthetic oligonucleotide
agcguccacgagacacaug

SEQ ID NO: 471072 - RNA, 19 nt, Artificial Sequence
  Description of Artificial Sequence: Synthetic oligonucleotide
ggcuccccacgcacgacgc

SEQ ID NO: 471073 - RNA, 19 nt, Artificial Sequence
  Description of Artificial Sequence: Synthetic oligonucleotide
gcucagucaacugccagau

SEQ ID NO: 471074 - RNA, 19 nt, Artificial Sequence
  Description of Artificial Sequence: Synthetic oligonucleotide
cguccacgagacacauggg

SEQ ID NO: 471075 - RNA, 19 nt, Artificial Sequence
  Description of Artificial Sequence: Synthetic oligonucleotide
accaugccguacagacaca

SEQ ID NO: 471076 - RNA, 19 nt, Artificial Sequence
  Description of Artificial Sequence: Synthetic oligonucleotide
caacgcgcuuacacugugu

SEQ ID NO: 471077 - RNA, 19 nt, Artificial Sequence
  Description of Artificial Sequence: Synthetic oligonucleotide
cccggugaccauagugcuc

SEQ ID NO: 471078 - RNA, 19 nt, Artificial Sequence
  Description of Artificial Sequence: Synthetic oligonucleotide
cggcuccccacgcacgacg

SEQ ID NO: 471079 - RNA, 19 nt, Artificial Sequence
  Description of Artificial Sequence: Synthetic oligonucleotide
cagugcaaacagccagccu

SEQ ID NO: 471080 - RNA, 19 nt, Artificial Sequence
  Description of Artificial Sequence: Synthetic oligonucleotide
gcuccccacgcacgacgcc

SEQ ID NO: 471081 - RNA, 19 nt, Artificial Sequence
  Description of Artificial Sequence: Synthetic oligonucleotide
ggucugguaaauggaccgu

SEQ ID NO: 471082 - RNA, 19 nt, Artificial Sequence
  Description of Artificial Sequence: Synthetic oligonucleotide
gcggccgguagaagaaguc

SEQ ID NO: 471083 - RNA, 19 nt, Artificial Sequence
  Description of Artificial Sequence: Synthetic oligonucleotide
ggcugacgauccucuccca

SEQ ID NO: 471084 - RNA, 19 nt, Artificial Sequence
  Description of Artificial Sequence: Synthetic oligonucleotide
ccaaaccaugccguacaga

SEQ ID NO: 471085 - RNA, 19 nt, Artificial Sequence
  Description of Artificial Sequence: Synthetic oligonucleotide
gcuagggacugaguaugcu

SEQ ID NO: 471086 - RNA, 19 nt, Artificial Sequence
  Description of Artificial Sequence: Synthetic oligonucleotide
cguccggcuccccacgcac

SEQ ID NO: 471087 - RNA, 19 nt, Artificial Sequence
  Description of Artificial Sequence: Synthetic oligonucleotide
cggaucaacaaggccuuca

SEQ ID NO: 471088 - RNA, 19 nt, Artificial Sequence
  Description of Artificial Sequence: Synthetic oligonucleotide
gggaucuagccaauacauu

SEQ ID NO: 471089 - RNA, 19 nt, Artificial Sequence
  Description of Artificial Sequence: Synthetic oligonucleotide
gugaucgugugcggccggu

SEQ ID NO: 471090 - RNA, 19 nt, Artificial Sequence
  Description of Artificial Sequence: Synthetic oligonucleotide
gagcuguaaugcagccgau

SEQ ID NO: 471091 - RNA, 19 nt, Artificial Sequence
  Description of Artificial Sequence: Synthetic oligonucleotide
ccagaaugaccugguccca

SEQ ID NO: 471092 - RNA, 19 nt, Artificial Sequence
  Description of Artificial Sequence: Synthetic oligonucleotide
gugucccaacgcgcuuaca

SEQ ID NO: 471093 - RNA, 19 nt, Artificial Sequence
  Description of Artificial Sequence: Synthetic oligonucleotide
ggaaugccgguuccuucuu

SEQ ID NO: 471094 - RNA, 19 nt, Artificial Sequence
  Description of Artificial Sequence: Synthetic oligonucleotide
gcuuaagggguggcuggcu

SEQ ID NO: 471095 - RNA, 19 nt, Artificial Sequence
  Description of Artificial Sequence: Synthetic oligonucleotide
ggaacgccagcacgcugau

SEQ ID NO: 471096 - RNA, 19 nt, Artificial Sequence
  Description of Artificial Sequence: Synthetic oligonucleotide
cguuguugcuugaaugcuu

SEQ ID NO: 471097 - RNA, 19 nt, Artificial Sequence
  Description of Artificial Sequence: Synthetic oligonucleotide
gcguccggcuccccacgca

SEQ ID NO: 471098 - RNA, 19 nt, Artificial Sequence
  Description of Artificial Sequence: Synthetic oligonucleotide
cccaacgcgcuuacacugu

SEQ ID NO: 471099 - RNA, 19 nt, Artificial Sequence
  Description of Artificial Sequence: Synthetic oligonucleotide
ggucagccuaauguauguu

SEQ ID NO: 471100 - RNA, 19 nt, Artificial Sequence
  Description of Artificial Sequence: Synthetic oligonucleotide
cagcguccacgagacacau

SEQ ID NO: 471101 - RNA, 19 nt, Artificial Sequence
  Description of Artificial Sequence: Synthetic oligonucleotide
cgcacgacgccauggcccu

SEQ ID NO: 471102 - RNA, 19 nt, Artificial Sequence
  Description of Artificial Sequence: Synthetic oligonucleotide
ccccacgcacgacgccaug

SEQ ID NO: 471103 - RNA, 19 nt, Artificial Sequence
  Description of Artificial Sequence: Synthetic oligonucleotide
cgcggagccggaggccccg

SEQ ID NO: 471104 - RNA, 19 nt, Artificial Sequence
  Description of Artificial Sequence: Synthetic oligonucleotide
ccgcgaaggcugggacccc

SEQ ID NO: 471105 - RNA, 19 nt, Artificial Sequence
  Description of Artificial Sequence: Synthetic oligonucleotide
cggccgguagaagaagucu

SEQ ID NO: 471106 - RNA, 19 nt, Artificial Sequence
  Description of Artificial Sequence: Synthetic oligonucleotide
ccggcuccccacgcacgac

SEQ ID NO: 471107 - RNA, 19 nt, Artificial Sequence
  Description of Artificial Sequence: Synthetic oligonucleotide
ccauggcccuucuccccgu

SEQ ID NO: 471108 - RNA, 19 nt, Artificial Sequence
  Description of Artificial Sequence: Synthetic oligonucleotide
gaaucauagacacucaugc

SEQ ID NO: 471109 - RNA, 19 nt, Artificial Sequence
  Description of Artificial Sequence: Synthetic oligonucleotide
aaacuuuagaaagagguuc

SEQ ID NO: 471110 - RNA, 19 nt, Artificial Sequence
  Description of Artificial Sequence: Synthetic oligonucleotide
aaauuauagaggaagcagg

SEQ ID NO: 471111 - RNA, 19 nt, Artificial Sequence
  Description of Artificial Sequence: Synthetic oligonucleotide
aaucauagacacucaugcc

SEQ ID NO: 471112 - RNA, 19 nt, Artificial Sequence
  Description of Artificial Sequence: Synthetic oligonucleotide
uuuagaaagagguucugag

SEQ ID NO: 471113 - RNA, 19 nt, Artificial Sequence
  Description of Artificial Sequence: Synthetic oligonucleotide
uagaaagagguucugagug

SEQ ID NO: 471114 - RNA, 19 nt, Artificial Sequence
  Description of Artificial Sequence: Synthetic oligonucleotide
uggaccaugucaaagcgcg

SEQ ID NO: 471115 - RNA, 19 nt, Artificial Sequence
  Description of Artificial Sequence: Synthetic oligonucleotide
auuugagggaaccucuugc

SEQ ID NO: 471116 - RNA, 19 nt, Artificial Sequence
  Description of Artificial Sequence: Synthetic oligonucleotide
uuauagaggaagcagggga

SEQ ID NO: 471117 - RNA, 19 nt, Artificial Sequence
  Description of Artificial Sequence: Synthetic oligonucleotide
aacucgucagccugggugc

SEQ ID NO: 471118 - RNA, 19 nt, Artificial Sequence
  Description of Artificial Sequence: Synthetic oligonucleotide
aacuguuggcgguugguac

SEQ ID NO: 471119 - RNA, 19 nt, Artificial Sequence
  Description of Artificial Sequence: Synthetic oligonucleotide
uacgaaucaccucagcugc

SEQ ID NO: 471120 - RNA, 19 nt, Artificial Sequence
  Description of Artificial Sequence: Synthetic oligonucleotide
uucuugguaaagaggagag

SEQ ID NO: 471121 - RNA, 19 nt, Artificial Sequence
  Description of Artificial Sequence: Synthetic oligonucleotide
cugauugagaccccgaacc

SEQ ID NO: 471122 - RNA, 19 nt, Artificial Sequence
  Description of Artificial Sequence: Synthetic oligonucleotide
uuccguacaaaauugugca

SEQ ID NO: 471123 - RNA, 19 nt, Artificial Sequence
  Description of Artificial Sequence: Synthetic oligonucleotide
aauccuugacaugaacccc

SEQ ID NO: 471124 - RNA, 19 nt, Artificial Sequence
  Description of Artificial Sequence: Synthetic oligonucleotide
ugccaaaagagccuguccc

SEQ ID NO: 471125 - RNA, 19 nt, Artificial Sequence
  Description of Artificial Sequence: Synthetic oligonucleotide
accguaggcauagacaucc

SEQ ID NO: 471126 - RNA, 19 nt, Artificial Sequence
  Description of Artificial Sequence: Synthetic oligonucleotide
uagacauccgacuggaagc

SEQ ID NO: 471127 - RNA, 19 nt, Artificial Sequence
  Description of Artificial Sequence: Synthetic oligonucleotide
acuuugacagccaacugcc

SEQ ID NO: 471128 - RNA, 19 nt, Artificial Sequence
  Description of Artificial Sequence: Synthetic oligonucleotide
aguaucaaggcagaggcag

SEQ ID NO: 471129 - RNA, 19 nt, Artificial Sequence
  Description of Artificial Sequence: Synthetic oligonucleotide
cagucauaagcucauaaag

SEQ ID NO: 471130 - RNA, 19 nt, Artificial Sequence
  Description of Artificial Sequence: Synthetic oligonucleotide
auacgaaucaccucagcug

SEQ ID NO: 471131 - RNA, 19 nt, Artificial Sequence
  Description of Artificial Sequence: Synthetic oligonucleotide
uggcacaucuucuaggacc

SEQ ID NO: 471132 - RNA, 19 nt, Artificial Sequence
  Description of Artificial Sequence: Synthetic oligonucleotide
gagacagauagccacggcc

SEQ ID NO: 471133 - RNA, 19 nt, Artificial Sequence
  Description of Artificial Sequence: Synthetic oligonucleotide
guagauguagagcggaugc

SEQ ID NO: 471134 - RNA, 19 nt, Artificial Sequence
  Description of Artificial Sequence: Synthetic oligonucleotide
guuaggaguagauguagag

SEQ ID NO: 471135 - RNA, 19 nt, Artificial Sequence
  Description of Artificial Sequence: Synthetic oligonucleotide
agaguccuugaauaguggg

SEQ ID NO: 471136 - RNA, 19 nt, Artificial Sequence
  Description of Artificial Sequence: Synthetic oligonucleotide
ggaggaacaaugcuggugg

SEQ ID NO: 471137 - RNA, 19 nt, Artificial Sequence
  Description of Artificial Sequence: Synthetic oligonucleotide
agaaagagguucugagugg

SEQ ID NO: 471138 - RNA, 19 nt, Artificial Sequence
  Description of Artificial Sequence: Synthetic oligonucleotide
agaccccgaaccuugaggg

SEQ ID NO: 471139 - RNA, 19 nt, Artificial Sequence
  Description of Artificial Sequence: Synthetic oligonucleotide
ugucaacgcagacuguggg

SEQ ID NO: 471140 - RNA, 19 nt, Artificial Sequence
  Description of Artificial Sequence: Synthetic oligonucleotide
cacgcagcaauccugauug

SEQ ID NO: 471141 - RNA, 19 nt, Artificial Sequence
  Description of Artificial Sequence: Synthetic oligonucleotide
uuagaaagagguucugagu

SEQ ID NO: 471142 - RNA, 19 nt, Artificial Sequence
  Description of Artificial Sequence: Synthetic oligonucleotide
uccgacuggaagcuguagg

SEQ ID NO: 471143 - RNA, 19 nt, Artificial Sequence
  Description of Artificial Sequence: Synthetic oligonucleotide
aaucuuggggagugaccgc

SEQ ID NO: 471144 - RNA, 19 nt, Artificial Sequence
  Description of Artificial Sequence: Synthetic oligonucleotide
aagaaugucuuccguacaa

SEQ ID NO: 471145 - RNA, 19 nt, Artificial Sequence
  Description of Artificial Sequence: Synthetic oligonucleotide
agauguagagcggaugcgc

SEQ ID NO: 471146 - RNA, 19 nt, Artificial Sequence
  Description of Artificial Sequence: Synthetic oligonucleotide
gagguccggagacagauag

SEQ ID NO: 471147 - RNA, 19 nt, Artificial Sequence
  Description of Artificial Sequence: Synthetic oligonucleotide
agacagauagccacggccc

SEQ ID NO: 471148 - RNA, 19 nt, Artificial Sequence
  Description of Artificial Sequence: Synthetic oligonucleotide
ucuccaaguuagaaguacc

SEQ ID NO: 471149 - RNA, 19 nt, Artificial Sequence
  Description of Artificial Sequence: Synthetic oligonucleotide
ugcguugcuuguuaggcag

SEQ ID NO: 471150 - RNA, 19 nt, Artificial Sequence
  Description of Artificial Sequence: Synthetic oligonucleotide
ucgaucguggccaggaucu

SEQ ID NO: 471151 - RNA, 19 nt, Artificial Sequence
  Description of Artificial Sequence: Synthetic oligonucleotide
gaguacuugcaucucauuc

SEQ ID NO: 471152 - RNA, 19 nt, Artificial Sequence
  Description of Artificial Sequence: Synthetic oligonucleotide
ugucgugucuuccugagua

SEQ ID NO: 471153 - RNA, 19 nt, Artificial Sequence
  Description of Artificial Sequence: Synthetic oligonucleotide
gaugagucuguagaccacg

SEQ ID NO: 471154 - RNA, 19 nt, Artificial Sequence
  Description of Artificial Sequence: Synthetic oligonucleotide
ggauagggaauccugaggc

SEQ ID NO: 471155 - RNA, 19 nt, Artificial Sequence
  Description of Artificial Sequence: Synthetic oligonucleotide
ugugcguugcuuguuaggc

SEQ ID NO: 471156 - RNA, 19 nt, Artificial Sequence
  Description of Artificial Sequence: Synthetic oligonucleotide
ucugccaaggacuuccgcu

SEQ ID NO: 471157 - RNA, 19 nt, Artificial Sequence
  Description of Artificial Sequence: Synthetic oligonucleotide
agcaauccugauugagacc

SEQ ID NO: 471158 - RNA, 19 nt, Artificial Sequence
  Description of Artificial Sequence: Synthetic oligonucleotide
agcucauaaagcacaacac

SEQ ID NO: 471159 - RNA, 19 nt, Artificial Sequence
  Description of Artificial Sequence: Synthetic oligonucleotide
auggccuuggggcaauuac

SEQ ID NO: 471160 - RNA, 19 nt, Artificial Sequence
  Description of Artificial Sequence: Synthetic oligonucleotide
acaccguaggcauagacau

SEQ ID NO: 471161 - RNA, 19 nt, Artificial Sequence
  Description of Artificial Sequence: Synthetic oligonucleotide
uccggagacagauagccac

SEQ ID NO: 471162 - RNA, 19 nt, Artificial Sequence
  Description of Artificial Sequence: Synthetic oligonucleotide
acuccgcucaaucuugggg

SEQ ID NO: 471163 - RNA, 19 nt, Artificial Sequence
  Description of Artificial Sequence: Synthetic oligonucleotide
uugacaugaaccccaccca

SEQ ID NO: 471164 - RNA, 19 nt, Artificial Sequence
  Description of Artificial Sequence: Synthetic oligonucleotide
acaugaaccccacccauug

SEQ ID NO: 471165 - RNA, 19 nt, Artificial Sequence
  Description of Artificial Sequence: Synthetic oligonucleotide
agcuguaccucacugggug

SEQ ID NO: 471166 - RNA, 19 nt, Artificial Sequence
  Description of Artificial Sequence: Synthetic oligonucleotide
aauccugauugagaccccg

SEQ ID NO: 471167 - RNA, 19 nt, Artificial Sequence
  Description of Artificial Sequence: Synthetic oligonucleotide
uguuggacuugagaucucg

SEQ ID NO: 471168 - RNA, 19 nt, Artificial Sequence
  Description of Artificial Sequence: Synthetic oligonucleotide
uugguacucaugucaacgc

SEQ ID NO: 471169 - RNA, 19 nt, Artificial Sequence
  Description of Artificial Sequence: Synthetic oligonucleotide
gcaaaauguugacaugucg

SEQ ID NO: 471170 - RNA, 19 nt, Artificial Sequence
  Description of Artificial Sequence: Synthetic oligonucleotide
aaaacuuuagaaagagguu

SEQ ID NO: 471171 - RNA, 19 nt, Artificial Sequence
  Description of Artificial Sequence: Synthetic oligonucleotide
cagcaauccugauugagac

SEQ ID NO: 471172 - RNA, 19 nt, Artificial Sequence
  Description of Artificial Sequence: Synthetic oligonucleotide
guaaagaggagaguccuug

SEQ ID NO: 471173 - RNA, 19 nt, Artificial Sequence
  Description of Artificial Sequence: Synthetic oligonucleotide
uucggaggcacuccgcuca

SEQ ID NO: 471174 - RNA, 19 nt, Artificial Sequence
  Description of Artificial Sequence: Synthetic oligonucleotide
agggagauuugagggaacc

SEQ ID NO: 471175 - RNA, 19 nt, Artificial Sequence
  Description of Artificial Sequence: Synthetic oligonucleotide
uugugugaugauagcaaac

SEQ ID NO: 471176 - RNA, 19 nt, Artificial Sequence
  Description of Artificial Sequence: Synthetic oligonucleotide
aacaccguaggcauagaca

SEQ ID NO: 471177 - RNA, 19 nt, Artificial Sequence
  Description of Artificial Sequence: Synthetic oligonucleotide
caacucgucagccugggug

SEQ ID NO: 471178 - RNA, 19 nt, Artificial Sequence
  Description of Artificial Sequence: Synthetic oligonucleotide
auugugugaugauagcaaa

SEQ ID NO: 471179 - RNA, 19 nt, Artificial Sequence
  Description of Artificial Sequence: Synthetic oligonucleotide
gaacuugaggcagucagac

SEQ ID NO: 471180 - RNA, 19 nt, Artificial Sequence
  Description of Artificial Sequence: Synthetic oligonucleotide
aguagcucgaucguggcca

SEQ ID NO: 471181 - RNA, 19 nt, Artificial Sequence
  Description of Artificial Sequence: Synthetic oligonucleotide
gugguagaacuguuggcgg

SEQ ID NO: 471182 - RNA, 19 nt, Artificial Sequence
  Description of Artificial Sequence: Synthetic oligonucleotide
uccccgaggacacacuagc

SEQ ID NO: 471183 - RNA, 19 nt, Artificial Sequence
  Description of Artificial Sequence: Synthetic oligonucleotide
cugcauacgaaucaccuca

SEQ ID NO: 471184 - RNA, 19 nt, Artificial Sequence
  Description of Artificial Sequence: Synthetic oligonucleotide
ugguacucaugucaacgca

SEQ ID NO: 471185 - RNA, 19 nt, Artificial Sequence
  Description of Artificial Sequence: Synthetic oligonucleotide
ucaacgcagacugugggga

SEQ ID NO: 471186 - RNA, 19 nt, Artificial Sequence
  Description of Artificial Sequence: Synthetic oligonucleotide
uggcgguugguacucaugu

SEQ ID NO: 471187 - RNA, 19 nt, Artificial Sequence
  Description of Artificial Sequence: Synthetic oligonucleotide
aaccccacccauuggagau

SEQ ID NO: 471188 - RNA, 19 nt, Artificial Sequence
  Description of Artificial Sequence: Synthetic oligonucleotide
aaccaugacuggcugguaa

SEQ ID NO: 471189 - RNA, 19 nt, Artificial Sequence
  Description of Artificial Sequence: Synthetic oligonucleotide
auaaagcacaacaccguag

SEQ ID NO: 471190 - RNA, 19 nt, Artificial Sequence
  Description of Artificial Sequence: Synthetic oligonucleotide
agccaacugcccgagaugg

SEQ ID NO: 471191 - RNA, 19 nt, Artificial Sequence
  Description of Artificial Sequence: Synthetic oligonucleotide
ugcauacgaaucaccucag

SEQ ID NO: 471192 - RNA, 19 nt, Artificial Sequence
  Description of Artificial Sequence: Synthetic oligonucleotide
uguagagcggaugcgcugc

SEQ ID NO: 471193 - RNA, 19 nt, Artificial Sequence
  Description of Artificial Sequence: Synthetic oligonucleotide
gucacggcugccaaugugg

SEQ ID NO: 471194 - RNA, 19 nt, Artificial Sequence
  Description of Artificial Sequence: Synthetic oligonucleotide
agcaggggaucucaguuug

SEQ ID NO: 471195 - RNA, 19 nt, Artificial Sequence
  Description of Artificial Sequence: Synthetic oligonucleotide
accccgaaccuugagggcc

SEQ ID NO: 471196 - RNA, 19 nt, Artificial Sequence
  Description of Artificial Sequence: Synthetic oligonucleotide
aagagccugucccaauccu

SEQ ID NO: 471197 - RNA, 19 nt, Artificial Sequence
  Description of Artificial Sequence: Synthetic oligonucleotide
uuggggcaauuacugaaga

SEQ ID NO: 471198 - RNA, 19 nt, Artificial Sequence
  Description of Artificial Sequence: Synthetic oligonucleotide
uagaccacgcagcaauccu

SEQ ID NO: 471199 - RNA, 19 nt, Artificial Sequence
  Description of Artificial Sequence: Synthetic oligonucleotide
ugucccaauccucuucaac

SEQ ID NO: 471200 - RNA, 19 nt, Artificial Sequence
  Description of Artificial Sequence: Synthetic oligonucleotide
gacaugucgugucuuccug

SEQ ID NO: 471201 - RNA, 19 nt, Artificial Sequence
  Description of Artificial Sequence: Synthetic oligonucleotide
cauugugugaugauagcaa

SEQ ID NO: 471202 - RNA, 19 nt, Artificial Sequence
  Description of Artificial Sequence: Synthetic oligonucleotide
uagaacuguuggcgguugg

SEQ ID NO: 471203 - RNA, 19 nt, Artificial Sequence
  Description of Artificial Sequence: Synthetic oligonucleotide
uggaggaacaaugcuggug

SEQ ID NO: 471204 - RNA, 19 nt, Artificial Sequence
  Description of Artificial Sequence: Synthetic oligonucleotide
ugacaugaaccccacccau

SEQ ID NO: 471205 - RNA, 19 nt, Artificial Sequence
  Description of Artificial Sequence: Synthetic oligonucleotide
uccaugggcgcuguggugc

SEQ ID NO: 471206 - RNA, 19 nt, Artificial Sequence
  Description of Artificial Sequence: Synthetic oligonucleotide
caugucgugucuuccugag

SEQ ID NO: 471207 - RNA, 19 nt, Artificial Sequence
  Description of Artificial Sequence: Synthetic oligonucleotide
uggacguuaggaguagaug

SEQ ID NO: 471208 - RNA, 19 nt, Artificial Sequence
  Description of Artificial Sequence: Synthetic oligonucleotide
aacccucacaccauugugu

SEQ ID NO: 471209 - RNA, 19 nt, Artificial Sequence
  Description of Artificial Sequence: Synthetic oligonucleotide
agcaguagguugcgccacc

SEQ ID NO: 471210 - RNA, 19 nt, Artificial Sequence
  Description of Artificial Sequence: Synthetic oligonucleotide
guaggcauagacauccgac

SEQ ID NO: 471211 - RNA, 19 nt, Artificial Sequence
  Description of Artificial Sequence: Synthetic oligonucleotide
aguagauguagagcggaug

SEQ ID NO: 471212 - RNA, 19 nt, Artificial Sequence
  Description of Artificial Sequence: Synthetic oligonucleotide
auugagaccccgaaccuug

SEQ ID NO: 471213 - RNA, 19 nt, Artificial Sequence
  Description of Artificial Sequence: Synthetic oligonucleotide
cacggcacgcugaaauugg

SEQ ID NO: 471214 - RNA, 19 nt, Artificial Sequence
  Description of Artificial Sequence: Synthetic oligonucleotide
gaguccaugggcgcugugg

SEQ ID NO: 471215 - RNA, 19 nt, Artificial Sequence
  Description of Artificial Sequence: Synthetic oligonucleotide
cugggagcgggccuaaggc

SEQ ID NO: 471216 - RNA, 19 nt, Artificial Sequence
  Description of Artificial Sequence: Synthetic oligonucleotide
auaggggccgcuccucccg

SEQ ID NO: 471217 - RNA, 19 nt, Artificial Sequence
  Description of Artificial Sequence: Synthetic oligonucleotide
gaagaaugucuuccguaca

SEQ ID NO: 471218 - RNA, 19 nt, Artificial Sequence
  Description of Artificial Sequence: Synthetic oligonucleotide
ugacaugucgugucuuccu

SEQ ID NO: 471219 - RNA, 19 nt, Artificial Sequence
  Description of Artificial Sequence: Synthetic oligonucleotide
cuugaggcagucagacagc

SEQ ID NO: 471220 - RNA, 19 nt, Artificial Sequence
  Description of Artificial Sequence: Synthetic oligonucleotide
gcagcaucggugcugaagc

SEQ ID NO: 471221 - RNA, 19 nt, Artificial Sequence
  Description of Artificial Sequence: Synthetic oligonucleotide
caaagcgcgugucagccac

SEQ ID NO: 471222 - RNA, 19 nt, Artificial Sequence
  Description of Artificial Sequence: Synthetic oligonucleotide
agcucauucacagggagau

SEQ ID NO: 471223 - RNA, 19 nt, Artificial Sequence
  Description of Artificial Sequence: Synthetic oligonucleotide
caguggcacaucuucuagg

SEQ ID NO: 471224 - RNA, 19 nt, Artificial Sequence
  Description of Artificial Sequence: Synthetic oligonucleotide
gauagggaauccugaggca

SEQ ID NO: 471225 - RNA, 19 nt, Artificial Sequence
  Description of Artificial Sequence: Synthetic oligonucleotide
uggcacggcacgcugaaau

SEQ ID NO: 471226 - RNA, 19 nt, Artificial Sequence
  Description of Artificial Sequence: Synthetic oligonucleotide
uccugauugagaccccgaa

SEQ ID NO: 471227 - RNA, 19 nt, Artificial Sequence
  Description of Artificial Sequence: Synthetic oligonucleotide
aaauccauauggggugcug

SEQ ID NO: 471228 - RNA, 19 nt, Artificial Sequence
  Description of Artificial Sequence: Synthetic oligonucleotide
acggcugccaauguggcug

SEQ ID NO: 471229 - RNA, 19 nt, Artificial Sequence
  Description of Artificial Sequence: Synthetic oligonucleotide
ugcugaagcucugagcagu

SEQ ID NO: 471230 - RNA, 19 nt, Artificial Sequence
  Description of Artificial Sequence: Synthetic oligonucleotide
uagguugcgccaccuugag

SEQ ID NO: 471231 - RNA, 19 nt, Artificial Sequence
  Description of Artificial Sequence: Synthetic oligonucleotide
acguuaggaguagauguag

SEQ ID NO: 471232 - RNA, 19 nt, Artificial Sequence
  Description of Artificial Sequence: Synthetic oligonucleotide
gggauagggaauccugagg

SEQ ID NO: 471233 - RNA, 19 nt, Artificial Sequence
  Description of Artificial Sequence: Synthetic oligonucleotide
ugguagaacuguuggcggu

SEQ ID NO: 471234 - RNA, 19 nt, Artificial Sequence
  Description of Artificial Sequence: Synthetic oligonucleotide
gacacacuagcugggcuag

SEQ ID NO: 471235 - RNA, 19 nt, Artificial Sequence
  Description of Artificial Sequence: Synthetic oligonucleotide
gugguagagacuggaaccc

SEQ ID NO: 471236 - RNA, 19 nt, Artificial Sequence
  Description of Artificial Sequence: Synthetic oligonucleotide
auuggagaugaaacagcuc

SEQ ID NO: 471237 - RNA, 19 nt, Artificial Sequence
  Description of Artificial Sequence: Synthetic oligonucleotide
cuggaccaugucaaagcgc

SEQ ID NO: 471238 - RNA, 19 nt, Artificial Sequence
  Description of Artificial Sequence: Synthetic oligonucleotide
guaaggaggggugccuugg

SEQ ID NO: 471239 - RNA, 19 nt, Artificial Sequence
  Description of Artificial Sequence: Synthetic oligonucleotide
acaaugagcucuucaccau

SEQ ID NO: 471240 - RNA, 19 nt, Artificial Sequence
  Description of Artificial Sequence: Synthetic oligonucleotide
gguccggagacagauagcc

SEQ ID NO: 471241 - RNA, 19 nt, Artificial Sequence
  Description of Artificial Sequence: Synthetic oligonucleotide
cugugcguugcuuguuagg

SEQ ID NO: 471242 - RNA, 19 nt, Artificial Sequence
  Description of Artificial Sequence: Synthetic oligonucleotide
agcaucggugcugaagcuc

SEQ ID NO: 471243 - RNA, 19 nt, Artificial Sequence
  Description of Artificial Sequence: Synthetic oligonucleotide
ugcggugcaaggaggguuc

SEQ ID NO: 471244 - RNA, 19 nt, Artificial Sequence
  Description of Artificial Sequence: Synthetic oligonucleotide
aagcaggggaucucaguuu

SEQ ID NO: 471245 - RNA, 19 nt, Artificial Sequence
  Description of Artificial Sequence: Synthetic oligonucleotide
cuuugacagccaacugccc

SEQ ID NO: 471246 - RNA, 19 nt, Artificial Sequence
  Description of Artificial Sequence: Synthetic oligonucleotide
cauacgaaucaccucagcu

SEQ ID NO: 471247 - RNA, 19 nt, Artificial Sequence
  Description of Artificial Sequence: Synthetic oligonucleotide
gguacucaugucaacgcag

SEQ ID NO: 471248 - RNA, 19 nt, Artificial Sequence
  Description of Artificial Sequence: Synthetic oligonucleotide
caugaaccccacccauugg

SEQ ID NO: 471249 - RNA, 19 nt, Artificial Sequence
  Description of Artificial Sequence: Synthetic oligonucleotide
accaugucaaagcgcgugu

SEQ ID NO: 471250 - RNA, 19 nt, Artificial Sequence
  Description of Artificial Sequence: Synthetic oligonucleotide
cacacuagcugggcuaggg

SEQ ID NO: 471251 - RNA, 19 nt, Artificial Sequence
  Description of Artificial Sequence: Synthetic oligonucleotide
agguugcgccaccuugagc

SEQ ID NO: 471252 - RNA, 19 nt, Artificial Sequence
  Description of Artificial Sequence: Synthetic oligonucleotide
cugccaaggacuuccgcuc

SEQ ID NO: 471253 - RNA, 19 nt, Artificial Sequence
  Description of Artificial Sequence: Synthetic oligonucleotide
ggacguuaggaguagaugu

SEQ ID NO: 471254 - RNA, 19 nt, Artificial Sequence
  Description of Artificial Sequence: Synthetic oligonucleotide
gagcggaugcgcugcagug

SEQ ID NO: 471255 - RNA, 19 nt, Artificial Sequence
  Description of Artificial Sequence: Synthetic oligonucleotide
acaugucgugucuuccuga

SEQ ID NO: 471256 - RNA, 19 nt, Artificial Sequence
  Description of Artificial Sequence: Synthetic oligonucleotide
augucaacgcagacugugg

SEQ ID NO: 471257 - RNA, 19 nt, Artificial Sequence
  Description of Artificial Sequence: Synthetic oligonucleotide
ucuugguaaagaggagagu

SEQ ID NO: 471258 - RNA, 19 nt, Artificial Sequence
  Description of Artificial Sequence: Synthetic oligonucleotide
acagauagccacggcccac

SEQ ID NO: 471259 - RNA, 19 nt, Artificial Sequence
  Description of Artificial Sequence: Synthetic oligonucleotide
guaggaagauauuguugga

SEQ ID NO: 471260 - RNA, 19 nt, Artificial Sequence
  Description of Artificial Sequence: Synthetic oligonucleotide
gaguggaauccuugacaug

SEQ ID NO: 471261 - RNA, 19 nt, Artificial Sequence
  Description of Artificial Sequence: Synthetic oligonucleotide
cucaaucuuggggagugac

SEQ ID NO: 471262 - RNA, 19 nt, Artificial Sequence
  Description of Artificial Sequence: Synthetic oligonucleotide
guagaccacgcagcaaucc

SEQ ID NO: 471263 - RNA, 19 nt, Artificial Sequence
  Description of Artificial Sequence: Synthetic oligonucleotide
cauaaagcacaacaccgua

SEQ ID NO: 471264 - RNA, 19 nt, Artificial Sequence
  Description of Artificial Sequence: Synthetic oligonucleotide
gacagauagccacggccca

SEQ ID NO: 471265 - RNA, 19 nt, Artificial Sequence
  Description of Artificial Sequence: Synthetic oligonucleotide
gaagcaggggaucucaguu

SEQ ID NO: 471266 - RNA, 19 nt, Artificial Sequence
  Description of Artificial Sequence: Synthetic oligonucleotide
gaaccccacccauuggaga

SEQ ID NO: 471267 - RNA, 19 nt, Artificial Sequence
  Description of Artificial Sequence: Synthetic oligonucleotide
cccaaaauccagugaagac

SEQ ID NO: 471268 - RNA, 19 nt, Artificial Sequence
  Description of Artificial Sequence: Synthetic oligonucleotide
ggccuaaggcacaaggcgg

SEQ ID NO: 471269 - RNA, 19 nt, Artificial Sequence
  Description of Artificial Sequence: Synthetic oligonucleotide
uggggcaauuacugaagau

SEQ ID NO: 471270 - RNA, 19 nt, Artificial Sequence
  Description of Artificial Sequence: Synthetic oligonucleotide
agacauccgacuggaagcu

SEQ ID NO: 471271 - RNA, 19 nt, Artificial Sequence
  Description of Artificial Sequence: Synthetic oligonucleotide
ggcacgcugaaauuggcuc

SEQ ID NO: 471272 - RNA, 19 nt, Artificial Sequence
  Description of Artificial Sequence: Synthetic oligonucleotide
ugccaaggacuuccgcucu

SEQ ID NO: 471273 - RNA, 19 nt, Artificial Sequence
  Description of Artificial Sequence: Synthetic oligonucleotide
uaccucacuggguggcacc

SEQ ID NO: 471274 - RNA, 19 nt, Artificial Sequence
  Description of Artificial Sequence: Synthetic oligonucleotide
cacgcugaaauuggcuccc

SEQ ID NO: 471275 - RNA, 19 nt, Artificial Sequence
  Description of Artificial Sequence: Synthetic oligonucleotide
cucgaucguggccaggauc

SEQ ID NO: 471276 - RNA, 19 nt, Artificial Sequence
  Description of Artificial Sequence: Synthetic oligonucleotide
gggguuagcagcucauuca

SEQ ID NO: 471277 - RNA, 19 nt, Artificial Sequence
  Description of Artificial Sequence: Synthetic oligonucleotide
ucgugucuuccugaguacu

SEQ ID NO: 471278 - RNA, 19 nt, Artificial Sequence
  Description of Artificial Sequence: Synthetic oligonucleotide
acgaaucaccucagcugcc

SEQ ID NO: 471279 - RNA, 19 nt, Artificial Sequence
  Description of Artificial Sequence: Synthetic oligonucleotide
cuguaccucacuggguggc

SEQ ID NO: 471280 - RNA, 19 nt, Artificial Sequence
  Description of Artificial Sequence: Synthetic oligonucleotide
ccacaaugagcucuucacc

SEQ ID NO: 471281 - RNA, 19 nt, Artificial Sequence
  Description of Artificial Sequence: Synthetic oligonucleotide
gcgguugguacucauguca

SEQ ID NO: 471282 - RNA, 19 nt, Artificial Sequence
  Description of Artificial Sequence: Synthetic oligonucleotide
ucggguccugcauacgaau

SEQ ID NO: 471283 - RNA, 19 nt, Artificial Sequence
  Description of Artificial Sequence: Synthetic oligonucleotide
agcaaaccccggccggguc

SEQ ID NO: 471284 - RNA, 19 nt, Artificial Sequence
  Description of Artificial Sequence: Synthetic oligonucleotide
uuggaggaacaaugcuggu

SEQ ID NO: 471285 - RNA, 19 nt, Artificial Sequence
  Description of Artificial Sequence: Synthetic oligonucleotide
cggacagucaccacugugc

SEQ ID NO: 471286 - RNA, 19 nt, Artificial Sequence
  Description of Artificial Sequence: Synthetic oligonucleotide
gcgggccuaaggcacaagg

SEQ ID NO: 471287 - RNA, 19 nt, Artificial Sequence
  Description of Artificial Sequence: Synthetic oligonucleotide
gcacgcugaaauuggcucc

SEQ ID NO: 471288 - RNA, 19 nt, Artificial Sequence
  Description of Artificial Sequence: Synthetic oligonucleotide
caguagcucgaucguggcc

SEQ ID NO: 471289 - RNA, 19 nt, Artificial Sequence
  Description of Artificial Sequence: Synthetic oligonucleotide
agaaugucuuccguacaaa

SEQ ID NO: 471290 - RNA, 19 nt, Artificial Sequence
  Description of Artificial Sequence: Synthetic oligonucleotide
gaccccgaaccuugagggc

SEQ ID NO: 471291 - RNA, 19 nt, Artificial Sequence
  Description of Artificial Sequence: Synthetic oligonucleotide
aauuggcucccugguggcu

SEQ ID NO: 471292 - RNA, 19 nt, Artificial Sequence
  Description of Artificial Sequence: Synthetic oligonucleotide
cacuccgcucaaucuuggg

SEQ ID NO: 471293 - RNA, 19 nt, Artificial Sequence
  Description of Artificial Sequence: Synthetic oligonucleotide
gacguuaggaguagaugua

SEQ ID NO: 471294 - RNA, 19 nt, Artificial Sequence
  Description of Artificial Sequence: Synthetic oligonucleotide
acggcacgcugaaauuggc

SEQ ID NO: 471295 - RNA, 19 nt, Artificial Sequence
  Description of Artificial Sequence: Synthetic oligonucleotide
guagaacuguuggcgguug

SEQ ID NO: 471296 - RNA, 19 nt, Artificial Sequence
  Description of Artificial Sequence: Synthetic oligonucleotide
gcgcugagaaggcaggcag

SEQ ID NO: 471297 - RNA, 19 nt, Artificial Sequence
  Description of Artificial Sequence: Synthetic oligonucleotide
cuccccgaggacacacuag

SEQ ID NO: 471298 - RNA, 19 nt, Artificial Sequence
  Description of Artificial Sequence: Synthetic oligonucleotide
uguaccucacuggguggca

SEQ ID NO: 471299 - RNA, 19 nt, Artificial Sequence
  Description of Artificial Sequence: Synthetic oligonucleotide
gaucuggucacggcugcca

SEQ ID NO: 471300 - RNA, 19 nt, Artificial Sequence
  Description of Artificial Sequence: Synthetic oligonucleotide
agaccacgcagcaauccug

SEQ ID NO: 471301 - RNA, 19 nt, Artificial Sequence
  Description of Artificial Sequence: Synthetic oligonucleotide
guagcucgaucguggccag

SEQ ID NO: 471302 - RNA, 19 nt, Artificial Sequence
  Description of Artificial Sequence: Synthetic oligonucleotide
gcuguaccucacugggugg

SEQ ID NO: 471303 - RNA, 19 nt, Artificial Sequence
  Description of Artificial Sequence: Synthetic oligonucleotide
uucuuggcguggagguagu

SEQ ID NO: 471304 - RNA, 19 nt, Artificial Sequence
  Description of Artificial Sequence: Synthetic oligonucleotide
agggccuuguccaaugaau

SEQ ID NO: 471305 - RNA, 19 nt, Artificial Sequence
  Description of Artificial Sequence: Synthetic oligonucleotide
auguggacguuaggaguag

SEQ ID NO: 471306 - RNA, 19 nt, Artificial Sequence
  Description of Artificial Sequence: Synthetic oligonucleotide
caccuugagcacuuucaca

SEQ ID NO: 471307 - RNA, 19 nt, Artificial Sequence
  Description of Artificial Sequence: Synthetic oligonucleotide
gaccacgcagcaauccuga

SEQ ID NO: 471308 - RNA, 19 nt, Artificial Sequence
  Description of Artificial Sequence: Synthetic oligonucleotide
ggaauguggggacuuccuc

SEQ ID NO: 471309 - RNA, 19 nt, Artificial Sequence
  Description of Artificial Sequence: Synthetic oligonucleotide
gugggauagggaauccuga

SEQ ID NO: 471310 - RNA, 19 nt, Artificial Sequence
  Description of Artificial Sequence: Synthetic oligonucleotide
aacagcucuccaaguuaga

SEQ ID NO: 471311 - RNA, 19 nt, Artificial Sequence
  Description of Artificial Sequence: Synthetic oligonucleotide
gauguagagcggaugcgcu

SEQ ID NO: 471312 - RNA, 19 nt, Artificial Sequence
  Description of Artificial Sequence: Synthetic oligonucleotide
ggaguagauguagagcgga

SEQ ID NO: 471313 - RNA, 19 nt, Artificial Sequence
  Description of Artificial Sequence: Synthetic oligonucleotide
gcuacaucaccaugccaac

SEQ ID NO: 471314 - RNA, 19 nt, Artificial Sequence
  Description of Artificial Sequence: Synthetic oligonucleotide
uguggacguuaggaguaga

SEQ ID NO: 471315 - RNA, 19 nt, Artificial Sequence
  Description of Artificial Sequence: Synthetic oligonucleotide
gccuaaggcacaaggcggg

SEQ ID NO: 471316 - RNA, 19 nt, Artificial Sequence
  Description of Artificial Sequence: Synthetic oligonucleotide
ugacggugacuuggaaugu

SEQ ID NO: 471317 - RNA, 19 nt, Artificial Sequence
  Description of Artificial Sequence: Synthetic oligonucleotide
ugcgccaccuugagcacuu

SEQ ID NO: 471318 - RNA, 19 nt, Artificial Sequence
  Description of Artificial Sequence: Synthetic oligonucleotide
guggcacaucuucuaggac

SEQ ID NO: 471319 - RNA, 19 nt, Artificial Sequence
  Description of Artificial Sequence: Synthetic oligonucleotide
ccugauugagaccccgaac

SEQ ID NO: 471320 - RNA, 19 nt, Artificial Sequence
  Description of Artificial Sequence: Synthetic oligonucleotide
augucgugucuuccugagu

SEQ ID NO: 471321 - RNA, 19 nt, Artificial Sequence
  Description of Artificial Sequence: Synthetic oligonucleotide
agauagccacggcccacca

SEQ ID NO: 471322 - RNA, 19 nt, Artificial Sequence
  Description of Artificial Sequence: Synthetic oligonucleotide
cacuagcugggcuagggcu

SEQ ID NO: 471323 - RNA, 19 nt, Artificial Sequence
  Description of Artificial Sequence: Synthetic oligonucleotide
gaacuguuggcgguuggua

SEQ ID NO: 471324 - RNA, 19 nt, Artificial Sequence
  Description of Artificial Sequence: Synthetic oligonucleotide
gugcguugcuuguuaggca

SEQ ID NO: 471325 - RNA, 19 nt, Artificial Sequence
  Description of Artificial Sequence: Synthetic oligonucleotide
ccggagacagauagccacg

SEQ ID NO: 471326 - RNA, 19 nt, Artificial Sequence
  Description of Artificial Sequence: Synthetic oligonucleotide
uagccacggcccaccauaa

SEQ ID NO: 471327 - RNA, 19 nt, Artificial Sequence
  Description of Artificial Sequence: Synthetic oligonucleotide
gcagcaauccugauugaga

SEQ ID NO: 471328 - RNA, 19 nt, Artificial Sequence
  Description of Artificial Sequence: Synthetic oligonucleotide
guccugcauacgaaucacc

SEQ ID NO: 471329 - RNA, 19 nt, Artificial Sequence
  Description of Artificial Sequence: Synthetic oligonucleotide
ggucacggcugccaaugug

SEQ ID NO: 471330 - RNA, 19 nt, Artificial Sequence
  Description of Artificial Sequence: Synthetic oligonucleotide
aaccccggccgggucauga

SEQ ID NO: 471331 - RNA, 19 nt, Artificial Sequence
  Description of Artificial Sequence: Synthetic oligonucleotide
gcaguagcucgaucguggc

SEQ ID NO: 471332 - RNA, 19 nt, Artificial Sequence
  Description of Artificial Sequence: Synthetic oligonucleotide
gcauacgaaucaccucagc

SEQ ID NO: 471333 - RNA, 19 nt, Artificial Sequence
  Description of Artificial Sequence: Synthetic oligonucleotide
ccugcauacgaaucaccuc

SEQ ID NO: 471334 - RNA, 19 nt, Artificial Sequence
  Description of Artificial Sequence: Synthetic oligonucleotide
guugcgccaccuugagcac

SEQ ID NO: 471335 - RNA, 19 nt, Artificial Sequence
  Description of Artificial Sequence: Synthetic oligonucleotide
caguaucaaggcagaggca

SEQ ID NO: 471336 - RNA, 19 nt, Artificial Sequence
  Description of Artificial Sequence: Synthetic oligonucleotide
gacauccgacuggaagcug

SEQ ID NO: 471337 - RNA, 19 nt, Artificial Sequence
  Description of Artificial Sequence: Synthetic oligonucleotide
gcgcgugucagccacaugu

SEQ ID NO: 471338 - RNA, 19 nt, Artificial Sequence
  Description of Artificial Sequence: Synthetic oligonucleotide
guacuugcaucucauucuu

SEQ ID NO: 471339 - RNA, 19 nt, Artificial Sequence
  Description of Artificial Sequence: Synthetic oligonucleotide
auccgacuggaagcuguag

SEQ ID NO: 471340 - RNA, 19 nt, Artificial Sequence
  Description of Artificial Sequence: Synthetic oligonucleotide
guucggaggcacuccgcuc

SEQ ID NO: 471341 - RNA, 19 nt, Artificial Sequence
  Description of Artificial Sequence: Synthetic oligonucleotide
uggggaaauaggggccgcu

SEQ ID NO: 471342 - RNA, 19 nt, Artificial Sequence
  Description of Artificial Sequence: Synthetic oligonucleotide
cagacaaauccugaaugcu

SEQ ID NO: 471343 - RNA, 19 nt, Artificial Sequence
  Description of Artificial Sequence: Synthetic oligonucleotide
agauuugagggaaccucuu

SEQ ID NO: 471344 - RNA, 19 nt, Artificial Sequence
  Description of Artificial Sequence: Synthetic oligonucleotide
aggcaguaucaaggcagag

SEQ ID NO: 471345 - RNA, 19 nt, Artificial Sequence
  Description of Artificial Sequence: Synthetic oligonucleotide
aggggugccuuggcacggc

SEQ ID NO: 471346 - RNA, 19 nt, Artificial Sequence
  Description of Artificial Sequence: Synthetic oligonucleotide
ugagucccucauguaggaa

SEQ ID NO: 471347 - RNA, 19 nt, Artificial Sequence
  Description of Artificial Sequence: Synthetic oligonucleotide
caccguaggcauagacauc

SEQ ID NO: 471348 - RNA, 19 nt, Artificial Sequence
  Description of Artificial Sequence: Synthetic oligonucleotide
ccaaauccauauggggugc

SEQ ID NO: 471349 - RNA, 19 nt, Artificial Sequence
  Description of Artificial Sequence: Synthetic oligonucleotide
gcugguaaggaggggugcc

SEQ ID NO: 471350 - RNA, 19 nt, Artificial Sequence
  Description of Artificial Sequence: Synthetic oligonucleotide
cuguuggcgguugguacuc

SEQ ID NO: 471351 - RNA, 19 nt, Artificial Sequence
  Description of Artificial Sequence: Synthetic oligonucleotide
gguccugcauacgaaucac

SEQ ID NO: 471352 - RNA, 19 nt, Artificial Sequence
  Description of Artificial Sequence: Synthetic oligonucleotide
guagggguucggguccugc

SEQ ID NO: 471353 - RNA, 19 nt, Artificial Sequence
  Description of Artificial Sequence: Synthetic oligonucleotide
uagcaaaccccggccgggu

SEQ ID NO: 471354 - RNA, 19 nt, Artificial Sequence
  Description of Artificial Sequence: Synthetic oligonucleotide
gguggcaccucccaguaau

SEQ ID NO: 471355 - RNA, 19 nt, Artificial Sequence
  Description of Artificial Sequence: Synthetic oligonucleotide
gcacggcacgcugaaauug

SEQ ID NO: 471356 - RNA, 19 nt, Artificial Sequence
  Description of Artificial Sequence: Synthetic oligonucleotide
ggcaacucgucagccuggg

SEQ ID NO: 471357 - RNA, 19 nt, Artificial Sequence
  Description of Artificial Sequence: Synthetic oligonucleotide
ggaaauaggggccgcuccu

SEQ ID NO: 471358 - RNA, 19 nt, Artificial Sequence
  Description of Artificial Sequence: Synthetic oligonucleotide
cagcaguagguugcgccac

SEQ ID NO: 471359 - RNA, 19 nt, Artificial Sequence
  Description of Artificial Sequence: Synthetic oligonucleotide
aaagcgcgugucagccaca

SEQ ID NO: 471360 - RNA, 19 nt, Artificial Sequence
  Description of Artificial Sequence: Synthetic oligonucleotide
uguuggcgguugguacuca

SEQ ID NO: 471361 - RNA, 19 nt, Artificial Sequence
  Description of Artificial Sequence: Synthetic oligonucleotide
cugcgcugagaaggcaggc

SEQ ID NO: 471362 - RNA, 19 nt, Artificial Sequence
  Description of Artificial Sequence: Synthetic oligonucleotide
ucggaggcacuccgcucaa

SEQ ID NO: 471363 - RNA, 19 nt, Artificial Sequence
  Description of Artificial Sequence: Synthetic oligonucleotide
gauugagaccccgaaccuu

SEQ ID NO: 471364 - RNA, 19 nt, Artificial Sequence
  Description of Artificial Sequence: Synthetic oligonucleotide
ugccuuggcacggcacgcu

SEQ ID NO: 471365 - RNA, 19 nt, Artificial Sequence
  Description of Artificial Sequence: Synthetic oligonucleotide
agguacacuuugacagcca

SEQ ID NO: 471366 - RNA, 19 nt, Artificial Sequence
  Description of Artificial Sequence: Synthetic oligonucleotide
gacagucaccacugugcgu

SEQ ID NO: 471367 - RNA, 19 nt, Artificial Sequence
  Description of Artificial Sequence: Synthetic oligonucleotide
cuuguuaggcagguacacu

SEQ ID NO: 471368 - RNA, 19 nt, Artificial Sequence
  Description of Artificial Sequence: Synthetic oligonucleotide
auccugauugagaccccga

SEQ ID NO: 471369 - RNA, 19 nt, Artificial Sequence
  Description of Artificial Sequence: Synthetic oligonucleotide
gugccuuggcacggcacgc

SEQ ID NO: 471370 - RNA, 19 nt, Artificial Sequence
  Description of Artificial Sequence: Synthetic oligonucleotide
guagagcggaugcgcugca

SEQ ID NO: 471371 - RNA, 19 nt, Artificial Sequence
  Description of Artificial Sequence: Synthetic oligonucleotide
cgggccuaaggcacaaggc

SEQ ID NO: 471372 - RNA, 19 nt, Artificial Sequence
  Description of Artificial Sequence: Synthetic oligonucleotide
cccucauguaggaagauau

SEQ ID NO: 471373 - RNA, 19 nt, Artificial Sequence
  Description of Artificial Sequence: Synthetic oligonucleotide
acgcagcaauccugauuga

SEQ ID NO: 471374 - RNA, 19 nt, Artificial Sequence
  Description of Artificial Sequence: Synthetic oligonucleotide
cauccauaacacagacccu

SEQ ID NO: 471375 - RNA, 19 nt, Artificial Sequence
  Description of Artificial Sequence: Synthetic oligonucleotide
ggcugguaaggaggggugc

SEQ ID NO: 471376 - RNA, 19 nt, Artificial Sequence
  Description of Artificial Sequence: Synthetic oligonucleotide
gcaaaccccggccggguca

SEQ ID NO: 471377 - RNA, 19 nt, Artificial Sequence
  Description of Artificial Sequence: Synthetic oligonucleotide
cccggccgggucaugaaac

SEQ ID NO: 471378 - RNA, 19 nt, Artificial Sequence
  Description of Artificial Sequence: Synthetic oligonucleotide
ggcgguugguacucauguc

SEQ ID NO: 471379 - RNA, 19 nt, Artificial Sequence
  Description of Artificial Sequence: Synthetic oligonucleotide
gugcauggucaguggcaca

SEQ ID NO: 471380 - RNA, 19 nt, Artificial Sequence
  Description of Artificial Sequence: Synthetic oligonucleotide
gaguagauguagagcggau

SEQ ID NO: 471381 - RNA, 19 nt, Artificial Sequence
  Description of Artificial Sequence: Synthetic oligonucleotide
gacaugaaccccacccauu

SEQ ID NO: 471382 - RNA, 19 nt, Artificial Sequence
  Description of Artificial Sequence: Synthetic oligonucleotide
gcacuccgcucaaucuugg

SEQ ID NO: 471383 - RNA, 19 nt, Artificial Sequence
  Description of Artificial Sequence: Synthetic oligonucleotide
ggcguggagguaguccaug

SEQ ID NO: 471384 - RNA, 19 nt, Artificial Sequence
  Description of Artificial Sequence: Synthetic oligonucleotide
gcaggggaucucaguuugg

SEQ ID NO: 471385 - RNA, 19 nt, Artificial Sequence
  Description of Artificial Sequence: Synthetic oligonucleotide
ccuugacaugaaccccacc

SEQ ID NO: 471386 - RNA, 19 nt, Artificial Sequence
  Description of Artificial Sequence: Synthetic oligonucleotide
gcguugcuuguuaggcagg

SEQ ID NO: 471387 - RNA, 19 nt, Artificial Sequence
  Description of Artificial Sequence: Synthetic oligonucleotide
ccguaggcauagacauccg

SEQ ID NO: 471388 - RNA, 19 nt, Artificial Sequence
  Description of Artificial Sequence: Synthetic oligonucleotide
ccggccgggucaugaaacc

SEQ ID NO: 471389 - RNA, 19 nt, Artificial Sequence
  Description of Artificial Sequence: Synthetic oligonucleotide
cgcagcaauccugauugag

SEQ ID NO: 471390 - RNA, 19 nt, Artificial Sequence
  Description of Artificial Sequence: Synthetic oligonucleotide
gggcuagggcuaccacggg

SEQ ID NO: 471391 - RNA, 19 nt, Artificial Sequence
  Description of Artificial Sequence: Synthetic oligonucleotide
ggccgggucaugaaaccca

SEQ ID NO: 471392 - RNA, 19 nt, Artificial Sequence
  Description of Artificial Sequence: Synthetic oligonucleotide
gucacggggcugggugcgg

SEQ ID NO: 471393 - RNA, 19 nt, Artificial Sequence
  Description of Artificial Sequence: Synthetic oligonucleotide
guggacguuaggaguagau

SEQ ID NO: 471394 - RNA, 19 nt, Artificial Sequence
  Description of Artificial Sequence: Synthetic oligonucleotide
ugggcgcuguggugcugac

SEQ ID NO: 471395 - RNA, 19 nt, Artificial Sequence
  Description of Artificial Sequence: Synthetic oligonucleotide
gccuccagacaaauccuga

SEQ ID NO: 471396 - RNA, 19 nt, Artificial Sequence
  Description of Artificial Sequence: Synthetic oligonucleotide
ccccacuagcaggagggcc

SEQ ID NO: 471397 - RNA, 19 nt, Artificial Sequence
  Description of Artificial Sequence: Synthetic oligonucleotide
gcaucggugcugaagcucu

SEQ ID NO: 471398 - RNA, 19 nt, Artificial Sequence
  Description of Artificial Sequence: Synthetic oligonucleotide
ggccuguucagcaguaggu

SEQ ID NO: 471399 - RNA, 19 nt, Artificial Sequence
  Description of Artificial Sequence: Synthetic oligonucleotide
ccaugucaaagcgcguguc

SEQ ID NO: 471400 - RNA, 19 nt, Artificial Sequence
  Description of Artificial Sequence: Synthetic oligonucleotide
guuggcgguugguacucau

SEQ ID NO: 471401 - RNA, 19 nt, Artificial Sequence
  Description of Artificial Sequence: Synthetic oligonucleotide
uuggcacggcacgcugaaa

SEQ ID NO: 471402 - RNA, 19 nt, Artificial Sequence
  Description of Artificial Sequence: Synthetic oligonucleotide
acgcugaaauuggcucccu

SEQ ID NO: 471403 - RNA, 19 nt, Artificial Sequence
  Description of Artificial Sequence: Synthetic oligonucleotide
gugugggauagggaauccu

SEQ ID NO: 471404 - RNA, 19 nt, Artificial Sequence
  Description of Artificial Sequence: Synthetic oligonucleotide
cugucccaauccucuucaa

SEQ ID NO: 471405 - RNA, 19 nt, Artificial Sequence
  Description of Artificial Sequence: Synthetic oligonucleotide
cccacuagcaggagggccu

SEQ ID NO: 471406 - RNA, 19 nt, Artificial Sequence
  Description of Artificial Sequence: Synthetic oligonucleotide
aaaccccggccgggucaug

SEQ ID NO: 471407 - RNA, 19 nt, Artificial Sequence
  Description of Artificial Sequence: Synthetic oligonucleotide
accccggccgggucaugaa

SEQ ID NO: 471408 - RNA, 19 nt, Artificial Sequence
  Description of Artificial Sequence: Synthetic oligonucleotide
gggguucggguccugcaua

SEQ ID NO: 471409 - RNA, 19 nt, Artificial Sequence
  Description of Artificial Sequence: Synthetic oligonucleotide
ggucaguggcacaucuucu

SEQ ID NO: 471410 - RNA, 19 nt, Artificial Sequence
  Description of Artificial Sequence: Synthetic oligonucleotide
ccccgaaacacagugccaa

SEQ ID NO: 471411 - RNA, 19 nt, Artificial Sequence
  Description of Artificial Sequence: Synthetic oligonucleotide
cguaggcauagacauccga

SEQ ID NO: 471412 - RNA, 19 nt, Artificial Sequence
  Description of Artificial Sequence: Synthetic oligonucleotide
gcggugcaaggaggguucg

SEQ ID NO: 471413 - RNA, 19 nt, Artificial Sequence
  Description of Artificial Sequence: Synthetic oligonucleotide
gggagauuugagggaaccu

SEQ ID NO: 471414 - RNA, 19 nt, Artificial Sequence
  Description of Artificial Sequence: Synthetic oligonucleotide
cgggcugcgcugagaaggc

SEQ ID NO: 471415 - RNA, 19 nt, Artificial Sequence
  Description of Artificial Sequence: Synthetic oligonucleotide
cagcuguaccucacugggu

SEQ ID NO: 471416 - RNA, 19 nt, Artificial Sequence
  Description of Artificial Sequence: Synthetic oligonucleotide
ccgaaacacagugccaaaa

SEQ ID NO: 471417 - RNA, 19 nt, Artificial Sequence
  Description of Artificial Sequence: Synthetic oligonucleotide
gacuuccgcucucgcugcu

SEQ ID NO: 471418 - RNA, 19 nt, Artificial Sequence
  Description of Artificial Sequence: Synthetic oligonucleotide
ccugaaugcugugguagaa

SEQ ID NO: 471419 - RNA, 19 nt, Artificial Sequence
  Description of Artificial Sequence: Synthetic oligonucleotide
caugggcgcuguggugcug

SEQ ID NO: 471420 - RNA, 19 nt, Artificial Sequence
  Description of Artificial Sequence: Synthetic oligonucleotide
ccaggcugaagaaugucuu

SEQ ID NO: 471421 - RNA, 19 nt, Artificial Sequence
  Description of Artificial Sequence: Synthetic oligonucleotide
gccaacugcccgagauggc

SEQ ID NO: 471422 - RNA, 19 nt, Artificial Sequence
  Description of Artificial Sequence: Synthetic oligonucleotide
cagcaucggugcugaagcu

SEQ ID NO: 471423 - RNA, 19 nt, Artificial Sequence
  Description of Artificial Sequence: Synthetic oligonucleotide
cgcugaaauuggcucccug

SEQ ID NO: 471424 - RNA, 19 nt, Artificial Sequence
  Description of Artificial Sequence: Synthetic oligonucleotide
caucaaugagcuggaccau

SEQ ID NO: 471425 - RNA, 19 nt, Artificial Sequence
  Description of Artificial Sequence: Synthetic oligonucleotide
gggaccuuggaggaacaau

SEQ ID NO: 471426 - RNA, 19 nt, Artificial Sequence
  Description of Artificial Sequence: Synthetic oligonucleotide
ccaacugcccgagauggcu

SEQ ID NO: 471427 - RNA, 19 nt, Artificial Sequence
  Description of Artificial Sequence: Synthetic oligonucleotide
gggugccuuggcacggcac

SEQ ID NO: 471428 - RNA, 19 nt, Artificial Sequence
  Description of Artificial Sequence: Synthetic oligonucleotide
ggcacggcacgcugaaauu

SEQ ID NO: 471429 - RNA, 19 nt, Artificial Sequence
  Description of Artificial Sequence: Synthetic oligonucleotide
cucucgcugcucugacggu

SEQ ID NO: 471430 - RNA, 19 nt, Artificial Sequence
  Description of Artificial Sequence: Synthetic oligonucleotide
cgguaccccagguucuuca

SEQ ID NO: 471431 - RNA, 19 nt, Artificial Sequence
  Description of Artificial Sequence: Synthetic oligonucleotide
cggccgggucaugaaaccc

SEQ ID NO: 471432 - RNA, 19 nt, Artificial Sequence
  Description of Artificial Sequence: Synthetic oligonucleotide
gccuguucagcaguagguu

SEQ ID NO: 471433 - RNA, 19 nt, Artificial Sequence
  Description of Artificial Sequence: Synthetic oligonucleotide
cggaugcgcugcagugggg

SEQ ID NO: 471434 - RNA, 19 nt, Artificial Sequence
  Description of Artificial Sequence: Synthetic oligonucleotide
ccgagauggcucagcccca

SEQ ID NO: 471435 - RNA, 19 nt, Artificial Sequence
  Description of Artificial Sequence: Synthetic oligonucleotide
ccacauguaggugguggua

SEQ ID NO: 471436 - RNA, 19 nt, Artificial Sequence
  Description of Artificial Sequence: Synthetic oligonucleotide
ccuccccgaggacacacua

SEQ ID NO: 471437 - RNA, 19 nt, Artificial Sequence
  Description of Artificial Sequence: Synthetic oligonucleotide
gcaguagguugcgccaccu

SEQ ID NO: 471438 - RNA, 19 nt, Artificial Sequence
  Description of Artificial Sequence: Synthetic oligonucleotide
caguagguugcgccaccuu

SEQ ID NO: 471439 - RNA, 19 nt, Artificial Sequence
  Description of Artificial Sequence: Synthetic oligonucleotide
caaaccccggccgggucau

SEQ ID NO: 471440 - RNA, 19 nt, Artificial Sequence
  Description of Artificial Sequence: Synthetic oligonucleotide
ccacgcagcaauccugauu

SEQ ID NO: 471441 - RNA, 19 nt, Artificial Sequence
  Description of Artificial Sequence: Synthetic oligonucleotide
cgcgugucagccacaugua

SEQ ID NO: 471442 - RNA, 19 nt, Artificial Sequence
  Description of Artificial Sequence: Synthetic oligonucleotide
gcucgaucguggccaggau

SEQ ID NO: 471443 - RNA, 19 nt, Artificial Sequence
  Description of Artificial Sequence: Synthetic oligonucleotide
ccaugggcgcuguggugcu

SEQ ID NO: 471444 - RNA, 19 nt, Artificial Sequence
  Description of Artificial Sequence: Synthetic oligonucleotide
ccccggccgggucaugaaa

SEQ ID NO: 471445 - RNA, 19 nt, Artificial Sequence
  Description of Artificial Sequence: Synthetic oligonucleotide
cccggacagucaccacugu

SEQ ID NO: 471446 - RNA, 19 nt, Artificial Sequence
  Description of Artificial Sequence: Synthetic oligonucleotide
cccgguaccccagguucuu

SEQ ID NO: 471447 - RNA, 19 nt, Artificial Sequence
  Description of Artificial Sequence: Synthetic oligonucleotide
aacacuacuguauaugcac

SEQ ID NO: 471448 - RNA, 19 nt, Artificial Sequence
  Description of Artificial Sequence: Synthetic oligonucleotide
uuaaauagacccauauugg

SEQ ID NO: 471449 - RNA, 19 nt, Artificial Sequence
  Description of Artificial Sequence: Synthetic oligonucleotide
agaauuaaccauuuauagc

SEQ ID NO: 471450 - RNA, 19 nt, Artificial Sequence
  Description of Artificial Sequence: Synthetic oligonucleotide
gguguuaugauuuugaagc

SEQ ID NO: 471451 - RNA, 19 nt, Artificial Sequence
  Description of Artificial Sequence: Synthetic oligonucleotide
aaaguagaacaacaaucgc

SEQ ID NO: 471452 - RNA, 19 nt, Artificial Sequence
  Description of Artificial Sequence: Synthetic oligonucleotide
uguaaguuaccguagauca

SEQ ID NO: 471453 - RNA, 19 nt, Artificial Sequence
  Description of Artificial Sequence: Synthetic oligonucleotide
uuaggauccaacaagcacc

SEQ ID NO: 471454 - RNA, 19 nt, Artificial Sequence
  Description of Artificial Sequence: Synthetic oligonucleotide
ugcgcaagggucaaaaucg

SEQ ID NO: 471455 - RNA, 19 nt, Artificial Sequence
  Description of Artificial Sequence: Synthetic oligonucleotide
ucaaaaucguacauggaug

SEQ ID NO: 471456 - RNA, 19 nt, Artificial Sequence
  Description of Artificial Sequence: Synthetic oligonucleotide
aaaauuuggagguauuaaa

SEQ ID NO: 471457 - RNA, 19 nt, Artificial Sequence
  Description of Artificial Sequence: Synthetic oligonucleotide
ucagucuuaacucuugaug

SEQ ID NO: 471458 - RNA, 19 nt, Artificial Sequence
  Description of Artificial Sequence: Synthetic oligonucleotide
uuaguuuagaacacagccc

SEQ ID NO: 471459 - RNA, 19 nt, Artificial Sequence
  Description of Artificial Sequence: Synthetic oligonucleotide
cauaaguugauacuugggc

SEQ ID NO: 471460 - RNA, 19 nt, Artificial Sequence
  Description of Artificial Sequence: Synthetic oligonucleotide
aggucuaaaacacagagau

SEQ ID NO: 471461 - RNA, 19 nt, Artificial Sequence
  Description of Artificial Sequence: Synthetic oligonucleotide
cagucuuaacucuugaugg

SEQ ID NO: 471462 - RNA, 19 nt, Artificial Sequence
  Description of Artificial Sequence: Synthetic oligonucleotide
uguuguuagagcgacacag

SEQ ID NO: 471463 - RNA, 19 nt, Artificial Sequence
  Description of Artificial Sequence: Synthetic oligonucleotide
auuuguauuggcuuugucu

SEQ ID NO: 471464 - RNA, 19 nt, Artificial Sequence
  Description of Artificial Sequence: Synthetic oligonucleotide
uagaacaacaaucgcugcg

SEQ ID NO: 471465 - RNA, 19 nt, Artificial Sequence
  Description of Artificial Sequence: Synthetic oligonucleotide
aaccauuuauagcuaggac

SEQ ID NO: 471466 - RNA, 19 nt, Artificial Sequence
  Description of Artificial Sequence: Synthetic oligonucleotide
uaagacgauucacacaaag

SEQ ID NO: 471467 - RNA, 19 nt, Artificial Sequence
  Description of Artificial Sequence: Synthetic oligonucleotide
aaguggucauacuugaaug

SEQ ID NO: 471468 - RNA, 19 nt, Artificial Sequence
  Description of Artificial Sequence: Synthetic oligonucleotide
ugcuaauccaacaaaagua

SEQ ID NO: 471469 - RNA, 19 nt, Artificial Sequence
  Description of Artificial Sequence: Synthetic oligonucleotide
auuccuaccauacauucug

SEQ ID NO: 471470 - RNA, 19 nt, Artificial Sequence
  Description of Artificial Sequence: Synthetic oligonucleotide
acuaguguaauccuuuugu

SEQ ID NO: 471471 - RNA, 19 nt, Artificial Sequence
  Description of Artificial Sequence: Synthetic oligonucleotide
uuaggcacagucaaggggu

SEQ ID NO: 471472 - RNA, 19 nt, Artificial Sequence
  Description of Artificial Sequence: Synthetic oligonucleotide
aagacgggccaauaguuuc

SEQ ID NO: 471473 - RNA, 19 nt, Artificial Sequence
  Description of Artificial Sequence: Synthetic oligonucleotide
ugcucgaagaaaauacuag

SEQ ID NO: 471474 - RNA, 19 nt, Artificial Sequence
  Description of Artificial Sequence: Synthetic oligonucleotide
auuaaaaguggucauacuu

SEQ ID NO: 471475 - RNA, 19 nt, Artificial Sequence
  Description of Artificial Sequence: Synthetic oligonucleotide
aauuaagacgauucacaca

SEQ ID NO: 471476 - RNA, 19 nt, Artificial Sequence
  Description of Artificial Sequence: Synthetic oligonucleotide
uaaauagacccauauugga

SEQ ID NO: 471477 - RNA, 19 nt, Artificial Sequence
  Description of Artificial Sequence: Synthetic oligonucleotide
auaaguugauacuugggcu

SEQ ID NO: 471478 - RNA, 19 nt, Artificial Sequence
  Description of Artificial Sequence: Synthetic oligonucleotide
agaacaacaaucgcugcgc

SEQ ID NO: 471479 - RNA, 19 nt, Artificial Sequence
  Description of Artificial Sequence: Synthetic oligonucleotide
aguguauuaaaagugguca

SEQ ID NO: 471480 - RNA, 19 nt, Artificial Sequence
  Description of Artificial Sequence: Synthetic oligonucleotide
uacgggauuguuuaaacac

SEQ ID NO: 471481 - RNA, 19 nt, Artificial Sequence
  Description of Artificial Sequence: Synthetic oligonucleotide
aaauagacccauauuggag

SEQ ID NO: 471482 - RNA, 19 nt, Artificial Sequence
  Description of Artificial Sequence: Synthetic oligonucleotide
auuaaccauuuauagcuag

SEQ ID NO: 471483 - RNA, 19 nt, Artificial Sequence
  Description of Artificial Sequence: Synthetic oligonucleotide
uuuuguugggaauagucaa

SEQ ID NO: 471484 - RNA, 19 nt, Artificial Sequence
  Description of Artificial Sequence: Synthetic oligonucleotide
uuauagcuaggacaaguca

SEQ ID NO: 471485 - RNA, 19 nt, Artificial Sequence
  Description of Artificial Sequence: Synthetic oligonucleotide
uaccguagaucaauuuucg

SEQ ID NO: 471486 - RNA, 19 nt, Artificial Sequence
  Description of Artificial Sequence: Synthetic oligonucleotide
cuugauugaccucaggaug

SEQ ID NO: 471487 - RNA, 19 nt, Artificial Sequence
  Description of Artificial Sequence: Synthetic oligonucleotide
uuuauagcuaggacaaguc

SEQ ID NO: 471488 - RNA, 19 nt, Artificial Sequence
  Description of Artificial Sequence: Synthetic oligonucleotide
uuaccguagaucaauuuuc

SEQ ID NO: 471489 - RNA, 19 nt, Artificial Sequence
  Description of Artificial Sequence: Synthetic oligonucleotide
auacauucugcaccauacc

SEQ ID NO: 471490 - RNA, 19 nt, Artificial Sequence
  Description of Artificial Sequence: Synthetic oligonucleotide
ugcggagaaacugucaggg

SEQ ID NO: 471491 - RNA, 19 nt, Artificial Sequence
  Description of Artificial Sequence: Synthetic oligonucleotide
aguagaacaacaaucgcug

SEQ ID NO: 471492 - RNA, 19 nt, Artificial Sequence
  Description of Artificial Sequence: Synthetic oligonucleotide
uacauauggacuacguuuc

SEQ ID NO: 471493 - RNA, 19 nt, Artificial Sequence
  Description of Artificial Sequence: Synthetic oligonucleotide
uacaguuguuguaaguuac

SEQ ID NO: 471494 - RNA, 19 nt, Artificial Sequence
  Description of Artificial Sequence: Synthetic oligonucleotide
uguagaugcgcaaggguca

SEQ ID NO: 471495 - RNA, 19 nt, Artificial Sequence
  Description of Artificial Sequence: Synthetic oligonucleotide
acuugaaugaaggcacucc

SEQ ID NO: 471496 - RNA, 19 nt, Artificial Sequence
  Description of Artificial Sequence: Synthetic oligonucleotide
ucgacagcagcaaucaacu

SEQ ID NO: 471497 - RNA, 19 nt, Artificial Sequence
  Description of Artificial Sequence: Synthetic oligonucleotide
acaacaaucgcugcgcagg

SEQ ID NO: 471498 - RNA, 19 nt, Artificial Sequence
  Description of Artificial Sequence: Synthetic oligonucleotide
cucgaagaaaauacuagug

SEQ ID NO: 471499 - RNA, 19 nt, Artificial Sequence
  Description of Artificial Sequence: Synthetic oligonucleotide
aacuaaguuugggcaaugc

SEQ ID NO: 471500 - RNA, 19 nt, Artificial Sequence
  Description of Artificial Sequence: Synthetic oligonucleotide
cuuaggauccaacaagcac

SEQ ID NO: 471501 - RNA, 19 nt, Artificial Sequence
  Description of Artificial Sequence: Synthetic oligonucleotide
agucagagaacuaaguuug

SEQ ID NO: 471502 - RNA, 19 nt, Artificial Sequence
  Description of Artificial Sequence: Synthetic oligonucleotide
cagagaacuaaguuugggc

SEQ ID NO: 471503 - RNA, 19 nt, Artificial Sequence
  Description of Artificial Sequence: Synthetic oligonucleotide
agucuuaacucuugauggg

SEQ ID NO: 471504 - RNA, 19 nt, Artificial Sequence
  Description of Artificial Sequence: Synthetic oligonucleotide
uuguuagagcgacacagca

SEQ ID NO: 471505 - RNA, 19 nt, Artificial Sequence
  Description of Artificial Sequence: Synthetic oligonucleotide
gacgauucacacaaaguag

SEQ ID NO: 471506 - RNA, 19 nt, Artificial Sequence
  Description of Artificial Sequence: Synthetic oligonucleotide
guccaaauuaguuuagaac

SEQ ID NO: 471507 - RNA, 19 nt, Artificial Sequence
  Description of Artificial Sequence: Synthetic oligonucleotide
augcgcaagggucaaaauc

SEQ ID NO: 471508 - RNA, 19 nt, Artificial Sequence
  Description of Artificial Sequence: Synthetic oligonucleotide
ucugcaagagcauuugauc

SEQ ID NO: 471509 - RNA, 19 nt, Artificial Sequence
  Description of Artificial Sequence: Synthetic oligonucleotide
uuguuguaaguuaccguag

SEQ ID NO: 471510 - RNA, 19 nt, Artificial Sequence
  Description of Artificial Sequence: Synthetic oligonucleotide
uguuguaaguuaccguaga

SEQ ID NO: 471511 - RNA, 19 nt, Artificial Sequence
  Description of Artificial Sequence: Synthetic oligonucleotide
aacaacaaucgcugcgcag

SEQ ID NO: 471512 - RNA, 19 nt, Artificial Sequence
  Description of Artificial Sequence: Synthetic oligonucleotide
aauagucaacacuacugua

SEQ ID NO: 471513 - RNA, 19 nt, Artificial Sequence
  Description of Artificial Sequence: Synthetic oligonucleotide
auuuauagcuaggacaagu

SEQ ID NO: 471514 - RNA, 19 nt, Artificial Sequence
  Description of Artificial Sequence: Synthetic oligonucleotide
uggagguauuaaaacauuc

SEQ ID NO: 471515 - RNA, 19 nt, Artificial Sequence
  Description of Artificial Sequence: Synthetic oligonucleotide
gaaaaccaccucuuaaauc

SEQ ID NO: 471516 - RNA, 19 nt, Artificial Sequence
  Description of Artificial Sequence: Synthetic oligonucleotide
acacacgguuugcuaaucc

SEQ ID NO: 471517 - RNA, 19 nt, Artificial Sequence
  Description of Artificial Sequence: Synthetic oligonucleotide
acaaucgcugcgcaggcag

SEQ ID NO: 471518 - RNA, 19 nt, Artificial Sequence
  Description of Artificial Sequence: Synthetic oligonucleotide
agagcaagguuucaaaauu

SEQ ID NO: 471519 - RNA, 19 nt, Artificial Sequence
  Description of Artificial Sequence: Synthetic oligonucleotide
uguccaaauuaguuuagaa

SEQ ID NO: 471520 - RNA, 19 nt, Artificial Sequence
  Description of Artificial Sequence: Synthetic oligonucleotide
guuagagcgacacagcaaa

SEQ ID NO: 471521 - RNA, 19 nt, Artificial Sequence
  Description of Artificial Sequence: Synthetic oligonucleotide
uaugucugucacuuaagaa

SEQ ID NO: 471522 - RNA, 19 nt, Artificial Sequence
  Description of Artificial Sequence: Synthetic oligonucleotide
uaaccauuuauagcuagga

SEQ ID NO: 471523 - RNA, 19 nt, Artificial Sequence
  Description of Artificial Sequence: Synthetic oligonucleotide
uguugcccaacauacggga

SEQ ID NO: 471524 - RNA, 19 nt, Artificial Sequence
  Description of Artificial Sequence: Synthetic oligonucleotide
caagaauuaaccauuuaua

SEQ ID NO: 471525 - RNA, 19 nt, Artificial Sequence
  Description of Artificial Sequence: Synthetic oligonucleotide
uauuaaaaguggucauacu

SEQ ID NO: 471526 - RNA, 19 nt, Artificial Sequence
  Description of Artificial Sequence: Synthetic oligonucleotide
uaguuguacauauggacua

SEQ ID NO: 471527 - RNA, 19 nt, Artificial Sequence
  Description of Artificial Sequence: Synthetic oligonucleotide
auggacuacguuucucuuc

SEQ ID NO: 471528 - RNA, 19 nt, Artificial Sequence
  Description of Artificial Sequence: Synthetic oligonucleotide
auuuucgacagcagcaauc

SEQ ID NO: 471529 - RNA, 19 nt, Artificial Sequence
  Description of Artificial Sequence: Synthetic oligonucleotide
uuguuuaaacacacgguuu

SEQ ID NO: 471530 - RNA, 19 nt, Artificial Sequence
  Description of Artificial Sequence: Synthetic oligonucleotide
uaaguuaccguagaucaau

SEQ ID NO: 471531 - RNA, 19 nt, Artificial Sequence
  Description of Artificial Sequence: Synthetic oligonucleotide
uaggacacaaagucagucu

SEQ ID NO: 471532 - RNA, 19 nt, Artificial Sequence
  Description of Artificial Sequence: Synthetic oligonucleotide
uucuuggaagcacuggaaa

SEQ ID NO: 471533 - RNA, 19 nt, Artificial Sequence
  Description of Artificial Sequence: Synthetic oligonucleotide
uacuaguguaauccuuuug

SEQ ID NO: 471534 - RNA, 19 nt, Artificial Sequence
  Description of Artificial Sequence: Synthetic oligonucleotide
uggggcuauggcaauaaac

SEQ ID NO: 471535 - RNA, 19 nt, Artificial Sequence
  Description of Artificial Sequence: Synthetic oligonucleotide
cauacgggauuguuuaaac

SEQ ID NO: 471536 - RNA, 19 nt, Artificial Sequence
  Description of Artificial Sequence: Synthetic oligonucleotide
uaugauuuugaagcccggc

SEQ ID NO: 471537 - RNA, 19 nt, Artificial Sequence
  Description of Artificial Sequence: Synthetic oligonucleotide
gaauagucaacacuacugu

SEQ ID NO: 471538 - RNA, 19 nt, Artificial Sequence
  Description of Artificial Sequence: Synthetic oligonucleotide
caccauaccacccagaugu

SEQ ID NO: 471539 - RNA, 19 nt, Artificial Sequence
  Description of Artificial Sequence: Synthetic oligonucleotide
agugcuacuaagaaaacuu

SEQ ID NO: 471540 - RNA, 19 nt, Artificial Sequence
  Description of Artificial Sequence: Synthetic oligonucleotide
uuuaccgcaaaggugguua

SEQ ID NO: 471541 - RNA, 19 nt, Artificial Sequence
  Description of Artificial Sequence: Synthetic oligonucleotide
aauuuucgacagcagcaau

SEQ ID NO: 471542 - RNA, 19 nt, Artificial Sequence
  Description of Artificial Sequence: Synthetic oligonucleotide
aagacgauucacacaaagu

SEQ ID NO: 471543 - RNA, 19 nt, Artificial Sequence
  Description of Artificial Sequence: Synthetic oligonucleotide
aaacacacgguuugcuaau

SEQ ID NO: 471544 - RNA, 19 nt, Artificial Sequence
  Description of Artificial Sequence: Synthetic oligonucleotide
uguuagagcgacacagcaa

SEQ ID NO: 471545 - RNA, 19 nt, Artificial Sequence
  Description of Artificial Sequence: Synthetic oligonucleotide
uagucaacacuacuguaua

SEQ ID NO: 471546 - RNA, 19 nt, Artificial Sequence
  Description of Artificial Sequence: Synthetic oligonucleotide
ugcacggagucagagaacu

SEQ ID NO: 471547 - RNA, 19 nt, Artificial Sequence
  Description of Artificial Sequence: Synthetic oligonucleotide
aaaaucguacauggaugug

SEQ ID NO: 471548 - RNA, 19 nt, Artificial Sequence
  Description of Artificial Sequence: Synthetic oligonucleotide
auacgggauuguuuaaaca

SEQ ID NO: 471549 - RNA, 19 nt, Artificial Sequence
  Description of Artificial Sequence: Synthetic oligonucleotide
uccaacucugcucgaagaa

SEQ ID NO: 471550 - RNA, 19 nt, Artificial Sequence
  Description of Artificial Sequence: Synthetic oligonucleotide
aaauuuguauuggcuuugu

SEQ ID NO: 471551 - RNA, 19 nt, Artificial Sequence
  Description of Artificial Sequence: Synthetic oligonucleotide
aaaugauccauaaguugau

SEQ ID NO: 471552 - RNA, 19 nt, Artificial Sequence
  Description of Artificial Sequence: Synthetic oligonucleotide
aaguugauacuugggcucu

SEQ ID NO: 471553 - RNA, 19 nt, Artificial Sequence
  Description of Artificial Sequence: Synthetic oligonucleotide
acuacguuucucuuccaaa

SEQ ID NO: 471554 - RNA, 19 nt, Artificial Sequence
  Description of Artificial Sequence: Synthetic oligonucleotide
auaagugaaagugcuacua

SEQ ID NO: 471555 - RNA, 19 nt, Artificial Sequence
  Description of Artificial Sequence: Synthetic oligonucleotide
agcccggccuuaugaaugc

SEQ ID NO: 471556 - RNA, 19 nt, Artificial Sequence
  Description of Artificial Sequence: Synthetic oligonucleotide
acgauucacacaaaguaga

SEQ ID NO: 471557 - RNA, 19 nt, Artificial Sequence
  Description of Artificial Sequence: Synthetic oligonucleotide
guagaacaacaaucgcugc

SEQ ID NO: 471558 - RNA, 19 nt, Artificial Sequence
  Description of Artificial Sequence: Synthetic oligonucleotide
uucucgucuaagccagggc

SEQ ID NO: 471559 - RNA, 19 nt, Artificial Sequence
  Description of Artificial Sequence: Synthetic oligonucleotide
agagcgacacagcaaaaua

SEQ ID NO: 471560 - RNA, 19 nt, Artificial Sequence
  Description of Artificial Sequence: Synthetic oligonucleotide
caacauacgggauuguuua

SEQ ID NO: 471561 - RNA, 19 nt, Artificial Sequence
  Description of Artificial Sequence: Synthetic oligonucleotide
uccuaccauacauucugca

SEQ ID NO: 471562 - RNA, 19 nt, Artificial Sequence
  Description of Artificial Sequence: Synthetic oligonucleotide
aacacacgguuugcuaauc

SEQ ID NO: 471563 - RNA, 19 nt, Artificial Sequence
  Description of Artificial Sequence: Synthetic oligonucleotide
aaucgcugcgcaggcaguc

SEQ ID NO: 471564 - RNA, 19 nt, Artificial Sequence
  Description of Artificial Sequence: Synthetic oligonucleotide
ugucaauaacugccucuca

SEQ ID NO: 471565 - RNA, 19 nt, Artificial Sequence
  Description of Artificial Sequence: Synthetic oligonucleotide
cucgucuaagccagggcag

SEQ ID NO: 471566 - RNA, 19 nt, Artificial Sequence
  Description of Artificial Sequence: Synthetic oligonucleotide
gucuuaacucuugaugggc

SEQ ID NO: 471567 - RNA, 19 nt, Artificial Sequence
  Description of Artificial Sequence: Synthetic oligonucleotide
cacgguuugcuaauccaac

SEQ ID NO: 471568 - RNA, 19 nt, Artificial Sequence
  Description of Artificial Sequence: Synthetic oligonucleotide
uuccuaccauacauucugc

SEQ ID NO: 471569 - RNA, 19 nt, Artificial Sequence
  Description of Artificial Sequence: Synthetic oligonucleotide
ccaaauuaguuuagaacac

SEQ ID NO: 471570 - RNA, 19 nt, Artificial Sequence
  Description of Artificial Sequence: Synthetic oligonucleotide
ccguagaucaauuuucgac

SEQ ID NO: 471571 - RNA, 19 nt, Artificial Sequence
  Description of Artificial Sequence: Synthetic oligonucleotide
acgguuugcuaauccaaca

SEQ ID NO: 471572 - RNA, 19 nt, Artificial Sequence
  Description of Artificial Sequence: Synthetic oligonucleotide
uaagacgggccaauaguuu

SEQ ID NO: 471573 - RNA, 19 nt, Artificial Sequence
  Description of Artificial Sequence: Synthetic oligonucleotide
uuugaagcccggccuuaug

SEQ ID NO: 471574 - RNA, 19 nt, Artificial Sequence
  Description of Artificial Sequence: Synthetic oligonucleotide
aacauacgggauuguuuaa

SEQ ID NO: 471575 - RNA, 19 nt, Artificial Sequence
  Description of Artificial Sequence: Synthetic oligonucleotide
agacgggccaauaguuucc

SEQ ID NO: 471576 - RNA, 19 nt, Artificial Sequence
  Description of Artificial Sequence: Synthetic oligonucleotide
cagauguuguuagagcgac

SEQ ID NO: 471577 - RNA, 19 nt, Artificial Sequence
  Description of Artificial Sequence: Synthetic oligonucleotide
auagacccauauuggagau

SEQ ID NO: 471578 - RNA, 19 nt, Artificial Sequence
  Description of Artificial Sequence: Synthetic oligonucleotide
acaucacuuaauauaaaua

SEQ ID NO: 471579 - RNA, 19 nt, Artificial Sequence
  Description of Artificial Sequence: Synthetic oligonucleotide
aauuaaccauuuauagcua

SEQ ID NO: 471580 - RNA, 19 nt, Artificial Sequence
  Description of Artificial Sequence: Synthetic oligonucleotide
aagcccggccuuaugaaug

SEQ ID NO: 471581 - RNA, 19 nt, Artificial Sequence
  Description of Artificial Sequence: Synthetic oligonucleotide
uaucaacccuuuuaugcuu

SEQ ID NO: 471582 - RNA, 19 nt, Artificial Sequence
  Description of Artificial Sequence: Synthetic oligonucleotide
caaaaucguacauggaugu

SEQ ID NO: 471583 - RNA, 19 nt, Artificial Sequence
  Description of Artificial Sequence: Synthetic oligonucleotide
gugaaggugagccaugacu

SEQ ID NO: 471584 - RNA, 19 nt, Artificial Sequence
  Description of Artificial Sequence: Synthetic oligonucleotide
guuguuagagcgacacagc

SEQ ID NO: 471585 - RNA, 19 nt, Artificial Sequence
  Description of Artificial Sequence: Synthetic oligonucleotide
cagaauaggcacgugccug

SEQ ID NO: 471586 - RNA, 19 nt, Artificial Sequence
  Description of Artificial Sequence: Synthetic oligonucleotide
ccauaaguugauacuuggg

SEQ ID NO: 471587 - RNA, 19 nt, Artificial Sequence
  Description of Artificial Sequence: Synthetic oligonucleotide
aaugauccauaaguugaua

SEQ ID NO: 471588 - RNA, 19 nt, Artificial Sequence
  Description of Artificial Sequence: Synthetic oligonucleotide
cuaaguuugggcaaugcuu

SEQ ID NO: 471589 - RNA, 19 nt, Artificial Sequence
  Description of Artificial Sequence: Synthetic oligonucleotide
uugcccaacauacgggauu

SEQ ID NO: 471590 - RNA, 19 nt, Artificial Sequence
  Description of Artificial Sequence: Synthetic oligonucleotide
gccuuaugaaugcacggag

SEQ ID NO: 471591 - RNA, 19 nt, Artificial Sequence
  Description of Artificial Sequence: Synthetic oligonucleotide
guauaaagguccaauuugu

SEQ ID NO: 471592 - RNA, 19 nt, Artificial Sequence
  Description of Artificial Sequence: Synthetic oligonucleotide
guuaccguagaucaauuuu

SEQ ID NO: 471593 - RNA, 19 nt, Artificial Sequence
  Description of Artificial Sequence: Synthetic oligonucleotide
gcaagggucaaaaucguac

SEQ ID NO: 471594 - RNA, 19 nt, Artificial Sequence
  Description of Artificial Sequence: Synthetic oligonucleotide
aguuaccguagaucaauuu

SEQ ID NO: 471595 - RNA, 19 nt, Artificial Sequence
  Description of Artificial Sequence: Synthetic oligonucleotide
aggcugaccgcuaguaggg

SEQ ID NO: 471596 - RNA, 19 nt, Artificial Sequence
  Description of Artificial Sequence: Synthetic oligonucleotide
uauggacuacguuucucuu

SEQ ID NO: 471597 - RNA, 19 nt, Artificial Sequence
  Description of Artificial Sequence: Synthetic oligonucleotide
aucucacgcuggcuccacc

SEQ ID NO: 471598 - RNA, 19 nt, Artificial Sequence
  Description of Artificial Sequence: Synthetic oligonucleotide
caacaaucgcugcgcaggc

SEQ ID NO: 471599 - RNA, 19 nt, Artificial Sequence
  Description of Artificial Sequence: Synthetic oligonucleotide
gaacaacaaucgcugcgca

SEQ ID NO: 471600 - RNA, 19 nt, Artificial Sequence
  Description of Artificial Sequence: Synthetic oligonucleotide
ucaacccuuuuaugcuuga

SEQ ID NO: 471601 - RNA, 19 nt, Artificial Sequence
  Description of Artificial Sequence: Synthetic oligonucleotide
auacuaguguaauccuuuu

SEQ ID NO: 471602 - RNA, 19 nt, Artificial Sequence
  Description of Artificial Sequence: Synthetic oligonucleotide
uuagagcgacacagcaaaa

SEQ ID NO: 471603 - RNA, 19 nt, Artificial Sequence
  Description of Artificial Sequence: Synthetic oligonucleotide
ccuaccauacauucugcac

SEQ ID NO: 471604 - RNA, 19 nt, Artificial Sequence
  Description of Artificial Sequence: Synthetic oligonucleotide
gucacuuaagaaggcugcc

SEQ ID NO: 471605 - RNA, 19 nt, Artificial Sequence
  Description of Artificial Sequence: Synthetic oligonucleotide
gacuacguuucucuuccaa

SEQ ID NO: 471606 - RNA, 19 nt, Artificial Sequence
  Description of Artificial Sequence: Synthetic oligonucleotide
uacuugaaugaaggcacuc

SEQ ID NO: 471607 - RNA, 19 nt, Artificial Sequence
  Description of Artificial Sequence: Synthetic oligonucleotide
aagaaccauguagauucau

SEQ ID NO: 471608 - RNA, 19 nt, Artificial Sequence
  Description of Artificial Sequence: Synthetic oligonucleotide
cacacgguuugcuaaucca

SEQ ID NO: 471609 - RNA, 19 nt, Artificial Sequence
  Description of Artificial Sequence: Synthetic oligonucleotide
acauacgggauuguuuaaa

SEQ ID NO: 471610 - RNA, 19 nt, Artificial Sequence
  Description of Artificial Sequence: Synthetic oligonucleotide
aucaacccuuuuaugcuug

SEQ ID NO: 471611 - RNA, 19 nt, Artificial Sequence
  Description of Artificial Sequence: Synthetic oligonucleotide
gaacuaaguuugggcaaug

SEQ ID NO: 471612 - RNA, 19 nt, Artificial Sequence
  Description of Artificial Sequence: Synthetic oligonucleotide
agaugcgcaagggucaaaa

SEQ ID NO: 471613 - RNA, 19 nt, Artificial Sequence
  Description of Artificial Sequence: Synthetic oligonucleotide
aaucgcacacaggcagaug

SEQ ID NO: 471614 - RNA, 19 nt, Artificial Sequence
  Description of Artificial Sequence: Synthetic oligonucleotide
cucuuucuaagacgggcca

SEQ ID NO: 471615 - RNA, 19 nt, Artificial Sequence
  Description of Artificial Sequence: Synthetic oligonucleotide
agaaccauguagauucauu

SEQ ID NO: 471616 - RNA, 19 nt, Artificial Sequence
  Description of Artificial Sequence: Synthetic oligonucleotide
uucccuguugggacaucac

SEQ ID NO: 471617 - RNA, 19 nt, Artificial Sequence
  Description of Artificial Sequence: Synthetic oligonucleotide
ccggccuuaugaaugcacg

SEQ ID NO: 471618 - RNA, 19 nt, Artificial Sequence
  Description of Artificial Sequence: Synthetic oligonucleotide
gggccaauaguuucccaug

SEQ ID NO: 471619 - RNA, 19 nt, Artificial Sequence
  Description of Artificial Sequence: Synthetic oligonucleotide
accgcaaaggugguuaaua

SEQ ID NO: 471620 - RNA, 19 nt, Artificial Sequence
  Description of Artificial Sequence: Synthetic oligonucleotide
caauuuucgacagcagcaa

SEQ ID NO: 471621 - RNA, 19 nt, Artificial Sequence
  Description of Artificial Sequence: Synthetic oligonucleotide
gacuuggagaucucacgcu

SEQ ID NO: 471622 - RNA, 19 nt, Artificial Sequence
  Description of Artificial Sequence: Synthetic oligonucleotide
gacgggccaauaguuuccc

SEQ ID NO: 471623 - RNA, 19 nt, Artificial Sequence
  Description of Artificial Sequence: Synthetic oligonucleotide
ucgucuaagccagggcagu

SEQ ID NO: 471624 - RNA, 19 nt, Artificial Sequence
  Description of Artificial Sequence: Synthetic oligonucleotide
acucaaauugggacuugga

SEQ ID NO: 471625 - RNA, 19 nt, Artificial Sequence
  Description of Artificial Sequence: Synthetic oligonucleotide
aaguuaccguagaucaauu

SEQ ID NO: 471626 - RNA, 19 nt, Artificial Sequence
  Description of Artificial Sequence: Synthetic oligonucleotide
cuaagacgggccaauaguu

SEQ ID NO: 471627 - RNA, 19 nt, Artificial Sequence
  Description of Artificial Sequence: Synthetic oligonucleotide
uuuugaagcccggccuuau

SEQ ID NO: 471628 - RNA, 19 nt, Artificial Sequence
  Description of Artificial Sequence: Synthetic oligonucleotide
gcucgaagaaaauacuagu

SEQ ID NO: 471629 - RNA, 19 nt, Artificial Sequence
  Description of Artificial Sequence: Synthetic oligonucleotide
acacgguuugcuaauccaa

SEQ ID NO: 471630 - RNA, 19 nt, Artificial Sequence
  Description of Artificial Sequence: Synthetic oligonucleotide
guuguaaguuaccguagau

SEQ ID NO: 471631 - RNA, 19 nt, Artificial Sequence
  Description of Artificial Sequence: Synthetic oligonucleotide
cacggagucagagaacuaa

SEQ ID NO: 471632 - RNA, 19 nt, Artificial Sequence
  Description of Artificial Sequence: Synthetic oligonucleotide
guggacugugugucugaug

SEQ ID NO: 471633 - RNA, 19 nt, Artificial Sequence
  Description of Artificial Sequence: Synthetic oligonucleotide
ggggaaaaccaccucuuaa

SEQ ID NO: 471634 - RNA, 19 nt, Artificial Sequence
  Description of Artificial Sequence: Synthetic oligonucleotide
caaaggugguuaauaaauu

SEQ ID NO: 471635 - RNA, 19 nt, Artificial Sequence
  Description of Artificial Sequence: Synthetic oligonucleotide
caagaaccauguagauuca

SEQ ID NO: 471636 - RNA, 19 nt, Artificial Sequence
  Description of Artificial Sequence: Synthetic oligonucleotide
agcaaucaacugcgcugug

SEQ ID NO: 471637 - RNA, 19 nt, Artificial Sequence
  Description of Artificial Sequence: Synthetic oligonucleotide
augcacggagucagagaac

SEQ ID NO: 471638 - RNA, 19 nt, Artificial Sequence
  Description of Artificial Sequence: Synthetic oligonucleotide
aggacaagucaaacaugcu

SEQ ID NO: 471639 - RNA, 19 nt, Artificial Sequence
  Description of Artificial Sequence: Synthetic oligonucleotide
gggaauagucaacacuacu

SEQ ID NO: 471640 - RNA, 19 nt, Artificial Sequence
  Description of Artificial Sequence: Synthetic oligonucleotide
ggggccuauuuugaggcug

SEQ ID NO: 471641 - RNA, 19 nt, Artificial Sequence
  Description of Artificial Sequence: Synthetic oligonucleotide
gaagcccggccuuaugaau

SEQ ID NO: 471642 - RNA, 19 nt, Artificial Sequence
  Description of Artificial Sequence: Synthetic oligonucleotide
gccuauuuugaggcugucc

SEQ ID NO: 471643 - RNA, 19 nt, Artificial Sequence
  Description of Artificial Sequence: Synthetic oligonucleotide
cucacgcuggcuccaccuc

SEQ ID NO: 471644 - RNA, 19 nt, Artificial Sequence
  Description of Artificial Sequence: Synthetic oligonucleotide
ggccuuaugaaugcacgga

SEQ ID NO: 471645 - RNA, 19 nt, Artificial Sequence
  Description of Artificial Sequence: Synthetic oligonucleotide
gacccauauuggagaugag

SEQ ID NO: 471646 - RNA, 19 nt, Artificial Sequence
  Description of Artificial Sequence: Synthetic oligonucleotide
ggugcggggcagcacaaga

SEQ ID NO: 471647 - RNA, 19 nt, Artificial Sequence
  Description of Artificial Sequence: Synthetic oligonucleotide
gaugcgcaagggucaaaau

SEQ ID NO: 471648 - RNA, 19 nt, Artificial Sequence
  Description of Artificial Sequence: Synthetic oligonucleotide
agauguuguuagagcgaca

SEQ ID NO: 471649 - RNA, 19 nt, Artificial Sequence
  Description of Artificial Sequence: Synthetic oligonucleotide
gcaccauaccacccagaug

SEQ ID NO: 471650 - RNA, 19 nt, Artificial Sequence
  Description of Artificial Sequence: Synthetic oligonucleotide
cacuacuguauaugcacau

SEQ ID NO: 471651 - RNA, 19 nt, Artificial Sequence
  Description of Artificial Sequence: Synthetic oligonucleotide
gaucucacgcuggcuccac

SEQ ID NO: 471652 - RNA, 19 nt, Artificial Sequence
  Description of Artificial Sequence: Synthetic oligonucleotide
ccgagucuuaggauccaac

SEQ ID NO: 471653 - RNA, 19 nt, Artificial Sequence
  Description of Artificial Sequence: Synthetic oligonucleotide
cggccuuaugaaugcacgg

SEQ ID NO: 471654 - RNA, 19 nt, Artificial Sequence
  Description of Artificial Sequence: Synthetic oligonucleotide
guagaugcgcaagggucaa

SEQ ID NO: 471655 - RNA, 19 nt, Artificial Sequence
  Description of Artificial Sequence: Synthetic oligonucleotide
acgggccaauaguuuccca

SEQ ID NO: 471656 - RNA, 19 nt, Artificial Sequence
  Description of Artificial Sequence: Synthetic oligonucleotide
gaugcuuguagggccuggu

SEQ ID NO: 471657 - RNA, 19 nt, Artificial Sequence
  Description of Artificial Sequence: Synthetic oligonucleotide
uaccgcaaaggugguuaau

SEQ ID NO: 471658 - RNA, 19 nt, Artificial Sequence
  Description of Artificial Sequence: Synthetic oligonucleotide
cccggccuuaugaaugcac

SEQ ID NO: 471659 - RNA, 19 nt, Artificial Sequence
  Description of Artificial Sequence: Synthetic oligonucleotide
ccaccucuuaaaucucuca

SEQ ID NO: 471660 - RNA, 19 nt, Artificial Sequence
  Description of Artificial Sequence: Synthetic oligonucleotide
agcacgucccacacucaaa

SEQ ID NO: 471661 - RNA, 19 nt, Artificial Sequence
  Description of Artificial Sequence: Synthetic oligonucleotide
gaauaggcacgugccugcu

SEQ ID NO: 471662 - RNA, 19 nt, Artificial Sequence
  Description of Artificial Sequence: Synthetic oligonucleotide
uagaugcgcaagggucaaa

SEQ ID NO: 471663 - RNA, 19 nt, Artificial Sequence
  Description of Artificial Sequence: Synthetic oligonucleotide
ccaauaguuucccaugcau

SEQ ID NO: 471664 - RNA, 19 nt, Artificial Sequence
  Description of Artificial Sequence: Synthetic oligonucleotide
cagucaaggggucccgagu

SEQ ID NO: 471665 - RNA, 19 nt, Artificial Sequence
  Description of Artificial Sequence: Synthetic oligonucleotide
gugcggggcagcacaagaa

SEQ ID NO: 471666 - RNA, 19 nt, Artificial Sequence
  Description of Artificial Sequence: Synthetic oligonucleotide
guugcccaacauacgggau

SEQ ID NO: 471667 - RNA, 19 nt, Artificial Sequence
  Description of Artificial Sequence: Synthetic oligonucleotide
ggacuacguuucucuucca

SEQ ID NO: 471668 - RNA, 19 nt, Artificial Sequence
  Description of Artificial Sequence: Synthetic oligonucleotide
guuuaccgcaaaggugguu

SEQ ID NO: 471669 - RNA, 19 nt, Artificial Sequence
  Description of Artificial Sequence: Synthetic oligonucleotide
cccugauguagaugcgcaa

SEQ ID NO: 471670 - RNA, 19 nt, Artificial Sequence
  Description of Artificial Sequence: Synthetic oligonucleotide
ggccuauuuugaggcuguc

SEQ ID NO: 471671 - RNA, 19 nt, Artificial Sequence
  Description of Artificial Sequence: Synthetic oligonucleotide
caacccuuuuaugcuugau

SEQ ID NO: 471672 - RNA, 19 nt, Artificial Sequence
  Description of Artificial Sequence: Synthetic oligonucleotide
gggucccgagucuuaggau

SEQ ID NO: 471673 - RNA, 19 nt, Artificial Sequence
  Description of Artificial Sequence: Synthetic oligonucleotide
cgggccaauaguuucccau

SEQ ID NO: 471674 - RNA, 19 nt, Artificial Sequence
  Description of Artificial Sequence: Synthetic oligonucleotide
gcgcaagggucaaaaucgu

SEQ ID NO: 471675 - RNA, 19 nt, Artificial Sequence
  Description of Artificial Sequence: Synthetic oligonucleotide
ccaugcaugucugcagaau

SEQ ID NO: 471676 - RNA, 19 nt, Artificial Sequence
  Description of Artificial Sequence: Synthetic oligonucleotide
cacaccccgcuggcaucca

SEQ ID NO: 471677 - RNA, 19 nt, Artificial Sequence
  Description of Artificial Sequence: Synthetic oligonucleotide
cccgagucuuaggauccaa

SEQ ID NO: 471678 - RNA, 19 nt, Artificial Sequence
  Description of Artificial Sequence: Synthetic oligonucleotide
caacugcgcugugccauuu

SEQ ID NO: 471679 - RNA, 19 nt, Artificial Sequence
  Description of Artificial Sequence: Synthetic oligonucleotide
gcccggccuuaugaaugca

SEQ ID NO: 471680 - RNA, 19 nt, Artificial Sequence
  Description of Artificial Sequence: Synthetic oligonucleotide
aaggagacaacauagaagg

SEQ ID NO: 471681 - RNA, 19 nt, Artificial Sequence
  Description of Artificial Sequence: Synthetic oligonucleotide
ucgaauagcaccuuggaug

SEQ ID NO: 471682 - RNA, 19 nt, Artificial Sequence
  Description of Artificial Sequence: Synthetic oligonucleotide
uuuccuuuaccaauuaccc

SEQ ID NO: 471683 - RNA, 19 nt, Artificial Sequence
  Description of Artificial Sequence: Synthetic oligonucleotide
gucgauugcaucuagaaac

SEQ ID NO: 471684 - RNA, 19 nt, Artificial Sequence
  Description of Artificial Sequence: Synthetic oligonucleotide
agugcuggaucccauacac

SEQ ID NO: 471685 - RNA, 19 nt, Artificial Sequence
  Description of Artificial Sequence: Synthetic oligonucleotide
gaugcgaugacucugagcu

SEQ ID NO: 471686 - RNA, 19 nt, Artificial Sequence
  Description of Artificial Sequence: Synthetic oligonucleotide
ucggaaggagacaacauag

SEQ ID NO: 471687 - RNA, 19 nt, Artificial Sequence
  Description of Artificial Sequence: Synthetic oligonucleotide
uggucuggauaucugaggg

SEQ ID NO: 471688 - RNA, 19 nt, Artificial Sequence
  Description of Artificial Sequence: Synthetic oligonucleotide
ugaacugugguuagcacca

SEQ ID NO: 471689 - RNA, 19 nt, Artificial Sequence
  Description of Artificial Sequence: Synthetic oligonucleotide
aauagcaccuuggaugagg

SEQ ID NO: 471690 - RNA, 19 nt, Artificial Sequence
  Description of Artificial Sequence: Synthetic oligonucleotide
uuugcguccacuucaggag

SEQ ID NO: 471691 - RNA, 19 nt, Artificial Sequence
  Description of Artificial Sequence: Synthetic oligonucleotide
acuaacaggugaugggccc

SEQ ID NO: 471692 - RNA, 19 nt, Artificial Sequence
  Description of Artificial Sequence: Synthetic oligonucleotide
uggaucgucucccagcagg

SEQ ID NO: 471693 - RNA, 19 nt, Artificial Sequence
  Description of Artificial Sequence: Synthetic oligonucleotide
ucagcgacagaacccacgg

SEQ ID NO: 471694 - RNA, 19 nt, Artificial Sequence
  Description of Artificial Sequence: Synthetic oligonucleotide
  modified_base (7)..(7): a, c, u, g, unknown or other
uacuccnggaaccuggcug

SEQ ID NO: 471695 - RNA, 19 nt, Artificial Sequence
  Description of Artificial Sequence: Synthetic oligonucleotide
auuuggaccguuucaaaug

SEQ ID NO: 471696 - RNA, 19 nt, Artificial Sequence
  Description of Artificial Sequence: Synthetic oligonucleotide
caucuagaaacucaggcug

SEQ ID NO: 471697 - RNA, 19 nt, Artificial Sequence
  Description of Artificial Sequence: Synthetic oligonucleotide
uucuaagccaacgugagcu

SEQ ID NO: 471698 - RNA, 19 nt, Artificial Sequence
  Description of Artificial Sequence: Synthetic oligonucleotide
ucuaccuuggucuggauau

SEQ ID NO: 471699 - RNA, 19 nt, Artificial Sequence
  Description of Artificial Sequence: Synthetic oligonucleotide
gaucauucgcugcugacgc

SEQ ID NO: 471700 - RNA, 19 nt, Artificial Sequence
  Description of Artificial Sequence: Synthetic oligonucleotide
uggaccguuucaaaugggg

SEQ ID NO: 471701 - RNA, 19 nt, Artificial Sequence
  Description of Artificial Sequence: Synthetic oligonucleotide
gaaacucaggcugcgaacg

SEQ ID NO: 471702 - RNA, 19 nt, Artificial Sequence
  Description of Artificial Sequence: Synthetic oligonucleotide
auaaaagccuggcugggag

SEQ ID NO: 471703 - RNA, 19 nt, Artificial Sequence
  Description of Artificial Sequence: Synthetic oligonucleotide
acauagaaggugucuuccc

SEQ ID NO: 471704 - RNA, 19 nt, Artificial Sequence
  Description of Artificial Sequence: Synthetic oligonucleotide
ugucaaacgggacauccug

SEQ ID NO: 471705 - RNA, 19 nt, Artificial Sequence
  Description of Artificial Sequence: Synthetic oligonucleotide
aaguggucccuucggaagg

SEQ ID NO: 471706 - RNA, 19 nt, Artificial Sequence
  Description of Artificial Sequence: Synthetic oligonucleotide
cauccccacauccagaggg

SEQ ID NO: 471707 - RNA, 19 nt, Artificial Sequence
  Description of Artificial Sequence: Synthetic oligonucleotide
gacaacuggggacacugcg

SEQ ID NO: 471708 - RNA, 19 nt, Artificial Sequence
  Description of Artificial Sequence: Synthetic oligonucleotide
agaaacucaggcugcgaac

SEQ ID NO: 471709 - RNA, 19 nt, Artificial Sequence
  Description of Artificial Sequence: Synthetic oligonucleotide
ugaucauucgcugcugacg

SEQ ID NO: 471710 - RNA, 19 nt, Artificial Sequence
  Description of Artificial Sequence: Synthetic oligonucleotide
caugaugcagacaacuuuc

SEQ ID NO: 471711 - RNA, 19 nt, Artificial Sequence
  Description of Artificial Sequence: Synthetic oligonucleotide
cuuggaugaggacaacugg

SEQ ID NO: 471712 - RNA, 19 nt, Artificial Sequence
  Description of Artificial Sequence: Synthetic oligonucleotide
gagagaugggagcuggagg

SEQ ID NO: 471713 - RNA, 19 nt, Artificial Sequence
  Description of Artificial Sequence: Synthetic oligonucleotide
cugaacugugguuagcacc

SEQ ID NO: 471714 - RNA, 19 nt, Artificial Sequence
  Description of Artificial Sequence: Synthetic oligonucleotide
uucuugaucauucgcugcu

SEQ ID NO: 471715 - RNA, 19 nt, Artificial Sequence
  Description of Artificial Sequence: Synthetic oligonucleotide
agcgacagaacccacggug

SEQ ID NO: 471716 - RNA, 19 nt, Artificial Sequence
  Description of Artificial Sequence: Synthetic oligonucleotide
gaacuaacaggugaugggc

SEQ ID NO: 471717 - RNA, 19 nt, Artificial Sequence
  Description of Artificial Sequence: Synthetic oligonucleotide
cagacaacuuuccuguucc

SEQ ID NO: 471718 - RNA, 19 nt, Artificial Sequence
  Description of Artificial Sequence: Synthetic oligonucleotide
ugugaggcauccuccgucg

SEQ ID NO: 471719 - RNA, 19 nt, Artificial Sequence
  Description of Artificial Sequence: Synthetic oligonucleotide
agguaaggagaggugagcc

SEQ ID NO: 471720 - RNA, 19 nt, Artificial Sequence
  Description of Artificial Sequence: Synthetic oligonucleotide
  modified_base (2)..(2): a, c, u, g, unknown or other
cngaaagaugcgaugacuc

SEQ ID NO: 471721 - RNA, 19 nt, Artificial Sequence
  Description of Artificial Sequence: Synthetic oligonucleotide
aagagguaaggagagguga

SEQ ID NO: 471722 - RNA, 19 nt, Artificial Sequence
  Description of Artificial Sequence: Synthetic oligonucleotide
  modified_base (6)..(6): a, c, u, g, unknown or other
ucugcngaaagaugcgaug

SEQ ID NO: 471723 - RNA, 19 nt, Artificial Sequence
  Description of Artificial Sequence: Synthetic oligonucleotide
gagguucucucagagaaag

SEQ ID NO: 471724 - RNA, 19 nt, Artificial Sequence
  Description of Artificial Sequence: Synthetic oligonucleotide
agaugcgaugacucugagc

SEQ ID NO: 471725 - RNA, 19 nt, Artificial Sequence
  Description of Artificial Sequence: Synthetic oligonucleotide
ggaacuaacaggugauggg

SEQ ID NO: 471726 - RNA, 19 nt, Artificial Sequence
  Description of Artificial Sequence: Synthetic oligonucleotide
agaggguugcugucaaacg

SEQ ID NO: 471727 - RNA, 19 nt, Artificial Sequence
  Description of Artificial Sequence: Synthetic oligonucleotide
accguggaggucuugaugu

SEQ ID NO: 471728 - RNA, 19 nt, Artificial Sequence
  Description of Artificial Sequence: Synthetic oligonucleotide
ucuccuauaaaagccuggc

SEQ ID NO: 471729 - RNA, 19 nt, Artificial Sequence
  Description of Artificial Sequence: Synthetic oligonucleotide
ucgauugcaucuagaaacu

SEQ ID NO: 471730 - RNA, 19 nt, Artificial Sequence
  Description of Artificial Sequence: Synthetic oligonucleotide
gagcccuauauucugaaga

SEQ ID NO: 471731 - RNA, 19 nt, Artificial Sequence
  Description of Artificial Sequence: Synthetic oligonucleotide
auucucccugcgcaguugc

SEQ ID NO: 471732 - RNA, 19 nt, Artificial Sequence
  Description of Artificial Sequence: Synthetic oligonucleotide
aaccaguucuaagccaacg

SEQ ID NO: 471733 - RNA, 19 nt, Artificial Sequence
  Description of Artificial Sequence: Synthetic oligonucleotide
ucuagaaacucaggcugcg

SEQ ID NO: 471734 - RNA, 19 nt, Artificial Sequence
  Description of Artificial Sequence: Synthetic oligonucleotide
ugaggaacuaacaggugau

SEQ ID NO: 471735 - RNA, 19 nt, Artificial Sequence
  Description of Artificial Sequence: Synthetic oligonucleotide
ucuuccguagcugagacuu

SEQ ID NO: 471736 - RNA, 19 nt, Artificial Sequence
  Description of Artificial Sequence: Synthetic oligonucleotide
gaggcuuccgaguggcugg

SEQ ID NO: 471737 - RNA, 19 nt, Artificial Sequence
  Description of Artificial Sequence: Synthetic oligonucleotide
aaccuccucuccuauaaaa

SEQ ID NO: 471738 - RNA, 19 nt, Artificial Sequence
  Description of Artificial Sequence: Synthetic oligonucleotide
ucaaacgggacauccugcu

SEQ ID NO: 471739 - RNA, 19 nt, Artificial Sequence
  Description of Artificial Sequence: Synthetic oligonucleotide
uucaccugaagaucuggga

SEQ ID NO: 471740 - RNA, 19 nt, Artificial Sequence
  Description of Artificial Sequence: Synthetic oligonucleotide
gacucgaauagcaccuugg

SEQ ID NO: 471741 - RNA, 19 nt, Artificial Sequence
  Description of Artificial Sequence: Synthetic oligonucleotide
uccucuccuauaaaagccu

SEQ ID NO: 471742 - RNA, 19 nt, Artificial Sequence
  Description of Artificial Sequence: Synthetic oligonucleotide
aaagaugcgaugacucuga

SEQ ID NO: 471743 - RNA, 19 nt, Artificial Sequence
  Description of Artificial Sequence: Synthetic oligonucleotide
ugcgaugacucugagcuca

SEQ ID NO: 471744 - RNA, 19 nt, Artificial Sequence
  Description of Artificial Sequence: Synthetic oligonucleotide
  modified_base (4)..(4): a, c, u, g, unknown or other
ugcngaaagaugcgaugac

SEQ ID NO: 471745 - RNA, 19 nt, Artificial Sequence
  Description of Artificial Sequence: Synthetic oligonucleotide
caaguggucccuucggaag

SEQ ID NO: 471746 - RNA, 19 nt, Artificial Sequence
  Description of Artificial Sequence: Synthetic oligonucleotide
uccacgcagcggaacagcg

SEQ ID NO: 471747 - RNA, 19 nt, Artificial Sequence
  Description of Artificial Sequence: Synthetic oligonucleotide
cuggcggugacuucuuccg

SEQ ID NO: 471748 - RNA, 19 nt, Artificial Sequence
  Description of Artificial Sequence: Synthetic oligonucleotide
ugacacggucucauugggg

SEQ ID NO: 471749 - RNA, 19 nt, Artificial Sequence
  Description of Artificial Sequence: Synthetic oligonucleotide
uagaaggugucuucccgcc

SEQ ID NO: 471750 - RNA, 19 nt, Artificial Sequence
  Description of Artificial Sequence: Synthetic oligonucleotide
gauagguagagggucccag

SEQ ID NO: 471751 - RNA, 19 nt, Artificial Sequence
  Description of Artificial Sequence: Synthetic oligonucleotide
cucggagaacuccagcagg

SEQ ID NO: 471752 - RNA, 19 nt, Artificial Sequence
  Description of Artificial Sequence: Synthetic oligonucleotide
cucuccuauaaaagccugg

SEQ ID NO: 471753 - RNA, 19 nt, Artificial Sequence
  Description of Artificial Sequence: Synthetic oligonucleotide
ucccauuaagugcuggauc

SEQ ID NO: 471754 - RNA, 19 nt, Artificial Sequence
  Description of Artificial Sequence: Synthetic oligonucleotide
auaucugaggggucaucag

SEQ ID NO: 471755 - RNA, 19 nt, Artificial Sequence
  Description of Artificial Sequence: Synthetic oligonucleotide
ugguugucugccagcacag

SEQ ID NO: 471756 - RNA, 19 nt, Artificial Sequence
  Description of Artificial Sequence: Synthetic oligonucleotide
cucacuaaugcucacaggu

SEQ ID NO: 471757 - RNA, 19 nt, Artificial Sequence
  Description of Artificial Sequence: Synthetic oligonucleotide
caaauggggaugcuggauc

SEQ ID NO: 471758 - RNA, 19 nt, Artificial Sequence
  Description of Artificial Sequence: Synthetic oligonucleotide
ggagacaacauagaaggug

SEQ ID NO: 471759 - RNA, 19 nt, Artificial Sequence
  Description of Artificial Sequence: Synthetic oligonucleotide
ucggaaguugacagaagaa

SEQ ID NO: 471760 - RNA, 19 nt, Artificial Sequence
  Description of Artificial Sequence: Synthetic oligonucleotide
agacaacuuuccuguuccc

SEQ ID NO: 471761 - RNA, 19 nt, Artificial Sequence
  Description of Artificial Sequence: Synthetic oligonucleotide
aucgucucccagcaggcag

SEQ ID NO: 471762 - RNA, 19 nt, Artificial Sequence
  Description of Artificial Sequence: Synthetic oligonucleotide
ugacuucuuccguagcuga

SEQ ID NO: 471763 - RNA, 19 nt, Artificial Sequence
  Description of Artificial Sequence: Synthetic oligonucleotide
cugcgaacggccugggugg

SEQ ID NO: 471764 - RNA, 19 nt, Artificial Sequence
  Description of Artificial Sequence: Synthetic oligonucleotide
agaacccacggugauuugg

SEQ ID NO: 471765 - RNA, 19 nt, Artificial Sequence
  Description of Artificial Sequence: Synthetic oligonucleotide
cugaggaacuaacagguga

SEQ ID NO: 471766 - RNA, 19 nt, Artificial Sequence
  Description of Artificial Sequence: Synthetic oligonucleotide
accaguucuaagccaacgu

SEQ ID NO: 471767 - RNA, 19 nt, Artificial Sequence
  Description of Artificial Sequence: Synthetic oligonucleotide
uuggaccguuucaaauggg

SEQ ID NO: 471768 - RNA, 19 nt, Artificial Sequence
  Description of Artificial Sequence: Synthetic oligonucleotide
ucuaagccaacgugagcug

SEQ ID NO: 471769 - RNA, 19 nt, Artificial Sequence
  Description of Artificial Sequence: Synthetic oligonucleotide
  modified_base (6)..(6): a, c, u, g, unknown or other
acuccnggaaccuggcuga

SEQ ID NO: 471770 - RNA, 19 nt, Artificial Sequence
  Description of Artificial Sequence: Synthetic oligonucleotide
uccuccgucgaccucucug

SEQ ID NO: 471771 - RNA, 19 nt, Artificial Sequence
  Description of Artificial Sequence: Synthetic oligonucleotide
  modified_base (14)..(14): a, c, u, g, unknown or other
cugagggcucugcngaaag

SEQ ID NO: 471772 - RNA, 19 nt, Artificial Sequence
  Description of Artificial Sequence: Synthetic oligonucleotide
aagaugcgaugacucugag

SEQ ID NO: 471773 - RNA, 19 nt, Artificial Sequence
  Description of Artificial Sequence: Synthetic oligonucleotide
acucgaauagcaccuugga

SEQ ID NO: 471774 - RNA, 19 nt, Artificial Sequence
  Description of Artificial Sequence: Synthetic oligonucleotide
cacgcagcggaacagcggc

SEQ ID NO: 471775 - RNA, 19 nt, Artificial Sequence
  Description of Artificial Sequence: Synthetic oligonucleotide
gaguggaggugcuaaggac

SEQ ID NO: 471776 - RNA, 19 nt, Artificial Sequence
  Description of Artificial Sequence: Synthetic oligonucleotide
cauggcuggcaucaccagg

SEQ ID NO: 471777 - RNA, 19 nt, Artificial Sequence
  Description of Artificial Sequence: Synthetic oligonucleotide
  modified_base (13)..(13): a, c, u, g, unknown or other
cuccccuacuccnggaacc

SEQ ID NO: 471778 - RNA, 19 nt, Artificial Sequence
  Description of Artificial Sequence: Synthetic oligonucleotide
gagggguucaacaccauga

SEQ ID NO: 471779 - RNA, 19 nt, Artificial Sequence
  Description of Artificial Sequence: Synthetic oligonucleotide
guaaggagaggugagccac

SEQ ID NO: 471780 - RNA, 19 nt, Artificial Sequence
  Description of Artificial Sequence: Synthetic oligonucleotide
uauaaaagccuggcuggga

SEQ ID NO: 471781 - RNA, 19 nt, Artificial Sequence
  Description of Artificial Sequence: Synthetic oligonucleotide
caguucuaagccaacguga

SEQ ID NO: 471782 - RNA, 19 nt, Artificial Sequence
  Description of Artificial Sequence: Synthetic oligonucleotide
cuccucggccacuucaucc

SEQ ID NO: 471783 - RNA, 19 nt, Artificial Sequence
  Description of Artificial Sequence: Synthetic oligonucleotide
guagcugagacuucugucu

SEQ ID NO: 471784 - RNA, 19 nt, Artificial Sequence
  Description of Artificial Sequence: Synthetic oligonucleotide
aggugcuaaggacuccauc

SEQ ID NO: 471785 - RNA, 19 nt, Artificial Sequence
  Description of Artificial Sequence: Synthetic oligonucleotide
gagaggacggcucagacuu

SEQ ID NO: 471786 - RNA, 19 nt, Artificial Sequence
  Description of Artificial Sequence: Synthetic oligonucleotide
ugaugugaaucacccuggu

SEQ ID NO: 471787 - RNA, 19 nt, Artificial Sequence
  Description of Artificial Sequence: Synthetic oligonucleotide
cugcugacgcuucagcagc

SEQ ID NO: 471788 - RNA, 19 nt, Artificial Sequence
  Description of Artificial Sequence: Synthetic oligonucleotide
cuucuuccguagcugagac

SEQ ID NO: 471789 - RNA, 19 nt, Artificial Sequence
  Description of Artificial Sequence: Synthetic oligonucleotide
ugauuuggaccguuucaaa

SEQ ID NO: 471790 - RNA, 19 nt, Artificial Sequence
  Description of Artificial Sequence: Synthetic oligonucleotide
cuaaggacuccaucuucac

SEQ ID NO: 471791 - RNA, 19 nt, Artificial Sequence
  Description of Artificial Sequence: Synthetic oligonucleotide
aggguugcugucaaacggg

SEQ ID NO: 471792 - RNA, 19 nt, Artificial Sequence
  Description of Artificial Sequence: Synthetic oligonucleotide
aacgggacauccugcucca

SEQ ID NO: 471793 - RNA, 19 nt, Artificial Sequence
  Description of Artificial Sequence: Synthetic oligonucleotide
cuucacacugaggaccucc

SEQ ID NO: 471794 - RNA, 19 nt, Artificial Sequence
  Description of Artificial Sequence: Synthetic oligonucleotide
cugacacggucucauuggg

SEQ ID NO: 471795 - RNA, 19 nt, Artificial Sequence
  Description of Artificial Sequence: Synthetic oligonucleotide
gagccacccacccuacucc

SEQ ID NO: 471796 - RNA, 19 nt, Artificial Sequence
  Description of Artificial Sequence: Synthetic oligonucleotide
  modified_base (3)..(3): a, c, u, g, unknown or other
ccnggaaccuggcugaggg

SEQ ID NO: 471797 - RNA, 19 nt, Artificial Sequence
  Description of Artificial Sequence: Synthetic oligonucleotide
uucuaccuuggucuggaua

SEQ ID NO: 471798 - RNA, 19 nt, Artificial Sequence
  Description of Artificial Sequence: Synthetic oligonucleotide
cuggaucccauacacccug

SEQ ID NO: 471799 - RNA, 19 nt, Artificial Sequence
  Description of Artificial Sequence: Synthetic oligonucleotide
gauuuggaccguuucaaau

SEQ ID NO: 471800 - RNA, 19 nt, Artificial Sequence
  Description of Artificial Sequence: Synthetic oligonucleotide
agguggcucacuaaugcuc

SEQ ID NO: 471801 - RNA, 19 nt, Artificial Sequence
  Description of Artificial Sequence: Synthetic oligonucleotide
gaaggaagaccaugaugca

SEQ ID NO: 471802 - RNA, 19 nt, Artificial Sequence
  Description of Artificial Sequence: Synthetic oligonucleotide
gccaacgugagcugcagag

SEQ ID NO: 471803 - RNA, 19 nt, Artificial Sequence
  Description of Artificial Sequence: Synthetic oligonucleotide
ggagcuuucccugaggaac

SEQ ID NO: 471804 - RNA, 19 nt, Artificial Sequence
  Description of Artificial Sequence: Synthetic oligonucleotide
agagguaaggagaggugag

SEQ ID NO: 471805 - RNA, 19 nt, Artificial Sequence
  Description of Artificial Sequence: Synthetic oligonucleotide
aaggacaguagugcuggga

SEQ ID NO: 471806 - RNA, 19 nt, Artificial Sequence
  Description of Artificial Sequence: Synthetic oligonucleotide
ggaguucccaggcagagga

SEQ ID NO: 471807 - RNA, 19 nt, Artificial Sequence
  Description of Artificial Sequence: Synthetic oligonucleotide
agacuucaccugaagaucu

SEQ ID NO: 471808 - RNA, 19 nt, Artificial Sequence
  Description of Artificial Sequence: Synthetic oligonucleotide
cacccagccacucagcuca

SEQ ID NO: 471809 - RNA, 19 nt, Artificial Sequence
  Description of Artificial Sequence: Synthetic oligonucleotide
cuaagccaacgugagcugc

SEQ ID NO: 471810 - RNA, 19 nt, Artificial Sequence
  Description of Artificial Sequence: Synthetic oligonucleotide
agcagcaaguggucccuuc

SEQ ID NO: 471811 - RNA, 19 nt, Artificial Sequence
  Description of Artificial Sequence: Synthetic oligonucleotide
ugggaggcccagcucuagg

SEQ ID NO: 471812 - RNA, 19 nt, Artificial Sequence
  Description of Artificial Sequence: Synthetic oligonucleotide
ggacugguuucacuggcgg

SEQ ID NO: 471813 - RNA, 19 nt, Artificial Sequence
  Description of Artificial Sequence: Synthetic oligonucleotide
cagaggguugcugucaaac

SEQ ID NO: 471814 - RNA, 19 nt, Artificial Sequence
  Description of Artificial Sequence: Synthetic oligonucleotide
cagacuucaccugaagauc

SEQ ID NO: 471815 - RNA, 19 nt, Artificial Sequence
  Description of Artificial Sequence: Synthetic oligonucleotide
gagguaaggagaggugagc

SEQ ID NO: 471816 - RNA, 19 nt, Artificial Sequence
  Description of Artificial Sequence: Synthetic oligonucleotide
ucgaccucucuggugacgc

SEQ ID NO: 471817 - RNA, 19 nt, Artificial Sequence
  Description of Artificial Sequence: Synthetic oligonucleotide
aucagcgacagaacccacg

SEQ ID NO: 471818 - RNA, 19 nt, Artificial Sequence
  Description of Artificial Sequence: Synthetic oligonucleotide
guucuaagccaacgugagc

SEQ ID NO: 471819 - RNA, 19 nt, Artificial Sequence
  Description of Artificial Sequence: Synthetic oligonucleotide
gaggcauccuccgucgacc

SEQ ID NO: 471820 - RNA, 19 nt, Artificial Sequence
  Description of Artificial Sequence: Synthetic oligonucleotide
agcaaguggucccuucgga

SEQ ID NO: 471821 - RNA, 19 nt, Artificial Sequence
  Description of Artificial Sequence: Synthetic oligonucleotide
aacgugagcugcagagguc

SEQ ID NO: 471822 - RNA, 19 nt, Artificial Sequence
  Description of Artificial Sequence: Synthetic oligonucleotide
agggaaggcugucagguuu

SEQ ID NO: 471823 - RNA, 19 nt, Artificial Sequence
  Description of Artificial Sequence: Synthetic oligonucleotide
ggaaggagacaacauagaa

SEQ ID NO: 471824 - RNA, 19 nt, Artificial Sequence
  Description of Artificial Sequence: Synthetic oligonucleotide
ccugacacggucucauugg

SEQ ID NO: 471825 - RNA, 19 nt, Artificial Sequence
  Description of Artificial Sequence: Synthetic oligonucleotide
ggugauuuggaccguuuca

SEQ ID NO: 471826 - RNA, 19 nt, Artificial Sequence
  Description of Artificial Sequence: Synthetic oligonucleotide
uagcaccacaggcuugggc

SEQ ID NO: 471827 - RNA, 19 nt, Artificial Sequence
  Description of Artificial Sequence: Synthetic oligonucleotide
  modified_base (10)..(10): a, c, u, g, unknown or other
cccuacuccnggaaccugg

SEQ ID NO: 471828 - RNA, 19 nt, Artificial Sequence
  Description of Artificial Sequence: Synthetic oligonucleotide
gcugcugacgcuucagcag

SEQ ID NO: 471829 - RNA, 19 nt, Artificial Sequence
  Description of Artificial Sequence: Synthetic oligonucleotide
uccucccugcucauccgag

SEQ ID NO: 471830 - RNA, 19 nt, Artificial Sequence
  Description of Artificial Sequence: Synthetic oligonucleotide
gaaguugacagaagaagau

SEQ ID NO: 471831 - RNA, 19 nt, Artificial Sequence
  Description of Artificial Sequence: Synthetic oligonucleotide
ccuuggaugaggacaacug

SEQ ID NO: 471832 - RNA, 19 nt, Artificial Sequence
  Description of Artificial Sequence: Synthetic oligonucleotide
ccugggucgagcuuccucc

SEQ ID NO: 471833 - RNA, 19 nt, Artificial Sequence
  Description of Artificial Sequence: Synthetic oligonucleotide
gaggaacuaacaggugaug

SEQ ID NO: 471834 - RNA, 19 nt, Artificial Sequence
  Description of Artificial Sequence: Synthetic oligonucleotide
  modified_base (4)..(4): a, c, u, g, unknown or other
uccnggaaccuggcugagg

SEQ ID NO: 471835 - RNA, 19 nt, Artificial Sequence
  Description of Artificial Sequence: Synthetic oligonucleotide
cacagggucccucucagga

SEQ ID NO: 471836 - RNA, 19 nt, Artificial Sequence
  Description of Artificial Sequence: Synthetic oligonucleotide
uuucgggccguggaacugc

SEQ ID NO: 471837 - RNA, 19 nt, Artificial Sequence
  Description of Artificial Sequence: Synthetic oligonucleotide
acugcgggcugcuggacga

SEQ ID NO: 471838 - RNA, 19 nt, Artificial Sequence
  Description of Artificial Sequence: Synthetic oligonucleotide
agggacaaugcucuuccuu

SEQ ID NO: 471839 - RNA, 19 nt, Artificial Sequence
  Description of Artificial Sequence: Synthetic oligonucleotide
caguggaggcuuccgagug

SEQ ID NO: 471840 - RNA, 19 nt, Artificial Sequence
  Description of Artificial Sequence: Synthetic oligonucleotide
aagccaacgugagcugcag

SEQ ID NO: 471841 - RNA, 19 nt, Artificial Sequence
  Description of Artificial Sequence: Synthetic oligonucleotide
gaccguuucaaauggggau

SEQ ID NO: 471842 - RNA, 19 nt, Artificial Sequence
  Description of Artificial Sequence: Synthetic oligonucleotide
uugcugucaaacgggacau

SEQ ID NO: 471843 - RNA, 19 nt, Artificial Sequence
  Description of Artificial Sequence: Synthetic oligonucleotide
  modified_base (5)..(5): a, c, u, g, unknown or other
cugcngaaagaugcgauga

SEQ ID NO: 471844 - RNA, 19 nt, Artificial Sequence
  Description of Artificial Sequence: Synthetic oligonucleotide
gacgucuuguuguggcuga

SEQ ID NO: 471845 - RNA, 19 nt, Artificial Sequence
  Description of Artificial Sequence: Synthetic oligonucleotide
gacuccgugcgguugaagu

SEQ ID NO: 471846 - RNA, 19 nt, Artificial Sequence
  Description of Artificial Sequence: Synthetic oligonucleotide
cucuggugacgcugcaccc

SEQ ID NO: 471847 - RNA, 19 nt, Artificial Sequence
  Description of Artificial Sequence: Synthetic oligonucleotide
agacaacauagaagguguc

SEQ ID NO: 471848 - RNA, 19 nt, Artificial Sequence
  Description of Artificial Sequence: Synthetic oligonucleotide
ccaguucuaagccaacgug

SEQ ID NO: 471849 - RNA, 19 nt, Artificial Sequence
  Description of Artificial Sequence: Synthetic oligonucleotide
cuuggccccgccagggaag

SEQ ID NO: 471850 - RNA, 19 nt, Artificial Sequence
  Description of Artificial Sequence: Synthetic oligonucleotide
agaagauggagaggcgggu

SEQ ID NO: 471851 - RNA, 19 nt, Artificial Sequence
  Description of Artificial Sequence: Synthetic oligonucleotide
cuugaucauucgcugcuga

SEQ ID NO: 471852 - RNA, 19 nt, Artificial Sequence
  Description of Artificial Sequence: Synthetic oligonucleotide
acccugcuuuccuuuacca

SEQ ID NO: 471853 - RNA, 19 nt, Artificial Sequence
  Description of Artificial Sequence: Synthetic oligonucleotide
ucgagcuuccucccugcuc

SEQ ID NO: 471854 - RNA, 19 nt, Artificial Sequence
  Description of Artificial Sequence: Synthetic oligonucleotide
augcgaugacucugagcuc

SEQ ID NO: 471855 - RNA, 19 nt, Artificial Sequence
  Description of Artificial Sequence: Synthetic oligonucleotide
uccgugcgguugaaguggc

SEQ ID NO: 471856 - RNA, 19 nt, Artificial Sequence
  Description of Artificial Sequence: Synthetic oligonucleotide
agauggggacuccgucuuc

SEQ ID NO: 471857 - RNA, 19 nt, Artificial Sequence
  Description of Artificial Sequence: Synthetic oligonucleotide
agcugagacuucugucucu

SEQ ID NO: 471858 - RNA, 19 nt, Artificial Sequence
  Description of Artificial Sequence: Synthetic oligonucleotide
gauggggacuccgucuuca

SEQ ID NO: 471859 - RNA, 19 nt, Artificial Sequence
  Description of Artificial Sequence: Synthetic oligonucleotide
uggagcuuucccugaggaa

SEQ ID NO: 471860 - RNA, 19 nt, Artificial Sequence
  Description of Artificial Sequence: Synthetic oligonucleotide
agcuccaagugaaggagcu

SEQ ID NO: 471861 - RNA, 19 nt, Artificial Sequence
  Description of Artificial Sequence: Synthetic oligonucleotide
ggugguugagguagagggg

SEQ ID NO: 471862 - RNA, 19 nt, Artificial Sequence
  Description of Artificial Sequence: Synthetic oligonucleotide
uccugggucgagcuuccuc

SEQ ID NO: 471863 - RNA, 19 nt, Artificial Sequence
  Description of Artificial Sequence: Synthetic oligonucleotide
aggucaggggugguugagg

SEQ ID NO: 471864 - RNA, 19 nt, Artificial Sequence
  Description of Artificial Sequence: Synthetic oligonucleotide
gaccucucuggugacgcug

SEQ ID NO: 471865 - RNA, 19 nt, Artificial Sequence
  Description of Artificial Sequence: Synthetic oligonucleotide
ggaggucuugaugugaauc

SEQ ID NO: 471866 - RNA, 19 nt, Artificial Sequence
  Description of Artificial Sequence: Synthetic oligonucleotide
aggcugucagguuucugaa

SEQ ID NO: 471867 - RNA, 19 nt, Artificial Sequence
  Description of Artificial Sequence: Synthetic oligonucleotide
aggagcccuauauucugaa

SEQ ID NO: 471868 - RNA, 19 nt, Artificial Sequence
  Description of Artificial Sequence: Synthetic oligonucleotide
cuucccgccggucgauugc

SEQ ID NO: 471869 - RNA, 19 nt, Artificial Sequence
  Description of Artificial Sequence: Synthetic oligonucleotide
auacacccugcuuuccuuu

SEQ ID NO: 471870 - RNA, 19 nt, Artificial Sequence
  Description of Artificial Sequence: Synthetic oligonucleotide
caggaguucccaggcagag

SEQ ID NO: 471871 - RNA, 19 nt, Artificial Sequence
  Description of Artificial Sequence: Synthetic oligonucleotide
cacugcgggcugcuggacg

SEQ ID NO: 471872 - RNA, 19 nt, Artificial Sequence
  Description of Artificial Sequence: Synthetic oligonucleotide
acgcuucagcagcuuugcg

SEQ ID NO: 471873 - RNA, 19 nt, Artificial Sequence
  Description of Artificial Sequence: Synthetic oligonucleotide
uucuuccguagcugagacu

SEQ ID NO: 471874 - RNA, 19 nt, Artificial Sequence
  Description of Artificial Sequence: Synthetic oligonucleotide
aggaguucccaggcagagg

SEQ ID NO: 471875 - RNA, 19 nt, Artificial Sequence
  Description of Artificial Sequence: Synthetic oligonucleotide
gcucggagaacuccagcag

SEQ ID NO: 471876 - RNA, 19 nt, Artificial Sequence
  Description of Artificial Sequence: Synthetic oligonucleotide
gcucacagguccaaaguug

SEQ ID NO: 471877 - RNA, 19 nt, Artificial Sequence
  Description of Artificial Sequence: Synthetic oligonucleotide
gcaucuagaaacucaggcu

SEQ ID NO: 471878 - RNA, 19 nt, Artificial Sequence
  Description of Artificial Sequence: Synthetic oligonucleotide
uuagcaccacaggcuuggg

SEQ ID NO: 471879 - RNA, 19 nt, Artificial Sequence
  Description of Artificial Sequence: Synthetic oligonucleotide
caggcuggacucgaauagc

SEQ ID NO: 471880 - RNA, 19 nt, Artificial Sequence
  Description of Artificial Sequence: Synthetic oligonucleotide
cugggucgagcuuccuccc

SEQ ID NO: 471881 - RNA, 19 nt, Artificial Sequence
  Description of Artificial Sequence: Synthetic oligonucleotide
agggacuccgugcgguuga

SEQ ID NO: 471882 - RNA, 19 nt, Artificial Sequence
  Description of Artificial Sequence: Synthetic oligonucleotide
cugcucggagaacuccagc

SEQ ID NO: 471883 - RNA, 19 nt, Artificial Sequence
  Description of Artificial Sequence: Synthetic oligonucleotide
auuaagugcuggaucccau

SEQ ID NO: 471884 - RNA, 19 nt, Artificial Sequence
  Description of Artificial Sequence: Synthetic oligonucleotide
gaauagcaccuuggaugag

SEQ ID NO: 471885 - RNA, 19 nt, Artificial Sequence
  Description of Artificial Sequence: Synthetic oligonucleotide
  modified_base (2)..(2): a, c, u, g, unknown or other
cnggaaccuggcugagggc

SEQ ID NO: 471886 - RNA, 19 nt, Artificial Sequence
  Description of Artificial Sequence: Synthetic oligonucleotide
uuggccccgccagggaagg

SEQ ID NO: 471887 - RNA, 19 nt, Artificial Sequence
  Description of Artificial Sequence: Synthetic oligonucleotide
aucauucgcugcugacgcu

SEQ ID NO: 471888 - RNA, 19 nt, Artificial Sequence
  Description of Artificial Sequence: Synthetic oligonucleotide
ggagggguucaacaccaug

SEQ ID NO: 471889 - RNA, 19 nt, Artificial Sequence
  Description of Artificial Sequence: Synthetic oligonucleotide
cugcagaggucaggggugg

SEQ ID NO: 471890 - RNA, 19 nt, Artificial Sequence
  Description of Artificial Sequence: Synthetic oligonucleotide
agcuuugcguccacuucag

SEQ ID NO: 471891 - RNA, 19 nt, Artificial Sequence
  Description of Artificial Sequence: Synthetic oligonucleotide
gccugacacggucucauug

SEQ ID NO: 471892 - RNA, 19 nt, Artificial Sequence
  Description of Artificial Sequence: Synthetic oligonucleotide
ccuacucccauuaagugcu

SEQ ID NO: 471893 - RNA, 19 nt, Artificial Sequence
  Description of Artificial Sequence: Synthetic oligonucleotide
ggucccuucggaaggagac

SEQ ID NO: 471894 - RNA, 19 nt, Artificial Sequence
  Description of Artificial Sequence: Synthetic oligonucleotide
ggugaugggcccaugcuga

SEQ ID NO: 471895 - RNA, 19 nt, Artificial Sequence
  Description of Artificial Sequence: Synthetic oligonucleotide
  modified_base (9)..(9): a, c, u, g, unknown or other
ggcucugcngaaagaugcg

SEQ ID NO: 471896 - RNA, 19 nt, Artificial Sequence
  Description of Artificial Sequence: Synthetic oligonucleotide
gcuuuccuuuaccaauuac

SEQ ID NO: 471897 - RNA, 19 nt, Artificial Sequence
  Description of Artificial Sequence: Synthetic oligonucleotide
guauugccugggguugggg

SEQ ID NO: 471898 - RNA, 19 nt, Artificial Sequence
  Description of Artificial Sequence: Synthetic oligonucleotide
gaggacggcucagacuuca

SEQ ID NO: 471899 - RNA, 19 nt, Artificial Sequence
  Description of Artificial Sequence: Synthetic oligonucleotide
gcccuauauucugaagagg

SEQ ID NO: 471900 - RNA, 19 nt, Artificial Sequence
  Description of Artificial Sequence: Synthetic oligonucleotide
ggucgauugcaucuagaaa

SEQ ID NO: 471901 - RNA, 19 nt, Artificial Sequence
  Description of Artificial Sequence: Synthetic oligonucleotide
cauggagaggacggcucag

SEQ ID NO: 471902 - RNA, 19 nt, Artificial Sequence
  Description of Artificial Sequence: Synthetic oligonucleotide
aggcuggacucgaauagca

SEQ ID NO: 471903 - RNA, 19 nt, Artificial Sequence
  Description of Artificial Sequence: Synthetic oligonucleotide
uucgggccguggaacugca

SEQ ID NO: 471904 - RNA, 19 nt, Artificial Sequence
  Description of Artificial Sequence: Synthetic oligonucleotide
  modified_base (18)..(18): a, c, u, g, unknown or other
aggaccuccccuacuccng

SEQ ID NO: 471905 - RNA, 19 nt, Artificial Sequence
  Description of Artificial Sequence: Synthetic oligonucleotide
caacgugagcugcagaggu

SEQ ID NO: 471906 - RNA, 19 nt, Artificial Sequence
  Description of Artificial Sequence: Synthetic oligonucleotide
ugggucgagcuuccucccu

SEQ ID NO: 471907 - RNA, 19 nt, Artificial Sequence
  Description of Artificial Sequence: Synthetic oligonucleotide
guggcggcagucagaggcg

SEQ ID NO: 471908 - RNA, 19 nt, Artificial Sequence
  Description of Artificial Sequence: Synthetic oligonucleotide
ggacucgaauagcaccuug

SEQ ID NO: 471909 - RNA, 19 nt, Artificial Sequence
  Description of Artificial Sequence: Synthetic oligonucleotide
gcaagccucagggacuccg

SEQ ID NO: 471910 - RNA, 19 nt, Artificial Sequence
  Description of Artificial Sequence: Synthetic oligonucleotide
cgaauagcaccuuggauga

SEQ ID NO: 471911 - RNA, 19 nt, Artificial Sequence
  Description of Artificial Sequence: Synthetic oligonucleotide
  modified_base (17)..(17): a, c, u, g, unknown or other
ggaccuccccuacuccngg

SEQ ID NO: 471912 - RNA, 19 nt, Artificial Sequence
  Description of Artificial Sequence: Synthetic oligonucleotide
uggcggugacuucuuccgu

SEQ ID NO: 471913 - RNA, 19 nt, Artificial Sequence
  Description of Artificial Sequence: Synthetic oligonucleotide
  modified_base (7)..(7): a, c, u, g, unknown or other
cucugcngaaagaugcgau

SEQ ID NO: 471914 - RNA, 19 nt, Artificial Sequence
  Description of Artificial Sequence: Synthetic oligonucleotide
gagucuggggaggccucgg

SEQ ID NO: 471915 - RNA, 19 nt, Artificial Sequence
  Description of Artificial Sequence: Synthetic oligonucleotide
gaucugggaaggauaggua

SEQ ID NO: 471916 - RNA, 19 nt, Artificial Sequence
  Description of Artificial Sequence: Synthetic oligonucleotide
gcggugacuucuuccguag

SEQ ID NO: 471917 - RNA, 19 nt, Artificial Sequence
  Description of Artificial Sequence: Synthetic oligonucleotide
gccccgggcagcuuucugg

SEQ ID NO: 471918 - RNA, 19 nt, Artificial Sequence
  Description of Artificial Sequence: Synthetic oligonucleotide
  modified_base (9)..(9): a, c, u, g, unknown or other
ccuacuccnggaaccuggc

SEQ ID NO: 471919 - RNA, 19 nt, Artificial Sequence
  Description of Artificial Sequence: Synthetic oligonucleotide
ugguuucacuggcggugac

SEQ ID NO: 471920 - RNA, 19 nt, Artificial Sequence
  Description of Artificial Sequence: Synthetic oligonucleotide
ccgggcagcuuucuggagg

SEQ ID NO: 471921 - RNA, 19 nt, Artificial Sequence
  Description of Artificial Sequence: Synthetic oligonucleotide
ugcgggcugcuggacgagg

SEQ ID NO: 471922 - RNA, 19 nt, Artificial Sequence
  Description of Artificial Sequence: Synthetic oligonucleotide
gcagaguggaggugcuaag

SEQ ID NO: 471923 - RNA, 19 nt, Artificial Sequence
  Description of Artificial Sequence: Synthetic oligonucleotide
uggaggucuugaugugaau

SEQ ID NO: 471924 - RNA, 19 nt, Artificial Sequence
  Description of Artificial Sequence: Synthetic oligonucleotide
gcgaggaagagcuggucca

SEQ ID NO: 471925 - RNA, 19 nt, Artificial Sequence
  Description of Artificial Sequence: Synthetic oligonucleotide
gcaccugaacugugguuag

SEQ ID NO: 471926 - RNA, 19 nt, Artificial Sequence
  Description of Artificial Sequence: Synthetic oligonucleotide
gucgaccucucuggugacg

SEQ ID NO: 471927 - RNA, 19 nt, Artificial Sequence
  Description of Artificial Sequence: Synthetic oligonucleotide
ccacccuacucccauuaag

SEQ ID NO: 471928 - RNA, 19 nt, Artificial Sequence
  Description of Artificial Sequence: Synthetic oligonucleotide
cuccgggcucagcagguug

SEQ ID NO: 471929 - RNA, 19 nt, Artificial Sequence
  Description of Artificial Sequence: Synthetic oligonucleotide
cuuccguagcugagacuuc

SEQ ID NO: 471930 - RNA, 19 nt, Artificial Sequence
  Description of Artificial Sequence: Synthetic oligonucleotide
cuaacaggugaugggccca

SEQ ID NO: 471931 - RNA, 19 nt, Artificial Sequence
  Description of Artificial Sequence: Synthetic oligonucleotide
cuuucgggccguggaacug

SEQ ID NO: 471932 - RNA, 19 nt, Artificial Sequence
  Description of Artificial Sequence: Synthetic oligonucleotide
ccucuccuauaaaagccug

SEQ ID NO: 471933 - RNA, 19 nt, Artificial Sequence
  Description of Artificial Sequence: Synthetic oligonucleotide
ugcagacaacuuuccuguu

SEQ ID NO: 471934 - RNA, 19 nt, Artificial Sequence
  Description of Artificial Sequence: Synthetic oligonucleotide
cuacucccauuaagugcug

SEQ ID NO: 471935 - RNA, 19 nt, Artificial Sequence
  Description of Artificial Sequence: Synthetic oligonucleotide
uggcaccugaacugugguu

SEQ ID NO: 471936 - RNA, 19 nt, Artificial Sequence
  Description of Artificial Sequence: Synthetic oligonucleotide
ggacgucuuguuguggcug

SEQ ID NO: 471937 - RNA, 19 nt, Artificial Sequence
  Description of Artificial Sequence: Synthetic oligonucleotide
ggucccucucaggaggucc

SEQ ID NO: 471938 - RNA, 19 nt, Artificial Sequence
  Description of Artificial Sequence: Synthetic oligonucleotide
gagauggggacuccgucuu

SEQ ID NO: 471939 - RNA, 19 nt, Artificial Sequence
  Description of Artificial Sequence: Synthetic oligonucleotide
ggaucgucucccagcaggc

SEQ ID NO: 471940 - RNA, 19 nt, Artificial Sequence
  Description of Artificial Sequence: Synthetic oligonucleotide
ggcggguucuaccuugguc

SEQ ID NO: 471941 - RNA, 19 nt, Artificial Sequence
  Description of Artificial Sequence: Synthetic oligonucleotide
agccaacgugagcugcaga

SEQ ID NO: 471942 - RNA, 19 nt, Artificial Sequence
  Description of Artificial Sequence: Synthetic oligonucleotide
  modified_base (15)..(15): a, c, u, g, unknown or other
accuccccuacuccnggaa

SEQ ID NO: 471943 - RNA, 19 nt, Artificial Sequence
  Description of Artificial Sequence: Synthetic oligonucleotide
ccaacgugagcugcagagg

SEQ ID NO: 471944 - RNA, 19 nt, Artificial Sequence
  Description of Artificial Sequence: Synthetic oligonucleotide
ggaccguuucaaaugggga

SEQ ID NO: 471945 - RNA, 19 nt, Artificial Sequence
  Description of Artificial Sequence: Synthetic oligonucleotide
gaucccauacacccugcuu

SEQ ID NO: 471946 - RNA, 19 nt, Artificial Sequence
  Description of Artificial Sequence: Synthetic oligonucleotide
ggucgagcuuccucccugc

SEQ ID NO: 471947 - RNA, 19 nt, Artificial Sequence
  Description of Artificial Sequence: Synthetic oligonucleotide
uucccgccggucgauugca

SEQ ID NO: 471948 - RNA, 19 nt, Artificial Sequence
  Description of Artificial Sequence: Synthetic oligonucleotide
gggucgagcuuccucccug

SEQ ID NO: 471949 - RNA, 19 nt, Artificial Sequence
  Description of Artificial Sequence: Synthetic oligonucleotide
caccacaggcuugggcugc

SEQ ID NO: 471950 - RNA, 19 nt, Artificial Sequence
  Description of Artificial Sequence: Synthetic oligonucleotide
gcaaguggucccuucggaa

SEQ ID NO: 471951 - RNA, 19 nt, Artificial Sequence
  Description of Artificial Sequence: Synthetic oligonucleotide
cucgaauagcaccuuggau

SEQ ID NO: 471952 - RNA, 19 nt, Artificial Sequence
  Description of Artificial Sequence: Synthetic oligonucleotide
ccugaggaacuaacaggug

SEQ ID NO: 471953 - RNA, 19 nt, Artificial Sequence
  Description of Artificial Sequence: Synthetic oligonucleotide
agcuggccccugcucggag

SEQ ID NO: 471954 - RNA, 19 nt, Artificial Sequence
  Description of Artificial Sequence: Synthetic oligonucleotide
ggaacagcggcgccugcuc

SEQ ID NO: 471955 - RNA, 19 nt, Artificial Sequence
  Description of Artificial Sequence: Synthetic oligonucleotide
ggagaggcggguucuaccu

SEQ ID NO: 471956 - RNA, 19 nt, Artificial Sequence
  Description of Artificial Sequence: Synthetic oligonucleotide
gaacugugguuagcaccac

SEQ ID NO: 471957 - RNA, 19 nt, Artificial Sequence
  Description of Artificial Sequence: Synthetic oligonucleotide
uggagggguucaacaccau

SEQ ID NO: 471958 - RNA, 19 nt, Artificial Sequence
  Description of Artificial Sequence: Synthetic oligonucleotide
aucccacaggaggcacccc

SEQ ID NO: 471959 - RNA, 19 nt, Artificial Sequence
  Description of Artificial Sequence: Synthetic oligonucleotide
agcaagccucagggacucc

SEQ ID NO: 471960 - RNA, 19 nt, Artificial Sequence
  Description of Artificial Sequence: Synthetic oligonucleotide
ccauuaagugcuggauccc

SEQ ID NO: 471961 - RNA, 19 nt, Artificial Sequence
  Description of Artificial Sequence: Synthetic oligonucleotide
  modified_base (14)..(14): a, c, u, g, unknown or other
ccuccccuacuccnggaac

SEQ ID NO: 471962 - RNA, 19 nt, Artificial Sequence
  Description of Artificial Sequence: Synthetic oligonucleotide
ggacuccgucuucacuucc

SEQ ID NO: 471963 - RNA, 19 nt, Artificial Sequence
  Description of Artificial Sequence: Synthetic oligonucleotide
cuaaugcucacagguccaa

SEQ ID NO: 471964 - RNA, 19 nt, Artificial Sequence
  Description of Artificial Sequence: Synthetic oligonucleotide
cuccuauaaaagccuggcu

SEQ ID NO: 471965 - RNA, 19 nt, Artificial Sequence
  Description of Artificial Sequence: Synthetic oligonucleotide
ggugucuccugggucgagc

SEQ ID NO: 471966 - RNA, 19 nt, Artificial Sequence
  Description of Artificial Sequence: Synthetic oligonucleotide
gcggcagucagaggcgagg

SEQ ID NO: 471967 - RNA, 19 nt, Artificial Sequence
  Description of Artificial Sequence: Synthetic oligonucleotide
caggccgacucucuguucu

SEQ ID NO: 471968 - RNA, 19 nt, Artificial Sequence
  Description of Artificial Sequence: Synthetic oligonucleotide
cugguuucacuggcgguga

SEQ ID NO: 471969 - RNA, 19 nt, Artificial Sequence
  Description of Artificial Sequence: Synthetic oligonucleotide
cagaacccacggugauuug

SEQ ID NO: 471970 - RNA, 19 nt, Artificial Sequence
  Description of Artificial Sequence: Synthetic oligonucleotide
ccacgcagcggaacagcgg

SEQ ID NO: 471971 - RNA, 19 nt, Artificial Sequence
  Description of Artificial Sequence: Synthetic oligonucleotide
gcauggagaggacggcuca

SEQ ID NO: 471972 - RNA, 19 nt, Artificial Sequence
  Description of Artificial Sequence: Synthetic oligonucleotide
agaggacggcucagacuuc

SEQ ID NO: 471973 - RNA, 19 nt, Artificial Sequence
  Description of Artificial Sequence: Synthetic oligonucleotide
cuccgucuucacuuccaga

SEQ ID NO: 471974 - RNA, 19 nt, Artificial Sequence
  Description of Artificial Sequence: Synthetic oligonucleotide
cugucaaacgggacauccu

SEQ ID NO: 471975 - RNA, 19 nt, Artificial Sequence
  Description of Artificial Sequence: Synthetic oligonucleotide
ugcgaacggccuggguggc

SEQ ID NO: 471976 - RNA, 19 nt, Artificial Sequence
  Description of Artificial Sequence: Synthetic oligonucleotide
  modified_base (3)..(3): a, c, u, g, unknown or other
gcngaaagaugcgaugacu

SEQ ID NO: 471977 - RNA, 19 nt, Artificial Sequence
  Description of Artificial Sequence: Synthetic oligonucleotide
ccgucgaccucucugguga

SEQ ID NO: 471978 - RNA, 19 nt, Artificial Sequence
  Description of Artificial Sequence: Synthetic oligonucleotide
uggacucgaauagcaccuu

SEQ ID NO: 471979 - RNA, 19 nt, Artificial Sequence
  Description of Artificial Sequence: Synthetic oligonucleotide
ccuauauucugaagaggua

SEQ ID NO: 471980 - RNA, 19 nt, Artificial Sequence
  Description of Artificial Sequence: Synthetic oligonucleotide
cucagagaaagaggggccu

SEQ ID NO: 471981 - RNA, 19 nt, Artificial Sequence
  Description of Artificial Sequence: Synthetic oligonucleotide
uucuuccggcgggacuggc

SEQ ID NO: 471982 - RNA, 19 nt, Artificial Sequence
  Description of Artificial Sequence: Synthetic oligonucleotide
cccagagcccagcuugagc

SEQ ID NO: 471983 - RNA, 19 nt, Artificial Sequence
  Description of Artificial Sequence: Synthetic oligonucleotide
cgggacauccugcuccacg

SEQ ID NO: 471984 - RNA, 19 nt, Artificial Sequence
  Description of Artificial Sequence: Synthetic oligonucleotide
  modified_base (5)..(5): a, c, u, g, unknown or other
cuccnggaaccuggcugag

SEQ ID NO: 471985 - RNA, 19 nt, Artificial Sequence
  Description of Artificial Sequence: Synthetic oligonucleotide
caucuugggucuggacguc

SEQ ID NO: 471986 - RNA, 19 nt, Artificial Sequence
  Description of Artificial Sequence: Synthetic oligonucleotide
cugugguauugccuggggu

SEQ ID NO: 471987 - RNA, 19 nt, Artificial Sequence
  Description of Artificial Sequence: Synthetic oligonucleotide
cugggaggcccagcucuag

SEQ ID NO: 471988 - RNA, 19 nt, Artificial Sequence
  Description of Artificial Sequence: Synthetic oligonucleotide
cauccuccgucgaccucuc

SEQ ID NO: 471989 - RNA, 19 nt, Artificial Sequence
  Description of Artificial Sequence: Synthetic oligonucleotide
ggagaggacggcucagacu

SEQ ID NO: 471990 - RNA, 19 nt, Artificial Sequence
  Description of Artificial Sequence: Synthetic oligonucleotide
gcgacagaacccacgguga

SEQ ID NO: 471991 - RNA, 19 nt, Artificial Sequence
  Description of Artificial Sequence: Synthetic oligonucleotide
ugucuucccgccggucgau

SEQ ID NO: 471992 - RNA, 19 nt, Artificial Sequence
  Description of Artificial Sequence: Synthetic oligonucleotide
gccggucgauugcaucuag

SEQ ID NO: 471993 - RNA, 19 nt, Artificial Sequence
  Description of Artificial Sequence: Synthetic oligonucleotide
ggcuggacucgaauagcac

SEQ ID NO: 471994 - RNA, 19 nt, Artificial Sequence
  Description of Artificial Sequence: Synthetic oligonucleotide
ggaagagcauggagaggac

SEQ ID NO: 471995 - RNA, 19 nt, Artificial Sequence
  Description of Artificial Sequence: Synthetic oligonucleotide
  modified_base (8)..(8): a, c, u, g, unknown or other
gcucugcngaaagaugcga

SEQ ID NO: 471996 - RNA, 19 nt, Artificial Sequence
  Description of Artificial Sequence: Synthetic oligonucleotide
gcgguugaaguggcggcag

SEQ ID NO: 471997 - RNA, 19 nt, Artificial Sequence
  Description of Artificial Sequence: Synthetic oligonucleotide
gugaggcauccuccgucga

SEQ ID NO: 471998 - RNA, 19 nt, Artificial Sequence
  Description of Artificial Sequence: Synthetic oligonucleotide
cagaaccuccucuccuaua

SEQ ID NO: 471999 - RNA, 19 nt, Artificial Sequence
  Description of Artificial Sequence: Synthetic oligonucleotide
aggccgacucucuguucuu

SEQ ID NO: 472000 - RNA, 19 nt, Artificial Sequence
  Description of Artificial Sequence: Synthetic oligonucleotide
aacggccuggguggcggua

SEQ ID NO: 472001 - RNA, 19 nt, Artificial Sequence
  Description of Artificial Sequence: Synthetic oligonucleotide
cucccauuaagugcuggau

SEQ ID NO: 472002 - RNA, 19 nt, Artificial Sequence
  Description of Artificial Sequence: Synthetic oligonucleotide
acggugauuuggaccguuu

SEQ ID NO: 472003 - RNA, 19 nt, Artificial Sequence
  Description of Artificial Sequence: Synthetic oligonucleotide
cggucgauugcaucuagaa

SEQ ID NO: 472004 - RNA, 19 nt, Artificial Sequence
  Description of Artificial Sequence: Synthetic oligonucleotide
aggugucuccugggucgag

SEQ ID NO: 472005 - RNA, 19 nt, Artificial Sequence
  Description of Artificial Sequence: Synthetic oligonucleotide
gggcagcauucucccugcg

SEQ ID NO: 472006 - RNA, 19 nt, Artificial Sequence
  Description of Artificial Sequence: Synthetic oligonucleotide
cagcggcgccugcuccucg

SEQ ID NO: 472007 - RNA, 19 nt, Artificial Sequence
  Description of Artificial Sequence: Synthetic oligonucleotide
ggauagguagaggguccca

SEQ ID NO: 472008 - RNA, 19 nt, Artificial Sequence
  Description of Artificial Sequence: Synthetic oligonucleotide
cgaacggccuggguggcgg

SEQ ID NO: 472009 - RNA, 19 nt, Artificial Sequence
  Description of Artificial Sequence: Synthetic oligonucleotide
gggaggcccagcucuaggu

SEQ ID NO: 472010 - RNA, 19 nt, Artificial Sequence
  Description of Artificial Sequence: Synthetic oligonucleotide
ccuggguggcgguagagcu

SEQ ID NO: 472011 - RNA, 19 nt, Artificial Sequence
  Description of Artificial Sequence: Synthetic oligonucleotide
gguggggacugguuucacu

SEQ ID NO: 472012 - RNA, 19 nt, Artificial Sequence
  Description of Artificial Sequence: Synthetic oligonucleotide
ucccgccggucgauugcau

SEQ ID NO: 472013 - RNA, 19 nt, Artificial Sequence
  Description of Artificial Sequence: Synthetic oligonucleotide
caccuuggaugaggacaac

SEQ ID NO: 472014 - RNA, 19 nt, Artificial Sequence
  Description of Artificial Sequence: Synthetic oligonucleotide
acgucuuguuguggcugau

SEQ ID NO: 472015 - RNA, 19 nt, Artificial Sequence
  Description of Artificial Sequence: Synthetic oligonucleotide
  modified_base (8)..(8): a, c, u, g, unknown or other
cuacuccnggaaccuggcu

SEQ ID NO: 472016 - RNA, 19 nt, Artificial Sequence
  Description of Artificial Sequence: Synthetic oligonucleotide
ccaagugaaggagcuggga

SEQ ID NO: 472017 - RNA, 19 nt, Artificial Sequence
  Description of Artificial Sequence: Synthetic oligonucleotide
cugggcccugugaggcauc

SEQ ID NO: 472018 - RNA, 19 nt, Artificial Sequence
  Description of Artificial Sequence: Synthetic oligonucleotide
auccuccgucgaccucucu

SEQ ID NO: 472019 - RNA, 19 nt, Artificial Sequence
  Description of Artificial Sequence: Synthetic oligonucleotide
gcccuucaggcuggacucg

SEQ ID NO: 472020 - RNA, 19 nt, Artificial Sequence
  Description of Artificial Sequence: Synthetic oligonucleotide
gggacaucuugggucugga

SEQ ID NO: 472021 - RNA, 19 nt, Artificial Sequence
  Description of Artificial Sequence: Synthetic oligonucleotide
cggguucuaccuuggucug

SEQ ID NO: 472022 - RNA, 19 nt, Artificial Sequence
  Description of Artificial Sequence: Synthetic oligonucleotide
gcgaugacucugagcucag

SEQ ID NO: 472023 - RNA, 19 nt, Artificial Sequence
  Description of Artificial Sequence: Synthetic oligonucleotide
cugcgggcugcuggacgag

SEQ ID NO: 472024 - RNA, 19 nt, Artificial Sequence
  Description of Artificial Sequence: Synthetic oligonucleotide
gucgagcuuccucccugcu

SEQ ID NO: 472025 - RNA, 19 nt, Artificial Sequence
  Description of Artificial Sequence: Synthetic oligonucleotide
ccgugcgguugaaguggcg

SEQ ID NO: 472026 - RNA, 19 nt, Artificial Sequence
  Description of Artificial Sequence: Synthetic oligonucleotide
gcguccacuucaggagggc

SEQ ID NO: 472027 - RNA, 19 nt, Artificial Sequence
  Description of Artificial Sequence: Synthetic oligonucleotide
ccgccggagggcagcauuc

SEQ ID NO: 472028 - RNA, 19 nt, Artificial Sequence
  Description of Artificial Sequence: Synthetic oligonucleotide
gucccucucaggagguccu

SEQ ID NO: 472029 - RNA, 19 nt, Artificial Sequence
  Description of Artificial Sequence: Synthetic oligonucleotide
ggcggcagucagaggcgag

SEQ ID NO: 472030 - RNA, 19 nt, Artificial Sequence
  Description of Artificial Sequence: Synthetic oligonucleotide
ccauacacccugcuuuccu

SEQ ID NO: 472031 - RNA, 19 nt, Artificial Sequence
  Description of Artificial Sequence: Synthetic oligonucleotide
ccggucgauugcaucuaga

SEQ ID NO: 472032 - RNA, 19 nt, Artificial Sequence
  Description of Artificial Sequence: Synthetic oligonucleotide
cggugacuucuuccguagc

SEQ ID NO: 472033 - RNA, 19 nt, Artificial Sequence
  Description of Artificial Sequence: Synthetic oligonucleotide
ccccgggcagcuuucugga

SEQ ID NO: 472034 - RNA, 19 nt, Artificial Sequence
  Description of Artificial Sequence: Synthetic oligonucleotide
gaacggccuggguggcggu

SEQ ID NO: 472035 - RNA, 19 nt, Artificial Sequence
  Description of Artificial Sequence: Synthetic oligonucleotide
guucuaccuuggucuggau

SEQ ID NO: 472036 - RNA, 19 nt, Artificial Sequence
  Description of Artificial Sequence: Synthetic oligonucleotide
ccugaagaucugggaagga

SEQ ID NO: 472037 - RNA, 19 nt, Artificial Sequence
  Description of Artificial Sequence: Synthetic oligonucleotide
uggccccgccagggaaggc

SEQ ID NO: 472038 - RNA, 19 nt, Artificial Sequence
  Description of Artificial Sequence: Synthetic oligonucleotide
cccggccugacacggucuc

SEQ ID NO: 472039 - RNA, 19 nt, Artificial Sequence
  Description of Artificial Sequence: Synthetic oligonucleotide
ggcaggccgacucucuguu

SEQ ID NO: 472040 - RNA, 19 nt, Artificial Sequence
  Description of Artificial Sequence: Synthetic oligonucleotide
ccgaguggcuggagcuuuc

SEQ ID NO: 472041 - RNA, 19 nt, Artificial Sequence
  Description of Artificial Sequence: Synthetic oligonucleotide
ccuuggccccgccagggaa

SEQ ID NO: 472042 - RNA, 19 nt, Artificial Sequence
  Description of Artificial Sequence: Synthetic oligonucleotide
cagcgacagaacccacggu

SEQ ID NO: 472043 - RNA, 19 nt, Artificial Sequence
  Description of Artificial Sequence: Synthetic oligonucleotide
cuccgucgaccucucuggu

SEQ ID NO: 472044 - RNA, 19 nt, Artificial Sequence
  Description of Artificial Sequence: Synthetic oligonucleotide
gccccgccagggaaggcug

SEQ ID NO: 472045 - RNA, 19 nt, Artificial Sequence
  Description of Artificial Sequence: Synthetic oligonucleotide
ccgaggagagaugggagcu

SEQ ID NO: 472046 - RNA, 19 nt, Artificial Sequence
  Description of Artificial Sequence: Synthetic oligonucleotide
ccccaaguucaaggaccag

SEQ ID NO: 472047 - RNA, 19 nt, Artificial Sequence
  Description of Artificial Sequence: Synthetic oligonucleotide
ggguggggacugguuucac

SEQ ID NO: 472048 - RNA, 19 nt, Artificial Sequence
  Description of Artificial Sequence: Synthetic oligonucleotide
gcucuagguggcaccugaa

SEQ ID NO: 472049 - RNA, 19 nt, Artificial Sequence
  Description of Artificial Sequence: Synthetic oligonucleotide
  modified_base (11)..(11): a, c, u, g, unknown or other
ccccuacuccnggaaccug

SEQ ID NO: 472050 - RNA, 19 nt, Artificial Sequence
  Description of Artificial Sequence: Synthetic oligonucleotide
cgucgaccucucuggugac

SEQ ID NO: 472051 - RNA, 19 nt, Artificial Sequence
  Description of Artificial Sequence: Synthetic oligonucleotide
ccguggaacugcaggggcu

SEQ ID NO: 472052 - RNA, 19 nt, Artificial Sequence
  Description of Artificial Sequence: Synthetic oligonucleotide
cggccacuucauccaggcc

SEQ ID NO: 472053 - RNA, 19 nt, Artificial Sequence
  Description of Artificial Sequence: Synthetic oligonucleotide
cacggugauuuggaccguu

SEQ ID NO: 472054 - RNA, 19 nt, Artificial Sequence
  Description of Artificial Sequence: Synthetic oligonucleotide
ccagaggguugcugucaaa

SEQ ID NO: 472055 - RNA, 19 nt, Artificial Sequence
  Description of Artificial Sequence: Synthetic oligonucleotide
ccucacacucgaucugcau

SEQ ID NO: 472056 - RNA, 19 nt, Artificial Sequence
  Description of Artificial Sequence: Synthetic oligonucleotide
gcgggacuggcaggccgac

SEQ ID NO: 472057 - RNA, 19 nt, Artificial Sequence
  Description of Artificial Sequence: Synthetic oligonucleotide
gccgccggagggcagcauu

SEQ ID NO: 472058 - RNA, 19 nt, Artificial Sequence
  Description of Artificial Sequence: Synthetic oligonucleotide
ccgccagggaaggcuguca

SEQ ID NO: 472059 - RNA, 19 nt, Artificial Sequence
  Description of Artificial Sequence: Synthetic oligonucleotide
gggcaccguggaggucuug

SEQ ID NO: 472060 - RNA, 19 nt, Artificial Sequence
  Description of Artificial Sequence: Synthetic oligonucleotide
gucuucccgccggucgauu

SEQ ID NO: 472061 - RNA, 19 nt, Artificial Sequence
  Description of Artificial Sequence: Synthetic oligonucleotide
cccaguccuccgggcucag

SEQ ID NO: 472062 - RNA, 19 nt, Artificial Sequence
  Description of Artificial Sequence: Synthetic oligonucleotide
gcugacgcuucagcagcuu

SEQ ID NO: 472063 - RNA, 19 nt, Artificial Sequence
  Description of Artificial Sequence: Synthetic oligonucleotide
ccggccugacacggucuca

SEQ ID NO: 472064 - RNA, 19 nt, Artificial Sequence
  Description of Artificial Sequence: Synthetic oligonucleotide
cgaccucucuggugacgcu

SEQ ID NO: 472065 - RNA, 19 nt, Artificial Sequence
  Description of Artificial Sequence: Synthetic oligonucleotide
gggcccugugaggcauccu

SEQ ID NO: 472066 - RNA, 19 nt, Artificial Sequence
  Description of Artificial Sequence: Synthetic oligonucleotide
cgccggucgauugcaucua

SEQ ID NO: 472067 - RNA, 19 nt, Artificial Sequence
  Description of Artificial Sequence: Synthetic oligonucleotide
ccccgccagggaaggcugu

SEQ ID NO: 472068 - RNA, 19 nt, Artificial Sequence
  Description of Artificial Sequence: Synthetic oligonucleotide
ccacggugauuuggaccgu

SEQ ID NO: 472069 - RNA, 19 nt, Artificial Sequence
  Description of Artificial Sequence: Synthetic oligonucleotide
ggggcaccguggaggucuu

SEQ ID NO: 472070 - RNA, 19 nt, Artificial Sequence
  Description of Artificial Sequence: Synthetic oligonucleotide
  modified_base (1)..(1): a, c, u, g, unknown or other
ngaaagaugcgaugacucu

SEQ ID NO: 472071 - RNA, 19 nt, Artificial Sequence
  Description of Artificial Sequence: Synthetic oligonucleotide
aaguauuaucaauuggucc

SEQ ID NO: 472072 - RNA, 19 nt, Artificial Sequence
  Description of Artificial Sequence: Synthetic oligonucleotide
aagaguguuaaucaagggg

SEQ ID NO: 472073 - RNA, 19 nt, Artificial Sequence
  Description of Artificial Sequence: Synthetic oligonucleotide
aauaacuaacuucucauug

SEQ ID NO: 472074 - RNA, 19 nt, Artificial Sequence
  Description of Artificial Sequence: Synthetic oligonucleotide
ucuaauacagacuguauag

SEQ ID NO: 472075 - RNA, 19 nt, Artificial Sequence
  Description of Artificial Sequence: Synthetic oligonucleotide
uuauaaaaugucuaggcug

SEQ ID NO: 472076 - RNA, 19 nt, Artificial Sequence
  Description of Artificial Sequence: Synthetic oligonucleotide
agcuuauacauucuaaugg

SEQ ID NO: 472077 - RNA, 19 nt, Artificial Sequence
  Description of Artificial Sequence: Synthetic oligonucleotide
auuguuaugaugaagagug

SEQ ID NO: 472078 - RNA, 19 nt, Artificial Sequence
  Description of Artificial Sequence: Synthetic oligonucleotide
ugaagaguguuaaucaagg

SEQ ID NO: 472079 - RNA, 19 nt, Artificial Sequence
  Description of Artificial Sequence: Synthetic oligonucleotide
aaaguucacauauguacac

SEQ ID NO: 472080 - RNA, 19 nt, Artificial Sequence
  Description of Artificial Sequence: Synthetic oligonucleotide
auaacuaacuucucauugc

SEQ ID NO: 472081 - RNA, 19 nt, Artificial Sequence
  Description of Artificial Sequence: Synthetic oligonucleotide
agugucuagacuuuucagc

SEQ ID NO: 472082 - RNA, 19 nt, Artificial Sequence
  Description of Artificial Sequence: Synthetic oligonucleotide
aaaucuaucucaauguauc

SEQ ID NO: 472083 - RNA, 19 nt, Artificial Sequence
  Description of Artificial Sequence: Synthetic oligonucleotide
acaguuguagacuucacgg

SEQ ID NO: 472084 - RNA, 19 nt, Artificial Sequence
  Description of Artificial Sequence: Synthetic oligonucleotide
ugaucuuuacaacagaagu

SEQ ID NO: 472085 - RNA, 19 nt, Artificial Sequence
  Description of Artificial Sequence: Synthetic oligonucleotide
uuagguucaauaaaaugug

SEQ ID NO: 472086 - RNA, 19 nt, Artificial Sequence
  Description of Artificial Sequence: Synthetic oligonucleotide
uguaagucuagcaaaugag

SEQ ID NO: 472087 - RNA, 19 nt, Artificial Sequence
  Description of Artificial Sequence: Synthetic oligonucleotide
uuugauaauacaauaugaa

SEQ ID NO: 472088 - RNA, 19 nt, Artificial Sequence
  Description of Artificial Sequence: Synthetic oligonucleotide
uucuaaucucuucacaagg

SEQ ID NO: 472089 - RNA, 19 nt, Artificial Sequence
  Description of Artificial Sequence: Synthetic oligonucleotide
uaacuuauaaauauuguua

SEQ ID NO: 472090 - RNA, 19 nt, Artificial Sequence
  Description of Artificial Sequence: Synthetic oligonucleotide
uguaguuuaaccuugucau

SEQ ID NO: 472091 - RNA, 19 nt, Artificial Sequence
  Description of Artificial Sequence: Synthetic oligonucleotide
uucuggaaaagucuaauca

SEQ ID NO: 472092 - RNA, 19 nt, Artificial Sequence
  Description of Artificial Sequence: Synthetic oligonucleotide
aacaguuguagacuucacg

SEQ ID NO: 472093 - RNA, 19 nt, Artificial Sequence
  Description of Artificial Sequence: Synthetic oligonucleotide
aauuccuugaucugcuguc

SEQ ID NO: 472094 - RNA, 19 nt, Artificial Sequence
  Description of Artificial Sequence: Synthetic oligonucleotide
uguauuagugucuagacuu

SEQ ID NO: 472095 - RNA, 19 nt, Artificial Sequence
  Description of Artificial Sequence: Synthetic oligonucleotide
agcuauuucaauaaaacag

SEQ ID NO: 472096 - RNA, 19 nt, Artificial Sequence
  Description of Artificial Sequence: Synthetic oligonucleotide
auuagguucaauaaaaugu

SEQ ID NO: 472097 - RNA, 19 nt, Artificial Sequence
  Description of Artificial Sequence: Synthetic oligonucleotide
ucuaauggaauaauggcaa

SEQ ID NO: 472098 - RNA, 19 nt, Artificial Sequence
  Description of Artificial Sequence: Synthetic oligonucleotide
uauagcacuacaauguuaa

SEQ ID NO: 472099 - RNA, 19 nt, Artificial Sequence
  Description of Artificial Sequence: Synthetic oligonucleotide
uccgaaaauauaaagaauu

SEQ ID NO: 472100 - RNA, 19 nt, Artificial Sequence
  Description of Artificial Sequence: Synthetic oligonucleotide
ugcguguccaccaagagca

SEQ ID NO: 472101 - RNA, 19 nt, Artificial Sequence
  Description of Artificial Sequence: Synthetic oligonucleotide
uuuaaccuugucauccucg

SEQ ID NO: 472102 - RNA, 19 nt, Artificial Sequence
  Description of Artificial Sequence: Synthetic oligonucleotide
gaugauucgaugcacagca

SEQ ID NO: 472103 - RNA, 19 nt, Artificial Sequence
  Description of Artificial Sequence: Synthetic oligonucleotide
acaugucuaauacagacug

SEQ ID NO: 472104 - RNA, 19 nt, Artificial Sequence
  Description of Artificial Sequence: Synthetic oligonucleotide
aaaguauuaucaauugguc

SEQ ID NO: 472105 - RNA, 19 nt, Artificial Sequence
  Description of Artificial Sequence: Synthetic oligonucleotide
ugguagagaauaccuaugg

SEQ ID NO: 472106 - RNA, 19 nt, Artificial Sequence
  Description of Artificial Sequence: Synthetic oligonucleotide
uaaaacuaccagaaaagcu

SEQ ID NO: 472107 - RNA, 19 nt, Artificial Sequence
  Description of Artificial Sequence: Synthetic oligonucleotide
auacaauugaucuuuacaa

SEQ ID NO: 472108 - RNA, 19 nt, Artificial Sequence
  Description of Artificial Sequence: Synthetic oligonucleotide
uauuucaauaaaacaguug

SEQ ID NO: 472109 - RNA, 19 nt, Artificial Sequence
  Description of Artificial Sequence: Synthetic oligonucleotide
acuuuauagcacuacaaug

SEQ ID NO: 472110 - RNA, 19 nt, Artificial Sequence
  Description of Artificial Sequence: Synthetic oligonucleotide
aggauuagcuagcuuauac

SEQ ID NO: 472111 - RNA, 19 nt, Artificial Sequence
  Description of Artificial Sequence: Synthetic oligonucleotide
uaacacuuaauucauggaa

SEQ ID NO: 472112 - RNA, 19 nt, Artificial Sequence
  Description of Artificial Sequence: Synthetic oligonucleotide
uacaguuaaacaguacugg

SEQ ID NO: 472113 - RNA, 19 nt, Artificial Sequence
  Description of Artificial Sequence: Synthetic oligonucleotide
gauccgaaaauauaaagaa

SEQ ID NO: 472114 - RNA, 19 nt, Artificial Sequence
  Description of Artificial Sequence: Synthetic oligonucleotide
ugaucauuuauacccaacu

SEQ ID NO: 472115 - RNA, 19 nt, Artificial Sequence
  Description of Artificial Sequence: Synthetic oligonucleotide
ucaauguaucuuuacaacu

SEQ ID NO: 472116 - RNA, 19 nt, Artificial Sequence
  Description of Artificial Sequence: Synthetic oligonucleotide
aaagacacaacgcacuaaa

SEQ ID NO: 472117 - RNA, 19 nt, Artificial Sequence
  Description of Artificial Sequence: Synthetic oligonucleotide
uugauaauacaauaugaaa

SEQ ID NO: 472118 - RNA, 19 nt, Artificial Sequence
  Description of Artificial Sequence: Synthetic oligonucleotide
aaaacuaccagaaaagcuu

SEQ ID NO: 472119 - RNA, 19 nt, Artificial Sequence
  Description of Artificial Sequence: Synthetic oligonucleotide
ugcuguuacacaaugugca

SEQ ID NO: 472120 - RNA, 19 nt, Artificial Sequence
  Description of Artificial Sequence: Synthetic oligonucleotide
aaccacaugucuaauacag

SEQ ID NO: 472121 - RNA, 19 nt, Artificial Sequence
  Description of Artificial Sequence: Synthetic oligonucleotide
ucacaauguaaagagauca

SEQ ID NO: 472122 - RNA, 19 nt, Artificial Sequence
  Description of Artificial Sequence: Synthetic oligonucleotide
ucgaagaaacuccugacga

SEQ ID NO: 472123 - RNA, 19 nt, Artificial Sequence
  Description of Artificial Sequence: Synthetic oligonucleotide
ugacaaguagagaugauuc

SEQ ID NO: 472124 - RNA, 19 nt, Artificial Sequence
  Description of Artificial Sequence: Synthetic oligonucleotide
ugaauggugaauacauuca

SEQ ID NO: 472125 - RNA, 19 nt, Artificial Sequence
  Description of Artificial Sequence: Synthetic oligonucleotide
uguggaauaugauuacuug

SEQ ID NO: 472126 - RNA, 19 nt, Artificial Sequence
  Description of Artificial Sequence: Synthetic oligonucleotide
gacaaguagagaugauucg

SEQ ID NO: 472127 - RNA, 19 nt, Artificial Sequence
  Description of Artificial Sequence: Synthetic oligonucleotide
aauugacaaguagagauga

SEQ ID NO: 472128 - RNA, 19 nt, Artificial Sequence
  Description of Artificial Sequence: Synthetic oligonucleotide
ucuccagcaaguuuuaacu

SEQ ID NO: 472129 - RNA, 19 nt, Artificial Sequence
  Description of Artificial Sequence: Synthetic oligonucleotide
uauacauucuaauggaaua

SEQ ID NO: 472130 - RNA, 19 nt, Artificial Sequence
  Description of Artificial Sequence: Synthetic oligonucleotide
aacucucguauucuaaucu

SEQ ID NO: 472131 - RNA, 19 nt, Artificial Sequence
  Description of Artificial Sequence: Synthetic oligonucleotide
uuauacauucuaauggaau

SEQ ID NO: 472132 - RNA, 19 nt, Artificial Sequence
  Description of Artificial Sequence: Synthetic oligonucleotide
gaauaauggcaaaagacac

SEQ ID NO: 472133 - RNA, 19 nt, Artificial Sequence
  Description of Artificial Sequence: Synthetic oligonucleotide
uaguuuaaccuugucaucc

SEQ ID NO: 472134 - RNA, 19 nt, Artificial Sequence
  Description of Artificial Sequence: Synthetic oligonucleotide
uuagugucuagacuuuuca

SEQ ID NO: 472135 - RNA, 19 nt, Artificial Sequence
  Description of Artificial Sequence: Synthetic oligonucleotide
uguguguguguguagaaca

SEQ ID NO: 472136 - RNA, 19 nt, Artificial Sequence
  Description of Artificial Sequence: Synthetic oligonucleotide
ucuaaucaaauacaaucau

SEQ ID NO: 472137 - RNA, 19 nt, Artificial Sequence
  Description of Artificial Sequence: Synthetic oligonucleotide
aaaagcagcguuccuguca

SEQ ID NO: 472138 - RNA, 19 nt, Artificial Sequence
  Description of Artificial Sequence: Synthetic oligonucleotide
ucucaauguaucuuuacaa

SEQ ID NO: 472139 - RNA, 19 nt, Artificial Sequence
  Description of Artificial Sequence: Synthetic oligonucleotide
uggcaaaagacacaacgca

SEQ ID NO: 472140 - RNA, 19 nt, Artificial Sequence
  Description of Artificial Sequence: Synthetic oligonucleotide
uauaacauucugcuucugu

SEQ ID NO: 472141 - RNA, 19 nt, Artificial Sequence
  Description of Artificial Sequence: Synthetic oligonucleotide
auauuguuaugaugaagag

SEQ ID NO: 472142 - RNA, 19 nt, Artificial Sequence
  Description of Artificial Sequence: Synthetic oligonucleotide
gaagucuugaagcugaucu

SEQ ID NO: 472143 - RNA, 19 nt, Artificial Sequence
  Description of Artificial Sequence: Synthetic oligonucleotide
aaucuaucucaauguaucu

SEQ ID NO: 472144 - RNA, 19 nt, Artificial Sequence
  Description of Artificial Sequence: Synthetic oligonucleotide
uugauugacuccuaugggu

SEQ ID NO: 472145 - RNA, 19 nt, Artificial Sequence
  Description of Artificial Sequence: Synthetic oligonucleotide
auaugugaauggugaauac

SEQ ID NO: 472146 - RNA, 19 nt, Artificial Sequence
  Description of Artificial Sequence: Synthetic oligonucleotide
uaaagagaucacauaguac

SEQ ID NO: 472147 - RNA, 19 nt, Artificial Sequence
  Description of Artificial Sequence: Synthetic oligonucleotide
auguuaauacagucaaaag

SEQ ID NO: 472148 - RNA, 19 nt, Artificial Sequence
  Description of Artificial Sequence: Synthetic oligonucleotide
ugauacgauauguuguucu

SEQ ID NO: 472149 - RNA, 19 nt, Artificial Sequence
  Description of Artificial Sequence: Synthetic oligonucleotide
ugauugcagacucauuuca

SEQ ID NO: 472150 - RNA, 19 nt, Artificial Sequence
  Description of Artificial Sequence: Synthetic oligonucleotide
aaaguggacuuagucacuc

SEQ ID NO: 472151 - RNA, 19 nt, Artificial Sequence
  Description of Artificial Sequence: Synthetic oligonucleotide
aacccuaguucuuaaggca

SEQ ID NO: 472152 - RNA, 19 nt, Artificial Sequence
  Description of Artificial Sequence: Synthetic oligonucleotide
ucuaaucucuucacaaggu

SEQ ID NO: 472153 - RNA, 19 nt, Artificial Sequence
  Description of Artificial Sequence: Synthetic oligonucleotide
uguacacuaguacauuccu

SEQ ID NO: 472154 - RNA, 19 nt, Artificial Sequence
  Description of Artificial Sequence: Synthetic oligonucleotide
aaaauguauuagugucuag

SEQ ID NO: 472155 - RNA, 19 nt, Artificial Sequence
  Description of Artificial Sequence: Synthetic oligonucleotide
agaguguuaaucaaggggu

SEQ ID NO: 472156 - RNA, 19 nt, Artificial Sequence
  Description of Artificial Sequence: Synthetic oligonucleotide
uuaaaaucccuuacuuagu

SEQ ID NO: 472157 - RNA, 19 nt, Artificial Sequence
  Description of Artificial Sequence: Synthetic oligonucleotide
ugucuaggcugcuaaauga

SEQ ID NO: 472158 - RNA, 19 nt, Artificial Sequence
  Description of Artificial Sequence: Synthetic oligonucleotide
ucucauugcuguuacacaa

SEQ ID NO: 472159 - RNA, 19 nt, Artificial Sequence
  Description of Artificial Sequence: Synthetic oligonucleotide
acaaugugcaacauauaac

SEQ ID NO: 472160 - RNA, 19 nt, Artificial Sequence
  Description of Artificial Sequence: Synthetic oligonucleotide
aguacauuccuucauuaaa

SEQ ID NO: 472161 - RNA, 19 nt, Artificial Sequence
  Description of Artificial Sequence: Synthetic oligonucleotide
cacauaguacuuuauagca

SEQ ID NO: 472162 - RNA, 19 nt, Artificial Sequence
  Description of Artificial Sequence: Synthetic oligonucleotide
uguaucuuuacaacugaua

SEQ ID NO: 472163 - RNA, 19 nt, Artificial Sequence
  Description of Artificial Sequence: Synthetic oligonucleotide
aaccuugucauccucgcau

SEQ ID NO: 472164 - RNA, 19 nt, Artificial Sequence
  Description of Artificial Sequence: Synthetic oligonucleotide
uggacuuagucacucucag

SEQ ID NO: 472165 - RNA, 19 nt, Artificial Sequence
  Description of Artificial Sequence: Synthetic oligonucleotide
aauugcgcuucuccaggcg

SEQ ID NO: 472166 - RNA, 19 nt, Artificial Sequence
  Description of Artificial Sequence: Synthetic oligonucleotide
augcguguccaccaagagc

SEQ ID NO: 472167 - RNA, 19 nt, Artificial Sequence
  Description of Artificial Sequence: Synthetic oligonucleotide
ucuaggcugcuaaaugaag

SEQ ID NO: 472168 - RNA, 19 nt, Artificial Sequence
  Description of Artificial Sequence: Synthetic oligonucleotide
uguuaaaaucccuuacuua

SEQ ID NO: 472169 - RNA, 19 nt, Artificial Sequence
  Description of Artificial Sequence: Synthetic oligonucleotide
ugauucgaugcacagcacu

SEQ ID NO: 472170 - RNA, 19 nt, Artificial Sequence
  Description of Artificial Sequence: Synthetic oligonucleotide
uuccugucgaagaaacucc

SEQ ID NO: 472171 - RNA, 19 nt, Artificial Sequence
  Description of Artificial Sequence: Synthetic oligonucleotide
uggaauaauuuuaggugcu

SEQ ID NO: 472172 - RNA, 19 nt, Artificial Sequence
  Description of Artificial Sequence: Synthetic oligonucleotide
uauuguuaugaugaagagu

SEQ ID NO: 472173 - RNA, 19 nt, Artificial Sequence
  Description of Artificial Sequence: Synthetic oligonucleotide
uucacgguacuucuauuca

SEQ ID NO: 472174 - RNA, 19 nt, Artificial Sequence
  Description of Artificial Sequence: Synthetic oligonucleotide
ucaccaauucguuugacuu

SEQ ID NO: 472175 - RNA, 19 nt, Artificial Sequence
  Description of Artificial Sequence: Synthetic oligonucleotide
gagaugauucgaugcacag

SEQ ID NO: 472176 - RNA, 19 nt, Artificial Sequence
  Description of Artificial Sequence: Synthetic oligonucleotide
uuuauacccaacucuuuuc

SEQ ID NO: 472177 - RNA, 19 nt, Artificial Sequence
  Description of Artificial Sequence: Synthetic oligonucleotide
acaaccgaugguugugagc

SEQ ID NO: 472178 - RNA, 19 nt, Artificial Sequence
  Description of Artificial Sequence: Synthetic oligonucleotide
gcuuugauaauacaauaug

SEQ ID NO: 472179 - RNA, 19 nt, Artificial Sequence
  Description of Artificial Sequence: Synthetic oligonucleotide
uuaaucaaggggugguaga

SEQ ID NO: 472180 - RNA, 19 nt, Artificial Sequence
  Description of Artificial Sequence: Synthetic oligonucleotide
auguacacuaguacauucc

SEQ ID NO: 472181 - RNA, 19 nt, Artificial Sequence
  Description of Artificial Sequence: Synthetic oligonucleotide
acucucguauucuaaucuc

SEQ ID NO: 472182 - RNA, 19 nt, Artificial Sequence
  Description of Artificial Sequence: Synthetic oligonucleotide
agucuagcaaaugagcuug

SEQ ID NO: 472183 - RNA, 19 nt, Artificial Sequence
  Description of Artificial Sequence: Synthetic oligonucleotide
auuuauacccaacucuuuu

SEQ ID NO: 472184 - RNA, 19 nt, Artificial Sequence
  Description of Artificial Sequence: Synthetic oligonucleotide
uuaaacaguacugguauua

SEQ ID NO: 472185 - RNA, 19 nt, Artificial Sequence
  Description of Artificial Sequence: Synthetic oligonucleotide
uuaugcguguccaccaaga

SEQ ID NO: 472186 - RNA, 19 nt, Artificial Sequence
  Description of Artificial Sequence: Synthetic oligonucleotide
aaagcagcguuccugucaa

SEQ ID NO: 472187 - RNA, 19 nt, Artificial Sequence
  Description of Artificial Sequence: Synthetic oligonucleotide
acugauacaauugaucuuu

SEQ ID NO: 472188 - RNA, 19 nt, Artificial Sequence
  Description of Artificial Sequence: Synthetic oligonucleotide
uaaucaaggggugguagag

SEQ ID NO: 472189 - RNA, 19 nt, Artificial Sequence
  Description of Artificial Sequence: Synthetic oligonucleotide
uuaugaugaagaguguuaa

SEQ ID NO: 472190 - RNA, 19 nt, Artificial Sequence
  Description of Artificial Sequence: Synthetic oligonucleotide
gaucuuuacaacagaaguc

SEQ ID NO: 472191 - RNA, 19 nt, Artificial Sequence
  Description of Artificial Sequence: Synthetic oligonucleotide
ggaucugauaugugaaugg

SEQ ID NO: 472192 - RNA, 19 nt, Artificial Sequence
  Description of Artificial Sequence: Synthetic oligonucleotide
ugugcucuuaauuccuuga

SEQ ID NO: 472193 - RNA, 19 nt, Artificial Sequence
  Description of Artificial Sequence: Synthetic oligonucleotide
ggaauaugauuacuugagg

SEQ ID NO: 472194 - RNA, 19 nt, Artificial Sequence
  Description of Artificial Sequence: Synthetic oligonucleotide
augauuacuugaggguucc

SEQ ID NO: 472195 - RNA, 19 nt, Artificial Sequence
  Description of Artificial Sequence: Synthetic oligonucleotide
acauaguacuuuauagcac

SEQ ID NO: 472196 - RNA, 19 nt, Artificial Sequence
  Description of Artificial Sequence: Synthetic oligonucleotide
uagugucuagacuuuucag

SEQ ID NO: 472197 - RNA, 19 nt, Artificial Sequence
  Description of Artificial Sequence: Synthetic oligonucleotide
ucugauacgauauguuguu

SEQ ID NO: 472198 - RNA, 19 nt, Artificial Sequence
  Description of Artificial Sequence: Synthetic oligonucleotide
aagucuagcaaaugagcuu

SEQ ID NO: 472199 - RNA, 19 nt, Artificial Sequence
  Description of Artificial Sequence: Synthetic oligonucleotide
auguauuagugucuagacu

SEQ ID NO: 472200 - RNA, 19 nt, Artificial Sequence
  Description of Artificial Sequence: Synthetic oligonucleotide
ucccuuagacuuaaaggac

SEQ ID NO: 472201 - RNA, 19 nt, Artificial Sequence
  Description of Artificial Sequence: Synthetic oligonucleotide
auauaaccuguacaaacau

SEQ ID NO: 472202 - RNA, 19 nt, Artificial Sequence
  Description of Artificial Sequence: Synthetic oligonucleotide
aguguuaaucaaggggugg

SEQ ID NO: 472203 - RNA, 19 nt, Artificial Sequence
  Description of Artificial Sequence: Synthetic oligonucleotide
uaugcguguccaccaagag

SEQ ID NO: 472204 - RNA, 19 nt, Artificial Sequence
  Description of Artificial Sequence: Synthetic oligonucleotide
ggaauaauggcaaaagaca

SEQ ID NO: 472205 - RNA, 19 nt, Artificial Sequence
  Description of Artificial Sequence: Synthetic oligonucleotide
agacuguauagaaugucac

SEQ ID NO: 472206 - RNA, 19 nt, Artificial Sequence
  Description of Artificial Sequence: Synthetic oligonucleotide
gucuaaucaaauacaauca

SEQ ID NO: 472207 - RNA, 19 nt, Artificial Sequence
  Description of Artificial Sequence: Synthetic oligonucleotide
cauuugauugacuccuaug

SEQ ID NO: 472208 - RNA, 19 nt, Artificial Sequence
  Description of Artificial Sequence: Synthetic oligonucleotide
ucaauugguccaagauucc

SEQ ID NO: 472209 - RNA, 19 nt, Artificial Sequence
  Description of Artificial Sequence: Synthetic oligonucleotide
ucccuuacuuaguaguucu

SEQ ID NO: 472210 - RNA, 19 nt, Artificial Sequence
  Description of Artificial Sequence: Synthetic oligonucleotide
uuggguuuugagcaucccu

SEQ ID NO: 472211 - RNA, 19 nt, Artificial Sequence
  Description of Artificial Sequence: Synthetic oligonucleotide
agaauuuuagccagugcug

SEQ ID NO: 472212 - RNA, 19 nt, Artificial Sequence
  Description of Artificial Sequence: Synthetic oligonucleotide
cacaaugugcaacauauaa

SEQ ID NO: 472213 - RNA, 19 nt, Artificial Sequence
  Description of Artificial Sequence: Synthetic oligonucleotide
ugucgaagaaacuccugac

SEQ ID NO: 472214 - RNA, 19 nt, Artificial Sequence
  Description of Artificial Sequence: Synthetic oligonucleotide
guagagaugauucgaugca

SEQ ID NO: 472215 - RNA, 19 nt, Artificial Sequence
  Description of Artificial Sequence: Synthetic oligonucleotide
acuuaguaguucuggaaaa

SEQ ID NO: 472216 - RNA, 19 nt, Artificial Sequence
  Description of Artificial Sequence: Synthetic oligonucleotide
uauaaccuguacaaacauu

SEQ ID NO: 472217 - RNA, 19 nt, Artificial Sequence
  Description of Artificial Sequence: Synthetic oligonucleotide
cacaauguaaagagaucac

SEQ ID NO: 472218 - RNA, 19 nt, Artificial Sequence
  Description of Artificial Sequence: Synthetic oligonucleotide
gaauuuuagccagugcuga

SEQ ID NO: 472219 - RNA, 19 nt, Artificial Sequence
  Description of Artificial Sequence: Synthetic oligonucleotide
uucuuaugcguguccacca

SEQ ID NO: 472220 - RNA, 19 nt, Artificial Sequence
  Description of Artificial Sequence: Synthetic oligonucleotide
uacgauauguuguucugua

SEQ ID NO: 472221 - RNA, 19 nt, Artificial Sequence
  Description of Artificial Sequence: Synthetic oligonucleotide
uccgaauugcgcuucucca

SEQ ID NO: 472222 - RNA, 19 nt, Artificial Sequence
  Description of Artificial Sequence: Synthetic oligonucleotide
gacuguauagaaugucaca

SEQ ID NO: 472223 - RNA, 19 nt, Artificial Sequence
  Description of Artificial Sequence: Synthetic oligonucleotide
acuaguacauuccuucauu

SEQ ID NO: 472224 - RNA, 19 nt, Artificial Sequence
  Description of Artificial Sequence: Synthetic oligonucleotide
aguuguagacuucacggua

SEQ ID NO: 472225 - RNA, 19 nt, Artificial Sequence
  Description of Artificial Sequence: Synthetic oligonucleotide
uaaacaguacugguauuac

SEQ ID NO: 472226 - RNA, 19 nt, Artificial Sequence
  Description of Artificial Sequence: Synthetic oligonucleotide
cauaguacuuuauagcacu

SEQ ID NO: 472227 - RNA, 19 nt, Artificial Sequence
  Description of Artificial Sequence: Synthetic oligonucleotide
aggagguccgaauugcgcu

SEQ ID NO: 472228 - RNA, 19 nt, Artificial Sequence
  Description of Artificial Sequence: Synthetic oligonucleotide
gaacuaaguaaggaauaac

SEQ ID NO: 472229 - RNA, 19 nt, Artificial Sequence
  Description of Artificial Sequence: Synthetic oligonucleotide
ugauaugugaauggugaau

SEQ ID NO: 472230 - RNA, 19 nt, Artificial Sequence
  Description of Artificial Sequence: Synthetic oligonucleotide
aucugauacgauauguugu

SEQ ID NO: 472231 - RNA, 19 nt, Artificial Sequence
  Description of Artificial Sequence: Synthetic oligonucleotide
auaugauuacuugaggguu

SEQ ID NO: 472232 - RNA, 19 nt, Artificial Sequence
  Description of Artificial Sequence: Synthetic oligonucleotide
augauguaugucugccauc

SEQ ID NO: 472233 - RNA, 19 nt, Artificial Sequence
  Description of Artificial Sequence: Synthetic oligonucleotide
acguuuggaauaauuuuag

SEQ ID NO: 472234 - RNA, 19 nt, Artificial Sequence
  Description of Artificial Sequence: Synthetic oligonucleotide
gcagacucauuucaaagug

SEQ ID NO: 472235 - RNA, 19 nt, Artificial Sequence
  Description of Artificial Sequence: Synthetic oligonucleotide
acgauauguuguucuguag

SEQ ID NO: 472236 - RNA, 19 nt, Artificial Sequence
  Description of Artificial Sequence: Synthetic oligonucleotide
ucuucacaagguauguguu

SEQ ID NO: 472237 - RNA, 19 nt, Artificial Sequence
  Description of Artificial Sequence: Synthetic oligonucleotide
aguuuaaccuugucauccu

SEQ ID NO: 472238 - RNA, 19 nt, Artificial Sequence
  Description of Artificial Sequence: Synthetic oligonucleotide
augaucauuuauacccaac

SEQ ID NO: 472239 - RNA, 19 nt, Artificial Sequence
  Description of Artificial Sequence: Synthetic oligonucleotide
aaaccuguuaaaaucccuu

SEQ ID NO: 472240 - RNA, 19 nt, Artificial Sequence
  Description of Artificial Sequence: Synthetic oligonucleotide
uggaggguucuuaacuaac

SEQ ID NO: 472241 - RNA, 19 nt, Artificial Sequence
  Description of Artificial Sequence: Synthetic oligonucleotide
ugacuacaguuaaacagua

SEQ ID NO: 472242 - RNA, 19 nt, Artificial Sequence
  Description of Artificial Sequence: Synthetic oligonucleotide
aaaugucuaggcugcuaaa

SEQ ID NO: 472243 - RNA, 19 nt, Artificial Sequence
  Description of Artificial Sequence: Synthetic oligonucleotide
uugacaaguagagaugauu

SEQ ID NO: 472244 - RNA, 19 nt, Artificial Sequence
  Description of Artificial Sequence: Synthetic oligonucleotide
ugcugacuacaguuaaaca

SEQ ID NO: 472245 - RNA, 19 nt, Artificial Sequence
  Description of Artificial Sequence: Synthetic oligonucleotide
gauuacuugaggguuccuc

SEQ ID NO: 472246 - RNA, 19 nt, Artificial Sequence
  Description of Artificial Sequence: Synthetic oligonucleotide
uugacuuguucuuucccau

SEQ ID NO: 472247 - RNA, 19 nt, Artificial Sequence
  Description of Artificial Sequence: Synthetic oligonucleotide
cugauugcagacucauuuc

SEQ ID NO: 472248 - RNA, 19 nt, Artificial Sequence
  Description of Artificial Sequence: Synthetic oligonucleotide
gucuaauacagacuguaua

SEQ ID NO: 472249 - RNA, 19 nt, Artificial Sequence
  Description of Artificial Sequence: Synthetic oligonucleotide
gguucaauaaaaugugaaa

SEQ ID NO: 472250 - RNA, 19 nt, Artificial Sequence
  Description of Artificial Sequence: Synthetic oligonucleotide
uguguguguguguguguag

SEQ ID NO: 472251 - RNA, 19 nt, Artificial Sequence
  Description of Artificial Sequence: Synthetic oligonucleotide
ucucguauucuaaucucuu

SEQ ID NO: 472252 - RNA, 19 nt, Artificial Sequence
  Description of Artificial Sequence: Synthetic oligonucleotide
gauccaucugaagcucucg

SEQ ID NO: 472253 - RNA, 19 nt, Artificial Sequence
  Description of Artificial Sequence: Synthetic oligonucleotide
gcuuuaaaugcaaagauua

SEQ ID NO: 472254 - RNA, 19 nt, Artificial Sequence
  Description of Artificial Sequence: Synthetic oligonucleotide
cuuacaaccgaugguugug

SEQ ID NO: 472255 - RNA, 19 nt, Artificial Sequence
  Description of Artificial Sequence: Synthetic oligonucleotide
uuaggugcuacaugaucau

SEQ ID NO: 472256 - RNA, 19 nt, Artificial Sequence
  Description of Artificial Sequence: Synthetic oligonucleotide
accaauucguuugacuugu

SEQ ID NO: 472257 - RNA, 19 nt, Artificial Sequence
  Description of Artificial Sequence: Synthetic oligonucleotide
uucuggucgaucugcuucu

SEQ ID NO: 472258 - RNA, 19 nt, Artificial Sequence
  Description of Artificial Sequence: Synthetic oligonucleotide
uauuaucaauugguccaag

SEQ ID NO: 472259 - RNA, 19 nt, Artificial Sequence
  Description of Artificial Sequence: Synthetic oligonucleotide
gaauugcgcuucuccaggc

SEQ ID NO: 472260 - RNA, 19 nt, Artificial Sequence
  Description of Artificial Sequence: Synthetic oligonucleotide
cacguuuggaauaauuuua

SEQ ID NO: 472261 - RNA, 19 nt, Artificial Sequence
  Description of Artificial Sequence: Synthetic oligonucleotide
uccuaugggucuccuuuug

SEQ ID NO: 472262 - RNA, 19 nt, Artificial Sequence
  Description of Artificial Sequence: Synthetic oligonucleotide
aucccuuacuuaguaguuc

SEQ ID NO: 472263 - RNA, 19 nt, Artificial Sequence
  Description of Artificial Sequence: Synthetic oligonucleotide
cuuauacauucuaauggaa

SEQ ID NO: 472264 - RNA, 19 nt, Artificial Sequence
  Description of Artificial Sequence: Synthetic oligonucleotide
acacuaguacauuccuuca

SEQ ID NO: 472265 - RNA, 19 nt, Artificial Sequence
  Description of Artificial Sequence: Synthetic oligonucleotide
gagaucacauaguacuuua

SEQ ID NO: 472266 - RNA, 19 nt, Artificial Sequence
  Description of Artificial Sequence: Synthetic oligonucleotide
uuguuaugaugaagagugu

SEQ ID NO: 472267 - RNA, 19 nt, Artificial Sequence
  Description of Artificial Sequence: Synthetic oligonucleotide
uacaaccgaugguugugag

SEQ ID NO: 472268 - RNA, 19 nt, Artificial Sequence
  Description of Artificial Sequence: Synthetic oligonucleotide
ucugccacuucaagaacua

SEQ ID NO: 472269 - RNA, 19 nt, Artificial Sequence
  Description of Artificial Sequence: Synthetic oligonucleotide
uagagaugauucgaugcac

SEQ ID NO: 472270 - RNA, 19 nt, Artificial Sequence
  Description of Artificial Sequence: Synthetic oligonucleotide
agauuccccaguuuauaaa

SEQ ID NO: 472271 - RNA, 19 nt, Artificial Sequence
  Description of Artificial Sequence: Synthetic oligonucleotide
cuuaugcguguccaccaag

SEQ ID NO: 472272 - RNA, 19 nt, Artificial Sequence
  Description of Artificial Sequence: Synthetic oligonucleotide
uaguacuuuauagcacuac

SEQ ID NO: 472273 - RNA, 19 nt, Artificial Sequence
  Description of Artificial Sequence: Synthetic oligonucleotide
uuggaggguucuuaacuaa

SEQ ID NO: 472274 - RNA, 19 nt, Artificial Sequence
  Description of Artificial Sequence: Synthetic oligonucleotide
guaguuuaaccuugucauc

SEQ ID NO: 472275 - RNA, 19 nt, Artificial Sequence
  Description of Artificial Sequence: Synthetic oligonucleotide
aaucaaggggugguagaga

SEQ ID NO: 472276 - RNA, 19 nt, Artificial Sequence
  Description of Artificial Sequence: Synthetic oligonucleotide
cacgguacuucuauucauc

SEQ ID NO: 472277 - RNA, 19 nt, Artificial Sequence
  Description of Artificial Sequence: Synthetic oligonucleotide
aggguucuuaacuaacauu

SEQ ID NO: 472278 - RNA, 19 nt, Artificial Sequence
  Description of Artificial Sequence: Synthetic oligonucleotide
ucuuaugcguguccaccaa

SEQ ID NO: 472279 - RNA, 19 nt, Artificial Sequence
  Description of Artificial Sequence: Synthetic oligonucleotide
cugucgaagaaacuccuga

SEQ ID NO: 472280 - RNA, 19 nt, Artificial Sequence
  Description of Artificial Sequence: Synthetic oligonucleotide
uuacaaccgaugguuguga

SEQ ID NO: 472281 - RNA, 19 nt, Artificial Sequence
  Description of Artificial Sequence: Synthetic oligonucleotide
gaguguuaaucaaggggug

SEQ ID NO: 472282 - RNA, 19 nt, Artificial Sequence
  Description of Artificial Sequence: Synthetic oligonucleotide
gauauguuguucuguaguu

SEQ ID NO: 472283 - RNA, 19 nt, Artificial Sequence
  Description of Artificial Sequence: Synthetic oligonucleotide
uucauguugugcucuuaau

SEQ ID NO: 472284 - RNA, 19 nt, Artificial Sequence
  Description of Artificial Sequence: Synthetic oligonucleotide
cauugucaaccaugcauuc

SEQ ID NO: 472285 - RNA, 19 nt, Artificial Sequence
  Description of Artificial Sequence: Synthetic oligonucleotide
gcaucccuuagacuuaaag

SEQ ID NO: 472286 - RNA, 19 nt, Artificial Sequence
  Description of Artificial Sequence: Synthetic oligonucleotide
ucgugugugugugugugug

SEQ ID NO: 472287 - RNA, 19 nt, Artificial Sequence
  Description of Artificial Sequence: Synthetic oligonucleotide
ugccaucugauacgauaug

SEQ ID NO: 472288 - RNA, 19 nt, Artificial Sequence
  Description of Artificial Sequence: Synthetic oligonucleotide
uguguguguguguguagaa

SEQ ID NO: 472289 - RNA, 19 nt, Artificial Sequence
  Description of Artificial Sequence: Synthetic oligonucleotide
acccuaguucuuaaggcag

SEQ ID NO: 472290 - RNA, 19 nt, Artificial Sequence
  Description of Artificial Sequence: Synthetic oligonucleotide
aaucccuuacuuaguaguu

SEQ ID NO: 472291 - RNA, 19 nt, Artificial Sequence
  Description of Artificial Sequence: Synthetic oligonucleotide
cuagcuuauacauucuaau

SEQ ID NO: 472292 - RNA, 19 nt, Artificial Sequence
  Description of Artificial Sequence: Synthetic oligonucleotide
ugagcaucccuuagacuua

SEQ ID NO: 472293 - RNA, 19 nt, Artificial Sequence
  Description of Artificial Sequence: Synthetic oligonucleotide
auacgauauguuguucugu

SEQ ID NO: 472294 - RNA, 19 nt, Artificial Sequence
  Description of Artificial Sequence: Synthetic oligonucleotide
auucauugucaaccaugca

SEQ ID NO: 472295 - RNA, 19 nt, Artificial Sequence
  Description of Artificial Sequence: Synthetic oligonucleotide
ucuagcaaaugagcuugga

SEQ ID NO: 472296 - RNA, 19 nt, Artificial Sequence
  Description of Artificial Sequence: Synthetic oligonucleotide
guucgugugugugugugug

SEQ ID NO: 472297 - RNA, 19 nt, Artificial Sequence
  Description of Artificial Sequence: Synthetic oligonucleotide
acaugaucauuuauaccca

SEQ ID NO: 472298 - RNA, 19 nt, Artificial Sequence
  Description of Artificial Sequence: Synthetic oligonucleotide
ccuuacuuaguaguucugg

SEQ ID NO: 472299 - RNA, 19 nt, Artificial Sequence
  Description of Artificial Sequence: Synthetic oligonucleotide
guacuuuauagcacuacaa

SEQ ID NO: 472300 - RNA, 19 nt, Artificial Sequence
  Description of Artificial Sequence: Synthetic oligonucleotide
auacugagauccgaaaaua

SEQ ID NO: 472301 - RNA, 19 nt, Artificial Sequence
  Description of Artificial Sequence: Synthetic oligonucleotide
caguuaaacaguacuggua

SEQ ID NO: 472302 - RNA, 19 nt, Artificial Sequence
  Description of Artificial Sequence: Synthetic oligonucleotide
ugugugugugugugugugu

SEQ ID NO: 472303 - RNA, 19 nt, Artificial Sequence
  Description of Artificial Sequence: Synthetic oligonucleotide
uguucgugugugugugugu

SEQ ID NO: 472304 - RNA, 19 nt, Artificial Sequence
  Description of Artificial Sequence: Synthetic oligonucleotide
gcagaaguaaaacacugua

SEQ ID NO: 472305 - RNA, 19 nt, Artificial Sequence
  Description of Artificial Sequence: Synthetic oligonucleotide
cuaaucaaauacaaucauu

SEQ ID NO: 472306 - RNA, 19 nt, Artificial Sequence
  Description of Artificial Sequence: Synthetic oligonucleotide
auguucgugugugugugug

SEQ ID NO: 472307 - RNA, 19 nt, Artificial Sequence
  Description of Artificial Sequence: Synthetic oligonucleotide
uagcuagcuuauacauucu

SEQ ID NO: 472308 - RNA, 19 nt, Artificial Sequence
  Description of Artificial Sequence: Synthetic oligonucleotide
cuaggcugcuaaaugaagu

SEQ ID NO: 472309 - RNA, 19 nt, Artificial Sequence
  Description of Artificial Sequence: Synthetic oligonucleotide
aaguaaggaauaacuuaua

SEQ ID NO: 472310 - RNA, 19 nt, Artificial Sequence
  Description of Artificial Sequence: Synthetic oligonucleotide
guuuaaccuugucauccuc

SEQ ID NO: 472311 - RNA, 19 nt, Artificial Sequence
  Description of Artificial Sequence: Synthetic oligonucleotide
uauguucgugugugugugu

SEQ ID NO: 472312 - RNA, 19 nt, Artificial Sequence
  Description of Artificial Sequence: Synthetic oligonucleotide
uguuaaucaagggguggua

SEQ ID NO: 472313 - RNA, 19 nt, Artificial Sequence
  Description of Artificial Sequence: Synthetic oligonucleotide
ggcaaaagacacaacgcac

SEQ ID NO: 472314 - RNA, 19 nt, Artificial Sequence
  Description of Artificial Sequence: Synthetic oligonucleotide
gugugugugugugugugug

SEQ ID NO: 472315 - RNA, 19 nt, Artificial Sequence
  Description of Artificial Sequence: Synthetic oligonucleotide
guaguucuggaaaagucua

SEQ ID NO: 472316 - RNA, 19 nt, Artificial Sequence
  Description of Artificial Sequence: Synthetic oligonucleotide
gcuauuucaauaaaacagu

SEQ ID NO: 472317 - RNA, 19 nt, Artificial Sequence
  Description of Artificial Sequence: Synthetic oligonucleotide
agcuagcuuauacauucua

SEQ ID NO: 472318 - RNA, 19 nt, Artificial Sequence
  Description of Artificial Sequence: Synthetic oligonucleotide
gacucauuucaaaguggac

SEQ ID NO: 472319 - RNA, 19 nt, Artificial Sequence
  Description of Artificial Sequence: Synthetic oligonucleotide
gauugacuccuaugggucu

SEQ ID NO: 472320 - RNA, 19 nt, Artificial Sequence
  Description of Artificial Sequence: Synthetic oligonucleotide
cuaauggaauaauggcaaa

SEQ ID NO: 472321 - RNA, 19 nt, Artificial Sequence
  Description of Artificial Sequence: Synthetic oligonucleotide
aggugcuacaugaucauuu

SEQ ID NO: 472322 - RNA, 19 nt, Artificial Sequence
  Description of Artificial Sequence: Synthetic oligonucleotide
caaggggugguagagaaua

SEQ ID NO: 472323 - RNA, 19 nt, Artificial Sequence
  Description of Artificial Sequence: Synthetic oligonucleotide
cugaggcggccguagucgg

SEQ ID NO: 472324 - RNA, 19 nt, Artificial Sequence
  Description of Artificial Sequence: Synthetic oligonucleotide
caugaucauuuauacccaa

SEQ ID NO: 472325 - RNA, 19 nt, Artificial Sequence
  Description of Artificial Sequence: Synthetic oligonucleotide
gacuucacgguacuucuau

SEQ ID NO: 472326 - RNA, 19 nt, Artificial Sequence
  Description of Artificial Sequence: Synthetic oligonucleotide
cuguuugccauagucugca

SEQ ID NO: 472327 - RNA, 19 nt, Artificial Sequence
  Description of Artificial Sequence: Synthetic oligonucleotide
auagcacuacaauguuaau

SEQ ID NO: 472328 - RNA, 19 nt, Artificial Sequence
  Description of Artificial Sequence: Synthetic oligonucleotide
uucgugugugugugugugu

SEQ ID NO: 472329 - RNA, 19 nt, Artificial Sequence
  Description of Artificial Sequence: Synthetic oligonucleotide
gaggguucuuaacuaacau

SEQ ID NO: 472330 - RNA, 19 nt, Artificial Sequence
  Description of Artificial Sequence: Synthetic oligonucleotide
guguguguguguagaacac

SEQ ID NO: 472331 - RNA, 19 nt, Artificial Sequence
  Description of Artificial Sequence: Synthetic oligonucleotide
augauucgaugcacagcac

SEQ ID NO: 472332 - RNA, 19 nt, Artificial Sequence
  Description of Artificial Sequence: Synthetic oligonucleotide
gacaucauugaagcgcugu

SEQ ID NO: 472333 - RNA, 19 nt, Artificial Sequence
  Description of Artificial Sequence: Synthetic oligonucleotide
ugaagcgcuguuugccaua

SEQ ID NO: 472334 - RNA, 19 nt, Artificial Sequence
  Description of Artificial Sequence: Synthetic oligonucleotide
guguguguguguguagaac

SEQ ID NO: 472335 - RNA, 19 nt, Artificial Sequence
  Description of Artificial Sequence: Synthetic oligonucleotide
cugauaugugaauggugaa

SEQ ID NO: 472336 - RNA, 19 nt, Artificial Sequence
  Description of Artificial Sequence: Synthetic oligonucleotide
cuguuaaaaucccuuacuu

SEQ ID NO: 472337 - RNA, 19 nt, Artificial Sequence
  Description of Artificial Sequence: Synthetic oligonucleotide
agcagcguuccugucaaaa

SEQ ID NO: 472338 - RNA, 19 nt, Artificial Sequence
  Description of Artificial Sequence: Synthetic oligonucleotide
caaacaacccuaguucuua

SEQ ID NO: 472339 - RNA, 19 nt, Artificial Sequence
  Description of Artificial Sequence: Synthetic oligonucleotide
aaggauuagcuagcuuaua

SEQ ID NO: 472340 - RNA, 19 nt, Artificial Sequence
  Description of Artificial Sequence: Synthetic oligonucleotide
uacugauugcagacucauu

SEQ ID NO: 472341 - RNA, 19 nt, Artificial Sequence
  Description of Artificial Sequence: Synthetic oligonucleotide
cgaauugcgcuucuccagg

SEQ ID NO: 472342 - RNA, 19 nt, Artificial Sequence
  Description of Artificial Sequence: Synthetic oligonucleotide
cacaugucuaauacagacu

SEQ ID NO: 472343 - RNA, 19 nt, Artificial Sequence
  Description of Artificial Sequence: Synthetic oligonucleotide
agcuguguuguaaccaaaa

SEQ ID NO: 472344 - RNA, 19 nt, Artificial Sequence
  Description of Artificial Sequence: Synthetic oligonucleotide
ccgaauugcgcuucuccag

SEQ ID NO: 472345 - RNA, 19 nt, Artificial Sequence
  Description of Artificial Sequence: Synthetic oligonucleotide
guguguguguguguguaga

SEQ ID NO: 472346 - RNA, 19 nt, Artificial Sequence
  Description of Artificial Sequence: Synthetic oligonucleotide
cucucguauucuaaucucu

SEQ ID NO: 472347 - RNA, 19 nt, Artificial Sequence
  Description of Artificial Sequence: Synthetic oligonucleotide
cugauacgauauguuguuc

SEQ ID NO: 472348 - RNA, 19 nt, Artificial Sequence
  Description of Artificial Sequence: Synthetic oligonucleotide
gcuuggaggguucuuaacu

SEQ ID NO: 472349 - RNA, 19 nt, Artificial Sequence
  Description of Artificial Sequence: Synthetic oligonucleotide
accacaugucuaauacaga

SEQ ID NO: 472350 - RNA, 19 nt, Artificial Sequence
  Description of Artificial Sequence: Synthetic oligonucleotide
caccauacugagauccgaa

SEQ ID NO: 472351 - RNA, 19 nt, Artificial Sequence
  Description of Artificial Sequence: Synthetic oligonucleotide
caaggauuagcuagcuuau

SEQ ID NO: 472352 - RNA, 19 nt, Artificial Sequence
  Description of Artificial Sequence: Synthetic oligonucleotide
cagcguuccugucaaaaua

SEQ ID NO: 472353 - RNA, 19 nt, Artificial Sequence
  Description of Artificial Sequence: Synthetic oligonucleotide
agaucacauaguacuuuau

SEQ ID NO: 472354 - RNA, 19 nt, Artificial Sequence
  Description of Artificial Sequence: Synthetic oligonucleotide
ugacgaagcucagccaguu

SEQ ID NO: 472355 - RNA, 19 nt, Artificial Sequence
  Description of Artificial Sequence: Synthetic oligonucleotide
cccuuagacuuaaaggaca

SEQ ID NO: 472356 - RNA, 19 nt, Artificial Sequence
  Description of Artificial Sequence: Synthetic oligonucleotide
gauucgaugcacagcacuu

SEQ ID NO: 472357 - RNA, 19 nt, Artificial Sequence
  Description of Artificial Sequence: Synthetic oligonucleotide
auucgaugcacagcacuuu

SEQ ID NO: 472358 - RNA, 19 nt, Artificial Sequence
  Description of Artificial Sequence: Synthetic oligonucleotide
auugacaaguagagaugau

SEQ ID NO: 472359 - RNA, 19 nt, Artificial Sequence
  Description of Artificial Sequence: Synthetic oligonucleotide
ggaggguucuuaacuaaca

SEQ ID NO: 472360 - RNA, 19 nt, Artificial Sequence
  Description of Artificial Sequence: Synthetic oligonucleotide
auaguacuuuauagcacua

SEQ ID NO: 472361 - RNA, 19 nt, Artificial Sequence
  Description of Artificial Sequence: Synthetic oligonucleotide
gcuagcuuauacauucuaa

SEQ ID NO: 472362 - RNA, 19 nt, Artificial Sequence
  Description of Artificial Sequence: Synthetic oligonucleotide
agcugaucuuccugucgaa

SEQ ID NO: 472363 - RNA, 19 nt, Artificial Sequence
  Description of Artificial Sequence: Synthetic oligonucleotide
guguuaaucaagggguggu

SEQ ID NO: 472364 - RNA, 19 nt, Artificial Sequence
  Description of Artificial Sequence: Synthetic oligonucleotide
gcuguuacacaaugugcaa

SEQ ID NO: 472365 - RNA, 19 nt, Artificial Sequence
  Description of Artificial Sequence: Synthetic oligonucleotide
gcuucuuaugcguguccac

SEQ ID NO: 472366 - RNA, 19 nt, Artificial Sequence
  Description of Artificial Sequence: Synthetic oligonucleotide
ugauuacuugaggguuccu

SEQ ID NO: 472367 - RNA, 19 nt, Artificial Sequence
  Description of Artificial Sequence: Synthetic oligonucleotide
gcuguuugccauagucugc

SEQ ID NO: 472368 - RNA, 19 nt, Artificial Sequence
  Description of Artificial Sequence: Synthetic oligonucleotide
gcacuacaauguuaauaca

SEQ ID NO: 472369 - RNA, 19 nt, Artificial Sequence
  Description of Artificial Sequence: Synthetic oligonucleotide
gagguccgaauugcgcuuc

SEQ ID NO: 472370 - RNA, 19 nt, Artificial Sequence
  Description of Artificial Sequence: Synthetic oligonucleotide
guuaaacaguacugguauu

SEQ ID NO: 472371 - RNA, 19 nt, Artificial Sequence
  Description of Artificial Sequence: Synthetic oligonucleotide
gccguagucggccuccuuc

SEQ ID NO: 472372 - RNA, 19 nt, Artificial Sequence
  Description of Artificial Sequence: Synthetic oligonucleotide
cuaugggucuccuuuuguu

SEQ ID NO: 472373 - RNA, 19 nt, Artificial Sequence
  Description of Artificial Sequence: Synthetic oligonucleotide
gugugugugugugugugua

SEQ ID NO: 472374 - RNA, 19 nt, Artificial Sequence
  Description of Artificial Sequence: Synthetic oligonucleotide
ccugucgaagaaacuccug

SEQ ID NO: 472375 - RNA, 19 nt, Artificial Sequence
  Description of Artificial Sequence: Synthetic oligonucleotide
cguuccugucaaaauaaca

SEQ ID NO: 472376 - RNA, 19 nt, Artificial Sequence
  Description of Artificial Sequence: Synthetic oligonucleotide
agccacguuuggaauaauu

SEQ ID NO: 472377 - RNA, 19 nt, Artificial Sequence
  Description of Artificial Sequence: Synthetic oligonucleotide
gugcucuuaauuccuugau

SEQ ID NO: 472378 - RNA, 19 nt, Artificial Sequence
  Description of Artificial Sequence: Synthetic oligonucleotide
gagcaucccuuagacuuaa

SEQ ID NO: 472379 - RNA, 19 nt, Artificial Sequence
  Description of Artificial Sequence: Synthetic oligonucleotide
cacuaguacauuccuucau

SEQ ID NO: 472380 - RNA, 19 nt, Artificial Sequence
  Description of Artificial Sequence: Synthetic oligonucleotide
ugacuccuaugggucuccu

SEQ ID NO: 472381 - RNA, 19 nt, Artificial Sequence
  Description of Artificial Sequence: Synthetic oligonucleotide
aagcagcguuccugucaaa

SEQ ID NO: 472382 - RNA, 19 nt, Artificial Sequence
  Description of Artificial Sequence: Synthetic oligonucleotide
guauuagugucuagacuuu

SEQ ID NO: 472383 - RNA, 19 nt, Artificial Sequence
  Description of Artificial Sequence: Synthetic oligonucleotide
cccuuacuuaguaguucug

SEQ ID NO: 472384 - RNA, 19 nt, Artificial Sequence
  Description of Artificial Sequence: Synthetic oligonucleotide
uuggcucagcuguguugua

SEQ ID NO: 472385 - RNA, 19 nt, Artificial Sequence
  Description of Artificial Sequence: Synthetic oligonucleotide
cagcuguguuguaaccaaa

SEQ ID NO: 472386 - RNA, 19 nt, Artificial Sequence
  Description of Artificial Sequence: Synthetic oligonucleotide
cuccagcaaguuuuaacuu

SEQ ID NO: 472387 - RNA, 19 nt, Artificial Sequence
  Description of Artificial Sequence: Synthetic oligonucleotide
cgauauguuguucuguagu

SEQ ID NO: 472388 - RNA, 19 nt, Artificial Sequence
  Description of Artificial Sequence: Synthetic oligonucleotide
cugacgaagcucagccagu

SEQ ID NO: 472389 - RNA, 19 nt, Artificial Sequence
  Description of Artificial Sequence: Synthetic oligonucleotide
ccacguuuggaauaauuuu

SEQ ID NO: 472390 - RNA, 19 nt, Artificial Sequence
  Description of Artificial Sequence: Synthetic oligonucleotide
ggcugcuaaaugaaguuuu

SEQ ID NO: 472391 - RNA, 19 nt, Artificial Sequence
  Description of Artificial Sequence: Synthetic oligonucleotide
guacacuaguacauuccuu

SEQ ID NO: 472392 - RNA, 19 nt, Artificial Sequence
  Description of Artificial Sequence: Synthetic oligonucleotide
gcguuccugucaaaauaac

SEQ ID NO: 472393 - RNA, 19 nt, Artificial Sequence
  Description of Artificial Sequence: Synthetic oligonucleotide
gccacguuuggaauaauuu

SEQ ID NO: 472394 - RNA, 19 nt, Artificial Sequence
  Description of Artificial Sequence: Synthetic oligonucleotide
cuagacuuuucagcugaau

SEQ ID NO: 472395 - RNA, 19 nt, Artificial Sequence
  Description of Artificial Sequence: Synthetic oligonucleotide
gcagcguuccugucaaaau

SEQ ID NO: 472396 - RNA, 19 nt, Artificial Sequence
  Description of Artificial Sequence: Synthetic oligonucleotide
ccuaguucuuaaggcagaa

SEQ ID NO: 472397 - RNA, 19 nt, Artificial Sequence
  Description of Artificial Sequence: Synthetic oligonucleotide
cugccacuucaagaacuaa

SEQ ID NO: 472398 - RNA, 19 nt, Artificial Sequence
  Description of Artificial Sequence: Synthetic oligonucleotide
gcgcuguuugccauagucu

SEQ ID NO: 472399 - RNA, 19 nt, Artificial Sequence
  Description of Artificial Sequence: Synthetic oligonucleotide
ggagguccgaauugcgcuu

SEQ ID NO: 472400 - RNA, 19 nt, Artificial Sequence
  Description of Artificial Sequence: Synthetic oligonucleotide
gguccgaauugcgcuucuc

SEQ ID NO: 472401 - RNA, 19 nt, Artificial Sequence
  Description of Artificial Sequence: Synthetic oligonucleotide
agcaucccuuagacuuaaa

SEQ ID NO: 472402 - RNA, 19 nt, Artificial Sequence
  Description of Artificial Sequence: Synthetic oligonucleotide
cgugugugugugugugugu

SEQ ID NO: 472403 - RNA, 19 nt, Artificial Sequence
  Description of Artificial Sequence: Synthetic oligonucleotide
cgaagcucagccaguuguu

SEQ ID NO: 472404 - RNA, 19 nt, Artificial Sequence
  Description of Artificial Sequence: Synthetic oligonucleotide
uguaaagacgggaagcugg

SEQ ID NO: 472405 - RNA, 19 nt, Artificial Sequence
  Description of Artificial Sequence: Synthetic oligonucleotide
agagccaguucacagaugc

SEQ ID NO: 472406 - RNA, 19 nt, Artificial Sequence
  Description of Artificial Sequence: Synthetic oligonucleotide
aaaaugagcugcauagucc

SEQ ID NO: 472407 - RNA, 19 nt, Artificial Sequence
  Description of Artificial Sequence: Synthetic oligonucleotide
aacuacucggugcagcacc

SEQ ID NO: 472408 - RNA, 19 nt, Artificial Sequence
  Description of Artificial Sequence: Synthetic oligonucleotide
cuugacucaguacaaaugg

SEQ ID NO: 472409 - RNA, 19 nt, Artificial Sequence
  Description of Artificial Sequence: Synthetic oligonucleotide
uuggauuuaggcaaggcca

SEQ ID NO: 472410 - RNA, 19 nt, Artificial Sequence
  Description of Artificial Sequence: Synthetic oligonucleotide
cauuguaaugguaucaccc

SEQ ID NO: 472411 - RNA, 19 nt, Artificial Sequence
  Description of Artificial Sequence: Synthetic oligonucleotide
aguaguaacaaggagagcu

SEQ ID NO: 472412 - RNA, 19 nt, Artificial Sequence
  Description of Artificial Sequence: Synthetic oligonucleotide
uaaggugucaggaucagca

SEQ ID NO: 472413 - RNA, 19 nt, Artificial Sequence
  Description of Artificial Sequence: Synthetic oligonucleotide
acagaacuguagcagaugg

SEQ ID NO: 472414 - RNA, 19 nt, Artificial Sequence
  Description of Artificial Sequence: Synthetic oligonucleotide
uuaugcacagaacuguagc

SEQ ID NO: 472415 - RNA, 19 nt, Artificial Sequence
  Description of Artificial Sequence: Synthetic oligonucleotide
uggauagaggcauauuggg

SEQ ID NO: 472416 - RNA, 19 nt, Artificial Sequence
  Description of Artificial Sequence: Synthetic oligonucleotide
uacacuguauuuaaaauuu

SEQ ID NO: 472417 - RNA, 19 nt, Artificial Sequence
  Description of Artificial Sequence: Synthetic oligonucleotide
uguucaaacucaaauacuu

SEQ ID NO: 472418 - RNA, 19 nt, Artificial Sequence
  Description of Artificial Sequence: Synthetic oligonucleotide
ucccaguugacuaaggugu

SEQ ID NO: 472419 - RNA, 19 nt, Artificial Sequence
  Description of Artificial Sequence: Synthetic oligonucleotide
aauacuuuauuuuggugua

SEQ ID NO: 472420 - RNA, 19 nt, Artificial Sequence
  Description of Artificial Sequence: Synthetic oligonucleotide
uuucuuaugcacagaacug

SEQ ID NO: 472421 - RNA, 19 nt, Artificial Sequence
  Description of Artificial Sequence: Synthetic oligonucleotide
uccacuuggauuuaggcaa

SEQ ID NO: 472422 - RNA, 19 nt, Artificial Sequence
  Description of Artificial Sequence: Synthetic oligonucleotide
auggucuacauucauccac

SEQ ID NO: 472423 - RNA, 19 nt, Artificial Sequence
  Description of Artificial Sequence: Synthetic oligonucleotide
auugacugggugcaggaac

SEQ ID NO: 472424 - RNA, 19 nt, Artificial Sequence
  Description of Artificial Sequence: Synthetic oligonucleotide
acucaguacaaaugguccc

SEQ ID NO: 472425 - RNA, 19 nt, Artificial Sequence
  Description of Artificial Sequence: Synthetic oligonucleotide
aauguggacuucaggauac

SEQ ID NO: 472426 - RNA, 19 nt, Artificial Sequence
  Description of Artificial Sequence: Synthetic oligonucleotide
aacacggucagaguuauca

SEQ ID NO: 472427 - RNA, 19 nt, Artificial Sequence
  Description of Artificial Sequence: Synthetic oligonucleotide
uuaaccuccuggauagcgg

SEQ ID NO: 472428 - RNA, 19 nt, Artificial Sequence
  Description of Artificial Sequence: Synthetic oligonucleotide
ugcuucaauagcuuggcug

SEQ ID NO: 472429 - RNA, 19 nt, Artificial Sequence
  Description of Artificial Sequence: Synthetic oligonucleotide
guuaucacucuccccaucg

SEQ ID NO: 472430 - RNA, 19 nt, Artificial Sequence
  Description of Artificial Sequence: Synthetic oligonucleotide
cuuggauuuaggcaaggcc

SEQ ID NO: 472431 - RNA, 19 nt, Artificial Sequence
  Description of Artificial Sequence: Synthetic oligonucleotide
agaaaccagauggagaagg

SEQ ID NO: 472432 - RNA, 19 nt, Artificial Sequence
  Description of Artificial Sequence: Synthetic oligonucleotide
ugugcuucuccucugcgag

SEQ ID NO: 472433 - RNA, 19 nt, Artificial Sequence
  Description of Artificial Sequence: Synthetic oligonucleotide
aaccaagcuguucucaucu

SEQ ID NO: 472434 - RNA, 19 nt, Artificial Sequence
  Description of Artificial Sequence: Synthetic oligonucleotide
uuuagugauggguuccucc

SEQ ID NO: 472435 - RNA, 19 nt, Artificial Sequence
  Description of Artificial Sequence: Synthetic oligonucleotide
uguggcaacaacacucuug

SEQ ID NO: 472436 - RNA, 19 nt, Artificial Sequence
  Description of Artificial Sequence: Synthetic oligonucleotide
cuuccaacgcagaaggagg

SEQ ID NO: 472437 - RNA, 19 nt, Artificial Sequence
  Description of Artificial Sequence: Synthetic oligonucleotide
aauacccagcaaucucuac

SEQ ID NO: 472438 - RNA, 19 nt, Artificial Sequence
  Description of Artificial Sequence: Synthetic oligonucleotide
aauagcuuggcugaaggaa

SEQ ID NO: 472439 - RNA, 19 nt, Artificial Sequence
  Description of Artificial Sequence: Synthetic oligonucleotide
uuuacuccaggcuuucuca

SEQ ID NO: 472440 - RNA, 19 nt, Artificial Sequence
  Description of Artificial Sequence: Synthetic oligonucleotide
ucaauacuuuauuuuggug

SEQ ID NO: 472441 - RNA, 19 nt, Artificial Sequence
  Description of Artificial Sequence: Synthetic oligonucleotide
cuccauuucaauucugcgc

SEQ ID NO: 472442 - RNA, 19 nt, Artificial Sequence
  Description of Artificial Sequence: Synthetic oligonucleotide
cugucgaacauccucagac

SEQ ID NO: 472443 - RNA, 19 nt, Artificial Sequence
  Description of Artificial Sequence: Synthetic oligonucleotide
uggcaagugagagagauac

SEQ ID NO: 472444 - RNA, 19 nt, Artificial Sequence
  Description of Artificial Sequence: Synthetic oligonucleotide
aaagacgggaagcuggaaa

SEQ ID NO: 472445 - RNA, 19 nt, Artificial Sequence
  Description of Artificial Sequence: Synthetic oligonucleotide
cuucuucgaaagcagacag

SEQ ID NO: 472446 - RNA, 19 nt, Artificial Sequence
  Description of Artificial Sequence: Synthetic oligonucleotide
gauagcggccucaauaaag

SEQ ID NO: 472447 - RNA, 19 nt, Artificial Sequence
  Description of Artificial Sequence: Synthetic oligonucleotide
uguugcagagaucuucucu

SEQ ID NO: 472448 - RNA, 19 nt, Artificial Sequence
  Description of Artificial Sequence: Synthetic oligonucleotide
ugagagagauaccuauggc

SEQ ID NO: 472449 - RNA, 19 nt, Artificial Sequence
  Description of Artificial Sequence: Synthetic oligonucleotide
auagcggccucaauaaagc

SEQ ID NO: 472450 - RNA, 19 nt, Artificial Sequence
  Description of Artificial Sequence: Synthetic oligonucleotide
agugauggguuccuccugg

SEQ ID NO: 472451 - RNA, 19 nt, Artificial Sequence
  Description of Artificial Sequence: Synthetic oligonucleotide
aggaucagcaaaaugagcu

SEQ ID NO: 472452 - RNA, 19 nt, Artificial Sequence
  Description of Artificial Sequence: Synthetic oligonucleotide
guuaucuuggcugcagucg

SEQ ID NO: 472453 - RNA, 19 nt, Artificial Sequence
  Description of Artificial Sequence: Synthetic oligonucleotide
aagacgggaagcuggaaaa

SEQ ID NO: 472454 - RNA, 19 nt, Artificial Sequence
  Description of Artificial Sequence: Synthetic oligonucleotide
gacucaguacaaauggucc

SEQ ID NO: 472455 - RNA, 19 nt, Artificial Sequence
  Description of Artificial Sequence: Synthetic oligonucleotide
auaccuauggcgcugucga

SEQ ID NO: 472456 - RNA, 19 nt, Artificial Sequence
  Description of Artificial Sequence: Synthetic oligonucleotide
acauggaauacccagcaau

SEQ ID NO: 472457 - RNA, 19 nt, Artificial Sequence
  Description of Artificial Sequence: Synthetic oligonucleotide
uuccaacgcagaaggaggg

SEQ ID NO: 472458 - RNA, 19 nt, Artificial Sequence
  Description of Artificial Sequence: Synthetic oligonucleotide
aggaauugaaggcaggaaa

SEQ ID NO: 472459 - RNA, 19 nt, Artificial Sequence
  Description of Artificial Sequence: Synthetic oligonucleotide
ugacuaaggugucaggauc

SEQ ID NO: 472460 - RNA, 19 nt, Artificial Sequence
  Description of Artificial Sequence: Synthetic oligonucleotide
caauucugcgcucucggcg

SEQ ID NO: 472461 - RNA, 19 nt, Artificial Sequence
  Description of Artificial Sequence: Synthetic oligonucleotide
ucuaggguuuccuuagaga

SEQ ID NO: 472462 - RNA, 19 nt, Artificial Sequence
  Description of Artificial Sequence: Synthetic oligonucleotide
agcggguuaucuuggcugc

SEQ ID NO: 472463 - RNA, 19 nt, Artificial Sequence
  Description of Artificial Sequence: Synthetic oligonucleotide
auauugggcaagauggcac

SEQ ID NO: 472464 - RNA, 19 nt, Artificial Sequence
  Description of Artificial Sequence: Synthetic oligonucleotide
uuagugauggguuccuccu

SEQ ID NO: 472465 - RNA, 19 nt, Artificial Sequence
  Description of Artificial Sequence: Synthetic oligonucleotide
cuuagggccagagaacugg

SEQ ID NO: 472466 - RNA, 19 nt, Artificial Sequence
  Description of Artificial Sequence: Synthetic oligonucleotide
uaacaaggagagcugcuca

SEQ ID NO: 472467 - RNA, 19 nt, Artificial Sequence
  Description of Artificial Sequence: Synthetic oligonucleotide
agcgaguagugucacuugg

SEQ ID NO: 472468 - RNA, 19 nt, Artificial Sequence
  Description of Artificial Sequence: Synthetic oligonucleotide
gaaagguagugcaggaugc

SEQ ID NO: 472469 - RNA, 19 nt, Artificial Sequence
  Description of Artificial Sequence: Synthetic oligonucleotide
ugcuaagaggagaaaggga

SEQ ID NO: 472470 - RNA, 19 nt, Artificial Sequence
  Description of Artificial Sequence: Synthetic oligonucleotide
aagguagugcaggaugcac

SEQ ID NO: 472471 - RNA, 19 nt, Artificial Sequence
  Description of Artificial Sequence: Synthetic oligonucleotide
guggauagaggcauauugg

SEQ ID NO: 472472 - RNA, 19 nt, Artificial Sequence
  Description of Artificial Sequence: Synthetic oligonucleotide
acauucauccacuuggauu

SEQ ID NO: 472473 - RNA, 19 nt, Artificial Sequence
  Description of Artificial Sequence: Synthetic oligonucleotide
cuuaugcacagaacuguag

SEQ ID NO: 472474 - RNA, 19 nt, Artificial Sequence
  Description of Artificial Sequence: Synthetic oligonucleotide
uucucacugagugaaaggu

SEQ ID NO: 472475 - RNA, 19 nt, Artificial Sequence
  Description of Artificial Sequence: Synthetic oligonucleotide
caaucucuaccacuguugc

SEQ ID NO: 472476 - RNA, 19 nt, Artificial Sequence
  Description of Artificial Sequence: Synthetic oligonucleotide
uucuuaugcacagaacugu

SEQ ID NO: 472477 - RNA, 19 nt, Artificial Sequence
  Description of Artificial Sequence: Synthetic oligonucleotide
uaaaauuuucuugguuccc

SEQ ID NO: 472478 - RNA, 19 nt, Artificial Sequence
  Description of Artificial Sequence: Synthetic oligonucleotide
uguguuguccauccuccgc

SEQ ID NO: 472479 - RNA, 19 nt, Artificial Sequence
  Description of Artificial Sequence: Synthetic oligonucleotide
aguuuugggccacacgucu

SEQ ID NO: 472480 - RNA, 19 nt, Artificial Sequence
  Description of Artificial Sequence: Synthetic oligonucleotide
cauggaauacccagcaauc

SEQ ID NO: 472481 - RNA, 19 nt, Artificial Sequence
  Description of Artificial Sequence: Synthetic oligonucleotide
ugucacuugguguggacga

SEQ ID NO: 472482 - RNA, 19 nt, Artificial Sequence
  Description of Artificial Sequence: Synthetic oligonucleotide
agacauggaauacccagca

SEQ ID NO: 472483 - RNA, 19 nt, Artificial Sequence
  Description of Artificial Sequence: Synthetic oligonucleotide
uggucuacauucauccacu

SEQ ID NO: 472484 - RNA, 19 nt, Artificial Sequence
  Description of Artificial Sequence: Synthetic oligonucleotide
ugcugaauucacaggugag

SEQ ID NO: 472485 - RNA, 19 nt, Artificial Sequence
  Description of Artificial Sequence: Synthetic oligonucleotide
gauaccuauggcgcugucg

SEQ ID NO: 472486 - RNA, 19 nt, Artificial Sequence
  Description of Artificial Sequence: Synthetic oligonucleotide
ucccgaacaaggcagcgca

SEQ ID NO: 472487 - RNA, 19 nt, Artificial Sequence
  Description of Artificial Sequence: Synthetic oligonucleotide
auccacuuggauuuaggca

SEQ ID NO: 472488 - RNA, 19 nt, Artificial Sequence
  Description of Artificial Sequence: Synthetic oligonucleotide
aaaugguccccuccccaag

SEQ ID NO: 472489 - RNA, 19 nt, Artificial Sequence
  Description of Artificial Sequence: Synthetic oligonucleotide
auaaagcaggacucaggag

SEQ ID NO: 472490 - RNA, 19 nt, Artificial Sequence
  Description of Artificial Sequence: Synthetic oligonucleotide
uggauuuaggcaaggccac

SEQ ID NO: 472491 - RNA, 19 nt, Artificial Sequence
  Description of Artificial Sequence: Synthetic oligonucleotide
ucuuucuuaugcacagaac

SEQ ID NO: 472492 - RNA, 19 nt, Artificial Sequence
  Description of Artificial Sequence: Synthetic oligonucleotide
uggaauacccagcaaucuc

SEQ ID NO: 472493 - RNA, 19 nt, Artificial Sequence
  Description of Artificial Sequence: Synthetic oligonucleotide
uuagggccagagaacuggg

SEQ ID NO: 472494 - RNA, 19 nt, Artificial Sequence
  Description of Artificial Sequence: Synthetic oligonucleotide
ugguguaaagacgggaagc

SEQ ID NO: 472495 - RNA, 19 nt, Artificial Sequence
  Description of Artificial Sequence: Synthetic oligonucleotide
uggauagcggccucaauaa

SEQ ID NO: 472496 - RNA, 19 nt, Artificial Sequence
  Description of Artificial Sequence: Synthetic oligonucleotide
acaaacugacaguuggccu

SEQ ID NO: 472497 - RNA, 19 nt, Artificial Sequence
  Description of Artificial Sequence: Synthetic oligonucleotide
aaguaguaacaaggagagc

SEQ ID NO: 472498 - RNA, 19 nt, Artificial Sequence
  Description of Artificial Sequence: Synthetic oligonucleotide
cugagugaaagguagugca

SEQ ID NO: 472499 - RNA, 19 nt, Artificial Sequence
  Description of Artificial Sequence: Synthetic oligonucleotide
gacuucaggauaccugccc

SEQ ID NO: 472500 - RNA, 19 nt, Artificial Sequence
  Description of Artificial Sequence: Synthetic oligonucleotide
uugguguggacgaccgagg

SEQ ID NO: 472501 - RNA, 19 nt, Artificial Sequence
  Description of Artificial Sequence: Synthetic oligonucleotide
uugacucaguacaaauggu

SEQ ID NO: 472502 - RNA, 19 nt, Artificial Sequence
  Description of Artificial Sequence: Synthetic oligonucleotide
guacaaaugguccccuccc

SEQ ID NO: 472503 - RNA, 19 nt, Artificial Sequence
  Description of Artificial Sequence: Synthetic oligonucleotide
acuuggauuuaggcaaggc

SEQ ID NO: 472504 - RNA, 19 nt, Artificial Sequence
  Description of Artificial Sequence: Synthetic oligonucleotide
aggcauauugggcaagaug

SEQ ID NO: 472505 - RNA, 19 nt, Artificial Sequence
  Description of Artificial Sequence: Synthetic oligonucleotide
ugacaguuggccuguaaaa

SEQ ID NO: 472506 - RNA, 19 nt, Artificial Sequence
  Description of Artificial Sequence: Synthetic oligonucleotide
cuaccaaagggagagcaag

SEQ ID NO: 472507 - RNA, 19 nt, Artificial Sequence
  Description of Artificial Sequence: Synthetic oligonucleotide
agaacuacucggugcagca

SEQ ID NO: 472508 - RNA, 19 nt, Artificial Sequence
  Description of Artificial Sequence: Synthetic oligonucleotide
uauugggcaagauggcacu

SEQ ID NO: 472509 - RNA, 19 nt, Artificial Sequence
  Description of Artificial Sequence: Synthetic oligonucleotide
agugaaagguagugcagga

SEQ ID NO: 472510 - RNA, 19 nt, Artificial Sequence
  Description of Artificial Sequence: Synthetic oligonucleotide
ucuuaugcacagaacugua

SEQ ID NO: 472511 - RNA, 19 nt, Artificial Sequence
  Description of Artificial Sequence: Synthetic oligonucleotide
aguugacuaaggugucagg

SEQ ID NO: 472512 - RNA, 19 nt, Artificial Sequence
  Description of Artificial Sequence: Synthetic oligonucleotide
ugucgaacauccucagaca

SEQ ID NO: 472513 - RNA, 19 nt, Artificial Sequence
  Description of Artificial Sequence: Synthetic oligonucleotide
caggugaguggcaagugag

SEQ ID NO: 472514 - RNA, 19 nt, Artificial Sequence
  Description of Artificial Sequence: Synthetic oligonucleotide
caagcuaaucaaucuguuc

SEQ ID NO: 472515 - RNA, 19 nt, Artificial Sequence
  Description of Artificial Sequence: Synthetic oligonucleotide
aaugguccccuccccaaga

SEQ ID NO: 472516 - RNA, 19 nt, Artificial Sequence
  Description of Artificial Sequence: Synthetic oligonucleotide
uugacuaaggugucaggau

SEQ ID NO: 472517 - RNA, 19 nt, Artificial Sequence
  Description of Artificial Sequence: Synthetic oligonucleotide
aaggaagggagagucuucu

SEQ ID NO: 472518 - RNA, 19 nt, Artificial Sequence
  Description of Artificial Sequence: Synthetic oligonucleotide
acgggaagcuggaaaauac

SEQ ID NO: 472519 - RNA, 19 nt, Artificial Sequence
  Description of Artificial Sequence: Synthetic oligonucleotide
acggucagaguuaucacuc

SEQ ID NO: 472520 - RNA, 19 nt, Artificial Sequence
  Description of Artificial Sequence: Synthetic oligonucleotide
ccagagaacaaacuucugc

SEQ ID NO: 472521 - RNA, 19 nt, Artificial Sequence
  Description of Artificial Sequence: Synthetic oligonucleotide
uccguuucuuuccuccucu

SEQ ID NO: 472522 - RNA, 19 nt, Artificial Sequence
  Description of Artificial Sequence: Synthetic oligonucleotide
acgaccgaggugcugaaca

SEQ ID NO: 472523 - RNA, 19 nt, Artificial Sequence
  Description of Artificial Sequence: Synthetic oligonucleotide
caacguacuggcgugauuc

SEQ ID NO: 472524 - RNA, 19 nt, Artificial Sequence
  Description of Artificial Sequence: Synthetic oligonucleotide
aacgcagaaggagggacug

SEQ ID NO: 472525 - RNA, 19 nt, Artificial Sequence
  Description of Artificial Sequence: Synthetic oligonucleotide
auggcgcugucgaacaucc

SEQ ID NO: 472526 - RNA, 19 nt, Artificial Sequence
  Description of Artificial Sequence: Synthetic oligonucleotide
caaggcagcgcacauugac

SEQ ID NO: 472527 - RNA, 19 nt, Artificial Sequence
  Description of Artificial Sequence: Synthetic oligonucleotide
aggcagcgcacauugacug

SEQ ID NO: 472528 - RNA, 19 nt, Artificial Sequence
  Description of Artificial Sequence: Synthetic oligonucleotide
uucuucgaaagcagacaga

SEQ ID NO: 472529 - RNA, 19 nt, Artificial Sequence
  Description of Artificial Sequence: Synthetic oligonucleotide
uacucggugcagcaccugc

SEQ ID NO: 472530 - RNA, 19 nt, Artificial Sequence
  Description of Artificial Sequence: Synthetic oligonucleotide
ucgaaagcagacagauacu

SEQ ID NO: 472531 - RNA, 19 nt, Artificial Sequence
  Description of Artificial Sequence: Synthetic oligonucleotide
ugcuguucaucuccuagau

SEQ ID NO: 472532 - RNA, 19 nt, Artificial Sequence
  Description of Artificial Sequence: Synthetic oligonucleotide
agugugcuucuccucugcg

SEQ ID NO: 472533 - RNA, 19 nt, Artificial Sequence
  Description of Artificial Sequence: Synthetic oligonucleotide
aucacccacaacguacugg

SEQ ID NO: 472534 - RNA, 19 nt, Artificial Sequence
  Description of Artificial Sequence: Synthetic oligonucleotide
gaacgaggggaguccagag

SEQ ID NO: 472535 - RNA, 19 nt, Artificial Sequence
  Description of Artificial Sequence: Synthetic oligonucleotide
accuauggcgcugucgaac

SEQ ID NO: 472536 - RNA, 19 nt, Artificial Sequence
  Description of Artificial Sequence: Synthetic oligonucleotide
auacucccgaacaaggcag

SEQ ID NO: 472537 - RNA, 19 nt, Artificial Sequence
  Description of Artificial Sequence: Synthetic oligonucleotide
ccuuagagaccacaggagg

SEQ ID NO: 472538 - RNA, 19 nt, Artificial Sequence
  Description of Artificial Sequence: Synthetic oligonucleotide
agaugaaugggauggucua

SEQ ID NO: 472539 - RNA, 19 nt, Artificial Sequence
  Description of Artificial Sequence: Synthetic oligonucleotide
uagaacuacucggugcagc

SEQ ID NO: 472540 - RNA, 19 nt, Artificial Sequence
  Description of Artificial Sequence: Synthetic oligonucleotide
acccacaacguacuggcgu

SEQ ID NO: 472541 - RNA, 19 nt, Artificial Sequence
  Description of Artificial Sequence: Synthetic oligonucleotide
gcuugguagaaguaguaac

SEQ ID NO: 472542 - RNA, 19 nt, Artificial Sequence
  Description of Artificial Sequence: Synthetic oligonucleotide
ucuaccacuguugcagaga

SEQ ID NO: 472543 - RNA, 19 nt, Artificial Sequence
  Description of Artificial Sequence: Synthetic oligonucleotide
uccuccgcuugguagaagu

SEQ ID NO: 472544 - RNA, 19 nt, Artificial Sequence
  Description of Artificial Sequence: Synthetic oligonucleotide
agcuaaucaaucuguucaa

SEQ ID NO: 472545 - RNA, 19 nt, Artificial Sequence
  Description of Artificial Sequence: Synthetic oligonucleotide
cauucauccacuuggauuu

SEQ ID NO: 472546 - RNA, 19 nt, Artificial Sequence
  Description of Artificial Sequence: Synthetic oligonucleotide
aacguacuggcgugauucu

SEQ ID NO: 472547 - RNA, 19 nt, Artificial Sequence
  Description of Artificial Sequence: Synthetic oligonucleotide
guaguaacaaggagagcug

SEQ ID NO: 472548 - RNA, 19 nt, Artificial Sequence
  Description of Artificial Sequence: Synthetic oligonucleotide
ucuuagggccagagaacug

SEQ ID NO: 472549 - RNA, 19 nt, Artificial Sequence
  Description of Artificial Sequence: Synthetic oligonucleotide
gcuacuuucucuucuagaa

SEQ ID NO: 472550 - RNA, 19 nt, Artificial Sequence
  Description of Artificial Sequence: Synthetic oligonucleotide
ugcagucgguggauagagg

SEQ ID NO: 472551 - RNA, 19 nt, Artificial Sequence
  Description of Artificial Sequence: Synthetic oligonucleotide
gguaucacccacaacguac

SEQ ID NO: 472552 - RNA, 19 nt, Artificial Sequence
  Description of Artificial Sequence: Synthetic oligonucleotide
aaagguagugcaggaugca

SEQ ID NO: 472553 - RNA, 19 nt, Artificial Sequence
  Description of Artificial Sequence: Synthetic oligonucleotide
cagcggguuaucuuggcug

SEQ ID NO: 472554 - RNA, 19 nt, Artificial Sequence
  Description of Artificial Sequence: Synthetic oligonucleotide
gcagucgguggauagaggc

SEQ ID NO: 472555 - RNA, 19 nt, Artificial Sequence
  Description of Artificial Sequence: Synthetic oligonucleotide
ugagcgaguagugucacuu

SEQ ID NO: 472556 - RNA, 19 nt, Artificial Sequence
  Description of Artificial Sequence: Synthetic oligonucleotide
ggaauugaaggcaggaaac

SEQ ID NO: 472557 - RNA, 19 nt, Artificial Sequence
  Description of Artificial Sequence: Synthetic oligonucleotide
gaucuucuuagggccagag

SEQ ID NO: 472558 - RNA, 19 nt, Artificial Sequence
  Description of Artificial Sequence: Synthetic oligonucleotide
cucagcugggugaagccug

SEQ ID NO: 472559 - RNA, 19 nt, Artificial Sequence
  Description of Artificial Sequence: Synthetic oligonucleotide
cagaguuaucacucucccc

SEQ ID NO: 472560 - RNA, 19 nt, Artificial Sequence
  Description of Artificial Sequence: Synthetic oligonucleotide
gauuuaggcaaggccacca

SEQ ID NO: 472561 - RNA, 19 nt, Artificial Sequence
  Description of Artificial Sequence: Synthetic oligonucleotide
uguagcagaugggacauuu

SEQ ID NO: 472562 - RNA, 19 nt, Artificial Sequence
  Description of Artificial Sequence: Synthetic oligonucleotide
caucugcuaccucugacuc

SEQ ID NO: 472563 - RNA, 19 nt, Artificial Sequence
  Description of Artificial Sequence: Synthetic oligonucleotide
uuacuccaggcuuucucac

SEQ ID NO: 472564 - RNA, 19 nt, Artificial Sequence
  Description of Artificial Sequence: Synthetic oligonucleotide
cuggaaacugggcacagga

SEQ ID NO: 472565 - RNA, 19 nt, Artificial Sequence
  Description of Artificial Sequence: Synthetic oligonucleotide
guaaugguaucacccacaa

SEQ ID NO: 472566 - RNA, 19 nt, Artificial Sequence
  Description of Artificial Sequence: Synthetic oligonucleotide
ugacgcuuccuuuucucaa

SEQ ID NO: 472567 - RNA, 19 nt, Artificial Sequence
  Description of Artificial Sequence: Synthetic oligonucleotide
caucuccuagaugaauggg

SEQ ID NO: 472568 - RNA, 19 nt, Artificial Sequence
  Description of Artificial Sequence: Synthetic oligonucleotide
agggacugcccugacuggc

SEQ ID NO: 472569 - RNA, 19 nt, Artificial Sequence
  Description of Artificial Sequence: Synthetic oligonucleotide
aaacugacaguuggccugu

SEQ ID NO: 472570 - RNA, 19 nt, Artificial Sequence
  Description of Artificial Sequence: Synthetic oligonucleotide
uggacgaccgaggugcuga

SEQ ID NO: 472571 - RNA, 19 nt, Artificial Sequence
  Description of Artificial Sequence: Synthetic oligonucleotide
ucacugagugaaagguagu

SEQ ID NO: 472572 - RNA, 19 nt, Artificial Sequence
  Description of Artificial Sequence: Synthetic oligonucleotide
ggaucagcaaaaugagcug

SEQ ID NO: 472573 - RNA, 19 nt, Artificial Sequence
  Description of Artificial Sequence: Synthetic oligonucleotide
ucacaggugaguggcaagu

SEQ ID NO: 472574 - RNA, 19 nt, Artificial Sequence
  Description of Artificial Sequence: Synthetic oligonucleotide
ucuuuuggcgcugacgcuu

SEQ ID NO: 472575 - RNA, 19 nt, Artificial Sequence
  Description of Artificial Sequence: Synthetic oligonucleotide
acauuuacuccaggcuuuc

SEQ ID NO: 472576 - RNA, 19 nt, Artificial Sequence
  Description of Artificial Sequence: Synthetic oligonucleotide
gauggucuacauucaucca

SEQ ID NO: 472577 - RNA, 19 nt, Artificial Sequence
  Description of Artificial Sequence: Synthetic oligonucleotide
gugucacuugguguggacg

SEQ ID NO: 472578 - RNA, 19 nt, Artificial Sequence
  Description of Artificial Sequence: Synthetic oligonucleotide
auggaauacccagcaaucu

SEQ ID NO: 472579 - RNA, 19 nt, Artificial Sequence
  Description of Artificial Sequence: Synthetic oligonucleotide
agagauaccuauggcgcug

SEQ ID NO: 472580 - RNA, 19 nt, Artificial Sequence
  Description of Artificial Sequence: Synthetic oligonucleotide
uaaugguaucacccacaac

SEQ ID NO: 472581 - RNA, 19 nt, Artificial Sequence
  Description of Artificial Sequence: Synthetic oligonucleotide
augaaugggauggucuaca

SEQ ID NO: 472582 - RNA, 19 nt, Artificial Sequence
  Description of Artificial Sequence: Synthetic oligonucleotide
agcagucacaacaccagug

SEQ ID NO: 472583 - RNA, 19 nt, Artificial Sequence
  Description of Artificial Sequence: Synthetic oligonucleotide
aaggcagcgcacauugacu

SEQ ID NO: 472584 - RNA, 19 nt, Artificial Sequence
  Description of Artificial Sequence: Synthetic oligonucleotide
uaggaauugaaggcaggaa

SEQ ID NO: 472585 - RNA, 19 nt, Artificial Sequence
  Description of Artificial Sequence: Synthetic oligonucleotide
agcggccucaauaaagcag

SEQ ID NO: 472586 - RNA, 19 nt, Artificial Sequence
  Description of Artificial Sequence: Synthetic oligonucleotide
gaacuguagcagaugggac

SEQ ID NO: 472587 - RNA, 19 nt, Artificial Sequence
  Description of Artificial Sequence: Synthetic oligonucleotide
ugguguggacgaccgaggu

SEQ ID NO: 472588 - RNA, 19 nt, Artificial Sequence
  Description of Artificial Sequence: Synthetic oligonucleotide
guaacaaggagagcugcuc

SEQ ID NO: 472589 - RNA, 19 nt, Artificial Sequence
  Description of Artificial Sequence: Synthetic oligonucleotide
ggugaguggcaagugagag

SEQ ID NO: 472590 - RNA, 19 nt, Artificial Sequence
  Description of Artificial Sequence: Synthetic oligonucleotide
cacugagugaaagguagug

SEQ ID NO: 472591 - RNA, 19 nt, Artificial Sequence
  Description of Artificial Sequence: Synthetic oligonucleotide
agcugcauuguaaugguau

SEQ ID NO: 472592 - RNA, 19 nt, Artificial Sequence
  Description of Artificial Sequence: Synthetic oligonucleotide
agugagagagauaccuaug

SEQ ID NO: 472593 - RNA, 19 nt, Artificial Sequence
  Description of Artificial Sequence: Synthetic oligonucleotide
ccgaaucuuaaccuccugg

SEQ ID NO: 472594 - RNA, 19 nt, Artificial Sequence
  Description of Artificial Sequence: Synthetic oligonucleotide
ucaaagugaccugccuggc

SEQ ID NO: 472595 - RNA, 19 nt, Artificial Sequence
  Description of Artificial Sequence: Synthetic oligonucleotide
guaggaauugaaggcagga

SEQ ID NO: 472596 - RNA, 19 nt, Artificial Sequence
  Description of Artificial Sequence: Synthetic oligonucleotide
gcggccucaauaaagcagg

SEQ ID NO: 472597 - RNA, 19 nt, Artificial Sequence
  Description of Artificial Sequence: Synthetic oligonucleotide
acuucugcuaagaggagaa

SEQ ID NO: 472598 - RNA, 19 nt, Artificial Sequence
  Description of Artificial Sequence: Synthetic oligonucleotide
cacuguugcagagaucuuc

SEQ ID NO: 472599 - RNA, 19 nt, Artificial Sequence
  Description of Artificial Sequence: Synthetic oligonucleotide
auggcuacagaugcgcacu

SEQ ID NO: 472600 - RNA, 19 nt, Artificial Sequence
  Description of Artificial Sequence: Synthetic oligonucleotide
ucacuugguguggacgacc

SEQ ID NO: 472601 - RNA, 19 nt, Artificial Sequence
  Description of Artificial Sequence: Synthetic oligonucleotide
uguggacuucaggauaccu

SEQ ID NO: 472602 - RNA, 19 nt, Artificial Sequence
  Description of Artificial Sequence: Synthetic oligonucleotide
cuccgcuugguagaaguag

SEQ ID NO: 472603 - RNA, 19 nt, Artificial Sequence
  Description of Artificial Sequence: Synthetic oligonucleotide
aggugaaauucaacaagug

SEQ ID NO: 472604 - RNA, 19 nt, Artificial Sequence
  Description of Artificial Sequence: Synthetic oligonucleotide
gauacucuagcacacccuu

SEQ ID NO: 472605 - RNA, 19 nt, Artificial Sequence
  Description of Artificial Sequence: Synthetic oligonucleotide
auagcuuggcugaaggaau

SEQ ID NO: 472606 - RNA, 19 nt, Artificial Sequence
  Description of Artificial Sequence: Synthetic oligonucleotide
cugcuuuugccuucccaac

SEQ ID NO: 472607 - RNA, 19 nt, Artificial Sequence
  Description of Artificial Sequence: Synthetic oligonucleotide
cuggauagcggccucaaua

SEQ ID NO: 472608 - RNA, 19 nt, Artificial Sequence
  Description of Artificial Sequence: Synthetic oligonucleotide
ugagcugcauaguccuggu

SEQ ID NO: 472609 - RNA, 19 nt, Artificial Sequence
  Description of Artificial Sequence: Synthetic oligonucleotide
ucggcgacgcuccucucga

SEQ ID NO: 472610 - RNA, 19 nt, Artificial Sequence
  Description of Artificial Sequence: Synthetic oligonucleotide
gagcgaguagugucacuug

SEQ ID NO: 472611 - RNA, 19 nt, Artificial Sequence
  Description of Artificial Sequence: Synthetic oligonucleotide
gacuucugcuaagaggaga

SEQ ID NO: 472612 - RNA, 19 nt, Artificial Sequence
  Description of Artificial Sequence: Synthetic oligonucleotide
auuuaggcaaggccaccaa

SEQ ID NO: 472613 - RNA, 19 nt, Artificial Sequence
  Description of Artificial Sequence: Synthetic oligonucleotide
acaacaccagugaccuccc

SEQ ID NO: 472614 - RNA, 19 nt, Artificial Sequence
  Description of Artificial Sequence: Synthetic oligonucleotide
uucuuuuggcgcugacgcu

SEQ ID NO: 472615 - RNA, 19 nt, Artificial Sequence
  Description of Artificial Sequence: Synthetic oligonucleotide
gcauuguaaugguaucacc

SEQ ID NO: 472616 - RNA, 19 nt, Artificial Sequence
  Description of Artificial Sequence: Synthetic oligonucleotide
ugcacgcccagcagaaaau

SEQ ID NO: 472617 - RNA, 19 nt, Artificial Sequence
  Description of Artificial Sequence: Synthetic oligonucleotide
cugcagucgguggauagag

SEQ ID NO: 472618 - RNA, 19 nt, Artificial Sequence
  Description of Artificial Sequence: Synthetic oligonucleotide
cuuucuggguuggaaaaca

SEQ ID NO: 472619 - RNA, 19 nt, Artificial Sequence
  Description of Artificial Sequence: Synthetic oligonucleotide
acagcggguuaucuuggcu

SEQ ID NO: 472620 - RNA, 19 nt, Artificial Sequence
  Description of Artificial Sequence: Synthetic oligonucleotide
auaccugcccugucucuug

SEQ ID NO: 472621 - RNA, 19 nt, Artificial Sequence
  Description of Artificial Sequence: Synthetic oligonucleotide
agaaccagaggagcaggug

SEQ ID NO: 472622 - RNA, 19 nt, Artificial Sequence
  Description of Artificial Sequence: Synthetic oligonucleotide
guugagugucaauacuuua

SEQ ID NO: 472623 - RNA, 19 nt, Artificial Sequence
  Description of Artificial Sequence: Synthetic oligonucleotide
ugguaucacccacaacgua

SEQ ID NO: 472624 - RNA, 19 nt, Artificial Sequence
  Description of Artificial Sequence: Synthetic oligonucleotide
gaauugaaggcaggaaacu

SEQ ID NO: 472625 - RNA, 19 nt, Artificial Sequence
  Description of Artificial Sequence: Synthetic oligonucleotide
gccucaauaaagcaggacu

SEQ ID NO: 472626 - RNA, 19 nt, Artificial Sequence
  Description of Artificial Sequence: Synthetic oligonucleotide
cucggcgacgcuccucucg

SEQ ID NO: 472627 - RNA, 19 nt, Artificial Sequence
  Description of Artificial Sequence: Synthetic oligonucleotide
gaguccagagaacaaacuu

SEQ ID NO: 472628 - RNA, 19 nt, Artificial Sequence
  Description of Artificial Sequence: Synthetic oligonucleotide
agaacgaggggaguccaga

SEQ ID NO: 472629 - RNA, 19 nt, Artificial Sequence
  Description of Artificial Sequence: Synthetic oligonucleotide
gugauucuguggcaacaac

SEQ ID NO: 472630 - RNA, 19 nt, Artificial Sequence
  Description of Artificial Sequence: Synthetic oligonucleotide
aauucacaggugaguggca

SEQ ID NO: 472631 - RNA, 19 nt, Artificial Sequence
  Description of Artificial Sequence: Synthetic oligonucleotide
gaaucuuaaccuccuggau

SEQ ID NO: 472632 - RNA, 19 nt, Artificial Sequence
  Description of Artificial Sequence: Synthetic oligonucleotide
ccaacccucagcaucugag

SEQ ID NO: 472633 - RNA, 19 nt, Artificial Sequence
  Description of Artificial Sequence: Synthetic oligonucleotide
auguggacuucaggauacc

SEQ ID NO: 472634 - RNA, 19 nt, Artificial Sequence
  Description of Artificial Sequence: Synthetic oligonucleotide
agcgcacauugacugggug

SEQ ID NO: 472635 - RNA, 19 nt, Artificial Sequence
  Description of Artificial Sequence: Synthetic oligonucleotide
augguaucacccacaacgu

SEQ ID NO: 472636 - RNA, 19 nt, Artificial Sequence
  Description of Artificial Sequence: Synthetic oligonucleotide
agcuuggcugaaggaauuc

SEQ ID NO: 472637 - RNA, 19 nt, Artificial Sequence
  Description of Artificial Sequence: Synthetic oligonucleotide
caguuuugggccacacguc

SEQ ID NO: 472638 - RNA, 19 nt, Artificial Sequence
  Description of Artificial Sequence: Synthetic oligonucleotide
uauggcgcugucgaacauc

SEQ ID NO: 472639 - RNA, 19 nt, Artificial Sequence
  Description of Artificial Sequence: Synthetic oligonucleotide
cuaaggugucaggaucagc

SEQ ID NO: 472640 - RNA, 19 nt, Artificial Sequence
  Description of Artificial Sequence: Synthetic oligonucleotide
cuuuuggcgcugacgcuuc

SEQ ID NO: 472641 - RNA, 19 nt, Artificial Sequence
  Description of Artificial Sequence: Synthetic oligonucleotide
cugacuggcagugggugac

SEQ ID NO: 472642 - RNA, 19 nt, Artificial Sequence
  Description of Artificial Sequence: Synthetic oligonucleotide
guguaaagacgggaagcug

SEQ ID NO: 472643 - RNA, 19 nt, Artificial Sequence
  Description of Artificial Sequence: Synthetic oligonucleotide
caauagcuuggcugaagga

SEQ ID NO: 472644 - RNA, 19 nt, Artificial Sequence
  Description of Artificial Sequence: Synthetic oligonucleotide
guaaagacgggaagcugga

SEQ ID NO: 472645 - RNA, 19 nt, Artificial Sequence
  Description of Artificial Sequence: Synthetic oligonucleotide
auucacaggugaguggcaa

SEQ ID NO: 472646 - RNA, 19 nt, Artificial Sequence
  Description of Artificial Sequence: Synthetic oligonucleotide
agaaggugccugggugagc

SEQ ID NO: 472647 - RNA, 19 nt, Artificial Sequence
  Description of Artificial Sequence: Synthetic oligonucleotide
acgcccagcagaaaaugug

SEQ ID NO: 472648 - RNA, 19 nt, Artificial Sequence
  Description of Artificial Sequence: Synthetic oligonucleotide
agugggugacaaagggguc

SEQ ID NO: 472649 - RNA, 19 nt, Artificial Sequence
  Description of Artificial Sequence: Synthetic oligonucleotide
cuacuccagacagagccuc

SEQ ID NO: 472650 - RNA, 19 nt, Artificial Sequence
  Description of Artificial Sequence: Synthetic oligonucleotide
uuuuggcgcugacgcuucc

SEQ ID NO: 472651 - RNA, 19 nt, Artificial Sequence
  Description of Artificial Sequence: Synthetic oligonucleotide
cacaggggccggaggaacc

SEQ ID NO: 472652 - RNA, 19 nt, Artificial Sequence
  Description of Artificial Sequence: Synthetic oligonucleotide
accgaggugcugaacagga

SEQ ID NO: 472653 - RNA, 19 nt, Artificial Sequence
  Description of Artificial Sequence: Synthetic oligonucleotide
gagagauaccuauggcgcu

SEQ ID NO: 472654 - RNA, 19 nt, Artificial Sequence
  Description of Artificial Sequence: Synthetic oligonucleotide
agauaccuauggcgcuguc

SEQ ID NO: 472655 - RNA, 19 nt, Artificial Sequence
  Description of Artificial Sequence: Synthetic oligonucleotide
aggaaccaagcuguucuca

SEQ ID NO: 472656 - RNA, 19 nt, Artificial Sequence
  Description of Artificial Sequence: Synthetic oligonucleotide
cacagcggguuaucuuggc

SEQ ID NO: 472657 - RNA, 19 nt, Artificial Sequence
  Description of Artificial Sequence: Synthetic oligonucleotide
gcaagugagagagauaccu

SEQ ID NO: 472658 - RNA, 19 nt, Artificial Sequence
  Description of Artificial Sequence: Synthetic oligonucleotide
cagagccucuucccgaauc

SEQ ID NO: 472659 - RNA, 19 nt, Artificial Sequence
  Description of Artificial Sequence: Synthetic oligonucleotide
ggcgcugucgaacauccuc

SEQ ID NO: 472660 - RNA, 19 nt, Artificial Sequence
  Description of Artificial Sequence: Synthetic oligonucleotide
gcugcauuguaaugguauc

SEQ ID NO: 472661 - RNA, 19 nt, Artificial Sequence
  Description of Artificial Sequence: Synthetic oligonucleotide
cuagaacuacucggugcag

SEQ ID NO: 472662 - RNA, 19 nt, Artificial Sequence
  Description of Artificial Sequence: Synthetic oligonucleotide
ggacccacagcagaaccag

SEQ ID NO: 472663 - RNA, 19 nt, Artificial Sequence
  Description of Artificial Sequence: Synthetic oligonucleotide
acgcagaaggagggacugc

SEQ ID NO: 472664 - RNA, 19 nt, Artificial Sequence
  Description of Artificial Sequence: Synthetic oligonucleotide
agccugguuuagugauggg

SEQ ID NO: 472665 - RNA, 19 nt, Artificial Sequence
  Description of Artificial Sequence: Synthetic oligonucleotide
guuuugggccacacgucug

SEQ ID NO: 472666 - RNA, 19 nt, Artificial Sequence
  Description of Artificial Sequence: Synthetic oligonucleotide
uuggcgcugacgcuuccuu

SEQ ID NO: 472667 - RNA, 19 nt, Artificial Sequence
  Description of Artificial Sequence: Synthetic oligonucleotide
ccacacgucugcuuuugcc

SEQ ID NO: 472668 - RNA, 19 nt, Artificial Sequence
  Description of Artificial Sequence: Synthetic oligonucleotide
cugcaugagaacugggacu

SEQ ID NO: 472669 - RNA, 19 nt, Artificial Sequence
  Description of Artificial Sequence: Synthetic oligonucleotide
cacccacaacguacuggcg

SEQ ID NO: 472670 - RNA, 19 nt, Artificial Sequence
  Description of Artificial Sequence: Synthetic oligonucleotide
ggacucaggagugugcuuc

SEQ ID NO: 472671 - RNA, 19 nt, Artificial Sequence
  Description of Artificial Sequence: Synthetic oligonucleotide
gaacuacucggugcagcac

SEQ ID NO: 472672 - RNA, 19 nt, Artificial Sequence
  Description of Artificial Sequence: Synthetic oligonucleotide
ucuuaaccuccuggauagc

SEQ ID NO: 472673 - RNA, 19 nt, Artificial Sequence
  Description of Artificial Sequence: Synthetic oligonucleotide
uguccauccuccgcuuggu

SEQ ID NO: 472674 - RNA, 19 nt, Artificial Sequence
  Description of Artificial Sequence: Synthetic oligonucleotide
gaaaccagauggagaaggu

SEQ ID NO: 472675 - RNA, 19 nt, Artificial Sequence
  Description of Artificial Sequence: Synthetic oligonucleotide
uaaagacgggaagcuggaa

SEQ ID NO: 472676 - RNA, 19 nt, Artificial Sequence
  Description of Artificial Sequence: Synthetic oligonucleotide
ucgguggauagaggcauau

SEQ ID NO: 472677 - RNA, 19 nt, Artificial Sequence
  Description of Artificial Sequence: Synthetic oligonucleotide
caguacaaaugguccccuc

SEQ ID NO: 472678 - RNA, 19 nt, Artificial Sequence
  Description of Artificial Sequence: Synthetic oligonucleotide
agugaccugccuggccacg

SEQ ID NO: 472679 - RNA, 19 nt, Artificial Sequence
  Description of Artificial Sequence: Synthetic oligonucleotide
ugcgcucucggcgacgcuc

SEQ ID NO: 472680 - RNA, 19 nt, Artificial Sequence
  Description of Artificial Sequence: Synthetic oligonucleotide
cucccgaacaaggcagcgc

SEQ ID NO: 472681 - RNA, 19 nt, Artificial Sequence
  Description of Artificial Sequence: Synthetic oligonucleotide
gacgggaagcuggaaaaua

SEQ ID NO: 472682 - RNA, 19 nt, Artificial Sequence
  Description of Artificial Sequence: Synthetic oligonucleotide
uuuggcgcugacgcuuccu

SEQ ID NO: 472683 - RNA, 19 nt, Artificial Sequence
  Description of Artificial Sequence: Synthetic oligonucleotide
caggagugugcuucuccuc

SEQ ID NO: 472684 - RNA, 19 nt, Artificial Sequence
  Description of Artificial Sequence: Synthetic oligonucleotide
uggcgugauucuguggcaa

SEQ ID NO: 472685 - RNA, 19 nt, Artificial Sequence
  Description of Artificial Sequence: Synthetic oligonucleotide
cagucgguggauagaggca

SEQ ID NO: 472686 - RNA, 19 nt, Artificial Sequence
  Description of Artificial Sequence: Synthetic oligonucleotide
cacggucagaguuaucacu

SEQ ID NO: 472687 - RNA, 19 nt, Artificial Sequence
  Description of Artificial Sequence: Synthetic oligonucleotide
acguacuggcgugauucug

SEQ ID NO: 472688 - RNA, 19 nt, Artificial Sequence
  Description of Artificial Sequence: Synthetic oligonucleotide
ggcugcagucgguggauag

SEQ ID NO: 472689 - RNA, 19 nt, Artificial Sequence
  Description of Artificial Sequence: Synthetic oligonucleotide
aguagcugguguguccaau

SEQ ID NO: 472690 - RNA, 19 nt, Artificial Sequence
  Description of Artificial Sequence: Synthetic oligonucleotide
gcgacgcuccucucgagcc

SEQ ID NO: 472691 - RNA, 19 nt, Artificial Sequence
  Description of Artificial Sequence: Synthetic oligonucleotide
uuugggccacacgucugcu

SEQ ID NO: 472692 - RNA, 19 nt, Artificial Sequence
  Description of Artificial Sequence: Synthetic oligonucleotide
uggcuugacucaguacaaa

SEQ ID NO: 472693 - RNA, 19 nt, Artificial Sequence
  Description of Artificial Sequence: Synthetic oligonucleotide
ccccaagcuaaucaaucug

SEQ ID NO: 472694 - RNA, 19 nt, Artificial Sequence
  Description of Artificial Sequence: Synthetic oligonucleotide
cccacaacguacuggcgug

SEQ ID NO: 472695 - RNA, 19 nt, Artificial Sequence
  Description of Artificial Sequence: Synthetic oligonucleotide
gacgcuuccuuuucucaau

SEQ ID NO: 472696 - RNA, 19 nt, Artificial Sequence
  Description of Artificial Sequence: Synthetic oligonucleotide
gguguaaagacgggaagcu

SEQ ID NO: 472697 - RNA, 19 nt, Artificial Sequence
  Description of Artificial Sequence: Synthetic oligonucleotide
acaacguacuggcgugauu

SEQ ID NO: 472698 - RNA, 19 nt, Artificial Sequence
  Description of Artificial Sequence: Synthetic oligonucleotide
cgaguagugucacuuggug

SEQ ID NO: 472699 - RNA, 19 nt, Artificial Sequence
  Description of Artificial Sequence: Synthetic oligonucleotide
guaucacccacaacguacu

SEQ ID NO: 472700 - RNA, 19 nt, Artificial Sequence
  Description of Artificial Sequence: Synthetic oligonucleotide
cagagccaguucacagaug

SEQ ID NO: 472701 - RNA, 19 nt, Artificial Sequence
  Description of Artificial Sequence: Synthetic oligonucleotide
uggagcaguuuugggccac

SEQ ID NO: 472702 - RNA, 19 nt, Artificial Sequence
  Description of Artificial Sequence: Synthetic oligonucleotide
uaccuauggcgcugucgaa

SEQ ID NO: 472703 - RNA, 19 nt, Artificial Sequence
  Description of Artificial Sequence: Synthetic oligonucleotide
augguccccuccccaagau

SEQ ID NO: 472704 - RNA, 19 nt, Artificial Sequence
  Description of Artificial Sequence: Synthetic oligonucleotide
uggcuacagaugcgcacuu

SEQ ID NO: 472705 - RNA, 19 nt, Artificial Sequence
  Description of Artificial Sequence: Synthetic oligonucleotide
ggauuuaggcaaggccacc

SEQ ID NO: 472706 - RNA, 19 nt, Artificial Sequence
  Description of Artificial Sequence: Synthetic oligonucleotide
cuaccacuguugcagagau

SEQ ID NO: 472707 - RNA, 19 nt, Artificial Sequence
  Description of Artificial Sequence: Synthetic oligonucleotide
ggcgacgcuccucucgagc

SEQ ID NO: 472708 - RNA, 19 nt, Artificial Sequence
  Description of Artificial Sequence: Synthetic oligonucleotide
agacgggaagcuggaaaau

SEQ ID NO: 472709 - RNA, 19 nt, Artificial Sequence
  Description of Artificial Sequence: Synthetic oligonucleotide
ccacuuggauuuaggcaag

SEQ ID NO: 472710 - RNA, 19 nt, Artificial Sequence
  Description of Artificial Sequence: Synthetic oligonucleotide
ggacugcccugacuggcag

SEQ ID NO: 472711 - RNA, 19 nt, Artificial Sequence
  Description of Artificial Sequence: Synthetic oligonucleotide
ccaacgcagaaggagggac

SEQ ID NO: 472712 - RNA, 19 nt, Artificial Sequence
  Description of Artificial Sequence: Synthetic oligonucleotide
gggauggucuacauucauc

SEQ ID NO: 472713 - RNA, 19 nt, Artificial Sequence
  Description of Artificial Sequence: Synthetic oligonucleotide
ccuuguuaaaaggcuuaug

SEQ ID NO: 472714 - RNA, 19 nt, Artificial Sequence
  Description of Artificial Sequence: Synthetic oligonucleotide
gacucaggagugugcuucu

SEQ ID NO: 472715 - RNA, 19 nt, Artificial Sequence
  Description of Artificial Sequence: Synthetic oligonucleotide
caggggaauguggacuuca

SEQ ID NO: 472716 - RNA, 19 nt, Artificial Sequence
  Description of Artificial Sequence: Synthetic oligonucleotide
ccugggugagcgaguagug

SEQ ID NO: 472717 - RNA, 19 nt, Artificial Sequence
  Description of Artificial Sequence: Synthetic oligonucleotide
cuccagugcuacuuucucu

SEQ ID NO: 472718 - RNA, 19 nt, Artificial Sequence
  Description of Artificial Sequence: Synthetic oligonucleotide
caacgcagaaggagggacu

SEQ ID NO: 472719 - RNA, 19 nt, Artificial Sequence
  Description of Artificial Sequence: Synthetic oligonucleotide
cagugcuacuuucucuucu

SEQ ID NO: 472720 - RNA, 19 nt, Artificial Sequence
  Description of Artificial Sequence: Synthetic oligonucleotide
gauaccugcccugucucuu

SEQ ID NO: 472721 - RNA, 19 nt, Artificial Sequence
  Description of Artificial Sequence: Synthetic oligonucleotide
uggcgcugacgcuuccuuu

SEQ ID NO: 472722 - RNA, 19 nt, Artificial Sequence
  Description of Artificial Sequence: Synthetic oligonucleotide
ggcuugacucaguacaaau

SEQ ID NO: 472723 - RNA, 19 nt, Artificial Sequence
  Description of Artificial Sequence: Synthetic oligonucleotide
ggcaagugagagagauacc

SEQ ID NO: 472724 - RNA, 19 nt, Artificial Sequence
  Description of Artificial Sequence: Synthetic oligonucleotide
gcuaaucaaucuguucaaa

SEQ ID NO: 472725 - RNA, 19 nt, Artificial Sequence
  Description of Artificial Sequence: Synthetic oligonucleotide
gccacgggguucaaaggug

SEQ ID NO: 472726 - RNA, 19 nt, Artificial Sequence
  Description of Artificial Sequence: Synthetic oligonucleotide
cccaagcuaaucaaucugu

SEQ ID NO: 472727 - RNA, 19 nt, Artificial Sequence
  Description of Artificial Sequence: Synthetic oligonucleotide
ggccucaauaaagcaggac

SEQ ID NO: 472728 - RNA, 19 nt, Artificial Sequence
  Description of Artificial Sequence: Synthetic oligonucleotide
auguguccacagcggguua

SEQ ID NO: 472729 - RNA, 19 nt, Artificial Sequence
  Description of Artificial Sequence: Synthetic oligonucleotide
gagauaccuauggcgcugu

SEQ ID NO: 472730 - RNA, 19 nt, Artificial Sequence
  Description of Artificial Sequence: Synthetic oligonucleotide
cccaguugacuaagguguc

SEQ ID NO: 472731 - RNA, 19 nt, Artificial Sequence
  Description of Artificial Sequence: Synthetic oligonucleotide
gacgaccgaggugcugaac

SEQ ID NO: 472732 - RNA, 19 nt, Artificial Sequence
  Description of Artificial Sequence: Synthetic oligonucleotide
aggggaguccagagaacaa

SEQ ID NO: 472733 - RNA, 19 nt, Artificial Sequence
  Description of Artificial Sequence: Synthetic oligonucleotide
ggccacgggguucaaaggu

SEQ ID NO: 472734 - RNA, 19 nt, Artificial Sequence
  Description of Artificial Sequence: Synthetic oligonucleotide
uggcgcugucgaacauccu

SEQ ID NO: 472735 - RNA, 19 nt, Artificial Sequence
  Description of Artificial Sequence: Synthetic oligonucleotide
ggaugcacgcccagcagaa

SEQ ID NO: 472736 - RNA, 19 nt, Artificial Sequence
  Description of Artificial Sequence: Synthetic oligonucleotide
cgccccaagcuaaucaauc

SEQ ID NO: 472737 - RNA, 19 nt, Artificial Sequence
  Description of Artificial Sequence: Synthetic oligonucleotide
caggacucaggagugugcu

SEQ ID NO: 472738 - RNA, 19 nt, Artificial Sequence
  Description of Artificial Sequence: Synthetic oligonucleotide
ggcuacagaugcgcacuug

SEQ ID NO: 472739 - RNA, 19 nt, Artificial Sequence
  Description of Artificial Sequence: Synthetic oligonucleotide
ggggccggaggaaccaagc

SEQ ID NO: 472740 - RNA, 19 nt, Artificial Sequence
  Description of Artificial Sequence: Synthetic oligonucleotide
cgaccgaggugcugaacag

SEQ ID NO: 472741 - RNA, 19 nt, Artificial Sequence
  Description of Artificial Sequence: Synthetic oligonucleotide
guguccacagcggguuauc

SEQ ID NO: 472742 - RNA, 19 nt, Artificial Sequence
  Description of Artificial Sequence: Synthetic oligonucleotide
ggccacacgucugcuuuug

SEQ ID NO: 472743 - RNA, 19 nt, Artificial Sequence
  Description of Artificial Sequence: Synthetic oligonucleotide
ccacgggguucaaagguga

SEQ ID NO: 472744 - RNA, 19 nt, Artificial Sequence
  Description of Artificial Sequence: Synthetic oligonucleotide
cuucugcuaagaggagaaa

SEQ ID NO: 472745 - RNA, 19 nt, Artificial Sequence
  Description of Artificial Sequence: Synthetic oligonucleotide
guggacgaccgaggugcug

SEQ ID NO: 472746 - RNA, 19 nt, Artificial Sequence
  Description of Artificial Sequence: Synthetic oligonucleotide
gcgugauucuguggcaaca

SEQ ID NO: 472747 - RNA, 19 nt, Artificial Sequence
  Description of Artificial Sequence: Synthetic oligonucleotide
gaacacggucagaguuauc

SEQ ID NO: 472748 - RNA, 19 nt, Artificial Sequence
  Description of Artificial Sequence: Synthetic oligonucleotide
gacugcccugacuggcagu

SEQ ID NO: 472749 - RNA, 19 nt, Artificial Sequence
  Description of Artificial Sequence: Synthetic oligonucleotide
ccguuucuuuccuccucug

SEQ ID NO: 472750 - RNA, 19 nt, Artificial Sequence
  Description of Artificial Sequence: Synthetic oligonucleotide
aacugacaguuggccugua

SEQ ID NO: 472751 - RNA, 19 nt, Artificial Sequence
  Description of Artificial Sequence: Synthetic oligonucleotide
gaggcauauugggcaagau

SEQ ID NO: 472752 - RNA, 19 nt, Artificial Sequence
  Description of Artificial Sequence: Synthetic oligonucleotide
ucucggcgacgcuccucuc

SEQ ID NO: 472753 - RNA, 19 nt, Artificial Sequence
  Description of Artificial Sequence: Synthetic oligonucleotide
ccucggugcuggugggacc

SEQ ID NO: 472754 - RNA, 19 nt, Artificial Sequence
  Description of Artificial Sequence: Synthetic oligonucleotide
guggcaagugagagagaua

SEQ ID NO: 472755 - RNA, 19 nt, Artificial Sequence
  Description of Artificial Sequence: Synthetic oligonucleotide
accugcccugucucuuguu

SEQ ID NO: 472756 - RNA, 19 nt, Artificial Sequence
  Description of Artificial Sequence: Synthetic oligonucleotide
ggaacacggucagaguuau

SEQ ID NO: 472757 - RNA, 19 nt, Artificial Sequence
  Description of Artificial Sequence: Synthetic oligonucleotide
ccgaacaaggcagcgcaca

SEQ ID NO: 472758 - RNA, 19 nt, Artificial Sequence
  Description of Artificial Sequence: Synthetic oligonucleotide
cugggugagcgaguagugu

SEQ ID NO: 472759 - RNA, 19 nt, Artificial Sequence
  Description of Artificial Sequence: Synthetic oligonucleotide
ucggugcuggugggaccca

SEQ ID NO: 472760 - RNA, 19 nt, Artificial Sequence
  Description of Artificial Sequence: Synthetic oligonucleotide
gugagcgaguagugucacu

SEQ ID NO: 472761 - RNA, 19 nt, Artificial Sequence
  Description of Artificial Sequence: Synthetic oligonucleotide
cauccuccgcuugguagaa

SEQ ID NO: 472762 - RNA, 19 nt, Artificial Sequence
  Description of Artificial Sequence: Synthetic oligonucleotide
cccgaacaaggcagcgcac

SEQ ID NO: 472763 - RNA, 19 nt, Artificial Sequence
  Description of Artificial Sequence: Synthetic oligonucleotide
gggacugcccugacuggca

SEQ ID NO: 472764 - RNA, 19 nt, Artificial Sequence
  Description of Artificial Sequence: Synthetic oligonucleotide
ggcgcugacgcuuccuuuu

SEQ ID NO: 472765 - RNA, 19 nt, Artificial Sequence
  Description of Artificial Sequence: Synthetic oligonucleotide
ccaguugacuaagguguca

SEQ ID NO: 472766 - RNA, 19 nt, Artificial Sequence
  Description of Artificial Sequence: Synthetic oligonucleotide
gcgcugacgcuuccuuuuc

SEQ ID NO: 472767 - RNA, 19 nt, Artificial Sequence
  Description of Artificial Sequence: Synthetic oligonucleotide
cguacuggcgugauucugu

SEQ ID NO: 472768 - RNA, 19 nt, Artificial Sequence
  Description of Artificial Sequence: Synthetic oligonucleotide
gggguucaaaggugaaauu

SEQ ID NO: 472769 - RNA, 19 nt, Artificial Sequence
  Description of Artificial Sequence: Synthetic oligonucleotide
ccaagcuaaucaaucuguu

SEQ ID NO: 472770 - RNA, 19 nt, Artificial Sequence
  Description of Artificial Sequence: Synthetic oligonucleotide
cccucggugcuggugggac

SEQ ID NO: 472771 - RNA, 19 nt, Artificial Sequence
  Description of Artificial Sequence: Synthetic oligonucleotide
gaguacuggcugugcuguu

SEQ ID NO: 472772 - RNA, 19 nt, Artificial Sequence
  Description of Artificial Sequence: Synthetic oligonucleotide
cccgccccaagcuaaucaa

SEQ ID NO: 472773 - RNA, 19 nt, Artificial Sequence
  Description of Artificial Sequence: Synthetic oligonucleotide
gacgcuccucucgagccuu

SEQ ID NO: 472774 - RNA, 19 nt, Artificial Sequence
  Description of Artificial Sequence: Synthetic oligonucleotide
gcuacuccagacagagccu

SEQ ID NO: 472775 - RNA, 19 nt, Artificial Sequence
  Description of Artificial Sequence: Synthetic oligonucleotide
ggagcaguuuugggccaca

SEQ ID NO: 472776 - RNA, 19 nt, Artificial Sequence
  Description of Artificial Sequence: Synthetic oligonucleotide
gucgguggauagaggcaua

SEQ ID NO: 472777 - RNA, 19 nt, Artificial Sequence
  Description of Artificial Sequence: Synthetic oligonucleotide
ggucuacauucauccacuu

SEQ ID NO: 472778 - RNA, 19 nt, Artificial Sequence
  Description of Artificial Sequence: Synthetic oligonucleotide
caccagugaccuccccucu

SEQ ID NO: 472779 - RNA, 19 nt, Artificial Sequence
  Description of Artificial Sequence: Synthetic oligonucleotide
ccccgccccaagcuaauca

SEQ ID NO: 472780 - RNA, 19 nt, Artificial Sequence
  Description of Artificial Sequence: Synthetic oligonucleotide
cagcgcacauugacugggu

SEQ ID NO: 472781 - RNA, 19 nt, Artificial Sequence
  Description of Artificial Sequence: Synthetic oligonucleotide
gcgaguagugucacuuggu

SEQ ID NO: 472782 - RNA, 19 nt, Artificial Sequence
  Description of Artificial Sequence: Synthetic oligonucleotide
cugccauguccacugccuu

SEQ ID NO: 472783 - RNA, 19 nt, Artificial Sequence
  Description of Artificial Sequence: Synthetic oligonucleotide
gcaagagaacgaggggagu

SEQ ID NO: 472784 - RNA, 19 nt, Artificial Sequence
  Description of Artificial Sequence: Synthetic oligonucleotide
cacaacguacuggcgugau

SEQ ID NO: 472785 - RNA, 19 nt, Artificial Sequence
  Description of Artificial Sequence: Synthetic oligonucleotide
cuauggcgcugucgaacau

SEQ ID NO: 472786 - RNA, 19 nt, Artificial Sequence
  Description of Artificial Sequence: Synthetic oligonucleotide
cgcccagcagaaaaugugu

SEQ ID NO: 472787 - RNA, 19 nt, Artificial Sequence
  Description of Artificial Sequence: Synthetic oligonucleotide
cgcuugguagaaguaguaa

SEQ ID NO: 472788 - RNA, 19 nt, Artificial Sequence
  Description of Artificial Sequence: Synthetic oligonucleotide
ccaggcuuucucacugagu

SEQ ID NO: 472789 - RNA, 19 nt, Artificial Sequence
  Description of Artificial Sequence: Synthetic oligonucleotide
gggugaagccugguuuagu

SEQ ID NO: 472790 - RNA, 19 nt, Artificial Sequence
  Description of Artificial Sequence: Synthetic oligonucleotide
ccuccgcuugguagaagua

SEQ ID NO: 472791 - RNA, 19 nt, Artificial Sequence
  Description of Artificial Sequence: Synthetic oligonucleotide
gcggguuaucuuggcugca

SEQ ID NO: 472792 - RNA, 19 nt, Artificial Sequence
  Description of Artificial Sequence: Synthetic oligonucleotide
ccuagaugaaugggauggu

SEQ ID NO: 472793 - RNA, 19 nt, Artificial Sequence
  Description of Artificial Sequence: Synthetic oligonucleotide
ccacaacguacuggcguga

SEQ ID NO: 472794 - RNA, 19 nt, Artificial Sequence
  Description of Artificial Sequence: Synthetic oligonucleotide
ggugccugggugagcgagu

SEQ ID NO: 472795 - RNA, 19 nt, Artificial Sequence
  Description of Artificial Sequence: Synthetic oligonucleotide
gggagccaucagcaccagu

SEQ ID NO: 472796 - RNA, 19 nt, Artificial Sequence
  Description of Artificial Sequence: Synthetic oligonucleotide
cggccucaauaaagcagga

SEQ ID NO: 472797 - RNA, 19 nt, Artificial Sequence
  Description of Artificial Sequence: Synthetic oligonucleotide
cggcgacgcuccucucgag

SEQ ID NO: 472798 - RNA, 19 nt, Artificial Sequence
  Description of Artificial Sequence: Synthetic oligonucleotide
ccgccccaagcuaaucaau

SEQ ID NO: 472799 - RNA, 19 nt, Artificial Sequence
  Description of Artificial Sequence: Synthetic oligonucleotide
ccccauggcccucggugcu

SEQ ID NO: 472800 - RNA, 19 nt, Artificial Sequence
  Description of Artificial Sequence: Synthetic oligonucleotide
cugcgcucucggcgacgcu

SEQ ID NO: 472801 - RNA, 19 nt, Artificial Sequence
  Description of Artificial Sequence: Synthetic oligonucleotide
cgacgcuccucucgagccu

SEQ ID NO: 472802 - RNA, 19 nt, Artificial Sequence
  Description of Artificial Sequence: Synthetic oligonucleotide
ccggaggaaccaagcuguu

SEQ ID NO: 472803 - RNA, 19 nt, Artificial Sequence
  Description of Artificial Sequence: Synthetic oligonucleotide
cgguggauagaggcauauu

SEQ ID NO: 472804 - RNA, 19 nt, Artificial Sequence
  Description of Artificial Sequence: Synthetic oligonucleotide
aaugaagcuccacaggagc

SEQ ID NO: 472805 - RNA, 19 nt, Artificial Sequence
  Description of Artificial Sequence: Synthetic oligonucleotide
guuagaaggacucuucugg

SEQ ID NO: 472806 - RNA, 19 nt, Artificial Sequence
  Description of Artificial Sequence: Synthetic oligonucleotide
ucccaguuggguuagaagg

SEQ ID NO: 472807 - RNA, 19 nt, Artificial Sequence
  Description of Artificial Sequence: Synthetic oligonucleotide
agcugauacguuuaugagc

SEQ ID NO: 472808 - RNA, 19 nt, Artificial Sequence
  Description of Artificial Sequence: Synthetic oligonucleotide
cauuauaagguccauugcc

SEQ ID NO: 472809 - RNA, 19 nt, Artificial Sequence
  Description of Artificial Sequence: Synthetic oligonucleotide
aaaggcgacugacuggggc

SEQ ID NO: 472810 - RNA, 19 nt, Artificial Sequence
  Description of Artificial Sequence: Synthetic oligonucleotide
aaagauaugccugaguuaa

SEQ ID NO: 472811 - RNA, 19 nt, Artificial Sequence
  Description of Artificial Sequence: Synthetic oligonucleotide
aaugaguucuccaucuugg

SEQ ID NO: 472812 - RNA, 19 nt, Artificial Sequence
  Description of Artificial Sequence: Synthetic oligonucleotide
ucugccguuugccacaugg

SEQ ID NO: 472813 - RNA, 19 nt, Artificial Sequence
  Description of Artificial Sequence: Synthetic oligonucleotide
uucgugaccgcauacaucu

SEQ ID NO: 472814 - RNA, 19 nt, Artificial Sequence
  Description of Artificial Sequence: Synthetic oligonucleotide
aaucccguaucuccuuucc

SEQ ID NO: 472815 - RNA, 19 nt, Artificial Sequence
  Description of Artificial Sequence: Synthetic oligonucleotide
aguuaaugugaccuguggg

SEQ ID NO: 472816 - RNA, 19 nt, Artificial Sequence
  Description of Artificial Sequence: Synthetic oligonucleotide
aaugagcaucuccaaguac

SEQ ID NO: 472817 - RNA, 19 nt, Artificial Sequence
  Description of Artificial Sequence: Synthetic oligonucleotide
guaacgaaccucaucaugg

SEQ ID NO: 472818 - RNA, 19 nt, Artificial Sequence
  Description of Artificial Sequence: Synthetic oligonucleotide
uaugccugaguuaauguga

SEQ ID NO: 472819 - RNA, 19 nt, Artificial Sequence
  Description of Artificial Sequence: Synthetic oligonucleotide
cuuacuguguagaucagug

SEQ ID NO: 472820 - RNA, 19 nt, Artificial Sequence
  Description of Artificial Sequence: Synthetic oligonucleotide
auugucggugacuaagaac

SEQ ID NO: 472821 - RNA, 19 nt, Artificial Sequence
  Description of Artificial Sequence: Synthetic oligonucleotide
aagccauaccaccaucugg

SEQ ID NO: 472822 - RNA, 19 nt, Artificial Sequence
  Description of Artificial Sequence: Synthetic oligonucleotide
uuagaaggacucuucuggg

SEQ ID NO: 472823 - RNA, 19 nt, Artificial Sequence
  Description of Artificial Sequence: Synthetic oligonucleotide
ucuacucuccccuucuagg

SEQ ID NO: 472824 - RNA, 19 nt, Artificial Sequence
  Description of Artificial Sequence: Synthetic oligonucleotide
uuuugugccgacaguaccc

SEQ ID NO: 472825 - RNA, 19 nt, Artificial Sequence
  Description of Artificial Sequence: Synthetic oligonucleotide
auaagguccauugccaugg

SEQ ID NO: 472826 - RNA, 19 nt, Artificial Sequence
  Description of Artificial Sequence: Synthetic oligonucleotide
ugguuauaaacucucccug

SEQ ID NO: 472827 - RNA, 19 nt, Artificial Sequence
  Description of Artificial Sequence: Synthetic oligonucleotide
agaucauucagacccagcu

SEQ ID NO: 472828 - RNA, 19 nt, Artificial Sequence
  Description of Artificial Sequence: Synthetic oligonucleotide
aucaccuuagggcaggguc

SEQ ID NO: 472829 - RNA, 19 nt, Artificial Sequence
  Description of Artificial Sequence: Synthetic oligonucleotide
uacgucccaaccaugagug

SEQ ID NO: 472830 - RNA, 19 nt, Artificial Sequence
  Description of Artificial Sequence: Synthetic oligonucleotide
uguaaguaguccacagcag

SEQ ID NO: 472831 - RNA, 19 nt, Artificial Sequence
  Description of Artificial Sequence: Synthetic oligonucleotide
cuucaaugaagcuccacag

SEQ ID NO: 472832 - RNA, 19 nt, Artificial Sequence
  Description of Artificial Sequence: Synthetic oligonucleotide
acaaccgugggcuccaggg

SEQ ID NO: 472833 - RNA, 19 nt, Artificial Sequence
  Description of Artificial Sequence: Synthetic oligonucleotide
uaccccuucucauacagcc

SEQ ID NO: 472834 - RNA, 19 nt, Artificial Sequence
  Description of Artificial Sequence: Synthetic oligonucleotide
gaguuaaugugaccugugg

SEQ ID NO: 472835 - RNA, 19 nt, Artificial Sequence
  Description of Artificial Sequence: Synthetic oligonucleotide
uauucccaucaccuuaggg

SEQ ID NO: 472836 - RNA, 19 nt, Artificial Sequence
  Description of Artificial Sequence: Synthetic oligonucleotide
caaacaugcaccuggucag

SEQ ID NO: 472837 - RNA, 19 nt, Artificial Sequence
  Description of Artificial Sequence: Synthetic oligonucleotide
uuuaugagcauuccuccaa

SEQ ID NO: 472838 - RNA, 19 nt, Artificial Sequence
  Description of Artificial Sequence: Synthetic oligonucleotide
uguaccacccaguucacac

SEQ ID NO: 472839 - RNA, 19 nt, Artificial Sequence
  Description of Artificial Sequence: Synthetic oligonucleotide
acuggucaauaucuacugc

SEQ ID NO: 472840 - RNA, 19 nt, Artificial Sequence
  Description of Artificial Sequence: Synthetic oligonucleotide
ugacuaagaacuccucagc

SEQ ID NO: 472841 - RNA, 19 nt, Artificial Sequence
  Description of Artificial Sequence: Synthetic oligonucleotide
ugcauaccagcaaaaugag

SEQ ID NO: 472842 - RNA, 19 nt, Artificial Sequence
  Description of Artificial Sequence: Synthetic oligonucleotide
acaagcaugagguguaagu

SEQ ID NO: 472843 - RNA, 19 nt, Artificial Sequence
  Description of Artificial Sequence: Synthetic oligonucleotide
auaugccugaguuaaugug

SEQ ID NO: 472844 - RNA, 19 nt, Artificial Sequence
  Description of Artificial Sequence: Synthetic oligonucleotide
uucccaucaccuuagggca

SEQ ID NO: 472845 - RNA, 19 nt, Artificial Sequence
  Description of Artificial Sequence: Synthetic oligonucleotide
guguaaguaguccacagca

SEQ ID NO: 472846 - RNA, 19 nt, Artificial Sequence
  Description of Artificial Sequence: Synthetic oligonucleotide
aaccagauuaucccgccgu

SEQ ID NO: 472847 - RNA, 19 nt, Artificial Sequence
  Description of Artificial Sequence: Synthetic oligonucleotide
acguuuaugagcauuccuc

SEQ ID NO: 472848 - RNA, 19 nt, Artificial Sequence
  Description of Artificial Sequence: Synthetic oligonucleotide
caacucacugccuacucgg

SEQ ID NO: 472849 - RNA, 19 nt, Artificial Sequence
  Description of Artificial Sequence: Synthetic oligonucleotide
aguaccccuucucauacag

SEQ ID NO: 472850 - RNA, 19 nt, Artificial Sequence
  Description of Artificial Sequence: Synthetic oligonucleotide
caugcauaccagcaaaaug

SEQ ID NO: 472851 - RNA, 19 nt, Artificial Sequence
  Description of Artificial Sequence: Synthetic oligonucleotide
cagguaacgaaccucauca

SEQ ID NO: 472852 - RNA, 19 nt, Artificial Sequence
  Description of Artificial Sequence: Synthetic oligonucleotide
uacguggugugucagacau

SEQ ID NO: 472853 - RNA, 19 nt, Artificial Sequence
  Description of Artificial Sequence: Synthetic oligonucleotide
aguuagaaggacucuucug

SEQ ID NO: 472854 - RNA, 19 nt, Artificial Sequence
  Description of Artificial Sequence: Synthetic oligonucleotide
agguccauugccauggugg

SEQ ID NO: 472855 - RNA, 19 nt, Artificial Sequence
  Description of Artificial Sequence: Synthetic oligonucleotide
uccacgucuaagcagccca

SEQ ID NO: 472856 - RNA, 19 nt, Artificial Sequence
  Description of Artificial Sequence: Synthetic oligonucleotide
auuaucccgccguccaggc

SEQ ID NO: 472857 - RNA, 19 nt, Artificial Sequence
  Description of Artificial Sequence: Synthetic oligonucleotide
ugaguuaaugugaccugug

SEQ ID NO: 472858 - RNA, 19 nt, Artificial Sequence
  Description of Artificial Sequence: Synthetic oligonucleotide
uaucccgccguccaggcca

SEQ ID NO: 472859 - RNA, 19 nt, Artificial Sequence
  Description of Artificial Sequence: Synthetic oligonucleotide
agccauaccaccaucuggg

SEQ ID NO: 472860 - RNA, 19 nt, Artificial Sequence
  Description of Artificial Sequence: Synthetic oligonucleotide
auucagacccagcuuguag

SEQ ID NO: 472861 - RNA, 19 nt, Artificial Sequence
  Description of Artificial Sequence: Synthetic oligonucleotide
gaagcguccaucaauggca

SEQ ID NO: 472862 - RNA, 19 nt, Artificial Sequence
  Description of Artificial Sequence: Synthetic oligonucleotide
auuauaagguccauugcca

SEQ ID NO: 472863 - RNA, 19 nt, Artificial Sequence
  Description of Artificial Sequence: Synthetic oligonucleotide
aaaugagcaucuccaagua

SEQ ID NO: 472864 - RNA, 19 nt, Artificial Sequence
  Description of Artificial Sequence: Synthetic oligonucleotide
uguagaucagugccccugc

SEQ ID NO: 472865 - RNA, 19 nt, Artificial Sequence
  Description of Artificial Sequence: Synthetic oligonucleotide
cacacggcugguuauaaac

SEQ ID NO: 472866 - RNA, 19 nt, Artificial Sequence
  Description of Artificial Sequence: Synthetic oligonucleotide
ucaguuagaaggacucuuc

SEQ ID NO: 472867 - RNA, 19 nt, Artificial Sequence
  Description of Artificial Sequence: Synthetic oligonucleotide
uacguuuaugagcauuccu

SEQ ID NO: 472868 - RNA, 19 nt, Artificial Sequence
  Description of Artificial Sequence: Synthetic oligonucleotide
uucacccuggggaaucccg

SEQ ID NO: 472869 - RNA, 19 nt, Artificial Sequence
  Description of Artificial Sequence: Synthetic oligonucleotide
accgcauacaucugcuggg

SEQ ID NO: 472870 - RNA, 19 nt, Artificial Sequence
  Description of Artificial Sequence: Synthetic oligonucleotide
ucaccuuagggcaggguca

SEQ ID NO: 472871 - RNA, 19 nt, Artificial Sequence
  Description of Artificial Sequence: Synthetic oligonucleotide
ugacccaguaaugaguucu

SEQ ID NO: 472872 - RNA, 19 nt, Artificial Sequence
  Description of Artificial Sequence: Synthetic oligonucleotide
gagcauuacuggcagugag

SEQ ID NO: 472873 - RNA, 19 nt, Artificial Sequence
  Description of Artificial Sequence: Synthetic oligonucleotide
uuagcaugcucucggcuga

SEQ ID NO: 472874 - RNA, 19 nt, Artificial Sequence
  Description of Artificial Sequence: Synthetic oligonucleotide
uguuuugugccgacaguac

SEQ ID NO: 472875 - RNA, 19 nt, Artificial Sequence
  Description of Artificial Sequence: Synthetic oligonucleotide
agcaaccagggauauccac

SEQ ID NO: 472876 - RNA, 19 nt, Artificial Sequence
  Description of Artificial Sequence: Synthetic oligonucleotide
guaaguaguccacagcaga

SEQ ID NO: 472877 - RNA, 19 nt, Artificial Sequence
  Description of Artificial Sequence: Synthetic oligonucleotide
gauacggccguaguugaag

SEQ ID NO: 472878 - RNA, 19 nt, Artificial Sequence
  Description of Artificial Sequence: Synthetic oligonucleotide
cucaaccagauuaucccgc

SEQ ID NO: 472879 - RNA, 19 nt, Artificial Sequence
  Description of Artificial Sequence: Synthetic oligonucleotide
ucaaccagauuaucccgcc

SEQ ID NO: 472880 - RNA, 19 nt, Artificial Sequence
  Description of Artificial Sequence: Synthetic oligonucleotide
ugcagaagcguccaucaau

SEQ ID NO: 472881 - RNA, 19 nt, Artificial Sequence
  Description of Artificial Sequence: Synthetic oligonucleotide
acucuccccuucuagggcg

SEQ ID NO: 472882 - RNA, 19 nt, Artificial Sequence
  Description of Artificial Sequence: Synthetic oligonucleotide
cauggaacuauugucggug

SEQ ID NO: 472883 - RNA, 19 nt, Artificial Sequence
  Description of Artificial Sequence: Synthetic oligonucleotide
aaggcgacugacuggggca

SEQ ID NO: 472884 - RNA, 19 nt, Artificial Sequence
  Description of Artificial Sequence: Synthetic oligonucleotide
gauuaucccgccguccagg

SEQ ID NO: 472885 - RNA, 19 nt, Artificial Sequence
  Description of Artificial Sequence: Synthetic oligonucleotide
ucggugacuaagaacuccu

SEQ ID NO: 472886 - RNA, 19 nt, Artificial Sequence
  Description of Artificial Sequence: Synthetic oligonucleotide
cugacagccgauaccggcg

SEQ ID NO: 472887 - RNA, 19 nt, Artificial Sequence
  Description of Artificial Sequence: Synthetic oligonucleotide
aacugcaucaguaggcgcu

SEQ ID NO: 472888 - RNA, 19 nt, Artificial Sequence
  Description of Artificial Sequence: Synthetic oligonucleotide
agauaugccugaguuaaug

SEQ ID NO: 472889 - RNA, 19 nt, Artificial Sequence
  Description of Artificial Sequence: Synthetic oligonucleotide
agcauuacuggcagugagc

SEQ ID NO: 472890 - RNA, 19 nt, Artificial Sequence
  Description of Artificial Sequence: Synthetic oligonucleotide
ggagcugauacguuuauga

SEQ ID NO: 472891 - RNA, 19 nt, Artificial Sequence
  Description of Artificial Sequence: Synthetic oligonucleotide
gaagccauaccaccaucug

SEQ ID NO: 472892 - RNA, 19 nt, Artificial Sequence
  Description of Artificial Sequence: Synthetic oligonucleotide
uuaugagcauuccuccaaa

SEQ ID NO: 472893 - RNA, 19 nt, Artificial Sequence
  Description of Artificial Sequence: Synthetic oligonucleotide
ucgcugguggcucaaccag

SEQ ID NO: 472894 - RNA, 19 nt, Artificial Sequence
  Description of Artificial Sequence: Synthetic oligonucleotide
aaacaugcaccuggucagg

SEQ ID NO: 472895 - RNA, 19 nt, Artificial Sequence
  Description of Artificial Sequence: Synthetic oligonucleotide
gcugauacguuuaugagca

SEQ ID NO: 472896 - RNA, 19 nt, Artificial Sequence
  Description of Artificial Sequence: Synthetic oligonucleotide
ucgucugacagccgauacc

SEQ ID NO: 472897 - RNA, 19 nt, Artificial Sequence
  Description of Artificial Sequence: Synthetic oligonucleotide
gcaaacaugcaccugguca

SEQ ID NO: 472898 - RNA, 19 nt, Artificial Sequence
  Description of Artificial Sequence: Synthetic oligonucleotide
uccaugcucgcucuguaaa

SEQ ID NO: 472899 - RNA, 19 nt, Artificial Sequence
  Description of Artificial Sequence: Synthetic oligonucleotide
ucccugaacaaccgugggc

SEQ ID NO: 472900 - RNA, 19 nt, Artificial Sequence
  Description of Artificial Sequence: Synthetic oligonucleotide
uaacgaaccucaucaugga

SEQ ID NO: 472901 - RNA, 19 nt, Artificial Sequence
  Description of Artificial Sequence: Synthetic oligonucleotide
uagggaaacccagccaucc

SEQ ID NO: 472902 - RNA, 19 nt, Artificial Sequence
  Description of Artificial Sequence: Synthetic oligonucleotide
uuugccacauggaacuauu

SEQ ID NO: 472903 - RNA, 19 nt, Artificial Sequence
  Description of Artificial Sequence: Synthetic oligonucleotide
agggauauccacaucauua

SEQ ID NO: 472904 - RNA, 19 nt, Artificial Sequence
  Description of Artificial Sequence: Synthetic oligonucleotide
uuguuuugugccgacagua

SEQ ID NO: 472905 - RNA, 19 nt, Artificial Sequence
  Description of Artificial Sequence: Synthetic oligonucleotide
gguaacgaaccucaucaug

SEQ ID NO: 472906 - RNA, 19 nt, Artificial Sequence
  Description of Artificial Sequence: Synthetic oligonucleotide
acucacugccuacucgguc

SEQ ID NO: 472907 - RNA, 19 nt, Artificial Sequence
  Description of Artificial Sequence: Synthetic oligonucleotide
ucuagggcgcugcaccagc

SEQ ID NO: 472908 - RNA, 19 nt, Artificial Sequence
  Description of Artificial Sequence: Synthetic oligonucleotide
ugaacccaccaaacugugc

SEQ ID NO: 472909 - RNA, 19 nt, Artificial Sequence
  Description of Artificial Sequence: Synthetic oligonucleotide
aacgaaccucaucauggau

SEQ ID NO: 472910 - RNA, 19 nt, Artificial Sequence
  Description of Artificial Sequence: Synthetic oligonucleotide
aucccaguuggguuagaag

SEQ ID NO: 472911 - RNA, 19 nt, Artificial Sequence
  Description of Artificial Sequence: Synthetic oligonucleotide
accagauuaucccgccguc

SEQ ID NO: 472912 - RNA, 19 nt, Artificial Sequence
  Description of Artificial Sequence: Synthetic oligonucleotide
uuggguuagaaggaguuuu

SEQ ID NO: 472913 - RNA, 19 nt, Artificial Sequence
  Description of Artificial Sequence: Synthetic oligonucleotide
uuugugccgacaguacccc

SEQ ID NO: 472914 - RNA, 19 nt, Artificial Sequence
  Description of Artificial Sequence: Synthetic oligonucleotide
augccugaguuaaugugac

SEQ ID NO: 472915 - RNA, 19 nt, Artificial Sequence
  Description of Artificial Sequence: Synthetic oligonucleotide
agccgauaccggcggaggc

SEQ ID NO: 472916 - RNA, 19 nt, Artificial Sequence
  Description of Artificial Sequence: Synthetic oligonucleotide
cagagugccauccuccauc

SEQ ID NO: 472917 - RNA, 19 nt, Artificial Sequence
  Description of Artificial Sequence: Synthetic oligonucleotide
gauaugccugaguuaaugu

SEQ ID NO: 472918 - RNA, 19 nt, Artificial Sequence
  Description of Artificial Sequence: Synthetic oligonucleotide
caugcucucggcugaugcc

SEQ ID NO: 472919 - RNA, 19 nt, Artificial Sequence
  Description of Artificial Sequence: Synthetic oligonucleotide
auaccagcaaaaugagcau

SEQ ID NO: 472920 - RNA, 19 nt, Artificial Sequence
  Description of Artificial Sequence: Synthetic oligonucleotide
uuucaacucacugccuacu

SEQ ID NO: 472921 - RNA, 19 nt, Artificial Sequence
  Description of Artificial Sequence: Synthetic oligonucleotide
gaacugcaucaguaggcgc

SEQ ID NO: 472922 - RNA, 19 nt, Artificial Sequence
  Description of Artificial Sequence: Synthetic oligonucleotide
uaugagcauuccuccaaaa

SEQ ID NO: 472923 - RNA, 19 nt, Artificial Sequence
  Description of Artificial Sequence: Synthetic oligonucleotide
gguguaaguaguccacagc

SEQ ID NO: 472924 - RNA, 19 nt, Artificial Sequence
  Description of Artificial Sequence: Synthetic oligonucleotide
cacggcugguuauaaacuc

SEQ ID NO: 472925 - RNA, 19 nt, Artificial Sequence
  Description of Artificial Sequence: Synthetic oligonucleotide
gauccuguagggaaaccca

SEQ ID NO: 472926 - RNA, 19 nt, Artificial Sequence
  Description of Artificial Sequence: Synthetic oligonucleotide
uggaacuauugucggugac

SEQ ID NO: 472927 - RNA, 19 nt, Artificial Sequence
  Description of Artificial Sequence: Synthetic oligonucleotide
agauuaucccgccguccag

SEQ ID NO: 472928 - RNA, 19 nt, Artificial Sequence
  Description of Artificial Sequence: Synthetic oligonucleotide
gguuauaaacucucccuga

SEQ ID NO: 472929 - RNA, 19 nt, Artificial Sequence
  Description of Artificial Sequence: Synthetic oligonucleotide
gguuagaaggaguuuuaca

SEQ ID NO: 472930 - RNA, 19 nt, Artificial Sequence
  Description of Artificial Sequence: Synthetic oligonucleotide
aaugugaccuguggggcau

SEQ ID NO: 472931 - RNA, 19 nt, Artificial Sequence
  Description of Artificial Sequence: Synthetic oligonucleotide
ugauacguuuaugagcauu

SEQ ID NO: 472932 - RNA, 19 nt, Artificial Sequence
  Description of Artificial Sequence: Synthetic oligonucleotide
gucuaagcagcccaguucu

SEQ ID NO: 472933 - RNA, 19 nt, Artificial Sequence
  Description of Artificial Sequence: Synthetic oligonucleotide
uuaccauccuugugaggca

SEQ ID NO: 472934 - RNA, 19 nt, Artificial Sequence
  Description of Artificial Sequence: Synthetic oligonucleotide
acccaguaaugaguucucc

SEQ ID NO: 472935 - RNA, 19 nt, Artificial Sequence
  Description of Artificial Sequence: Synthetic oligonucleotide
gugguaagugggcuggcug

SEQ ID NO: 472936 - RNA, 19 nt, Artificial Sequence
  Description of Artificial Sequence: Synthetic oligonucleotide
agagugccauccuccaucu

SEQ ID NO: 472937 - RNA, 19 nt, Artificial Sequence
  Description of Artificial Sequence: Synthetic oligonucleotide
aucaaagguagggugccug

SEQ ID NO: 472938 - RNA, 19 nt, Artificial Sequence
  Description of Artificial Sequence: Synthetic oligonucleotide
cagaagcguccaucaaugg

SEQ ID NO: 472939 - RNA, 19 nt, Artificial Sequence
  Description of Artificial Sequence: Synthetic oligonucleotide
guagggugccuggucaugg

SEQ ID NO: 472940 - RNA, 19 nt, Artificial Sequence
  Description of Artificial Sequence: Synthetic oligonucleotide
gaacuauugucggugacua

SEQ ID NO: 472941 - RNA, 19 nt, Artificial Sequence
  Description of Artificial Sequence: Synthetic oligonucleotide
gugucagacauggcaaugc

SEQ ID NO: 472942 - RNA, 19 nt, Artificial Sequence
  Description of Artificial Sequence: Synthetic oligonucleotide
cuauugucggugacuaaga

SEQ ID NO: 472943 - RNA, 19 nt, Artificial Sequence
  Description of Artificial Sequence: Synthetic oligonucleotide
cugguuauaaacucucccu

SEQ ID NO: 472944 - RNA, 19 nt, Artificial Sequence
  Description of Artificial Sequence: Synthetic oligonucleotide
caucaguaggcgcucagca

SEQ ID NO: 472945 - RNA, 19 nt, Artificial Sequence
  Description of Artificial Sequence: Synthetic oligonucleotide
auggaacuauugucgguga

SEQ ID NO: 472946 - RNA, 19 nt, Artificial Sequence
  Description of Artificial Sequence: Synthetic oligonucleotide
aaagcacaucugaaagccu

SEQ ID NO: 472947 - RNA, 19 nt, Artificial Sequence
  Description of Artificial Sequence: Synthetic oligonucleotide
ggugacuaagaacuccuca

SEQ ID NO: 472948 - RNA, 19 nt, Artificial Sequence
  Description of Artificial Sequence: Synthetic oligonucleotide
cugaacaaccgugggcucc

SEQ ID NO: 472949 - RNA, 19 nt, Artificial Sequence
  Description of Artificial Sequence: Synthetic oligonucleotide
cguuuaugagcauuccucc

SEQ ID NO: 472950 - RNA, 19 nt, Artificial Sequence
  Description of Artificial Sequence: Synthetic oligonucleotide
gaucuuucgaagauccugu

SEQ ID NO: 472951 - RNA, 19 nt, Artificial Sequence
  Description of Artificial Sequence: Synthetic oligonucleotide
auacggccguaguugaaga

SEQ ID NO: 472952 - RNA, 19 nt, Artificial Sequence
  Description of Artificial Sequence: Synthetic oligonucleotide
cuucgugaccgcauacauc

SEQ ID NO: 472953 - RNA, 19 nt, Artificial Sequence
  Description of Artificial Sequence: Synthetic oligonucleotide
gguaaauauccagugcuuc

SEQ ID NO: 472954 - RNA, 19 nt, Artificial Sequence
  Description of Artificial Sequence: Synthetic oligonucleotide
aguucacacggcugguuau

SEQ ID NO: 472955 - RNA, 19 nt, Artificial Sequence
  Description of Artificial Sequence: Synthetic oligonucleotide
ugaccgcauacaucugcug

SEQ ID NO: 472956 - RNA, 19 nt, Artificial Sequence
  Description of Artificial Sequence: Synthetic oligonucleotide
cgaaccucaucauggaugc

SEQ ID NO: 472957 - RNA, 19 nt, Artificial Sequence
  Description of Artificial Sequence: Synthetic oligonucleotide
cagccccauagauacggcc

SEQ ID NO: 472958 - RNA, 19 nt, Artificial Sequence
  Description of Artificial Sequence: Synthetic oligonucleotide
ugggguacgugguguguca

SEQ ID NO: 472959 - RNA, 19 nt, Artificial Sequence
  Description of Artificial Sequence: Synthetic oligonucleotide
uccuugugaggcagcuuga

SEQ ID NO: 472960 - RNA, 19 nt, Artificial Sequence
  Description of Artificial Sequence: Synthetic oligonucleotide
cagauuaucccgccgucca

SEQ ID NO: 472961 - RNA, 19 nt, Artificial Sequence
  Description of Artificial Sequence: Synthetic oligonucleotide
cucgucugacagccgauac

SEQ ID NO: 472962 - RNA, 19 nt, Artificial Sequence
  Description of Artificial Sequence: Synthetic oligonucleotide
caccagagcuucuacucuc

SEQ ID NO: 472963 - RNA, 19 nt, Artificial Sequence
  Description of Artificial Sequence: Synthetic oligonucleotide
gcagaagcguccaucaaug

SEQ ID NO: 472964 - RNA, 19 nt, Artificial Sequence
  Description of Artificial Sequence: Synthetic oligonucleotide
ugucggugacuaagaacuc

SEQ ID NO: 472965 - RNA, 19 nt, Artificial Sequence
  Description of Artificial Sequence: Synthetic oligonucleotide
uuaucccgccguccaggcc

SEQ ID NO: 472966 - RNA, 19 nt, Artificial Sequence
  Description of Artificial Sequence: Synthetic oligonucleotide
acggccguaguugaagacu

SEQ ID NO: 472967 - RNA, 19 nt, Artificial Sequence
  Description of Artificial Sequence: Synthetic oligonucleotide
ugccugaguuaaugugacc

SEQ ID NO: 472968 - RNA, 19 nt, Artificial Sequence
  Description of Artificial Sequence: Synthetic oligonucleotide
cagcccaguucuucugccg

SEQ ID NO: 472969 - RNA, 19 nt, Artificial Sequence
  Description of Artificial Sequence: Synthetic oligonucleotide
ccaucugggagcugauacg

SEQ ID NO: 472970 - RNA, 19 nt, Artificial Sequence
  Description of Artificial Sequence: Synthetic oligonucleotide
acccucgucugacagccga

SEQ ID NO: 472971 - RNA, 19 nt, Artificial Sequence
  Description of Artificial Sequence: Synthetic oligonucleotide
uccaucccaguuggguuag

SEQ ID NO: 472972 - RNA, 19 nt, Artificial Sequence
  Description of Artificial Sequence: Synthetic oligonucleotide
gguacgucccaaccaugag

SEQ ID NO: 472973 - RNA, 19 nt, Artificial Sequence
  Description of Artificial Sequence: Synthetic oligonucleotide
acacggcugguuauaaacu

SEQ ID NO: 472974 - RNA, 19 nt, Artificial Sequence
  Description of Artificial Sequence: Synthetic oligonucleotide
cauggcacggggaagggcu

SEQ ID NO: 472975 - RNA, 19 nt, Artificial Sequence
  Description of Artificial Sequence: Synthetic oligonucleotide
ugggagcugauacguuuau

SEQ ID NO: 472976 - RNA, 19 nt, Artificial Sequence
  Description of Artificial Sequence: Synthetic oligonucleotide
cuugugagccugugguuga

SEQ ID NO: 472977 - RNA, 19 nt, Artificial Sequence
  Description of Artificial Sequence: Synthetic oligonucleotide
gucucaccagccauucacc

SEQ ID NO: 472978 - RNA, 19 nt, Artificial Sequence
  Description of Artificial Sequence: Synthetic oligonucleotide
ggagguuggugaucugcag

SEQ ID NO: 472979 - RNA, 19 nt, Artificial Sequence
  Description of Artificial Sequence: Synthetic oligonucleotide
aacugugccuucaguuaga

SEQ ID NO: 472980 - RNA, 19 nt, Artificial Sequence
  Description of Artificial Sequence: Synthetic oligonucleotide
acgucuaagcagcccaguu

SEQ ID NO: 472981 - RNA, 19 nt, Artificial Sequence
  Description of Artificial Sequence: Synthetic oligonucleotide
agggaaacccagccauccu

SEQ ID NO: 472982 - RNA, 19 nt, Artificial Sequence
  Description of Artificial Sequence: Synthetic oligonucleotide
agguaacgaaccucaucau

SEQ ID NO: 472983 - RNA, 19 nt, Artificial Sequence
  Description of Artificial Sequence: Synthetic oligonucleotide
uucacacggcugguuauaa

SEQ ID NO: 472984 - RNA, 19 nt, Artificial Sequence
  Description of Artificial Sequence: Synthetic oligonucleotide
acagccgauaccggcggag

SEQ ID NO: 472985 - RNA, 19 nt, Artificial Sequence
  Description of Artificial Sequence: Synthetic oligonucleotide
gaugccuacagugcuggcu

SEQ ID NO: 472986 - RNA, 19 nt, Artificial Sequence
  Description of Artificial Sequence: Synthetic oligonucleotide
guacgucccaaccaugagu

SEQ ID NO: 472987 - RNA, 19 nt, Artificial Sequence
  Description of Artificial Sequence: Synthetic oligonucleotide
uccccuucuagggcgcugc

SEQ ID NO: 472988 - RNA, 19 nt, Artificial Sequence
  Description of Artificial Sequence: Synthetic oligonucleotide
ccguaguugaagacuuuag

SEQ ID NO: 472989 - RNA, 19 nt, Artificial Sequence
  Description of Artificial Sequence: Synthetic oligonucleotide
ucauggcacggggaagggc

SEQ ID NO: 472990 - RNA, 19 nt, Artificial Sequence
  Description of Artificial Sequence: Synthetic oligonucleotide
ccugaguuaaugugaccug

SEQ ID NO: 472991 - RNA, 19 nt, Artificial Sequence
  Description of Artificial Sequence: Synthetic oligonucleotide
caugcucgcucuguaaaca

SEQ ID NO: 472992 - RNA, 19 nt, Artificial Sequence
  Description of Artificial Sequence: Synthetic oligonucleotide
auaccaccaucugggagcu

SEQ ID NO: 472993 - RNA, 19 nt, Artificial Sequence
  Description of Artificial Sequence: Synthetic oligonucleotide
acggcugguuauaaacucu

SEQ ID NO: 472994 - RNA, 19 nt, Artificial Sequence
  Description of Artificial Sequence: Synthetic oligonucleotide
gggaaacccagccauccuc

SEQ ID NO: 472995 - RNA, 19 nt, Artificial Sequence
  Description of Artificial Sequence: Synthetic oligonucleotide
cacaagcaugagguguaag

SEQ ID NO: 472996 - RNA, 19 nt, Artificial Sequence
  Description of Artificial Sequence: Synthetic oligonucleotide
uagggcgcugcaccagcac

SEQ ID NO: 472997 - RNA, 19 nt, Artificial Sequence
  Description of Artificial Sequence: Synthetic oligonucleotide
aagcguccaucaauggcaa

SEQ ID NO: 472998 - RNA, 19 nt, Artificial Sequence
  Description of Artificial Sequence: Synthetic oligonucleotide
cuucuagggcgcugcacca

SEQ ID NO: 472999 - RNA, 19 nt, Artificial Sequence
  Description of Artificial Sequence: Synthetic oligonucleotide
ucgugaccgcauacaucug

SEQ ID NO: 473000 - RNA, 19 nt, Artificial Sequence
  Description of Artificial Sequence: Synthetic oligonucleotide
ggccgagcauuacuggcag

SEQ ID NO: 473001 - RNA, 19 nt, Artificial Sequence
  Description of Artificial Sequence: Synthetic oligonucleotide
aagauaugccugaguuaau

SEQ ID NO: 473002 - RNA, 19 nt, Artificial Sequence
  Description of Artificial Sequence: Synthetic oligonucleotide
uaccggcggaggcccuucg

SEQ ID NO: 473003 - RNA, 19 nt, Artificial Sequence
  Description of Artificial Sequence: Synthetic oligonucleotide
cugacccaguaaugaguuc

SEQ ID NO: 473004 - RNA, 19 nt, Artificial Sequence
  Description of Artificial Sequence: Synthetic oligonucleotide
cacuucaaugaagcuccac

SEQ ID NO: 473005 - RNA, 19 nt, Artificial Sequence
  Description of Artificial Sequence: Synthetic oligonucleotide
aggccgagcauuacuggca

SEQ ID NO: 473006 - RNA, 19 nt, Artificial Sequence
  Description of Artificial Sequence: Synthetic oligonucleotide
cucggcgggugauggugcc

SEQ ID NO: 473007 - RNA, 19 nt, Artificial Sequence
  Description of Artificial Sequence: Synthetic oligonucleotide
aggacguagccagguggag

SEQ ID NO: 473008 - RNA, 19 nt, Artificial Sequence
  Description of Artificial Sequence: Synthetic oligonucleotide
ggcaggcuagcccuguuga

SEQ ID NO: 473009 - RNA, 19 nt, Artificial Sequence
  Description of Artificial Sequence: Synthetic oligonucleotide
cauagauacggccguaguu

SEQ ID NO: 473010 - RNA, 19 nt, Artificial Sequence
  Description of Artificial Sequence: Synthetic oligonucleotide
cagccgauaccggcggagg

SEQ ID NO: 473011 - RNA, 19 nt, Artificial Sequence
  Description of Artificial Sequence: Synthetic oligonucleotide
gggauauccacaucauuau

SEQ ID NO: 473012 - RNA, 19 nt, Artificial Sequence
  Description of Artificial Sequence: Synthetic oligonucleotide
agguagggugccuggucau

SEQ ID NO: 473013 - RNA, 19 nt, Artificial Sequence
  Description of Artificial Sequence: Synthetic oligonucleotide
caguuagaaggacucuucu

SEQ ID NO: 473014 - RNA, 19 nt, Artificial Sequence
  Description of Artificial Sequence: Synthetic oligonucleotide
guacguggugugucagaca

SEQ ID NO: 473015 - RNA, 19 nt, Artificial Sequence
  Description of Artificial Sequence: Synthetic oligonucleotide
cgugaccgcauacaucugc

SEQ ID NO: 473016 - RNA, 19 nt, Artificial Sequence
  Description of Artificial Sequence: Synthetic oligonucleotide
gcauaccagcaaaaugagc

SEQ ID NO: 473017 - RNA, 19 nt, Artificial Sequence
  Description of Artificial Sequence: Synthetic oligonucleotide
ggacguagccagguggagc

SEQ ID NO: 473018 - RNA, 19 nt, Artificial Sequence
  Description of Artificial Sequence: Synthetic oligonucleotide
uuccuguacagggccucga

SEQ ID NO: 473019 - RNA, 19 nt, Artificial Sequence
  Description of Artificial Sequence: Synthetic oligonucleotide
cugaguuaaugugaccugu

SEQ ID NO: 473020 - RNA, 19 nt, Artificial Sequence
  Description of Artificial Sequence: Synthetic oligonucleotide
ggucaauaucuacugcacu

SEQ ID NO: 473021 - RNA, 19 nt, Artificial Sequence
  Description of Artificial Sequence: Synthetic oligonucleotide
guaccccuucucauacagc

SEQ ID NO: 473022 - RNA, 19 nt, Artificial Sequence
  Description of Artificial Sequence: Synthetic oligonucleotide
ccaguuggguuagaaggag

SEQ ID NO: 473023 - RNA, 19 nt, Artificial Sequence
  Description of Artificial Sequence: Synthetic oligonucleotide
cauucacccucgucugaca

SEQ ID NO: 473024 - RNA, 19 nt, Artificial Sequence
  Description of Artificial Sequence: Synthetic oligonucleotide
ccagguaacgaaccucauc

SEQ ID NO: 473025 - RNA, 19 nt, Artificial Sequence
  Description of Artificial Sequence: Synthetic oligonucleotide
ccaugcucgcucuguaaac

SEQ ID NO: 473026 - RNA, 19 nt, Artificial Sequence
  Description of Artificial Sequence: Synthetic oligonucleotide
caguucacacggcugguua

SEQ ID NO: 473027 - RNA, 19 nt, Artificial Sequence
  Description of Artificial Sequence: Synthetic oligonucleotide
cuucacccuggggaauccc

SEQ ID NO: 473028 - RNA, 19 nt, Artificial Sequence
  Description of Artificial Sequence: Synthetic oligonucleotide
ggcugguuauaaacucucc

SEQ ID NO: 473029 - RNA, 19 nt, Artificial Sequence
  Description of Artificial Sequence: Synthetic oligonucleotide
ggggcugacccaguaauga

SEQ ID NO: 473030 - RNA, 19 nt, Artificial Sequence
  Description of Artificial Sequence: Synthetic oligonucleotide
gugccgacaguaccccuuc

SEQ ID NO: 473031 - RNA, 19 nt, Artificial Sequence
  Description of Artificial Sequence: Synthetic oligonucleotide
cugggagcugauacguuua

SEQ ID NO: 473032 - RNA, 19 nt, Artificial Sequence
  Description of Artificial Sequence: Synthetic oligonucleotide
ccagauuaucccgccgucc

SEQ ID NO: 473033 - RNA, 19 nt, Artificial Sequence
  Description of Artificial Sequence: Synthetic oligonucleotide
auaccggcggaggcccuuc

SEQ ID NO: 473034 - RNA, 19 nt, Artificial Sequence
  Description of Artificial Sequence: Synthetic oligonucleotide
ggaacuauugucggugacu

SEQ ID NO: 473035 - RNA, 19 nt, Artificial Sequence
  Description of Artificial Sequence: Synthetic oligonucleotide
caccaggguacgucccaac

SEQ ID NO: 473036 - RNA, 19 nt, Artificial Sequence
  Description of Artificial Sequence: Synthetic oligonucleotide
cugccguuugccacaugga

SEQ ID NO: 473037 - RNA, 19 nt, Artificial Sequence
  Description of Artificial Sequence: Synthetic oligonucleotide
acgucccaaccaugagugu

SEQ ID NO: 473038 - RNA, 19 nt, Artificial Sequence
  Description of Artificial Sequence: Synthetic oligonucleotide
gccaugugggcuccacagc

SEQ ID NO: 473039 - RNA, 19 nt, Artificial Sequence
  Description of Artificial Sequence: Synthetic oligonucleotide
cccaguuggguuagaagga

SEQ ID NO: 473040 - RNA, 19 nt, Artificial Sequence
  Description of Artificial Sequence: Synthetic oligonucleotide
gcaucaguaggcgcucagc

SEQ ID NO: 473041 - RNA, 19 nt, Artificial Sequence
  Description of Artificial Sequence: Synthetic oligonucleotide
ggguacgucccaaccauga

SEQ ID NO: 473042 - RNA, 19 nt, Artificial Sequence
  Description of Artificial Sequence: Synthetic oligonucleotide
cccguaucuccuuuccauc

SEQ ID NO: 473043 - RNA, 19 nt, Artificial Sequence
  Description of Artificial Sequence: Synthetic oligonucleotide
cuagggcgcugcaccagca

SEQ ID NO: 473044 - RNA, 19 nt, Artificial Sequence
  Description of Artificial Sequence: Synthetic oligonucleotide
gacugcccagccccauaga

SEQ ID NO: 473045 - RNA, 19 nt, Artificial Sequence
  Description of Artificial Sequence: Synthetic oligonucleotide
aggguacgucccaaccaug

SEQ ID NO: 473046 - RNA, 19 nt, Artificial Sequence
  Description of Artificial Sequence: Synthetic oligonucleotide
ccgacaguaccccuucuca

SEQ ID NO: 473047 - RNA, 19 nt, Artificial Sequence
  Description of Artificial Sequence: Synthetic oligonucleotide
cacggggaagggcugaccu

SEQ ID NO: 473048 - RNA, 19 nt, Artificial Sequence
  Description of Artificial Sequence: Synthetic oligonucleotide
gacagccgauaccggcgga

SEQ ID NO: 473049 - RNA, 19 nt, Artificial Sequence
  Description of Artificial Sequence: Synthetic oligonucleotide
caggguacgucccaaccau

SEQ ID NO: 473050 - RNA, 19 nt, Artificial Sequence
  Description of Artificial Sequence: Synthetic oligonucleotide
gccgauaccggcggaggcc

SEQ ID NO: 473051 - RNA, 19 nt, Artificial Sequence
  Description of Artificial Sequence: Synthetic oligonucleotide
ccacgucuaagcagcccag

SEQ ID NO: 473052 - RNA, 19 nt, Artificial Sequence
  Description of Artificial Sequence: Synthetic oligonucleotide
gguccauugccaugguggu

SEQ ID NO: 473053 - RNA, 19 nt, Artificial Sequence
  Description of Artificial Sequence: Synthetic oligonucleotide
guucacacggcugguuaua

SEQ ID NO: 473054 - RNA, 19 nt, Artificial Sequence
  Description of Artificial Sequence: Synthetic oligonucleotide
aagcuucucucuggaucuu

SEQ ID NO: 473055 - RNA, 19 nt, Artificial Sequence
  Description of Artificial Sequence: Synthetic oligonucleotide
ggucaccagagcuucuacu

SEQ ID NO: 473056 - RNA, 19 nt, Artificial Sequence
  Description of Artificial Sequence: Synthetic oligonucleotide
cagcaaccagggauaucca

SEQ ID NO: 473057 - RNA, 19 nt, Artificial Sequence
  Description of Artificial Sequence: Synthetic oligonucleotide
gccgacaguaccccuucuc

SEQ ID NO: 473058 - RNA, 19 nt, Artificial Sequence
  Description of Artificial Sequence: Synthetic oligonucleotide
caguuggguuagaaggagu

SEQ ID NO: 473059 - RNA, 19 nt, Artificial Sequence
  Description of Artificial Sequence: Synthetic oligonucleotide
guagaucagugccccugcu

SEQ ID NO: 473060 - RNA, 19 nt, Artificial Sequence
  Description of Artificial Sequence: Synthetic oligonucleotide
gugaccgcauacaucugcu

SEQ ID NO: 473061 - RNA, 19 nt, Artificial Sequence
  Description of Artificial Sequence: Synthetic oligonucleotide
cacccucgucugacagccg

SEQ ID NO: 473062 - RNA, 19 nt, Artificial Sequence
  Description of Artificial Sequence: Synthetic oligonucleotide
uucugccguuugccacaug

SEQ ID NO: 473063 - RNA, 19 nt, Artificial Sequence
  Description of Artificial Sequence: Synthetic oligonucleotide
caucccaguuggguuagaa

SEQ ID NO: 473064 - RNA, 19 nt, Artificial Sequence
  Description of Artificial Sequence: Synthetic oligonucleotide
ccaggguacgucccaacca

SEQ ID NO: 473065 - RNA, 19 nt, Artificial Sequence
  Description of Artificial Sequence: Synthetic oligonucleotide
gaggcccuucgugaccgca

SEQ ID NO: 473066 - RNA, 19 nt, Artificial Sequence
  Description of Artificial Sequence: Synthetic oligonucleotide
caggcuagcccuguugacu

SEQ ID NO: 473067 - RNA, 19 nt, Artificial Sequence
  Description of Artificial Sequence: Synthetic oligonucleotide
caguaccccuucucauaca

SEQ ID NO: 473068 - RNA, 19 nt, Artificial Sequence
  Description of Artificial Sequence: Synthetic oligonucleotide
accggcggaggcccuucgu

SEQ ID NO: 473069 - RNA, 19 nt, Artificial Sequence
  Description of Artificial Sequence: Synthetic oligonucleotide
agauacggccguaguugaa

SEQ ID NO: 473070 - RNA, 19 nt, Artificial Sequence
  Description of Artificial Sequence: Synthetic oligonucleotide
auggcacggggaagggcug

SEQ ID NO: 473071 - RNA, 19 nt, Artificial Sequence
  Description of Artificial Sequence: Synthetic oligonucleotide
guuugccacauggaacuau

SEQ ID NO: 473072 - RNA, 19 nt, Artificial Sequence
  Description of Artificial Sequence: Synthetic oligonucleotide
ccgauaccggcggaggccc

SEQ ID NO: 473073 - RNA, 19 nt, Artificial Sequence
  Description of Artificial Sequence: Synthetic oligonucleotide
cggcugguuauaaacucuc

SEQ ID NO: 473074 - RNA, 19 nt, Artificial Sequence
  Description of Artificial Sequence: Synthetic oligonucleotide
ccgcauacaucugcugggc

SEQ ID NO: 473075 - RNA, 19 nt, Artificial Sequence
  Description of Artificial Sequence: Synthetic oligonucleotide
gggguacguggugugucag

SEQ ID NO: 473076 - RNA, 19 nt, Artificial Sequence
  Description of Artificial Sequence: Synthetic oligonucleotide
cacugccuacucggucagg

SEQ ID NO: 473077 - RNA, 19 nt, Artificial Sequence
  Description of Artificial Sequence: Synthetic oligonucleotide
ggguacguggugugucaga

SEQ ID NO: 473078 - RNA, 19 nt, Artificial Sequence
  Description of Artificial Sequence: Synthetic oligonucleotide
cugucucaccagccauuca

SEQ ID NO: 473079 - RNA, 19 nt, Artificial Sequence
  Description of Artificial Sequence: Synthetic oligonucleotide
guuggguuagaaggaguuu

SEQ ID NO: 473080 - RNA, 19 nt, Artificial Sequence
  Description of Artificial Sequence: Synthetic oligonucleotide
aucccgccguccaggccac

SEQ ID NO: 473081 - RNA, 19 nt, Artificial Sequence
  Description of Artificial Sequence: Synthetic oligonucleotide
cccacuucuuccagcguga

SEQ ID NO: 473082 - RNA, 19 nt, Artificial Sequence
  Description of Artificial Sequence: Synthetic oligonucleotide
ggccccauagcggccuucc

SEQ ID NO: 473083 - RNA, 19 nt, Artificial Sequence
  Description of Artificial Sequence: Synthetic oligonucleotide
ccugaacaaccgugggcuc

SEQ ID NO: 473084 - RNA, 19 nt, Artificial Sequence
  Description of Artificial Sequence: Synthetic oligonucleotide
cgucccaaccaugaguguc

SEQ ID NO: 473085 - RNA, 19 nt, Artificial Sequence
  Description of Artificial Sequence: Synthetic oligonucleotide
cagauggagcuagggucca

SEQ ID NO: 473086 - RNA, 19 nt, Artificial Sequence
  Description of Artificial Sequence: Synthetic oligonucleotide
uagcaugcucucggcugau

SEQ ID NO: 473087 - RNA, 19 nt, Artificial Sequence
  Description of Artificial Sequence: Synthetic oligonucleotide
ccaugugggcuccacagcu

SEQ ID NO: 473088 - RNA, 19 nt, Artificial Sequence
  Description of Artificial Sequence: Synthetic oligonucleotide
gccguaguugaagacuuua

SEQ ID NO: 473089 - RNA, 19 nt, Artificial Sequence
  Description of Artificial Sequence: Synthetic oligonucleotide
gcuucacccuggggaaucc

SEQ ID NO: 473090 - RNA, 19 nt, Artificial Sequence
  Description of Artificial Sequence: Synthetic oligonucleotide
gccaccaggguacguccca

SEQ ID NO: 473091 - RNA, 19 nt, Artificial Sequence
  Description of Artificial Sequence: Synthetic oligonucleotide
gccauucacccucgucuga

SEQ ID NO: 473092 - RNA, 19 nt, Artificial Sequence
  Description of Artificial Sequence: Synthetic oligonucleotide
ccccuguccaugcucgcuc

SEQ ID NO: 473093 - RNA, 19 nt, Artificial Sequence
  Description of Artificial Sequence: Synthetic oligonucleotide
cugacuggggcagaucauu

SEQ ID NO: 473094 - RNA, 19 nt, Artificial Sequence
  Description of Artificial Sequence: Synthetic oligonucleotide
gcugacccaguaaugaguu

SEQ ID NO: 473095 - RNA, 19 nt, Artificial Sequence
  Description of Artificial Sequence: Synthetic oligonucleotide
ccggcggaggcccuucgug

SEQ ID NO: 473096 - RNA, 19 nt, Artificial Sequence
  Description of Artificial Sequence: Synthetic oligonucleotide
cggaggcccuucgugaccg

SEQ ID NO: 473097 - RNA, 19 nt, Artificial Sequence
  Description of Artificial Sequence: Synthetic oligonucleotide
acguagccagguggagccu

SEQ ID NO: 473098 - RNA, 19 nt, Artificial Sequence
  Description of Artificial Sequence: Synthetic oligonucleotide
ccuggucauggcacgggga

SEQ ID NO: 473099 - RNA, 19 nt, Artificial Sequence
  Description of Artificial Sequence: Synthetic oligonucleotide
gcccuucgugaccgcauac

SEQ ID NO: 473100 - RNA, 19 nt, Artificial Sequence
  Description of Artificial Sequence: Synthetic oligonucleotide
cuguccaugcucgcucugu

SEQ ID NO: 473101 - RNA, 19 nt, Artificial Sequence
  Description of Artificial Sequence: Synthetic oligonucleotide
agcuaggggcugacccagu

SEQ ID NO: 473102 - RNA, 19 nt, Artificial Sequence
  Description of Artificial Sequence: Synthetic oligonucleotide
cggugacuaagaacuccuc

SEQ ID NO: 473103 - RNA, 19 nt, Artificial Sequence
  Description of Artificial Sequence: Synthetic oligonucleotide
ccuucgugaccgcauacau

SEQ ID NO: 473104 - RNA, 19 nt, Artificial Sequence
  Description of Artificial Sequence: Synthetic oligonucleotide
cccuucgugaccgcauaca

SEQ ID NO: 473105 - RNA, 19 nt, Artificial Sequence
  Description of Artificial Sequence: Synthetic oligonucleotide
cugauacguuuaugagcau

SEQ ID NO: 473106 - RNA, 19 nt, Artificial Sequence
  Description of Artificial Sequence: Synthetic oligonucleotide
cacgucuaagcagcccagu

SEQ ID NO: 473107 - RNA, 19 nt, Artificial Sequence
  Description of Artificial Sequence: Synthetic oligonucleotide
cucggucaggccgagcauu

SEQ ID NO: 473108 - RNA, 19 nt, Artificial Sequence
  Description of Artificial Sequence: Synthetic oligonucleotide
ggcccuucgugaccgcaua

SEQ ID NO: 473109 - RNA, 19 nt, Artificial Sequence
  Description of Artificial Sequence: Synthetic oligonucleotide
cccuucuagggcgcugcac

SEQ ID NO: 473110 - RNA, 19 nt, Artificial Sequence
  Description of Artificial Sequence: Synthetic oligonucleotide
gggaaucccguaucuccuu

SEQ ID NO: 473111 - RNA, 19 nt, Artificial Sequence
  Description of Artificial Sequence: Synthetic oligonucleotide
ggggcucgcugguggcuca

SEQ ID NO: 473112 - RNA, 19 nt, Artificial Sequence
  Description of Artificial Sequence: Synthetic oligonucleotide
ccgccguccaggccaccag

SEQ ID NO: 473113 - RNA, 19 nt, Artificial Sequence
  Description of Artificial Sequence: Synthetic oligonucleotide
cgagcauuacuggcaguga

SEQ ID NO: 473114 - RNA, 19 nt, Artificial Sequence
  Description of Artificial Sequence: Synthetic oligonucleotide
cucuacaguggggcucgcu

SEQ ID NO: 473115 - RNA, 19 nt, Artificial Sequence
  Description of Artificial Sequence: Synthetic oligonucleotide
ggcuuucaacucacugccu

SEQ ID NO: 473116 - RNA, 19 nt, Artificial Sequence
  Description of Artificial Sequence: Synthetic oligonucleotide
cuucugccguuugccacau

SEQ ID NO: 473117 - RNA, 19 nt, Artificial Sequence
  Description of Artificial Sequence: Synthetic oligonucleotide
ggcgacugacuggggcaga

SEQ ID NO: 473118 - RNA, 19 nt, Artificial Sequence
  Description of Artificial Sequence: Synthetic oligonucleotide
ccucgucugacagccgaua

SEQ ID NO: 473119 - RNA, 19 nt, Artificial Sequence
  Description of Artificial Sequence: Synthetic oligonucleotide
gcgacugacuggggcagau

SEQ ID NO: 473120 - RNA, 19 nt, Artificial Sequence
  Description of Artificial Sequence: Synthetic oligonucleotide
cggccguaguugaagacuu

SEQ ID NO: 473121 - RNA, 19 nt, Artificial Sequence
  Description of Artificial Sequence: Synthetic oligonucleotide
ggccguaguugaagacuuu

SEQ ID NO: 473122 - RNA, 19 nt, Artificial Sequence
  Description of Artificial Sequence: Synthetic oligonucleotide
cccucgucugacagccgau

SEQ ID NO: 473123 - RNA, 19 nt, Artificial Sequence
  Description of Artificial Sequence: Synthetic oligonucleotide
ccaucccaguuggguuaga

SEQ ID NO: 473124 - RNA, 19 nt, Artificial Sequence
  Description of Artificial Sequence: Synthetic oligonucleotide
cgauaccggcggaggcccu

SEQ ID NO: 473125 - RNA, 19 nt, Artificial Sequence
  Description of Artificial Sequence: Synthetic oligonucleotide
aagcccacgaacuugaggc

SEQ ID NO: 473126 - RNA, 19 nt, Artificial Sequence
  Description of Artificial Sequence: Synthetic oligonucleotide
uuugagucagccuugagcg

SEQ ID NO: 473127 - RNA, 19 nt, Artificial Sequence
  Description of Artificial Sequence: Synthetic oligonucleotide
ugaguuuuaauacuucggg

SEQ ID NO: 473128 - RNA, 19 nt, Artificial Sequence
  Description of Artificial Sequence: Synthetic oligonucleotide
aagucgcugaacuugacac

SEQ ID NO: 473129 - RNA, 19 nt, Artificial Sequence
  Description of Artificial Sequence: Synthetic oligonucleotide
ucuaaaauugcagaugccg

SEQ ID NO: 473130 - RNA, 19 nt, Artificial Sequence
  Description of Artificial Sequence: Synthetic oligonucleotide
uaguugauggcaaagguag

SEQ ID NO: 473131 - RNA, 19 nt, Artificial Sequence
  Description of Artificial Sequence: Synthetic oligonucleotide
uguaagaugagcguguggg

SEQ ID NO: 473132 - RNA, 19 nt, Artificial Sequence
  Description of Artificial Sequence: Synthetic oligonucleotide
cuuguauaggucuacaaac

SEQ ID NO: 473133 - RNA, 19 nt, Artificial Sequence
  Description of Artificial Sequence: Synthetic oligonucleotide
uugaucacguggcagaugc

SEQ ID NO: 473134 - RNA, 19 nt, Artificial Sequence
  Description of Artificial Sequence: Synthetic oligonucleotide
guagacgaggcucagaaag

SEQ ID NO: 473135 - RNA, 19 nt, Artificial Sequence
  Description of Artificial Sequence: Synthetic oligonucleotide
ugugcaacggcccugcuug

SEQ ID NO: 473136 - RNA, 19 nt, Artificial Sequence
  Description of Artificial Sequence: Synthetic oligonucleotide
uguuugguugaccuggaag

SEQ ID NO: 473137 - RNA, 19 nt, Artificial Sequence
  Description of Artificial Sequence: Synthetic oligonucleotide
uguauaggucuacaaacug

SEQ ID NO: 473138 - RNA, 19 nt, Artificial Sequence
  Description of Artificial Sequence: Synthetic oligonucleotide
gacacggucagccaggagc

SEQ ID NO: 473139 - RNA, 19 nt, Artificial Sequence
  Description of Artificial Sequence: Synthetic oligonucleotide
aacuguaggacacggucag

SEQ ID NO: 473140 - RNA, 19 nt, Artificial Sequence
  Description of Artificial Sequence: Synthetic oligonucleotide
aaagaacuguaggacacgg

SEQ ID NO: 473141 - RNA, 19 nt, Artificial Sequence
  Description of Artificial Sequence: Synthetic oligonucleotide
accugugaggcauagugcg

SEQ ID NO: 473142 - RNA, 19 nt, Artificial Sequence
  Description of Artificial Sequence: Synthetic oligonucleotide
acuggcaaaaugaaagcgc

SEQ ID NO: 473143 - RNA, 19 nt, Artificial Sequence
  Description of Artificial Sequence: Synthetic oligonucleotide
aucaugaccacccgguggg

SEQ ID NO: 473144 - RNA, 19 nt, Artificial Sequence
  Description of Artificial Sequence: Synthetic oligonucleotide
ugcguucugaaucucucgg

SEQ ID NO: 473145 - RNA, 19 nt, Artificial Sequence
  Description of Artificial Sequence: Synthetic oligonucleotide
acggacauucgcuuuaggg

SEQ ID NO: 473146 - RNA, 19 nt, Artificial Sequence
  Description of Artificial Sequence: Synthetic oligonucleotide
agcgucgucaccaaugugc

SEQ ID NO: 473147 - RNA, 19 nt, Artificial Sequence
  Description of Artificial Sequence: Synthetic oligonucleotide
gaugccgauuuauuuaccc

SEQ ID NO: 473148 - RNA, 19 nt, Artificial Sequence
  Description of Artificial Sequence: Synthetic oligonucleotide
aucagcgugcuucagugcg

SEQ ID NO: 473149 - RNA, 19 nt, Artificial Sequence
  Description of Artificial Sequence: Synthetic oligonucleotide
uuguauaggucuacaaacu

SEQ ID NO: 473150 - RNA, 19 nt, Artificial Sequence
  Description of Artificial Sequence: Synthetic oligonucleotide
uccugguacagguagacga

SEQ ID NO: 473151 - RNA, 19 nt, Artificial Sequence
  Description of Artificial Sequence: Synthetic oligonucleotide
cuaucacuugucaagguac

SEQ ID NO: 473152 - RNA, 19 nt, Artificial Sequence
  Description of Artificial Sequence: Synthetic oligonucleotide
gaucaugaccacccggugg

SEQ ID NO: 473153 - RNA, 19 nt, Artificial Sequence
  Description of Artificial Sequence: Synthetic oligonucleotide
ugaaauccggugaggaacc

SEQ ID NO: 473154 - RNA, 19 nt, Artificial Sequence
  Description of Artificial Sequence: Synthetic oligonucleotide
uacgaggccaaacuggcug

SEQ ID NO: 473155 - RNA, 19 nt, Artificial Sequence
  Description of Artificial Sequence: Synthetic oligonucleotide
uucgcuuuagggcacuggc

SEQ ID NO: 473156 - RNA, 19 nt, Artificial Sequence
  Description of Artificial Sequence: Synthetic oligonucleotide
gacagcuuagaggugaaag

SEQ ID NO: 473157 - RNA, 19 nt, Artificial Sequence
  Description of Artificial Sequence: Synthetic oligonucleotide
aaugaagcccacgaacuug

SEQ ID NO: 473158 - RNA, 19 nt, Artificial Sequence
  Description of Artificial Sequence: Synthetic oligonucleotide
cauagugcgugcuccaggg

SEQ ID NO: 473159 - RNA, 19 nt, Artificial Sequence
  Description of Artificial Sequence: Synthetic oligonucleotide
ugggaaaacauggagugca

SEQ ID NO: 473160 - RNA, 19 nt, Artificial Sequence
  Description of Artificial Sequence: Synthetic oligonucleotide
auaggcgguggauaccagc

SEQ ID NO: 473161 - RNA, 19 nt, Artificial Sequence
  Description of Artificial Sequence: Synthetic oligonucleotide
agucgcugaacuugacacc

SEQ ID NO: 473162 - RNA, 19 nt, Artificial Sequence
  Description of Artificial Sequence: Synthetic oligonucleotide
uaaaauugcagaugccgau

SEQ ID NO: 473163 - RNA, 19 nt, Artificial Sequence
  Description of Artificial Sequence: Synthetic oligonucleotide
cuguacaugagggaugagg

SEQ ID NO: 473164 - RNA, 19 nt, Artificial Sequence
  Description of Artificial Sequence: Synthetic oligonucleotide
uagugcgugcuccagggcc

SEQ ID NO: 473165 - RNA, 19 nt, Artificial Sequence
  Description of Artificial Sequence: Synthetic oligonucleotide
cuaaaauugcagaugccga

SEQ ID NO: 473166 - RNA, 19 nt, Artificial Sequence
  Description of Artificial Sequence: Synthetic oligonucleotide
uucuaaaauugcagaugcc

SEQ ID NO: 473167 - RNA, 19 nt, Artificial Sequence
  Description of Artificial Sequence: Synthetic oligonucleotide
aauccggugaggaaccaag

SEQ ID NO: 473168 - RNA, 19 nt, Artificial Sequence
  Description of Artificial Sequence: Synthetic oligonucleotide
ugucuacgaggccaaacug

SEQ ID NO: 473169 - RNA, 19 nt, Artificial Sequence
  Description of Artificial Sequence: Synthetic oligonucleotide
augucuacgaggccaaacu

SEQ ID NO: 473170 - RNA, 19 nt, Artificial Sequence
  Description of Artificial Sequence: Synthetic oligonucleotide
uggcuauaugccaggauga

SEQ ID NO: 473171 - RNA, 19 nt, Artificial Sequence
  Description of Artificial Sequence: Synthetic oligonucleotide
ucacguggcagaugcauug

SEQ ID NO: 473172 - RNA, 19 nt, Artificial Sequence
  Description of Artificial Sequence: Synthetic oligonucleotide
uucaggcuagugaugacaa

SEQ ID NO: 473173 - RNA, 19 nt, Artificial Sequence
  Description of Artificial Sequence: Synthetic oligonucleotide
ucgggagagagucuugaga

SEQ ID NO: 473174 - RNA, 19 nt, Artificial Sequence
  Description of Artificial Sequence: Synthetic oligonucleotide
acuuuggcuauaugccagg

SEQ ID NO: 473175 - RNA, 19 nt, Artificial Sequence
  Description of Artificial Sequence: Synthetic oligonucleotide
uaggacacggucagccagg

SEQ ID NO: 473176 - RNA, 19 nt, Artificial Sequence
  Description of Artificial Sequence: Synthetic oligonucleotide
ugccgauuuauuuacccaa

SEQ ID NO: 473177 - RNA, 19 nt, Artificial Sequence
  Description of Artificial Sequence: Synthetic oligonucleotide
uuucaggcuagugaugaca

SEQ ID NO: 473178 - RNA, 19 nt, Artificial Sequence
  Description of Artificial Sequence: Synthetic oligonucleotide
acagccgcgauguagcaga

SEQ ID NO: 473179 - RNA, 19 nt, Artificial Sequence
  Description of Artificial Sequence: Synthetic oligonucleotide
uccagucuacagcuguaag

SEQ ID NO: 473180 - RNA, 19 nt, Artificial Sequence
  Description of Artificial Sequence: Synthetic oligonucleotide
gucuacgaggccaaacugg

SEQ ID NO: 473181 - RNA, 19 nt, Artificial Sequence
  Description of Artificial Sequence: Synthetic oligonucleotide
aucacuugucaagguaccc

SEQ ID NO: 473182 - RNA, 19 nt, Artificial Sequence
  Description of Artificial Sequence: Synthetic oligonucleotide
aagguacccgucuugucaa

SEQ ID NO: 473183 - RNA, 19 nt, Artificial Sequence
  Description of Artificial Sequence: Synthetic oligonucleotide
cuuucucugagggaggaug

SEQ ID NO: 473184 - RNA, 19 nt, Artificial Sequence
  Description of Artificial Sequence: Synthetic oligonucleotide
agugccgaccuuuguuugg

SEQ ID NO: 473185 - RNA, 19 nt, Artificial Sequence
  Description of Artificial Sequence: Synthetic oligonucleotide
agguagacgaggcucagaa

SEQ ID NO: 473186 - RNA, 19 nt, Artificial Sequence
  Description of Artificial Sequence: Synthetic oligonucleotide
augcccuagcuccuuguac

SEQ ID NO: 473187 - RNA, 19 nt, Artificial Sequence
  Description of Artificial Sequence: Synthetic oligonucleotide
ugggaugcguucugaaucu

SEQ ID NO: 473188 - RNA, 19 nt, Artificial Sequence
  Description of Artificial Sequence: Synthetic oligonucleotide
gugggaugcguucugaauc

SEQ ID NO: 473189 - RNA, 19 nt, Artificial Sequence
  Description of Artificial Sequence: Synthetic oligonucleotide
gaaccaaggagcaagccaa

SEQ ID NO: 473190 - RNA, 19 nt, Artificial Sequence
  Description of Artificial Sequence: Synthetic oligonucleotide
ugcagaugccgauuuauuu

SEQ ID NO: 473191 - RNA, 19 nt, Artificial Sequence
  Description of Artificial Sequence: Synthetic oligonucleotide
uccggugaggaaccaagga

SEQ ID NO: 473192 - RNA, 19 nt, Artificial Sequence
  Description of Artificial Sequence: Synthetic oligonucleotide
aaaauugcagaugccgauu

SEQ ID NO: 473193 - RNA, 19 nt, Artificial Sequence
  Description of Artificial Sequence: Synthetic oligonucleotide
uuggucaguguccagucua

SEQ ID NO: 473194 - RNA, 19 nt, Artificial Sequence
  Description of Artificial Sequence: Synthetic oligonucleotide
uagacgaggcucagaaagu

SEQ ID NO: 473195 - RNA, 19 nt, Artificial Sequence
  Description of Artificial Sequence: Synthetic oligonucleotide
gagaugggagcaguguucc

SEQ ID NO: 473196 - RNA, 19 nt, Artificial Sequence
  Description of Artificial Sequence: Synthetic oligonucleotide
gggaucacccacuagggug

SEQ ID NO: 473197 - RNA, 19 nt, Artificial Sequence
  Description of Artificial Sequence: Synthetic oligonucleotide
cuaugggaaugcuggacac

SEQ ID NO: 473198 - RNA, 19 nt, Artificial Sequence
  Description of Artificial Sequence: Synthetic oligonucleotide
uugagaggcuuggagcggg

SEQ ID NO: 473199 - RNA, 19 nt, Artificial Sequence
  Description of Artificial Sequence: Synthetic oligonucleotide
guaagaugagcgugugggc

SEQ ID NO: 473200 - RNA, 19 nt, Artificial Sequence
  Description of Artificial Sequence: Synthetic oligonucleotide
uugagucagccuugagcgg

SEQ ID NO: 473201 - RNA, 19 nt, Artificial Sequence
  Description of Artificial Sequence: Synthetic oligonucleotide
uuucuaugggaaugcugga

SEQ ID NO: 473202 - RNA, 19 nt, Artificial Sequence
  Description of Artificial Sequence: Synthetic oligonucleotide
gaagucgcugaacuugaca

SEQ ID NO: 473203 - RNA, 19 nt, Artificial Sequence
  Description of Artificial Sequence: Synthetic oligonucleotide
ucucggaucacagccuuug

SEQ ID NO: 473204 - RNA, 19 nt, Artificial Sequence
  Description of Artificial Sequence: Synthetic oligonucleotide
aggcuaucacuugucaagg

SEQ ID NO: 473205 - RNA, 19 nt, Artificial Sequence
  Description of Artificial Sequence: Synthetic oligonucleotide
auagugcgugcuccagggc

SEQ ID NO: 473206 - RNA, 19 nt, Artificial Sequence
  Description of Artificial Sequence: Synthetic oligonucleotide
gauguaagaugagcgugug

SEQ ID NO: 473207 - RNA, 19 nt, Artificial Sequence
  Description of Artificial Sequence: Synthetic oligonucleotide
cugcuaucaauggagcgcc

SEQ ID NO: 473208 - RNA, 19 nt, Artificial Sequence
  Description of Artificial Sequence: Synthetic oligonucleotide
caggauaggcgguggauac

SEQ ID NO: 473209 - RNA, 19 nt, Artificial Sequence
  Description of Artificial Sequence: Synthetic oligonucleotide
ggacauucgcuuuagggca

SEQ ID NO: 473210 - RNA, 19 nt, Artificial Sequence
  Description of Artificial Sequence: Synthetic oligonucleotide
uggcaaaaugaaagcgcug

SEQ ID NO: 473211 - RNA, 19 nt, Artificial Sequence
  Description of Artificial Sequence: Synthetic oligonucleotide
agugcgcccacgucauugg

SEQ ID NO: 473212 - RNA, 19 nt, Artificial Sequence
  Description of Artificial Sequence: Synthetic oligonucleotide
uuuggcuauaugccaggau

SEQ ID NO: 473213 - RNA, 19 nt, Artificial Sequence
  Description of Artificial Sequence: Synthetic oligonucleotide
uaucaauggagcgccacuc

SEQ ID NO: 473214 - RNA, 19 nt, Artificial Sequence
  Description of Artificial Sequence: Synthetic oligonucleotide
gaggcauagugcgugcucc

SEQ ID NO: 473215 - RNA, 19 nt, Artificial Sequence
  Description of Artificial Sequence: Synthetic oligonucleotide
uguaggacacggucagcca

SEQ ID NO: 473216 - RNA, 19 nt, Artificial Sequence
  Description of Artificial Sequence: Synthetic oligonucleotide
agggaugucuacgaggcca

SEQ ID NO: 473217 - RNA, 19 nt, Artificial Sequence
  Description of Artificial Sequence: Synthetic oligonucleotide
ggagagagucuugagaggc

SEQ ID NO: 473218 - RNA, 19 nt, Artificial Sequence
  Description of Artificial Sequence: Synthetic oligonucleotide
gcuagugaugacaaauucc

SEQ ID NO: 473219 - RNA, 19 nt, Artificial Sequence
  Description of Artificial Sequence: Synthetic oligonucleotide
augccgauuuauuuaccca

SEQ ID NO: 473220 - RNA, 19 nt, Artificial Sequence
  Description of Artificial Sequence: Synthetic oligonucleotide
uucuaugggaaugcuggac

SEQ ID NO: 473221 - RNA, 19 nt, Artificial Sequence
  Description of Artificial Sequence: Synthetic oligonucleotide
accacgaaccaccaggcua

SEQ ID NO: 473222 - RNA, 19 nt, Artificial Sequence
  Description of Artificial Sequence: Synthetic oligonucleotide
cucguaggaggcgagcacg

SEQ ID NO: 473223 - RNA, 19 nt, Artificial Sequence
  Description of Artificial Sequence: Synthetic oligonucleotide
ugaacaucugcagcgucgu

SEQ ID NO: 473224 - RNA, 19 nt, Artificial Sequence
  Description of Artificial Sequence: Synthetic oligonucleotide
aggacacgggcuccuuccc

SEQ ID NO: 473225 - RNA, 19 nt, Artificial Sequence
  Description of Artificial Sequence: Synthetic oligonucleotide
aguggguuguccccuguga

SEQ ID NO: 473226 - RNA, 19 nt, Artificial Sequence
  Description of Artificial Sequence: Synthetic oligonucleotide
aauugcagaugccgauuua

SEQ ID NO: 473227 - RNA, 19 nt, Artificial Sequence
  Description of Artificial Sequence: Synthetic oligonucleotide
aacggcccugcuugaucac

SEQ ID NO: 473228 - RNA, 19 nt, Artificial Sequence
  Description of Artificial Sequence: Synthetic oligonucleotide
gaugucuacgaggccaaac

SEQ ID NO: 473229 - RNA, 19 nt, Artificial Sequence
  Description of Artificial Sequence: Synthetic oligonucleotide
accaaugugcaacggcccu

SEQ ID NO: 473230 - RNA, 19 nt, Artificial Sequence
  Description of Artificial Sequence: Synthetic oligonucleotide
ucccgagagaucucagugu

SEQ ID NO: 473231 - RNA, 19 nt, Artificial Sequence
  Description of Artificial Sequence: Synthetic oligonucleotide
ucucguaggaggcgagcac

SEQ ID NO: 473232 - RNA, 19 nt, Artificial Sequence
  Description of Artificial Sequence: Synthetic oligonucleotide
gagcgugugggccuuguca

SEQ ID NO: 473233 - RNA, 19 nt, Artificial Sequence
  Description of Artificial Sequence: Synthetic oligonucleotide
ugaggcauagugcgugcuc

SEQ ID NO: 473234 - RNA, 19 nt, Artificial Sequence
  Description of Artificial Sequence: Synthetic oligonucleotide
ucagcgugcuucagugcgc

SEQ ID NO: 473235 - RNA, 19 nt, Artificial Sequence
  Description of Artificial Sequence: Synthetic oligonucleotide
auaggucuacaaacuguuc

SEQ ID NO: 473236 - RNA, 19 nt, Artificial Sequence
  Description of Artificial Sequence: Synthetic oligonucleotide
auuuucagccccugaguuu

SEQ ID NO: 473237 - RNA, 19 nt, Artificial Sequence
  Description of Artificial Sequence: Synthetic oligonucleotide
ggaaccaaggagcaagcca

SEQ ID NO: 473238 - RNA, 19 nt, Artificial Sequence
  Description of Artificial Sequence: Synthetic oligonucleotide
uuuccacuagccuggccaa

SEQ ID NO: 473239 - RNA, 19 nt, Artificial Sequence
  Description of Artificial Sequence: Synthetic oligonucleotide
agaugccgauuuauuuacc

SEQ ID NO: 473240 - RNA, 19 nt, Artificial Sequence
  Description of Artificial Sequence: Synthetic oligonucleotide
auaugccaggaugagggca

SEQ ID NO: 473241 - RNA, 19 nt, Artificial Sequence
  Description of Artificial Sequence: Synthetic oligonucleotide
ugcgcccacgucauuggug

SEQ ID NO: 473242 - RNA, 19 nt, Artificial Sequence
  Description of Artificial Sequence: Synthetic oligonucleotide
gcugcuaucaauggagcgc

SEQ ID NO: 473243 - RNA, 19 nt, Artificial Sequence
  Description of Artificial Sequence: Synthetic oligonucleotide
cggacauucgcuuuagggc

SEQ ID NO: 473244 - RNA, 19 nt, Artificial Sequence
  Description of Artificial Sequence: Synthetic oligonucleotide
gaggcucagaaaguggaca

SEQ ID NO: 473245 - RNA, 19 nt, Artificial Sequence
  Description of Artificial Sequence: Synthetic oligonucleotide
guaggaggcgagcacggac

SEQ ID NO: 473246 - RNA, 19 nt, Artificial Sequence
  Description of Artificial Sequence: Synthetic oligonucleotide
gagugccgaccuuuguuug

SEQ ID NO: 473247 - RNA, 19 nt, Artificial Sequence
  Description of Artificial Sequence: Synthetic oligonucleotide
ucgccguucuacaauccuc

SEQ ID NO: 473248 - RNA, 19 nt, Artificial Sequence
  Description of Artificial Sequence: Synthetic oligonucleotide
aggauaggcgguggauacc

SEQ ID NO: 473249 - RNA, 19 nt, Artificial Sequence
  Description of Artificial Sequence: Synthetic oligonucleotide
ggugagccaagccaucacc

SEQ ID NO: 473250 - RNA, 19 nt, Artificial Sequence
  Description of Artificial Sequence: Synthetic oligonucleotide
auucgcuuuagggcacugg

SEQ ID NO: 473251 - RNA, 19 nt, Artificial Sequence
  Description of Artificial Sequence: Synthetic oligonucleotide
uccacuagccuggccaaug

SEQ ID NO: 473252 - RNA, 19 nt, Artificial Sequence
  Description of Artificial Sequence: Synthetic oligonucleotide
ucucgggagagagucuuga

SEQ ID NO: 473253 - RNA, 19 nt, Artificial Sequence
  Description of Artificial Sequence: Synthetic oligonucleotide
gcuauaugccaggaugagg

SEQ ID NO: 473254 - RNA, 19 nt, Artificial Sequence
  Description of Artificial Sequence: Synthetic oligonucleotide
uugcagaugccgauuuauu

SEQ ID NO: 473255 - RNA, 19 nt, Artificial Sequence
  Description of Artificial Sequence: Synthetic oligonucleotide
cuugagaggcuuggagcgg

SEQ ID NO: 473256 - RNA, 19 nt, Artificial Sequence
  Description of Artificial Sequence: Synthetic oligonucleotide
gucuugucaagcagcacac

SEQ ID NO: 473257 - RNA, 19 nt, Artificial Sequence
  Description of Artificial Sequence: Synthetic oligonucleotide
uaugggaaugcuggacacu

SEQ ID NO: 473258 - RNA, 19 nt, Artificial Sequence
  Description of Artificial Sequence: Synthetic oligonucleotide
uggguuguccccugugauc

SEQ ID NO: 473259 - RNA, 19 nt, Artificial Sequence
  Description of Artificial Sequence: Synthetic oligonucleotide
gcacuggcaaaaugaaagc

SEQ ID NO: 473260 - RNA, 19 nt, Artificial Sequence
  Description of Artificial Sequence: Synthetic oligonucleotide
cugugaucaugaccacccg

SEQ ID NO: 473261 - RNA, 19 nt, Artificial Sequence
  Description of Artificial Sequence: Synthetic oligonucleotide
uagugaugacaaauuccuu

SEQ ID NO: 473262 - RNA, 19 nt, Artificial Sequence
  Description of Artificial Sequence: Synthetic oligonucleotide
acuguaggacacggucagc

SEQ ID NO: 473263 - RNA, 19 nt, Artificial Sequence
  Description of Artificial Sequence: Synthetic oligonucleotide
ugaugcgugagaugcccua

SEQ ID NO: 473264 - RNA, 19 nt, Artificial Sequence
  Description of Artificial Sequence: Synthetic oligonucleotide
uggggagaugggagcagug

SEQ ID NO: 473265 - RNA, 19 nt, Artificial Sequence
  Description of Artificial Sequence: Synthetic oligonucleotide
aagaacuguaggacacggu

SEQ ID NO: 473266 - RNA, 19 nt, Artificial Sequence
  Description of Artificial Sequence: Synthetic oligonucleotide
ggagccgagcuucucguag

SEQ ID NO: 473267 - RNA, 19 nt, Artificial Sequence
  Description of Artificial Sequence: Synthetic oligonucleotide
ucaagguacccgucuuguc

SEQ ID NO: 473268 - RNA, 19 nt, Artificial Sequence
  Description of Artificial Sequence: Synthetic oligonucleotide
ccgauuuauuuacccaagg

SEQ ID NO: 473269 - RNA, 19 nt, Artificial Sequence
  Description of Artificial Sequence: Synthetic oligonucleotide
ugaccacccggugggaugc

SEQ ID NO: 473270 - RNA, 19 nt, Artificial Sequence
  Description of Artificial Sequence: Synthetic oligonucleotide
ggagcgggagaugaagagg

SEQ ID NO: 473271 - RNA, 19 nt, Artificial Sequence
  Description of Artificial Sequence: Synthetic oligonucleotide
caucagcgugcuucagugc

SEQ ID NO: 473272 - RNA, 19 nt, Artificial Sequence
  Description of Artificial Sequence: Synthetic oligonucleotide
uuuacccaaggcgcagcca

SEQ ID NO: 473273 - RNA, 19 nt, Artificial Sequence
  Description of Artificial Sequence: Synthetic oligonucleotide
ucggcucaaacuccuugua

SEQ ID NO: 473274 - RNA, 19 nt, Artificial Sequence
  Description of Artificial Sequence: Synthetic oligonucleotide
cucgggagagagucuugag

SEQ ID NO: 473275 - RNA, 19 nt, Artificial Sequence
  Description of Artificial Sequence: Synthetic oligonucleotide
ggaucacccacuagggugc

SEQ ID NO: 473276 - RNA, 19 nt, Artificial Sequence
  Description of Artificial Sequence: Synthetic oligonucleotide
aaauccggugaggaaccaa

SEQ ID NO: 473277 - RNA, 19 nt, Artificial Sequence
  Description of Artificial Sequence: Synthetic oligonucleotide
guacccgucuugucaagca

SEQ ID NO: 473278 - RNA, 19 nt, Artificial Sequence
  Description of Artificial Sequence: Synthetic oligonucleotide
ggggcauuggccaggagug

SEQ ID NO: 473279 - RNA, 19 nt, Artificial Sequence
  Description of Artificial Sequence: Synthetic oligonucleotide
agcacggacauucgcuuua

SEQ ID NO: 473280 - RNA, 19 nt, Artificial Sequence
  Description of Artificial Sequence: Synthetic oligonucleotide
ccuugagcggacaggagac

SEQ ID NO: 473281 - RNA, 19 nt, Artificial Sequence
  Description of Artificial Sequence: Synthetic oligonucleotide
ccggugaggaaccaaggag

SEQ ID NO: 473282 - RNA, 19 nt, Artificial Sequence
  Description of Artificial Sequence: Synthetic oligonucleotide
aaugugcaacggcccugcu

SEQ ID NO: 473283 - RNA, 19 nt, Artificial Sequence
  Description of Artificial Sequence: Synthetic oligonucleotide
cacuuucagcuucggaguc

SEQ ID NO: 473284 - RNA, 19 nt, Artificial Sequence
  Description of Artificial Sequence: Synthetic oligonucleotide
gaguggguuguccccugug

SEQ ID NO: 473285 - RNA, 19 nt, Artificial Sequence
  Description of Artificial Sequence: Synthetic oligonucleotide
ugaucacguggcagaugca

SEQ ID NO: 473286 - RNA, 19 nt, Artificial Sequence
  Description of Artificial Sequence: Synthetic oligonucleotide
caacggcccugcuugauca

SEQ ID NO: 473287 - RNA, 19 nt, Artificial Sequence
  Description of Artificial Sequence: Synthetic oligonucleotide
agucuacagcuguaagcau

SEQ ID NO: 473288 - RNA, 19 nt, Artificial Sequence
  Description of Artificial Sequence: Synthetic oligonucleotide
gcagaugccgauuuauuua

SEQ ID NO: 473289 - RNA, 19 nt, Artificial Sequence
  Description of Artificial Sequence: Synthetic oligonucleotide
ugaguggguuguccccugu

SEQ ID NO: 473290 - RNA, 19 nt, Artificial Sequence
  Description of Artificial Sequence: Synthetic oligonucleotide
agcuucggaguccccaaaa

SEQ ID NO: 473291 - RNA, 19 nt, Artificial Sequence
  Description of Artificial Sequence: Synthetic oligonucleotide
auccggugaggaaccaagg

SEQ ID NO: 473292 - RNA, 19 nt, Artificial Sequence
  Description of Artificial Sequence: Synthetic oligonucleotide
auggagcgccacucacacg

SEQ ID NO: 473293 - RNA, 19 nt, Artificial Sequence
  Description of Artificial Sequence: Synthetic oligonucleotide
agcgugcuucagugcgccc

SEQ ID NO: 473294 - RNA, 19 nt, Artificial Sequence
  Description of Artificial Sequence: Synthetic oligonucleotide
cacguggcagaugcauugg

SEQ ID NO: 473295 - RNA, 19 nt, Artificial Sequence
  Description of Artificial Sequence: Synthetic oligonucleotide
cuugucaagguacccgucu

SEQ ID NO: 473296 - RNA, 19 nt, Artificial Sequence
  Description of Artificial Sequence: Synthetic oligonucleotide
cuugagcggacaggagacc

SEQ ID NO: 473297 - RNA, 19 nt, Artificial Sequence
  Description of Artificial Sequence: Synthetic oligonucleotide
ugcuaucaauggagcgcca

SEQ ID NO: 473298 - RNA, 19 nt, Artificial Sequence
  Description of Artificial Sequence: Synthetic oligonucleotide
acuagccuggccaaugguu

SEQ ID NO: 473299 - RNA, 19 nt, Artificial Sequence
  Description of Artificial Sequence: Synthetic oligonucleotide
gagcgccacucacacggcc

SEQ ID NO: 473300 - RNA, 19 nt, Artificial Sequence
  Description of Artificial Sequence: Synthetic oligonucleotide
caguguccagucuacagcu

SEQ ID NO: 473301 - RNA, 19 nt, Artificial Sequence
  Description of Artificial Sequence: Synthetic oligonucleotide
gcugaugcgugagaugccc

SEQ ID NO: 473302 - RNA, 19 nt, Artificial Sequence
  Description of Artificial Sequence: Synthetic oligonucleotide
cacacggccggccuuucuc

SEQ ID NO: 473303 - RNA, 19 nt, Artificial Sequence
  Description of Artificial Sequence: Synthetic oligonucleotide
gauaggcgguggauaccag

SEQ ID NO: 473304 - RNA, 19 nt, Artificial Sequence
  Description of Artificial Sequence: Synthetic oligonucleotide
cccgagagaucucagugug

SEQ ID NO: 473305 - RNA, 19 nt, Artificial Sequence
  Description of Artificial Sequence: Synthetic oligonucleotide
ucgcugaacuugacacccu

SEQ ID NO: 473306 - RNA, 19 nt, Artificial Sequence
  Description of Artificial Sequence: Synthetic oligonucleotide
cagugcgcccacgucauug

SEQ ID NO: 473307 - RNA, 19 nt, Artificial Sequence
  Description of Artificial Sequence: Synthetic oligonucleotide
aggcauagugcgugcucca

SEQ ID NO: 473308 - RNA, 19 nt, Artificial Sequence
  Description of Artificial Sequence: Synthetic oligonucleotide
ggcuauaugccaggaugag

SEQ ID NO: 473309 - RNA, 19 nt, Artificial Sequence
  Description of Artificial Sequence: Synthetic oligonucleotide
cccugccacaccacgaacc

SEQ ID NO: 473310 - RNA, 19 nt, Artificial Sequence
  Description of Artificial Sequence: Synthetic oligonucleotide
cacggacauucgcuuuagg

SEQ ID NO: 473311 - RNA, 19 nt, Artificial Sequence
  Description of Artificial Sequence: Synthetic oligonucleotide
gccgauuuauuuacccaag

SEQ ID NO: 473312 - RNA, 19 nt, Artificial Sequence
  Description of Artificial Sequence: Synthetic oligonucleotide
agguacccgucuugucaag

SEQ ID NO: 473313 - RNA, 19 nt, Artificial Sequence
  Description of Artificial Sequence: Synthetic oligonucleotide
gaugcccuagcuccuugua

SEQ ID NO: 473314 - RNA, 19 nt, Artificial Sequence
  Description of Artificial Sequence: Synthetic oligonucleotide
acccacuagggugccauca

SEQ ID NO: 473315 - RNA, 19 nt, Artificial Sequence
  Description of Artificial Sequence: Synthetic oligonucleotide
gcccugcuugaucacgugg

SEQ ID NO: 473316 - RNA, 19 nt, Artificial Sequence
  Description of Artificial Sequence: Synthetic oligonucleotide
ggauaggcgguggauacca

SEQ ID NO: 473317 - RNA, 19 nt, Artificial Sequence
  Description of Artificial Sequence: Synthetic oligonucleotide
ugggcccuuguaguugaug

SEQ ID NO: 473318 - RNA, 19 nt, Artificial Sequence
  Description of Artificial Sequence: Synthetic oligonucleotide
ggacacgggcuccuucccg

SEQ ID NO: 473319 - RNA, 19 nt, Artificial Sequence
  Description of Artificial Sequence: Synthetic oligonucleotide
ucacauagcccagcucuuu

SEQ ID NO: 473320 - RNA, 19 nt, Artificial Sequence
  Description of Artificial Sequence: Synthetic oligonucleotide
ggccacacgggcaaacacc

SEQ ID NO: 473321 - RNA, 19 nt, Artificial Sequence
  Description of Artificial Sequence: Synthetic oligonucleotide
cacacgggcaaacaccugu

SEQ ID NO: 473322 - RNA, 19 nt, Artificial Sequence
  Description of Artificial Sequence: Synthetic oligonucleotide
gcucggcucaaacuccuug

SEQ ID NO: 473323 - RNA, 19 nt, Artificial Sequence
  Description of Artificial Sequence: Synthetic oligonucleotide
cgaaccaccaggcuaucac

SEQ ID NO: 473324 - RNA, 19 nt, Artificial Sequence
  Description of Artificial Sequence: Synthetic oligonucleotide
gcuccugagccacauggca

SEQ ID NO: 473325 - RNA, 19 nt, Artificial Sequence
  Description of Artificial Sequence: Synthetic oligonucleotide
gagcggacaggagaccaca

SEQ ID NO: 473326 - RNA, 19 nt, Artificial Sequence
  Description of Artificial Sequence: Synthetic oligonucleotide
gugaguggguuguccccug

SEQ ID NO: 473327 - RNA, 19 nt, Artificial Sequence
  Description of Artificial Sequence: Synthetic oligonucleotide
cuaucaauggagcgccacu

SEQ ID NO: 473328 - RNA, 19 nt, Artificial Sequence
  Description of Artificial Sequence: Synthetic oligonucleotide
cagcgugcuucagugcgcc

SEQ ID NO: 473329 - RNA, 19 nt, Artificial Sequence
  Description of Artificial Sequence: Synthetic oligonucleotide
guucccuucuggggcaaug

SEQ ID NO: 473330 - RNA, 19 nt, Artificial Sequence
  Description of Artificial Sequence: Synthetic oligonucleotide
aggcuagugaugacaaauu

SEQ ID NO: 473331 - RNA, 19 nt, Artificial Sequence
  Description of Artificial Sequence: Synthetic oligonucleotide
gcaagggccgcucucggga

SEQ ID NO: 473332 - RNA, 19 nt, Artificial Sequence
  Description of Artificial Sequence: Synthetic oligonucleotide
cauuccagcgccucucgcu

SEQ ID NO: 473333 - RNA, 19 nt, Artificial Sequence
  Description of Artificial Sequence: Synthetic oligonucleotide
ugguugucccuuggucgcc

SEQ ID NO: 473334 - RNA, 19 nt, Artificial Sequence
  Description of Artificial Sequence: Synthetic oligonucleotide
cucucgggagagagucuug

SEQ ID NO: 473335 - RNA, 19 nt, Artificial Sequence
  Description of Artificial Sequence: Synthetic oligonucleotide
gaacaucugcagcgucguc

SEQ ID NO: 473336 - RNA, 19 nt, Artificial Sequence
  Description of Artificial Sequence: Synthetic oligonucleotide
gcaaccaggauaggcggug

SEQ ID NO: 473337 - RNA, 19 nt, Artificial Sequence
  Description of Artificial Sequence: Synthetic oligonucleotide
gaaauccggugaggaacca

SEQ ID NO: 473338 - RNA, 19 nt, Artificial Sequence
  Description of Artificial Sequence: Synthetic oligonucleotide
uguugggcaagggccgcuc

SEQ ID NO: 473339 - RNA, 19 nt, Artificial Sequence
  Description of Artificial Sequence: Synthetic oligonucleotide
gguacccgucuugucaagc

SEQ ID NO: 473340 - RNA, 19 nt, Artificial Sequence
  Description of Artificial Sequence: Synthetic oligonucleotide
agggaggauguaagaugag

SEQ ID NO: 473341 - RNA, 19 nt, Artificial Sequence
  Description of Artificial Sequence: Synthetic oligonucleotide
agggugggcccuuguaguu

SEQ ID NO: 473342 - RNA, 19 nt, Artificial Sequence
  Description of Artificial Sequence: Synthetic oligonucleotide
cuuuggcuauaugccagga

SEQ ID NO: 473343 - RNA, 19 nt, Artificial Sequence
  Description of Artificial Sequence: Synthetic oligonucleotide
ggcagugaguggguugucc

SEQ ID NO: 473344 - RNA, 19 nt, Artificial Sequence
  Description of Artificial Sequence: Synthetic oligonucleotide
gcuaucaauggagcgccac

SEQ ID NO: 473345 - RNA, 19 nt, Artificial Sequence
  Description of Artificial Sequence: Synthetic oligonucleotide
gaaagcgcuggugaauuuu

SEQ ID NO: 473346 - RNA, 19 nt, Artificial Sequence
  Description of Artificial Sequence: Synthetic oligonucleotide
cucggcucaaacuccuugu

SEQ ID NO: 473347 - RNA, 19 nt, Artificial Sequence
  Description of Artificial Sequence: Synthetic oligonucleotide
ccacuagccuggccaaugg

SEQ ID NO: 473348 - RNA, 19 nt, Artificial Sequence
  Description of Artificial Sequence: Synthetic oligonucleotide
ggcgagcacggacauucgc

SEQ ID NO: 473349 - RNA, 19 nt, Artificial Sequence
  Description of Artificial Sequence: Synthetic oligonucleotide
caugagggaugaggcggag

SEQ ID NO: 473350 - RNA, 19 nt, Artificial Sequence
  Description of Artificial Sequence: Synthetic oligonucleotide
ccgagagaucucagugugg

SEQ ID NO: 473351 - RNA, 19 nt, Artificial Sequence
  Description of Artificial Sequence: Synthetic oligonucleotide
ggcccgguguguuucuaug

SEQ ID NO: 473352 - RNA, 19 nt, Artificial Sequence
  Description of Artificial Sequence: Synthetic oligonucleotide
acaauccucucaggggcau

SEQ ID NO: 473353 - RNA, 19 nt, Artificial Sequence
  Description of Artificial Sequence: Synthetic oligonucleotide
gucaagguacccgucuugu

SEQ ID NO: 473354 - RNA, 19 nt, Artificial Sequence
  Description of Artificial Sequence: Synthetic oligonucleotide
cccugaguuuuaauacuuc

SEQ ID NO: 473355 - RNA, 19 nt, Artificial Sequence
  Description of Artificial Sequence: Synthetic oligonucleotide
gagucagccuugagcggac

SEQ ID NO: 473356 - RNA, 19 nt, Artificial Sequence
  Description of Artificial Sequence: Synthetic oligonucleotide
agggugagaggcagcacaa

SEQ ID NO: 473357 - RNA, 19 nt, Artificial Sequence
  Description of Artificial Sequence: Synthetic oligonucleotide
acauucgcuuuagggcacu

SEQ ID NO: 473358 - RNA, 19 nt, Artificial Sequence
  Description of Artificial Sequence: Synthetic oligonucleotide
ggauguaagaugagcgugu

SEQ ID NO: 473359 - RNA, 19 nt, Artificial Sequence
  Description of Artificial Sequence: Synthetic oligonucleotide
ucaugaccacccgguggga

SEQ ID NO: 473360 - RNA, 19 nt, Artificial Sequence
  Description of Artificial Sequence: Synthetic oligonucleotide
uuccagcgccucucgcuuc

SEQ ID NO: 473361 - RNA, 19 nt, Artificial Sequence
  Description of Artificial Sequence: Synthetic oligonucleotide
ggcauagugcgugcuccag

SEQ ID NO: 473362 - RNA, 19 nt, Artificial Sequence
  Description of Artificial Sequence: Synthetic oligonucleotide
gccaaugguugcccacaag

SEQ ID NO: 473363 - RNA, 19 nt, Artificial Sequence
  Description of Artificial Sequence: Synthetic oligonucleotide
aucacguggcagaugcauu

SEQ ID NO: 473364 - RNA, 19 nt, Artificial Sequence
  Description of Artificial Sequence: Synthetic oligonucleotide
acgaaccaccaggcuauca

SEQ ID NO: 473365 - RNA, 19 nt, Artificial Sequence
  Description of Artificial Sequence: Synthetic oligonucleotide
uggagccgagcuucucgua

SEQ ID NO: 473366 - RNA, 19 nt, Artificial Sequence
  Description of Artificial Sequence: Synthetic oligonucleotide
gguagucaggugggcacug

SEQ ID NO: 473367 - RNA, 19 nt, Artificial Sequence
  Description of Artificial Sequence: Synthetic oligonucleotide
ccgaccuuuguuugguuga

SEQ ID NO: 473368 - RNA, 19 nt, Artificial Sequence
  Description of Artificial Sequence: Synthetic oligonucleotide
gcguucugaaucucucgga

SEQ ID NO: 473369 - RNA, 19 nt, Artificial Sequence
  Description of Artificial Sequence: Synthetic oligonucleotide
cauucgcuuuagggcacug

SEQ ID NO: 473370 - RNA, 19 nt, Artificial Sequence
  Description of Artificial Sequence: Synthetic oligonucleotide
ggggcgguacuccugccca

SEQ ID NO: 473371 - RNA, 19 nt, Artificial Sequence
  Description of Artificial Sequence: Synthetic oligonucleotide
ugcaacggcccugcuugau

SEQ ID NO: 473372 - RNA, 19 nt, Artificial Sequence
  Description of Artificial Sequence: Synthetic oligonucleotide
caugagcgaguggcaggag

SEQ ID NO: 473373 - RNA, 19 nt, Artificial Sequence
  Description of Artificial Sequence: Synthetic oligonucleotide
cucggaucacagccuuuga

SEQ ID NO: 473374 - RNA, 19 nt, Artificial Sequence
  Description of Artificial Sequence: Synthetic oligonucleotide
cagccgcgauguagcagag

SEQ ID NO: 473375 - RNA, 19 nt, Artificial Sequence
  Description of Artificial Sequence: Synthetic oligonucleotide
gcaacggcccugcuugauc

SEQ ID NO: 473376 - RNA, 19 nt, Artificial Sequence
  Description of Artificial Sequence: Synthetic oligonucleotide
cugagggaggauguaagau

SEQ ID NO: 473377 - RNA, 19 nt, Artificial Sequence
  Description of Artificial Sequence: Synthetic oligonucleotide
cagcgucgucaccaaugug

SEQ ID NO: 473378 - RNA, 19 nt, Artificial Sequence
  Description of Artificial Sequence: Synthetic oligonucleotide
gagagaucucaguguggau

SEQ ID NO: 473379 - RNA, 19 nt, Artificial Sequence
  Description of Artificial Sequence: Synthetic oligonucleotide
caaugaagcccacgaacuu

SEQ ID NO: 473380 - RNA, 19 nt, Artificial Sequence
  Description of Artificial Sequence: Synthetic oligonucleotide
aggcgagcacggacauucg

SEQ ID NO: 473381 - RNA, 19 nt, Artificial Sequence
  Description of Artificial Sequence: Synthetic oligonucleotide
guggguuguccccugugau

SEQ ID NO: 473382 - RNA, 19 nt, Artificial Sequence
  Description of Artificial Sequence: Synthetic oligonucleotide
ccguucuacaauccucuca

SEQ ID NO: 473383 - RNA, 19 nt, Artificial Sequence
  Description of Artificial Sequence: Synthetic oligonucleotide
gcccacgaacuugaggcug

SEQ ID NO: 473384 - RNA, 19 nt, Artificial Sequence
  Description of Artificial Sequence: Synthetic oligonucleotide
ggagugccgaccuuuguuu

SEQ ID NO: 473385 - RNA, 19 nt, Artificial Sequence
  Description of Artificial Sequence: Synthetic oligonucleotide
ccgucgccguucuacaauc

SEQ ID NO: 473386 - RNA, 19 nt, Artificial Sequence
  Description of Artificial Sequence: Synthetic oligonucleotide
ggugggaugcguucugaau

SEQ ID NO: 473387 - RNA, 19 nt, Artificial Sequence
  Description of Artificial Sequence: Synthetic oligonucleotide
cccgucuugucaagcagca

SEQ ID NO: 473388 - RNA, 19 nt, Artificial Sequence
  Description of Artificial Sequence: Synthetic oligonucleotide
gcgaguggcaggaggccag

SEQ ID NO: 473389 - RNA, 19 nt, Artificial Sequence
  Description of Artificial Sequence: Synthetic oligonucleotide
ccaaugugcaacggcccug

SEQ ID NO: 473390 - RNA, 19 nt, Artificial Sequence
  Description of Artificial Sequence: Synthetic oligonucleotide
gcacggacauucgcuuuag

SEQ ID NO: 473391 - RNA, 19 nt, Artificial Sequence
  Description of Artificial Sequence: Synthetic oligonucleotide
gccccugaguuuuaauacu

SEQ ID NO: 473392 - RNA, 19 nt, Artificial Sequence
  Description of Artificial Sequence: Synthetic oligonucleotide
ucagugcgcccacgucauu

SEQ ID NO: 473393 - RNA, 19 nt, Artificial Sequence
  Description of Artificial Sequence: Synthetic oligonucleotide
ccgcucucgggagagaguc

SEQ ID NO: 473394 - RNA, 19 nt, Artificial Sequence
  Description of Artificial Sequence: Synthetic oligonucleotide
gggaauacuuucucaucuu

SEQ ID NO: 473395 - RNA, 19 nt, Artificial Sequence
  Description of Artificial Sequence: Synthetic oligonucleotide
gggugcucucguccucgag

SEQ ID NO: 473396 - RNA, 19 nt, Artificial Sequence
  Description of Artificial Sequence: Synthetic oligonucleotide
gcgguggauaccagcacca

SEQ ID NO: 473397 - RNA, 19 nt, Artificial Sequence
  Description of Artificial Sequence: Synthetic oligonucleotide
cuacgaggccaaacuggcu

SEQ ID NO: 473398 - RNA, 19 nt, Artificial Sequence
  Description of Artificial Sequence: Synthetic oligonucleotide
gccacucacacggccggcc

SEQ ID NO: 473399 - RNA, 19 nt, Artificial Sequence
  Description of Artificial Sequence: Synthetic oligonucleotide
ggaagucgcugaacuugac

SEQ ID NO: 473400 - RNA, 19 nt, Artificial Sequence
  Description of Artificial Sequence: Synthetic oligonucleotide
gagcacggacauucgcuuu

SEQ ID NO: 473401 - RNA, 19 nt, Artificial Sequence
  Description of Artificial Sequence: Synthetic oligonucleotide
ggacacggucagccaggag

SEQ ID NO: 473402 - RNA, 19 nt, Artificial Sequence
  Description of Artificial Sequence: Synthetic oligonucleotide
ccgguguguuucuauggga

SEQ ID NO: 473403 - RNA, 19 nt, Artificial Sequence
  Description of Artificial Sequence: Synthetic oligonucleotide
cugaugcgugagaugcccu

SEQ ID NO: 473404 - RNA, 19 nt, Artificial Sequence
  Description of Artificial Sequence: Synthetic oligonucleotide
cacggucagccaggagcgc

SEQ ID NO: 473405 - RNA, 19 nt, Artificial Sequence
  Description of Artificial Sequence: Synthetic oligonucleotide
agcggacaggagaccacaa

SEQ ID NO: 473406 - RNA, 19 nt, Artificial Sequence
  Description of Artificial Sequence: Synthetic oligonucleotide
gugcgugcuccagggccag

SEQ ID NO: 473407 - RNA, 19 nt, Artificial Sequence
  Description of Artificial Sequence: Synthetic oligonucleotide
guugggcaagggccgcucu

SEQ ID NO: 473408 - RNA, 19 nt, Artificial Sequence
  Description of Artificial Sequence: Synthetic oligonucleotide
ccaggggaucacccacuag

SEQ ID NO: 473409 - RNA, 19 nt, Artificial Sequence
  Description of Artificial Sequence: Synthetic oligonucleotide
gugcaacggcccugcuuga

SEQ ID NO: 473410 - RNA, 19 nt, Artificial Sequence
  Description of Artificial Sequence: Synthetic oligonucleotide
gggaugucuacgaggccaa

SEQ ID NO: 473411 - RNA, 19 nt, Artificial Sequence
  Description of Artificial Sequence: Synthetic oligonucleotide
gccaucaccugugaggcau

SEQ ID NO: 473412 - RNA, 19 nt, Artificial Sequence
  Description of Artificial Sequence: Synthetic oligonucleotide
gugccgaccuuuguuuggu

SEQ ID NO: 473413 - RNA, 19 nt, Artificial Sequence
  Description of Artificial Sequence: Synthetic oligonucleotide
cgucgccguucuacaaucc

SEQ ID NO: 473414 - RNA, 19 nt, Artificial Sequence
  Description of Artificial Sequence: Synthetic oligonucleotide
gcgagcacggacauucgcu

SEQ ID NO: 473415 - RNA, 19 nt, Artificial Sequence
  Description of Artificial Sequence: Synthetic oligonucleotide
gggcacuggcaaaaugaaa

SEQ ID NO: 473416 - RNA, 19 nt, Artificial Sequence
  Description of Artificial Sequence: Synthetic oligonucleotide
cacgaaccaccaggcuauc

SEQ ID NO: 473417 - RNA, 19 nt, Artificial Sequence
  Description of Artificial Sequence: Synthetic oligonucleotide
gugaggcauagugcgugcu

SEQ ID NO: 473418 - RNA, 19 nt, Artificial Sequence
  Description of Artificial Sequence: Synthetic oligonucleotide
gcgguacuccugcccagca

SEQ ID NO: 473419 - RNA, 19 nt, Artificial Sequence
  Description of Artificial Sequence: Synthetic oligonucleotide
ccacacaugagggucacau

SEQ ID NO: 473420 - RNA, 19 nt, Artificial Sequence
  Description of Artificial Sequence: Synthetic oligonucleotide
ggagcgccacucacacggc

SEQ ID NO: 473421 - RNA, 19 nt, Artificial Sequence
  Description of Artificial Sequence: Synthetic oligonucleotide
cgaccuuuguuugguugac

SEQ ID NO: 473422 - RNA, 19 nt, Artificial Sequence
  Description of Artificial Sequence: Synthetic oligonucleotide
gggaugcguucugaaucuc

SEQ ID NO: 473423 - RNA, 19 nt, Artificial Sequence
  Description of Artificial Sequence: Synthetic oligonucleotide
ggggccacacgggcaaaca

SEQ ID NO: 473424 - RNA, 19 nt, Artificial Sequence
  Description of Artificial Sequence: Synthetic oligonucleotide
cccggugggaugcguucug

SEQ ID NO: 473425 - RNA, 19 nt, Artificial Sequence
  Description of Artificial Sequence: Synthetic oligonucleotide
ccgggccugcugaugcgug

SEQ ID NO: 473426 - RNA, 19 nt, Artificial Sequence
  Description of Artificial Sequence: Synthetic oligonucleotide
caugaccacccggugggau

SEQ ID NO: 473427 - RNA, 19 nt, Artificial Sequence
  Description of Artificial Sequence: Synthetic oligonucleotide
ggucaguggagccgagcuu

SEQ ID NO: 473428 - RNA, 19 nt, Artificial Sequence
  Description of Artificial Sequence: Synthetic oligonucleotide
ggacagcuuagaggugaaa

SEQ ID NO: 473429 - RNA, 19 nt, Artificial Sequence
  Description of Artificial Sequence: Synthetic oligonucleotide
gugcgcccacgucauuggu

SEQ ID NO: 473430 - RNA, 19 nt, Artificial Sequence
  Description of Artificial Sequence: Synthetic oligonucleotide
gccgucgccguucuacaau

SEQ ID NO: 473431 - RNA, 19 nt, Artificial Sequence
  Description of Artificial Sequence: Synthetic oligonucleotide
ccaccagacuccacaccaa

SEQ ID NO: 473432 - RNA, 19 nt, Artificial Sequence
  Description of Artificial Sequence: Synthetic oligonucleotide
gcggacaggagaccacaau

SEQ ID NO: 473433 - RNA, 19 nt, Artificial Sequence
  Description of Artificial Sequence: Synthetic oligonucleotide
ccccugaguuuuaauacuu

SEQ ID NO: 473434 - RNA, 19 nt, Artificial Sequence
  Description of Artificial Sequence: Synthetic oligonucleotide
gccugcugaugcgugagau

SEQ ID NO: 473435 - RNA, 19 nt, Artificial Sequence
  Description of Artificial Sequence: Synthetic oligonucleotide
cgagcacggacauucgcuu

SEQ ID NO: 473436 - RNA, 19 nt, Artificial Sequence
  Description of Artificial Sequence: Synthetic oligonucleotide
cuuggucgccgucgccguu

SEQ ID NO: 473437 - RNA, 19 nt, Artificial Sequence
  Description of Artificial Sequence: Synthetic oligonucleotide
ccggugggaugcguucuga

SEQ ID NO: 473438 - RNA, 19 nt, Artificial Sequence
  Description of Artificial Sequence: Synthetic oligonucleotide
cgccacucacacggccggc

SEQ ID NO: 473439 - RNA, 19 nt, Artificial Sequence
  Description of Artificial Sequence: Synthetic oligonucleotide
gccgcucucgggagagagu

SEQ ID NO: 473440 - RNA, 19 nt, Artificial Sequence
  Description of Artificial Sequence: Synthetic oligonucleotide
gugggcccuuguaguugau

SEQ ID NO: 473441 - RNA, 19 nt, Artificial Sequence
  Description of Artificial Sequence: Synthetic oligonucleotide
cgccgucgccguucuacaa

SEQ ID NO: 473442 - RNA, 19 nt, Artificial Sequence
  Description of Artificial Sequence: Synthetic oligonucleotide
ccacccggugggaugcguu

SEQ ID NO: 473443 - RNA, 19 nt, Artificial Sequence
  Description of Artificial Sequence: Synthetic oligonucleotide
ggcucggcucaaacuccuu

SEQ ID NO: 473444 - RNA, 19 nt, Artificial Sequence
  Description of Artificial Sequence: Synthetic oligonucleotide
cgguggauaccagcaccau

SEQ ID NO: 473445 - RNA, 19 nt, Artificial Sequence
  Description of Artificial Sequence: Synthetic oligonucleotide
agaaaaggaaccuagcucc

SEQ ID NO: 473446 - RNA, 19 nt, Artificial Sequence
  Description of Artificial Sequence: Synthetic oligonucleotide
aagacccuuacucagagag

SEQ ID NO: 473447 - RNA, 19 nt, Artificial Sequence
  Description of Artificial Sequence: Synthetic oligonucleotide
aauuggacaaaagagucuc

SEQ ID NO: 473448 - RNA, 19 nt, Artificial Sequence
  Description of Artificial Sequence: Synthetic oligonucleotide
uaaacuggaguacaggagc

SEQ ID NO: 473449 - RNA, 19 nt, Artificial Sequence
  Description of Artificial Sequence: Synthetic oligonucleotide
aaaggaaccuagcuccacc

SEQ ID NO: 473450 - RNA, 19 nt, Artificial Sequence
  Description of Artificial Sequence: Synthetic oligonucleotide
aaucaagccacuuuccuca

SEQ ID NO: 473451 - RNA, 19 nt, Artificial Sequence
  Description of Artificial Sequence: Synthetic oligonucleotide
aaguuuccggccuuggccc

SEQ ID NO: 473452 - RNA, 19 nt, Artificial Sequence
  Description of Artificial Sequence: Synthetic oligonucleotide
gaugguauaggccuucagg

SEQ ID NO: 473453 - RNA, 19 nt, Artificial Sequence
  Description of Artificial Sequence: Synthetic oligonucleotide
uuucugguuccucaaagcg

SEQ ID NO: 473454 - RNA, 19 nt, Artificial Sequence
  Description of Artificial Sequence: Synthetic oligonucleotide
aagaauaccccugccaggc

SEQ ID NO: 473455 - RNA, 19 nt, Artificial Sequence
  Description of Artificial Sequence: Synthetic oligonucleotide
ugcucuuaagacuagggag

SEQ ID NO: 473456 - RNA, 19 nt, Artificial Sequence
  Description of Artificial Sequence: Synthetic oligonucleotide
agugacuacagcuccaggg

SEQ ID NO: 473457 - RNA, 19 nt, Artificial Sequence
  Description of Artificial Sequence: Synthetic oligonucleotide
aauuacaacacaaggauau

SEQ ID NO: 473458 - RNA, 19 nt, Artificial Sequence
  Description of Artificial Sequence: Synthetic oligonucleotide
gaagagaauguaaacauug

SEQ ID NO: 473459 - RNA, 19 nt, Artificial Sequence
  Description of Artificial Sequence: Synthetic oligonucleotide
guuccuugcuauuagacag

SEQ ID NO: 473460 - RNA, 19 nt, Artificial Sequence
  Description of Artificial Sequence: Synthetic oligonucleotide
uuaccuucuggaaacgccg

SEQ ID NO: 473461 - RNA, 19 nt, Artificial Sequence
  Description of Artificial Sequence: Synthetic oligonucleotide
uuaaauaaacuggaguaca

SEQ ID NO: 473462 - RNA, 19 nt, Artificial Sequence
  Description of Artificial Sequence: Synthetic oligonucleotide
uuuaccuucuggaaacgcc

SEQ ID NO: 473463 - RNA, 19 nt, Artificial Sequence
  Description of Artificial Sequence: Synthetic oligonucleotide
uccaugguuucauacaugc

SEQ ID NO: 473464 - RNA, 19 nt, Artificial Sequence
  Description of Artificial Sequence: Synthetic oligonucleotide
uagguuucgaagcugcucc

SEQ ID NO: 473465 - RNA, 19 nt, Artificial Sequence
  Description of Artificial Sequence: Synthetic oligonucleotide
aguuacugaacauuuccag

SEQ ID NO: 473466 - RNA, 19 nt, Artificial Sequence
  Description of Artificial Sequence: Synthetic oligonucleotide
guaggagugacagagaccc

SEQ ID NO: 473467 - RNA, 19 nt, Artificial Sequence
  Description of Artificial Sequence: Synthetic oligonucleotide
cauguagucgccgugaggg

SEQ ID NO: 473468 - RNA, 19 nt, Artificial Sequence
  Description of Artificial Sequence: Synthetic oligonucleotide
cuauuagacagguacugcc

SEQ ID NO: 473469 - RNA, 19 nt, Artificial Sequence
  Description of Artificial Sequence: Synthetic oligonucleotide
agaacagagcaccccaccc

SEQ ID NO: 473470 - RNA, 19 nt, Artificial Sequence
  Description of Artificial Sequence: Synthetic oligonucleotide
uuucauacaugccuugaca

SEQ ID NO: 473471 - RNA, 19 nt, Artificial Sequence
  Description of Artificial Sequence: Synthetic oligonucleotide
agaauguaaacauuggguu

SEQ ID NO: 473472 - RNA, 19 nt, Artificial Sequence
  Description of Artificial Sequence: Synthetic oligonucleotide
gucaucuagacccagcaag

SEQ ID NO: 473473 - RNA, 19 nt, Artificial Sequence
  Description of Artificial Sequence: Synthetic oligonucleotide
uuaacuccuucacagaaaa

SEQ ID NO: 473474 - RNA, 19 nt, Artificial Sequence
  Description of Artificial Sequence: Synthetic oligonucleotide
gacaaaagagucuccagac

SEQ ID NO: 473475 - RNA, 19 nt, Artificial Sequence
  Description of Artificial Sequence: Synthetic oligonucleotide
auucguaggagugacagag

SEQ ID NO: 473476 - RNA, 19 nt, Artificial Sequence
  Description of Artificial Sequence: Synthetic oligonucleotide
gaauucguaggagugacag

SEQ ID NO: 473477 - RNA, 19 nt, Artificial Sequence
  Description of Artificial Sequence: Synthetic oligonucleotide
ggaacaaaaugaaagacag

SEQ ID NO: 473478 - RNA, 19 nt, Artificial Sequence
  Description of Artificial Sequence: Synthetic oligonucleotide
ucgucaggccuguagaugg

SEQ ID NO: 473479 - RNA, 19 nt, Artificial Sequence
  Description of Artificial Sequence: Synthetic oligonucleotide
aaagacaguggggugacag

SEQ ID NO: 473480 - RNA, 19 nt, Artificial Sequence
  Description of Artificial Sequence: Synthetic oligonucleotide
caggauucgguacaggucc

SEQ ID NO: 473481 - RNA, 19 nt, Artificial Sequence
  Description of Artificial Sequence: Synthetic oligonucleotide
ugcacuguaguaaccuggg

SEQ ID NO: 473482 - RNA, 19 nt, Artificial Sequence
  Description of Artificial Sequence: Synthetic oligonucleotide
ucauggauagcucgggagc

SEQ ID NO: 473483 - RNA, 19 nt, Artificial Sequence
  Description of Artificial Sequence: Synthetic oligonucleotide
gacccuuacucagagaggg

SEQ ID NO: 473484 - RNA, 19 nt, Artificial Sequence
  Description of Artificial Sequence: Synthetic oligonucleotide
guaaacauuggguuccacc

SEQ ID NO: 473485 - RNA, 19 nt, Artificial Sequence
  Description of Artificial Sequence: Synthetic oligonucleotide
uccccuuaaauaaacugga

SEQ ID NO: 473486 - RNA, 19 nt, Artificial Sequence
  Description of Artificial Sequence: Synthetic oligonucleotide
guugugguagguuucgaag

SEQ ID NO: 473487 - RNA, 19 nt, Artificial Sequence
  Description of Artificial Sequence: Synthetic oligonucleotide
aaguaagcaucuugccggg

SEQ ID NO: 473488 - RNA, 19 nt, Artificial Sequence
  Description of Artificial Sequence: Synthetic oligonucleotide
ucuggaaacgccgugacaa

SEQ ID NO: 473489 - RNA, 19 nt, Artificial Sequence
  Description of Artificial Sequence: Synthetic oligonucleotide
gaagaauaccccugccagg

SEQ ID NO: 473490 - RNA, 19 nt, Artificial Sequence
  Description of Artificial Sequence: Synthetic oligonucleotide
aaugcgcugccgccgaagg

SEQ ID NO: 473491 - RNA, 19 nt, Artificial Sequence
  Description of Artificial Sequence: Synthetic oligonucleotide
uucugguuccucaaagcgc

SEQ ID NO: 473492 - RNA, 19 nt, Artificial Sequence
  Description of Artificial Sequence: Synthetic oligonucleotide
ucaucuagacccagcaaga

SEQ ID NO: 473493 - RNA, 19 nt, Artificial Sequence
  Description of Artificial Sequence: Synthetic oligonucleotide
uucaggauucgguacaggu

SEQ ID NO: 473494 - RNA, 19 nt, Artificial Sequence
  Description of Artificial Sequence: Synthetic oligonucleotide
uguaagacagcaccccaga

SEQ ID NO: 473495 - RNA, 19 nt, Artificial Sequence
  Description of Artificial Sequence: Synthetic oligonucleotide
cuugucgcagaucuguacc

SEQ ID NO: 473496 - RNA, 19 nt, Artificial Sequence
  Description of Artificial Sequence: Synthetic oligonucleotide
cuuaagacuagggaggcug

SEQ ID NO: 473497 - RNA, 19 nt, Artificial Sequence
  Description of Artificial Sequence: Synthetic oligonucleotide
acacgcagcacugaagccc

SEQ ID NO: 473498 - RNA, 19 nt, Artificial Sequence
  Description of Artificial Sequence: Synthetic oligonucleotide
gacgcaaggaaaguuuccg

SEQ ID NO: 473499 - RNA, 19 nt, Artificial Sequence
  Description of Artificial Sequence: Synthetic oligonucleotide
uugguuaccucaugcacca

SEQ ID NO: 473500 - RNA, 19 nt, Artificial Sequence
  Description of Artificial Sequence: Synthetic oligonucleotide
ucguaggagugacagagac

SEQ ID NO: 473501 - RNA, 19 nt, Artificial Sequence
  Description of Artificial Sequence: Synthetic oligonucleotide
acaaggauauccaggagag

SEQ ID NO: 473502 - RNA, 19 nt, Artificial Sequence
  Description of Artificial Sequence: Synthetic oligonucleotide
ugugguagguuucgaagcu

SEQ ID NO: 473503 - RNA, 19 nt, Artificial Sequence
  Description of Artificial Sequence: Synthetic oligonucleotide
uuccuugcuauuagacagg

SEQ ID NO: 473504 - RNA, 19 nt, Artificial Sequence
  Description of Artificial Sequence: Synthetic oligonucleotide
auggaugcagucccucagc

SEQ ID NO: 473505 - RNA, 19 nt, Artificial Sequence
  Description of Artificial Sequence: Synthetic oligonucleotide
acuugucgcagaucuguac

SEQ ID NO: 473506 - RNA, 19 nt, Artificial Sequence
  Description of Artificial Sequence: Synthetic oligonucleotide
ugcuauuagacagguacug

SEQ ID NO: 473507 - RNA, 19 nt, Artificial Sequence
  Description of Artificial Sequence: Synthetic oligonucleotide
auacagcugucccaugcac

SEQ ID NO: 473508 - RNA, 19 nt, Artificial Sequence
  Description of Artificial Sequence: Synthetic oligonucleotide
cuaggaaauacagcugucc

SEQ ID NO: 473509 - RNA, 19 nt, Artificial Sequence
  Description of Artificial Sequence: Synthetic oligonucleotide
aaggaaccuagcuccacca

SEQ ID NO: 473510 - RNA, 19 nt, Artificial Sequence
  Description of Artificial Sequence: Synthetic oligonucleotide
aggaauucguaggagugac

SEQ ID NO: 473511 - RNA, 19 nt, Artificial Sequence
  Description of Artificial Sequence: Synthetic oligonucleotide
uagaugggaaggaaaugga

SEQ ID NO: 473512 - RNA, 19 nt, Artificial Sequence
  Description of Artificial Sequence: Synthetic oligonucleotide
uagagcacggggucaaugc

SEQ ID NO: 473513 - RNA, 19 nt, Artificial Sequence
  Description of Artificial Sequence: Synthetic oligonucleotide
acaggagcgcagcuuuucc

SEQ ID NO: 473514 - RNA, 19 nt, Artificial Sequence
  Description of Artificial Sequence: Synthetic oligonucleotide
cugcacuguaguaaccugg

SEQ ID NO: 473515 - RNA, 19 nt, Artificial Sequence
  Description of Artificial Sequence: Synthetic oligonucleotide
aaaagagucuccagacuug

SEQ ID NO: 473516 - RNA, 19 nt, Artificial Sequence
  Description of Artificial Sequence: Synthetic oligonucleotide
auaaacuggaguacaggag

SEQ ID NO: 473517 - RNA, 19 nt, Artificial Sequence
  Description of Artificial Sequence: Synthetic oligonucleotide
gacuuggucacugcuaccc

SEQ ID NO: 473518 - RNA, 19 nt, Artificial Sequence
  Description of Artificial Sequence: Synthetic oligonucleotide
cuagcuccaccaucuaagg

SEQ ID NO: 473519 - RNA, 19 nt, Artificial Sequence
  Description of Artificial Sequence: Synthetic oligonucleotide
gaggggaucccuuuccggc

SEQ ID NO: 473520 - RNA, 19 nt, Artificial Sequence
  Description of Artificial Sequence: Synthetic oligonucleotide
guugguuaccucaugcacc

SEQ ID NO: 473521 - RNA, 19 nt, Artificial Sequence
  Description of Artificial Sequence: Synthetic oligonucleotide
uugcuauuagacagguacu

SEQ ID NO: 473522 - RNA, 19 nt, Artificial Sequence
  Description of Artificial Sequence: Synthetic oligonucleotide
aguguguuaggagggagag

SEQ ID NO: 473523 - RNA, 19 nt, Artificial Sequence
  Description of Artificial Sequence: Synthetic oligonucleotide
aauucguaggagugacaga

SEQ ID NO: 473524 - RNA, 19 nt, Artificial Sequence
  Description of Artificial Sequence: Synthetic oligonucleotide
cauguccccuuaaauaaac

SEQ ID NO: 473525 - RNA, 19 nt, Artificial Sequence
  Description of Artificial Sequence: Synthetic oligonucleotide
agagcacggggucaaugcg

SEQ ID NO: 473526 - RNA, 19 nt, Artificial Sequence
  Description of Artificial Sequence: Synthetic oligonucleotide
uuaagacuagggaggcuga

SEQ ID NO: 473527 - RNA, 19 nt, Artificial Sequence
  Description of Artificial Sequence: Synthetic oligonucleotide
ugccuuucgacgcaaggaa

SEQ ID NO: 473528 - RNA, 19 nt, Artificial Sequence
  Description of Artificial Sequence: Synthetic oligonucleotide
aaccauucugucauguaga

SEQ ID NO: 473529 - RNA, 19 nt, Artificial Sequence
  Description of Artificial Sequence: Synthetic oligonucleotide
aggaguuccuugcuauuag

SEQ ID NO: 473530 - RNA, 19 nt, Artificial Sequence
  Description of Artificial Sequence: Synthetic oligonucleotide
aaugcuucugucacuggga

SEQ ID NO: 473531 - RNA, 19 nt, Artificial Sequence
  Description of Artificial Sequence: Synthetic oligonucleotide
aucuaagggaagcccacug

SEQ ID NO: 473532 - RNA, 19 nt, Artificial Sequence
  Description of Artificial Sequence: Synthetic oligonucleotide
uucgacgcaaggaaaguuu

SEQ ID NO: 473533 - RNA, 19 nt, Artificial Sequence
  Description of Artificial Sequence: Synthetic oligonucleotide
uacaugccuugacaggagc

SEQ ID NO: 473534 - RNA, 19 nt, Artificial Sequence
  Description of Artificial Sequence: Synthetic oligonucleotide
aguguaagacagcacccca

SEQ ID NO: 473535 - RNA, 19 nt, Artificial Sequence
  Description of Artificial Sequence: Synthetic oligonucleotide
gcucuuaagacuagggagg

SEQ ID NO: 473536 - RNA, 19 nt, Artificial Sequence
  Description of Artificial Sequence: Synthetic oligonucleotide
cuggcaaggagucagggga

SEQ ID NO: 473537 - RNA, 19 nt, Artificial Sequence
  Description of Artificial Sequence: Synthetic oligonucleotide
agaauaccccugccaggcc

SEQ ID NO: 473538 - RNA, 19 nt, Artificial Sequence
  Description of Artificial Sequence: Synthetic oligonucleotide
gaugcagucccucagcagu

SEQ ID NO: 473539 - RNA, 19 nt, Artificial Sequence
  Description of Artificial Sequence: Synthetic oligonucleotide
ccaguuacugaacauuucc

SEQ ID NO: 473540 - RNA, 19 nt, Artificial Sequence
  Description of Artificial Sequence: Synthetic oligonucleotide
gauacugcagcucuccccu

SEQ ID NO: 473541 - RNA, 19 nt, Artificial Sequence
  Description of Artificial Sequence: Synthetic oligonucleotide
ugugucgcagcaagaccag

SEQ ID NO: 473542 - RNA, 19 nt, Artificial Sequence
  Description of Artificial Sequence: Synthetic oligonucleotide
ugacaaccacuuaucccag

SEQ ID NO: 473543 - RNA, 19 nt, Artificial Sequence
  Description of Artificial Sequence: Synthetic oligonucleotide
uggaugcagucccucagca

SEQ ID NO: 473544 - RNA, 19 nt, Artificial Sequence
  Description of Artificial Sequence: Synthetic oligonucleotide
ugacuacagcuccagggac

SEQ ID NO: 473545 - RNA, 19 nt, Artificial Sequence
  Description of Artificial Sequence: Synthetic oligonucleotide
ucuuugccguuccuucucc

SEQ ID NO: 473546 - RNA, 19 nt, Artificial Sequence
  Description of Artificial Sequence: Synthetic oligonucleotide
gguuaccucaugcaccagg

SEQ ID NO: 473547 - RNA, 19 nt, Artificial Sequence
  Description of Artificial Sequence: Synthetic oligonucleotide
aacccaacgugugucgcag

SEQ ID NO: 473548 - RNA, 19 nt, Artificial Sequence
  Description of Artificial Sequence: Synthetic oligonucleotide
caacgugugucgcagcaag

SEQ ID NO: 473549 - RNA, 19 nt, Artificial Sequence
  Description of Artificial Sequence: Synthetic oligonucleotide
agggaagcccacuggagug

SEQ ID NO: 473550 - RNA, 19 nt, Artificial Sequence
  Description of Artificial Sequence: Synthetic oligonucleotide
ucaagggaagacccuuacu

SEQ ID NO: 473551 - RNA, 19 nt, Artificial Sequence
  Description of Artificial Sequence: Synthetic oligonucleotide
agaaggcuggaggacgggc

SEQ ID NO: 473552 - RNA, 19 nt, Artificial Sequence
  Description of Artificial Sequence: Synthetic oligonucleotide
uguagucgccgugagggcc

SEQ ID NO: 473553 - RNA, 19 nt, Artificial Sequence
  Description of Artificial Sequence: Synthetic oligonucleotide
uccucgagcagcaaacauu

SEQ ID NO: 473554 - RNA, 19 nt, Artificial Sequence
  Description of Artificial Sequence: Synthetic oligonucleotide
agaacccaacgugugucgc

SEQ ID NO: 473555 - RNA, 19 nt, Artificial Sequence
  Description of Artificial Sequence: Synthetic oligonucleotide
acgugugucgcagcaagac

SEQ ID NO: 473556 - RNA, 19 nt, Artificial Sequence
  Description of Artificial Sequence: Synthetic oligonucleotide
auguagucgccgugagggc

SEQ ID NO: 473557 - RNA, 19 nt, Artificial Sequence
  Description of Artificial Sequence: Synthetic oligonucleotide
ucgacgcaaggaaaguuuc

SEQ ID NO: 473558 - RNA, 19 nt, Artificial Sequence
  Description of Artificial Sequence: Synthetic oligonucleotide
ccuuaaauaaacuggagua

SEQ ID NO: 473559 - RNA, 19 nt, Artificial Sequence
  Description of Artificial Sequence: Synthetic oligonucleotide
aaacuggaguacaggagca

SEQ ID NO: 473560 - RNA, 19 nt, Artificial Sequence
  Description of Artificial Sequence: Synthetic oligonucleotide
uacugcagcucuccccuag

SEQ ID NO: 473561 - RNA, 19 nt, Artificial Sequence
  Description of Artificial Sequence: Synthetic oligonucleotide
gaccagagccacucggaag

SEQ ID NO: 473562 - RNA, 19 nt, Artificial Sequence
  Description of Artificial Sequence: Synthetic oligonucleotide
cuccucauggauagcucgg

SEQ ID NO: 473563 - RNA, 19 nt, Artificial Sequence
  Description of Artificial Sequence: Synthetic oligonucleotide
cccagaaggaauucguagg

SEQ ID NO: 473564 - RNA, 19 nt, Artificial Sequence
  Description of Artificial Sequence: Synthetic oligonucleotide
agagccacucggaagauga

SEQ ID NO: 473565 - RNA, 19 nt, Artificial Sequence
  Description of Artificial Sequence: Synthetic oligonucleotide
gugacuacagcuccaggga

SEQ ID NO: 473566 - RNA, 19 nt, Artificial Sequence
  Description of Artificial Sequence: Synthetic oligonucleotide
cagaacccaacgugugucg

SEQ ID NO: 473567 - RNA, 19 nt, Artificial Sequence
  Description of Artificial Sequence: Synthetic oligonucleotide
gaguuccuugcuauuagac

SEQ ID NO: 473568 - RNA, 19 nt, Artificial Sequence
  Description of Artificial Sequence: Synthetic oligonucleotide
ccuagcuccaccaucuaag

SEQ ID NO: 473569 - RNA, 19 nt, Artificial Sequence
  Description of Artificial Sequence: Synthetic oligonucleotide
cucuuaagacuagggaggc

SEQ ID NO: 473570 - RNA, 19 nt, Artificial Sequence
  Description of Artificial Sequence: Synthetic oligonucleotide
uggaaacgccgugacaacc

SEQ ID NO: 473571 - RNA, 19 nt, Artificial Sequence
  Description of Artificial Sequence: Synthetic oligonucleotide
gaaggugccgaugcgccag

SEQ ID NO: 473572 - RNA, 19 nt, Artificial Sequence
  Description of Artificial Sequence: Synthetic oligonucleotide
gaacagagcaccccaccca

SEQ ID NO: 473573 - RNA, 19 nt, Artificial Sequence
  Description of Artificial Sequence: Synthetic oligonucleotide
acaaccacuuaucccaguu

SEQ ID NO: 473574 - RNA, 19 nt, Artificial Sequence
  Description of Artificial Sequence: Synthetic oligonucleotide
ugucccaugcacuguggcu

SEQ ID NO: 473575 - RNA, 19 nt, Artificial Sequence
  Description of Artificial Sequence: Synthetic oligonucleotide
ucuuuagcuggguugcauu

SEQ ID NO: 473576 - RNA, 19 nt, Artificial Sequence
  Description of Artificial Sequence: Synthetic oligonucleotide
aucccuuuccggcagcgca

SEQ ID NO: 473577 - RNA, 19 nt, Artificial Sequence
  Description of Artificial Sequence: Synthetic oligonucleotide
ggacaaaagagucuccaga

SEQ ID NO: 473578 - RNA, 19 nt, Artificial Sequence
  Description of Artificial Sequence: Synthetic oligonucleotide
ggaagacccuuacucagag

SEQ ID NO: 473579 - RNA, 19 nt, Artificial Sequence
  Description of Artificial Sequence: Synthetic oligonucleotide
agaugguauaggccuucag

SEQ ID NO: 473580 - RNA, 19 nt, Artificial Sequence
  Description of Artificial Sequence: Synthetic oligonucleotide
gagggugcgggcaaagaug

SEQ ID NO: 473581 - RNA, 19 nt, Artificial Sequence
  Description of Artificial Sequence: Synthetic oligonucleotide
ggcaaagaugcacaugaac

SEQ ID NO: 473582 - RNA, 19 nt, Artificial Sequence
  Description of Artificial Sequence: Synthetic oligonucleotide
caaagcaaguguguuagga

SEQ ID NO: 473583 - RNA, 19 nt, Artificial Sequence
  Description of Artificial Sequence: Synthetic oligonucleotide
gguugguuaccucaugcac

SEQ ID NO: 473584 - RNA, 19 nt, Artificial Sequence
  Description of Artificial Sequence: Synthetic oligonucleotide
cuaagggaagcccacugga

SEQ ID NO: 473585 - RNA, 19 nt, Artificial Sequence
  Description of Artificial Sequence: Synthetic oligonucleotide
cugacugagggaaaaggaa

SEQ ID NO: 473586 - RNA, 19 nt, Artificial Sequence
  Description of Artificial Sequence: Synthetic oligonucleotide
guugccaguaggugaagga

SEQ ID NO: 473587 - RNA, 19 nt, Artificial Sequence
  Description of Artificial Sequence: Synthetic oligonucleotide
gucacugggagguugguua

SEQ ID NO: 473588 - RNA, 19 nt, Artificial Sequence
  Description of Artificial Sequence: Synthetic oligonucleotide
ugccgaugcgccagagggg

SEQ ID NO: 473589 - RNA, 19 nt, Artificial Sequence
  Description of Artificial Sequence: Synthetic oligonucleotide
gacacgcagcacugaagcc

SEQ ID NO: 473590 - RNA, 19 nt, Artificial Sequence
  Description of Artificial Sequence: Synthetic oligonucleotide
gcuacccuaggaaauacag

SEQ ID NO: 473591 - RNA, 19 nt, Artificial Sequence
  Description of Artificial Sequence: Synthetic oligonucleotide
gacauagaugggaaggaaa

SEQ ID NO: 473592 - RNA, 19 nt, Artificial Sequence
  Description of Artificial Sequence: Synthetic oligonucleotide
agggaagccugccaaggga

SEQ ID NO: 473593 - RNA, 19 nt, Artificial Sequence
  Description of Artificial Sequence: Synthetic oligonucleotide
uucguaggagugacagaga

SEQ ID NO: 473594 - RNA, 19 nt, Artificial Sequence
  Description of Artificial Sequence: Synthetic oligonucleotide
acggggucaaugcgcugcc

SEQ ID NO: 473595 - RNA, 19 nt, Artificial Sequence
  Description of Artificial Sequence: Synthetic oligonucleotide
ccuguagaugguauaggcc

SEQ ID NO: 473596 - RNA, 19 nt, Artificial Sequence
  Description of Artificial Sequence: Synthetic oligonucleotide
gccuguagaugguauaggc

SEQ ID NO: 473597 - RNA, 19 nt, Artificial Sequence
  Description of Artificial Sequence: Synthetic oligonucleotide
cauuugagcucccgcugcc

SEQ ID NO: 473598 - RNA, 19 nt, Artificial Sequence
  Description of Artificial Sequence: Synthetic oligonucleotide
ugggagguacuugucgcag

SEQ ID NO: 473599 - RNA, 19 nt, Artificial Sequence
  Description of Artificial Sequence: Synthetic oligonucleotide
aguagcccucgucaggccu

SEQ ID NO: 473600 - RNA, 19 nt, Artificial Sequence
  Description of Artificial Sequence: Synthetic oligonucleotide
aggaaauggagggcauuuc

SEQ ID NO: 473601 - RNA, 19 nt, Artificial Sequence
  Description of Artificial Sequence: Synthetic oligonucleotide
gaaacgccgugacaaccac

SEQ ID NO: 473602 - RNA, 19 nt, Artificial Sequence
  Description of Artificial Sequence: Synthetic oligonucleotide
ugucgcagaucuguaccag

SEQ ID NO: 473603 - RNA, 19 nt, Artificial Sequence
  Description of Artificial Sequence: Synthetic oligonucleotide
uaucccaguuacugaacau

SEQ ID NO: 473604 - RNA, 19 nt, Artificial Sequence
  Description of Artificial Sequence: Synthetic oligonucleotide
gugugucgcagcaagacca

SEQ ID NO: 473605 - RNA, 19 nt, Artificial Sequence
  Description of Artificial Sequence: Synthetic oligonucleotide
ccugagcauacaaagcaag

SEQ ID NO: 473606 - RNA, 19 nt, Artificial Sequence
  Description of Artificial Sequence: Synthetic oligonucleotide
guauaggccuucaggauuc

SEQ ID NO: 473607 - RNA, 19 nt, Artificial Sequence
  Description of Artificial Sequence: Synthetic oligonucleotide
aguaagcaucuugccgggc

SEQ ID NO: 473608 - RNA, 19 nt, Artificial Sequence
  Description of Artificial Sequence: Synthetic oligonucleotide
ccuuucgacgcaaggaaag

SEQ ID NO: 473609 - RNA, 19 nt, Artificial Sequence
  Description of Artificial Sequence: Synthetic oligonucleotide
aggacauagaugggaagga

SEQ ID NO: 473610 - RNA, 19 nt, Artificial Sequence
  Description of Artificial Sequence: Synthetic oligonucleotide
agcagcugaccuguccucg

SEQ ID NO: 473611 - RNA, 19 nt, Artificial Sequence
  Description of Artificial Sequence: Synthetic oligonucleotide
aagagggccaugucaucua

SEQ ID NO: 473612 - RNA, 19 nt, Artificial Sequence
  Description of Artificial Sequence: Synthetic oligonucleotide
guguaagacagcaccccag

SEQ ID NO: 473613 - RNA, 19 nt, Artificial Sequence
  Description of Artificial Sequence: Synthetic oligonucleotide
ggaagcccgacgcaggagc

SEQ ID NO: 473614 - RNA, 19 nt, Artificial Sequence
  Description of Artificial Sequence: Synthetic oligonucleotide
ucuccccuaguuucccgcc

SEQ ID NO: 473615 - RNA, 19 nt, Artificial Sequence
  Description of Artificial Sequence: Synthetic oligonucleotide
agcaagaggucagaaguaa

SEQ ID NO: 473616 - RNA, 19 nt, Artificial Sequence
  Description of Artificial Sequence: Synthetic oligonucleotide
aaguccuccugcauacacu

SEQ ID NO: 473617 - RNA, 19 nt, Artificial Sequence
  Description of Artificial Sequence: Synthetic oligonucleotide
gaagcccgacgcaggagcg

SEQ ID NO: 473618 - RNA, 19 nt, Artificial Sequence
  Description of Artificial Sequence: Synthetic oligonucleotide
cugcucuuaagacuaggga

SEQ ID NO: 473619 - RNA, 19 nt, Artificial Sequence
  Description of Artificial Sequence: Synthetic oligonucleotide
aagcccgacgcaggagcgc

SEQ ID NO: 473620 - RNA, 19 nt, Artificial Sequence
  Description of Artificial Sequence: Synthetic oligonucleotide
guuaccucaugcaccagga

SEQ ID NO: 473621 - RNA, 19 nt, Artificial Sequence
  Description of Artificial Sequence: Synthetic oligonucleotide
caccaucuaagggaagccc

SEQ ID NO: 473622 - RNA, 19 nt, Artificial Sequence
  Description of Artificial Sequence: Synthetic oligonucleotide
cacggggucaaugcgcugc

SEQ ID NO: 473623 - RNA, 19 nt, Artificial Sequence
  Description of Artificial Sequence: Synthetic oligonucleotide
gaaaaggaaccuagcucca

SEQ ID NO: 473624 - RNA, 19 nt, Artificial Sequence
  Description of Artificial Sequence: Synthetic oligonucleotide
acuugcccggguucugcuc

SEQ ID NO: 473625 - RNA, 19 nt, Artificial Sequence
  Description of Artificial Sequence: Synthetic oligonucleotide
caaaagagucuccagacuu

SEQ ID NO: 473626 - RNA, 19 nt, Artificial Sequence
  Description of Artificial Sequence: Synthetic oligonucleotide
uuuugccguuccuucuccu

SEQ ID NO: 473627 - RNA, 19 nt, Artificial Sequence
  Description of Artificial Sequence: Synthetic oligonucleotide
gagcacggggucaaugcgc

SEQ ID NO: 473628 - RNA, 19 nt, Artificial Sequence
  Description of Artificial Sequence: Synthetic oligonucleotide
gaacccaacgugugucgca

SEQ ID NO: 473629 - RNA, 19 nt, Artificial Sequence
  Description of Artificial Sequence: Synthetic oligonucleotide
uuucgacgcaaggaaaguu

SEQ ID NO: 473630 - RNA, 19 nt, Artificial Sequence
  Description of Artificial Sequence: Synthetic oligonucleotide
agacccuuacucagagagg

SEQ ID NO: 473631 - RNA, 19 nt, Artificial Sequence
  Description of Artificial Sequence: Synthetic oligonucleotide
cugucccaugcacuguggc

SEQ ID NO: 473632 - RNA, 19 nt, Artificial Sequence
  Description of Artificial Sequence: Synthetic oligonucleotide
ucaggggaaucaagccacu

SEQ ID NO: 473633 - RNA, 19 nt, Artificial Sequence
  Description of Artificial Sequence: Synthetic oligonucleotide
agaccagagccacucggaa

SEQ ID NO: 473634 - RNA, 19 nt, Artificial Sequence
  Description of Artificial Sequence: Synthetic oligonucleotide
ugggccuaauuggacaaaa

SEQ ID NO: 473635 - RNA, 19 nt, Artificial Sequence
  Description of Artificial Sequence: Synthetic oligonucleotide
agacaggcuuucugaugag

SEQ ID NO: 473636 - RNA, 19 nt, Artificial Sequence
  Description of Artificial Sequence: Synthetic oligonucleotide
ugcgccagaggggaagccc

SEQ ID NO: 473637 - RNA, 19 nt, Artificial Sequence
  Description of Artificial Sequence: Synthetic oligonucleotide
cagccauuugagcucccgc

SEQ ID NO: 473638 - RNA, 19 nt, Artificial Sequence
  Description of Artificial Sequence: Synthetic oligonucleotide
cacuuaucccaguuacuga

SEQ ID NO: 473639 - RNA, 19 nt, Artificial Sequence
  Description of Artificial Sequence: Synthetic oligonucleotide
uagggaucagcagcuggca

SEQ ID NO: 473640 - RNA, 19 nt, Artificial Sequence
  Description of Artificial Sequence: Synthetic oligonucleotide
uggcaaggagucaggggaa

SEQ ID NO: 473641 - RNA, 19 nt, Artificial Sequence
  Description of Artificial Sequence: Synthetic oligonucleotide
ugcccaugcccuccucgag

SEQ ID NO: 473642 - RNA, 19 nt, Artificial Sequence
  Description of Artificial Sequence: Synthetic oligonucleotide
aggcccaucugccuuucga

SEQ ID NO: 473643 - RNA, 19 nt, Artificial Sequence
  Description of Artificial Sequence: Synthetic oligonucleotide
aggggaucccuuuccggca

SEQ ID NO: 473644 - RNA, 19 nt, Artificial Sequence
  Description of Artificial Sequence: Synthetic oligonucleotide
ucgccgugagggccgauac

SEQ ID NO: 473645 - RNA, 19 nt, Artificial Sequence
  Description of Artificial Sequence: Synthetic oligonucleotide
gaauaccccugccaggccu

SEQ ID NO: 473646 - RNA, 19 nt, Artificial Sequence
  Description of Artificial Sequence: Synthetic oligonucleotide
cuggaaacgccgugacaac

SEQ ID NO: 473647 - RNA, 19 nt, Artificial Sequence
  Description of Artificial Sequence: Synthetic oligonucleotide
gaagagggccaugucaucu

SEQ ID NO: 473648 - RNA, 19 nt, Artificial Sequence
  Description of Artificial Sequence: Synthetic oligonucleotide
ccacuuaucccaguuacug

SEQ ID NO: 473649 - RNA, 19 nt, Artificial Sequence
  Description of Artificial Sequence: Synthetic oligonucleotide
ucuuaagacuagggaggcu

SEQ ID NO: 473650 - RNA, 19 nt, Artificial Sequence
  Description of Artificial Sequence: Synthetic oligonucleotide
auacaugccuugacaggag

SEQ ID NO: 473651 - RNA, 19 nt, Artificial Sequence
  Description of Artificial Sequence: Synthetic oligonucleotide
guaagcaucuugccgggcu

SEQ ID NO: 473652 - RNA, 19 nt, Artificial Sequence
  Description of Artificial Sequence: Synthetic oligonucleotide
agcgcaguuuuaccuucug

SEQ ID NO: 473653 - RNA, 19 nt, Artificial Sequence
  Description of Artificial Sequence: Synthetic oligonucleotide
acucggaagaugaucuuaa

SEQ ID NO: 473654 - RNA, 19 nt, Artificial Sequence
  Description of Artificial Sequence: Synthetic oligonucleotide
agacccagcaagaggucag

SEQ ID NO: 473655 - RNA, 19 nt, Artificial Sequence
  Description of Artificial Sequence: Synthetic oligonucleotide
uagaugguauaggccuuca

SEQ ID NO: 473656 - RNA, 19 nt, Artificial Sequence
  Description of Artificial Sequence: Synthetic oligonucleotide
accuagcuccaccaucuaa

SEQ ID NO: 473657 - RNA, 19 nt, Artificial Sequence
  Description of Artificial Sequence: Synthetic oligonucleotide
aggagcacugugaaacaca

SEQ ID NO: 473658 - RNA, 19 nt, Artificial Sequence
  Description of Artificial Sequence: Synthetic oligonucleotide
acugcuacccuaggaaaua

SEQ ID NO: 473659 - RNA, 19 nt, Artificial Sequence
  Description of Artificial Sequence: Synthetic oligonucleotide
guacuugucgcagaucugu

SEQ ID NO: 473660 - RNA, 19 nt, Artificial Sequence
  Description of Artificial Sequence: Synthetic oligonucleotide
cagcucuccccuaguuucc

SEQ ID NO: 473661 - RNA, 19 nt, Artificial Sequence
  Description of Artificial Sequence: Synthetic oligonucleotide
gaagacccuuacucagaga

SEQ ID NO: 473662 - RNA, 19 nt, Artificial Sequence
  Description of Artificial Sequence: Synthetic oligonucleotide
cucgucaggccuguagaug

SEQ ID NO: 473663 - RNA, 19 nt, Artificial Sequence
  Description of Artificial Sequence: Synthetic oligonucleotide
uaguaaccugggagguacu

SEQ ID NO: 473664 - RNA, 19 nt, Artificial Sequence
  Description of Artificial Sequence: Synthetic oligonucleotide
agggccgauacugcagcuc

SEQ ID NO: 473665 - RNA, 19 nt, Artificial Sequence
  Description of Artificial Sequence: Synthetic oligonucleotide
gcgcaguuuuaccuucugg

SEQ ID NO: 473666 - RNA, 19 nt, Artificial Sequence
  Description of Artificial Sequence: Synthetic oligonucleotide
cauucucccucucaaucaa

SEQ ID NO: 473667 - RNA, 19 nt, Artificial Sequence
  Description of Artificial Sequence: Synthetic oligonucleotide
aggaaaguuuccggccuug

SEQ ID NO: 473668 - RNA, 19 nt, Artificial Sequence
  Description of Artificial Sequence: Synthetic oligonucleotide
guaagacagcaccccagaa

SEQ ID NO: 473669 - RNA, 19 nt, Artificial Sequence
  Description of Artificial Sequence: Synthetic oligonucleotide
uugccgggcuucagcagcu

SEQ ID NO: 473670 - RNA, 19 nt, Artificial Sequence
  Description of Artificial Sequence: Synthetic oligonucleotide
ggaaaguuuccggccuugg

SEQ ID NO: 473671 - RNA, 19 nt, Artificial Sequence
  Description of Artificial Sequence: Synthetic oligonucleotide
guagaugguauaggccuuc

SEQ ID NO: 473672 - RNA, 19 nt, Artificial Sequence
  Description of Artificial Sequence: Synthetic oligonucleotide
aacgugugucgcagcaaga

SEQ ID NO: 473673 - RNA, 19 nt, Artificial Sequence
  Description of Artificial Sequence: Synthetic oligonucleotide
ugcgggcaaagaugcacau

SEQ ID NO: 473674 - RNA, 19 nt, Artificial Sequence
  Description of Artificial Sequence: Synthetic oligonucleotide
caggagcacugugaaacac

SEQ ID NO: 473675 - RNA, 19 nt, Artificial Sequence
  Description of Artificial Sequence: Synthetic oligonucleotide
gacaggagcgcagcuuuuc

SEQ ID NO: 473676 - RNA, 19 nt, Artificial Sequence
  Description of Artificial Sequence: Synthetic oligonucleotide
uccucgccaucauggggug

SEQ ID NO: 473677 - RNA, 19 nt, Artificial Sequence
  Description of Artificial Sequence: Synthetic oligonucleotide
ggucaaugcgcugccgccg

SEQ ID NO: 473678 - RNA, 19 nt, Artificial Sequence
  Description of Artificial Sequence: Synthetic oligonucleotide
aaacgccgugacaaccacu

SEQ ID NO: 473679 - RNA, 19 nt, Artificial Sequence
  Description of Artificial Sequence: Synthetic oligonucleotide
ccauuugagcucccgcugc

SEQ ID NO: 473680 - RNA, 19 nt, Artificial Sequence
  Description of Artificial Sequence: Synthetic oligonucleotide
cccuuacucagagaggggc

SEQ ID NO: 473681 - RNA, 19 nt, Artificial Sequence
  Description of Artificial Sequence: Synthetic oligonucleotide
aggaaccuagcuccaccau

SEQ ID NO: 473682 - RNA, 19 nt, Artificial Sequence
  Description of Artificial Sequence: Synthetic oligonucleotide
ggugcgggcaaagaugcac

SEQ ID NO: 473683 - RNA, 19 nt, Artificial Sequence
  Description of Artificial Sequence: Synthetic oligonucleotide
ugcuggugccuaguggggu

SEQ ID NO: 473684 - RNA, 19 nt, Artificial Sequence
  Description of Artificial Sequence: Synthetic oligonucleotide
aaggugccgaugcgccaga

SEQ ID NO: 473685 - RNA, 19 nt, Artificial Sequence
  Description of Artificial Sequence: Synthetic oligonucleotide
ggaaucaagccacuuuccu

SEQ ID NO: 473686 - RNA, 19 nt, Artificial Sequence
  Description of Artificial Sequence: Synthetic oligonucleotide
ccaaccugaccuucuguac

SEQ ID NO: 473687 - RNA, 19 nt, Artificial Sequence
  Description of Artificial Sequence: Synthetic oligonucleotide
ccgaaggugccgaugcgcc

SEQ ID NO: 473688 - RNA, 19 nt, Artificial Sequence
  Description of Artificial Sequence: Synthetic oligonucleotide
aguuucccgccacuucuuu

SEQ ID NO: 473689 - RNA, 19 nt, Artificial Sequence
  Description of Artificial Sequence: Synthetic oligonucleotide
ccaucuaagggaagcccac

SEQ ID NO: 473690 - RNA, 19 nt, Artificial Sequence
  Description of Artificial Sequence: Synthetic oligonucleotide
agcacggggucaaugcgcu

SEQ ID NO: 473691 - RNA, 19 nt, Artificial Sequence
  Description of Artificial Sequence: Synthetic oligonucleotide
ggugccgaugcgccagagg

SEQ ID NO: 473692 - RNA, 19 nt, Artificial Sequence
  Description of Artificial Sequence: Synthetic oligonucleotide
cucccucucaaucaaugcu

SEQ ID NO: 473693 - RNA, 19 nt, Artificial Sequence
  Description of Artificial Sequence: Synthetic oligonucleotide
gccgugagggccgauacug

SEQ ID NO: 473694 - RNA, 19 nt, Artificial Sequence
  Description of Artificial Sequence: Synthetic oligonucleotide
augccuugacaggagcgca

SEQ ID NO: 473695 - RNA, 19 nt, Artificial Sequence
  Description of Artificial Sequence: Synthetic oligonucleotide
gcaagaccagagccacucg

SEQ ID NO: 473696 - RNA, 19 nt, Artificial Sequence
  Description of Artificial Sequence: Synthetic oligonucleotide
ccgccacuucuuuagcugg

SEQ ID NO: 473697 - RNA, 19 nt, Artificial Sequence
  Description of Artificial Sequence: Synthetic oligonucleotide
ggaaauacagcugucccau

SEQ ID NO: 473698 - RNA, 19 nt, Artificial Sequence
  Description of Artificial Sequence: Synthetic oligonucleotide
aaccuagcuccaccaucua

SEQ ID NO: 473699 - RNA, 19 nt, Artificial Sequence
  Description of Artificial Sequence: Synthetic oligonucleotide
accacuuaucccaguuacu

SEQ ID NO: 473700 - RNA, 19 nt, Artificial Sequence
  Description of Artificial Sequence: Synthetic oligonucleotide
ggagugacagagacccaag

SEQ ID NO: 473701 - RNA, 19 nt, Artificial Sequence
  Description of Artificial Sequence: Synthetic oligonucleotide
cagcacuagcccugcgaac

SEQ ID NO: 473702 - RNA, 19 nt, Artificial Sequence
  Description of Artificial Sequence: Synthetic oligonucleotide
gguauaggccuucaggauu

SEQ ID NO: 473703 - RNA, 19 nt, Artificial Sequence
  Description of Artificial Sequence: Synthetic oligonucleotide
ggaaacgccgugacaacca

SEQ ID NO: 473704 - RNA, 19 nt, Artificial Sequence
  Description of Artificial Sequence: Synthetic oligonucleotide
cgauacugcagcucucccc

SEQ ID NO: 473705 - RNA, 19 nt, Artificial Sequence
  Description of Artificial Sequence: Synthetic oligonucleotide
guuccucaaagcgccaaaa

SEQ ID NO: 473706 - RNA, 19 nt, Artificial Sequence
  Description of Artificial Sequence: Synthetic oligonucleotide
acccuuacucagagagggg

SEQ ID NO: 473707 - RNA, 19 nt, Artificial Sequence
  Description of Artificial Sequence: Synthetic oligonucleotide
augcagucccucagcagug

SEQ ID NO: 473708 - RNA, 19 nt, Artificial Sequence
  Description of Artificial Sequence: Synthetic oligonucleotide
ccacagaacccaacgugug

SEQ ID NO: 473709 - RNA, 19 nt, Artificial Sequence
  Description of Artificial Sequence: Synthetic oligonucleotide
auggauagcucgggagcca

SEQ ID NO: 473710 - RNA, 19 nt, Artificial Sequence
  Description of Artificial Sequence: Synthetic oligonucleotide
caaugcgcugccgccgaag

SEQ ID NO: 473711 - RNA, 19 nt, Artificial Sequence
  Description of Artificial Sequence: Synthetic oligonucleotide
cguaggagugacagagacc

SEQ ID NO: 473712 - RNA, 19 nt, Artificial Sequence
  Description of Artificial Sequence: Synthetic oligonucleotide
cccuuaaauaaacuggagu

SEQ ID NO: 473713 - RNA, 19 nt, Artificial Sequence
  Description of Artificial Sequence: Synthetic oligonucleotide
gauucgguacagguccugu

SEQ ID NO: 473714 - RNA, 19 nt, Artificial Sequence
  Description of Artificial Sequence: Synthetic oligonucleotide
ccuaguuucccgccacuuc

SEQ ID NO: 473715 - RNA, 19 nt, Artificial Sequence
  Description of Artificial Sequence: Synthetic oligonucleotide
ggaugggaccaugacagaa

SEQ ID NO: 473716 - RNA, 19 nt, Artificial Sequence
  Description of Artificial Sequence: Synthetic oligonucleotide
gccgauacugcagcucucc

SEQ ID NO: 473717 - RNA, 19 nt, Artificial Sequence
  Description of Artificial Sequence: Synthetic oligonucleotide
ggaucccuuuccggcagcg

SEQ ID NO: 473718 - RNA, 19 nt, Artificial Sequence
  Description of Artificial Sequence: Synthetic oligonucleotide
gugcgggcaaagaugcaca

SEQ ID NO: 473719 - RNA, 19 nt, Artificial Sequence
  Description of Artificial Sequence: Synthetic oligonucleotide
ccggacucaagggaagacc

SEQ ID NO: 473720 - RNA, 19 nt, Artificial Sequence
  Description of Artificial Sequence: Synthetic oligonucleotide
guccucgccaucauggggu

SEQ ID NO: 473721 - RNA, 19 nt, Artificial Sequence
  Description of Artificial Sequence: Synthetic oligonucleotide
ccaguaggugaaggaaggg

SEQ ID NO: 473722 - RNA, 19 nt, Artificial Sequence
  Description of Artificial Sequence: Synthetic oligonucleotide
gguacuugucgcagaucug

SEQ ID NO: 473723 - RNA, 19 nt, Artificial Sequence
  Description of Artificial Sequence: Synthetic oligonucleotide
cugggagguugguuaccuc

SEQ ID NO: 473724 - RNA, 19 nt, Artificial Sequence
  Description of Artificial Sequence: Synthetic oligonucleotide
gcagcgcaguuuuaccuuc

SEQ ID NO: 473725 - RNA, 19 nt, Artificial Sequence
  Description of Artificial Sequence: Synthetic oligonucleotide
cccaguuacugaacauuuc

SEQ ID NO: 473726 - RNA, 19 nt, Artificial Sequence
  Description of Artificial Sequence: Synthetic oligonucleotide
cgugugucgcagcaagacc

SEQ ID NO: 473727 - RNA, 19 nt, Artificial Sequence
  Description of Artificial Sequence: Synthetic oligonucleotide
gcccaugcccuccucgagc

SEQ ID NO: 473728 - RNA, 19 nt, Artificial Sequence
  Description of Artificial Sequence: Synthetic oligonucleotide
agcccgacgcaggagcgca

SEQ ID NO: 473729 - RNA, 19 nt, Artificial Sequence
  Description of Artificial Sequence: Synthetic oligonucleotide
ugguuaccucaugcaccag

SEQ ID NO: 473730 - RNA, 19 nt, Artificial Sequence
  Description of Artificial Sequence: Synthetic oligonucleotide
cugcgaacaggagguggug

SEQ ID NO: 473731 - RNA, 19 nt, Artificial Sequence
  Description of Artificial Sequence: Synthetic oligonucleotide
gacucaagggaagacccuu

SEQ ID NO: 473732 - RNA, 19 nt, Artificial Sequence
  Description of Artificial Sequence: Synthetic oligonucleotide
gacaaccacuuaucccagu

SEQ ID NO: 473733 - RNA, 19 nt, Artificial Sequence
  Description of Artificial Sequence: Synthetic oligonucleotide
uugcccggguucugcucca

SEQ ID NO: 473734 - RNA, 19 nt, Artificial Sequence
  Description of Artificial Sequence: Synthetic oligonucleotide
caggaguuccuugcuauua

SEQ ID NO: 473735 - RNA, 19 nt, Artificial Sequence
  Description of Artificial Sequence: Synthetic oligonucleotide
cacugcuacccuaggaaau

SEQ ID NO: 473736 - RNA, 19 nt, Artificial Sequence
  Description of Artificial Sequence: Synthetic oligonucleotide
gcccucgucaggccuguag

SEQ ID NO: 473737 - RNA, 19 nt, Artificial Sequence
  Description of Artificial Sequence: Synthetic oligonucleotide
cagcccugcacuguaguaa

SEQ ID NO: 473738 - RNA, 19 nt, Artificial Sequence
  Description of Artificial Sequence: Synthetic oligonucleotide
ggacauagaugggaaggaa

SEQ ID NO: 473739 - RNA, 19 nt, Artificial Sequence
  Description of Artificial Sequence: Synthetic oligonucleotide
cuuucgacgcaaggaaagu

SEQ ID NO: 473740 - RNA, 19 nt, Artificial Sequence
  Description of Artificial Sequence: Synthetic oligonucleotide
gagcacugugaaacacaga

SEQ ID NO: 473741 - RNA, 19 nt, Artificial Sequence
  Description of Artificial Sequence: Synthetic oligonucleotide
gccgugacaaccacuuauc

SEQ ID NO: 473742 - RNA, 19 nt, Artificial Sequence
  Description of Artificial Sequence: Synthetic oligonucleotide
gggagccauguagucgccg

SEQ ID NO: 473743 - RNA, 19 nt, Artificial Sequence
  Description of Artificial Sequence: Synthetic oligonucleotide
ccggcagcgcaguuuuacc

SEQ ID NO: 473744 - RNA, 19 nt, Artificial Sequence
  Description of Artificial Sequence: Synthetic oligonucleotide
gaaggaaauggagggcauu

SEQ ID NO: 473745 - RNA, 19 nt, Artificial Sequence
  Description of Artificial Sequence: Synthetic oligonucleotide
gggaagacccuuacucaga

SEQ ID NO: 473746 - RNA, 19 nt, Artificial Sequence
  Description of Artificial Sequence: Synthetic oligonucleotide
aacuggcgaugcagguccu

SEQ ID NO: 473747 - RNA, 19 nt, Artificial Sequence
  Description of Artificial Sequence: Synthetic oligonucleotide
ggagccauguagucgccgu

SEQ ID NO: 473748 - RNA, 19 nt, Artificial Sequence
  Description of Artificial Sequence: Synthetic oligonucleotide
cccugcgaacaggaggugg

SEQ ID NO: 473749 - RNA, 19 nt, Artificial Sequence
  Description of Artificial Sequence: Synthetic oligonucleotide
cccagaggcccguuccagc

SEQ ID NO: 473750 - RNA, 19 nt, Artificial Sequence
  Description of Artificial Sequence: Synthetic oligonucleotide
ugcgcuccucauggauagc

SEQ ID NO: 473751 - RNA, 19 nt, Artificial Sequence
  Description of Artificial Sequence: Synthetic oligonucleotide
gccgaugcgccagagggga

SEQ ID NO: 473752 - RNA, 19 nt, Artificial Sequence
  Description of Artificial Sequence: Synthetic oligonucleotide
ccagccauuugagcucccg

SEQ ID NO: 473753 - RNA, 19 nt, Artificial Sequence
  Description of Artificial Sequence: Synthetic oligonucleotide
ccgauacugcagcucuccc

SEQ ID NO: 473754 - RNA, 19 nt, Artificial Sequence
  Description of Artificial Sequence: Synthetic oligonucleotide
cuccccuaguuucccgcca

SEQ ID NO: 473755 - RNA, 19 nt, Artificial Sequence
  Description of Artificial Sequence: Synthetic oligonucleotide
ggccucugcucuuaagacu

SEQ ID NO: 473756 - RNA, 19 nt, Artificial Sequence
  Description of Artificial Sequence: Synthetic oligonucleotide
ggagggugcgggcaaagau

SEQ ID NO: 473757 - RNA, 19 nt, Artificial Sequence
  Description of Artificial Sequence: Synthetic oligonucleotide
ggaauucguaggagugaca

SEQ ID NO: 473758 - RNA, 19 nt, Artificial Sequence
  Description of Artificial Sequence: Synthetic oligonucleotide
gggccgauacugcagcucu

SEQ ID NO: 473759 - RNA, 19 nt, Artificial Sequence
  Description of Artificial Sequence: Synthetic oligonucleotide
ucgccaucauggggugcug

SEQ ID NO: 473760 - RNA, 19 nt, Artificial Sequence
  Description of Artificial Sequence: Synthetic oligonucleotide
ccgugagggccgauacugc

SEQ ID NO: 473761 - RNA, 19 nt, Artificial Sequence
  Description of Artificial Sequence: Synthetic oligonucleotide
uagcccucgucaggccugu

SEQ ID NO: 473762 - RNA, 19 nt, Artificial Sequence
  Description of Artificial Sequence: Synthetic oligonucleotide
cccaacgugugucgcagca

SEQ ID NO: 473763 - RNA, 19 nt, Artificial Sequence
  Description of Artificial Sequence: Synthetic oligonucleotide
cuuacucagagaggggcuu

SEQ ID NO: 473764 - RNA, 19 nt, Artificial Sequence
  Description of Artificial Sequence: Synthetic oligonucleotide
cuuugccguuccuucuccu

SEQ ID NO: 473765 - RNA, 19 nt, Artificial Sequence
  Description of Artificial Sequence: Synthetic oligonucleotide
caucuaagggaagcccacu

SEQ ID NO: 473766 - RNA, 19 nt, Artificial Sequence
  Description of Artificial Sequence: Synthetic oligonucleotide
gggcauuuccuugcauguc

SEQ ID NO: 473767 - RNA, 19 nt, Artificial Sequence
  Description of Artificial Sequence: Synthetic oligonucleotide
gggaucccuuuccggcagc

SEQ ID NO: 473768 - RNA, 19 nt, Artificial Sequence
  Description of Artificial Sequence: Synthetic oligonucleotide
cuccucgagcagcaaacau

SEQ ID NO: 473769 - RNA, 19 nt, Artificial Sequence
  Description of Artificial Sequence: Synthetic oligonucleotide
gggaugggaccaugacaga

SEQ ID NO: 473770 - RNA, 19 nt, Artificial Sequence
  Description of Artificial Sequence: Synthetic oligonucleotide
gugccuaguggggugcugu

SEQ ID NO: 473771 - RNA, 19 nt, Artificial Sequence
  Description of Artificial Sequence: Synthetic oligonucleotide
uuccggcagcgcaguuuua

SEQ ID NO: 473772 - RNA, 19 nt, Artificial Sequence
  Description of Artificial Sequence: Synthetic oligonucleotide
agacccaagcugggccuaa

SEQ ID NO: 473773 - RNA, 19 nt, Artificial Sequence
  Description of Artificial Sequence: Synthetic oligonucleotide
acgccgugacaaccacuua

SEQ ID NO: 473774 - RNA, 19 nt, Artificial Sequence
  Description of Artificial Sequence: Synthetic oligonucleotide
ccucauggauagcucggga

SEQ ID NO: 473775 - RNA, 19 nt, Artificial Sequence
  Description of Artificial Sequence: Synthetic oligonucleotide
uagucgccgugagggccga

SEQ ID NO: 473776 - RNA, 19 nt, Artificial Sequence
  Description of Artificial Sequence: Synthetic oligonucleotide
ccccugccaggccugcucc

SEQ ID NO: 473777 - RNA, 19 nt, Artificial Sequence
  Description of Artificial Sequence: Synthetic oligonucleotide
acuggcgaugcagguccuu

SEQ ID NO: 473778 - RNA, 19 nt, Artificial Sequence
  Description of Artificial Sequence: Synthetic oligonucleotide
gguccccagaggcccguuc

SEQ ID NO: 473779 - RNA, 19 nt, Artificial Sequence
  Description of Artificial Sequence: Synthetic oligonucleotide
cgaugcgccagaggggaag

SEQ ID NO: 473780 - RNA, 19 nt, Artificial Sequence
  Description of Artificial Sequence: Synthetic oligonucleotide
gccuuucgacgcaaggaaa

SEQ ID NO: 473781 - RNA, 19 nt, Artificial Sequence
  Description of Artificial Sequence: Synthetic oligonucleotide
accugaccuucuguacaua

SEQ ID NO: 473782 - RNA, 19 nt, Artificial Sequence
  Description of Artificial Sequence: Synthetic oligonucleotide
cccggacucaagggaagac

SEQ ID NO: 473783 - RNA, 19 nt, Artificial Sequence
  Description of Artificial Sequence: Synthetic oligonucleotide
gucgccgugagggccgaua

SEQ ID NO: 473784 - RNA, 19 nt, Artificial Sequence
  Description of Artificial Sequence: Synthetic oligonucleotide
cagcgcaguuuuaccuucu

SEQ ID NO: 473785 - RNA, 19 nt, Artificial Sequence
  Description of Artificial Sequence: Synthetic oligonucleotide
gguagguuucgaagcugcu

SEQ ID NO: 473786 - RNA, 19 nt, Artificial Sequence
  Description of Artificial Sequence: Synthetic oligonucleotide
gcugcccgagggccucugc

SEQ ID NO: 473787 - RNA, 19 nt, Artificial Sequence
  Description of Artificial Sequence: Synthetic oligonucleotide
cugccgccgaaggugccga

SEQ ID NO: 473788 - RNA, 19 nt, Artificial Sequence
  Description of Artificial Sequence: Synthetic oligonucleotide
gcacggggucaaugcgcug

SEQ ID NO: 473789 - RNA, 19 nt, Artificial Sequence
  Description of Artificial Sequence: Synthetic oligonucleotide
ggacucaagggaagacccu

SEQ ID NO: 473790 - RNA, 19 nt, Artificial Sequence
  Description of Artificial Sequence: Synthetic oligonucleotide
acgcagcacugaagcccag

SEQ ID NO: 473791 - RNA, 19 nt, Artificial Sequence
  Description of Artificial Sequence: Synthetic oligonucleotide
gcgcuccucauggauagcu

SEQ ID NO: 473792 - RNA, 19 nt, Artificial Sequence
  Description of Artificial Sequence: Synthetic oligonucleotide
ggguugcauucucccucuc

SEQ ID NO: 473793 - RNA, 19 nt, Artificial Sequence
  Description of Artificial Sequence: Synthetic oligonucleotide
gcgcuuccagcugcccgag

SEQ ID NO: 473794 - RNA, 19 nt, Artificial Sequence
  Description of Artificial Sequence: Synthetic oligonucleotide
ggaggcccaucugccuuuc

SEQ ID NO: 473795 - RNA, 19 nt, Artificial Sequence
  Description of Artificial Sequence: Synthetic oligonucleotide
ggccgauacugcagcucuc

SEQ ID NO: 473796 - RNA, 19 nt, Artificial Sequence
  Description of Artificial Sequence: Synthetic oligonucleotide
cucccgcugccgagccaca

SEQ ID NO: 473797 - RNA, 19 nt, Artificial Sequence
  Description of Artificial Sequence: Synthetic oligonucleotide
cgccgugacaaccacuuau

SEQ ID NO: 473798 - RNA, 19 nt, Artificial Sequence
  Description of Artificial Sequence: Synthetic oligonucleotide
cgggagccauguagucgcc

SEQ ID NO: 473799 - RNA, 19 nt, Artificial Sequence
  Description of Artificial Sequence: Synthetic oligonucleotide
ccaacgugugucgcagcaa

SEQ ID NO: 473800 - RNA, 19 nt, Artificial Sequence
  Description of Artificial Sequence: Synthetic oligonucleotide
caggggaaucaagccacuu

SEQ ID NO: 473801 - RNA, 19 nt, Artificial Sequence
  Description of Artificial Sequence: Synthetic oligonucleotide
ccucgucaggccuguagau

SEQ ID NO: 473802 - RNA, 19 nt, Artificial Sequence
  Description of Artificial Sequence: Synthetic oligonucleotide
cggcagcgcaguuuuaccu

SEQ ID NO: 473803 - RNA, 19 nt, Artificial Sequence
  Description of Artificial Sequence: Synthetic oligonucleotide
gcccugcgaacaggaggug

SEQ ID NO: 473804 - RNA, 19 nt, Artificial Sequence
  Description of Artificial Sequence: Synthetic oligonucleotide
ccccggacucaagggaaga

SEQ ID NO: 473805 - RNA, 19 nt, Artificial Sequence
  Description of Artificial Sequence: Synthetic oligonucleotide
ccgacgcaggagcgcaaaa

SEQ ID NO: 473806 - RNA, 19 nt, Artificial Sequence
  Description of Artificial Sequence: Synthetic oligonucleotide
agucgccgugagggccgau

SEQ ID NO: 473807 - RNA, 19 nt, Artificial Sequence
  Description of Artificial Sequence: Synthetic oligonucleotide
cccgacgcaggagcgcaaa

SEQ ID NO: 473808 - RNA, 19 nt, Artificial Sequence
  Description of Artificial Sequence: Synthetic oligonucleotide
ccgaugcgccagaggggaa

SEQ ID NO: 473809 - RNA, 19 nt, Artificial Sequence
  Description of Artificial Sequence: Synthetic oligonucleotide
agcccucgucaggccugua

SEQ ID NO: 473810 - RNA, 19 nt, Artificial Sequence
  Description of Artificial Sequence: Synthetic oligonucleotide
cccuaguuucccgccacuu

SEQ ID NO: 473811 - RNA, 19 nt, Artificial Sequence
  Description of Artificial Sequence: Synthetic oligonucleotide
ccccuaguuucccgccacu

SEQ ID NO: 473812 - RNA, 19 nt, Artificial Sequence
  Description of Artificial Sequence: Synthetic oligonucleotide
cccuuuccggcagcgcagu

SEQ ID NO: 473813 - RNA, 19 nt, Artificial Sequence
  Description of Artificial Sequence: Synthetic oligonucleotide
gcccgacgcaggagcgcaa

SEQ ID NO: 473814 - RNA, 19 nt, Artificial Sequence
  Description of Artificial Sequence: Synthetic oligonucleotide
cgccgugagggccgauacu

SEQ ID NO: 473815 - RNA, 19 nt, Artificial Sequence
  Description of Artificial Sequence: Synthetic oligonucleotide
ccuuuccggcagcgcaguu

SEQ ID NO: 473816 - RNA, 19 nt, Artificial Sequence
  Description of Artificial Sequence: Synthetic oligonucleotide
acuugcauuagucagauuc

SEQ ID NO: 473817 - RNA, 19 nt, Artificial Sequence
  Description of Artificial Sequence: Synthetic oligonucleotide
aagauaaguacuuggguac

SEQ ID NO: 473818 - RNA, 19 nt, Artificial Sequence
  Description of Artificial Sequence: Synthetic oligonucleotide
gaucuaaugauccucaugc

SEQ ID NO: 473819 - RNA, 19 nt, Artificial Sequence
  Description of Artificial Sequence: Synthetic oligonucleotide
aauauuguacugaugaagg

SEQ ID NO: 473820 - RNA, 19 nt, Artificial Sequence
  Description of Artificial Sequence: Synthetic oligonucleotide
ucgaacuccacuaaaggcg

SEQ ID NO: 473821 - RNA, 19 nt, Artificial Sequence
  Description of Artificial Sequence: Synthetic oligonucleotide
auauucucgccucaaaggc

SEQ ID NO: 473822 - RNA, 19 nt, Artificial Sequence
  Description of Artificial Sequence: Synthetic oligonucleotide
uauauucucgccucaaagg

SEQ ID NO: 473823 - RNA, 19 nt, Artificial Sequence
  Description of Artificial Sequence: Synthetic oligonucleotide
ucguaagccaacaauauug

SEQ ID NO: 473824 - RNA, 19 nt, Artificial Sequence
  Description of Artificial Sequence: Synthetic oligonucleotide
uuugaguccauaaugaauu

SEQ ID NO: 473825 - RNA, 19 nt, Artificial Sequence
  Description of Artificial Sequence: Synthetic oligonucleotide
ucaggauuaauaccaggcg

SEQ ID NO: 473826 - RNA, 19 nt, Artificial Sequence
  Description of Artificial Sequence: Synthetic oligonucleotide
aacaaguacacugcauugc

SEQ ID NO: 473827 - RNA, 19 nt, Artificial Sequence
  Description of Artificial Sequence: Synthetic oligonucleotide
ugugugaagucugaaagcg

SEQ ID NO: 473828 - RNA, 19 nt, Artificial Sequence
  Description of Artificial Sequence: Synthetic oligonucleotide
uaauugcagaugaaggagg

SEQ ID NO: 473829 - RNA, 19 nt, Artificial Sequence
  Description of Artificial Sequence: Synthetic oligonucleotide
aaugcacugagacuucauc

SEQ ID NO: 473830 - RNA, 19 nt, Artificial Sequence
  Description of Artificial Sequence: Synthetic oligonucleotide
ucuaauugcagaugaagga

SEQ ID NO: 473831 - RNA, 19 nt, Artificial Sequence
  Description of Artificial Sequence: Synthetic oligonucleotide
guucguaucacccugcaag

SEQ ID NO: 473832 - RNA, 19 nt, Artificial Sequence
  Description of Artificial Sequence: Synthetic oligonucleotide
guuccuaucuaccacagcc

SEQ ID NO: 473833 - RNA, 19 nt, Artificial Sequence
  Description of Artificial Sequence: Synthetic oligonucleotide
auuaauaccaggcgcuggg

SEQ ID NO: 473834 - RNA, 19 nt, Artificial Sequence
  Description of Artificial Sequence: Synthetic oligonucleotide
ugguguaagagauauucag

SEQ ID NO: 473835 - RNA, 19 nt, Artificial Sequence
  Description of Artificial Sequence: Synthetic oligonucleotide
acuacaucacuuuuaccac

SEQ ID NO: 473836 - RNA, 19 nt, Artificial Sequence
  Description of Artificial Sequence: Synthetic oligonucleotide
aaaggcgcaugucuguugg

SEQ ID NO: 473837 - RNA, 19 nt, Artificial Sequence
  Description of Artificial Sequence: Synthetic oligonucleotide
auacccauaucucuaauug

SEQ ID NO: 473838 - RNA, 19 nt, Artificial Sequence
  Description of Artificial Sequence: Synthetic oligonucleotide
uaucucuaauugcagauga

SEQ ID NO: 473839 - RNA, 19 nt, Artificial Sequence
  Description of Artificial Sequence: Synthetic oligonucleotide
augguuauacgucacagcu

SEQ ID NO: 473840 - RNA, 19 nt, Artificial Sequence
  Description of Artificial Sequence: Synthetic oligonucleotide
gaucauuucagugacagga

SEQ ID NO: 473841 - RNA, 19 nt, Artificial Sequence
  Description of Artificial Sequence: Synthetic oligonucleotide
uguagucuuguauucaucu

SEQ ID NO: 473842 - RNA, 19 nt, Artificial Sequence
  Description of Artificial Sequence: Synthetic oligonucleotide
ucuaaugauccucaugccu

SEQ ID NO: 473843 - RNA, 19 nt, Artificial Sequence
  Description of Artificial Sequence: Synthetic oligonucleotide
ugaaggagggccuauaaaa

SEQ ID NO: 473844 - RNA, 19 nt, Artificial Sequence
  Description of Artificial Sequence: Synthetic oligonucleotide
guuucgacagggcugacgg

SEQ ID NO: 473845 - RNA, 19 nt, Artificial Sequence
  Description of Artificial Sequence: Synthetic oligonucleotide
aacaccuuuucaaugguuc

SEQ ID NO: 473846 - RNA, 19 nt, Artificial Sequence
  Description of Artificial Sequence: Synthetic oligonucleotide
acgacuacaucacuuuuac

SEQ ID NO: 473847 - RNA, 19 nt, Artificial Sequence
  Description of Artificial Sequence: Synthetic oligonucleotide
ugcugaaugaaaacggaga

SEQ ID NO: 473848 - RNA, 19 nt, Artificial Sequence
  Description of Artificial Sequence: Synthetic oligonucleotide
uuuaugguaugcuccaucu

SEQ ID NO: 473849 - RNA, 19 nt, Artificial Sequence
  Description of Artificial Sequence: Synthetic oligonucleotide
gauuucuuagcuucccugc

SEQ ID NO: 473850 - RNA, 19 nt, Artificial Sequence
  Description of Artificial Sequence: Synthetic oligonucleotide
agauguugugcugucagcc

SEQ ID NO: 473851 - RNA, 19 nt, Artificial Sequence
  Description of Artificial Sequence: Synthetic oligonucleotide
cagcauagcaucaucauug

SEQ ID NO: 473852 - RNA, 19 nt, Artificial Sequence
  Description of Artificial Sequence: Synthetic oligonucleotide
ucugaucuaaugauccuca

SEQ ID NO: 473853 - RNA, 19 nt, Artificial Sequence
  Description of Artificial Sequence: Synthetic oligonucleotide
uucuugcuuacaaaguuca

SEQ ID NO: 473854 - RNA, 19 nt, Artificial Sequence
  Description of Artificial Sequence: Synthetic oligonucleotide
uccacauugguucguaagc

SEQ ID NO: 473855 - RNA, 19 nt, Artificial Sequence
  Description of Artificial Sequence: Synthetic oligonucleotide
ugcgauaguaccucccugg

SEQ ID NO: 473856 - RNA, 19 nt, Artificial Sequence
  Description of Artificial Sequence: Synthetic oligonucleotide
ucauaaugcacugagacuu

SEQ ID NO: 473857 - RNA, 19 nt, Artificial Sequence
  Description of Artificial Sequence: Synthetic oligonucleotide
agggauuucuuccuggcuc

SEQ ID NO: 473858 - RNA, 19 nt, Artificial Sequence
  Description of Artificial Sequence: Synthetic oligonucleotide
agaggugaaccaauggucc

SEQ ID NO: 473859 - RNA, 19 nt, Artificial Sequence
  Description of Artificial Sequence: Synthetic oligonucleotide
aauugcagaugaaggaggg

SEQ ID NO: 473860 - RNA, 19 nt, Artificial Sequence
  Description of Artificial Sequence: Synthetic oligonucleotide
ugcaugguguuccugucgg

SEQ ID NO: 473861 - RNA, 19 nt, Artificial Sequence
  Description of Artificial Sequence: Synthetic oligonucleotide
gaagauaaguacuugggua

SEQ ID NO: 473862 - RNA, 19 nt, Artificial Sequence
  Description of Artificial Sequence: Synthetic oligonucleotide
ugaaccaaugguccggccc

SEQ ID NO: 473863 - RNA, 19 nt, Artificial Sequence
  Description of Artificial Sequence: Synthetic oligonucleotide
ugauucuaacugcucuugg

SEQ ID NO: 473864 - RNA, 19 nt, Artificial Sequence
  Description of Artificial Sequence: Synthetic oligonucleotide
aucuaaugauccucaugcc

SEQ ID NO: 473865 - RNA, 19 nt, Artificial Sequence
  Description of Artificial Sequence: Synthetic oligonucleotide
cuaauugcagaugaaggag

SEQ ID NO: 473866 - RNA, 19 nt, Artificial Sequence
  Description of Artificial Sequence: Synthetic oligonucleotide
uguaagagauauucagucu

SEQ ID NO: 473867 - RNA, 19 nt, Artificial Sequence
  Description of Artificial Sequence: Synthetic oligonucleotide
acuuggauuuacuggcuac

SEQ ID NO: 473868 - RNA, 19 nt, Artificial Sequence
  Description of Artificial Sequence: Synthetic oligonucleotide
gucauaugacccaucaugg

SEQ ID NO: 473869 - RNA, 19 nt, Artificial Sequence
  Description of Artificial Sequence: Synthetic oligonucleotide
ucuucuuacuucaggauua

SEQ ID NO: 473870 - RNA, 19 nt, Artificial Sequence
  Description of Artificial Sequence: Synthetic oligonucleotide
ugaucuaaugauccucaug

SEQ ID NO: 473871 - RNA, 19 nt, Artificial Sequence
  Description of Artificial Sequence: Synthetic oligonucleotide
acggcuuugaucauaacag

SEQ ID NO: 473872 - RNA, 19 nt, Artificial Sequence
  Description of Artificial Sequence: Synthetic oligonucleotide
guguaagagauauucaguc

SEQ ID NO: 473873 - RNA, 19 nt, Artificial Sequence
  Description of Artificial Sequence: Synthetic oligonucleotide
caggauuaauaccaggcgc

SEQ ID NO: 473874 - RNA, 19 nt, Artificial Sequence
  Description of Artificial Sequence: Synthetic oligonucleotide
aguuucaauccuuguggac

SEQ ID NO: 473875 - RNA, 19 nt, Artificial Sequence
  Description of Artificial Sequence: Synthetic oligonucleotide
cuugcuuacaaaguucagc

SEQ ID NO: 473876 - RNA, 19 nt, Artificial Sequence
  Description of Artificial Sequence: Synthetic oligonucleotide
cuggcuacuccauuaacag

SEQ ID NO: 473877 - RNA, 19 nt, Artificial Sequence
  Description of Artificial Sequence: Synthetic oligonucleotide
auauucagucuucucccac

SEQ ID NO: 473878 - RNA, 19 nt, Artificial Sequence
  Description of Artificial Sequence: Synthetic oligonucleotide
aguacuuggguacuggaau

SEQ ID NO: 473879 - RNA, 19 nt, Artificial Sequence
  Description of Artificial Sequence: Synthetic oligonucleotide
uguuccauacuucaugguu

SEQ ID NO: 473880 - RNA, 19 nt, Artificial Sequence
  Description of Artificial Sequence: Synthetic oligonucleotide
uccuaucuaccacagccag

SEQ ID NO: 473881 - RNA, 19 nt, Artificial Sequence
  Description of Artificial Sequence: Synthetic oligonucleotide
uccacuuguagucuuguau

SEQ ID NO: 473882 - RNA, 19 nt, Artificial Sequence
  Description of Artificial Sequence: Synthetic oligonucleotide
ugugcuuugaguccauaau

SEQ ID NO: 473883 - RNA, 19 nt, Artificial Sequence
  Description of Artificial Sequence: Synthetic oligonucleotide
gguuauacgucacagcuac

SEQ ID NO: 473884 - RNA, 19 nt, Artificial Sequence
  Description of Artificial Sequence: Synthetic oligonucleotide
uggauuuacuggcuacucc

SEQ ID NO: 473885 - RNA, 19 nt, Artificial Sequence
  Description of Artificial Sequence: Synthetic oligonucleotide
uucuccauugccagguagc

SEQ ID NO: 473886 - RNA, 19 nt, Artificial Sequence
  Description of Artificial Sequence: Synthetic oligonucleotide
aucuagagauucaggaggc

SEQ ID NO: 473887 - RNA, 19 nt, Artificial Sequence
  Description of Artificial Sequence: Synthetic oligonucleotide
ugcaaagaucaccaaggac

SEQ ID NO: 473888 - RNA, 19 nt, Artificial Sequence
  Description of Artificial Sequence: Synthetic oligonucleotide
uuucaauccuuguggacac

SEQ ID NO: 473889 - RNA, 19 nt, Artificial Sequence
  Description of Artificial Sequence: Synthetic oligonucleotide
gcgaucauaaccaucagag

SEQ ID NO: 473890 - RNA, 19 nt, Artificial Sequence
  Description of Artificial Sequence: Synthetic oligonucleotide
auuguacugaugaaggcug

SEQ ID NO: 473891 - RNA, 19 nt, Artificial Sequence
  Description of Artificial Sequence: Synthetic oligonucleotide
acuguaugcccauucuuug

SEQ ID NO: 473892 - RNA, 19 nt, Artificial Sequence
  Description of Artificial Sequence: Synthetic oligonucleotide
uauucucgccucaaaggca

SEQ ID NO: 473893 - RNA, 19 nt, Artificial Sequence
  Description of Artificial Sequence: Synthetic oligonucleotide
uacgucacagcuacgacua

SEQ ID NO: 473894 - RNA, 19 nt, Artificial Sequence
  Description of Artificial Sequence: Synthetic oligonucleotide
aaagcgcuggucaugucuc

SEQ ID NO: 473895 - RNA, 19 nt, Artificial Sequence
  Description of Artificial Sequence: Synthetic oligonucleotide
uucguaucacccugcaagc

SEQ ID NO: 473896 - RNA, 19 nt, Artificial Sequence
  Description of Artificial Sequence: Synthetic oligonucleotide
ccaguuucaauccuugugg

SEQ ID NO: 473897 - RNA, 19 nt, Artificial Sequence
  Description of Artificial Sequence: Synthetic oligonucleotide
gauuaauaccaggcgcugg

SEQ ID NO: 473898 - RNA, 19 nt, Artificial Sequence
  Description of Artificial Sequence: Synthetic oligonucleotide
aguacugccuuccauggaa

SEQ ID NO: 473899 - RNA, 19 nt, Artificial Sequence
  Description of Artificial Sequence: Synthetic oligonucleotide
guaaccuuccacaacagga

SEQ ID NO: 473900 - RNA, 19 nt, Artificial Sequence
  Description of Artificial Sequence: Synthetic oligonucleotide
aggauguuccacuuguagu

SEQ ID NO: 473901 - RNA, 19 nt, Artificial Sequence
  Description of Artificial Sequence: Synthetic oligonucleotide
gcugaaugaaaacggagag

SEQ ID NO: 473902 - RNA, 19 nt, Artificial Sequence
  Description of Artificial Sequence: Synthetic oligonucleotide
caaagaucaccaaggacuc

SEQ ID NO: 473903 - RNA, 19 nt, Artificial Sequence
  Description of Artificial Sequence: Synthetic oligonucleotide
augcacugagacuucaucu

SEQ ID NO: 473904 - RNA, 19 nt, Artificial Sequence
  Description of Artificial Sequence: Synthetic oligonucleotide
gauucuaacugcucuugga

SEQ ID NO: 473905 - RNA, 19 nt, Artificial Sequence
  Description of Artificial Sequence: Synthetic oligonucleotide
auacgucacagcuacgacu

SEQ ID NO: 473906 - RNA, 19 nt, Artificial Sequence
  Description of Artificial Sequence: Synthetic oligonucleotide
uacuugacagccugagcag

SEQ ID NO: 473907 - RNA, 19 nt, Artificial Sequence
  Description of Artificial Sequence: Synthetic oligonucleotide
caaucugcaugucauauga

SEQ ID NO: 473908 - RNA, 19 nt, Artificial Sequence
  Description of Artificial Sequence: Synthetic oligonucleotide
guauugggcagguaagaug

SEQ ID NO: 473909 - RNA, 19 nt, Artificial Sequence
  Description of Artificial Sequence: Synthetic oligonucleotide
ugaucauuucagugacagg

SEQ ID NO: 473910 - RNA, 19 nt, Artificial Sequence
  Description of Artificial Sequence: Synthetic oligonucleotide
cacuuuuaccacuucucag

SEQ ID NO: 473911 - RNA, 19 nt, Artificial Sequence
  Description of Artificial Sequence: Synthetic oligonucleotide
augccaauuucaguacugc

SEQ ID NO: 473912 - RNA, 19 nt, Artificial Sequence
  Description of Artificial Sequence: Synthetic oligonucleotide
auaggugcgauaguaccuc

SEQ ID NO: 473913 - RNA, 19 nt, Artificial Sequence
  Description of Artificial Sequence: Synthetic oligonucleotide
uuggguacuggaaugccaa

SEQ ID NO: 473914 - RNA, 19 nt, Artificial Sequence
  Description of Artificial Sequence: Synthetic oligonucleotide
ugaaaacggagagaauuga

SEQ ID NO: 473915 - RNA, 19 nt, Artificial Sequence
  Description of Artificial Sequence: Synthetic oligonucleotide
uauacgucacagcuacgac

SEQ ID NO: 473916 - RNA, 19 nt, Artificial Sequence
  Description of Artificial Sequence: Synthetic oligonucleotide
acaugcaugguguuccugu

SEQ ID NO: 473917 - RNA, 19 nt, Artificial Sequence
  Description of Artificial Sequence: Synthetic oligonucleotide
ucuugcuuacaaaguucag

SEQ ID NO: 473918 - RNA, 19 nt, Artificial Sequence
  Description of Artificial Sequence: Synthetic oligonucleotide
uaugcccauucuuuggcug

SEQ ID NO: 473919 - RNA, 19 nt, Artificial Sequence
  Description of Artificial Sequence: Synthetic oligonucleotide
cuugccguacuccaguuuc

SEQ ID NO: 473920 - RNA, 19 nt, Artificial Sequence
  Description of Artificial Sequence: Synthetic oligonucleotide
ucaguuucgacagggcuga

SEQ ID NO: 473921 - RNA, 19 nt, Artificial Sequence
  Description of Artificial Sequence: Synthetic oligonucleotide
cugcugaaugaaaacggag

SEQ ID NO: 473922 - RNA, 19 nt, Artificial Sequence
  Description of Artificial Sequence: Synthetic oligonucleotide
auggcgaucauaaccauca

SEQ ID NO: 473923 - RNA, 19 nt, Artificial Sequence
  Description of Artificial Sequence: Synthetic oligonucleotide
aagcccauucccucggcug

SEQ ID NO: 473924 - RNA, 19 nt, Artificial Sequence
  Description of Artificial Sequence: Synthetic oligonucleotide
uaccucaguuucgacaggg

SEQ ID NO: 473925 - RNA, 19 nt, Artificial Sequence
  Description of Artificial Sequence: Synthetic oligonucleotide
gaguccauaaugaauucca

SEQ ID NO: 473926 - RNA, 19 nt, Artificial Sequence
  Description of Artificial Sequence: Synthetic oligonucleotide
agaauugaucuugugugug

SEQ ID NO: 473927 - RNA, 19 nt, Artificial Sequence
  Description of Artificial Sequence: Synthetic oligonucleotide
uaaguacuuggguacugga

SEQ ID NO: 473928 - RNA, 19 nt, Artificial Sequence
  Description of Artificial Sequence: Synthetic oligonucleotide
ugccaauuucaguacugcc

SEQ ID NO: 473929 - RNA, 19 nt, Artificial Sequence
  Description of Artificial Sequence: Synthetic oligonucleotide
ugggcacaguucauuauga

SEQ ID NO: 473930 - RNA, 19 nt, Artificial Sequence
  Description of Artificial Sequence: Synthetic oligonucleotide
uucgacagggcugacgggc

SEQ ID NO: 473931 - RNA, 19 nt, Artificial Sequence
  Description of Artificial Sequence: Synthetic oligonucleotide
acuugacagccugagcagc

SEQ ID NO: 473932 - RNA, 19 nt, Artificial Sequence
  Description of Artificial Sequence: Synthetic oligonucleotide
augaaaacggagagaauug

SEQ ID NO: 473933 - RNA, 19 nt, Artificial Sequence
  Description of Artificial Sequence: Synthetic oligonucleotide
uuucugaucuaaugauccu

SEQ ID NO: 473934 - RNA, 19 nt, Artificial Sequence
  Description of Artificial Sequence: Synthetic oligonucleotide
uauacccauaucucuaauu

SEQ ID NO: 473935 - RNA, 19 nt, Artificial Sequence
  Description of Artificial Sequence: Synthetic oligonucleotide
aauugaucuugugugugaa

SEQ ID NO: 473936 - RNA, 19 nt, Artificial Sequence
  Description of Artificial Sequence: Synthetic oligonucleotide
gugugugaagucugaaagc

SEQ ID NO: 473937 - RNA, 19 nt, Artificial Sequence
  Description of Artificial Sequence: Synthetic oligonucleotide
ucucuuugaggaugagccc

SEQ ID NO: 473938 - RNA, 19 nt, Artificial Sequence
  Description of Artificial Sequence: Synthetic oligonucleotide
uacgacuacaucacuuuua

SEQ ID NO: 473939 - RNA, 19 nt, Artificial Sequence
  Description of Artificial Sequence: Synthetic oligonucleotide
ucaguuccagugaucauuu

SEQ ID NO: 473940 - RNA, 19 nt, Artificial Sequence
  Description of Artificial Sequence: Synthetic oligonucleotide
uuaauaccaggcgcugggg

SEQ ID NO: 473941 - RNA, 19 nt, Artificial Sequence
  Description of Artificial Sequence: Synthetic oligonucleotide
gagaggugaaccaaugguc

SEQ ID NO: 473942 - RNA, 19 nt, Artificial Sequence
  Description of Artificial Sequence: Synthetic oligonucleotide
auaguaccucccuggguuc

SEQ ID NO: 473943 - RNA, 19 nt, Artificial Sequence
  Description of Artificial Sequence: Synthetic oligonucleotide
uaacaggguacccaauuuu

SEQ ID NO: 473944 - RNA, 19 nt, Artificial Sequence
  Description of Artificial Sequence: Synthetic oligonucleotide
gauaguaccucccuggguu

SEQ ID NO: 473945 - RNA, 19 nt, Artificial Sequence
  Description of Artificial Sequence: Synthetic oligonucleotide
ugguuccuaucuaccacag

SEQ ID NO: 473946 - RNA, 19 nt, Artificial Sequence
  Description of Artificial Sequence: Synthetic oligonucleotide
acggagagaauugaucuug

SEQ ID NO: 473947 - RNA, 19 nt, Artificial Sequence
  Description of Artificial Sequence: Synthetic oligonucleotide
guacuuggguacuggaaug

SEQ ID NO: 473948 - RNA, 19 nt, Artificial Sequence
  Description of Artificial Sequence: Synthetic oligonucleotide
guccacauugguucguaag

SEQ ID NO: 473949 - RNA, 19 nt, Artificial Sequence
  Description of Artificial Sequence: Synthetic oligonucleotide
augcaugguguuccugucg

SEQ ID NO: 473950 - RNA, 19 nt, Artificial Sequence
  Description of Artificial Sequence: Synthetic oligonucleotide
cuagagauucaggaggcac

SEQ ID NO: 473951 - RNA, 19 nt, Artificial Sequence
  Description of Artificial Sequence: Synthetic oligonucleotide
aggauuaauaccaggcgcu

SEQ ID NO: 473952 - RNA, 19 nt, Artificial Sequence
  Description of Artificial Sequence: Synthetic oligonucleotide
aaugguccggccccuggca

SEQ ID NO: 473953 - RNA, 19 nt, Artificial Sequence
  Description of Artificial Sequence: Synthetic oligonucleotide
uucguaagccaacaauauu

SEQ ID NO: 473954 - RNA, 19 nt, Artificial Sequence
  Description of Artificial Sequence: Synthetic oligonucleotide
caacugguuccuaucuacc

SEQ ID NO: 473955 - RNA, 19 nt, Artificial Sequence
  Description of Artificial Sequence: Synthetic oligonucleotide
aucugcggcccauacaaca

SEQ ID NO: 473956 - RNA, 19 nt, Artificial Sequence
  Description of Artificial Sequence: Synthetic oligonucleotide
uucugaucuaaugauccuc

SEQ ID NO: 473957 - RNA, 19 nt, Artificial Sequence
  Description of Artificial Sequence: Synthetic oligonucleotide
aguccauaaugaauuccac

SEQ ID NO: 473958 - RNA, 19 nt, Artificial Sequence
  Description of Artificial Sequence: Synthetic oligonucleotide
aacggagagaauugaucuu

SEQ ID NO: 473959 - RNA, 19 nt, Artificial Sequence
  Description of Artificial Sequence: Synthetic oligonucleotide
cugcauauauucucgccuc

SEQ ID NO: 473960 - RNA, 19 nt, Artificial Sequence
  Description of Artificial Sequence: Synthetic oligonucleotide
ugcggcccauacaacaagc

SEQ ID NO: 473961 - RNA, 19 nt, Artificial Sequence
  Description of Artificial Sequence: Synthetic oligonucleotide
ugcauuagucagauuccuc

SEQ ID NO: 473962 - RNA, 19 nt, Artificial Sequence
  Description of Artificial Sequence: Synthetic oligonucleotide
aucaugguuauacgucaca

SEQ ID NO: 473963 - RNA, 19 nt, Artificial Sequence
  Description of Artificial Sequence: Synthetic oligonucleotide
cacggcuuugaucauaaca

SEQ ID NO: 473964 - RNA, 19 nt, Artificial Sequence
  Description of Artificial Sequence: Synthetic oligonucleotide
caugguaaccuuccacaac

SEQ ID NO: 473965 - RNA, 19 nt, Artificial Sequence
  Description of Artificial Sequence: Synthetic oligonucleotide
ucgccucaaaggcauggcc

SEQ ID NO: 473966 - RNA, 19 nt, Artificial Sequence
  Description of Artificial Sequence: Synthetic oligonucleotide
ugcucuuuauacccauauc

SEQ ID NO: 473967 - RNA, 19 nt, Artificial Sequence
  Description of Artificial Sequence: Synthetic oligonucleotide
acuggcuacuccauuaaca

SEQ ID NO: 473968 - RNA, 19 nt, Artificial Sequence
  Description of Artificial Sequence: Synthetic oligonucleotide
gguaaccuuccacaacagg

SEQ ID NO: 473969 - RNA, 19 nt, Artificial Sequence
  Description of Artificial Sequence: Synthetic oligonucleotide
caauccugaacugccauuc

SEQ ID NO: 473970 - RNA, 19 nt, Artificial Sequence
  Description of Artificial Sequence: Synthetic oligonucleotide
cugacgggcgaucugcggc

SEQ ID NO: 473971 - RNA, 19 nt, Artificial Sequence
  Description of Artificial Sequence: Synthetic oligonucleotide
agcauagcaucaucauuga

SEQ ID NO: 473972 - RNA, 19 nt, Artificial Sequence
  Description of Artificial Sequence: Synthetic oligonucleotide
ugcaauccugaacugccau

SEQ ID NO: 473973 - RNA, 19 nt, Artificial Sequence
  Description of Artificial Sequence: Synthetic oligonucleotide
ucugcggcccauacaacaa

SEQ ID NO: 473974 - RNA, 19 nt, Artificial Sequence
  Description of Artificial Sequence: Synthetic oligonucleotide
aguacacugcauugccaug

SEQ ID NO: 473975 - RNA, 19 nt, Artificial Sequence
  Description of Artificial Sequence: Synthetic oligonucleotide
cauugguucguaagccaac

SEQ ID NO: 473976 - RNA, 19 nt, Artificial Sequence
  Description of Artificial Sequence: Synthetic oligonucleotide
aguuucgacagggcugacg

SEQ ID NO: 473977 - RNA, 19 nt, Artificial Sequence
  Description of Artificial Sequence: Synthetic oligonucleotide
gcucuuggccacuugaaug

SEQ ID NO: 473978 - RNA, 19 nt, Artificial Sequence
  Description of Artificial Sequence: Synthetic oligonucleotide
gcuaugacgcugugggugg

SEQ ID NO: 473979 - RNA, 19 nt, Artificial Sequence
  Description of Artificial Sequence: Synthetic oligonucleotide
auagggacccgccgcaacu

SEQ ID NO: 473980 - RNA, 19 nt, Artificial Sequence
  Description of Artificial Sequence: Synthetic oligonucleotide
ugguuauacgucacagcua

SEQ ID NO: 473981 - RNA, 19 nt, Artificial Sequence
  Description of Artificial Sequence: Synthetic oligonucleotide
uuucgacagggcugacggg

SEQ ID NO: 473982 - RNA, 19 nt, Artificial Sequence
  Description of Artificial Sequence: Synthetic oligonucleotide
ugacuugcauuagucagau

SEQ ID NO: 473983 - RNA, 19 nt, Artificial Sequence
  Description of Artificial Sequence: Synthetic oligonucleotide
cuguaccucaguuucgaca

SEQ ID NO: 473984 - RNA, 19 nt, Artificial Sequence
  Description of Artificial Sequence: Synthetic oligonucleotide
cugauucuaacugcucuug

SEQ ID NO: 473985 - RNA, 19 nt, Artificial Sequence
  Description of Artificial Sequence: Synthetic oligonucleotide
ggaauaaagucagugugca

SEQ ID NO: 473986 - RNA, 19 nt, Artificial Sequence
  Description of Artificial Sequence: Synthetic oligonucleotide
guagagaggugaaccaaug

SEQ ID NO: 473987 - RNA, 19 nt, Artificial Sequence
  Description of Artificial Sequence: Synthetic oligonucleotide
cuuuggagcuuuuauggua

SEQ ID NO: 473988 - RNA, 19 nt, Artificial Sequence
  Description of Artificial Sequence: Synthetic oligonucleotide
ucggaaggucucauuucca

SEQ ID NO: 473989 - RNA, 19 nt, Artificial Sequence
  Description of Artificial Sequence: Synthetic oligonucleotide
gucauguuccugguguaag

SEQ ID NO: 473990 - RNA, 19 nt, Artificial Sequence
  Description of Artificial Sequence: Synthetic oligonucleotide
auaugacccaucaugguua

SEQ ID NO: 473991 - RNA, 19 nt, Artificial Sequence
  Description of Artificial Sequence: Synthetic oligonucleotide
cuuggcuaugacgcugugg

SEQ ID NO: 473992 - RNA, 19 nt, Artificial Sequence
  Description of Artificial Sequence: Synthetic oligonucleotide
gagaauugaucuugugugu

SEQ ID NO: 473993 - RNA, 19 nt, Artificial Sequence
  Description of Artificial Sequence: Synthetic oligonucleotide
agguaagauguugugcugu

SEQ ID NO: 473994 - RNA, 19 nt, Artificial Sequence
  Description of Artificial Sequence: Synthetic oligonucleotide
uuaccacuucucagaguca

SEQ ID NO: 473995 - RNA, 19 nt, Artificial Sequence
  Description of Artificial Sequence: Synthetic oligonucleotide
cagcuucgaacucugggug

SEQ ID NO: 473996 - RNA, 19 nt, Artificial Sequence
  Description of Artificial Sequence: Synthetic oligonucleotide
acugcugaaugaaaacgga

SEQ ID NO: 473997 - RNA, 19 nt, Artificial Sequence
  Description of Artificial Sequence: Synthetic oligonucleotide
uuggauuuacuggcuacuc

SEQ ID NO: 473998 - RNA, 19 nt, Artificial Sequence
  Description of Artificial Sequence: Synthetic oligonucleotide
uaaugauccucaugccuuu

SEQ ID NO: 473999 - RNA, 19 nt, Artificial Sequence
  Description of Artificial Sequence: Synthetic oligonucleotide
uuaugguaugcuccaucuu

SEQ ID NO: 474000 - RNA, 19 nt, Artificial Sequence
  Description of Artificial Sequence: Synthetic oligonucleotide
gaucuugugugugaagucu

SEQ ID NO: 474001 - RNA, 19 nt, Artificial Sequence
  Description of Artificial Sequence: Synthetic oligonucleotide
cugaugaaggcuguaccuc

SEQ ID NO: 474002 - RNA, 19 nt, Artificial Sequence
  Description of Artificial Sequence: Synthetic oligonucleotide
accaaggacucggaagguc

SEQ ID NO: 474003 - RNA, 19 nt, Artificial Sequence
  Description of Artificial Sequence: Synthetic oligonucleotide
uguucguaucacccugcaa

SEQ ID NO: 474004 - RNA, 19 nt, Artificial Sequence
  Description of Artificial Sequence: Synthetic oligonucleotide
augacuugcauuagucaga

SEQ ID NO: 474005 - RNA, 19 nt, Artificial Sequence
  Description of Artificial Sequence: Synthetic oligonucleotide
guacccaauuuucccagca

SEQ ID NO: 474006 - RNA, 19 nt, Artificial Sequence
  Description of Artificial Sequence: Synthetic oligonucleotide
ccguacuccaguuucaauc

SEQ ID NO: 474007 - RNA, 19 nt, Artificial Sequence
  Description of Artificial Sequence: Synthetic oligonucleotide
gauagggacccgccgcaac

SEQ ID NO: 474008 - RNA, 19 nt, Artificial Sequence
  Description of Artificial Sequence: Synthetic oligonucleotide
cuacagucucuuucaaaca

SEQ ID NO: 474009 - RNA, 19 nt, Artificial Sequence
  Description of Artificial Sequence: Synthetic oligonucleotide
cuaaugauccucaugccuu

SEQ ID NO: 474010 - RNA, 19 nt, Artificial Sequence
  Description of Artificial Sequence: Synthetic oligonucleotide
gguagguacagccucccuc

SEQ ID NO: 474011 - RNA, 19 nt, Artificial Sequence
  Description of Artificial Sequence: Synthetic oligonucleotide
uccacuaaaggcgcauguc

SEQ ID NO: 474012 - RNA, 19 nt, Artificial Sequence
  Description of Artificial Sequence: Synthetic oligonucleotide
agacuguaugcccauucuu

SEQ ID NO: 474013 - RNA, 19 nt, Artificial Sequence
  Description of Artificial Sequence: Synthetic oligonucleotide
cugguguaagagauauuca

SEQ ID NO: 474014 - RNA, 19 nt, Artificial Sequence
  Description of Artificial Sequence: Synthetic oligonucleotide
aggauagggacccgccgca

SEQ ID NO: 474015 - RNA, 19 nt, Artificial Sequence
  Description of Artificial Sequence: Synthetic oligonucleotide
ugagauggagcagggccga

SEQ ID NO: 474016 - RNA, 19 nt, Artificial Sequence
  Description of Artificial Sequence: Synthetic oligonucleotide
ucuagagauucaggaggca

SEQ ID NO: 474017 - RNA, 19 nt, Artificial Sequence
  Description of Artificial Sequence: Synthetic oligonucleotide
gaugugcucuuuauaccca

SEQ ID NO: 474018 - RNA, 19 nt, Artificial Sequence
  Description of Artificial Sequence: Synthetic oligonucleotide
uaggugcgauaguaccucc

SEQ ID NO: 474019 - RNA, 19 nt, Artificial Sequence
  Description of Artificial Sequence: Synthetic oligonucleotide
gucauaaugcacugagacu

SEQ ID NO: 474020 - RNA, 19 nt, Artificial Sequence
  Description of Artificial Sequence: Synthetic oligonucleotide
agcucuuggccacuugaau

SEQ ID NO: 474021 - RNA, 19 nt, Artificial Sequence
  Description of Artificial Sequence: Synthetic oligonucleotide
uugccguacuccaguuuca

SEQ ID NO: 474022 - RNA, 19 nt, Artificial Sequence
  Description of Artificial Sequence: Synthetic oligonucleotide
aggugcgauaguaccuccc

SEQ ID NO: 474023 - RNA, 19 nt, Artificial Sequence
  Description of Artificial Sequence: Synthetic oligonucleotide
uucaaugguuccagucaua

SEQ ID NO: 474024 - RNA, 19 nt, Artificial Sequence
  Description of Artificial Sequence: Synthetic oligonucleotide
ggcuaugacgcugugggug

SEQ ID NO: 474025 - RNA, 19 nt, Artificial Sequence
  Description of Artificial Sequence: Synthetic oligonucleotide
cuccacugaacuaaaauuu

SEQ ID NO: 474026 - RNA, 19 nt, Artificial Sequence
  Description of Artificial Sequence: Synthetic oligonucleotide
uuccugucggccucacugu

SEQ ID NO: 474027 - RNA, 19 nt, Artificial Sequence
  Description of Artificial Sequence: Synthetic oligonucleotide
cuacuccauuaacagaaga

SEQ ID NO: 474028 - RNA, 19 nt, Artificial Sequence
  Description of Artificial Sequence: Synthetic oligonucleotide
cagugugcacauucccagc

SEQ ID NO: 474029 - RNA, 19 nt, Artificial Sequence
  Description of Artificial Sequence: Synthetic oligonucleotide
caccaaacaccugaacuuc

SEQ ID NO: 474030 - RNA, 19 nt, Artificial Sequence
  Description of Artificial Sequence: Synthetic oligonucleotide
aacuccacuaaaggcgcau

SEQ ID NO: 474031 - RNA, 19 nt, Artificial Sequence
  Description of Artificial Sequence: Synthetic oligonucleotide
ugcaugucauaugacccau

SEQ ID NO: 474032 - RNA, 19 nt, Artificial Sequence
  Description of Artificial Sequence: Synthetic oligonucleotide
auucucgccucaaaggcau

SEQ ID NO: 474033 - RNA, 19 nt, Artificial Sequence
  Description of Artificial Sequence: Synthetic oligonucleotide
caaugguccggccccuggc

SEQ ID NO: 474034 - RNA, 19 nt, Artificial Sequence
  Description of Artificial Sequence: Synthetic oligonucleotide
cuguuugcaaugaggaccu

SEQ ID NO: 474035 - RNA, 19 nt, Artificial Sequence
  Description of Artificial Sequence: Synthetic oligonucleotide
cugaaugaaaacggagaga

SEQ ID NO: 474036 - RNA, 19 nt, Artificial Sequence
  Description of Artificial Sequence: Synthetic oligonucleotide
acagccggagcaggaaguc

SEQ ID NO: 474037 - RNA, 19 nt, Artificial Sequence
  Description of Artificial Sequence: Synthetic oligonucleotide
gguucguaagccaacaaua

SEQ ID NO: 474038 - RNA, 19 nt, Artificial Sequence
  Description of Artificial Sequence: Synthetic oligonucleotide
ucguaucacccugcaagca

SEQ ID NO: 474039 - RNA, 19 nt, Artificial Sequence
  Description of Artificial Sequence: Synthetic oligonucleotide
augucauaugacccaucau

SEQ ID NO: 474040 - RNA, 19 nt, Artificial Sequence
  Description of Artificial Sequence: Synthetic oligonucleotide
cagggccgauggaauaugc

SEQ ID NO: 474041 - RNA, 19 nt, Artificial Sequence
  Description of Artificial Sequence: Synthetic oligonucleotide
cauauccuggauggauggc

SEQ ID NO: 474042 - RNA, 19 nt, Artificial Sequence
  Description of Artificial Sequence: Synthetic oligonucleotide
gucggccucacuguaaaca

SEQ ID NO: 474043 - RNA, 19 nt, Artificial Sequence
  Description of Artificial Sequence: Synthetic oligonucleotide
gcacacuacagucucuuuc

SEQ ID NO: 474044 - RNA, 19 nt, Artificial Sequence
  Description of Artificial Sequence: Synthetic oligonucleotide
guaccucaguuucgacagg

SEQ ID NO: 474045 - RNA, 19 nt, Artificial Sequence
  Description of Artificial Sequence: Synthetic oligonucleotide
aagcgcuggucaugucucu

SEQ ID NO: 474046 - RNA, 19 nt, Artificial Sequence
  Description of Artificial Sequence: Synthetic oligonucleotide
gcgauaguaccucccuggg

SEQ ID NO: 474047 - RNA, 19 nt, Artificial Sequence
  Description of Artificial Sequence: Synthetic oligonucleotide
guuauacgucacagcuacg

SEQ ID NO: 474048 - RNA, 19 nt, Artificial Sequence
  Description of Artificial Sequence: Synthetic oligonucleotide
agggacccgccgcaacugg

SEQ ID NO: 474049 - RNA, 19 nt, Artificial Sequence
  Description of Artificial Sequence: Synthetic oligonucleotide
gucagccuucuuugauggg

SEQ ID NO: 474050 - RNA, 19 nt, Artificial Sequence
  Description of Artificial Sequence: Synthetic oligonucleotide
gcacuugcuguauugggca

SEQ ID NO: 474051 - RNA, 19 nt, Artificial Sequence
  Description of Artificial Sequence: Synthetic oligonucleotide
cauaggugcgauaguaccu

SEQ ID NO: 474052 - RNA, 19 nt, Artificial Sequence
  Description of Artificial Sequence: Synthetic oligonucleotide
gcgagcugauucuaacugc

SEQ ID NO: 474053 - RNA, 19 nt, Artificial Sequence
  Description of Artificial Sequence: Synthetic oligonucleotide
cauaugacccaucaugguu

SEQ ID NO: 474054 - RNA, 19 nt, Artificial Sequence
  Description of Artificial Sequence: Synthetic oligonucleotide
uuccaaucugcaugucaua

SEQ ID NO: 474055 - RNA, 19 nt, Artificial Sequence
  Description of Artificial Sequence: Synthetic oligonucleotide
uaucuacaugcaugguguu

SEQ ID NO: 474056 - RNA, 19 nt, Artificial Sequence
  Description of Artificial Sequence: Synthetic oligonucleotide
uaguaccucccuggguucc

SEQ ID NO: 474057 - RNA, 19 nt, Artificial Sequence
  Description of Artificial Sequence: Synthetic oligonucleotide
gugcgauaguaccucccug

SEQ ID NO: 474058 - RNA, 19 nt, Artificial Sequence
  Description of Artificial Sequence: Synthetic oligonucleotide
gucaugucucucucuuuga

SEQ ID NO: 474059 - RNA, 19 nt, Artificial Sequence
  Description of Artificial Sequence: Synthetic oligonucleotide
cuuagcuucccugcgagcu

SEQ ID NO: 474060 - RNA, 19 nt, Artificial Sequence
  Description of Artificial Sequence: Synthetic oligonucleotide
cuggguuccuucugagcuc

SEQ ID NO: 474061 - RNA, 19 nt, Artificial Sequence
  Description of Artificial Sequence: Synthetic oligonucleotide
acgucacagcuacgacuac

SEQ ID NO: 474062 - RNA, 19 nt, Artificial Sequence
  Description of Artificial Sequence: Synthetic oligonucleotide
ggauuaauaccaggcgcug

SEQ ID NO: 474063 - RNA, 19 nt, Artificial Sequence
  Description of Artificial Sequence: Synthetic oligonucleotide
cugcggcccauacaacaag

SEQ ID NO: 474064 - RNA, 19 nt, Artificial Sequence
  Description of Artificial Sequence: Synthetic oligonucleotide
cauuagucagauuccuccu

SEQ ID NO: 474065 - RNA, 19 nt, Artificial Sequence
  Description of Artificial Sequence: Synthetic oligonucleotide
uuccaccaagucaguucca

SEQ ID NO: 474066 - RNA, 19 nt, Artificial Sequence
  Description of Artificial Sequence: Synthetic oligonucleotide
aaguccacauugguucgua

SEQ ID NO: 474067 - RNA, 19 nt, Artificial Sequence
  Description of Artificial Sequence: Synthetic oligonucleotide
acuccacuaaaggcgcaug

SEQ ID NO: 474068 - RNA, 19 nt, Artificial Sequence
  Description of Artificial Sequence: Synthetic oligonucleotide
agucaguuccagugaucau

SEQ ID NO: 474069 - RNA, 19 nt, Artificial Sequence
  Description of Artificial Sequence: Synthetic oligonucleotide
auguuccacuuguagucuu

SEQ ID NO: 474070 - RNA, 19 nt, Artificial Sequence
  Description of Artificial Sequence: Synthetic oligonucleotide
agcgcuggucaugucucuc

SEQ ID NO: 474071 - RNA, 19 nt, Artificial Sequence
  Description of Artificial Sequence: Synthetic oligonucleotide
ccauaucucuaauugcaga

SEQ ID NO: 474072 - RNA, 19 nt, Artificial Sequence
  Description of Artificial Sequence: Synthetic oligonucleotide
uucucgccucaaaggcaug

SEQ ID NO: 474073 - RNA, 19 nt, Artificial Sequence
  Description of Artificial Sequence: Synthetic oligonucleotide
uagggacccgccgcaacug

SEQ ID NO: 474074 - RNA, 19 nt, Artificial Sequence
  Description of Artificial Sequence: Synthetic oligonucleotide
cucgccucaaaggcauggc

SEQ ID NO: 474075 - RNA, 19 nt, Artificial Sequence
  Description of Artificial Sequence: Synthetic oligonucleotide
ccuaucuaccacagccagc

SEQ ID NO: 474076 - RNA, 19 nt, Artificial Sequence
  Description of Artificial Sequence: Synthetic oligonucleotide
cuuuggcuguucguaucac

SEQ ID NO: 474077 - RNA, 19 nt, Artificial Sequence
  Description of Artificial Sequence: Synthetic oligonucleotide
agucauguuccugguguaa

SEQ ID NO: 474078 - RNA, 19 nt, Artificial Sequence
  Description of Artificial Sequence: Synthetic oligonucleotide
caaugaucuucugaugucu

SEQ ID NO: 474079 - RNA, 19 nt, Artificial Sequence
  Description of Artificial Sequence: Synthetic oligonucleotide
gugaaccaaugguccggcc

SEQ ID NO: 474080 - RNA, 19 nt, Artificial Sequence
  Description of Artificial Sequence: Synthetic oligonucleotide
gacuuggaugugcucuuua

SEQ ID NO: 474081 - RNA, 19 nt, Artificial Sequence
  Description of Artificial Sequence: Synthetic oligonucleotide
agcccugacugcggccucc

SEQ ID NO: 474082 - RNA, 19 nt, Artificial Sequence
  Description of Artificial Sequence: Synthetic oligonucleotide
guucguaagccaacaauau

SEQ ID NO: 474083 - RNA, 19 nt, Artificial Sequence
  Description of Artificial Sequence: Synthetic oligonucleotide
gggguagagaggugaacca

SEQ ID NO: 474084 - RNA, 19 nt, Artificial Sequence
  Description of Artificial Sequence: Synthetic oligonucleotide
ggugaaccaaugguccggc

SEQ ID NO: 474085 - RNA, 19 nt, Artificial Sequence
  Description of Artificial Sequence: Synthetic oligonucleotide
gagggauuucuuccuggcu

SEQ ID NO: 474086 - RNA, 19 nt, Artificial Sequence
  Description of Artificial Sequence: Synthetic oligonucleotide
ugucggccucacuguaaac

SEQ ID NO: 474087 - RNA, 19 nt, Artificial Sequence
  Description of Artificial Sequence: Synthetic oligonucleotide
gguuccuaucuaccacagc

SEQ ID NO: 474088 - RNA, 19 nt, Artificial Sequence
  Description of Artificial Sequence: Synthetic oligonucleotide
ccugcgagcugauucuaac

SEQ ID NO: 474089 - RNA, 19 nt, Artificial Sequence
  Description of Artificial Sequence: Synthetic oligonucleotide
agugaucauuucagugaca

SEQ ID NO: 474090 - RNA, 19 nt, Artificial Sequence
  Description of Artificial Sequence: Synthetic oligonucleotide
cuaugacgcuguggguggg

SEQ ID NO: 474091 - RNA, 19 nt, Artificial Sequence
  Description of Artificial Sequence: Synthetic oligonucleotide
gucaguuccagugaucauu

SEQ ID NO: 474092 - RNA, 19 nt, Artificial Sequence
  Description of Artificial Sequence: Synthetic oligonucleotide
ugccguacuccaguuucaa

SEQ ID NO: 474093 - RNA, 19 nt, Artificial Sequence
  Description of Artificial Sequence: Synthetic oligonucleotide
gacccgccgcaacugguuc

SEQ ID NO: 474094 - RNA, 19 nt, Artificial Sequence
  Description of Artificial Sequence: Synthetic oligonucleotide
cauugccagguagcucugc

SEQ ID NO: 474095 - RNA, 19 nt, Artificial Sequence
  Description of Artificial Sequence: Synthetic oligonucleotide
gaacuuggauuuacuggcu

SEQ ID NO: 474096 - RNA, 19 nt, Artificial Sequence
  Description of Artificial Sequence: Synthetic oligonucleotide
acccugcaagcaauuucuc

SEQ ID NO: 474097 - RNA, 19 nt, Artificial Sequence
  Description of Artificial Sequence: Synthetic oligonucleotide
guaugcccauucuuuggcu

SEQ ID NO: 474098 - RNA, 19 nt, Artificial Sequence
  Description of Artificial Sequence: Synthetic oligonucleotide
uguuggccugggcccuucu

SEQ ID NO: 474099 - RNA, 19 nt, Artificial Sequence
  Description of Artificial Sequence: Synthetic oligonucleotide
cuguucguaucacccugca

SEQ ID NO: 474100 - RNA, 19 nt, Artificial Sequence
  Description of Artificial Sequence: Synthetic oligonucleotide
gaucugcggcccauacaac

SEQ ID NO: 474101 - RNA, 19 nt, Artificial Sequence
  Description of Artificial Sequence: Synthetic oligonucleotide
uccugguguaagagauauu

SEQ ID NO: 474102 - RNA, 19 nt, Artificial Sequence
  Description of Artificial Sequence: Synthetic oligonucleotide
cugucggccucacuguaaa

SEQ ID NO: 474103 - RNA, 19 nt, Artificial Sequence
  Description of Artificial Sequence: Synthetic oligonucleotide
ccaacaauauuguacugau

SEQ ID NO: 474104 - RNA, 19 nt, Artificial Sequence
  Description of Artificial Sequence: Synthetic oligonucleotide
agggccgauggaauaugcu

SEQ ID NO: 474105 - RNA, 19 nt, Artificial Sequence
  Description of Artificial Sequence: Synthetic oligonucleotide
cagccggagcaggaagucc

SEQ ID NO: 474106 - RNA, 19 nt, Artificial Sequence
  Description of Artificial Sequence: Synthetic oligonucleotide
cucguggugcugaggaaua

SEQ ID NO: 474107 - RNA, 19 nt, Artificial Sequence
  Description of Artificial Sequence: Synthetic oligonucleotide
cagacuguaugcccauucu

SEQ ID NO: 474108 - RNA, 19 nt, Artificial Sequence
  Description of Artificial Sequence: Synthetic oligonucleotide
ucguggugcugaggaauaa

SEQ ID NO: 474109 - RNA, 19 nt, Artificial Sequence
  Description of Artificial Sequence: Synthetic oligonucleotide
ggugcgauaguaccucccu

SEQ ID NO: 474110 - RNA, 19 nt, Artificial Sequence
  Description of Artificial Sequence: Synthetic oligonucleotide
aguaccucccuggguuccu

SEQ ID NO: 474111 - RNA, 19 nt, Artificial Sequence
  Description of Artificial Sequence: Synthetic oligonucleotide
gcuguucguaucacccugc

SEQ ID NO: 474112 - RNA, 19 nt, Artificial Sequence
  Description of Artificial Sequence: Synthetic oligonucleotide
gggcugacgggcgaucugc

SEQ ID NO: 474113 - RNA, 19 nt, Artificial Sequence
  Description of Artificial Sequence: Synthetic oligonucleotide
gaacuccacuaaaggcgca

SEQ ID NO: 474114 - RNA, 19 nt, Artificial Sequence
  Description of Artificial Sequence: Synthetic oligonucleotide
ccaaugguccggccccugg

SEQ ID NO: 474115 - RNA, 19 nt, Artificial Sequence
  Description of Artificial Sequence: Synthetic oligonucleotide
guuggccugggcccuucuc

SEQ ID NO: 474116 - RNA, 19 nt, Artificial Sequence
  Description of Artificial Sequence: Synthetic oligonucleotide
gcuacgacuacaucacuuu

SEQ ID NO: 474117 - RNA, 19 nt, Artificial Sequence
  Description of Artificial Sequence: Synthetic oligonucleotide
cuccacuaaaggcgcaugu

SEQ ID NO: 474118 - RNA, 19 nt, Artificial Sequence
  Description of Artificial Sequence: Synthetic oligonucleotide
cugcgagcugauucuaacu

SEQ ID NO: 474119 - RNA, 19 nt, Artificial Sequence
  Description of Artificial Sequence: Synthetic oligonucleotide
ggcgaucugcggcccauac

SEQ ID NO: 474120 - RNA, 19 nt, Artificial Sequence
  Description of Artificial Sequence: Synthetic oligonucleotide
gccgcaacugguuccuauc

SEQ ID NO: 474121 - RNA, 19 nt, Artificial Sequence
  Description of Artificial Sequence: Synthetic oligonucleotide
caguacugccuuccaugga

SEQ ID NO: 474122 - RNA, 19 nt, Artificial Sequence
  Description of Artificial Sequence: Synthetic oligonucleotide
ggcccauacaacaagcuuu

SEQ ID NO: 474123 - RNA, 19 nt, Artificial Sequence
  Description of Artificial Sequence: Synthetic oligonucleotide
gaaguccacauugguucgu

SEQ ID NO: 474124 - RNA, 19 nt, Artificial Sequence
  Description of Artificial Sequence: Synthetic oligonucleotide
ccagcuucgaacucugggu

SEQ ID NO: 474125 - RNA, 19 nt, Artificial Sequence
  Description of Artificial Sequence: Synthetic oligonucleotide
gacgggcgaucugcggccc

SEQ ID NO: 474126 - RNA, 19 nt, Artificial Sequence
  Description of Artificial Sequence: Synthetic oligonucleotide
caucagagagucuccgguu

SEQ ID NO: 474127 - RNA, 19 nt, Artificial Sequence
  Description of Artificial Sequence: Synthetic oligonucleotide
ccaaggacucggaaggucu

SEQ ID NO: 474128 - RNA, 19 nt, Artificial Sequence
  Description of Artificial Sequence: Synthetic oligonucleotide
cgacuacaucacuuuuacc

SEQ ID NO: 474129 - RNA, 19 nt, Artificial Sequence
  Description of Artificial Sequence: Synthetic oligonucleotide
caaugaggaccuuggcaau

SEQ ID NO: 474130 - RNA, 19 nt, Artificial Sequence
  Description of Artificial Sequence: Synthetic oligonucleotide
gcauagcaucaucauugaa

SEQ ID NO: 474131 - RNA, 19 nt, Artificial Sequence
  Description of Artificial Sequence: Synthetic oligonucleotide
gguagagaggugaaccaau

SEQ ID NO: 474132 - RNA, 19 nt, Artificial Sequence
  Description of Artificial Sequence: Synthetic oligonucleotide
cugaucuaaugauccucau

SEQ ID NO: 474133 - RNA, 19 nt, Artificial Sequence
  Description of Artificial Sequence: Synthetic oligonucleotide
accaaugguccggccccug

SEQ ID NO: 474134 - RNA, 19 nt, Artificial Sequence
  Description of Artificial Sequence: Synthetic oligonucleotide
cgaucauaaccaucagaga

SEQ ID NO: 474135 - RNA, 19 nt, Artificial Sequence
  Description of Artificial Sequence: Synthetic oligonucleotide
gggucauaaugcacugaga

SEQ ID NO: 474136 - RNA, 19 nt, Artificial Sequence
  Description of Artificial Sequence: Synthetic oligonucleotide
cuacgacuacaucacuuuu

SEQ ID NO: 474137 - RNA, 19 nt, Artificial Sequence
  Description of Artificial Sequence: Synthetic oligonucleotide
ggccagacagccggagcag

SEQ ID NO: 474138 - RNA, 19 nt, Artificial Sequence
  Description of Artificial Sequence: Synthetic oligonucleotide
ccauaaugaauuccacagu

SEQ ID NO: 474139 - RNA, 19 nt, Artificial Sequence
  Description of Artificial Sequence: Synthetic oligonucleotide
ccaucagagagucuccggu

SEQ ID NO: 474140 - RNA, 19 nt, Artificial Sequence
  Description of Artificial Sequence: Synthetic oligonucleotide
uugcaaucauggggucaua

SEQ ID NO: 474141 - RNA, 19 nt, Artificial Sequence
  Description of Artificial Sequence: Synthetic oligonucleotide
cuaaaggcgcaugucuguu

SEQ ID NO: 474142 - RNA, 19 nt, Artificial Sequence
  Description of Artificial Sequence: Synthetic oligonucleotide
aggguccucugcauauauu

SEQ ID NO: 474143 - RNA, 19 nt, Artificial Sequence
  Description of Artificial Sequence: Synthetic oligonucleotide
acgggcgaucugcggccca

SEQ ID NO: 474144 - RNA, 19 nt, Artificial Sequence
  Description of Artificial Sequence: Synthetic oligonucleotide
uguuugcaaugaggaccuu

SEQ ID NO: 474145 - RNA, 19 nt, Artificial Sequence
  Description of Artificial Sequence: Synthetic oligonucleotide
acgcacggcuuugaucaua

SEQ ID NO: 474146 - RNA, 19 nt, Artificial Sequence
  Description of Artificial Sequence: Synthetic oligonucleotide
caggguccucugcauauau

SEQ ID NO: 474147 - RNA, 19 nt, Artificial Sequence
  Description of Artificial Sequence: Synthetic oligonucleotide
cgcaugucuguuggccugg

SEQ ID NO: 474148 - RNA, 19 nt, Artificial Sequence
  Description of Artificial Sequence: Synthetic oligonucleotide
gcaauccugaacugccauu

SEQ ID NO: 474149 - RNA, 19 nt, Artificial Sequence
  Description of Artificial Sequence: Synthetic oligonucleotide
cacuucucagagucauguu

SEQ ID NO: 474150 - RNA, 19 nt, Artificial Sequence
  Description of Artificial Sequence: Synthetic oligonucleotide
cagcuacgacuacaucacu

SEQ ID NO: 474151 - RNA, 19 nt, Artificial Sequence
  Description of Artificial Sequence: Synthetic oligonucleotide
caguuucgacagggcugac

SEQ ID NO: 474152 - RNA, 19 nt, Artificial Sequence
  Description of Artificial Sequence: Synthetic oligonucleotide
gacuugcauuagucagauu

SEQ ID NO: 474153 - RNA, 19 nt, Artificial Sequence
  Description of Artificial Sequence: Synthetic oligonucleotide
cagaugaaggagggccuau

SEQ ID NO: 474154 - RNA, 19 nt, Artificial Sequence
  Description of Artificial Sequence: Synthetic oligonucleotide
ggauagggacccgccgcaa

SEQ ID NO: 474155 - RNA, 19 nt, Artificial Sequence
  Description of Artificial Sequence: Synthetic oligonucleotide
gcccauucuuuggcuguuc

SEQ ID NO: 474156 - RNA, 19 nt, Artificial Sequence
  Description of Artificial Sequence: Synthetic oligonucleotide
gcggcccauacaacaagcu

SEQ ID NO: 474157 - RNA, 19 nt, Artificial Sequence
  Description of Artificial Sequence: Synthetic oligonucleotide
cccugcgagcugauucuaa

SEQ ID NO: 474158 - RNA, 19 nt, Artificial Sequence
  Description of Artificial Sequence: Synthetic oligonucleotide
cgcaacugguuccuaucua

SEQ ID NO: 474159 - RNA, 19 nt, Artificial Sequence
  Description of Artificial Sequence: Synthetic oligonucleotide
caccacgcacggcuuugau

SEQ ID NO: 474160 - RNA, 19 nt, Artificial Sequence
  Description of Artificial Sequence: Synthetic oligonucleotide
cgauaguaccucccugggu

SEQ ID NO: 474161 - RNA, 19 nt, Artificial Sequence
  Description of Artificial Sequence: Synthetic oligonucleotide
guaccucccuggguuccuu

SEQ ID NO: 474162 - RNA, 19 nt, Artificial Sequence
  Description of Artificial Sequence: Synthetic oligonucleotide
ccaccacgcacggcuuuga

SEQ ID NO: 474163 - RNA, 19 nt, Artificial Sequence
  Description of Artificial Sequence: Synthetic oligonucleotide
cggcccauacaacaagcuu

SEQ ID NO: 474164 - RNA, 19 nt, Artificial Sequence
  Description of Artificial Sequence: Synthetic oligonucleotide
cccgccgcaacugguuccu

SEQ ID NO: 474165 - RNA, 19 nt, Artificial Sequence
  Description of Artificial Sequence: Synthetic oligonucleotide
cgccgcaacugguuccuau

SEQ ID NO: 474166 - RNA, 19 nt, Artificial Sequence
  Description of Artificial Sequence: Synthetic oligonucleotide
cgggcgaucugcggcccau

SEQ ID NO: 474167 - RNA, 19 nt, Artificial Sequence
  Description of Artificial Sequence: Synthetic oligonucleotide
ccgccgcaacugguuccua

SEQ ID NO: 474168 - RNA, 19 nt, Artificial Sequence
  Description of Artificial Sequence: Synthetic oligonucleotide
aauaucauuauguaccgcc

SEQ ID NO: 474169 - RNA, 19 nt, Artificial Sequence
  Description of Artificial Sequence: Synthetic oligonucleotide
uccaauaucauuauguacc

SEQ ID NO: 474170 - RNA, 19 nt, Artificial Sequence
  Description of Artificial Sequence: Synthetic oligonucleotide
ucugauaugggcuccaugg

SEQ ID NO: 474171 - RNA, 19 nt, Artificial Sequence
  Description of Artificial Sequence: Synthetic oligonucleotide
ugugauuccgcaugaaggg

SEQ ID NO: 474172 - RNA, 19 nt, Artificial Sequence
  Description of Artificial Sequence: Synthetic oligonucleotide
aacgggagaucacaaaggg

SEQ ID NO: 474173 - RNA, 19 nt, Artificial Sequence
  Description of Artificial Sequence: Synthetic oligonucleotide
agugguaugauguauccug

SEQ ID NO: 474174 - RNA, 19 nt, Artificial Sequence
  Description of Artificial Sequence: Synthetic oligonucleotide
aguuuucccaggcucaagc

SEQ ID NO: 474175 - RNA, 19 nt, Artificial Sequence
  Description of Artificial Sequence: Synthetic oligonucleotide
auccauauuccaucgaagg

SEQ ID NO: 474176 - RNA, 19 nt, Artificial Sequence
  Description of Artificial Sequence: Synthetic oligonucleotide
uccauauuccaucgaaggg

SEQ ID NO: 474177 - RNA, 19 nt, Artificial Sequence
  Description of Artificial Sequence: Synthetic oligonucleotide
cuugcugugcacaacagac

SEQ ID NO: 474178 - RNA, 19 nt, Artificial Sequence
  Description of Artificial Sequence: Synthetic oligonucleotide
aucauuauguaccgccggc

SEQ ID NO: 474179 - RNA, 19 nt, Artificial Sequence
  Description of Artificial Sequence: Synthetic oligonucleotide
aggagcucgacacaucccc

SEQ ID NO: 474180 - RNA, 19 nt, Artificial Sequence
  Description of Artificial Sequence: Synthetic oligonucleotide
cuugggucaagccauacag

SEQ ID NO: 474181 - RNA, 19 nt, Artificial Sequence
  Description of Artificial Sequence: Synthetic oligonucleotide
auaacgcaaagugaaggcc

SEQ ID NO: 474182 - RNA, 19 nt, Artificial Sequence
  Description of Artificial Sequence: Synthetic oligonucleotide
guaagaaagaugcucccag

SEQ ID NO: 474183 - RNA, 19 nt, Artificial Sequence
  Description of Artificial Sequence: Synthetic oligonucleotide
aguauggcggcaugaaggg

SEQ ID NO: 474184 - RNA, 19 nt, Artificial Sequence
  Description of Artificial Sequence: Synthetic oligonucleotide
cauaacgcaaagugaaggc

SEQ ID NO: 474185 - RNA, 19 nt, Artificial Sequence
  Description of Artificial Sequence: Synthetic oligonucleotide
aauuggguccagcguacac

SEQ ID NO: 474186 - RNA, 19 nt, Artificial Sequence
  Description of Artificial Sequence: Synthetic oligonucleotide
gaaggugcuagauccaggc

SEQ ID NO: 474187 - RNA, 19 nt, Artificial Sequence
  Description of Artificial Sequence: Synthetic oligonucleotide
auaucuggcacagaguaag

SEQ ID NO: 474188 - RNA, 19 nt, Artificial Sequence
  Description of Artificial Sequence: Synthetic oligonucleotide
uccagugaccagcauauug

SEQ ID NO: 474189 - RNA, 19 nt, Artificial Sequence
  Description of Artificial Sequence: Synthetic oligonucleotide
aucacaaagggucguguuc

SEQ ID NO: 474190 - RNA, 19 nt, Artificial Sequence
  Description of Artificial Sequence: Synthetic oligonucleotide
guggcuacucccaagacgg

SEQ ID NO: 474191 - RNA, 19 nt, Artificial Sequence
  Description of Artificial Sequence: Synthetic oligonucleotide
gaaagggugugacccauag

SEQ ID NO: 474192 - RNA, 19 nt, Artificial Sequence
  Description of Artificial Sequence: Synthetic oligonucleotide
acuaacucauucacaaugg

SEQ ID NO: 474193 - RNA, 19 nt, Artificial Sequence
  Description of Artificial Sequence: Synthetic oligonucleotide
ugucaauccauauuccauc

SEQ ID NO: 474194 - RNA, 19 nt, Artificial Sequence
  Description of Artificial Sequence: Synthetic oligonucleotide
ucgagcgucagccacugcc

SEQ ID NO: 474195 - RNA, 19 nt, Artificial Sequence
  Description of Artificial Sequence: Synthetic oligonucleotide
guuaacgccacagccaggg

SEQ ID NO: 474196 - RNA, 19 nt, Artificial Sequence
  Description of Artificial Sequence: Synthetic oligonucleotide
uguccuuccaccagacaag

SEQ ID NO: 474197 - RNA, 19 nt, Artificial Sequence
  Description of Artificial Sequence: Synthetic oligonucleotide
gaguuggugaugaacacgc

SEQ ID NO: 474198 - RNA, 19 nt, Artificial Sequence
  Description of Artificial Sequence: Synthetic oligonucleotide
aagaacagcggagccacgg

SEQ ID NO: 474199 - RNA, 19 nt, Artificial Sequence
  Description of Artificial Sequence: Synthetic oligonucleotide
gauaugggcuccauggaag

SEQ ID NO: 474200 - RNA, 19 nt, Artificial Sequence
  Description of Artificial Sequence: Synthetic oligonucleotide
uguccagugaccagcauau

SEQ ID NO: 474201 - RNA, 19 nt, Artificial Sequence
  Description of Artificial Sequence: Synthetic oligonucleotide
ggaccagucaaucugaaac

SEQ ID NO: 474202 - RNA, 19 nt, Artificial Sequence
  Description of Artificial Sequence: Synthetic oligonucleotide
uccaagaucccaccuguug

SEQ ID NO: 474203 - RNA, 19 nt, Artificial Sequence
  Description of Artificial Sequence: Synthetic oligonucleotide
auuauguaccgccggccac

SEQ ID NO: 474204 - RNA, 19 nt, Artificial Sequence
  Description of Artificial Sequence: Synthetic oligonucleotide
guagaagguccccaauugg

SEQ ID NO: 474205 - RNA, 19 nt, Artificial Sequence
  Description of Artificial Sequence: Synthetic oligonucleotide
agcgaggccagugaugugc

SEQ ID NO: 474206 - RNA, 19 nt, Artificial Sequence
  Description of Artificial Sequence: Synthetic oligonucleotide
gacaauagcaguggaggag

SEQ ID NO: 474207 - RNA, 19 nt, Artificial Sequence
  Description of Artificial Sequence: Synthetic oligonucleotide
uuagcggcugcccagucga

SEQ ID NO: 474208 - RNA, 19 nt, Artificial Sequence
  Description of Artificial Sequence: Synthetic oligonucleotide
ugcaaacccguccugggug

SEQ ID NO: 474209 - RNA, 19 nt, Artificial Sequence
  Description of Artificial Sequence: Synthetic oligonucleotide
uccccaauuggguccagcg

SEQ ID NO: 474210 - RNA, 19 nt, Artificial Sequence
  Description of Artificial Sequence: Synthetic oligonucleotide
acgccuaccagguuaaacu

SEQ ID NO: 474211 - RNA, 19 nt, Artificial Sequence
  Description of Artificial Sequence: Synthetic oligonucleotide
uccccgucaucccagaaca

SEQ ID NO: 474212 - RNA, 19 nt, Artificial Sequence
  Description of Artificial Sequence: Synthetic oligonucleotide
gaacuggucagcaaagaac

SEQ ID NO: 474213 - RNA, 19 nt, Artificial Sequence
  Description of Artificial Sequence: Synthetic oligonucleotide
ugauaugggcuccauggaa

SEQ ID NO: 474214 - RNA, 19 nt, Artificial Sequence
  Description of Artificial Sequence: Synthetic oligonucleotide
auaucauuauguaccgccg

SEQ ID NO: 474215 - RNA, 19 nt, Artificial Sequence
  Description of Artificial Sequence: Synthetic oligonucleotide
cuguuaacgccacagccag

SEQ ID NO: 474216 - RNA, 19 nt, Artificial Sequence
  Description of Artificial Sequence: Synthetic oligonucleotide
gugaaaucggggaaggugc

SEQ ID NO: 474217 - RNA, 19 nt, Artificial Sequence
  Description of Artificial Sequence: Synthetic oligonucleotide
ugauuccgcaugaaggggu

SEQ ID NO: 474218 - RNA, 19 nt, Artificial Sequence
  Description of Artificial Sequence: Synthetic oligonucleotide
ucgucauagggccuguaac

SEQ ID NO: 474219 - RNA, 19 nt, Artificial Sequence
  Description of Artificial Sequence: Synthetic oligonucleotide
uguguaggccccacgcucc

SEQ ID NO: 474220 - RNA, 19 nt, Artificial Sequence
  Description of Artificial Sequence: Synthetic oligonucleotide
ucugcuaggaccagucaau

SEQ ID NO: 474221 - RNA, 19 nt, Artificial Sequence
  Description of Artificial Sequence: Synthetic oligonucleotide
aauagcaguggaggaguag

SEQ ID NO: 474222 - RNA, 19 nt, Artificial Sequence
  Description of Artificial Sequence: Synthetic oligonucleotide
ucauugugauuccgcauga

SEQ ID NO: 474223 - RNA, 19 nt, Artificial Sequence
  Description of Artificial Sequence: Synthetic oligonucleotide
accgcgggcacauagggug

SEQ ID NO: 474224 - RNA, 19 nt, Artificial Sequence
  Description of Artificial Sequence: Synthetic oligonucleotide
aacacgccccuccgaagac

SEQ ID NO: 474225 - RNA, 19 nt, Artificial Sequence
  Description of Artificial Sequence: Synthetic oligonucleotide
ugacuuguguguaggcccc

SEQ ID NO: 474226 - RNA, 19 nt, Artificial Sequence
  Description of Artificial Sequence: Synthetic oligonucleotide
ugggccuaggaacacguac

SEQ ID NO: 474227 - RNA, 19 nt, Artificial Sequence
  Description of Artificial Sequence: Synthetic oligonucleotide
agucgaguuggugaugaac

SEQ ID NO: 474228 - RNA, 19 nt, Artificial Sequence
  Description of Artificial Sequence: Synthetic oligonucleotide
agaugucugccccaaucag

SEQ ID NO: 474229 - RNA, 19 nt, Artificial Sequence
  Description of Artificial Sequence: Synthetic oligonucleotide
gaaggugacuuguguguag

SEQ ID NO: 474230 - RNA, 19 nt, Artificial Sequence
  Description of Artificial Sequence: Synthetic oligonucleotide
uacugcugcacaacgcucu

SEQ ID NO: 474231 - RNA, 19 nt, Artificial Sequence
  Description of Artificial Sequence: Synthetic oligonucleotide
auuagcggcugcccagucg

SEQ ID NO: 474232 - RNA, 19 nt, Artificial Sequence
  Description of Artificial Sequence: Synthetic oligonucleotide
ugcccagucgaguugguga

SEQ ID NO: 474233 - RNA, 19 nt, Artificial Sequence
  Description of Artificial Sequence: Synthetic oligonucleotide
aaccaccgcgggcacauag

SEQ ID NO: 474234 - RNA, 19 nt, Artificial Sequence
  Description of Artificial Sequence: Synthetic oligonucleotide
agaagggcauaacgcaaag

SEQ ID NO: 474235 - RNA, 19 nt, Artificial Sequence
  Description of Artificial Sequence: Synthetic oligonucleotide
ucauuauguaccgccggcc

SEQ ID NO: 474236 - RNA, 19 nt, Artificial Sequence
  Description of Artificial Sequence: Synthetic oligonucleotide
ucauucacaaugguaucgu

SEQ ID NO: 474237 - RNA, 19 nt, Artificial Sequence
  Description of Artificial Sequence: Synthetic oligonucleotide
gaaauuggagacagggaca

SEQ ID NO: 474238 - RNA, 19 nt, Artificial Sequence
  Description of Artificial Sequence: Synthetic oligonucleotide
agggccuguaacucccagc

SEQ ID NO: 474239 - RNA, 19 nt, Artificial Sequence
  Description of Artificial Sequence: Synthetic oligonucleotide
aguucguugucagggcagc

SEQ ID NO: 474240 - RNA, 19 nt, Artificial Sequence
  Description of Artificial Sequence: Synthetic oligonucleotide
acaauagcaguggaggagu

SEQ ID NO: 474241 - RNA, 19 nt, Artificial Sequence
  Description of Artificial Sequence: Synthetic oligonucleotide
cuccccauaggccucgccg

SEQ ID NO: 474242 - RNA, 19 nt, Artificial Sequence
  Description of Artificial Sequence: Synthetic oligonucleotide
aacagcggagccacgguag

SEQ ID NO: 474243 - RNA, 19 nt, Artificial Sequence
  Description of Artificial Sequence: Synthetic oligonucleotide
uuauguaccgccggccacc

SEQ ID NO: 474244 - RNA, 19 nt, Artificial Sequence
  Description of Artificial Sequence: Synthetic oligonucleotide
ugggagccucuaaugaagc

SEQ ID NO: 474245 - RNA, 19 nt, Artificial Sequence
  Description of Artificial Sequence: Synthetic oligonucleotide
gcauaacgcaaagugaagg

SEQ ID NO: 474246 - RNA, 19 nt, Artificial Sequence
  Description of Artificial Sequence: Synthetic oligonucleotide
caugucaauccauauucca

SEQ ID NO: 474247 - RNA, 19 nt, Artificial Sequence
  Description of Artificial Sequence: Synthetic oligonucleotide
cagaccugaggggugaugg

SEQ ID NO: 474248 - RNA, 19 nt, Artificial Sequence
  Description of Artificial Sequence: Synthetic oligonucleotide
gacccgaguccauucagug

SEQ ID NO: 474249 - RNA, 19 nt, Artificial Sequence
  Description of Artificial Sequence: Synthetic oligonucleotide
ugaaaucggggaaggugcu

SEQ ID NO: 474250 - RNA, 19 nt, Artificial Sequence
  Description of Artificial Sequence: Synthetic oligonucleotide
uguguguaggccccacgcu

SEQ ID NO: 474251 - RNA, 19 nt, Artificial Sequence
  Description of Artificial Sequence: Synthetic oligonucleotide
cuggcggacaauagcagug

SEQ ID NO: 474252 - RNA, 19 nt, Artificial Sequence
  Description of Artificial Sequence: Synthetic oligonucleotide
acgucccgguuccagaggg

SEQ ID NO: 474253 - RNA, 19 nt, Artificial Sequence
  Description of Artificial Sequence: Synthetic oligonucleotide
uguccccucugauaugggc

SEQ ID NO: 474254 - RNA, 19 nt, Artificial Sequence
  Description of Artificial Sequence: Synthetic oligonucleotide
gacaccauuggaaaggacu

SEQ ID NO: 474255 - RNA, 19 nt, Artificial Sequence
  Description of Artificial Sequence: Synthetic oligonucleotide
uucgucauagggccuguaa

SEQ ID NO: 474256 - RNA, 19 nt, Artificial Sequence
  Description of Artificial Sequence: Synthetic oligonucleotide
uguaaacacaggugugcuc

SEQ ID NO: 474257 - RNA, 19 nt, Artificial Sequence
  Description of Artificial Sequence: Synthetic oligonucleotide
gucgaguuggugaugaaca

SEQ ID NO: 474258 - RNA, 19 nt, Artificial Sequence
  Description of Artificial Sequence: Synthetic oligonucleotide
cagagggugacccgagucc

SEQ ID NO: 474259 - RNA, 19 nt, Artificial Sequence
  Description of Artificial Sequence: Synthetic oligonucleotide
aaagggugugacccauaga

SEQ ID NO: 474260 - RNA, 19 nt, Artificial Sequence
  Description of Artificial Sequence: Synthetic oligonucleotide
cucgacacauccccugucc

SEQ ID NO: 474261 - RNA, 19 nt, Artificial Sequence
  Description of Artificial Sequence: Synthetic oligonucleotide
agaucccaccuguugaccu

SEQ ID NO: 474262 - RNA, 19 nt, Artificial Sequence
  Description of Artificial Sequence: Synthetic oligonucleotide
uguuaacgccacagccagg

SEQ ID NO: 474263 - RNA, 19 nt, Artificial Sequence
  Description of Artificial Sequence: Synthetic oligonucleotide
auaugggcuccauggaaga

SEQ ID NO: 474264 - RNA, 19 nt, Artificial Sequence
  Description of Artificial Sequence: Synthetic oligonucleotide
agguguugggauccucagg

SEQ ID NO: 474265 - RNA, 19 nt, Artificial Sequence
  Description of Artificial Sequence: Synthetic oligonucleotide
gagcuggcgguccacagac

SEQ ID NO: 474266 - RNA, 19 nt, Artificial Sequence
  Description of Artificial Sequence: Synthetic oligonucleotide
acaaagggucguguucccc

SEQ ID NO: 474267 - RNA, 19 nt, Artificial Sequence
  Description of Artificial Sequence: Synthetic oligonucleotide
ugcuagauccaggccaugc

SEQ ID NO: 474268 - RNA, 19 nt, Artificial Sequence
  Description of Artificial Sequence: Synthetic oligonucleotide
ucgaguuggugaugaacac

SEQ ID NO: 474269 - RNA, 19 nt, Artificial Sequence
  Description of Artificial Sequence: Synthetic oligonucleotide
uccagcguacacacaacuc

SEQ ID NO: 474270 - RNA, 19 nt, Artificial Sequence
  Description of Artificial Sequence: Synthetic oligonucleotide
ggugaaaucggggaaggug

SEQ ID NO: 474271 - RNA, 19 nt, Artificial Sequence
  Description of Artificial Sequence: Synthetic oligonucleotide
guugaccuccagguuaggg

SEQ ID NO: 474272 - RNA, 19 nt, Artificial Sequence
  Description of Artificial Sequence: Synthetic oligonucleotide
uucccaggcucaagcacag

SEQ ID NO: 474273 - RNA, 19 nt, Artificial Sequence
  Description of Artificial Sequence: Synthetic oligonucleotide
uucguugucagggcagccc

SEQ ID NO: 474274 - RNA, 19 nt, Artificial Sequence
  Description of Artificial Sequence: Synthetic oligonucleotide
ugaacacgccccuccgaag

SEQ ID NO: 474275 - RNA, 19 nt, Artificial Sequence
  Description of Artificial Sequence: Synthetic oligonucleotide
gaacacgccccuccgaaga

SEQ ID NO: 474276 - RNA, 19 nt, Artificial Sequence
  Description of Artificial Sequence: Synthetic oligonucleotide
agacaagggucucaggguu

SEQ ID NO: 474277 - RNA, 19 nt, Artificial Sequence
  Description of Artificial Sequence: Synthetic oligonucleotide
uggcggacaauagcagugg

SEQ ID NO: 474278 - RNA, 19 nt, Artificial Sequence
  Description of Artificial Sequence: Synthetic oligonucleotide
uugaacgggagaucacaaa

SEQ ID NO: 474279 - RNA, 19 nt, Artificial Sequence
  Description of Artificial Sequence: Synthetic oligonucleotide
augaacacgccccuccgaa

SEQ ID NO: 474280 - RNA, 19 nt, Artificial Sequence
  Description of Artificial Sequence: Synthetic oligonucleotide
ucgacacauccccugucca

SEQ ID NO: 474281 - RNA, 19 nt, Artificial Sequence
  Description of Artificial Sequence: Synthetic oligonucleotide
cucccaugagcagugagac

SEQ ID NO: 474282 - RNA, 19 nt, Artificial Sequence
  Description of Artificial Sequence: Synthetic oligonucleotide
aggugugcucugcuaggac

SEQ ID NO: 474283 - RNA, 19 nt, Artificial Sequence
  Description of Artificial Sequence: Synthetic oligonucleotide
gugauuccgcaugaagggg

SEQ ID NO: 474284 - RNA, 19 nt, Artificial Sequence
  Description of Artificial Sequence: Synthetic oligonucleotide
uccccauaggccucgccgc

SEQ ID NO: 474285 - RNA, 19 nt, Artificial Sequence
  Description of Artificial Sequence: Synthetic oligonucleotide
aacgccacagccagggcca

SEQ ID NO: 474286 - RNA, 19 nt, Artificial Sequence
  Description of Artificial Sequence: Synthetic oligonucleotide
ucgcugaaccuguauggcu

SEQ ID NO: 474287 - RNA, 19 nt, Artificial Sequence
  Description of Artificial Sequence: Synthetic oligonucleotide
uucccaauuagcggcugcc

SEQ ID NO: 474288 - RNA, 19 nt, Artificial Sequence
  Description of Artificial Sequence: Synthetic oligonucleotide
ugacccgaguccauucagu

SEQ ID NO: 474289 - RNA, 19 nt, Artificial Sequence
  Description of Artificial Sequence: Synthetic oligonucleotide
caugagccaagccaccauc

SEQ ID NO: 474290 - RNA, 19 nt, Artificial Sequence
  Description of Artificial Sequence: Synthetic oligonucleotide
caguucguugucagggcag

SEQ ID NO: 474291 - RNA, 19 nt, Artificial Sequence
  Description of Artificial Sequence: Synthetic oligonucleotide
ggguggguucuccaguucg

SEQ ID NO: 474292 - RNA, 19 nt, Artificial Sequence
  Description of Artificial Sequence: Synthetic oligonucleotide
uguauggcuccugaggcuu

SEQ ID NO: 474293 - RNA, 19 nt, Artificial Sequence
  Description of Artificial Sequence: Synthetic oligonucleotide
aaucggggaaggugcuaga

SEQ ID NO: 474294 - RNA, 19 nt, Artificial Sequence
  Description of Artificial Sequence: Synthetic oligonucleotide
ugugcacaacagaccugag

SEQ ID NO: 474295 - RNA, 19 nt, Artificial Sequence
  Description of Artificial Sequence: Synthetic oligonucleotide
cauuauguaccgccggcca

SEQ ID NO: 474296 - RNA, 19 nt, Artificial Sequence
  Description of Artificial Sequence: Synthetic oligonucleotide
uuccagagggugacccgag

SEQ ID NO: 474297 - RNA, 19 nt, Artificial Sequence
  Description of Artificial Sequence: Synthetic oligonucleotide
augucaauccauauuccau

SEQ ID NO: 474298 - RNA, 19 nt, Artificial Sequence
  Description of Artificial Sequence: Synthetic oligonucleotide
uagauccaggccaugccuu

SEQ ID NO: 474299 - RNA, 19 nt, Artificial Sequence
  Description of Artificial Sequence: Synthetic oligonucleotide
gcagugguaugauguaucc

SEQ ID NO: 474300 - RNA, 19 nt, Artificial Sequence
  Description of Artificial Sequence: Synthetic oligonucleotide
cuuggccacguguacuaac

SEQ ID NO: 474301 - RNA, 19 nt, Artificial Sequence
  Description of Artificial Sequence: Synthetic oligonucleotide
gagcucgacacauccccug

SEQ ID NO: 474302 - RNA, 19 nt, Artificial Sequence
  Description of Artificial Sequence: Synthetic oligonucleotide
uccccgggucuucacuagg

SEQ ID NO: 474303 - RNA, 19 nt, Artificial Sequence
  Description of Artificial Sequence: Synthetic oligonucleotide
ggccagcgaagguugaacg

SEQ ID NO: 474304 - RNA, 19 nt, Artificial Sequence
  Description of Artificial Sequence: Synthetic oligonucleotide
agccacgguaguguucagc

SEQ ID NO: 474305 - RNA, 19 nt, Artificial Sequence
  Description of Artificial Sequence: Synthetic oligonucleotide
uuaacgccacagccagggc

SEQ ID NO: 474306 - RNA, 19 nt, Artificial Sequence
  Description of Artificial Sequence: Synthetic oligonucleotide
cagguuguaccacgugccc

SEQ ID NO: 474307 - RNA, 19 nt, Artificial Sequence
  Description of Artificial Sequence: Synthetic oligonucleotide
uaggccucgccgcuugcug

SEQ ID NO: 474308 - RNA, 19 nt, Artificial Sequence
  Description of Artificial Sequence: Synthetic oligonucleotide
cucgcugaaccuguauggc

SEQ ID NO: 474309 - RNA, 19 nt, Artificial Sequence
  Description of Artificial Sequence: Synthetic oligonucleotide
guuaaacugcaggauaucu

SEQ ID NO: 474310 - RNA, 19 nt, Artificial Sequence
  Description of Artificial Sequence: Synthetic oligonucleotide
agaacagcggagccacggu

SEQ ID NO: 474311 - RNA, 19 nt, Artificial Sequence
  Description of Artificial Sequence: Synthetic oligonucleotide
guaccacgugcccucgggg

SEQ ID NO: 474312 - RNA, 19 nt, Artificial Sequence
  Description of Artificial Sequence: Synthetic oligonucleotide
uuguaccacgugcccucgg

SEQ ID NO: 474313 - RNA, 19 nt, Artificial Sequence
  Description of Artificial Sequence: Synthetic oligonucleotide
ugcggucucgcugaaccug

SEQ ID NO: 474314 - RNA, 19 nt, Artificial Sequence
  Description of Artificial Sequence: Synthetic oligonucleotide
cuucccaauuagcggcugc

SEQ ID NO: 474315 - RNA, 19 nt, Artificial Sequence
  Description of Artificial Sequence: Synthetic oligonucleotide
cagaugucugccccaauca

SEQ ID NO: 474316 - RNA, 19 nt, Artificial Sequence
  Description of Artificial Sequence: Synthetic oligonucleotide
gaugaacacgccccuccga

SEQ ID NO: 474317 - RNA, 19 nt, Artificial Sequence
  Description of Artificial Sequence: Synthetic oligonucleotide
gugacccgaguccauucag

SEQ ID NO: 474318 - RNA, 19 nt, Artificial Sequence
  Description of Artificial Sequence: Synthetic oligonucleotide
cacgcuccagagcaucuag

SEQ ID NO: 474319 - RNA, 19 nt, Artificial Sequence
  Description of Artificial Sequence: Synthetic oligonucleotide
caaucagcggcacgccuac

SEQ ID NO: 474320 - RNA, 19 nt, Artificial Sequence
  Description of Artificial Sequence: Synthetic oligonucleotide
uccccucugauaugggcuc

SEQ ID NO: 474321 - RNA, 19 nt, Artificial Sequence
  Description of Artificial Sequence: Synthetic oligonucleotide
cuucaagguacugcugcac

SEQ ID NO: 474322 - RNA, 19 nt, Artificial Sequence
  Description of Artificial Sequence: Synthetic oligonucleotide
aggucguuccacugcacau

SEQ ID NO: 474323 - RNA, 19 nt, Artificial Sequence
  Description of Artificial Sequence: Synthetic oligonucleotide
gccagcgaagguugaacgg

SEQ ID NO: 474324 - RNA, 19 nt, Artificial Sequence
  Description of Artificial Sequence: Synthetic oligonucleotide
gcuagauccaggccaugcc

SEQ ID NO: 474325 - RNA, 19 nt, Artificial Sequence
  Description of Artificial Sequence: Synthetic oligonucleotide
gcauauuggccauggccag

SEQ ID NO: 474326 - RNA, 19 nt, Artificial Sequence
  Description of Artificial Sequence: Synthetic oligonucleotide
acacauccccuguccagug

SEQ ID NO: 474327 - RNA, 19 nt, Artificial Sequence
  Description of Artificial Sequence: Synthetic oligonucleotide
gaagguugaacgggagauc

SEQ ID NO: 474328 - RNA, 19 nt, Artificial Sequence
  Description of Artificial Sequence: Synthetic oligonucleotide
ucccaauuagcggcugccc

SEQ ID NO: 474329 - RNA, 19 nt, Artificial Sequence
  Description of Artificial Sequence: Synthetic oligonucleotide
gggaagugugcccugguca

SEQ ID NO: 474330 - RNA, 19 nt, Artificial Sequence
  Description of Artificial Sequence: Synthetic oligonucleotide
uuccgcaugaagggguaga

SEQ ID NO: 474331 - RNA, 19 nt, Artificial Sequence
  Description of Artificial Sequence: Synthetic oligonucleotide
cacugggagccucuaauga

SEQ ID NO: 474332 - RNA, 19 nt, Artificial Sequence
  Description of Artificial Sequence: Synthetic oligonucleotide
cuccccgucaucccagaac

SEQ ID NO: 474333 - RNA, 19 nt, Artificial Sequence
  Description of Artificial Sequence: Synthetic oligonucleotide
agcucgacacauccccugu

SEQ ID NO: 474334 - RNA, 19 nt, Artificial Sequence
  Description of Artificial Sequence: Synthetic oligonucleotide
ccaauuagcggcugcccag

SEQ ID NO: 474335 - RNA, 19 nt, Artificial Sequence
  Description of Artificial Sequence: Synthetic oligonucleotide
uggcgaggguggcacgucc

SEQ ID NO: 474336 - RNA, 19 nt, Artificial Sequence
  Description of Artificial Sequence: Synthetic oligonucleotide
gguuguaccacgugcccuc

SEQ ID NO: 474337 - RNA, 19 nt, Artificial Sequence
  Description of Artificial Sequence: Synthetic oligonucleotide
gccgcuugcuguuaacgcc

SEQ ID NO: 474338 - RNA, 19 nt, Artificial Sequence
  Description of Artificial Sequence: Synthetic oligonucleotide
gguuccagagggugacccg

SEQ ID NO: 474339 - RNA, 19 nt, Artificial Sequence
  Description of Artificial Sequence: Synthetic oligonucleotide
gguggcacgucccgguucc

SEQ ID NO: 474340 - RNA, 19 nt, Artificial Sequence
  Description of Artificial Sequence: Synthetic oligonucleotide
agcguacacacaacuccuc

SEQ ID NO: 474341 - RNA, 19 nt, Artificial Sequence
  Description of Artificial Sequence: Synthetic oligonucleotide
ucacuagggcccuguugga

SEQ ID NO: 474342 - RNA, 19 nt, Artificial Sequence
  Description of Artificial Sequence: Synthetic oligonucleotide
guauggcggcaugaagggg

SEQ ID NO: 474343 - RNA, 19 nt, Artificial Sequence
  Description of Artificial Sequence: Synthetic oligonucleotide
cugauaugggcuccaugga

SEQ ID NO: 474344 - RNA, 19 nt, Artificial Sequence
  Description of Artificial Sequence: Synthetic oligonucleotide
agcggagccacgguagugu

SEQ ID NO: 474345 - RNA, 19 nt, Artificial Sequence
  Description of Artificial Sequence: Synthetic oligonucleotide
gugucucccaggaagccac

SEQ ID NO: 474346 - RNA, 19 nt, Artificial Sequence
  Description of Artificial Sequence: Synthetic oligonucleotide
accuucgucauagggccug

SEQ ID NO: 474347 - RNA, 19 nt, Artificial Sequence
  Description of Artificial Sequence: Synthetic oligonucleotide
gggugugacccauagaggu

SEQ ID NO: 474348 - RNA, 19 nt, Artificial Sequence
  Description of Artificial Sequence: Synthetic oligonucleotide
cagaagggcauaacgcaaa

SEQ ID NO: 474349 - RNA, 19 nt, Artificial Sequence
  Description of Artificial Sequence: Synthetic oligonucleotide
gcuuucagggcuguaggug

SEQ ID NO: 474350 - RNA, 19 nt, Artificial Sequence
  Description of Artificial Sequence: Synthetic oligonucleotide
uccagagggugacccgagu

SEQ ID NO: 474351 - RNA, 19 nt, Artificial Sequence
  Description of Artificial Sequence: Synthetic oligonucleotide
uccccuguccagugaccag

SEQ ID NO: 474352 - RNA, 19 nt, Artificial Sequence
  Description of Artificial Sequence: Synthetic oligonucleotide
gguugaacgggagaucaca

SEQ ID NO: 474353 - RNA, 19 nt, Artificial Sequence
  Description of Artificial Sequence: Synthetic oligonucleotide
guuguaccacgugcccucg

SEQ ID NO: 474354 - RNA, 19 nt, Artificial Sequence
  Description of Artificial Sequence: Synthetic oligonucleotide
gggcauaacgcaaagugaa

SEQ ID NO: 474355 - RNA, 19 nt, Artificial Sequence
  Description of Artificial Sequence: Synthetic oligonucleotide
ggcauaacgcaaagugaag

SEQ ID NO: 474356 - RNA, 19 nt, Artificial Sequence
  Description of Artificial Sequence: Synthetic oligonucleotide
cuugggagggccucaccga

SEQ ID NO: 474357 - RNA, 19 nt, Artificial Sequence
  Description of Artificial Sequence: Synthetic oligonucleotide
gguacugcugcacaacgcu

SEQ ID NO: 474358 - RNA, 19 nt, Artificial Sequence
  Description of Artificial Sequence: Synthetic oligonucleotide
uccgcaugaagggguagaa

SEQ ID NO: 474359 - RNA, 19 nt, Artificial Sequence
  Description of Artificial Sequence: Synthetic oligonucleotide
cacgccuaccagguuaaac

SEQ ID NO: 474360 - RNA, 19 nt, Artificial Sequence
  Description of Artificial Sequence: Synthetic oligonucleotide
ggaaguagccagucacuuc

SEQ ID NO: 474361 - RNA, 19 nt, Artificial Sequence
  Description of Artificial Sequence: Synthetic oligonucleotide
agguuguaccacgugcccu

SEQ ID NO: 474362 - RNA, 19 nt, Artificial Sequence
  Description of Artificial Sequence: Synthetic oligonucleotide
caccuguugaccuccaggu

SEQ ID NO: 474363 - RNA, 19 nt, Artificial Sequence
  Description of Artificial Sequence: Synthetic oligonucleotide
guaucguucuuggccaaga

SEQ ID NO: 474364 - RNA, 19 nt, Artificial Sequence
  Description of Artificial Sequence: Synthetic oligonucleotide
gcuguuaacgccacagcca

SEQ ID NO: 474365 - RNA, 19 nt, Artificial Sequence
  Description of Artificial Sequence: Synthetic oligonucleotide
cuagauccaggccaugccu

SEQ ID NO: 474366 - RNA, 19 nt, Artificial Sequence
  Description of Artificial Sequence: Synthetic oligonucleotide
guugaacgggagaucacaa

SEQ ID NO: 474367 - RNA, 19 nt, Artificial Sequence
  Description of Artificial Sequence: Synthetic oligonucleotide
cacuagggcccuguuggag

SEQ ID NO: 474368 - RNA, 19 nt, Artificial Sequence
  Description of Artificial Sequence: Synthetic oligonucleotide
uccauucagugcugagcau

SEQ ID NO: 474369 - RNA, 19 nt, Artificial Sequence
  Description of Artificial Sequence: Synthetic oligonucleotide
ucgggauucugugguugug

SEQ ID NO: 474370 - RNA, 19 nt, Artificial Sequence
  Description of Artificial Sequence: Synthetic oligonucleotide
cuaacucauucacaauggu

SEQ ID NO: 474371 - RNA, 19 nt, Artificial Sequence
  Description of Artificial Sequence: Synthetic oligonucleotide
guuccagagggugacccga

SEQ ID NO: 474372 - RNA, 19 nt, Artificial Sequence
  Description of Artificial Sequence: Synthetic oligonucleotide
gaucacaaagggucguguu

SEQ ID NO: 474373 - RNA, 19 nt, Artificial Sequence
  Description of Artificial Sequence: Synthetic oligonucleotide
gccaaggcccuccauuggc

SEQ ID NO: 474374 - RNA, 19 nt, Artificial Sequence
  Description of Artificial Sequence: Synthetic oligonucleotide
uauguaccgccggccaccu

SEQ ID NO: 474375 - RNA, 19 nt, Artificial Sequence
  Description of Artificial Sequence: Synthetic oligonucleotide
ugcggguguccauguaguc

SEQ ID NO: 474376 - RNA, 19 nt, Artificial Sequence
  Description of Artificial Sequence: Synthetic oligonucleotide
cacgucccgguuccagagg

SEQ ID NO: 474377 - RNA, 19 nt, Artificial Sequence
  Description of Artificial Sequence: Synthetic oligonucleotide
ccauucagugcugagcaug

SEQ ID NO: 474378 - RNA, 19 nt, Artificial Sequence
  Description of Artificial Sequence: Synthetic oligonucleotide
cuguggcuacucccaagac

SEQ ID NO: 474379 - RNA, 19 nt, Artificial Sequence
  Description of Artificial Sequence: Synthetic oligonucleotide
cuucgagcgucagccacug

SEQ ID NO: 474380 - RNA, 19 nt, Artificial Sequence
  Description of Artificial Sequence: Synthetic oligonucleotide
agcgaagguugaacgggag

SEQ ID NO: 474381 - RNA, 19 nt, Artificial Sequence
  Description of Artificial Sequence: Synthetic oligonucleotide
accaccgcgggcacauagg

SEQ ID NO: 474382 - RNA, 19 nt, Artificial Sequence
  Description of Artificial Sequence: Synthetic oligonucleotide
ccaagaucccaccuguuga

SEQ ID NO: 474383 - RNA, 19 nt, Artificial Sequence
  Description of Artificial Sequence: Synthetic oligonucleotide
ccaauuggguccagcguac

SEQ ID NO: 474384 - RNA, 19 nt, Artificial Sequence
  Description of Artificial Sequence: Synthetic oligonucleotide
auuccgcaugaagggguag

SEQ ID NO: 474385 - RNA, 19 nt, Artificial Sequence
  Description of Artificial Sequence: Synthetic oligonucleotide
caggucguuccacugcaca

SEQ ID NO: 474386 - RNA, 19 nt, Artificial Sequence
  Description of Artificial Sequence: Synthetic oligonucleotide
acgcaaagugaaggccuuc

SEQ ID NO: 474387 - RNA, 19 nt, Artificial Sequence
  Description of Artificial Sequence: Synthetic oligonucleotide
gcucucgaaccaugucugg

SEQ ID NO: 474388 - RNA, 19 nt, Artificial Sequence
  Description of Artificial Sequence: Synthetic oligonucleotide
cugcuaggaccagucaauc

SEQ ID NO: 474389 - RNA, 19 nt, Artificial Sequence
  Description of Artificial Sequence: Synthetic oligonucleotide
gauccccacaagagcuggc

SEQ ID NO: 474390 - RNA, 19 nt, Artificial Sequence
  Description of Artificial Sequence: Synthetic oligonucleotide
gagcaugagugggcucagg

SEQ ID NO: 474391 - RNA, 19 nt, Artificial Sequence
  Description of Artificial Sequence: Synthetic oligonucleotide
cagcgaagguugaacggga

SEQ ID NO: 474392 - RNA, 19 nt, Artificial Sequence
  Description of Artificial Sequence: Synthetic oligonucleotide
agcggcacgccuaccaggu

SEQ ID NO: 474393 - RNA, 19 nt, Artificial Sequence
  Description of Artificial Sequence: Synthetic oligonucleotide
cucgaaccaugucugggaa

SEQ ID NO: 474394 - RNA, 19 nt, Artificial Sequence
  Description of Artificial Sequence: Synthetic oligonucleotide
aggccucgccgcuugcugu

SEQ ID NO: 474395 - RNA, 19 nt, Artificial Sequence
  Description of Artificial Sequence: Synthetic oligonucleotide
cuccauggaagagagugua

SEQ ID NO: 474396 - RNA, 19 nt, Artificial Sequence
  Description of Artificial Sequence: Synthetic oligonucleotide
gcugcacaacgcucuuggg

SEQ ID NO: 474397 - RNA, 19 nt, Artificial Sequence
  Description of Artificial Sequence: Synthetic oligonucleotide
gggguaucccacaacuuca

SEQ ID NO: 474398 - RNA, 19 nt, Artificial Sequence
  Description of Artificial Sequence: Synthetic oligonucleotide
gccaugccuucccaauuag

SEQ ID NO: 474399 - RNA, 19 nt, Artificial Sequence
  Description of Artificial Sequence: Synthetic oligonucleotide
gcggacaauagcaguggag

SEQ ID NO: 474400 - RNA, 19 nt, Artificial Sequence
  Description of Artificial Sequence: Synthetic oligonucleotide
guucguugucagggcagcc

SEQ ID NO: 474401 - RNA, 19 nt, Artificial Sequence
  Description of Artificial Sequence: Synthetic oligonucleotide
gguauccagaggggcuucg

SEQ ID NO: 474402 - RNA, 19 nt, Artificial Sequence
  Description of Artificial Sequence: Synthetic oligonucleotide
ucuccccgucaucccagaa

SEQ ID NO: 474403 - RNA, 19 nt, Artificial Sequence
  Description of Artificial Sequence: Synthetic oligonucleotide
guuccccgggucuucacua

SEQ ID NO: 474404 - RNA, 19 nt, Artificial Sequence
  Description of Artificial Sequence: Synthetic oligonucleotide
guguugggauccucaggga

SEQ ID NO: 474405 - RNA, 19 nt, Artificial Sequence
  Description of Artificial Sequence: Synthetic oligonucleotide
gcggguguccauguagucc

SEQ ID NO: 474406 - RNA, 19 nt, Artificial Sequence
  Description of Artificial Sequence: Synthetic oligonucleotide
ggaguagccccagcggcag

SEQ ID NO: 474407 - RNA, 19 nt, Artificial Sequence
  Description of Artificial Sequence: Synthetic oligonucleotide
gcguacacacaacuccuca

SEQ ID NO: 474408 - RNA, 19 nt, Artificial Sequence
  Description of Artificial Sequence: Synthetic oligonucleotide
gggcacauaggguggguuc

SEQ ID NO: 474409 - RNA, 19 nt, Artificial Sequence
  Description of Artificial Sequence: Synthetic oligonucleotide
guaccgccggccaccuugg

SEQ ID NO: 474410 - RNA, 19 nt, Artificial Sequence
  Description of Artificial Sequence: Synthetic oligonucleotide
uggcuacucccaagacggu

SEQ ID NO: 474411 - RNA, 19 nt, Artificial Sequence
  Description of Artificial Sequence: Synthetic oligonucleotide
ccaccgcgggcacauaggg

SEQ ID NO: 474412 - RNA, 19 nt, Artificial Sequence
  Description of Artificial Sequence: Synthetic oligonucleotide
gguaucguucuuggccaag

SEQ ID NO: 474413 - RNA, 19 nt, Artificial Sequence
  Description of Artificial Sequence: Synthetic oligonucleotide
ggugacccgaguccauuca

SEQ ID NO: 474414 - RNA, 19 nt, Artificial Sequence
  Description of Artificial Sequence: Synthetic oligonucleotide
uagcggcugcccagucgag

SEQ ID NO: 474415 - RNA, 19 nt, Artificial Sequence
  Description of Artificial Sequence: Synthetic oligonucleotide
uacucccaagacggucacc

SEQ ID NO: 474416 - RNA, 19 nt, Artificial Sequence
  Description of Artificial Sequence: Synthetic oligonucleotide
accuggcgaggguggcacg

SEQ ID NO: 474417 - RNA, 19 nt, Artificial Sequence
  Description of Artificial Sequence: Synthetic oligonucleotide
ccacugggagccucuaaug

SEQ ID NO: 474418 - RNA, 19 nt, Artificial Sequence
  Description of Artificial Sequence: Synthetic oligonucleotide
uucgagcgucagccacugc

SEQ ID NO: 474419 - RNA, 19 nt, Artificial Sequence
  Description of Artificial Sequence: Synthetic oligonucleotide
cccgucaucccagaacagc

SEQ ID NO: 474420 - RNA, 19 nt, Artificial Sequence
  Description of Artificial Sequence: Synthetic oligonucleotide
auaggccucgccgcuugcu

SEQ ID NO: 474421 - RNA, 19 nt, Artificial Sequence
  Description of Artificial Sequence: Synthetic oligonucleotide
gcgaggguggcacgucccg

SEQ ID NO: 474422 - RNA, 19 nt, Artificial Sequence
  Description of Artificial Sequence: Synthetic oligonucleotide
cucgccgcuugcuguuaac

SEQ ID NO: 474423 - RNA, 19 nt, Artificial Sequence
  Description of Artificial Sequence: Synthetic oligonucleotide
gcguggaacucagacacca

SEQ ID NO: 474424 - RNA, 19 nt, Artificial Sequence
  Description of Artificial Sequence: Synthetic oligonucleotide
cuguaaacacaggugugcu

SEQ ID NO: 474425 - RNA, 19 nt, Artificial Sequence
  Description of Artificial Sequence: Synthetic oligonucleotide
gaaaucggggaaggugcua

SEQ ID NO: 474426 - RNA, 19 nt, Artificial Sequence
  Description of Artificial Sequence: Synthetic oligonucleotide
gcaaacccguccuggguga

SEQ ID NO: 474427 - RNA, 19 nt, Artificial Sequence
  Description of Artificial Sequence: Synthetic oligonucleotide
cgagcgucagccacugccc

SEQ ID NO: 474428 - RNA, 19 nt, Artificial Sequence
  Description of Artificial Sequence: Synthetic oligonucleotide
gcgaagguugaacgggaga

SEQ ID NO: 474429 - RNA, 19 nt, Artificial Sequence
  Description of Artificial Sequence: Synthetic oligonucleotide
gcggcaugaagggguaucc

SEQ ID NO: 474430 - RNA, 19 nt, Artificial Sequence
  Description of Artificial Sequence: Synthetic oligonucleotide
caauagcaguggaggagua

SEQ ID NO: 474431 - RNA, 19 nt, Artificial Sequence
  Description of Artificial Sequence: Synthetic oligonucleotide
cccaauuggguccagcgua

SEQ ID NO: 474432 - RNA, 19 nt, Artificial Sequence
  Description of Artificial Sequence: Synthetic oligonucleotide
ccagguguugggauccuca

SEQ ID NO: 474433 - RNA, 19 nt, Artificial Sequence
  Description of Artificial Sequence: Synthetic oligonucleotide
guccccucugauaugggcu

SEQ ID NO: 474434 - RNA, 19 nt, Artificial Sequence
  Description of Artificial Sequence: Synthetic oligonucleotide
ugagugggcucaggugcuc

SEQ ID NO: 474435 - RNA, 19 nt, Artificial Sequence
  Description of Artificial Sequence: Synthetic oligonucleotide
cgccuaccagguuaaacug

SEQ ID NO: 474436 - RNA, 19 nt, Artificial Sequence
  Description of Artificial Sequence: Synthetic oligonucleotide
ccgagaggccucuguaaac

SEQ ID NO: 474437 - RNA, 19 nt, Artificial Sequence
  Description of Artificial Sequence: Synthetic oligonucleotide
cgcaaagugaaggccuucc

SEQ ID NO: 474438 - RNA, 19 nt, Artificial Sequence
  Description of Artificial Sequence: Synthetic oligonucleotide
cuguauggcuccugaggcu

SEQ ID NO: 474439 - RNA, 19 nt, Artificial Sequence
  Description of Artificial Sequence: Synthetic oligonucleotide
ggggaagugugcccugguc

SEQ ID NO: 474440 - RNA, 19 nt, Artificial Sequence
  Description of Artificial Sequence: Synthetic oligonucleotide
gcgaggccagugaugugcg

SEQ ID NO: 474441 - RNA, 19 nt, Artificial Sequence
  Description of Artificial Sequence: Synthetic oligonucleotide
ggcuacucccaagacgguc

SEQ ID NO: 474442 - RNA, 19 nt, Artificial Sequence
  Description of Artificial Sequence: Synthetic oligonucleotide
guaggggcuguggcuacuc

SEQ ID NO: 474443 - RNA, 19 nt, Artificial Sequence
  Description of Artificial Sequence: Synthetic oligonucleotide
caggugugcucugcuagga

SEQ ID NO: 474444 - RNA, 19 nt, Artificial Sequence
  Description of Artificial Sequence: Synthetic oligonucleotide
ggugcacauugaugguauc

SEQ ID NO: 474445 - RNA, 19 nt, Artificial Sequence
  Description of Artificial Sequence: Synthetic oligonucleotide
caacgcucuugggcucugg

SEQ ID NO: 474446 - RNA, 19 nt, Artificial Sequence
  Description of Artificial Sequence: Synthetic oligonucleotide
cccaauuagcggcugccca

SEQ ID NO: 474447 - RNA, 19 nt, Artificial Sequence
  Description of Artificial Sequence: Synthetic oligonucleotide
gggugacccgaguccauuc

SEQ ID NO: 474448 - RNA, 19 nt, Artificial Sequence
  Description of Artificial Sequence: Synthetic oligonucleotide
ggcggacaauagcagugga

SEQ ID NO: 474449 - RNA, 19 nt, Artificial Sequence
  Description of Artificial Sequence: Synthetic oligonucleotide
gacuuguguguaggcccca

SEQ ID NO: 474450 - RNA, 19 nt, Artificial Sequence
  Description of Artificial Sequence: Synthetic oligonucleotide
cgccgcuugcuguuaacgc

SEQ ID NO: 474451 - RNA, 19 nt, Artificial Sequence
  Description of Artificial Sequence: Synthetic oligonucleotide
ggccaugccuucccaauua

SEQ ID NO: 474452 - RNA, 19 nt, Artificial Sequence
  Description of Artificial Sequence: Synthetic oligonucleotide
ggugaugaacacgccccuc

SEQ ID NO: 474453 - RNA, 19 nt, Artificial Sequence
  Description of Artificial Sequence: Synthetic oligonucleotide
ccaguucguugucagggca

SEQ ID NO: 474454 - RNA, 19 nt, Artificial Sequence
  Description of Artificial Sequence: Synthetic oligonucleotide
ccagucgaguuggugauga

SEQ ID NO: 474455 - RNA, 19 nt, Artificial Sequence
  Description of Artificial Sequence: Synthetic oligonucleotide
agggugacccgaguccauu

SEQ ID NO: 474456 - RNA, 19 nt, Artificial Sequence
  Description of Artificial Sequence: Synthetic oligonucleotide
cagcggagccacgguagug

SEQ ID NO: 474457 - RNA, 19 nt, Artificial Sequence
  Description of Artificial Sequence: Synthetic oligonucleotide
agugugcccuggucauguu

SEQ ID NO: 474458 - RNA, 19 nt, Artificial Sequence
  Description of Artificial Sequence: Synthetic oligonucleotide
agaggggcuucgagcguca

SEQ ID NO: 474459 - RNA, 19 nt, Artificial Sequence
  Description of Artificial Sequence: Synthetic oligonucleotide
gaguagccccagcggcaga

SEQ ID NO: 474460 - RNA, 19 nt, Artificial Sequence
  Description of Artificial Sequence: Synthetic oligonucleotide
ggguagaagguccccaauu

SEQ ID NO: 474461 - RNA, 19 nt, Artificial Sequence
  Description of Artificial Sequence: Synthetic oligonucleotide
cugcaaacccguccugggu

SEQ ID NO: 474462 - RNA, 19 nt, Artificial Sequence
  Description of Artificial Sequence: Synthetic oligonucleotide
ccauagagguugguaccug

SEQ ID NO: 474463 - RNA, 19 nt, Artificial Sequence
  Description of Artificial Sequence: Synthetic oligonucleotide
cuccgaagaccuucgucau

SEQ ID NO: 474464 - RNA, 19 nt, Artificial Sequence
  Description of Artificial Sequence: Synthetic oligonucleotide
caauuagcggcugcccagu

SEQ ID NO: 474465 - RNA, 19 nt, Artificial Sequence
  Description of Artificial Sequence: Synthetic oligonucleotide
agccucuaaugaagcugga

SEQ ID NO: 474466 - RNA, 19 nt, Artificial Sequence
  Description of Artificial Sequence: Synthetic oligonucleotide
cagcgaggccagugaugug

SEQ ID NO: 474467 - RNA, 19 nt, Artificial Sequence
  Description of Artificial Sequence: Synthetic oligonucleotide
ccgcgggcacauagggugg

SEQ ID NO: 474468 - RNA, 19 nt, Artificial Sequence
  Description of Artificial Sequence: Synthetic oligonucleotide
gcucgacacauccccuguc

SEQ ID NO: 474469 - RNA, 19 nt, Artificial Sequence
  Description of Artificial Sequence: Synthetic oligonucleotide
cgucauagggccuguaacu

SEQ ID NO: 474470 - RNA, 19 nt, Artificial Sequence
  Description of Artificial Sequence: Synthetic oligonucleotide
gccccuccgaagaccuucg

SEQ ID NO: 474471 - RNA, 19 nt, Artificial Sequence
  Description of Artificial Sequence: Synthetic oligonucleotide
cgguuccagagggugaccc

SEQ ID NO: 474472 - RNA, 19 nt, Artificial Sequence
  Description of Artificial Sequence: Synthetic oligonucleotide
ggcgaggguggcacguccc

SEQ ID NO: 474473 - RNA, 19 nt, Artificial Sequence
  Description of Artificial Sequence: Synthetic oligonucleotide
ccgcaugaagggguagaag

SEQ ID NO: 474474 - RNA, 19 nt, Artificial Sequence
  Description of Artificial Sequence: Synthetic oligonucleotide
ggcguggaacucagacacc

SEQ ID NO: 474475 - RNA, 19 nt, Artificial Sequence
  Description of Artificial Sequence: Synthetic oligonucleotide
ggguaucccacaacuucaa

SEQ ID NO: 474476 - RNA, 19 nt, Artificial Sequence
  Description of Artificial Sequence: Synthetic oligonucleotide
cccacaagagcuggcgguc

SEQ ID NO: 474477 - RNA, 19 nt, Artificial Sequence
  Description of Artificial Sequence: Synthetic oligonucleotide
cagugguaugauguauccu

SEQ ID NO: 474478 - RNA, 19 nt, Artificial Sequence
  Description of Artificial Sequence: Synthetic oligonucleotide
gugcuagauccaggccaug

SEQ ID NO: 474479 - RNA, 19 nt, Artificial Sequence
  Description of Artificial Sequence: Synthetic oligonucleotide
cccgccaaccaccgcgggc

SEQ ID NO: 474480 - RNA, 19 nt, Artificial Sequence
  Description of Artificial Sequence: Synthetic oligonucleotide
cuggcgaggguggcacguc

SEQ ID NO: 474481 - RNA, 19 nt, Artificial Sequence
  Description of Artificial Sequence: Synthetic oligonucleotide
gccacguguacuaacucau

SEQ ID NO: 474482 - RNA, 19 nt, Artificial Sequence
  Description of Artificial Sequence: Synthetic oligonucleotide
ggugcuagauccaggccau

SEQ ID NO: 474483 - RNA, 19 nt, Artificial Sequence
  Description of Artificial Sequence: Synthetic oligonucleotide
ccgaguccauucagugcug

SEQ ID NO: 474484 - RNA, 19 nt, Artificial Sequence
  Description of Artificial Sequence: Synthetic oligonucleotide
gccuaggaacacguacaca

SEQ ID NO: 474485 - RNA, 19 nt, Artificial Sequence
  Description of Artificial Sequence: Synthetic oligonucleotide
cagucgaguuggugaugaa

SEQ ID NO: 474486 - RNA, 19 nt, Artificial Sequence
  Description of Artificial Sequence: Synthetic oligonucleotide
ggcacgccuaccagguuaa

SEQ ID NO: 474487 - RNA, 19 nt, Artificial Sequence
  Description of Artificial Sequence: Synthetic oligonucleotide
cugggccuaggaacacgua

SEQ ID NO: 474488 - RNA, 19 nt, Artificial Sequence
  Description of Artificial Sequence: Synthetic oligonucleotide
ccccgucaucccagaacag

SEQ ID NO: 474489 - RNA, 19 nt, Artificial Sequence
  Description of Artificial Sequence: Synthetic oligonucleotide
uggcggcaugaagggguau

SEQ ID NO: 474490 - RNA, 19 nt, Artificial Sequence
  Description of Artificial Sequence: Synthetic oligonucleotide
cacaacgcucuugggcucu

SEQ ID NO: 474491 - RNA, 19 nt, Artificial Sequence
  Description of Artificial Sequence: Synthetic oligonucleotide
gaugugcggggagggcagu

SEQ ID NO: 474492 - RNA, 19 nt, Artificial Sequence
  Description of Artificial Sequence: Synthetic oligonucleotide
gaccuucgucauagggccu

SEQ ID NO: 474493 - RNA, 19 nt, Artificial Sequence
  Description of Artificial Sequence: Synthetic oligonucleotide
cgaagguugaacgggagau

SEQ ID NO: 474494 - RNA, 19 nt, Artificial Sequence
  Description of Artificial Sequence: Synthetic oligonucleotide
gcuccauggaagagagugu

SEQ ID NO: 474495 - RNA, 19 nt, Artificial Sequence
  Description of Artificial Sequence: Synthetic oligonucleotide
gcccagucgaguuggugau

SEQ ID NO: 474496 - RNA, 19 nt, Artificial Sequence
  Description of Artificial Sequence: Synthetic oligonucleotide
ggucucgcugaaccuguau

SEQ ID NO: 474497 - RNA, 19 nt, Artificial Sequence
  Description of Artificial Sequence: Synthetic oligonucleotide
caccgcgggcacauagggu

SEQ ID NO: 474498 - RNA, 19 nt, Artificial Sequence
  Description of Artificial Sequence: Synthetic oligonucleotide
ggccucaccgagaggccuc

SEQ ID NO: 474499 - RNA, 19 nt, Artificial Sequence
  Description of Artificial Sequence: Synthetic oligonucleotide
cggcaugaagggguauccc

SEQ ID NO: 474500 - RNA, 19 nt, Artificial Sequence
  Description of Artificial Sequence: Synthetic oligonucleotide
guggguucuccaguucguu

SEQ ID NO: 474501 - RNA, 19 nt, Artificial Sequence
  Description of Artificial Sequence: Synthetic oligonucleotide
gcuucgagcgucagccacu

SEQ ID NO: 474502 - RNA, 19 nt, Artificial Sequence
  Description of Artificial Sequence: Synthetic oligonucleotide
ggagcucgacacauccccu

SEQ ID NO: 474503 - RNA, 19 nt, Artificial Sequence
  Description of Artificial Sequence: Synthetic oligonucleotide
cuucgucauagggccugua

SEQ ID NO: 474504 - RNA, 19 nt, Artificial Sequence
  Description of Artificial Sequence: Synthetic oligonucleotide
gagggugacccgaguccau

SEQ ID NO: 474505 - RNA, 19 nt, Artificial Sequence
  Description of Artificial Sequence: Synthetic oligonucleotide
gucguguuccccgggucuu

SEQ ID NO: 474506 - RNA, 19 nt, Artificial Sequence
  Description of Artificial Sequence: Synthetic oligonucleotide
gcccucggggaaguagcca

SEQ ID NO: 474507 - RNA, 19 nt, Artificial Sequence
  Description of Artificial Sequence: Synthetic oligonucleotide
cgcgggcacauaggguggg

SEQ ID NO: 474508 - RNA, 19 nt, Artificial Sequence
  Description of Artificial Sequence: Synthetic oligonucleotide
cgccccuccgaagaccuuc

SEQ ID NO: 474509 - RNA, 19 nt, Artificial Sequence
  Description of Artificial Sequence: Synthetic oligonucleotide
gcggucucgcugaaccugu

SEQ ID NO: 474510 - RNA, 19 nt, Artificial Sequence
  Description of Artificial Sequence: Synthetic oligonucleotide
guggcacgucccgguucca

SEQ ID NO: 474511 - RNA, 19 nt, Artificial Sequence
  Description of Artificial Sequence: Synthetic oligonucleotide
ccacguguacuaacucauu

SEQ ID NO: 474512 - RNA, 19 nt, Artificial Sequence
  Description of Artificial Sequence: Synthetic oligonucleotide
gcggagccacgguaguguu

SEQ ID NO: 474513 - RNA, 19 nt, Artificial Sequence
  Description of Artificial Sequence: Synthetic oligonucleotide
ggccucgccgcuugcuguu

SEQ ID NO: 474514 - RNA, 19 nt, Artificial Sequence
  Description of Artificial Sequence: Synthetic oligonucleotide
ccucgccgcuugcuguuaa

SEQ ID NO: 474515 - RNA, 19 nt, Artificial Sequence
  Description of Artificial Sequence: Synthetic oligonucleotide
ggccccaguauggcggcau

SEQ ID NO: 474516 - RNA, 19 nt, Artificial Sequence
  Description of Artificial Sequence: Synthetic oligonucleotide
ccccauaggccucgccgcu

SEQ ID NO: 474517 - RNA, 19 nt, Artificial Sequence
  Description of Artificial Sequence: Synthetic oligonucleotide
cugcccucaggugcacauu

SEQ ID NO: 474518 - RNA, 19 nt, Artificial Sequence
  Description of Artificial Sequence: Synthetic oligonucleotide
gccucaccgagaggccucu

SEQ ID NO: 474519 - RNA, 19 nt, Artificial Sequence
  Description of Artificial Sequence: Synthetic oligonucleotide
ccucaccgagaggccucug

SEQ ID NO: 474520 - RNA, 19 nt, Artificial Sequence
  Description of Artificial Sequence: Synthetic oligonucleotide
acgccccuccgaagaccuu

SEQ ID NO: 474521 - RNA, 19 nt, Artificial Sequence
  Description of Artificial Sequence: Synthetic oligonucleotide
cguggaacucagacaccau

SEQ ID NO: 474522 - RNA, 19 nt, Artificial Sequence
  Description of Artificial Sequence: Synthetic oligonucleotide
caaccaccgcgggcacaua

SEQ ID NO: 474523 - RNA, 19 nt, Artificial Sequence
  Description of Artificial Sequence: Synthetic oligonucleotide
gcacgccuaccagguuaaa

SEQ ID NO: 474524 - RNA, 19 nt, Artificial Sequence
  Description of Artificial Sequence: Synthetic oligonucleotide
ccuucgucauagggccugu

SEQ ID NO: 474525 - RNA, 19 nt, Artificial Sequence
  Description of Artificial Sequence: Synthetic oligonucleotide
gccucgccgcuugcuguua

SEQ ID NO: 474526 - RNA, 19 nt, Artificial Sequence
  Description of Artificial Sequence: Synthetic oligonucleotide
ccccagcggcagaggugga

SEQ ID NO: 474527 - RNA, 19 nt, Artificial Sequence
  Description of Artificial Sequence: Synthetic oligonucleotide
gcggcacgccuaccagguu

SEQ ID NO: 474528 - RNA, 19 nt, Artificial Sequence
  Description of Artificial Sequence: Synthetic oligonucleotide
cggucucgcugaaccugua

SEQ ID NO: 474529 - RNA, 19 nt, Artificial Sequence
  Description of Artificial Sequence: Synthetic oligonucleotide
ccccuccgaagaccuucgu

SEQ ID NO: 474530 - RNA, 19 nt, Artificial Sequence
  Description of Artificial Sequence: Synthetic oligonucleotide
gggcugcuuucgggauucu

SEQ ID NO: 474531 - RNA, 19 nt, Artificial Sequence
  Description of Artificial Sequence: Synthetic oligonucleotide
cccauaggccucgccgcuu

SEQ ID NO: 474532 - RNA, 19 nt, Artificial Sequence
  Description of Artificial Sequence: Synthetic oligonucleotide
gccccacgcuccagagcau

SEQ ID NO: 474533 - RNA, 19 nt, Artificial Sequence
  Description of Artificial Sequence: Synthetic oligonucleotide
aauauuaguauucugaagu

SEQ ID NO: 474534 - RNA, 19 nt, Artificial Sequence
  Description of Artificial Sequence: Synthetic oligonucleotide
ucuaugacaaacuuguugg

SEQ ID NO: 474535 - RNA, 19 nt, Artificial Sequence
  Description of Artificial Sequence: Synthetic oligonucleotide
gaacauaugauccuggacg

SEQ ID NO: 474536 - RNA, 19 nt, Artificial Sequence
  Description of Artificial Sequence: Synthetic oligonucleotide
aauagaaguuaaaacaagc

SEQ ID NO: 474537 - RNA, 19 nt, Artificial Sequence
  Description of Artificial Sequence: Synthetic oligonucleotide
aaaaucacgucauuaaugu

SEQ ID NO: 474538 - RNA, 19 nt, Artificial Sequence
  Description of Artificial Sequence: Synthetic oligonucleotide
aaagaugcaaagcucugac

SEQ ID NO: 474539 - RNA, 19 nt, Artificial Sequence
  Description of Artificial Sequence: Synthetic oligonucleotide
uagcaaucaacgaauaugg

SEQ ID NO: 474540 - RNA, 19 nt, Artificial Sequence
  Description of Artificial Sequence: Synthetic oligonucleotide
uacguaaagcuaaagaugc

SEQ ID NO: 474541 - RNA, 19 nt, Artificial Sequence
  Description of Artificial Sequence: Synthetic oligonucleotide
aaagcucugacgucugucc

SEQ ID NO: 474542 - RNA, 19 nt, Artificial Sequence
  Description of Artificial Sequence: Synthetic oligonucleotide
gauauuaaggaauugggga

SEQ ID NO: 474543 - RNA, 19 nt, Artificial Sequence
  Description of Artificial Sequence: Synthetic oligonucleotide
uuaaucaaaauaaggguga

SEQ ID NO: 474544 - RNA, 19 nt, Artificial Sequence
  Description of Artificial Sequence: Synthetic oligonucleotide
aacauaugauccuggacgg

SEQ ID NO: 474545 - RNA, 19 nt, Artificial Sequence
  Description of Artificial Sequence: Synthetic oligonucleotide
ucuuauacggcauugcuca

SEQ ID NO: 474546 - RNA, 19 nt, Artificial Sequence
  Description of Artificial Sequence: Synthetic oligonucleotide
uaucuguccgcucacaagg

SEQ ID NO: 474547 - RNA, 19 nt, Artificial Sequence
  Description of Artificial Sequence: Synthetic oligonucleotide
uuuuccuacgucauuuugg

SEQ ID NO: 474548 - RNA, 19 nt, Artificial Sequence
  Description of Artificial Sequence: Synthetic oligonucleotide
ugagauaugagguaaugga

SEQ ID NO: 474549 - RNA, 19 nt, Artificial Sequence
  Description of Artificial Sequence: Synthetic oligonucleotide
uuacguaaagcuaaagaug

SEQ ID NO: 474550 - RNA, 19 nt, Artificial Sequence
  Description of Artificial Sequence: Synthetic oligonucleotide
caaaauaagggugauacgc

SEQ ID NO: 474551 - RNA, 19 nt, Artificial Sequence
  Description of Artificial Sequence: Synthetic oligonucleotide
aagcuaaagaugcaaagcu

SEQ ID NO: 474552 - RNA, 19 nt, Artificial Sequence
  Description of Artificial Sequence: Synthetic oligonucleotide
aauacuggcaguacggaac

SEQ ID NO: 474553 - RNA, 19 nt, Artificial Sequence
  Description of Artificial Sequence: Synthetic oligonucleotide
aguacggaacauaugaucc

SEQ ID NO: 474554 - RNA, 19 nt, Artificial Sequence
  Description of Artificial Sequence: Synthetic oligonucleotide
aauccugggaaugagagug

SEQ ID NO: 474555 - RNA, 19 nt, Artificial Sequence
  Description of Artificial Sequence: Synthetic oligonucleotide
ucuuguaucuuauacggca

SEQ ID NO: 474556 - RNA, 19 nt, Artificial Sequence
  Description of Artificial Sequence: Synthetic oligonucleotide
uaaagcuaaagaugcaaag

SEQ ID NO: 474557 - RNA, 19 nt, Artificial Sequence
  Description of Artificial Sequence: Synthetic oligonucleotide
uauucuucgggcuugugcc

SEQ ID NO: 474558 - RNA, 19 nt, Artificial Sequence
  Description of Artificial Sequence: Synthetic oligonucleotide
uuuccuacgucauuuuggg

SEQ ID NO: 474559 - RNA, 19 nt, Artificial Sequence
  Description of Artificial Sequence: Synthetic oligonucleotide
uuucaagugaagauaguga

SEQ ID NO: 474560 - RNA, 19 nt, Artificial Sequence
  Description of Artificial Sequence: Synthetic oligonucleotide
aggacuuugccuuugcuuc

SEQ ID NO: 474561 - RNA, 19 nt, Artificial Sequence
  Description of Artificial Sequence: Synthetic oligonucleotide
uuccagagauuucugauag

SEQ ID NO: 474562 - RNA, 19 nt, Artificial Sequence
  Description of Artificial Sequence: Synthetic oligonucleotide
aauaggacuuugccuuugc

SEQ ID NO: 474563 - RNA, 19 nt, Artificial Sequence
  Description of Artificial Sequence: Synthetic oligonucleotide
agauagugaauaaaggaac

SEQ ID NO: 474564 - RNA, 19 nt, Artificial Sequence
  Description of Artificial Sequence: Synthetic oligonucleotide
gaaguuaaggcaucaguug

SEQ ID NO: 474565 - RNA, 19 nt, Artificial Sequence
  Description of Artificial Sequence: Synthetic oligonucleotide
ucuucguggagguugagcc

SEQ ID NO: 474566 - RNA, 19 nt, Artificial Sequence
  Description of Artificial Sequence: Synthetic oligonucleotide
aaggaauuggggauuuucc

SEQ ID NO: 474567 - RNA, 19 nt, Artificial Sequence
  Description of Artificial Sequence: Synthetic oligonucleotide
ucuagauugauuucaucca

SEQ ID NO: 474568 - RNA, 19 nt, Artificial Sequence
  Description of Artificial Sequence: Synthetic oligonucleotide
ugggauauuaaggaauugg

SEQ ID NO: 474569 - RNA, 19 nt, Artificial Sequence
  Description of Artificial Sequence: Synthetic oligonucleotide
uacgcaugcaucaaaauau

SEQ ID NO: 474570 - RNA, 19 nt, Artificial Sequence
  Description of Artificial Sequence: Synthetic oligonucleotide
uacagauaaaaucuccugu

SEQ ID NO: 474571 - RNA, 19 nt, Artificial Sequence
  Description of Artificial Sequence: Synthetic oligonucleotide
aauugguccuucuagcaga

SEQ ID NO: 474572 - RNA, 19 nt, Artificial Sequence
  Description of Artificial Sequence: Synthetic oligonucleotide
cacuuuauagccuucuccc

SEQ ID NO: 474573 - RNA, 19 nt, Artificial Sequence
  Description of Artificial Sequence: Synthetic oligonucleotide
ugcccuauaaaaugcagcc

SEQ ID NO: 474574 - RNA, 19 nt, Artificial Sequence
  Description of Artificial Sequence: Synthetic oligonucleotide
aaaauuggcaauagcaaca

SEQ ID NO: 474575 - RNA, 19 nt, Artificial Sequence
  Description of Artificial Sequence: Synthetic oligonucleotide
aaugcucuguuuuccuacg

SEQ ID NO: 474576 - RNA, 19 nt, Artificial Sequence
  Description of Artificial Sequence: Synthetic oligonucleotide
uaugacacugugagggugg

SEQ ID NO: 474577 - RNA, 19 nt, Artificial Sequence
  Description of Artificial Sequence: Synthetic oligonucleotide
uuauucuucgggcuugugc

SEQ ID NO: 474578 - RNA, 19 nt, Artificial Sequence
  Description of Artificial Sequence: Synthetic oligonucleotide
aucaagucugacaacaugg

SEQ ID NO: 474579 - RNA, 19 nt, Artificial Sequence
  Description of Artificial Sequence: Synthetic oligonucleotide
gggucucuaaccuugaugg

SEQ ID NO: 474580 - RNA, 19 nt, Artificial Sequence
  Description of Artificial Sequence: Synthetic oligonucleotide
aaccuaauaugacacugug

SEQ ID NO: 474581 - RNA, 19 nt, Artificial Sequence
  Description of Artificial Sequence: Synthetic oligonucleotide
uucaagugaagauagugaa

SEQ ID NO: 474582 - RNA, 19 nt, Artificial Sequence
  Description of Artificial Sequence: Synthetic oligonucleotide
cucaauacuggcaguacgg

SEQ ID NO: 474583 - RNA, 19 nt, Artificial Sequence
  Description of Artificial Sequence: Synthetic oligonucleotide
auuucugauaggcugcgag

SEQ ID NO: 474584 - RNA, 19 nt, Artificial Sequence
  Description of Artificial Sequence: Synthetic oligonucleotide
uuuucaugcugacaggcac

SEQ ID NO: 474585 - RNA, 19 nt, Artificial Sequence
  Description of Artificial Sequence: Synthetic oligonucleotide
ugcuaaccuaauaugacac

SEQ ID NO: 474586 - RNA, 19 nt, Artificial Sequence
  Description of Artificial Sequence: Synthetic oligonucleotide
uuggucauuucauugaaaa

SEQ ID NO: 474587 - RNA, 19 nt, Artificial Sequence
  Description of Artificial Sequence: Synthetic oligonucleotide
aagggucuacaucucagag

SEQ ID NO: 474588 - RNA, 19 nt, Artificial Sequence
  Description of Artificial Sequence: Synthetic oligonucleotide
gauagugaauaaaggaacc

SEQ ID NO: 474589 - RNA, 19 nt, Artificial Sequence
  Description of Artificial Sequence: Synthetic oligonucleotide
ucuagcagagucacuaugu

SEQ ID NO: 474590 - RNA, 19 nt, Artificial Sequence
  Description of Artificial Sequence: Synthetic oligonucleotide
uacggcauugcucagugca

SEQ ID NO: 474591 - RNA, 19 nt, Artificial Sequence
  Description of Artificial Sequence: Synthetic oligonucleotide
uuucugauaggcugcgagg

SEQ ID NO: 474592 - RNA, 19 nt, Artificial Sequence
  Description of Artificial Sequence: Synthetic oligonucleotide
gugaauuucucaauacugg

SEQ ID NO: 474593 - RNA, 19 nt, Artificial Sequence
  Description of Artificial Sequence: Synthetic oligonucleotide
gaauagaaguuaaaacaag

SEQ ID NO: 474594 - RNA, 19 nt, Artificial Sequence
  Description of Artificial Sequence: Synthetic oligonucleotide
auauuaaggaauuggggau

SEQ ID NO: 474595 - RNA, 19 nt, Artificial Sequence
  Description of Artificial Sequence: Synthetic oligonucleotide
uuaggugcaucuucuauga

SEQ ID NO: 474596 - RNA, 19 nt, Artificial Sequence
  Description of Artificial Sequence: Synthetic oligonucleotide
uguaagcacuaacagcacc

SEQ ID NO: 474597 - RNA, 19 nt, Artificial Sequence
  Description of Artificial Sequence: Synthetic oligonucleotide
uaucuuauacggcauugcu

SEQ ID NO: 474598 - RNA, 19 nt, Artificial Sequence
  Description of Artificial Sequence: Synthetic oligonucleotide
uauacggcauugcucagug

SEQ ID NO: 474599 - RNA, 19 nt, Artificial Sequence
  Description of Artificial Sequence: Synthetic oligonucleotide
gauaugagguaauggaauc

SEQ ID NO: 474600 - RNA, 19 nt, Artificial Sequence
  Description of Artificial Sequence: Synthetic oligonucleotide
cuaagucccagggugaucg

SEQ ID NO: 474601 - RNA, 19 nt, Artificial Sequence
  Description of Artificial Sequence: Synthetic oligonucleotide
aaauaagggugauacgcau

SEQ ID NO: 474602 - RNA, 19 nt, Artificial Sequence
  Description of Artificial Sequence: Synthetic oligonucleotide
agaacuacagaauuccuua

SEQ ID NO: 474603 - RNA, 19 nt, Artificial Sequence
  Description of Artificial Sequence: Synthetic oligonucleotide
uuuauagccuucucccugc

SEQ ID NO: 474604 - RNA, 19 nt, Artificial Sequence
  Description of Artificial Sequence: Synthetic oligonucleotide
acgucauuaauguguagag

SEQ ID NO: 474605 - RNA, 19 nt, Artificial Sequence
  Description of Artificial Sequence: Synthetic oligonucleotide
uccuacgucauuuugggau

SEQ ID NO: 474606 - RNA, 19 nt, Artificial Sequence
  Description of Artificial Sequence: Synthetic oligonucleotide
aaaauaagggugauacgca

SEQ ID NO: 474607 - RNA, 19 nt, Artificial Sequence
  Description of Artificial Sequence: Synthetic oligonucleotide
uaguguuugcaaaauugga

SEQ ID NO: 474608 - RNA, 19 nt, Artificial Sequence
  Description of Artificial Sequence: Synthetic oligonucleotide
ugagguaauggaaucucga

SEQ ID NO: 474609 - RNA, 19 nt, Artificial Sequence
  Description of Artificial Sequence: Synthetic oligonucleotide
uguuuacagauaaaaucuc

SEQ ID NO: 474610 - RNA, 19 nt, Artificial Sequence
  Description of Artificial Sequence: Synthetic oligonucleotide
cuuugcuaaccuaauauga

SEQ ID NO: 474611 - RNA, 19 nt, Artificial Sequence
  Description of Artificial Sequence: Synthetic oligonucleotide
aauaugacacugugagggu

SEQ ID NO: 474612 - RNA, 19 nt, Artificial Sequence
  Description of Artificial Sequence: Synthetic oligonucleotide
ucccaacuaagucccaggg

SEQ ID NO: 474613 - RNA, 19 nt, Artificial Sequence
  Description of Artificial Sequence: Synthetic oligonucleotide
aaaucacgucauuaaugug

SEQ ID NO: 474614 - RNA, 19 nt, Artificial Sequence
  Description of Artificial Sequence: Synthetic oligonucleotide
auccaggcggucuaguaac

SEQ ID NO: 474615 - RNA, 19 nt, Artificial Sequence
  Description of Artificial Sequence: Synthetic oligonucleotide
augagaguggauuuccaug

SEQ ID NO: 474616 - RNA, 19 nt, Artificial Sequence
  Description of Artificial Sequence: Synthetic oligonucleotide
uggugaauuucucaauacu

SEQ ID NO: 474617 - RNA, 19 nt, Artificial Sequence
  Description of Artificial Sequence: Synthetic oligonucleotide
uuugggguaaucccuuugu

SEQ ID NO: 474618 - RNA, 19 nt, Artificial Sequence
  Description of Artificial Sequence: Synthetic oligonucleotide
uuggcuuacugaaaagggu

SEQ ID NO: 474619 - RNA, 19 nt, Artificial Sequence
  Description of Artificial Sequence: Synthetic oligonucleotide
ucuggcugaucucugguga

SEQ ID NO: 474620 - RNA, 19 nt, Artificial Sequence
  Description of Artificial Sequence: Synthetic oligonucleotide
gcaaucaacgaauaugggc

SEQ ID NO: 474621 - RNA, 19 nt, Artificial Sequence
  Description of Artificial Sequence: Synthetic oligonucleotide
aggguuuaggugcaucuuc

SEQ ID NO: 474622 - RNA, 19 nt, Artificial Sequence
  Description of Artificial Sequence: Synthetic oligonucleotide
uguaucuuauacggcauug

SEQ ID NO: 474623 - RNA, 19 nt, Artificial Sequence
  Description of Artificial Sequence: Synthetic oligonucleotide
uggcuuacugaaaaggguc

SEQ ID NO: 474624 - RNA, 19 nt, Artificial Sequence
  Description of Artificial Sequence: Synthetic oligonucleotide
gauuccggaaaauaggacu

SEQ ID NO: 474625 - RNA, 19 nt, Artificial Sequence
  Description of Artificial Sequence: Synthetic oligonucleotide
uuuccauagcaaucaacga

SEQ ID NO: 474626 - RNA, 19 nt, Artificial Sequence
  Description of Artificial Sequence: Synthetic oligonucleotide
ugauacgcaugcaucaaaa

SEQ ID NO: 474627 - RNA, 19 nt, Artificial Sequence
  Description of Artificial Sequence: Synthetic oligonucleotide
uugucaagaccgaaguuaa

SEQ ID NO: 474628 - RNA, 19 nt, Artificial Sequence
  Description of Artificial Sequence: Synthetic oligonucleotide
caaucaacgaauaugggcu

SEQ ID NO: 474629 - RNA, 19 nt, Artificial Sequence
  Description of Artificial Sequence: Synthetic oligonucleotide
cuuacguaaagcuaaagau

SEQ ID NO: 474630 - RNA, 19 nt, Artificial Sequence
  Description of Artificial Sequence: Synthetic oligonucleotide
ggauauuaaggaauugggg

SEQ ID NO: 474631 - RNA, 19 nt, Artificial Sequence
  Description of Artificial Sequence: Synthetic oligonucleotide
agcuguagcgcuuacguaa

SEQ ID NO: 474632 - RNA, 19 nt, Artificial Sequence
  Description of Artificial Sequence: Synthetic oligonucleotide
ucuaguaacccaccaguua

SEQ ID NO: 474633 - RNA, 19 nt, Artificial Sequence
  Description of Artificial Sequence: Synthetic oligonucleotide
guaagcacuaacagcaccc

SEQ ID NO: 474634 - RNA, 19 nt, Artificial Sequence
  Description of Artificial Sequence: Synthetic oligonucleotide
uggcaauagcaacaaauau

SEQ ID NO: 474635 - RNA, 19 nt, Artificial Sequence
  Description of Artificial Sequence: Synthetic oligonucleotide
aacgaauaugggcuuuccu

SEQ ID NO: 474636 - RNA, 19 nt, Artificial Sequence
  Description of Artificial Sequence: Synthetic oligonucleotide
uucuuguaucuuauacggc

SEQ ID NO: 474637 - RNA, 19 nt, Artificial Sequence
  Description of Artificial Sequence: Synthetic oligonucleotide
agaguggauuuccaugcuc

SEQ ID NO: 474638 - RNA, 19 nt, Artificial Sequence
  Description of Artificial Sequence: Synthetic oligonucleotide
ccugcuuaggcucugaccc

SEQ ID NO: 474639 - RNA, 19 nt, Artificial Sequence
  Description of Artificial Sequence: Synthetic oligonucleotide
agugcgaccagauccgugu

SEQ ID NO: 474640 - RNA, 19 nt, Artificial Sequence
  Description of Artificial Sequence: Synthetic oligonucleotide
auacgcaugcaucaaaaua

SEQ ID NO: 474641 - RNA, 19 nt, Artificial Sequence
  Description of Artificial Sequence: Synthetic oligonucleotide
acaagugauuggcuuacug

SEQ ID NO: 474642 - RNA, 19 nt, Artificial Sequence
  Description of Artificial Sequence: Synthetic oligonucleotide
uauuaguauucugaaguaa

SEQ ID NO: 474643 - RNA, 19 nt, Artificial Sequence
  Description of Artificial Sequence: Synthetic oligonucleotide
cucagugcgaccagauccg

SEQ ID NO: 474644 - RNA, 19 nt, Artificial Sequence
  Description of Artificial Sequence: Synthetic oligonucleotide
cagagugccuucugcaugg

SEQ ID NO: 474645 - RNA, 19 nt, Artificial Sequence
  Description of Artificial Sequence: Synthetic oligonucleotide
aauaagggugauacgcaug

SEQ ID NO: 474646 - RNA, 19 nt, Artificial Sequence
  Description of Artificial Sequence: Synthetic oligonucleotide
acgaauaugggcuuuccuu

SEQ ID NO: 474647 - RNA, 19 nt, Artificial Sequence
  Description of Artificial Sequence: Synthetic oligonucleotide
aagaccgaaguuaaggcau

SEQ ID NO: 474648 - RNA, 19 nt, Artificial Sequence
  Description of Artificial Sequence: Synthetic oligonucleotide
gucaucuagagcuaggugu

SEQ ID NO: 474649 - RNA, 19 nt, Artificial Sequence
  Description of Artificial Sequence: Synthetic oligonucleotide
gaaucucgaaccugaucag

SEQ ID NO: 474650 - RNA, 19 nt, Artificial Sequence
  Description of Artificial Sequence: Synthetic oligonucleotide
cuaaagaugcaaagcucug

SEQ ID NO: 474651 - RNA, 19 nt, Artificial Sequence
  Description of Artificial Sequence: Synthetic oligonucleotide
agauaaaaucuccuguguu

SEQ ID NO: 474652 - RNA, 19 nt, Artificial Sequence
  Description of Artificial Sequence: Synthetic oligonucleotide
gguuuugcaccucagcgag

SEQ ID NO: 474653 - RNA, 19 nt, Artificial Sequence
  Description of Artificial Sequence: Synthetic oligonucleotide
auauuaguauucugaagua

SEQ ID NO: 474654 - RNA, 19 nt, Artificial Sequence
  Description of Artificial Sequence: Synthetic oligonucleotide
uucggcucuuucaggaaag

SEQ ID NO: 474655 - RNA, 19 nt, Artificial Sequence
  Description of Artificial Sequence: Synthetic oligonucleotide
uuaauguguagaggcagca

SEQ ID NO: 474656 - RNA, 19 nt, Artificial Sequence
  Description of Artificial Sequence: Synthetic oligonucleotide
agucacuaugucuauucga

SEQ ID NO: 474657 - RNA, 19 nt, Artificial Sequence
  Description of Artificial Sequence: Synthetic oligonucleotide
uggauuuccaugcucugua

SEQ ID NO: 474658 - RNA, 19 nt, Artificial Sequence
  Description of Artificial Sequence: Synthetic oligonucleotide
aguaacccaccaguuauuc

SEQ ID NO: 474659 - RNA, 19 nt, Artificial Sequence
  Description of Artificial Sequence: Synthetic oligonucleotide
uaaaggaaccucaccgaaa

SEQ ID NO: 474660 - RNA, 19 nt, Artificial Sequence
  Description of Artificial Sequence: Synthetic oligonucleotide
uuaaaacaagcugcugagc

SEQ ID NO: 474661 - RNA, 19 nt, Artificial Sequence
  Description of Artificial Sequence: Synthetic oligonucleotide
aucuuauacggcauugcuc

SEQ ID NO: 474662 - RNA, 19 nt, Artificial Sequence
  Description of Artificial Sequence: Synthetic oligonucleotide
uaugauccuggacggacgu

SEQ ID NO: 474663 - RNA, 19 nt, Artificial Sequence
  Description of Artificial Sequence: Synthetic oligonucleotide
gauauggguuucuggucag

SEQ ID NO: 474664 - RNA, 19 nt, Artificial Sequence
  Description of Artificial Sequence: Synthetic oligonucleotide
guugcaggagacuguagug

SEQ ID NO: 474665 - RNA, 19 nt, Artificial Sequence
  Description of Artificial Sequence: Synthetic oligonucleotide
gaauuucucaauacuggca

SEQ ID NO: 474666 - RNA, 19 nt, Artificial Sequence
  Description of Artificial Sequence: Synthetic oligonucleotide
aauauuagaugaagggcuu

SEQ ID NO: 474667 - RNA, 19 nt, Artificial Sequence
  Description of Artificial Sequence: Synthetic oligonucleotide
uagugaauaaaggaaccuc

SEQ ID NO: 474668 - RNA, 19 nt, Artificial Sequence
  Description of Artificial Sequence: Synthetic oligonucleotide
caguacggaacauaugauc

SEQ ID NO: 474669 - RNA, 19 nt, Artificial Sequence
  Description of Artificial Sequence: Synthetic oligonucleotide
uguagcgcuuacguaaagc

SEQ ID NO: 474670 - RNA, 19 nt, Artificial Sequence
  Description of Artificial Sequence: Synthetic oligonucleotide
ugugccggggacucuaggc

SEQ ID NO: 474671 - RNA, 19 nt, Artificial Sequence
  Description of Artificial Sequence: Synthetic oligonucleotide
agcuaaagaugcaaagcuc

SEQ ID NO: 474672 - RNA, 19 nt, Artificial Sequence
  Description of Artificial Sequence: Synthetic oligonucleotide
auagugaauaaaggaaccu

SEQ ID NO: 474673 - RNA, 19 nt, Artificial Sequence
  Description of Artificial Sequence: Synthetic oligonucleotide
ucucguucugccaaccauc

SEQ ID NO: 474674 - RNA, 19 nt, Artificial Sequence
  Description of Artificial Sequence: Synthetic oligonucleotide
acguaucuagauugauuuc

SEQ ID NO: 474675 - RNA, 19 nt, Artificial Sequence
  Description of Artificial Sequence: Synthetic oligonucleotide
cucaccgaaacccaaagaa

SEQ ID NO: 474676 - RNA, 19 nt, Artificial Sequence
  Description of Artificial Sequence: Synthetic oligonucleotide
caagugauuggcuuacuga

SEQ ID NO: 474677 - RNA, 19 nt, Artificial Sequence
  Description of Artificial Sequence: Synthetic oligonucleotide
ugugcagguagaguaauau

SEQ ID NO: 474678 - RNA, 19 nt, Artificial Sequence
  Description of Artificial Sequence: Synthetic oligonucleotide
aagucccagggugaucggc

SEQ ID NO: 474679 - RNA, 19 nt, Artificial Sequence
  Description of Artificial Sequence: Synthetic oligonucleotide
ccaacuaagucccagggug

SEQ ID NO: 474680 - RNA, 19 nt, Artificial Sequence
  Description of Artificial Sequence: Synthetic oligonucleotide
aaucaacgaauaugggcuu

SEQ ID NO: 474681 - RNA, 19 nt, Artificial Sequence
  Description of Artificial Sequence: Synthetic oligonucleotide
ucuguggacucaugccagg

SEQ ID NO: 474682 - RNA, 19 nt, Artificial Sequence
  Description of Artificial Sequence: Synthetic oligonucleotide
agguagaguaauauuuaag

SEQ ID NO: 474683 - RNA, 19 nt, Artificial Sequence
  Description of Artificial Sequence: Synthetic oligonucleotide
acacgugucaauccuggga

SEQ ID NO: 474684 - RNA, 19 nt, Artificial Sequence
  Description of Artificial Sequence: Synthetic oligonucleotide
uacggaacauaugauccug

SEQ ID NO: 474685 - RNA, 19 nt, Artificial Sequence
  Description of Artificial Sequence: Synthetic oligonucleotide
ucucgaaccugaucagagc

SEQ ID NO: 474686 - RNA, 19 nt, Artificial Sequence
  Description of Artificial Sequence: Synthetic oligonucleotide
gugaucggcuacuauugcc

SEQ ID NO: 474687 - RNA, 19 nt, Artificial Sequence
  Description of Artificial Sequence: Synthetic oligonucleotide
uaauguguagaggcagcag

SEQ ID NO: 474688 - RNA, 19 nt, Artificial Sequence
  Description of Artificial Sequence: Synthetic oligonucleotide
ugacaaacuuguugguuuc

SEQ ID NO: 474689 - RNA, 19 nt, Artificial Sequence
  Description of Artificial Sequence: Synthetic oligonucleotide
aguacacaauaacagugua

SEQ ID NO: 474690 - RNA, 19 nt, Artificial Sequence
  Description of Artificial Sequence: Synthetic oligonucleotide
ucgaaccugaucagagcug

SEQ ID NO: 474691 - RNA, 19 nt, Artificial Sequence
  Description of Artificial Sequence: Synthetic oligonucleotide
gaugcaaagcucugacguc

SEQ ID NO: 474692 - RNA, 19 nt, Artificial Sequence
  Description of Artificial Sequence: Synthetic oligonucleotide
uggacggacgucacuguca

SEQ ID NO: 474693 - RNA, 19 nt, Artificial Sequence
  Description of Artificial Sequence: Synthetic oligonucleotide
auaugagguaauggaaucu

SEQ ID NO: 474694 - RNA, 19 nt, Artificial Sequence
  Description of Artificial Sequence: Synthetic oligonucleotide
aaucucgaaccugaucaga

SEQ ID NO: 474695 - RNA, 19 nt, Artificial Sequence
  Description of Artificial Sequence: Synthetic oligonucleotide
augagguaauggaaucucg

SEQ ID NO: 474696 - RNA, 19 nt, Artificial Sequence
  Description of Artificial Sequence: Synthetic oligonucleotide
ggcuucuuguaucuuauac

SEQ ID NO: 474697 - RNA, 19 nt, Artificial Sequence
  Description of Artificial Sequence: Synthetic oligonucleotide
uaagcacuaacagcacccc

SEQ ID NO: 474698 - RNA, 19 nt, Artificial Sequence
  Description of Artificial Sequence: Synthetic oligonucleotide
gcuuacguaaagcuaaaga

SEQ ID NO: 474699 - RNA, 19 nt, Artificial Sequence
  Description of Artificial Sequence: Synthetic oligonucleotide
gagguaauggaaucucgaa

SEQ ID NO: 474700 - RNA, 19 nt, Artificial Sequence
  Description of Artificial Sequence: Synthetic oligonucleotide
aucucgaaccugaucagag

SEQ ID NO: 474701 - RNA, 19 nt, Artificial Sequence
  Description of Artificial Sequence: Synthetic oligonucleotide
ugauaggcugcgaggggug

SEQ ID NO: 474702 - RNA, 19 nt, Artificial Sequence
  Description of Artificial Sequence: Synthetic oligonucleotide
ugucaauccugggaaugag

SEQ ID NO: 474703 - RNA, 19 nt, Artificial Sequence
  Description of Artificial Sequence: Synthetic oligonucleotide
caccgaaacccaaagaaaa

SEQ ID NO: 474704 - RNA, 19 nt, Artificial Sequence
  Description of Artificial Sequence: Synthetic oligonucleotide
cucuguggacucaugccag

SEQ ID NO: 474705 - RNA, 19 nt, Artificial Sequence
  Description of Artificial Sequence: Synthetic oligonucleotide
uuacccuugccaacucugu

SEQ ID NO: 474706 - RNA, 19 nt, Artificial Sequence
  Description of Artificial Sequence: Synthetic oligonucleotide
uguggacucaugccaggcu

SEQ ID NO: 474707 - RNA, 19 nt, Artificial Sequence
  Description of Artificial Sequence: Synthetic oligonucleotide
uccuggacggacgucacug

SEQ ID NO: 474708 - RNA, 19 nt, Artificial Sequence
  Description of Artificial Sequence: Synthetic oligonucleotide
agggugaucggcuacuauu

SEQ ID NO: 474709 - RNA, 19 nt, Artificial Sequence
  Description of Artificial Sequence: Synthetic oligonucleotide
acuaugucuauucgauuua

SEQ ID NO: 474710 - RNA, 19 nt, Artificial Sequence
  Description of Artificial Sequence: Synthetic oligonucleotide
uccggaaaauaggacuuug

SEQ ID NO: 474711 - RNA, 19 nt, Artificial Sequence
  Description of Artificial Sequence: Synthetic oligonucleotide
auaugacacugugagggug

SEQ ID NO: 474712 - RNA, 19 nt, Artificial Sequence
  Description of Artificial Sequence: Synthetic oligonucleotide
guagcuguagcgcuuacgu

SEQ ID NO: 474713 - RNA, 19 nt, Artificial Sequence
  Description of Artificial Sequence: Synthetic oligonucleotide
ccaagcaacuacuguauag

SEQ ID NO: 474714 - RNA, 19 nt, Artificial Sequence
  Description of Artificial Sequence: Synthetic oligonucleotide
acuugagaucaagucugac

SEQ ID NO: 474715 - RNA, 19 nt, Artificial Sequence
  Description of Artificial Sequence: Synthetic oligonucleotide
ugucccaacuaagucccag

SEQ ID NO: 474716 - RNA, 19 nt, Artificial Sequence
  Description of Artificial Sequence: Synthetic oligonucleotide
gacacugugagggugguua

SEQ ID NO: 474717 - RNA, 19 nt, Artificial Sequence
  Description of Artificial Sequence: Synthetic oligonucleotide
agcgcuuacguaaagcuaa

SEQ ID NO: 474718 - RNA, 19 nt, Artificial Sequence
  Description of Artificial Sequence: Synthetic oligonucleotide
ugguuacaagugauuggcu

SEQ ID NO: 474719 - RNA, 19 nt, Artificial Sequence
  Description of Artificial Sequence: Synthetic oligonucleotide
aucaacugggucaugguaa

SEQ ID NO: 474720 - RNA, 19 nt, Artificial Sequence
  Description of Artificial Sequence: Synthetic oligonucleotide
ucaaguagcuguagcgcuu

SEQ ID NO: 474721 - RNA, 19 nt, Artificial Sequence
  Description of Artificial Sequence: Synthetic oligonucleotide
ucuguccgcucacaaggac

SEQ ID NO: 474722 - RNA, 19 nt, Artificial Sequence
  Description of Artificial Sequence: Synthetic oligonucleotide
agcaaucaacgaauauggg

SEQ ID NO: 474723 - RNA, 19 nt, Artificial Sequence
  Description of Artificial Sequence: Synthetic oligonucleotide
uuauacggcauugcucagu

SEQ ID NO: 474724 - RNA, 19 nt, Artificial Sequence
  Description of Artificial Sequence: Synthetic oligonucleotide
uuguaucuuauacggcauu

SEQ ID NO: 474725 - RNA, 19 nt, Artificial Sequence
  Description of Artificial Sequence: Synthetic oligonucleotide
cacgucauuaauguguaga

SEQ ID NO: 474726 - RNA, 19 nt, Artificial Sequence
  Description of Artificial Sequence: Synthetic oligonucleotide
guagcgcuuacguaaagcu

SEQ ID NO: 474727 - RNA, 19 nt, Artificial Sequence
  Description of Artificial Sequence: Synthetic oligonucleotide
guuugggguaaucccuuug

SEQ ID NO: 474728 - RNA, 19 nt, Artificial Sequence
  Description of Artificial Sequence: Synthetic oligonucleotide
auacggcauugcucagugc

SEQ ID NO: 474729 - RNA, 19 nt, Artificial Sequence
  Description of Artificial Sequence: Synthetic oligonucleotide
ggaaugagaguggauuucc

SEQ ID NO: 474730 - RNA, 19 nt, Artificial Sequence
  Description of Artificial Sequence: Synthetic oligonucleotide
ugguuccucagugcgacca

SEQ ID NO: 474731 - RNA, 19 nt, Artificial Sequence
  Description of Artificial Sequence: Synthetic oligonucleotide
gucuucggcucuuucagga

SEQ ID NO: 474732 - RNA, 19 nt, Artificial Sequence
  Description of Artificial Sequence: Synthetic oligonucleotide
ugucucguucugccaacca

SEQ ID NO: 474733 - RNA, 19 nt, Artificial Sequence
  Description of Artificial Sequence: Synthetic oligonucleotide
ggaacauaugauccuggac

SEQ ID NO: 474734 - RNA, 19 nt, Artificial Sequence
  Description of Artificial Sequence: Synthetic oligonucleotide
auaggacuuugccuuugcu

SEQ ID NO: 474735 - RNA, 19 nt, Artificial Sequence
  Description of Artificial Sequence: Synthetic oligonucleotide
cacguaucuagauugauuu

SEQ ID NO: 474736 - RNA, 19 nt, Artificial Sequence
  Description of Artificial Sequence: Synthetic oligonucleotide
uagcgcuuacguaaagcua

SEQ ID NO: 474737 - RNA, 19 nt, Artificial Sequence
  Description of Artificial Sequence: Synthetic oligonucleotide
acgucauuuugggauuccg

SEQ ID NO: 474738 - RNA, 19 nt, Artificial Sequence
  Description of Artificial Sequence: Synthetic oligonucleotide
cuaguaacccaccaguuau

SEQ ID NO: 474739 - RNA, 19 nt, Artificial Sequence
  Description of Artificial Sequence: Synthetic oligonucleotide
guggacucaugccaggcuc

SEQ ID NO: 474740 - RNA, 19 nt, Artificial Sequence
  Description of Artificial Sequence: Synthetic oligonucleotide
uugugccggggacucuagg

SEQ ID NO: 474741 - RNA, 19 nt, Artificial Sequence
  Description of Artificial Sequence: Synthetic oligonucleotide
augucucguucugccaacc

SEQ ID NO: 474742 - RNA, 19 nt, Artificial Sequence
  Description of Artificial Sequence: Synthetic oligonucleotide
cuguaagcacuaacagcac

SEQ ID NO: 474743 - RNA, 19 nt, Artificial Sequence
  Description of Artificial Sequence: Synthetic oligonucleotide
uaagucccagggugaucgg

SEQ ID NO: 474744 - RNA, 19 nt, Artificial Sequence
  Description of Artificial Sequence: Synthetic oligonucleotide
ucuagagcuagguguccau

SEQ ID NO: 474745 - RNA, 19 nt, Artificial Sequence
  Description of Artificial Sequence: Synthetic oligonucleotide
ugcuuaggcucugacccgc

SEQ ID NO: 474746 - RNA, 19 nt, Artificial Sequence
  Description of Artificial Sequence: Synthetic oligonucleotide
ugccaacucugucccaacu

SEQ ID NO: 474747 - RNA, 19 nt, Artificial Sequence
  Description of Artificial Sequence: Synthetic oligonucleotide
aacuaagucccagggugau

SEQ ID NO: 474748 - RNA, 19 nt, Artificial Sequence
  Description of Artificial Sequence: Synthetic oligonucleotide
acggacgucacugucacua

SEQ ID NO: 474749 - RNA, 19 nt, Artificial Sequence
  Description of Artificial Sequence: Synthetic oligonucleotide
caugccaggcucagucaag

SEQ ID NO: 474750 - RNA, 19 nt, Artificial Sequence
  Description of Artificial Sequence: Synthetic oligonucleotide
uguugucuucggcucuuuc

SEQ ID NO: 474751 - RNA, 19 nt, Artificial Sequence
  Description of Artificial Sequence: Synthetic oligonucleotide
aggcggucuaguaacccac

SEQ ID NO: 474752 - RNA, 19 nt, Artificial Sequence
  Description of Artificial Sequence: Synthetic oligonucleotide
uugguaagaggggccaggu

SEQ ID NO: 474753 - RNA, 19 nt, Artificial Sequence
  Description of Artificial Sequence: Synthetic oligonucleotide
ugcgaccagauccgugugu

SEQ ID NO: 474754 - RNA, 19 nt, Artificial Sequence
  Description of Artificial Sequence: Synthetic oligonucleotide
cacuugaugucucguucug

SEQ ID NO: 474755 - RNA, 19 nt, Artificial Sequence
  Description of Artificial Sequence: Synthetic oligonucleotide
cagguagaguaauauuuaa

SEQ ID NO: 474756 - RNA, 19 nt, Artificial Sequence
  Description of Artificial Sequence: Synthetic oligonucleotide
cugauaucuguccgcucac

SEQ ID NO: 474757 - RNA, 19 nt, Artificial Sequence
  Description of Artificial Sequence: Synthetic oligonucleotide
ugauaucuguccgcucaca

SEQ ID NO: 474758 - RNA, 19 nt, Artificial Sequence
  Description of Artificial Sequence: Synthetic oligonucleotide
gggugguuacaagugauug

SEQ ID NO: 474759 - RNA, 19 nt, Artificial Sequence
  Description of Artificial Sequence: Synthetic oligonucleotide
guaauggaaucucgaaccu

SEQ ID NO: 474760 - RNA, 19 nt, Artificial Sequence
  Description of Artificial Sequence: Synthetic oligonucleotide
cucguucugccaaccauca

SEQ ID NO: 474761 - RNA, 19 nt, Artificial Sequence
  Description of Artificial Sequence: Synthetic oligonucleotide
ugccauccugauaucuguc

SEQ ID NO: 474762 - RNA, 19 nt, Artificial Sequence
  Description of Artificial Sequence: Synthetic oligonucleotide
uaguaacccaccaguuauu

SEQ ID NO: 474763 - RNA, 19 nt, Artificial Sequence
  Description of Artificial Sequence: Synthetic oligonucleotide
accuaauaugacacuguga

SEQ ID NO: 474764 - RNA, 19 nt, Artificial Sequence
  Description of Artificial Sequence: Synthetic oligonucleotide
uuccuacgucauuuuggga

SEQ ID NO: 474765 - RNA, 19 nt, Artificial Sequence
  Description of Artificial Sequence: Synthetic oligonucleotide
gcucuguuuuccuacguca

SEQ ID NO: 474766 - RNA, 19 nt, Artificial Sequence
  Description of Artificial Sequence: Synthetic oligonucleotide
agaccgaaguuaaggcauc

SEQ ID NO: 474767 - RNA, 19 nt, Artificial Sequence
  Description of Artificial Sequence: Synthetic oligonucleotide
acuaagucccagggugauc

SEQ ID NO: 474768 - RNA, 19 nt, Artificial Sequence
  Description of Artificial Sequence: Synthetic oligonucleotide
caacgaauaugggcuuucc

SEQ ID NO: 474769 - RNA, 19 nt, Artificial Sequence
  Description of Artificial Sequence: Synthetic oligonucleotide
uacgucauuuugggauucc

SEQ ID NO: 474770 - RNA, 19 nt, Artificial Sequence
  Description of Artificial Sequence: Synthetic oligonucleotide
acggcauugcucagugcac

SEQ ID NO: 474771 - RNA, 19 nt, Artificial Sequence
  Description of Artificial Sequence: Synthetic oligonucleotide
caaagcucugacgucuguc

SEQ ID NO: 474772 - RNA, 19 nt, Artificial Sequence
  Description of Artificial Sequence: Synthetic oligonucleotide
gauacgcaugcaucaaaau

SEQ ID NO: 474773 - RNA, 19 nt, Artificial Sequence
  Description of Artificial Sequence: Synthetic oligonucleotide
ggucuaguaacccaccagu

SEQ ID NO: 474774 - RNA, 19 nt, Artificial Sequence
  Description of Artificial Sequence: Synthetic oligonucleotide
gucacuaugucuauucgau

SEQ ID NO: 474775 - RNA, 19 nt, Artificial Sequence
  Description of Artificial Sequence: Synthetic oligonucleotide
gcuaaagaugcaaagcucu

SEQ ID NO: 474776 - RNA, 19 nt, Artificial Sequence
  Description of Artificial Sequence: Synthetic oligonucleotide
ucgggcuugugccggggac

SEQ ID NO: 474777 - RNA, 19 nt, Artificial Sequence
  Description of Artificial Sequence: Synthetic oligonucleotide
ggugaucggcuacuauugc

SEQ ID NO: 474778 - RNA, 19 nt, Artificial Sequence
  Description of Artificial Sequence: Synthetic oligonucleotide
gggugaucggcuacuauug

SEQ ID NO: 474779 - RNA, 19 nt, Artificial Sequence
  Description of Artificial Sequence: Synthetic oligonucleotide
ccggaaaauaggacuuugc

SEQ ID NO: 474780 - RNA, 19 nt, Artificial Sequence
  Description of Artificial Sequence: Synthetic oligonucleotide
uucuggugccugaaauauu

SEQ ID NO: 474781 - RNA, 19 nt, Artificial Sequence
  Description of Artificial Sequence: Synthetic oligonucleotide
ccugauaucuguccgcuca

SEQ ID NO: 474782 - RNA, 19 nt, Artificial Sequence
  Description of Artificial Sequence: Synthetic oligonucleotide
cagauaaaaucuccugugu

SEQ ID NO: 474783 - RNA, 19 nt, Artificial Sequence
  Description of Artificial Sequence: Synthetic oligonucleotide
ggguuuugcaccucagcga

SEQ ID NO: 474784 - RNA, 19 nt, Artificial Sequence
  Description of Artificial Sequence: Synthetic oligonucleotide
cuguggacucaugccaggc

SEQ ID NO: 474785 - RNA, 19 nt, Artificial Sequence
  Description of Artificial Sequence: Synthetic oligonucleotide
uuuguugucuucggcucuu

SEQ ID NO: 474786 - RNA, 19 nt, Artificial Sequence
  Description of Artificial Sequence: Synthetic oligonucleotide
auauuagaugaagggcuuu

SEQ ID NO: 474787 - RNA, 19 nt, Artificial Sequence
  Description of Artificial Sequence: Synthetic oligonucleotide
uguuugggguaaucccuuu

SEQ ID NO: 474788 - RNA, 19 nt, Artificial Sequence
  Description of Artificial Sequence: Synthetic oligonucleotide
gugauacgcaugcaucaaa

SEQ ID NO: 474789 - RNA, 19 nt, Artificial Sequence
  Description of Artificial Sequence: Synthetic oligonucleotide
uaagggugauacgcaugca

SEQ ID NO: 474790 - RNA, 19 nt, Artificial Sequence
  Description of Artificial Sequence: Synthetic oligonucleotide
acacguaucuagauugauu

SEQ ID NO: 474791 - RNA, 19 nt, Artificial Sequence
  Description of Artificial Sequence: Synthetic oligonucleotide
caucaacugggucauggua

SEQ ID NO: 474792 - RNA, 19 nt, Artificial Sequence
  Description of Artificial Sequence: Synthetic oligonucleotide
cuugugccggggacucuag

SEQ ID NO: 474793 - RNA, 19 nt, Artificial Sequence
  Description of Artificial Sequence: Synthetic oligonucleotide
uagcuguagcgcuuacgua

SEQ ID NO: 474794 - RNA, 19 nt, Artificial Sequence
  Description of Artificial Sequence: Synthetic oligonucleotide
aguuauucuucgggcuugu

SEQ ID NO: 474795 - RNA, 19 nt, Artificial Sequence
  Description of Artificial Sequence: Synthetic oligonucleotide
cauccaggcggucuaguaa

SEQ ID NO: 474796 - RNA, 19 nt, Artificial Sequence
  Description of Artificial Sequence: Synthetic oligonucleotide
ucccagggugaucggcuac

SEQ ID NO: 474797 - RNA, 19 nt, Artificial Sequence
  Description of Artificial Sequence: Synthetic oligonucleotide
uucgggcuugugccgggga

SEQ ID NO: 474798 - RNA, 19 nt, Artificial Sequence
  Description of Artificial Sequence: Synthetic oligonucleotide
ggacggacgucacugucac

SEQ ID NO: 474799 - RNA, 19 nt, Artificial Sequence
  Description of Artificial Sequence: Synthetic oligonucleotide
cuucggcucuuucaggaaa

SEQ ID NO: 474800 - RNA, 19 nt, Artificial Sequence
  Description of Artificial Sequence: Synthetic oligonucleotide
cuggacggacgucacuguc

SEQ ID NO: 474801 - RNA, 19 nt, Artificial Sequence
  Description of Artificial Sequence: Synthetic oligonucleotide
acuggcaguacggaacaua

SEQ ID NO: 474802 - RNA, 19 nt, Artificial Sequence
  Description of Artificial Sequence: Synthetic oligonucleotide
gggauuuuccacacguauc

SEQ ID NO: 474803 - RNA, 19 nt, Artificial Sequence
  Description of Artificial Sequence: Synthetic oligonucleotide
cuguagcgcuuacguaaag

SEQ ID NO: 474804 - RNA, 19 nt, Artificial Sequence
  Description of Artificial Sequence: Synthetic oligonucleotide
gcugagcuccuuugguaag

SEQ ID NO: 474805 - RNA, 19 nt, Artificial Sequence
  Description of Artificial Sequence: Synthetic oligonucleotide
acauaugauccuggacgga

SEQ ID NO: 474806 - RNA, 19 nt, Artificial Sequence
  Description of Artificial Sequence: Synthetic oligonucleotide
uccugauaucuguccgcuc

SEQ ID NO: 474807 - RNA, 19 nt, Artificial Sequence
  Description of Artificial Sequence: Synthetic oligonucleotide
cguaucuagauugauuuca

SEQ ID NO: 474808 - RNA, 19 nt, Artificial Sequence
  Description of Artificial Sequence: Synthetic oligonucleotide
gguuacaagugauuggcuu

SEQ ID NO: 474809 - RNA, 19 nt, Artificial Sequence
  Description of Artificial Sequence: Synthetic oligonucleotide
gaugaagggcuuuguguuu

SEQ ID NO: 474810 - RNA, 19 nt, Artificial Sequence
  Description of Artificial Sequence: Synthetic oligonucleotide
cuacgucauuuugggauuc

SEQ ID NO: 474811 - RNA, 19 nt, Artificial Sequence
  Description of Artificial Sequence: Synthetic oligonucleotide
acguaaagcuaaagaugca

SEQ ID NO: 474812 - RNA, 19 nt, Artificial Sequence
  Description of Artificial Sequence: Synthetic oligonucleotide
cagugcgaccagauccgug

SEQ ID NO: 474813 - RNA, 19 nt, Artificial Sequence
  Description of Artificial Sequence: Synthetic oligonucleotide
gcugcgaggggugaugcug

SEQ ID NO: 474814 - RNA, 19 nt, Artificial Sequence
  Description of Artificial Sequence: Synthetic oligonucleotide
aacucccuucuugguaaau

SEQ ID NO: 474815 - RNA, 19 nt, Artificial Sequence
  Description of Artificial Sequence: Synthetic oligonucleotide
aucaacgaauaugggcuuu

SEQ ID NO: 474816 - RNA, 19 nt, Artificial Sequence
  Description of Artificial Sequence: Synthetic oligonucleotide
uuccggaaaauaggacuuu

SEQ ID NO: 474817 - RNA, 19 nt, Artificial Sequence
  Description of Artificial Sequence: Synthetic oligonucleotide
gauaggcugcgagggguga

SEQ ID NO: 474818 - RNA, 19 nt, Artificial Sequence
  Description of Artificial Sequence: Synthetic oligonucleotide
cucuaaccuugauggaaaa

SEQ ID NO: 474819 - RNA, 19 nt, Artificial Sequence
  Description of Artificial Sequence: Synthetic oligonucleotide
gauccuggacggacgucac

SEQ ID NO: 474820 - RNA, 19 nt, Artificial Sequence
  Description of Artificial Sequence: Synthetic oligonucleotide
cccugcuuaggcucugacc

SEQ ID NO: 474821 - RNA, 19 nt, Artificial Sequence
  Description of Artificial Sequence: Synthetic oligonucleotide
agcuccaaacucccuucuu

SEQ ID NO: 474822 - RNA, 19 nt, Artificial Sequence
  Description of Artificial Sequence: Synthetic oligonucleotide
ugacgucuguccgcuuucu

SEQ ID NO: 474823 - RNA, 19 nt, Artificial Sequence
  Description of Artificial Sequence: Synthetic oligonucleotide
gcagccuuugcuaaccuaa

SEQ ID NO: 474824 - RNA, 19 nt, Artificial Sequence
  Description of Artificial Sequence: Synthetic oligonucleotide
ucagugcgaccagauccgu

SEQ ID NO: 474825 - RNA, 19 nt, Artificial Sequence
  Description of Artificial Sequence: Synthetic oligonucleotide
cugguuccucagugcgacc

SEQ ID NO: 474826 - RNA, 19 nt, Artificial Sequence
  Description of Artificial Sequence: Synthetic oligonucleotide
guaucuagauugauuucau

SEQ ID NO: 474827 - RNA, 19 nt, Artificial Sequence
  Description of Artificial Sequence: Synthetic oligonucleotide
auccuggacggacgucacu

SEQ ID NO: 474828 - RNA, 19 nt, Artificial Sequence
  Description of Artificial Sequence: Synthetic oligonucleotide
gugcacacgugucaauccu

SEQ ID NO: 474829 - RNA, 19 nt, Artificial Sequence
  Description of Artificial Sequence: Synthetic oligonucleotide
gaucggcuacuauugccau

SEQ ID NO: 474830 - RNA, 19 nt, Artificial Sequence
  Description of Artificial Sequence: Synthetic oligonucleotide
gugcgaccagauccgugug

SEQ ID NO: 474831 - RNA, 19 nt, Artificial Sequence
  Description of Artificial Sequence: Synthetic oligonucleotide
cugcugagcuccuuuggua

SEQ ID NO: 474832 - RNA, 19 nt, Artificial Sequence
  Description of Artificial Sequence: Synthetic oligonucleotide
aucuguccgcucacaagga

SEQ ID NO: 474833 - RNA, 19 nt, Artificial Sequence
  Description of Artificial Sequence: Synthetic oligonucleotide
cugagcuccuuugguaaga

SEQ ID NO: 474834 - RNA, 19 nt, Artificial Sequence
  Description of Artificial Sequence: Synthetic oligonucleotide
cacguuccgaauuucuuuu

SEQ ID NO: 474835 - RNA, 19 nt, Artificial Sequence
  Description of Artificial Sequence: Synthetic oligonucleotide
gucucguucugccaaccau

SEQ ID NO: 474836 - RNA, 19 nt, Artificial Sequence
  Description of Artificial Sequence: Synthetic oligonucleotide
ggucucuaaccuugaugga

SEQ ID NO: 474837 - RNA, 19 nt, Artificial Sequence
  Description of Artificial Sequence: Synthetic oligonucleotide
gcuaaccuaauaugacacu

SEQ ID NO: 474838 - RNA, 19 nt, Artificial Sequence
  Description of Artificial Sequence: Synthetic oligonucleotide
cuacuauugccauccugau

SEQ ID NO: 474839 - RNA, 19 nt, Artificial Sequence
  Description of Artificial Sequence: Synthetic oligonucleotide
aaccaucaacugggucaug

SEQ ID NO: 474840 - RNA, 19 nt, Artificial Sequence
  Description of Artificial Sequence: Synthetic oligonucleotide
ccaacucugucccaacuaa

SEQ ID NO: 474841 - RNA, 19 nt, Artificial Sequence
  Description of Artificial Sequence: Synthetic oligonucleotide
agggugguuacaagugauu

SEQ ID NO: 474842 - RNA, 19 nt, Artificial Sequence
  Description of Artificial Sequence: Synthetic oligonucleotide
cugauaggcugcgaggggu

SEQ ID NO: 474843 - RNA, 19 nt, Artificial Sequence
  Description of Artificial Sequence: Synthetic oligonucleotide
gaaccugaucagagcuguc

SEQ ID NO: 474844 - RNA, 19 nt, Artificial Sequence
  Description of Artificial Sequence: Synthetic oligonucleotide
gcuguuugggguaaucccu

SEQ ID NO: 474845 - RNA, 19 nt, Artificial Sequence
  Description of Artificial Sequence: Synthetic oligonucleotide
ggugauacgcaugcaucaa

SEQ ID NO: 474846 - RNA, 19 nt, Artificial Sequence
  Description of Artificial Sequence: Synthetic oligonucleotide
cguaaagcuaaagaugcaa

SEQ ID NO: 474847 - RNA, 19 nt, Artificial Sequence
  Description of Artificial Sequence: Synthetic oligonucleotide
cuucguggagguugagccu

SEQ ID NO: 474848 - RNA, 19 nt, Artificial Sequence
  Description of Artificial Sequence: Synthetic oligonucleotide
caaguagcuguagcgcuua

SEQ ID NO: 474849 - RNA, 19 nt, Artificial Sequence
  Description of Artificial Sequence: Synthetic oligonucleotide
ggacucaugccaggcucag

SEQ ID NO: 474850 - RNA, 19 nt, Artificial Sequence
  Description of Artificial Sequence: Synthetic oligonucleotide
auaggcugcgaggggugau

SEQ ID NO: 474851 - RNA, 19 nt, Artificial Sequence
  Description of Artificial Sequence: Synthetic oligonucleotide
cggucuaguaacccaccag

SEQ ID NO: 474852 - RNA, 19 nt, Artificial Sequence
  Description of Artificial Sequence: Synthetic oligonucleotide
cuucuucguggagguugag

SEQ ID NO: 474853 - RNA, 19 nt, Artificial Sequence
  Description of Artificial Sequence: Synthetic oligonucleotide
cuguguugcaggagacugu

SEQ ID NO: 474854 - RNA, 19 nt, Artificial Sequence
  Description of Artificial Sequence: Synthetic oligonucleotide
cgugucaauccugggaaug

SEQ ID NO: 474855 - RNA, 19 nt, Artificial Sequence
  Description of Artificial Sequence: Synthetic oligonucleotide
cuucuagcagagucacuau

SEQ ID NO: 474856 - RNA, 19 nt, Artificial Sequence
  Description of Artificial Sequence: Synthetic oligonucleotide
gcggucuaguaacccacca

SEQ ID NO: 474857 - RNA, 19 nt, Artificial Sequence
  Description of Artificial Sequence: Synthetic oligonucleotide
gccaacucugucccaacua

SEQ ID NO: 474858 - RNA, 19 nt, Artificial Sequence
  Description of Artificial Sequence: Synthetic oligonucleotide
cgaaguuaaggcaucaguu

SEQ ID NO: 474859 - RNA, 19 nt, Artificial Sequence
  Description of Artificial Sequence: Synthetic oligonucleotide
caucaguuguggcaacuuu

SEQ ID NO: 474860 - RNA, 19 nt, Artificial Sequence
  Description of Artificial Sequence: Synthetic oligonucleotide
ggcggucuaguaacccacc

SEQ ID NO: 474861 - RNA, 19 nt, Artificial Sequence
  Description of Artificial Sequence: Synthetic oligonucleotide
cuguuugggguaaucccuu

SEQ ID NO: 474862 - RNA, 19 nt, Artificial Sequence
  Description of Artificial Sequence: Synthetic oligonucleotide
cuggggccucuugugagca

SEQ ID NO: 474863 - RNA, 19 nt, Artificial Sequence
  Description of Artificial Sequence: Synthetic oligonucleotide
ccgaaguuaaggcaucagu

SEQ ID NO: 474864 - RNA, 19 nt, Artificial Sequence
  Description of Artificial Sequence: Synthetic oligonucleotide
gucuaguaacccaccaguu

SEQ ID NO: 474865 - RNA, 19 nt, Artificial Sequence
  Description of Artificial Sequence: Synthetic oligonucleotide
cacugugagggugguuaca

SEQ ID NO: 474866 - RNA, 19 nt, Artificial Sequence
  Description of Artificial Sequence: Synthetic oligonucleotide
ucugacccgcuggacccuu

SEQ ID NO: 474867 - RNA, 19 nt, Artificial Sequence
  Description of Artificial Sequence: Synthetic oligonucleotide
ccacacguaucuagauuga

SEQ ID NO: 474868 - RNA, 19 nt, Artificial Sequence
  Description of Artificial Sequence: Synthetic oligonucleotide
gcuguagcgcuuacguaaa

SEQ ID NO: 474869 - RNA, 19 nt, Artificial Sequence
  Description of Artificial Sequence: Synthetic oligonucleotide
cugucccaacuaaguccca

SEQ ID NO: 474870 - RNA, 19 nt, Artificial Sequence
  Description of Artificial Sequence: Synthetic oligonucleotide
cacacguaucuagauugau

SEQ ID NO: 474871 - RNA, 19 nt, Artificial Sequence
  Description of Artificial Sequence: Synthetic oligonucleotide
cagccuuugcuaaccuaau

SEQ ID NO: 474872 - RNA, 19 nt, Artificial Sequence
  Description of Artificial Sequence: Synthetic oligonucleotide
caacugggucaugguaaaa

SEQ ID NO: 474873 - RNA, 19 nt, Artificial Sequence
  Description of Artificial Sequence: Synthetic oligonucleotide
cgcuuacguaaagcuaaag

SEQ ID NO: 474874 - RNA, 19 nt, Artificial Sequence
  Description of Artificial Sequence: Synthetic oligonucleotide
acacaggguuuaggugcau

SEQ ID NO: 474875 - RNA, 19 nt, Artificial Sequence
  Description of Artificial Sequence: Synthetic oligonucleotide
gacucaugccaggcucagu

SEQ ID NO: 474876 - RNA, 19 nt, Artificial Sequence
  Description of Artificial Sequence: Synthetic oligonucleotide
gacggacgucacugucacu

SEQ ID NO: 474877 - RNA, 19 nt, Artificial Sequence
  Description of Artificial Sequence: Synthetic oligonucleotide
gcucugacgucuguccgcu

SEQ ID NO: 474878 - RNA, 19 nt, Artificial Sequence
  Description of Artificial Sequence: Synthetic oligonucleotide
cuccuagauauggguuucu

SEQ ID NO: 474879 - RNA, 19 nt, Artificial Sequence
  Description of Artificial Sequence: Synthetic oligonucleotide
cccaacuaagucccagggu

SEQ ID NO: 474880 - RNA, 19 nt, Artificial Sequence
  Description of Artificial Sequence: Synthetic oligonucleotide
ggucuacaucucagagcca

SEQ ID NO: 474881 - RNA, 19 nt, Artificial Sequence
  Description of Artificial Sequence: Synthetic oligonucleotide
cccgcuggacccuucuucu

SEQ ID NO: 474882 - RNA, 19 nt, Artificial Sequence
  Description of Artificial Sequence: Synthetic oligonucleotide
cgaaccugaucagagcugu

SEQ ID NO: 474883 - RNA, 19 nt, Artificial Sequence
  Description of Artificial Sequence: Synthetic oligonucleotide
gcgcuuacguaaagcuaaa

SEQ ID NO: 474884 - RNA, 19 nt, Artificial Sequence
  Description of Artificial Sequence: Synthetic oligonucleotide
gcgaccagauccguguguu

SEQ ID NO: 474885 - RNA, 19 nt, Artificial Sequence
  Description of Artificial Sequence: Synthetic oligonucleotide
ggcuggggucucuaaccuu

SEQ ID NO: 474886 - RNA, 19 nt, Artificial Sequence
  Description of Artificial Sequence: Synthetic oligonucleotide
ccuggacggacgucacugu

SEQ ID NO: 474887 - RNA, 19 nt, Artificial Sequence
  Description of Artificial Sequence: Synthetic oligonucleotide
guccgcucacaaggacucu

SEQ ID NO: 474888 - RNA, 19 nt, Artificial Sequence
  Description of Artificial Sequence: Synthetic oligonucleotide
cucugacccgcuggacccu

SEQ ID NO: 474889 - RNA, 19 nt, Artificial Sequence
  Description of Artificial Sequence: Synthetic oligonucleotide
gcuuaggcucugacccgcu

SEQ ID NO: 474890 - RNA, 19 nt, Artificial Sequence
  Description of Artificial Sequence: Synthetic oligonucleotide
ccagggugaucggcuacua

SEQ ID NO: 474891 - RNA, 19 nt, Artificial Sequence
  Description of Artificial Sequence: Synthetic oligonucleotide
ggccucuugugagcaccau

SEQ ID NO: 474892 - RNA, 19 nt, Artificial Sequence
  Description of Artificial Sequence: Synthetic oligonucleotide
ggcuugugccggggacucu

SEQ ID NO: 474893 - RNA, 19 nt, Artificial Sequence
  Description of Artificial Sequence: Synthetic oligonucleotide
gcgaggggugaugcugguu

SEQ ID NO: 474894 - RNA, 19 nt, Artificial Sequence
  Description of Artificial Sequence: Synthetic oligonucleotide
cgaccagauccguguguuu

SEQ ID NO: 474895 - RNA, 19 nt, Artificial Sequence
  Description of Artificial Sequence: Synthetic oligonucleotide
aacuuuaguacauuuauuc

SEQ ID NO: 474896 - RNA, 19 nt, Artificial Sequence
  Description of Artificial Sequence: Synthetic oligonucleotide
agaucuaugggauacaccg

SEQ ID NO: 474897 - RNA, 19 nt, Artificial Sequence
  Description of Artificial Sequence: Synthetic oligonucleotide
auacguucaacacugaagc

SEQ ID NO: 474898 - RNA, 19 nt, Artificial Sequence
  Description of Artificial Sequence: Synthetic oligonucleotide
aaacaauacauguauaggu

SEQ ID NO: 474899 - RNA, 19 nt, Artificial Sequence
  Description of Artificial Sequence: Synthetic oligonucleotide
aaaucauuaacugucagcu

SEQ ID NO: 474900 - RNA, 19 nt, Artificial Sequence
  Description of Artificial Sequence: Synthetic oligonucleotide
aaaaggagugagcaugugg

SEQ ID NO: 474901 - RNA, 19 nt, Artificial Sequence
  Description of Artificial Sequence: Synthetic oligonucleotide
uguagguacaagcugugcg

SEQ ID NO: 474902 - RNA, 19 nt, Artificial Sequence
  Description of Artificial Sequence: Synthetic oligonucleotide
agugcuauagaucuuacga

SEQ ID NO: 474903 - RNA, 19 nt, Artificial Sequence
  Description of Artificial Sequence: Synthetic oligonucleotide
gagauuuaaacuuggggag

SEQ ID NO: 474904 - RNA, 19 nt, Artificial Sequence
  Description of Artificial Sequence: Synthetic oligonucleotide
uaaacaauacauguauagg

SEQ ID NO: 474905 - RNA, 19 nt, Artificial Sequence
  Description of Artificial Sequence: Synthetic oligonucleotide
guuaaaugcauugaaguag

SEQ ID NO: 474906 - RNA, 19 nt, Artificial Sequence
  Description of Artificial Sequence: Synthetic oligonucleotide
uacaguucaagccacucag

SEQ ID NO: 474907 - RNA, 19 nt, Artificial Sequence
  Description of Artificial Sequence: Synthetic oligonucleotide
uuuaucagcaaauacccuc

SEQ ID NO: 474908 - RNA, 19 nt, Artificial Sequence
  Description of Artificial Sequence: Synthetic oligonucleotide
ucaauguaaaaccaccgcu

SEQ ID NO: 474909 - RNA, 19 nt, Artificial Sequence
  Description of Artificial Sequence: Synthetic oligonucleotide
acuucaauaucuuuccuug

SEQ ID NO: 474910 - RNA, 19 nt, Artificial Sequence
  Description of Artificial Sequence: Synthetic oligonucleotide
acauguauaggucgcauag

SEQ ID NO: 474911 - RNA, 19 nt, Artificial Sequence
  Description of Artificial Sequence: Synthetic oligonucleotide
uaaggaguuaaaugcauug

SEQ ID NO: 474912 - RNA, 19 nt, Artificial Sequence
  Description of Artificial Sequence: Synthetic oligonucleotide
aguuggauacguucaacac

SEQ ID NO: 474913 - RNA, 19 nt, Artificial Sequence
  Description of Artificial Sequence: Synthetic oligonucleotide
gauaucaauuucuagcgga

SEQ ID NO: 474914 - RNA, 19 nt, Artificial Sequence
  Description of Artificial Sequence: Synthetic oligonucleotide
agcugugcgaagcagaguc

SEQ ID NO: 474915 - RNA, 19 nt, Artificial Sequence
  Description of Artificial Sequence: Synthetic oligonucleotide
guuauauaggucugcaagc

SEQ ID NO: 474916 - RNA, 19 nt, Artificial Sequence
  Description of Artificial Sequence: Synthetic oligonucleotide
ugagccagaagguuugagg

SEQ ID NO: 474917 - RNA, 19 nt, Artificial Sequence
  Description of Artificial Sequence: Synthetic oligonucleotide
ugugaucacuuuauaaaca

SEQ ID NO: 474918 - RNA, 19 nt, Artificial Sequence
  Description of Artificial Sequence: Synthetic oligonucleotide
ucgguguugggucugagcc

SEQ ID NO: 474919 - RNA, 19 nt, Artificial Sequence
  Description of Artificial Sequence: Synthetic oligonucleotide
auagaaagugguugacccc

SEQ ID NO: 474920 - RNA, 19 nt, Artificial Sequence
  Description of Artificial Sequence: Synthetic oligonucleotide
acaaagauguacaauaugu

SEQ ID NO: 474921 - RNA, 19 nt, Artificial Sequence
  Description of Artificial Sequence: Synthetic oligonucleotide
uuacgaacaagcuccaugu

SEQ ID NO: 474922 - RNA, 19 nt, Artificial Sequence
  Description of Artificial Sequence: Synthetic oligonucleotide
aggaaacacgcuuuggcac

SEQ ID NO: 474923 - RNA, 19 nt, Artificial Sequence
  Description of Artificial Sequence: Synthetic oligonucleotide
gauacguucaacacugaag

SEQ ID NO: 474924 - RNA, 19 nt, Artificial Sequence
  Description of Artificial Sequence: Synthetic oligonucleotide
auuugucccggacaaaauc

SEQ ID NO: 474925 - RNA, 19 nt, Artificial Sequence
  Description of Artificial Sequence: Synthetic oligonucleotide
acaugauucuuaauaaaac

SEQ ID NO: 474926 - RNA, 19 nt, Artificial Sequence
  Description of Artificial Sequence: Synthetic oligonucleotide
uagcguauggcacucuggg

SEQ ID NO: 474927 - RNA, 19 nt, Artificial Sequence
  Description of Artificial Sequence: Synthetic oligonucleotide
uaagucaccaagaggagaa

SEQ ID NO: 474928 - RNA, 19 nt, Artificial Sequence
  Description of Artificial Sequence: Synthetic oligonucleotide
aauacccuccuguuccagg

SEQ ID NO: 474929 - RNA, 19 nt, Artificial Sequence
  Description of Artificial Sequence: Synthetic oligonucleotide
ugcuauagaucuuacgaac

SEQ ID NO: 474930 - RNA, 19 nt, Artificial Sequence
  Description of Artificial Sequence: Synthetic oligonucleotide
uccuuugugacuucaauau

SEQ ID NO: 474931 - RNA, 19 nt, Artificial Sequence
  Description of Artificial Sequence: Synthetic oligonucleotide
gucuagaacacauaauuca

SEQ ID NO: 474932 - RNA, 19 nt, Artificial Sequence
  Description of Artificial Sequence: Synthetic oligonucleotide
gagccagaagguuugaggc

SEQ ID NO: 474933 - RNA, 19 nt, Artificial Sequence
  Description of Artificial Sequence: Synthetic oligonucleotide
uaacgcaacacuuucuuaa

SEQ ID NO: 474934 - RNA, 19 nt, Artificial Sequence
  Description of Artificial Sequence: Synthetic oligonucleotide
ugauuuguugggauggggu

SEQ ID NO: 474935 - RNA, 19 nt, Artificial Sequence
  Description of Artificial Sequence: Synthetic oligonucleotide
aucauuaacugucagcuua

SEQ ID NO: 474936 - RNA, 19 nt, Artificial Sequence
  Description of Artificial Sequence: Synthetic oligonucleotide
cucgaugucggccagaguc

SEQ ID NO: 474937 - RNA, 19 nt, Artificial Sequence
  Description of Artificial Sequence: Synthetic oligonucleotide
aggagaaggaauuuaacuu

SEQ ID NO: 474938 - RNA, 19 nt, Artificial Sequence
  Description of Artificial Sequence: Synthetic oligonucleotide
gauuuguugggauggggug

SEQ ID NO: 474939 - RNA, 19 nt, Artificial Sequence
  Description of Artificial Sequence: Synthetic oligonucleotide
acaagccaccggcugaucc

SEQ ID NO: 474940 - RNA, 19 nt, Artificial Sequence
  Description of Artificial Sequence: Synthetic oligonucleotide
gacuccgcaaucuggagcc

SEQ ID NO: 474941 - RNA, 19 nt, Artificial Sequence
  Description of Artificial Sequence: Synthetic oligonucleotide
auuuguugggauggggugc

SEQ ID NO: 474942 - RNA, 19 nt, Artificial Sequence
  Description of Artificial Sequence: Synthetic oligonucleotide
agacuccgcaaucuggagc

SEQ ID NO: 474943 - RNA, 19 nt, Artificial Sequence
  Description of Artificial Sequence: Synthetic oligonucleotide
ucugcgauucgugacuucg

SEQ ID NO: 474944 - RNA, 19 nt, Artificial Sequence
  Description of Artificial Sequence: Synthetic oligonucleotide
uagauugcggagaagggaa

SEQ ID NO: 474945 - RNA, 19 nt, Artificial Sequence
  Description of Artificial Sequence: Synthetic oligonucleotide
cuuacgaacaagcuccaug

SEQ ID NO: 474946 - RNA, 19 nt, Artificial Sequence
  Description of Artificial Sequence: Synthetic oligonucleotide
gcuuuuaucagcaaauacc

SEQ ID NO: 474947 - RNA, 19 nt, Artificial Sequence
  Description of Artificial Sequence: Synthetic oligonucleotide
uacaucagcuccccgacca

SEQ ID NO: 474948 - RNA, 19 nt, Artificial Sequence
  Description of Artificial Sequence: Synthetic oligonucleotide
cauacaacuuuucagggca

SEQ ID NO: 474949 - RNA, 19 nt, Artificial Sequence
  Description of Artificial Sequence: Synthetic oligonucleotide
ugucucggaggaaacacgc

SEQ ID NO: 474950 - RNA, 19 nt, Artificial Sequence
  Description of Artificial Sequence: Synthetic oligonucleotide
acuaaguucucuuccacaa

SEQ ID NO: 474951 - RNA, 19 nt, Artificial Sequence
  Description of Artificial Sequence: Synthetic oligonucleotide
uauauaggucugcaagcug

SEQ ID NO: 474952 - RNA, 19 nt, Artificial Sequence
  Description of Artificial Sequence: Synthetic oligonucleotide
agguuguaaggcaaggccc

SEQ ID NO: 474953 - RNA, 19 nt, Artificial Sequence
  Description of Artificial Sequence: Synthetic oligonucleotide
uguacagucacuguaggua

SEQ ID NO: 474954 - RNA, 19 nt, Artificial Sequence
  Description of Artificial Sequence: Synthetic oligonucleotide
acgaacaagcuccauguug

SEQ ID NO: 474955 - RNA, 19 nt, Artificial Sequence
  Description of Artificial Sequence: Synthetic oligonucleotide
ugaccugcgagccaccagc

SEQ ID NO: 474956 - RNA, 19 nt, Artificial Sequence
  Description of Artificial Sequence: Synthetic oligonucleotide
gaagcuaacuuggugugag

SEQ ID NO: 474957 - RNA, 19 nt, Artificial Sequence
  Description of Artificial Sequence: Synthetic oligonucleotide
uauaggucgcauagaaagu

SEQ ID NO: 474958 - RNA, 19 nt, Artificial Sequence
  Description of Artificial Sequence: Synthetic oligonucleotide
uaaacuuggggagguaaag

SEQ ID NO: 474959 - RNA, 19 nt, Artificial Sequence
  Description of Artificial Sequence: Synthetic oligonucleotide
cuaacuuggugugagguac

SEQ ID NO: 474960 - RNA, 19 nt, Artificial Sequence
  Description of Artificial Sequence: Synthetic oligonucleotide
aucuaugggauacaccgca

SEQ ID NO: 474961 - RNA, 19 nt, Artificial Sequence
  Description of Artificial Sequence: Synthetic oligonucleotide
augucggccagagucaagc

SEQ ID NO: 474962 - RNA, 19 nt, Artificial Sequence
  Description of Artificial Sequence: Synthetic oligonucleotide
uguccauagcguauggcac

SEQ ID NO: 474963 - RNA, 19 nt, Artificial Sequence
  Description of Artificial Sequence: Synthetic oligonucleotide
agucuagaacacauaauuc

SEQ ID NO: 474964 - RNA, 19 nt, Artificial Sequence
  Description of Artificial Sequence: Synthetic oligonucleotide
ugggagauuuaaacuuggg

SEQ ID NO: 474965 - RNA, 19 nt, Artificial Sequence
  Description of Artificial Sequence: Synthetic oligonucleotide
aaguucauaggugaccaga

SEQ ID NO: 474966 - RNA, 19 nt, Artificial Sequence
  Description of Artificial Sequence: Synthetic oligonucleotide
gguaaagaugaccugcgag

SEQ ID NO: 474967 - RNA, 19 nt, Artificial Sequence
  Description of Artificial Sequence: Synthetic oligonucleotide
agacuaaagcuugaaacug

SEQ ID NO: 474968 - RNA, 19 nt, Artificial Sequence
  Description of Artificial Sequence: Synthetic oligonucleotide
uuaaacuuggggagguaaa

SEQ ID NO: 474969 - RNA, 19 nt, Artificial Sequence
  Description of Artificial Sequence: Synthetic oligonucleotide
aagcguuauauaggucugc

SEQ ID NO: 474970 - RNA, 19 nt, Artificial Sequence
  Description of Artificial Sequence: Synthetic oligonucleotide
aaacugaaguuggauacgu

SEQ ID NO: 474971 - RNA, 19 nt, Artificial Sequence
  Description of Artificial Sequence: Synthetic oligonucleotide
accaugacgucacugaaau

SEQ ID NO: 474972 - RNA, 19 nt, Artificial Sequence
  Description of Artificial Sequence: Synthetic oligonucleotide
gauccuccggcauccacgg

SEQ ID NO: 474973 - RNA, 19 nt, Artificial Sequence
  Description of Artificial Sequence: Synthetic oligonucleotide
aaggaguuaaaugcauuga

SEQ ID NO: 474974 - RNA, 19 nt, Artificial Sequence
  Description of Artificial Sequence: Synthetic oligonucleotide
agcuauucucucgaugucg

SEQ ID NO: 474975 - RNA, 19 nt, Artificial Sequence
  Description of Artificial Sequence: Synthetic oligonucleotide
ugagcauacacaggaaagu

SEQ ID NO: 474976 - RNA, 19 nt, Artificial Sequence
  Description of Artificial Sequence: Synthetic oligonucleotide
augugaucgggguuggcag

SEQ ID NO: 474977 - RNA, 19 nt, Artificial Sequence
  Description of Artificial Sequence: Synthetic oligonucleotide
cucauaacgcaacacuuuc

SEQ ID NO: 474978 - RNA, 19 nt, Artificial Sequence
  Description of Artificial Sequence: Synthetic oligonucleotide
gacuaaagcuugaaacugc

SEQ ID NO: 474979 - RNA, 19 nt, Artificial Sequence
  Description of Artificial Sequence: Synthetic oligonucleotide
gucgcauagaaagugguug

SEQ ID NO: 474980 - RNA, 19 nt, Artificial Sequence
  Description of Artificial Sequence: Synthetic oligonucleotide
gauugaugccucccacacg

SEQ ID NO: 474981 - RNA, 19 nt, Artificial Sequence
  Description of Artificial Sequence: Synthetic oligonucleotide
auaggucgcauagaaagug

SEQ ID NO: 474982 - RNA, 19 nt, Artificial Sequence
  Description of Artificial Sequence: Synthetic oligonucleotide
ucuuacucagugccaugag

SEQ ID NO: 474983 - RNA, 19 nt, Artificial Sequence
  Description of Artificial Sequence: Synthetic oligonucleotide
uaaaggccgaacuuguuuu

SEQ ID NO: 474984 - RNA, 19 nt, Artificial Sequence
  Description of Artificial Sequence: Synthetic oligonucleotide
ucuaugggauacaccgcag

SEQ ID NO: 474985 - RNA, 19 nt, Artificial Sequence
  Description of Artificial Sequence: Synthetic oligonucleotide
aagauugcacucugcuaca

SEQ ID NO: 474986 - RNA, 19 nt, Artificial Sequence
  Description of Artificial Sequence: Synthetic oligonucleotide
ucauaacgcaacacuuucu

SEQ ID NO: 474987 - RNA, 19 nt, Artificial Sequence
  Description of Artificial Sequence: Synthetic oligonucleotide
gagucuagaacacauaauu

SEQ ID NO: 474988 - RNA, 19 nt, Artificial Sequence
  Description of Artificial Sequence: Synthetic oligonucleotide
uccuccggcauccacgggc

SEQ ID NO: 474989 - RNA, 19 nt, Artificial Sequence
  Description of Artificial Sequence: Synthetic oligonucleotide
cauaagucaccaagaggag

SEQ ID NO: 474990 - RNA, 19 nt, Artificial Sequence
  Description of Artificial Sequence: Synthetic oligonucleotide
ucgaugaccccgcuguaug

SEQ ID NO: 474991 - RNA, 19 nt, Artificial Sequence
  Description of Artificial Sequence: Synthetic oligonucleotide
uguauaggucgcauagaaa

SEQ ID NO: 474992 - RNA, 19 nt, Artificial Sequence
  Description of Artificial Sequence: Synthetic oligonucleotide
gaaaguagauugcggagaa

SEQ ID NO: 474993 - RNA, 19 nt, Artificial Sequence
  Description of Artificial Sequence: Synthetic oligonucleotide
aucaauuucuagcggagua

SEQ ID NO: 474994 - RNA, 19 nt, Artificial Sequence
  Description of Artificial Sequence: Synthetic oligonucleotide
aagcuaacuuggugugagg

SEQ ID NO: 474995 - RNA, 19 nt, Artificial Sequence
  Description of Artificial Sequence: Synthetic oligonucleotide
agcguauggcacucugggc

SEQ ID NO: 474996 - RNA, 19 nt, Artificial Sequence
  Description of Artificial Sequence: Synthetic oligonucleotide
cuagcggaguaacuugucc

SEQ ID NO: 474997 - RNA, 19 nt, Artificial Sequence
  Description of Artificial Sequence: Synthetic oligonucleotide
ggcauacaacuuuucaggg

SEQ ID NO: 474998 - RNA, 19 nt, Artificial Sequence
  Description of Artificial Sequence: Synthetic oligonucleotide
uucuagcggaguaacuugu

SEQ ID NO: 474999 - RNA, 19 nt, Artificial Sequence
  Description of Artificial Sequence: Synthetic oligonucleotide
uagcggaguaacuugucca

SEQ ID NO: 475000 - RNA, 19 nt, Artificial Sequence
  Description of Artificial Sequence: Synthetic oligonucleotide
aacgcaacacuuucuuaaa

SEQ ID NO: 475001 - RNA, 19 nt, Artificial Sequence
  Description of Artificial Sequence: Synthetic oligonucleotide
auaucaauuucuagcggag

SEQ ID NO: 475002 - RNA, 19 nt, Artificial Sequence
  Description of Artificial Sequence: Synthetic oligonucleotide
ugagaucaugccacuuuug

SEQ ID NO: 475003 - RNA, 19 nt, Artificial Sequence
  Description of Artificial Sequence: Synthetic oligonucleotide
uguaagcagacuccgcaau

SEQ ID NO: 475004 - RNA, 19 nt, Artificial Sequence
  Description of Artificial Sequence: Synthetic oligonucleotide
aagguuugaggccuccaaa

SEQ ID NO: 475005 - RNA, 19 nt, Artificial Sequence
  Description of Artificial Sequence: Synthetic oligonucleotide
aguaacuuguccauagcgu

SEQ ID NO: 475006 - RNA, 19 nt, Artificial Sequence
  Description of Artificial Sequence: Synthetic oligonucleotide
agggugaaccuguaagcag

SEQ ID NO: 475007 - RNA, 19 nt, Artificial Sequence
  Description of Artificial Sequence: Synthetic oligonucleotide
ugguaaauuugucccggac

SEQ ID NO: 475008 - RNA, 19 nt, Artificial Sequence
  Description of Artificial Sequence: Synthetic oligonucleotide
uucgugacuucgguguugg

SEQ ID NO: 475009 - RNA, 19 nt, Artificial Sequence
  Description of Artificial Sequence: Synthetic oligonucleotide
cugcauuacauuucuauaa

SEQ ID NO: 475010 - RNA, 19 nt, Artificial Sequence
  Description of Artificial Sequence: Synthetic oligonucleotide
gugugugugugucaugagc

SEQ ID NO: 475011 - RNA, 19 nt, Artificial Sequence
  Description of Artificial Sequence: Synthetic oligonucleotide
uucuuacucagugccauga

SEQ ID NO: 475012 - RNA, 19 nt, Artificial Sequence
  Description of Artificial Sequence: Synthetic oligonucleotide
uucaugccaaggcucagaa

SEQ ID NO: 475013 - RNA, 19 nt, Artificial Sequence
  Description of Artificial Sequence: Synthetic oligonucleotide
ucagaccucgguagagucc

SEQ ID NO: 475014 - RNA, 19 nt, Artificial Sequence
  Description of Artificial Sequence: Synthetic oligonucleotide
ggaggaaacacgcuuuggc

SEQ ID NO: 475015 - RNA, 19 nt, Artificial Sequence
  Description of Artificial Sequence: Synthetic oligonucleotide
ugugggaccgaauggugac

SEQ ID NO: 475016 - RNA, 19 nt, Artificial Sequence
  Description of Artificial Sequence: Synthetic oligonucleotide
cguuauauaggucugcaag

SEQ ID NO: 475017 - RNA, 19 nt, Artificial Sequence
  Description of Artificial Sequence: Synthetic oligonucleotide
gugacuucgguguuggguc

SEQ ID NO: 475018 - RNA, 19 nt, Artificial Sequence
  Description of Artificial Sequence: Synthetic oligonucleotide
ggauaucaauuucuagcgg

SEQ ID NO: 475019 - RNA, 19 nt, Artificial Sequence
  Description of Artificial Sequence: Synthetic oligonucleotide
acguccguucucaucagcc

SEQ ID NO: 475020 - RNA, 19 nt, Artificial Sequence
  Description of Artificial Sequence: Synthetic oligonucleotide
ugugcgaagcagagucuag

SEQ ID NO: 475021 - RNA, 19 nt, Artificial Sequence
  Description of Artificial Sequence: Synthetic oligonucleotide
gguaaauuugucccggaca

SEQ ID NO: 475022 - RNA, 19 nt, Artificial Sequence
  Description of Artificial Sequence: Synthetic oligonucleotide
ucgaugucggccagaguca

SEQ ID NO: 475023 - RNA, 19 nt, Artificial Sequence
  Description of Artificial Sequence: Synthetic oligonucleotide
aagcagacuccgcaaucug

SEQ ID NO: 475024 - RNA, 19 nt, Artificial Sequence
  Description of Artificial Sequence: Synthetic oligonucleotide
agcauacacaggaaaguag

SEQ ID NO: 475025 - RNA, 19 nt, Artificial Sequence
  Description of Artificial Sequence: Synthetic oligonucleotide
cacacguccguucucauca

SEQ ID NO: 475026 - RNA, 19 nt, Artificial Sequence
  Description of Artificial Sequence: Synthetic oligonucleotide
gaagcguuauauaggucug

SEQ ID NO: 475027 - RNA, 19 nt, Artificial Sequence
  Description of Artificial Sequence: Synthetic oligonucleotide
ccgguugacaggaagauug

SEQ ID NO: 475028 - RNA, 19 nt, Artificial Sequence
  Description of Artificial Sequence: Synthetic oligonucleotide
ugugugugucaugagcagc

SEQ ID NO: 475029 - RNA, 19 nt, Artificial Sequence
  Description of Artificial Sequence: Synthetic oligonucleotide
ugcgauucgugacuucggu

SEQ ID NO: 475030 - RNA, 19 nt, Artificial Sequence
  Description of Artificial Sequence: Synthetic oligonucleotide
acagaccguaccgugcagc

SEQ ID NO: 475031 - RNA, 19 nt, Artificial Sequence
  Description of Artificial Sequence: Synthetic oligonucleotide
ugcccaagccaggagauug

SEQ ID NO: 475032 - RNA, 19 nt, Artificial Sequence
  Description of Artificial Sequence: Synthetic oligonucleotide
ucggaggaaacacgcuuug

SEQ ID NO: 475033 - RNA, 19 nt, Artificial Sequence
  Description of Artificial Sequence: Synthetic oligonucleotide
uccacgggcauacaacuuu

SEQ ID NO: 475034 - RNA, 19 nt, Artificial Sequence
  Description of Artificial Sequence: Synthetic oligonucleotide
auuucuuacucagugccau

SEQ ID NO: 475035 - RNA, 19 nt, Artificial Sequence
  Description of Artificial Sequence: Synthetic oligonucleotide
cuaaagcuugaaacugcac

SEQ ID NO: 475036 - RNA, 19 nt, Artificial Sequence
  Description of Artificial Sequence: Synthetic oligonucleotide
auaagucaccaagaggaga

SEQ ID NO: 475037 - RNA, 19 nt, Artificial Sequence
  Description of Artificial Sequence: Synthetic oligonucleotide
agcuugaaacugcacugug

SEQ ID NO: 475038 - RNA, 19 nt, Artificial Sequence
  Description of Artificial Sequence: Synthetic oligonucleotide
agagucaagcgccccgaag

SEQ ID NO: 475039 - RNA, 19 nt, Artificial Sequence
  Description of Artificial Sequence: Synthetic oligonucleotide
aauuucuagcggaguaacu

SEQ ID NO: 475040 - RNA, 19 nt, Artificial Sequence
  Description of Artificial Sequence: Synthetic oligonucleotide
gucauugagccgcugccgc

SEQ ID NO: 475041 - RNA, 19 nt, Artificial Sequence
  Description of Artificial Sequence: Synthetic oligonucleotide
agucuguagccaccaaugu

SEQ ID NO: 475042 - RNA, 19 nt, Artificial Sequence
  Description of Artificial Sequence: Synthetic oligonucleotide
ucccggagaaucuuccgga

SEQ ID NO: 475043 - RNA, 19 nt, Artificial Sequence
  Description of Artificial Sequence: Synthetic oligonucleotide
gaucgggguuggcaggagg

SEQ ID NO: 475044 - RNA, 19 nt, Artificial Sequence
  Description of Artificial Sequence: Synthetic oligonucleotide
agcacagaccguaccgugc

SEQ ID NO: 475045 - RNA, 19 nt, Artificial Sequence
  Description of Artificial Sequence: Synthetic oligonucleotide
ugugugugugugucaugag

SEQ ID NO: 475046 - RNA, 19 nt, Artificial Sequence
  Description of Artificial Sequence: Synthetic oligonucleotide
auacccuccuguuccagga

SEQ ID NO: 475047 - RNA, 19 nt, Artificial Sequence
  Description of Artificial Sequence: Synthetic oligonucleotide
uaucaauuucuagcggagu

SEQ ID NO: 475048 - RNA, 19 nt, Artificial Sequence
  Description of Artificial Sequence: Synthetic oligonucleotide
cuuuaguacauuuauucuu

SEQ ID NO: 475049 - RNA, 19 nt, Artificial Sequence
  Description of Artificial Sequence: Synthetic oligonucleotide
cagagucuagaacacauaa

SEQ ID NO: 475050 - RNA, 19 nt, Artificial Sequence
  Description of Artificial Sequence: Synthetic oligonucleotide
ugcuauggcuccagcggcc

SEQ ID NO: 475051 - RNA, 19 nt, Artificial Sequence
  Description of Artificial Sequence: Synthetic oligonucleotide
gaggucugcgauucgugac

SEQ ID NO: 475052 - RNA, 19 nt, Artificial Sequence
  Description of Artificial Sequence: Synthetic oligonucleotide
aagcccucauaacgcaaca

SEQ ID NO: 475053 - RNA, 19 nt, Artificial Sequence
  Description of Artificial Sequence: Synthetic oligonucleotide
guuggauacguucaacacu

SEQ ID NO: 475054 - RNA, 19 nt, Artificial Sequence
  Description of Artificial Sequence: Synthetic oligonucleotide
uacguucaacacugaagcu

SEQ ID NO: 475055 - RNA, 19 nt, Artificial Sequence
  Description of Artificial Sequence: Synthetic oligonucleotide
uucgguguugggucugagc

SEQ ID NO: 475056 - RNA, 19 nt, Artificial Sequence
  Description of Artificial Sequence: Synthetic oligonucleotide
uaaaaccaccgcugcagaa

SEQ ID NO: 475057 - RNA, 19 nt, Artificial Sequence
  Description of Artificial Sequence: Synthetic oligonucleotide
cauaggugaccagagugac

SEQ ID NO: 475058 - RNA, 19 nt, Artificial Sequence
  Description of Artificial Sequence: Synthetic oligonucleotide
aaauacccuccuguuccag

SEQ ID NO: 475059 - RNA, 19 nt, Artificial Sequence
  Description of Artificial Sequence: Synthetic oligonucleotide
uacauguauaggucgcaua

SEQ ID NO: 475060 - RNA, 19 nt, Artificial Sequence
  Description of Artificial Sequence: Synthetic oligonucleotide
ggauacaccgcaguggccc

SEQ ID NO: 475061 - RNA, 19 nt, Artificial Sequence
  Description of Artificial Sequence: Synthetic oligonucleotide
cuugaaacugcacuguggu

SEQ ID NO: 475062 - RNA, 19 nt, Artificial Sequence
  Description of Artificial Sequence: Synthetic oligonucleotide
gaucuaugggauacaccgc

SEQ ID NO: 475063 - RNA, 19 nt, Artificial Sequence
  Description of Artificial Sequence: Synthetic oligonucleotide
gaaguuggauacguucaac

SEQ ID NO: 475064 - RNA, 19 nt, Artificial Sequence
  Description of Artificial Sequence: Synthetic oligonucleotide
agcggagcuauucucucga

SEQ ID NO: 475065 - RNA, 19 nt, Artificial Sequence
  Description of Artificial Sequence: Synthetic oligonucleotide
caugugggaccgaauggug

SEQ ID NO: 475066 - RNA, 19 nt, Artificial Sequence
  Description of Artificial Sequence: Synthetic oligonucleotide
auagcguauggcacucugg

SEQ ID NO: 475067 - RNA, 19 nt, Artificial Sequence
  Description of Artificial Sequence: Synthetic oligonucleotide
uugguaaauuugucccgga

SEQ ID NO: 475068 - RNA, 19 nt, Artificial Sequence
  Description of Artificial Sequence: Synthetic oligonucleotide
uguguguguguguguguca

SEQ ID NO: 475069 - RNA, 19 nt, Artificial Sequence
  Description of Artificial Sequence: Synthetic oligonucleotide
gaagguuugaggccuccaa

SEQ ID NO: 475070 - RNA, 19 nt, Artificial Sequence
  Description of Artificial Sequence: Synthetic oligonucleotide
ucauugagccgcugccgcc

SEQ ID NO: 475071 - RNA, 19 nt, Artificial Sequence
  Description of Artificial Sequence: Synthetic oligonucleotide
gccccgaagcguuauauag

SEQ ID NO: 475072 - RNA, 19 nt, Artificial Sequence
  Description of Artificial Sequence: Synthetic oligonucleotide
ucuagcggaguaacuuguc

SEQ ID NO: 475073 - RNA, 19 nt, Artificial Sequence
  Description of Artificial Sequence: Synthetic oligonucleotide
cugcuauggcuccagcggc

SEQ ID NO: 475074 - RNA, 19 nt, Artificial Sequence
  Description of Artificial Sequence: Synthetic oligonucleotide
gugcuauagaucuuacgaa

SEQ ID NO: 475075 - RNA, 19 nt, Artificial Sequence
  Description of Artificial Sequence: Synthetic oligonucleotide
gugagguacuuccuccagc

SEQ ID NO: 475076 - RNA, 19 nt, Artificial Sequence
  Description of Artificial Sequence: Synthetic oligonucleotide
caccagaucuaugggauac

SEQ ID NO: 475077 - RNA, 19 nt, Artificial Sequence
  Description of Artificial Sequence: Synthetic oligonucleotide
guaucagaccucgguagag

SEQ ID NO: 475078 - RNA, 19 nt, Artificial Sequence
  Description of Artificial Sequence: Synthetic oligonucleotide
agccagcggagcuauucuc

SEQ ID NO: 475079 - RNA, 19 nt, Artificial Sequence
  Description of Artificial Sequence: Synthetic oligonucleotide
guaagcagacuccgcaauc

SEQ ID NO: 475080 - RNA, 19 nt, Artificial Sequence
  Description of Artificial Sequence: Synthetic oligonucleotide
ucccggacaaaaucauuaa

SEQ ID NO: 475081 - RNA, 19 nt, Artificial Sequence
  Description of Artificial Sequence: Synthetic oligonucleotide
auugagccgcugccgccgc

SEQ ID NO: 475082 - RNA, 19 nt, Artificial Sequence
  Description of Artificial Sequence: Synthetic oligonucleotide
acguucaacacugaagcuu

SEQ ID NO: 475083 - RNA, 19 nt, Artificial Sequence
  Description of Artificial Sequence: Synthetic oligonucleotide
uaucagaccucgguagagu

SEQ ID NO: 475084 - RNA, 19 nt, Artificial Sequence
  Description of Artificial Sequence: Synthetic oligonucleotide
cacgguacuggccauucuc

SEQ ID NO: 475085 - RNA, 19 nt, Artificial Sequence
  Description of Artificial Sequence: Synthetic oligonucleotide
agcggaguaacuuguccau

SEQ ID NO: 475086 - RNA, 19 nt, Artificial Sequence
  Description of Artificial Sequence: Synthetic oligonucleotide
augccagcgaaaguggcug

SEQ ID NO: 475087 - RNA, 19 nt, Artificial Sequence
  Description of Artificial Sequence: Synthetic oligonucleotide
augucucggaggaaacacg

SEQ ID NO: 475088 - RNA, 19 nt, Artificial Sequence
  Description of Artificial Sequence: Synthetic oligonucleotide
cauugagccgcugccgccg

SEQ ID NO: 475089 - RNA, 19 nt, Artificial Sequence
  Description of Artificial Sequence: Synthetic oligonucleotide
agcguuauauaggucugca

SEQ ID NO: 475090 - RNA, 19 nt, Artificial Sequence
  Description of Artificial Sequence: Synthetic oligonucleotide
gauuuaaacuuggggaggu

SEQ ID NO: 475091 - RNA, 19 nt, Artificial Sequence
  Description of Artificial Sequence: Synthetic oligonucleotide
augaccccgcuguauguug

SEQ ID NO: 475092 - RNA, 19 nt, Artificial Sequence
  Description of Artificial Sequence: Synthetic oligonucleotide
gguuguaaggcaaggcccc

SEQ ID NO: 475093 - RNA, 19 nt, Artificial Sequence
  Description of Artificial Sequence: Synthetic oligonucleotide
ugugugugugugugugugu

SEQ ID NO: 475094 - RNA, 19 nt, Artificial Sequence
  Description of Artificial Sequence: Synthetic oligonucleotide
cugaggagaggaccggaac

SEQ ID NO: 475095 - RNA, 19 nt, Artificial Sequence
  Description of Artificial Sequence: Synthetic oligonucleotide
gaccgaauggugaccauga

SEQ ID NO: 475096 - RNA, 19 nt, Artificial Sequence
  Description of Artificial Sequence: Synthetic oligonucleotide
ccgaauggugaccaugacg

SEQ ID NO: 475097 - RNA, 19 nt, Artificial Sequence
  Description of Artificial Sequence: Synthetic oligonucleotide
aaggcccuucuucccggag

SEQ ID NO: 475098 - RNA, 19 nt, Artificial Sequence
  Description of Artificial Sequence: Synthetic oligonucleotide
auaggccugcccaagccag

SEQ ID NO: 475099 - RNA, 19 nt, Artificial Sequence
  Description of Artificial Sequence: Synthetic oligonucleotide
gagaaggaauuuaacuuua

SEQ ID NO: 475100 - RNA, 19 nt, Artificial Sequence
  Description of Artificial Sequence: Synthetic oligonucleotide
gcuugaaacugcacugugg

SEQ ID NO: 475101 - RNA, 19 nt, Artificial Sequence
  Description of Artificial Sequence: Synthetic oligonucleotide
uaggccugcccaagccagg

SEQ ID NO: 475102 - RNA, 19 nt, Artificial Sequence
  Description of Artificial Sequence: Synthetic oligonucleotide
ugggaccgaauggugacca

SEQ ID NO: 475103 - RNA, 19 nt, Artificial Sequence
  Description of Artificial Sequence: Synthetic oligonucleotide
acugaagcuugacuuccau

SEQ ID NO: 475104 - RNA, 19 nt, Artificial Sequence
  Description of Artificial Sequence: Synthetic oligonucleotide
aaaagcccucauaacgcaa

SEQ ID NO: 475105 - RNA, 19 nt, Artificial Sequence
  Description of Artificial Sequence: Synthetic oligonucleotide
gugugugugugugucauga

SEQ ID NO: 475106 - RNA, 19 nt, Artificial Sequence
  Description of Artificial Sequence: Synthetic oligonucleotide
ugugugugugugugucaug

SEQ ID NO: 475107 - RNA, 19 nt, Artificial Sequence
  Description of Artificial Sequence: Synthetic oligonucleotide
gugugugugugugugugug

SEQ ID NO: 475108 - RNA, 19 nt, Artificial Sequence
  Description of Artificial Sequence: Synthetic oligonucleotide
cagcgaaaguggcuguggc

SEQ ID NO: 475109 - RNA, 19 nt, Artificial Sequence
  Description of Artificial Sequence: Synthetic oligonucleotide
cagcggagcuauucucucg

SEQ ID NO: 475110 - RNA, 19 nt, Artificial Sequence
  Description of Artificial Sequence: Synthetic oligonucleotide
accuguaagcagacuccgc

SEQ ID NO: 475111 - RNA, 19 nt, Artificial Sequence
  Description of Artificial Sequence: Synthetic oligonucleotide
caacacugaagcuugacuu

SEQ ID NO: 475112 - RNA, 19 nt, Artificial Sequence
  Description of Artificial Sequence: Synthetic oligonucleotide
ugaccccgcuguauguugu

SEQ ID NO: 475113 - RNA, 19 nt, Artificial Sequence
  Description of Artificial Sequence: Synthetic oligonucleotide
acgcugguuuugcauccgg

SEQ ID NO: 475114 - RNA, 19 nt, Artificial Sequence
  Description of Artificial Sequence: Synthetic oligonucleotide
ugacuucgguguugggucu

SEQ ID NO: 475115 - RNA, 19 nt, Artificial Sequence
  Description of Artificial Sequence: Synthetic oligonucleotide
cacuguagguacaagcugu

SEQ ID NO: 475116 - RNA, 19 nt, Artificial Sequence
  Description of Artificial Sequence: Synthetic oligonucleotide
caaggcucagaaaacauuu

SEQ ID NO: 475117 - RNA, 19 nt, Artificial Sequence
  Description of Artificial Sequence: Synthetic oligonucleotide
uagguacaagcugugcgaa

SEQ ID NO: 475118 - RNA, 19 nt, Artificial Sequence
  Description of Artificial Sequence: Synthetic oligonucleotide
caguucaagccacucagaa

SEQ ID NO: 475119 - RNA, 19 nt, Artificial Sequence
  Description of Artificial Sequence: Synthetic oligonucleotide
cguucaacacugaagcuug

SEQ ID NO: 475120 - RNA, 19 nt, Artificial Sequence
  Description of Artificial Sequence: Synthetic oligonucleotide
accucgguagaguccaaaa

SEQ ID NO: 475121 - RNA, 19 nt, Artificial Sequence
  Description of Artificial Sequence: Synthetic oligonucleotide
aacagucgaugaccccgcu

SEQ ID NO: 475122 - RNA, 19 nt, Artificial Sequence
  Description of Artificial Sequence: Synthetic oligonucleotide
gagcuauucucucgauguc

SEQ ID NO: 475123 - RNA, 19 nt, Artificial Sequence
  Description of Artificial Sequence: Synthetic oligonucleotide
gagcauacacaggaaagua

SEQ ID NO: 475124 - RNA, 19 nt, Artificial Sequence
  Description of Artificial Sequence: Synthetic oligonucleotide
gucacuguagguacaagcu

SEQ ID NO: 475125 - RNA, 19 nt, Artificial Sequence
  Description of Artificial Sequence: Synthetic oligonucleotide
agagucuagaacacauaau

SEQ ID NO: 475126 - RNA, 19 nt, Artificial Sequence
  Description of Artificial Sequence: Synthetic oligonucleotide
uuccgguugacaggaagau

SEQ ID NO: 475127 - RNA, 19 nt, Artificial Sequence
  Description of Artificial Sequence: Synthetic oligonucleotide
gcauagaaagugguugacc

SEQ ID NO: 475128 - RNA, 19 nt, Artificial Sequence
  Description of Artificial Sequence: Synthetic oligonucleotide
acgcaacacuuucuuaaaa

SEQ ID NO: 475129 - RNA, 19 nt, Artificial Sequence
  Description of Artificial Sequence: Synthetic oligonucleotide
auacauguauaggucgcau

SEQ ID NO: 475130 - RNA, 19 nt, Artificial Sequence
  Description of Artificial Sequence: Synthetic oligonucleotide
cagacuccgcaaucuggag

SEQ ID NO: 475131 - RNA, 19 nt, Artificial Sequence
  Description of Artificial Sequence: Synthetic oligonucleotide
gcuauagaucuuacgaaca

SEQ ID NO: 475132 - RNA, 19 nt, Artificial Sequence
  Description of Artificial Sequence: Synthetic oligonucleotide
acuguagguacaagcugug

SEQ ID NO: 475133 - RNA, 19 nt, Artificial Sequence
  Description of Artificial Sequence: Synthetic oligonucleotide
uggauacguucaacacuga

SEQ ID NO: 475134 - RNA, 19 nt, Artificial Sequence
  Description of Artificial Sequence: Synthetic oligonucleotide
cagucuugucuugauaaca

SEQ ID NO: 475135 - RNA, 19 nt, Artificial Sequence
  Description of Artificial Sequence: Synthetic oligonucleotide
agaagcuaacuugguguga

SEQ ID NO: 475136 - RNA, 19 nt, Artificial Sequence
  Description of Artificial Sequence: Synthetic oligonucleotide
ccagaaggaguuugcagug

SEQ ID NO: 475137 - RNA, 19 nt, Artificial Sequence
  Description of Artificial Sequence: Synthetic oligonucleotide
ugagcccagggugaaccug

SEQ ID NO: 475138 - RNA, 19 nt, Artificial Sequence
  Description of Artificial Sequence: Synthetic oligonucleotide
cagcacagaccguaccgug

SEQ ID NO: 475139 - RNA, 19 nt, Artificial Sequence
  Description of Artificial Sequence: Synthetic oligonucleotide
uacgaacaagcuccauguu

SEQ ID NO: 475140 - RNA, 19 nt, Artificial Sequence
  Description of Artificial Sequence: Synthetic oligonucleotide
guacaagcugugcgaagca

SEQ ID NO: 475141 - RNA, 19 nt, Artificial Sequence
  Description of Artificial Sequence: Synthetic oligonucleotide
guacaucagcuccccgacc

SEQ ID NO: 475142 - RNA, 19 nt, Artificial Sequence
  Description of Artificial Sequence: Synthetic oligonucleotide
ggacuaaguucucuuccac

SEQ ID NO: 475143 - RNA, 19 nt, Artificial Sequence
  Description of Artificial Sequence: Synthetic oligonucleotide
augacgucacugaaaucca

SEQ ID NO: 475144 - RNA, 19 nt, Artificial Sequence
  Description of Artificial Sequence: Synthetic oligonucleotide
ugccacgcugguuuugcau

SEQ ID NO: 475145 - RNA, 19 nt, Artificial Sequence
  Description of Artificial Sequence: Synthetic oligonucleotide
auucgugacuucgguguug

SEQ ID NO: 475146 - RNA, 19 nt, Artificial Sequence
  Description of Artificial Sequence: Synthetic oligonucleotide
gguaucagaccucgguaga

SEQ ID NO: 475147 - RNA, 19 nt, Artificial Sequence
  Description of Artificial Sequence: Synthetic oligonucleotide
ucaugccaaggcucagaaa

SEQ ID NO: 475148 - RNA, 19 nt, Artificial Sequence
  Description of Artificial Sequence: Synthetic oligonucleotide
aacacgcuuuggcacccuu

SEQ ID NO: 475149 - RNA, 19 nt, Artificial Sequence
  Description of Artificial Sequence: Synthetic oligonucleotide
gccaccaaugugaucgggg

SEQ ID NO: 475150 - RNA, 19 nt, Artificial Sequence
  Description of Artificial Sequence: Synthetic oligonucleotide
ccccgaagcguuauauagg

SEQ ID NO: 475151 - RNA, 19 nt, Artificial Sequence
  Description of Artificial Sequence: Synthetic oligonucleotide
aacgccgaaggcccuucuu

SEQ ID NO: 475152 - RNA, 19 nt, Artificial Sequence
  Description of Artificial Sequence: Synthetic oligonucleotide
uccagcggguugguaaaga

SEQ ID NO: 475153 - RNA, 19 nt, Artificial Sequence
  Description of Artificial Sequence: Synthetic oligonucleotide
cauaacgcaacacuuucuu

SEQ ID NO: 475154 - RNA, 19 nt, Artificial Sequence
  Description of Artificial Sequence: Synthetic oligonucleotide
guguguguguguguguguc

SEQ ID NO: 475155 - RNA, 19 nt, Artificial Sequence
  Description of Artificial Sequence: Synthetic oligonucleotide
cgaauggugaccaugacgu

SEQ ID NO: 475156 - RNA, 19 nt, Artificial Sequence
  Description of Artificial Sequence: Synthetic oligonucleotide
gucccggacaaaaucauua

SEQ ID NO: 475157 - RNA, 19 nt, Artificial Sequence
  Description of Artificial Sequence: Synthetic oligonucleotide
cagaccucgguagagucca

SEQ ID NO: 475158 - RNA, 19 nt, Artificial Sequence
  Description of Artificial Sequence: Synthetic oligonucleotide
augugggaccgaaugguga

SEQ ID NO: 475159 - RNA, 19 nt, Artificial Sequence
  Description of Artificial Sequence: Synthetic oligonucleotide
cagggugaaccuguaagca

SEQ ID NO: 475160 - RNA, 19 nt, Artificial Sequence
  Description of Artificial Sequence: Synthetic oligonucleotide
cggaguaacuuguccauag

SEQ ID NO: 475161 - RNA, 19 nt, Artificial Sequence
  Description of Artificial Sequence: Synthetic oligonucleotide
agaacgccgaaggcccuuc

SEQ ID NO: 475162 - RNA, 19 nt, Artificial Sequence
  Description of Artificial Sequence: Synthetic oligonucleotide
aggucgcauagaaaguggu

SEQ ID NO: 475163 - RNA, 19 nt, Artificial Sequence
  Description of Artificial Sequence: Synthetic oligonucleotide
ccggacaaaaucauuaacu

SEQ ID NO: 475164 - RNA, 19 nt, Artificial Sequence
  Description of Artificial Sequence: Synthetic oligonucleotide
cauccacgggcauacaacu

SEQ ID NO: 475165 - RNA, 19 nt, Artificial Sequence
  Description of Artificial Sequence: Synthetic oligonucleotide
ggugcaacuccuaucagcu

SEQ ID NO: 475166 - RNA, 19 nt, Artificial Sequence
  Description of Artificial Sequence: Synthetic oligonucleotide
cuguaagcagacuccgcaa

SEQ ID NO: 475167 - RNA, 19 nt, Artificial Sequence
  Description of Artificial Sequence: Synthetic oligonucleotide
cauguauaggucgcauaga

SEQ ID NO: 475168 - RNA, 19 nt, Artificial Sequence
  Description of Artificial Sequence: Synthetic oligonucleotide
ggcgaaucuucacaaucuc

SEQ ID NO: 475169 - RNA, 19 nt, Artificial Sequence
  Description of Artificial Sequence: Synthetic oligonucleotide
ggagauugcugucucugaa

SEQ ID NO: 475170 - RNA, 19 nt, Artificial Sequence
  Description of Artificial Sequence: Synthetic oligonucleotide
cggagaaucuuccggaaac

SEQ ID NO: 475171 - RNA, 19 nt, Artificial Sequence
  Description of Artificial Sequence: Synthetic oligonucleotide
ggauacguucaacacugaa

SEQ ID NO: 475172 - RNA, 19 nt, Artificial Sequence
  Description of Artificial Sequence: Synthetic oligonucleotide
gggugaaccuguaagcaga

SEQ ID NO: 475173 - RNA, 19 nt, Artificial Sequence
  Description of Artificial Sequence: Synthetic oligonucleotide
cacguccguucucaucagc

SEQ ID NO: 475174 - RNA, 19 nt, Artificial Sequence
  Description of Artificial Sequence: Synthetic oligonucleotide
gaugucggccagagucaag

SEQ ID NO: 475175 - RNA, 19 nt, Artificial Sequence
  Description of Artificial Sequence: Synthetic oligonucleotide
cgaagcguuauauaggucu

SEQ ID NO: 475176 - RNA, 19 nt, Artificial Sequence
  Description of Artificial Sequence: Synthetic oligonucleotide
acaguucaagccacucaga

SEQ ID NO: 475177 - RNA, 19 nt, Artificial Sequence
  Description of Artificial Sequence: Synthetic oligonucleotide
auaggugaccagagugaca

SEQ ID NO: 475178 - RNA, 19 nt, Artificial Sequence
  Description of Artificial Sequence: Synthetic oligonucleotide
guucauaggugaccagagu

SEQ ID NO: 475179 - RNA, 19 nt, Artificial Sequence
  Description of Artificial Sequence: Synthetic oligonucleotide
ucuuacgaacaagcuccau

SEQ ID NO: 475180 - RNA, 19 nt, Artificial Sequence
  Description of Artificial Sequence: Synthetic oligonucleotide
gcgauucgugacuucggug

SEQ ID NO: 475181 - RNA, 19 nt, Artificial Sequence
  Description of Artificial Sequence: Synthetic oligonucleotide
caacuccuaucagcugggg

SEQ ID NO: 475182 - RNA, 19 nt, Artificial Sequence
  Description of Artificial Sequence: Synthetic oligonucleotide
ccuuugugacuucaauauc

SEQ ID NO: 475183 - RNA, 19 nt, Artificial Sequence
  Description of Artificial Sequence: Synthetic oligonucleotide
cacgggcauacaacuuuuc

SEQ ID NO: 475184 - RNA, 19 nt, Artificial Sequence
  Description of Artificial Sequence: Synthetic oligonucleotide
cugaagcuugacuuccaua

SEQ ID NO: 475185 - RNA, 19 nt, Artificial Sequence
  Description of Artificial Sequence: Synthetic oligonucleotide
ggaccgaauggugaccaug

SEQ ID NO: 475186 - RNA, 19 nt, Artificial Sequence
  Description of Artificial Sequence: Synthetic oligonucleotide
ugccagcgaaaguggcugu

SEQ ID NO: 475187 - RNA, 19 nt, Artificial Sequence
  Description of Artificial Sequence: Synthetic oligonucleotide
accagaucuaugggauaca

SEQ ID NO: 475188 - RNA, 19 nt, Artificial Sequence
  Description of Artificial Sequence: Synthetic oligonucleotide
gacuucgguguugggucug

SEQ ID NO: 475189 - RNA, 19 nt, Artificial Sequence
  Description of Artificial Sequence: Synthetic oligonucleotide
cccggacaaaaucauuaac

SEQ ID NO: 475190 - RNA, 19 nt, Artificial Sequence
  Description of Artificial Sequence: Synthetic oligonucleotide
gcauccacgggcauacaac

SEQ ID NO: 475191 - RNA, 19 nt, Artificial Sequence
  Description of Artificial Sequence: Synthetic oligonucleotide
cuccgcaaucuggagccag

SEQ ID NO: 475192 - RNA, 19 nt, Artificial Sequence
  Description of Artificial Sequence: Synthetic oligonucleotide
ccgaccacagagccggugc

SEQ ID NO: 475193 - RNA, 19 nt, Artificial Sequence
  Description of Artificial Sequence: Synthetic oligonucleotide
ggagaggaccggaacacuc

SEQ ID NO: 475194 - RNA, 19 nt, Artificial Sequence
  Description of Artificial Sequence: Synthetic oligonucleotide
agggcauuucuuacucagu

SEQ ID NO: 475195 - RNA, 19 nt, Artificial Sequence
  Description of Artificial Sequence: Synthetic oligonucleotide
cacagaccguaccgugcag

SEQ ID NO: 475196 - RNA, 19 nt, Artificial Sequence
  Description of Artificial Sequence: Synthetic oligonucleotide
aucuuacgaacaagcucca

SEQ ID NO: 475197 - RNA, 19 nt, Artificial Sequence
  Description of Artificial Sequence: Synthetic oligonucleotide
cugcuacaaacaacuggaa

SEQ ID NO: 475198 - RNA, 19 nt, Artificial Sequence
  Description of Artificial Sequence: Synthetic oligonucleotide
uggacacgguacuggccau

SEQ ID NO: 475199 - RNA, 19 nt, Artificial Sequence
  Description of Artificial Sequence: Synthetic oligonucleotide
uccgguugacaggaagauu

SEQ ID NO: 475200 - RNA, 19 nt, Artificial Sequence
  Description of Artificial Sequence: Synthetic oligonucleotide
cuacgcugggagauuuaaa

SEQ ID NO: 475201 - RNA, 19 nt, Artificial Sequence
  Description of Artificial Sequence: Synthetic oligonucleotide
guuguugaguaaggaguua

SEQ ID NO: 475202 - RNA, 19 nt, Artificial Sequence
  Description of Artificial Sequence: Synthetic oligonucleotide
accgcugcagaaguucaua

SEQ ID NO: 475203 - RNA, 19 nt, Artificial Sequence
  Description of Artificial Sequence: Synthetic oligonucleotide
agaccguaccgugcagcug

SEQ ID NO: 475204 - RNA, 19 nt, Artificial Sequence
  Description of Artificial Sequence: Synthetic oligonucleotide
gaccccgcuguauguuguc

SEQ ID NO: 475205 - RNA, 19 nt, Artificial Sequence
  Description of Artificial Sequence: Synthetic oligonucleotide
agauugcggagaagggaau

SEQ ID NO: 475206 - RNA, 19 nt, Artificial Sequence
  Description of Artificial Sequence: Synthetic oligonucleotide
gauucgugacuucgguguu

SEQ ID NO: 475207 - RNA, 19 nt, Artificial Sequence
  Description of Artificial Sequence: Synthetic oligonucleotide
cagagccggugccacgcug

SEQ ID NO: 475208 - RNA, 19 nt, Artificial Sequence
  Description of Artificial Sequence: Synthetic oligonucleotide
uccggcauccacgggcaua

SEQ ID NO: 475209 - RNA, 19 nt, Artificial Sequence
  Description of Artificial Sequence: Synthetic oligonucleotide
ggcauccacgggcauacaa

SEQ ID NO: 475210 - RNA, 19 nt, Artificial Sequence
  Description of Artificial Sequence: Synthetic oligonucleotide
ugccugcuaaagugcuaua

SEQ ID NO: 475211 - RNA, 19 nt, Artificial Sequence
  Description of Artificial Sequence: Synthetic oligonucleotide
gugccaaggugucucugua

SEQ ID NO: 475212 - RNA, 19 nt, Artificial Sequence
  Description of Artificial Sequence: Synthetic oligonucleotide
acuucgguguugggucuga

SEQ ID NO: 475213 - RNA, 19 nt, Artificial Sequence
  Description of Artificial Sequence: Synthetic oligonucleotide
ccaagccaggagauugcug

SEQ ID NO: 475214 - RNA, 19 nt, Artificial Sequence
  Description of Artificial Sequence: Synthetic oligonucleotide
cuucgguguugggucugag

SEQ ID NO: 475215 - RNA, 19 nt, Artificial Sequence
  Description of Artificial Sequence: Synthetic oligonucleotide
cagcugacuggacacggua

SEQ ID NO: 475216 - RNA, 19 nt, Artificial Sequence
  Description of Artificial Sequence: Synthetic oligonucleotide
cagaccguaccgugcagcu

SEQ ID NO: 475217 - RNA, 19 nt, Artificial Sequence
  Description of Artificial Sequence: Synthetic oligonucleotide
cugugcgaagcagagucua

SEQ ID NO: 475218 - RNA, 19 nt, Artificial Sequence
  Description of Artificial Sequence: Synthetic oligonucleotide
ccagauaggccugcccaag

SEQ ID NO: 475219 - RNA, 19 nt, Artificial Sequence
  Description of Artificial Sequence: Synthetic oligonucleotide
gaccugcgagccaccagca

SEQ ID NO: 475220 - RNA, 19 nt, Artificial Sequence
  Description of Artificial Sequence: Synthetic oligonucleotide
cacacacaagccaccggcu

SEQ ID NO: 475221 - RNA, 19 nt, Artificial Sequence
  Description of Artificial Sequence: Synthetic oligonucleotide
cuccagcggguugguaaag

SEQ ID NO: 475222 - RNA, 19 nt, Artificial Sequence
  Description of Artificial Sequence: Synthetic oligonucleotide
cccgaagcguuauauaggu

SEQ ID NO: 475223 - RNA, 19 nt, Artificial Sequence
  Description of Artificial Sequence: Synthetic oligonucleotide
ccagcggagcuauucucuc

SEQ ID NO: 475224 - RNA, 19 nt, Artificial Sequence
  Description of Artificial Sequence: Synthetic oligonucleotide
cgauucgugacuucggugu

SEQ ID NO: 475225 - RNA, 19 nt, Artificial Sequence
  Description of Artificial Sequence: Synthetic oligonucleotide
gcguuauauaggucugcaa

SEQ ID NO: 475226 - RNA, 19 nt, Artificial Sequence
  Description of Artificial Sequence: Synthetic oligonucleotide
accguaccgugcagcugac

SEQ ID NO: 475227 - RNA, 19 nt, Artificial Sequence
  Description of Artificial Sequence: Synthetic oligonucleotide
acagcuacgcugggagauu

SEQ ID NO: 475228 - RNA, 19 nt, Artificial Sequence
  Description of Artificial Sequence: Synthetic oligonucleotide
accugagaucaugccacuu

SEQ ID NO: 475229 - RNA, 19 nt, Artificial Sequence
  Description of Artificial Sequence: Synthetic oligonucleotide
gugugugugugugugucau

SEQ ID NO: 475230 - RNA, 19 nt, Artificial Sequence
  Description of Artificial Sequence: Synthetic oligonucleotide
aagcgccccgaagcguuau

SEQ ID NO: 475231 - RNA, 19 nt, Artificial Sequence
  Description of Artificial Sequence: Synthetic oligonucleotide
gcaugugggaccgaauggu

SEQ ID NO: 475232 - RNA, 19 nt, Artificial Sequence
  Description of Artificial Sequence: Synthetic oligonucleotide
gaugaccccgcuguauguu

SEQ ID NO: 475233 - RNA, 19 nt, Artificial Sequence
  Description of Artificial Sequence: Synthetic oligonucleotide
cacagcuacgcugggagau

SEQ ID NO: 475234 - RNA, 19 nt, Artificial Sequence
  Description of Artificial Sequence: Synthetic oligonucleotide
gcuacgcugggagauuuaa

SEQ ID NO: 475235 - RNA, 19 nt, Artificial Sequence
  Description of Artificial Sequence: Synthetic oligonucleotide
ccggcauccacgggcauac

SEQ ID NO: 475236 - RNA, 19 nt, Artificial Sequence
  Description of Artificial Sequence: Synthetic oligonucleotide
ccauguuguugaguaagga

SEQ ID NO: 475237 - RNA, 19 nt, Artificial Sequence
  Description of Artificial Sequence: Synthetic oligonucleotide
cggagcuauucucucgaug

SEQ ID NO: 475238 - RNA, 19 nt, Artificial Sequence
  Description of Artificial Sequence: Synthetic oligonucleotide
auccacgggcauacaacuu

SEQ ID NO: 475239 - RNA, 19 nt, Artificial Sequence
  Description of Artificial Sequence: Synthetic oligonucleotide
ccgaagcguuauauagguc

SEQ ID NO: 475240 - RNA, 19 nt, Artificial Sequence
  Description of Artificial Sequence: Synthetic oligonucleotide
gugccacgcugguuuugca

SEQ ID NO: 475241 - RNA, 19 nt, Artificial Sequence
  Description of Artificial Sequence: Synthetic oligonucleotide
cacaaccuccagcaaggau

SEQ ID NO: 475242 - RNA, 19 nt, Artificial Sequence
  Description of Artificial Sequence: Synthetic oligonucleotide
gccagcgaaaguggcugug

SEQ ID NO: 475243 - RNA, 19 nt, Artificial Sequence
  Description of Artificial Sequence: Synthetic oligonucleotide
ccaugacgucacugaaauc

SEQ ID NO: 475244 - RNA, 19 nt, Artificial Sequence
  Description of Artificial Sequence: Synthetic oligonucleotide
agugagcaugugggaccga

SEQ ID NO: 475245 - RNA, 19 nt, Artificial Sequence
  Description of Artificial Sequence: Synthetic oligonucleotide
gaacgccgaaggcccuucu

SEQ ID NO: 475246 - RNA, 19 nt, Artificial Sequence
  Description of Artificial Sequence: Synthetic oligonucleotide
ccgugcagcugacuggaca

SEQ ID NO: 475247 - RNA, 19 nt, Artificial Sequence
  Description of Artificial Sequence: Synthetic oligonucleotide
caacugagcccagggugaa

SEQ ID NO: 475248 - RNA, 19 nt, Artificial Sequence
  Description of Artificial Sequence: Synthetic oligonucleotide
cuccuaucagcugggguau

SEQ ID NO: 475249 - RNA, 19 nt, Artificial Sequence
  Description of Artificial Sequence: Synthetic oligonucleotide
ccgggucuucaccagaucu

SEQ ID NO: 475250 - RNA, 19 nt, Artificial Sequence
  Description of Artificial Sequence: Synthetic oligonucleotide
agcgccccgaagcguuaua

SEQ ID NO: 475251 - RNA, 19 nt, Artificial Sequence
  Description of Artificial Sequence: Synthetic oligonucleotide
gucucggaggaaacacgcu

SEQ ID NO: 475252 - RNA, 19 nt, Artificial Sequence
  Description of Artificial Sequence: Synthetic oligonucleotide
ccgccacugccuuggguug

SEQ ID NO: 475253 - RNA, 19 nt, Artificial Sequence
  Description of Artificial Sequence: Synthetic oligonucleotide
cccucauaacgcaacacuu

SEQ ID NO: 475254 - RNA, 19 nt, Artificial Sequence
  Description of Artificial Sequence: Synthetic oligonucleotide
cacaagccaccggcugauc

SEQ ID NO: 475255 - RNA, 19 nt, Artificial Sequence
  Description of Artificial Sequence: Synthetic oligonucleotide
gucaagcgccccgaagcgu

SEQ ID NO: 475256 - RNA, 19 nt, Artificial Sequence
  Description of Artificial Sequence: Synthetic oligonucleotide
ccagcggccaggagauuga

SEQ ID NO: 475257 - RNA, 19 nt, Artificial Sequence
  Description of Artificial Sequence: Synthetic oligonucleotide
cguccguucucaucagcca

SEQ ID NO: 475258 - RNA, 19 nt, Artificial Sequence
  Description of Artificial Sequence: Synthetic oligonucleotide
gggugccaaggugucucug

SEQ ID NO: 475259 - RNA, 19 nt, Artificial Sequence
  Description of Artificial Sequence: Synthetic oligonucleotide
ucugggcccuguggugauu

SEQ ID NO: 475260 - RNA, 19 nt, Artificial Sequence
  Description of Artificial Sequence: Synthetic oligonucleotide
gccagcggagcuauucucu

SEQ ID NO: 475261 - RNA, 19 nt, Artificial Sequence
  Description of Artificial Sequence: Synthetic oligonucleotide
agcuacgcugggagauuua

SEQ ID NO: 475262 - RNA, 19 nt, Artificial Sequence
  Description of Artificial Sequence: Synthetic oligonucleotide
ccagagucaagcgccccga

SEQ ID NO: 475263 - RNA, 19 nt, Artificial Sequence
  Description of Artificial Sequence: Synthetic oligonucleotide
cccggagaaucuuccggaa

SEQ ID NO: 475264 - RNA, 19 nt, Artificial Sequence
  Description of Artificial Sequence: Synthetic oligonucleotide
ggucgcauagaaagugguu

SEQ ID NO: 475265 - RNA, 19 nt, Artificial Sequence
  Description of Artificial Sequence: Synthetic oligonucleotide
gugucaugagcagcugcuu

SEQ ID NO: 475266 - RNA, 19 nt, Artificial Sequence
  Description of Artificial Sequence: Synthetic oligonucleotide
cggaacacucgagcugcag

SEQ ID NO: 475267 - RNA, 19 nt, Artificial Sequence
  Description of Artificial Sequence: Synthetic oligonucleotide
gcggaguaacuuguccaua

SEQ ID NO: 475268 - RNA, 19 nt, Artificial Sequence
  Description of Artificial Sequence: Synthetic oligonucleotide
ccugcccaagccaggagau

SEQ ID NO: 475269 - RNA, 19 nt, Artificial Sequence
  Description of Artificial Sequence: Synthetic oligonucleotide
ccagcggguugguaaagau

SEQ ID NO: 475270 - RNA, 19 nt, Artificial Sequence
  Description of Artificial Sequence: Synthetic oligonucleotide
gcugugcgaagcagagucu

SEQ ID NO: 475271 - RNA, 19 nt, Artificial Sequence
  Description of Artificial Sequence: Synthetic oligonucleotide
agaccucgguagaguccaa

SEQ ID NO: 475272 - RNA, 19 nt, Artificial Sequence
  Description of Artificial Sequence: Synthetic oligonucleotide
cccgaccacagagccggug

SEQ ID NO: 475273 - RNA, 19 nt, Artificial Sequence
  Description of Artificial Sequence: Synthetic oligonucleotide
cccgccaccugcaggcgaa

SEQ ID NO: 475274 - RNA, 19 nt, Artificial Sequence
  Description of Artificial Sequence: Synthetic oligonucleotide
cagcuacgcugggagauuu

SEQ ID NO: 475275 - RNA, 19 nt, Artificial Sequence
  Description of Artificial Sequence: Synthetic oligonucleotide
gggaccgaauggugaccau

SEQ ID NO: 475276 - RNA, 19 nt, Artificial Sequence
  Description of Artificial Sequence: Synthetic oligonucleotide
cgcaaucuggagccagaua

SEQ ID NO: 475277 - RNA, 19 nt, Artificial Sequence
  Description of Artificial Sequence: Synthetic oligonucleotide
cgaugaccccgcuguaugu

SEQ ID NO: 475278 - RNA, 19 nt, Artificial Sequence
  Description of Artificial Sequence: Synthetic oligonucleotide
ccugggcaugugaucacuu

SEQ ID NO: 475279 - RNA, 19 nt, Artificial Sequence
  Description of Artificial Sequence: Synthetic oligonucleotide
gcgccccgaagcguuauau

SEQ ID NO: 475280 - RNA, 19 nt, Artificial Sequence
  Description of Artificial Sequence: Synthetic oligonucleotide
ggacacgguacuggccauu

SEQ ID NO: 475281 - RNA, 19 nt, Artificial Sequence
  Description of Artificial Sequence: Synthetic oligonucleotide
ccggcugauccuccggcau

SEQ ID NO: 475282 - RNA, 19 nt, Artificial Sequence
  Description of Artificial Sequence: Synthetic oligonucleotide
ccgccgccacugccuuggg

SEQ ID NO: 475283 - RNA, 19 nt, Artificial Sequence
  Description of Artificial Sequence: Synthetic oligonucleotide
cagcggccaggagauugau

SEQ ID NO: 475284 - RNA, 19 nt, Artificial Sequence
  Description of Artificial Sequence: Synthetic oligonucleotide
cccugggcaugugaucacu

SEQ ID NO: 475285 - RNA, 19 nt, Artificial Sequence
  Description of Artificial Sequence: Synthetic oligonucleotide
cggugccacgcugguuuug

SEQ ID NO: 475286 - RNA, 19 nt, Artificial Sequence
  Description of Artificial Sequence: Synthetic oligonucleotide
cuccggcauccacgggcau

SEQ ID NO: 475287 - RNA, 19 nt, Artificial Sequence
  Description of Artificial Sequence: Synthetic oligonucleotide
ccguaccgugcagcugacu

SEQ ID NO: 475288 - RNA, 19 nt, Artificial Sequence
  Description of Artificial Sequence: Synthetic oligonucleotide
cggcauccacgggcauaca

SEQ ID NO: 475289 - RNA, 19 nt, Artificial Sequence
  Description of Artificial Sequence: Synthetic oligonucleotide
aauguugucacuuugaauc

SEQ ID NO: 475290 - RNA, 19 nt, Artificial Sequence
  Description of Artificial Sequence: Synthetic oligonucleotide
aaaguguacacucacgugc

SEQ ID NO: 475291 - RNA, 19 nt, Artificial Sequence
  Description of Artificial Sequence: Synthetic oligonucleotide
aacauaacuaacuugagga

SEQ ID NO: 475292 - RNA, 19 nt, Artificial Sequence
  Description of Artificial Sequence: Synthetic oligonucleotide
agugaaacugcuuuaaacc

SEQ ID NO: 475293 - RNA, 19 nt, Artificial Sequence
  Description of Artificial Sequence: Synthetic oligonucleotide
aacaacaugaccaaacucc

SEQ ID NO: 475294 - RNA, 19 nt, Artificial Sequence
  Description of Artificial Sequence: Synthetic oligonucleotide
uucuacguagcuaugaucg

SEQ ID NO: 475295 - RNA, 19 nt, Artificial Sequence
  Description of Artificial Sequence: Synthetic oligonucleotide
aaggaauuauccuuugacc

SEQ ID NO: 475296 - RNA, 19 nt, Artificial Sequence
  Description of Artificial Sequence: Synthetic oligonucleotide
aggaauuauccuuugaccc

SEQ ID NO: 475297 - RNA, 19 nt, Artificial Sequence
  Description of Artificial Sequence: Synthetic oligonucleotide
ucaauguguacucucaugg

SEQ ID NO: 475298 - RNA, 19 nt, Artificial Sequence
  Description of Artificial Sequence: Synthetic oligonucleotide
aagugaaacugcuuuaaac

SEQ ID NO: 475299 - RNA, 19 nt, Artificial Sequence
  Description of Artificial Sequence: Synthetic oligonucleotide
aaucuaucagacccaaagc

SEQ ID NO: 475300 - RNA, 19 nt, Artificial Sequence
  Description of Artificial Sequence: Synthetic oligonucleotide
accgauagugaucagaagc

SEQ ID NO: 475301 - RNA, 19 nt, Artificial Sequence
  Description of Artificial Sequence: Synthetic oligonucleotide
aguaguuuaggucucuccc

SEQ ID NO: 475302 - RNA, 19 nt, Artificial Sequence
  Description of Artificial Sequence: Synthetic oligonucleotide
aaaguauugguacuacauc

SEQ ID NO: 475303 - RNA, 19 nt, Artificial Sequence
  Description of Artificial Sequence: Synthetic oligonucleotide
agaauuaacaaacaugcca

SEQ ID NO: 475304 - RNA, 19 nt, Artificial Sequence
  Description of Artificial Sequence: Synthetic oligonucleotide
uuacuuuacaguaagcaug

SEQ ID NO: 475305 - RNA, 19 nt, Artificial Sequence
  Description of Artificial Sequence: Synthetic oligonucleotide
uguuauuacauccuagaug

SEQ ID NO: 475306 - RNA, 19 nt, Artificial Sequence
  Description of Artificial Sequence: Synthetic oligonucleotide
acuccuaaaguauugguac

SEQ ID NO: 475307 - RNA, 19 nt, Artificial Sequence
  Description of Artificial Sequence: Synthetic oligonucleotide
uguauugugguauaagagc

SEQ ID NO: 475308 - RNA, 19 nt, Artificial Sequence
  Description of Artificial Sequence: Synthetic oligonucleotide
aguacaauacaucuaaaug

SEQ ID NO: 475309 - RNA, 19 nt, Artificial Sequence
  Description of Artificial Sequence: Synthetic oligonucleotide
uuuaacguaagugaaacug

SEQ ID NO: 475310 - RNA, 19 nt, Artificial Sequence
  Description of Artificial Sequence: Synthetic oligonucleotide
uguaaugcaaaacuguuaa

SEQ ID NO: 475311 - RNA, 19 nt, Artificial Sequence
  Description of Artificial Sequence: Synthetic oligonucleotide
aaguauugguacuacaucu

SEQ ID NO: 475312 - RNA, 19 nt, Artificial Sequence
  Description of Artificial Sequence: Synthetic oligonucleotide
caagguaagauuuaaauca

SEQ ID NO: 475313 - RNA, 19 nt, Artificial Sequence
  Description of Artificial Sequence: Synthetic oligonucleotide
uaucauaaggacccgggcg

SEQ ID NO: 475314 - RNA, 19 nt, Artificial Sequence
  Description of Artificial Sequence: Synthetic oligonucleotide
auagucauaagcuuucgag

SEQ ID NO: 475315 - RNA, 19 nt, Artificial Sequence
  Description of Artificial Sequence: Synthetic oligonucleotide
acaagguaagauuuaaauc

SEQ ID NO: 475316 - RNA, 19 nt, Artificial Sequence
  Description of Artificial Sequence: Synthetic oligonucleotide
cuacaucucaaaauuaucc

SEQ ID NO: 475317 - RNA, 19 nt, Artificial Sequence
  Description of Artificial Sequence: Synthetic oligonucleotide
uacaauacaucuaaaugga

SEQ ID NO: 475318 - RNA, 19 nt, Artificial Sequence
  Description of Artificial Sequence: Synthetic oligonucleotide
aaacaaucuuaacuuuuac

SEQ ID NO: 475319 - RNA, 19 nt, Artificial Sequence
  Description of Artificial Sequence: Synthetic oligonucleotide
aaacaacaugaccaaacuc

SEQ ID NO: 475320 - RNA, 19 nt, Artificial Sequence
  Description of Artificial Sequence: Synthetic oligonucleotide
aacgcaauuucaauguggc

SEQ ID NO: 475321 - RNA, 19 nt, Artificial Sequence
  Description of Artificial Sequence: Synthetic oligonucleotide
aagcuuguaaugcaaaacu

SEQ ID NO: 475322 - RNA, 19 nt, Artificial Sequence
  Description of Artificial Sequence: Synthetic oligonucleotide
cugaaaguggauuuaacag

SEQ ID NO: 475323 - RNA, 19 nt, Artificial Sequence
  Description of Artificial Sequence: Synthetic oligonucleotide
aucauaaggacccgggcgc

SEQ ID NO: 475324 - RNA, 19 nt, Artificial Sequence
  Description of Artificial Sequence: Synthetic oligonucleotide
uugaagauuucaauguacc

SEQ ID NO: 475325 - RNA, 19 nt, Artificial Sequence
  Description of Artificial Sequence: Synthetic oligonucleotide
aucuaugcugcauauuagc

SEQ ID NO: 475326 - RNA, 19 nt, Artificial Sequence
  Description of Artificial Sequence: Synthetic oligonucleotide
uuagcuuuaucuuuugcca

SEQ ID NO: 475327 - RNA, 19 nt, Artificial Sequence
  Description of Artificial Sequence: Synthetic oligonucleotide
ugaaacgaacaccugaugu

SEQ ID NO: 475328 - RNA, 19 nt, Artificial Sequence
  Description of Artificial Sequence: Synthetic oligonucleotide
uuaacguaagugaaacugc

SEQ ID NO: 475329 - RNA, 19 nt, Artificial Sequence
  Description of Artificial Sequence: Synthetic oligonucleotide
uagucauaagcuuucgagg

SEQ ID NO: 475330 - RNA, 19 nt, Artificial Sequence
  Description of Artificial Sequence: Synthetic oligonucleotide
ugaaaguguacacucacgu

SEQ ID NO: 475331 - RNA, 19 nt, Artificial Sequence
  Description of Artificial Sequence: Synthetic oligonucleotide
aaacgaacaccugauguac

SEQ ID NO: 475332 - RNA, 19 nt, Artificial Sequence
  Description of Artificial Sequence: Synthetic oligonucleotide
aauguguacucucauggga

SEQ ID NO: 475333 - RNA, 19 nt, Artificial Sequence
  Description of Artificial Sequence: Synthetic oligonucleotide
uggccuaucauaaggaccc

SEQ ID NO: 475334 - RNA, 19 nt, Artificial Sequence
  Description of Artificial Sequence: Synthetic oligonucleotide
cuagaugaauauuucagug

SEQ ID NO: 475335 - RNA, 19 nt, Artificial Sequence
  Description of Artificial Sequence: Synthetic oligonucleotide
uaaaguauugguacuacau

SEQ ID NO: 475336 - RNA, 19 nt, Artificial Sequence
  Description of Artificial Sequence: Synthetic oligonucleotide
uccuacucuauccaguucc

SEQ ID NO: 475337 - RNA, 19 nt, Artificial Sequence
  Description of Artificial Sequence: Synthetic oligonucleotide
ugaaucacaagcuuguaau

SEQ ID NO: 475338 - RNA, 19 nt, Artificial Sequence
  Description of Artificial Sequence: Synthetic oligonucleotide
uaagcaugaaucacaagcu

SEQ ID NO: 475339 - RNA, 19 nt, Artificial Sequence
  Description of Artificial Sequence: Synthetic oligonucleotide
uugacugauagucacuuga

SEQ ID NO: 475340 - RNA, 19 nt, Artificial Sequence
  Description of Artificial Sequence: Synthetic oligonucleotide
aucuaaauggaauucacaa

SEQ ID NO: 475341 - RNA, 19 nt, Artificial Sequence
  Description of Artificial Sequence: Synthetic oligonucleotide
aacaugaccaaacuccuaa

SEQ ID NO: 475342 - RNA, 19 nt, Artificial Sequence
  Description of Artificial Sequence: Synthetic oligonucleotide
aaacugcugagcuuaaagu

SEQ ID NO: 475343 - RNA, 19 nt, Artificial Sequence
  Description of Artificial Sequence: Synthetic oligonucleotide
gauguauugugguauaaga

SEQ ID NO: 475344 - RNA, 19 nt, Artificial Sequence
  Description of Artificial Sequence: Synthetic oligonucleotide
uguuaaacuuaaauuuugu

SEQ ID NO: 475345 - RNA, 19 nt, Artificial Sequence
  Description of Artificial Sequence: Synthetic oligonucleotide
cauuuaccaaucauacugg

SEQ ID NO: 475346 - RNA, 19 nt, Artificial Sequence
  Description of Artificial Sequence: Synthetic oligonucleotide
uccuacaacauaacuaacu

SEQ ID NO: 475347 - RNA, 19 nt, Artificial Sequence
  Description of Artificial Sequence: Synthetic oligonucleotide
aaagcugaccgauagugau

SEQ ID NO: 475348 - RNA, 19 nt, Artificial Sequence
  Description of Artificial Sequence: Synthetic oligonucleotide
agcaagguuugacugauag

SEQ ID NO: 475349 - RNA, 19 nt, Artificial Sequence
  Description of Artificial Sequence: Synthetic oligonucleotide
uccauaacuagacugguua

SEQ ID NO: 475350 - RNA, 19 nt, Artificial Sequence
  Description of Artificial Sequence: Synthetic oligonucleotide
caagguuugacugauaguc

SEQ ID NO: 475351 - RNA, 19 nt, Artificial Sequence
  Description of Artificial Sequence: Synthetic oligonucleotide
ucccauuuaccaaucauac

SEQ ID NO: 475352 - RNA, 19 nt, Artificial Sequence
  Description of Artificial Sequence: Synthetic oligonucleotide
acuccuacaacauaacuaa

SEQ ID NO: 475353 - RNA, 19 nt, Artificial Sequence
  Description of Artificial Sequence: Synthetic oligonucleotide
ucaugaguagcaaacucga

SEQ ID NO: 475354 - RNA, 19 nt, Artificial Sequence
  Description of Artificial Sequence: Synthetic oligonucleotide
agguuugacugauagucac

SEQ ID NO: 475355 - RNA, 19 nt, Artificial Sequence
  Description of Artificial Sequence: Synthetic oligonucleotide
caacauaacuaacuugagg

SEQ ID NO: 475356 - RNA, 19 nt, Artificial Sequence
  Description of Artificial Sequence: Synthetic oligonucleotide
caucucaaaauuaucccag

SEQ ID NO: 475357 - RNA, 19 nt, Artificial Sequence
  Description of Artificial Sequence: Synthetic oligonucleotide
uccuauuucaauguguacu

SEQ ID NO: 475358 - RNA, 19 nt, Artificial Sequence
  Description of Artificial Sequence: Synthetic oligonucleotide
ugguuagauaaacccaucc

SEQ ID NO: 475359 - RNA, 19 nt, Artificial Sequence
  Description of Artificial Sequence: Synthetic oligonucleotide
aguuccuauaaaugcacag

SEQ ID NO: 475360 - RNA, 19 nt, Artificial Sequence
  Description of Artificial Sequence: Synthetic oligonucleotide
ugaguagcaaacucgacau

SEQ ID NO: 475361 - RNA, 19 nt, Artificial Sequence
  Description of Artificial Sequence: Synthetic oligonucleotide
caacauuuaacguaaguga

SEQ ID NO: 475362 - RNA, 19 nt, Artificial Sequence
  Description of Artificial Sequence: Synthetic oligonucleotide
ggauuuaacaguuaugguc

SEQ ID NO: 475363 - RNA, 19 nt, Artificial Sequence
  Description of Artificial Sequence: Synthetic oligonucleotide
ugucuuaaggaauuauccu

SEQ ID NO: 475364 - RNA, 19 nt, Artificial Sequence
  Description of Artificial Sequence: Synthetic oligonucleotide
ugugucuuaaggaauuauc

SEQ ID NO: 475365 - RNA, 19 nt, Artificial Sequence
  Description of Artificial Sequence: Synthetic oligonucleotide
augaguagcaaacucgaca

SEQ ID NO: 475366 - RNA, 19 nt, Artificial Sequence
  Description of Artificial Sequence: Synthetic oligonucleotide
aaaaccaucauuggcagua

SEQ ID NO: 475367 - RNA, 19 nt, Artificial Sequence
  Description of Artificial Sequence: Synthetic oligonucleotide
uauuccuggagcuguuugg

SEQ ID NO: 475368 - RNA, 19 nt, Artificial Sequence
  Description of Artificial Sequence: Synthetic oligonucleotide
aaguguacacucacgugcc

SEQ ID NO: 475369 - RNA, 19 nt, Artificial Sequence
  Description of Artificial Sequence: Synthetic oligonucleotide
uagaugaauauuucagugu

SEQ ID NO: 475370 - RNA, 19 nt, Artificial Sequence
  Description of Artificial Sequence: Synthetic oligonucleotide
cuuaguacaauacaucuaa

SEQ ID NO: 475371 - RNA, 19 nt, Artificial Sequence
  Description of Artificial Sequence: Synthetic oligonucleotide
uuacaguaagcaugaauca

SEQ ID NO: 475372 - RNA, 19 nt, Artificial Sequence
  Description of Artificial Sequence: Synthetic oligonucleotide
ccuuacagaauauuaaacc

SEQ ID NO: 475373 - RNA, 19 nt, Artificial Sequence
  Description of Artificial Sequence: Synthetic oligonucleotide
uacuacaucucaaaauuau

SEQ ID NO: 475374 - RNA, 19 nt, Artificial Sequence
  Description of Artificial Sequence: Synthetic oligonucleotide
cucauguguacacagugcc

SEQ ID NO: 475375 - RNA, 19 nt, Artificial Sequence
  Description of Artificial Sequence: Synthetic oligonucleotide
aaguggauuuaacaguuau

SEQ ID NO: 475376 - RNA, 19 nt, Artificial Sequence
  Description of Artificial Sequence: Synthetic oligonucleotide
auaacuaacuugaggaaag

SEQ ID NO: 475377 - RNA, 19 nt, Artificial Sequence
  Description of Artificial Sequence: Synthetic oligonucleotide
ccauuuaccaaucauacug

SEQ ID NO: 475378 - RNA, 19 nt, Artificial Sequence
  Description of Artificial Sequence: Synthetic oligonucleotide
acugauagucacuugaguu

SEQ ID NO: 475379 - RNA, 19 nt, Artificial Sequence
  Description of Artificial Sequence: Synthetic oligonucleotide
auugugguauaagagcaac

SEQ ID NO: 475380 - RNA, 19 nt, Artificial Sequence
  Description of Artificial Sequence: Synthetic oligonucleotide
ugcuuaaguacacuccuac

SEQ ID NO: 475381 - RNA, 19 nt, Artificial Sequence
  Description of Artificial Sequence: Synthetic oligonucleotide
agaugaauauuucaguguu

SEQ ID NO: 475382 - RNA, 19 nt, Artificial Sequence
  Description of Artificial Sequence: Synthetic oligonucleotide
uagauaaacccaucccucc

SEQ ID NO: 475383 - RNA, 19 nt, Artificial Sequence
  Description of Artificial Sequence: Synthetic oligonucleotide
uaacguaagugaaacugcu

SEQ ID NO: 475384 - RNA, 19 nt, Artificial Sequence
  Description of Artificial Sequence: Synthetic oligonucleotide
agcuaugaucguaagcucc

SEQ ID NO: 475385 - RNA, 19 nt, Artificial Sequence
  Description of Artificial Sequence: Synthetic oligonucleotide
auggaauucacaauacaag

SEQ ID NO: 475386 - RNA, 19 nt, Artificial Sequence
  Description of Artificial Sequence: Synthetic oligonucleotide
ucacuuaguacaauacauc

SEQ ID NO: 475387 - RNA, 19 nt, Artificial Sequence
  Description of Artificial Sequence: Synthetic oligonucleotide
ugaagauuucaauguaccu

SEQ ID NO: 475388 - RNA, 19 nt, Artificial Sequence
  Description of Artificial Sequence: Synthetic oligonucleotide
aaauguugucacuuugaau

SEQ ID NO: 475389 - RNA, 19 nt, Artificial Sequence
  Description of Artificial Sequence: Synthetic oligonucleotide
caacgcaauuucaaugugg

SEQ ID NO: 475390 - RNA, 19 nt, Artificial Sequence
  Description of Artificial Sequence: Synthetic oligonucleotide
ugaccgauagugaucagaa

SEQ ID NO: 475391 - RNA, 19 nt, Artificial Sequence
  Description of Artificial Sequence: Synthetic oligonucleotide
uaugaucguaagcuccucc

SEQ ID NO: 475392 - RNA, 19 nt, Artificial Sequence
  Description of Artificial Sequence: Synthetic oligonucleotide
cuuguuauuacauccuaga

SEQ ID NO: 475393 - RNA, 19 nt, Artificial Sequence
  Description of Artificial Sequence: Synthetic oligonucleotide
gaaaguguacacucacgug

SEQ ID NO: 475394 - RNA, 19 nt, Artificial Sequence
  Description of Artificial Sequence: Synthetic oligonucleotide
aauaugcuuacugcuuaag

SEQ ID NO: 475395 - RNA, 19 nt, Artificial Sequence
  Description of Artificial Sequence: Synthetic oligonucleotide
uacugaacuuguuauuaca

SEQ ID NO: 475396 - RNA, 19 nt, Artificial Sequence
  Description of Artificial Sequence: Synthetic oligonucleotide
cauacccgucauuauagcc

SEQ ID NO: 475397 - RNA, 19 nt, Artificial Sequence
  Description of Artificial Sequence: Synthetic oligonucleotide
aaguucgacaaaugcuuca

SEQ ID NO: 475398 - RNA, 19 nt, Artificial Sequence
  Description of Artificial Sequence: Synthetic oligonucleotide
ugauguauugugguauaag

SEQ ID NO: 475399 - RNA, 19 nt, Artificial Sequence
  Description of Artificial Sequence: Synthetic oligonucleotide
acgaaagccuccccugugc

SEQ ID NO: 475400 - RNA, 19 nt, Artificial Sequence
  Description of Artificial Sequence: Synthetic oligonucleotide
aaguuugaaaacaaucuua

SEQ ID NO: 475401 - RNA, 19 nt, Artificial Sequence
  Description of Artificial Sequence: Synthetic oligonucleotide
cuaugaucagacauuccug

SEQ ID NO: 475402 - RNA, 19 nt, Artificial Sequence
  Description of Artificial Sequence: Synthetic oligonucleotide
uacuggauaugcuugguau

SEQ ID NO: 475403 - RNA, 19 nt, Artificial Sequence
  Description of Artificial Sequence: Synthetic oligonucleotide
uucccauuuaccaaucaua

SEQ ID NO: 475404 - RNA, 19 nt, Artificial Sequence
  Description of Artificial Sequence: Synthetic oligonucleotide
uuguuauuacauccuagau

SEQ ID NO: 475405 - RNA, 19 nt, Artificial Sequence
  Description of Artificial Sequence: Synthetic oligonucleotide
cuugguauccuuccuacuc

SEQ ID NO: 475406 - RNA, 19 nt, Artificial Sequence
  Description of Artificial Sequence: Synthetic oligonucleotide
auguauugugguauaagag

SEQ ID NO: 475407 - RNA, 19 nt, Artificial Sequence
  Description of Artificial Sequence: Synthetic oligonucleotide
cuuaaguacacuccuacaa

SEQ ID NO: 475408 - RNA, 19 nt, Artificial Sequence
  Description of Artificial Sequence: Synthetic oligonucleotide
uauuacauccuagaugaau

SEQ ID NO: 475409 - RNA, 19 nt, Artificial Sequence
  Description of Artificial Sequence: Synthetic oligonucleotide
aacgaacaccugauguacc

SEQ ID NO: 475410 - RNA, 19 nt, Artificial Sequence
  Description of Artificial Sequence: Synthetic oligonucleotide
agguaugugucuuaaggaa

SEQ ID NO: 475411 - RNA, 19 nt, Artificial Sequence
  Description of Artificial Sequence: Synthetic oligonucleotide
agacacagcuccuauauuu

SEQ ID NO: 475412 - RNA, 19 nt, Artificial Sequence
  Description of Artificial Sequence: Synthetic oligonucleotide
ucucaaaauuaucccagau

SEQ ID NO: 475413 - RNA, 19 nt, Artificial Sequence
  Description of Artificial Sequence: Synthetic oligonucleotide
ugguacuacaucucaaaau

SEQ ID NO: 475414 - RNA, 19 nt, Artificial Sequence
  Description of Artificial Sequence: Synthetic oligonucleotide
aggaccuccauaacuagac

SEQ ID NO: 475415 - RNA, 19 nt, Artificial Sequence
  Description of Artificial Sequence: Synthetic oligonucleotide
ucaacgcaauuucaaugug

SEQ ID NO: 475416 - RNA, 19 nt, Artificial Sequence
  Description of Artificial Sequence: Synthetic oligonucleotide
ucuuaacuuuuacuuuaca

SEQ ID NO: 475417 - RNA, 19 nt, Artificial Sequence
  Description of Artificial Sequence: Synthetic oligonucleotide
gguuagauaaacccauccc

SEQ ID NO: 475418 - RNA, 19 nt, Artificial Sequence
  Description of Artificial Sequence: Synthetic oligonucleotide
acuacaucucaaaauuauc

SEQ ID NO: 475419 - RNA, 19 nt, Artificial Sequence
  Description of Artificial Sequence: Synthetic oligonucleotide
uaucuaugaucagacauuc

SEQ ID NO: 475420 - RNA, 19 nt, Artificial Sequence
  Description of Artificial Sequence: Synthetic oligonucleotide
gaauuauccuuugacccug

SEQ ID NO: 475421 - RNA, 19 nt, Artificial Sequence
  Description of Artificial Sequence: Synthetic oligonucleotide
guauugugguauaagagca

SEQ ID NO: 475422 - RNA, 19 nt, Artificial Sequence
  Description of Artificial Sequence: Synthetic oligonucleotide
aacuuguuauuacauccua

SEQ ID NO: 475423 - RNA, 19 nt, Artificial Sequence
  Description of Artificial Sequence: Synthetic oligonucleotide
ucaaauccagcuccucuac

SEQ ID NO: 475424 - RNA, 19 nt, Artificial Sequence
  Description of Artificial Sequence: Synthetic oligonucleotide
guuauggucaauacugaac

SEQ ID NO: 475425 - RNA, 19 nt, Artificial Sequence
  Description of Artificial Sequence: Synthetic oligonucleotide
aacuaacuugaggaaagcu

SEQ ID NO: 475426 - RNA, 19 nt, Artificial Sequence
  Description of Artificial Sequence: Synthetic oligonucleotide
acguaagugaaacugcuuu

SEQ ID NO: 475427 - RNA, 19 nt, Artificial Sequence
  Description of Artificial Sequence: Synthetic oligonucleotide
agcuagaauuaacaaacau

SEQ ID NO: 475428 - RNA, 19 nt, Artificial Sequence
  Description of Artificial Sequence: Synthetic oligonucleotide
uacaguaagcaugaaucac

SEQ ID NO: 475429 - RNA, 19 nt, Artificial Sequence
  Description of Artificial Sequence: Synthetic oligonucleotide
gugacuguugggcucuugg

SEQ ID NO: 475430 - RNA, 19 nt, Artificial Sequence
  Description of Artificial Sequence: Synthetic oligonucleotide
auaaaugcacagcuuuuau

SEQ ID NO: 475431 - RNA, 19 nt, Artificial Sequence
  Description of Artificial Sequence: Synthetic oligonucleotide
gucauaagcuuucgagggg

SEQ ID NO: 475432 - RNA, 19 nt, Artificial Sequence
  Description of Artificial Sequence: Synthetic oligonucleotide
uacguagcuaugaucguaa

SEQ ID NO: 475433 - RNA, 19 nt, Artificial Sequence
  Description of Artificial Sequence: Synthetic oligonucleotide
gauagugaucagaagcaac

SEQ ID NO: 475434 - RNA, 19 nt, Artificial Sequence
  Description of Artificial Sequence: Synthetic oligonucleotide
uacucuauccaguuccuau

SEQ ID NO: 475435 - RNA, 19 nt, Artificial Sequence
  Description of Artificial Sequence: Synthetic oligonucleotide
caucugaaggcuuugaugu

SEQ ID NO: 475436 - RNA, 19 nt, Artificial Sequence
  Description of Artificial Sequence: Synthetic oligonucleotide
gaaacgaacaccugaugua

SEQ ID NO: 475437 - RNA, 19 nt, Artificial Sequence
  Description of Artificial Sequence: Synthetic oligonucleotide
acgcaauuucaauguggcc

SEQ ID NO: 475438 - RNA, 19 nt, Artificial Sequence
  Description of Artificial Sequence: Synthetic oligonucleotide
agaagcgcaucacuuccuc

SEQ ID NO: 475439 - RNA, 19 nt, Artificial Sequence
  Description of Artificial Sequence: Synthetic oligonucleotide
ugggauuaagaggugagaa

SEQ ID NO: 475440 - RNA, 19 nt, Artificial Sequence
  Description of Artificial Sequence: Synthetic oligonucleotide
auuuaccaaucauacugga

SEQ ID NO: 475441 - RNA, 19 nt, Artificial Sequence
  Description of Artificial Sequence: Synthetic oligonucleotide
ugucccugcaguagaauuc

SEQ ID NO: 475442 - RNA, 19 nt, Artificial Sequence
  Description of Artificial Sequence: Synthetic oligonucleotide
cuaucauaaggacccgggc

SEQ ID NO: 475443 - RNA, 19 nt, Artificial Sequence
  Description of Artificial Sequence: Synthetic oligonucleotide
accuccauaacuagacugg

SEQ ID NO: 475444 - RNA, 19 nt, Artificial Sequence
  Description of Artificial Sequence: Synthetic oligonucleotide
auuuaacguaagugaaacu

SEQ ID NO: 475445 - RNA, 19 nt, Artificial Sequence
  Description of Artificial Sequence: Synthetic oligonucleotide
ucgacaaaugcuucaccac

SEQ ID NO: 475446 - RNA, 19 nt, Artificial Sequence
  Description of Artificial Sequence: Synthetic oligonucleotide
uaguuuaggucucucccaa

SEQ ID NO: 475447 - RNA, 19 nt, Artificial Sequence
  Description of Artificial Sequence: Synthetic oligonucleotide
auuacauccuagaugaaua

SEQ ID NO: 475448 - RNA, 19 nt, Artificial Sequence
  Description of Artificial Sequence: Synthetic oligonucleotide
aagaaagcugaccgauagu

SEQ ID NO: 475449 - RNA, 19 nt, Artificial Sequence
  Description of Artificial Sequence: Synthetic oligonucleotide
aagcaugaaucacaagcuu

SEQ ID NO: 475450 - RNA, 19 nt, Artificial Sequence
  Description of Artificial Sequence: Synthetic oligonucleotide
uauugugguauaagagcaa

SEQ ID NO: 475451 - RNA, 19 nt, Artificial Sequence
  Description of Artificial Sequence: Synthetic oligonucleotide
augaucguaagcuccucca

SEQ ID NO: 475452 - RNA, 19 nt, Artificial Sequence
  Description of Artificial Sequence: Synthetic oligonucleotide
uaugcuugguauccuuccu

SEQ ID NO: 475453 - RNA, 19 nt, Artificial Sequence
  Description of Artificial Sequence: Synthetic oligonucleotide
acaguaagcaugaaucaca

SEQ ID NO: 475454 - RNA, 19 nt, Artificial Sequence
  Description of Artificial Sequence: Synthetic oligonucleotide
uaaaugcacagcuuuuauu

SEQ ID NO: 475455 - RNA, 19 nt, Artificial Sequence
  Description of Artificial Sequence: Synthetic oligonucleotide
uccauacaaacaacaugac

SEQ ID NO: 475456 - RNA, 19 nt, Artificial Sequence
  Description of Artificial Sequence: Synthetic oligonucleotide
gauaaacccaucccuccca

SEQ ID NO: 475457 - RNA, 19 nt, Artificial Sequence
  Description of Artificial Sequence: Synthetic oligonucleotide
accugauguaccauuuugg

SEQ ID NO: 475458 - RNA, 19 nt, Artificial Sequence
  Description of Artificial Sequence: Synthetic oligonucleotide
augcuauuauacccucuuc

SEQ ID NO: 475459 - RNA, 19 nt, Artificial Sequence
  Description of Artificial Sequence: Synthetic oligonucleotide
uuacauccuagaugaauau

SEQ ID NO: 475460 - RNA, 19 nt, Artificial Sequence
  Description of Artificial Sequence: Synthetic oligonucleotide
uuggcucaacgcaauuuca

SEQ ID NO: 475461 - RNA, 19 nt, Artificial Sequence
  Description of Artificial Sequence: Synthetic oligonucleotide
auguugucacuuugaauca

SEQ ID NO: 475462 - RNA, 19 nt, Artificial Sequence
  Description of Artificial Sequence: Synthetic oligonucleotide
uuugacugauagucacuug

SEQ ID NO: 475463 - RNA, 19 nt, Artificial Sequence
  Description of Artificial Sequence: Synthetic oligonucleotide
ugcacgaaagccuccccug

SEQ ID NO: 475464 - RNA, 19 nt, Artificial Sequence
  Description of Artificial Sequence: Synthetic oligonucleotide
ugucacuuugaaucauaga

SEQ ID NO: 475465 - RNA, 19 nt, Artificial Sequence
  Description of Artificial Sequence: Synthetic oligonucleotide
acuuguuauuacauccuag

SEQ ID NO: 475466 - RNA, 19 nt, Artificial Sequence
  Description of Artificial Sequence: Synthetic oligonucleotide
cugcuuuaaaccuaaauau

SEQ ID NO: 475467 - RNA, 19 nt, Artificial Sequence
  Description of Artificial Sequence: Synthetic oligonucleotide
guauugguacuacaucuca

SEQ ID NO: 475468 - RNA, 19 nt, Artificial Sequence
  Description of Artificial Sequence: Synthetic oligonucleotide
caguaguuuaggucucucc

SEQ ID NO: 475469 - RNA, 19 nt, Artificial Sequence
  Description of Artificial Sequence: Synthetic oligonucleotide
ugaucguaagcuccuccac

SEQ ID NO: 475470 - RNA, 19 nt, Artificial Sequence
  Description of Artificial Sequence: Synthetic oligonucleotide
cauaucuaugaucagacau

SEQ ID NO: 475471 - RNA, 19 nt, Artificial Sequence
  Description of Artificial Sequence: Synthetic oligonucleotide
acauccuagaugaauauuu

SEQ ID NO: 475472 - RNA, 19 nt, Artificial Sequence
  Description of Artificial Sequence: Synthetic oligonucleotide
aguucuacguagcuaugau

SEQ ID NO: 475473 - RNA, 19 nt, Artificial Sequence
  Description of Artificial Sequence: Synthetic oligonucleotide
aguaagcaugaaucacaag

SEQ ID NO: 475474 - RNA, 19 nt, Artificial Sequence
  Description of Artificial Sequence: Synthetic oligonucleotide
uacacuccuacaacauaac

SEQ ID NO: 475475 - RNA, 19 nt, Artificial Sequence
  Description of Artificial Sequence: Synthetic oligonucleotide
acgaacaccugauguacca

SEQ ID NO: 475476 - RNA, 19 nt, Artificial Sequence
  Description of Artificial Sequence: Synthetic oligonucleotide
gcugaaaguggauuuaaca

SEQ ID NO: 475477 - RNA, 19 nt, Artificial Sequence
  Description of Artificial Sequence: Synthetic oligonucleotide
cuguaacucugccaucggg

SEQ ID NO: 475478 - RNA, 19 nt, Artificial Sequence
  Description of Artificial Sequence: Synthetic oligonucleotide
auacccgucauuauagccu

SEQ ID NO: 475479 - RNA, 19 nt, Artificial Sequence
  Description of Artificial Sequence: Synthetic oligonucleotide
gugaaaguguacacucacg

SEQ ID NO: 475480 - RNA, 19 nt, Artificial Sequence
  Description of Artificial Sequence: Synthetic oligonucleotide
auaaggacccgggcgcugc

SEQ ID NO: 475481 - RNA, 19 nt, Artificial Sequence
  Description of Artificial Sequence: Synthetic oligonucleotide
uccuuccuacucuauccag

SEQ ID NO: 475482 - RNA, 19 nt, Artificial Sequence
  Description of Artificial Sequence: Synthetic oligonucleotide
acugguuagauaaacccau

SEQ ID NO: 475483 - RNA, 19 nt, Artificial Sequence
  Description of Artificial Sequence: Synthetic oligonucleotide
ucggguccuauuucaaugu

SEQ ID NO: 475484 - RNA, 19 nt, Artificial Sequence
  Description of Artificial Sequence: Synthetic oligonucleotide
acacuccuacaacauaacu

SEQ ID NO: 475485 - RNA, 19 nt, Artificial Sequence
  Description of Artificial Sequence: Synthetic oligonucleotide
guaguuuaggucucuccca

SEQ ID NO: 475486 - RNA, 19 nt, Artificial Sequence
  Description of Artificial Sequence: Synthetic oligonucleotide
gaaacugcuuuaaaccuaa

SEQ ID NO: 475487 - RNA, 19 nt, Artificial Sequence
  Description of Artificial Sequence: Synthetic oligonucleotide
cuuuaaaccuaaauaugcu

SEQ ID NO: 475488 - RNA, 19 nt, Artificial Sequence
  Description of Artificial Sequence: Synthetic oligonucleotide
caucuaaauggaauucaca

SEQ ID NO: 475489 - RNA, 19 nt, Artificial Sequence
  Description of Artificial Sequence: Synthetic oligonucleotide
ccuaucauaaggacccggg

SEQ ID NO: 475490 - RNA, 19 nt, Artificial Sequence
  Description of Artificial Sequence: Synthetic oligonucleotide
cuaaaguauugguacuaca

SEQ ID NO: 475491 - RNA, 19 nt, Artificial Sequence
  Description of Artificial Sequence: Synthetic oligonucleotide
cucuugaagauuucaaugu

SEQ ID NO: 475492 - RNA, 19 nt, Artificial Sequence
  Description of Artificial Sequence: Synthetic oligonucleotide
aagguuugacugauaguca

SEQ ID NO: 475493 - RNA, 19 nt, Artificial Sequence
  Description of Artificial Sequence: Synthetic oligonucleotide
cacuuaguacaauacaucu

SEQ ID NO: 475494 - RNA, 19 nt, Artificial Sequence
  Description of Artificial Sequence: Synthetic oligonucleotide
agcaacuuuauuucccauu

SEQ ID NO: 475495 - RNA, 19 nt, Artificial Sequence
  Description of Artificial Sequence: Synthetic oligonucleotide
ugauagucacuugaguuuu

SEQ ID NO: 475496 - RNA, 19 nt, Artificial Sequence
  Description of Artificial Sequence: Synthetic oligonucleotide
ccuaagcaagguuugacug

SEQ ID NO: 475497 - RNA, 19 nt, Artificial Sequence
  Description of Artificial Sequence: Synthetic oligonucleotide
ugcaucugaaggcuuugau

SEQ ID NO: 475498 - RNA, 19 nt, Artificial Sequence
  Description of Artificial Sequence: Synthetic oligonucleotide
aguggauuuaacaguuaug

SEQ ID NO: 475499 - RNA, 19 nt, Artificial Sequence
  Description of Artificial Sequence: Synthetic oligonucleotide
cagguaugugucuuaagga

SEQ ID NO: 475500 - RNA, 19 nt, Artificial Sequence
  Description of Artificial Sequence: Synthetic oligonucleotide
cugagcuuaaaguuugaaa

SEQ ID NO: 475501 - RNA, 19 nt, Artificial Sequence
  Description of Artificial Sequence: Synthetic oligonucleotide
ugaguucggacuucagcuc

SEQ ID NO: 475502 - RNA, 19 nt, Artificial Sequence
  Description of Artificial Sequence: Synthetic oligonucleotide
uggcucaacgcaauuucaa

SEQ ID NO: 475503 - RNA, 19 nt, Artificial Sequence
  Description of Artificial Sequence: Synthetic oligonucleotide
agcugaccgauagugauca

SEQ ID NO: 475504 - RNA, 19 nt, Artificial Sequence
  Description of Artificial Sequence: Synthetic oligonucleotide
acaacauaacuaacuugag

SEQ ID NO: 475505 - RNA, 19 nt, Artificial Sequence
  Description of Artificial Sequence: Synthetic oligonucleotide
gcucaacgcaauuucaaug

SEQ ID NO: 475506 - RNA, 19 nt, Artificial Sequence
  Description of Artificial Sequence: Synthetic oligonucleotide
cacuccuacaacauaacua

SEQ ID NO: 475507 - RNA, 19 nt, Artificial Sequence
  Description of Artificial Sequence: Synthetic oligonucleotide
ucuacguagcuaugaucgu

SEQ ID NO: 475508 - RNA, 19 nt, Artificial Sequence
  Description of Artificial Sequence: Synthetic oligonucleotide
caaguucgacaaaugcuuc

SEQ ID NO: 475509 - RNA, 19 nt, Artificial Sequence
  Description of Artificial Sequence: Synthetic oligonucleotide
acaacaugaccaaacuccu

SEQ ID NO: 475510 - RNA, 19 nt, Artificial Sequence
  Description of Artificial Sequence: Synthetic oligonucleotide
cucaacgcaauuucaaugu

SEQ ID NO: 475511 - RNA, 19 nt, Artificial Sequence
  Description of Artificial Sequence: Synthetic oligonucleotide
aagcuagaauuaacaaaca

SEQ ID NO: 475512 - RNA, 19 nt, Artificial Sequence
  Description of Artificial Sequence: Synthetic oligonucleotide
auuucccauuuaccaauca

SEQ ID NO: 475513 - RNA, 19 nt, Artificial Sequence
  Description of Artificial Sequence: Synthetic oligonucleotide
uacccgucauuauagccuc

SEQ ID NO: 475514 - RNA, 19 nt, Artificial Sequence
  Description of Artificial Sequence: Synthetic oligonucleotide
caugaguagcaaacucgac

SEQ ID NO: 475515 - RNA, 19 nt, Artificial Sequence
  Description of Artificial Sequence: Synthetic oligonucleotide
agcugaaaguggauuuaac

SEQ ID NO: 475516 - RNA, 19 nt, Artificial Sequence
  Description of Artificial Sequence: Synthetic oligonucleotide
guucuacguagcuaugauc

SEQ ID NO: 475517 - RNA, 19 nt, Artificial Sequence
  Description of Artificial Sequence: Synthetic oligonucleotide
gaccgauagugaucagaag

SEQ ID NO: 475518 - RNA, 19 nt, Artificial Sequence
  Description of Artificial Sequence: Synthetic oligonucleotide
guacacuccuacaacauaa

SEQ ID NO: 475519 - RNA, 19 nt, Artificial Sequence
  Description of Artificial Sequence: Synthetic oligonucleotide
caaauguugucacuuugaa

SEQ ID NO: 475520 - RNA, 19 nt, Artificial Sequence
  Description of Artificial Sequence: Synthetic oligonucleotide
cacaauacaagguaagauu

SEQ ID NO: 475521 - RNA, 19 nt, Artificial Sequence
  Description of Artificial Sequence: Synthetic oligonucleotide
caucacuuccucagcugag

SEQ ID NO: 475522 - RNA, 19 nt, Artificial Sequence
  Description of Artificial Sequence: Synthetic oligonucleotide
acucuauccaguuccuaua

SEQ ID NO: 475523 - RNA, 19 nt, Artificial Sequence
  Description of Artificial Sequence: Synthetic oligonucleotide
ucguaagcuccuccacuug

SEQ ID NO: 475524 - RNA, 19 nt, Artificial Sequence
  Description of Artificial Sequence: Synthetic oligonucleotide
uuuuauuccuggagcuguu

SEQ ID NO: 475525 - RNA, 19 nt, Artificial Sequence
  Description of Artificial Sequence: Synthetic oligonucleotide
uagcuaugaucguaagcuc

SEQ ID NO: 475526 - RNA, 19 nt, Artificial Sequence
  Description of Artificial Sequence: Synthetic oligonucleotide
guaagugaaacugcuuuaa

SEQ ID NO: 475527 - RNA, 19 nt, Artificial Sequence
  Description of Artificial Sequence: Synthetic oligonucleotide
acauuuaacguaagugaaa

SEQ ID NO: 475528 - RNA, 19 nt, Artificial Sequence
  Description of Artificial Sequence: Synthetic oligonucleotide
cuugaggaaagcugaaagu

SEQ ID NO: 475529 - RNA, 19 nt, Artificial Sequence
  Description of Artificial Sequence: Synthetic oligonucleotide
gagaaacaguaguuuaggu

SEQ ID NO: 475530 - RNA, 19 nt, Artificial Sequence
  Description of Artificial Sequence: Synthetic oligonucleotide
uguacucucaugggauuaa

SEQ ID NO: 475531 - RNA, 19 nt, Artificial Sequence
  Description of Artificial Sequence: Synthetic oligonucleotide
agccauacccgucauuaua

SEQ ID NO: 475532 - RNA, 19 nt, Artificial Sequence
  Description of Artificial Sequence: Synthetic oligonucleotide
cauacugcucugaccacca

SEQ ID NO: 475533 - RNA, 19 nt, Artificial Sequence
  Description of Artificial Sequence: Synthetic oligonucleotide
uugauguauugugguauaa

SEQ ID NO: 475534 - RNA, 19 nt, Artificial Sequence
  Description of Artificial Sequence: Synthetic oligonucleotide
ccugaaaguccacuggcag

SEQ ID NO: 475535 - RNA, 19 nt, Artificial Sequence
  Description of Artificial Sequence: Synthetic oligonucleotide
cuccauaucuaugaucaga

SEQ ID NO: 475536 - RNA, 19 nt, Artificial Sequence
  Description of Artificial Sequence: Synthetic oligonucleotide
cauaacuagacugguuaga

SEQ ID NO: 475537 - RNA, 19 nt, Artificial Sequence
  Description of Artificial Sequence: Synthetic oligonucleotide
gaucguaagcuccuccacu

SEQ ID NO: 475538 - RNA, 19 nt, Artificial Sequence
  Description of Artificial Sequence: Synthetic oligonucleotide
ucccuaagcaagguuugac

SEQ ID NO: 475539 - RNA, 19 nt, Artificial Sequence
  Description of Artificial Sequence: Synthetic oligonucleotide
auacuggauaugcuuggua

SEQ ID NO: 475540 - RNA, 19 nt, Artificial Sequence
  Description of Artificial Sequence: Synthetic oligonucleotide
uagugaguucggacuucag

SEQ ID NO: 475541 - RNA, 19 nt, Artificial Sequence
  Description of Artificial Sequence: Synthetic oligonucleotide
caguaagcaugaaucacaa

SEQ ID NO: 475542 - RNA, 19 nt, Artificial Sequence
  Description of Artificial Sequence: Synthetic oligonucleotide
cauagucauaagcuuucga

SEQ ID NO: 475543 - RNA, 19 nt, Artificial Sequence
  Description of Artificial Sequence: Synthetic oligonucleotide
cuccuacaacauaacuaac

SEQ ID NO: 475544 - RNA, 19 nt, Artificial Sequence
  Description of Artificial Sequence: Synthetic oligonucleotide
acguagcuaugaucguaag

SEQ ID NO: 475545 - RNA, 19 nt, Artificial Sequence
  Description of Artificial Sequence: Synthetic oligonucleotide
uuuaacaguuauggucaau

SEQ ID NO: 475546 - RNA, 19 nt, Artificial Sequence
  Description of Artificial Sequence: Synthetic oligonucleotide
ccaguuccuauaaaugcac

SEQ ID NO: 475547 - RNA, 19 nt, Artificial Sequence
  Description of Artificial Sequence: Synthetic oligonucleotide
guaaugcaaaacuguuaaa

SEQ ID NO: 475548 - RNA, 19 nt, Artificial Sequence
  Description of Artificial Sequence: Synthetic oligonucleotide
agcuccuauauuugauuuu

SEQ ID NO: 475549 - RNA, 19 nt, Artificial Sequence
  Description of Artificial Sequence: Synthetic oligonucleotide
gaacuuguuauuacauccu

SEQ ID NO: 475550 - RNA, 19 nt, Artificial Sequence
  Description of Artificial Sequence: Synthetic oligonucleotide
uuccuacucuauccaguuc

SEQ ID NO: 475551 - RNA, 19 nt, Artificial Sequence
  Description of Artificial Sequence: Synthetic oligonucleotide
aagaagcgcaucacuuccu

SEQ ID NO: 475552 - RNA, 19 nt, Artificial Sequence
  Description of Artificial Sequence: Synthetic oligonucleotide
gacugauagucacuugagu

SEQ ID NO: 475553 - RNA, 19 nt, Artificial Sequence
  Description of Artificial Sequence: Synthetic oligonucleotide
acuuaguacaauacaucua

SEQ ID NO: 475554 - RNA, 19 nt, Artificial Sequence
  Description of Artificial Sequence: Synthetic oligonucleotide
ugcugagcuuaaaguuuga

SEQ ID NO: 475555 - RNA, 19 nt, Artificial Sequence
  Description of Artificial Sequence: Synthetic oligonucleotide
augggauuaagaggugaga

SEQ ID NO: 475556 - RNA, 19 nt, Artificial Sequence
  Description of Artificial Sequence: Synthetic oligonucleotide
uguugucacuuugaaucau

SEQ ID NO: 475557 - RNA, 19 nt, Artificial Sequence
  Description of Artificial Sequence: Synthetic oligonucleotide
acccgggcgcugcauaguc

SEQ ID NO: 475558 - RNA, 19 nt, Artificial Sequence
  Description of Artificial Sequence: Synthetic oligonucleotide
aacguaagugaaacugcuu

SEQ ID NO: 475559 - RNA, 19 nt, Artificial Sequence
  Description of Artificial Sequence: Synthetic oligonucleotide
ugguauccuuccuacucua

SEQ ID NO: 475560 - RNA, 19 nt, Artificial Sequence
  Description of Artificial Sequence: Synthetic oligonucleotide
cuuugacagaaaauccacu

SEQ ID NO: 475561 - RNA, 19 nt, Artificial Sequence
  Description of Artificial Sequence: Synthetic oligonucleotide
ggaauuauccuuugacccu

SEQ ID NO: 475562 - RNA, 19 nt, Artificial Sequence
  Description of Artificial Sequence: Synthetic oligonucleotide
gaguucggacuucagcucu

SEQ ID NO: 475563 - RNA, 19 nt, Artificial Sequence
  Description of Artificial Sequence: Synthetic oligonucleotide
ugccaaauguugucacuuu

SEQ ID NO: 475564 - RNA, 19 nt, Artificial Sequence
  Description of Artificial Sequence: Synthetic oligonucleotide
ccgauagugaucagaagca

SEQ ID NO: 475565 - RNA, 19 nt, Artificial Sequence
  Description of Artificial Sequence: Synthetic oligonucleotide
ugcuacucuugaagauuuc

SEQ ID NO: 475566 - RNA, 19 nt, Artificial Sequence
  Description of Artificial Sequence: Synthetic oligonucleotide
ucauaaggacccgggcgcu

SEQ ID NO: 475567 - RNA, 19 nt, Artificial Sequence
  Description of Artificial Sequence: Synthetic oligonucleotide
uuuauuccuggagcuguuu

SEQ ID NO: 475568 - RNA, 19 nt, Artificial Sequence
  Description of Artificial Sequence: Synthetic oligonucleotide
gcuuaaguacacuccuaca

SEQ ID NO: 475569 - RNA, 19 nt, Artificial Sequence
  Description of Artificial Sequence: Synthetic oligonucleotide
cauagugaguucggacuuc

SEQ ID NO: 475570 - RNA, 19 nt, Artificial Sequence
  Description of Artificial Sequence: Synthetic oligonucleotide
guggcucuguaugguaacc

SEQ ID NO: 475571 - RNA, 19 nt, Artificial Sequence
  Description of Artificial Sequence: Synthetic oligonucleotide
ccuaaaguauugguacuac

SEQ ID NO: 475572 - RNA, 19 nt, Artificial Sequence
  Description of Artificial Sequence: Synthetic oligonucleotide
caccauaaccaccaccaua

SEQ ID NO: 475573 - RNA, 19 nt, Artificial Sequence
  Description of Artificial Sequence: Synthetic oligonucleotide
aaccccucccugcccucug

SEQ ID NO: 475574 - RNA, 19 nt, Artificial Sequence
  Description of Artificial Sequence: Synthetic oligonucleotide
caguucuacguagcuauga

SEQ ID NO: 475575 - RNA, 19 nt, Artificial Sequence
  Description of Artificial Sequence: Synthetic oligonucleotide
uaaggccuuuucagcuauc

SEQ ID NO: 475576 - RNA, 19 nt, Artificial Sequence
  Description of Artificial Sequence: Synthetic oligonucleotide
gaacaccugauguaccauu

SEQ ID NO: 475577 - RNA, 19 nt, Artificial Sequence
  Description of Artificial Sequence: Synthetic oligonucleotide
cugaaaguccacuggcagu

SEQ ID NO: 475578 - RNA, 19 nt, Artificial Sequence
  Description of Artificial Sequence: Synthetic oligonucleotide
guuugacugauagucacuu

SEQ ID NO: 475579 - RNA, 19 nt, Artificial Sequence
  Description of Artificial Sequence: Synthetic oligonucleotide
uuggcaguaucaggacuau

SEQ ID NO: 475580 - RNA, 19 nt, Artificial Sequence
  Description of Artificial Sequence: Synthetic oligonucleotide
cuaugaucguaagcuccuc

SEQ ID NO: 475581 - RNA, 19 nt, Artificial Sequence
  Description of Artificial Sequence: Synthetic oligonucleotide
guaugugucuuaaggaauu

SEQ ID NO: 475582 - RNA, 19 nt, Artificial Sequence
  Description of Artificial Sequence: Synthetic oligonucleotide
ccuagaugaauauuucagu

SEQ ID NO: 475583 - RNA, 19 nt, Artificial Sequence
  Description of Artificial Sequence: Synthetic oligonucleotide
acaguucuacguagcuaug

SEQ ID NO: 475584 - RNA, 19 nt, Artificial Sequence
  Description of Artificial Sequence: Synthetic oligonucleotide
ccauacccgucauuauagc

SEQ ID NO: 475585 - RNA, 19 nt, Artificial Sequence
  Description of Artificial Sequence: Synthetic oligonucleotide
cacgaaccccucccugccc

SEQ ID NO: 475586 - RNA, 19 nt, Artificial Sequence
  Description of Artificial Sequence: Synthetic oligonucleotide
gccuaucauaaggacccgg

SEQ ID NO: 475587 - RNA, 19 nt, Artificial Sequence
  Description of Artificial Sequence: Synthetic oligonucleotide
aguucggacuucagcucug

SEQ ID NO: 475588 - RNA, 19 nt, Artificial Sequence
  Description of Artificial Sequence: Synthetic oligonucleotide
uguugggcucuugguggca

SEQ ID NO: 475589 - RNA, 19 nt, Artificial Sequence
  Description of Artificial Sequence: Synthetic oligonucleotide
caugccaaauguugucacu

SEQ ID NO: 475590 - RNA, 19 nt, Artificial Sequence
  Description of Artificial Sequence: Synthetic oligonucleotide
cuacguagcuaugaucgua

SEQ ID NO: 475591 - RNA, 19 nt, Artificial Sequence
  Description of Artificial Sequence: Synthetic oligonucleotide
cuuacugcuuaaguacacu

SEQ ID NO: 475592 - RNA, 19 nt, Artificial Sequence
  Description of Artificial Sequence: Synthetic oligonucleotide
agugcccuguggugcucug

SEQ ID NO: 475593 - RNA, 19 nt, Artificial Sequence
  Description of Artificial Sequence: Synthetic oligonucleotide
ggcaguaucaggacuauuu

SEQ ID NO: 475594 - RNA, 19 nt, Artificial Sequence
  Description of Artificial Sequence: Synthetic oligonucleotide
acccgucauuauagccucc

SEQ ID NO: 475595 - RNA, 19 nt, Artificial Sequence
  Description of Artificial Sequence: Synthetic oligonucleotide
gcauguuucucaacaugca

SEQ ID NO: 475596 - RNA, 19 nt, Artificial Sequence
  Description of Artificial Sequence: Synthetic oligonucleotide
ggaucauagugaguucgga

SEQ ID NO: 475597 - RNA, 19 nt, Artificial Sequence
  Description of Artificial Sequence: Synthetic oligonucleotide
ggacccgggcgcugcauag

SEQ ID NO: 475598 - RNA, 19 nt, Artificial Sequence
  Description of Artificial Sequence: Synthetic oligonucleotide
cugcuacucuugaagauuu

SEQ ID NO: 475599 - RNA, 19 nt, Artificial Sequence
  Description of Artificial Sequence: Synthetic oligonucleotide
ccacucauacugcucugac

SEQ ID NO: 475600 - RNA, 19 nt, Artificial Sequence
  Description of Artificial Sequence: Synthetic oligonucleotide
gguaugugucuuaaggaau

SEQ ID NO: 475601 - RNA, 19 nt, Artificial Sequence
  Description of Artificial Sequence: Synthetic oligonucleotide
ccuacaacauaacuaacuu

SEQ ID NO: 475602 - RNA, 19 nt, Artificial Sequence
  Description of Artificial Sequence: Synthetic oligonucleotide
gcaauuucaauguggccuu

SEQ ID NO: 475603 - RNA, 19 nt, Artificial Sequence
  Description of Artificial Sequence: Synthetic oligonucleotide
cagcuccuauauuugauuu

SEQ ID NO: 475604 - RNA, 19 nt, Artificial Sequence
  Description of Artificial Sequence: Synthetic oligonucleotide
auacugcucugaccaccau

SEQ ID NO: 475605 - RNA, 19 nt, Artificial Sequence
  Description of Artificial Sequence: Synthetic oligonucleotide
gacccaccaucuccauauc

SEQ ID NO: 475606 - RNA, 19 nt, Artificial Sequence
  Description of Artificial Sequence: Synthetic oligonucleotide
cgcaauuucaauguggccu

SEQ ID NO: 475607 - RNA, 19 nt, Artificial Sequence
  Description of Artificial Sequence: Synthetic oligonucleotide
cgugccuuacagaauauua

SEQ ID NO: 475608 - RNA, 19 nt, Artificial Sequence
  Description of Artificial Sequence: Synthetic oligonucleotide
ccucaccuguaacucugcc

SEQ ID NO: 475609 - RNA, 19 nt, Artificial Sequence
  Description of Artificial Sequence: Synthetic oligonucleotide
acgugccuuacagaauauu

SEQ ID NO: 475610 - RNA, 19 nt, Artificial Sequence
  Description of Artificial Sequence: Synthetic oligonucleotide
gaccaggguaggccccuga

SEQ ID NO: 475611 - RNA, 19 nt, Artificial Sequence
  Description of Artificial Sequence: Synthetic oligonucleotide
gcuaugaucguaagcuccu

SEQ ID NO: 475612 - RNA, 19 nt, Artificial Sequence
  Description of Artificial Sequence: Synthetic oligonucleotide
ggccuaucauaaggacccg

SEQ ID NO: 475613 - RNA, 19 nt, Artificial Sequence
  Description of Artificial Sequence: Synthetic oligonucleotide
gggcgcugcauagucauaa

SEQ ID NO: 475614 - RNA, 19 nt, Artificial Sequence
  Description of Artificial Sequence: Synthetic oligonucleotide
aagcaagguuugacugaua

SEQ ID NO: 475615 - RNA, 19 nt, Artificial Sequence
  Description of Artificial Sequence: Synthetic oligonucleotide
uggcaguaucaggacuauu

SEQ ID NO: 475616 - RNA, 19 nt, Artificial Sequence
  Description of Artificial Sequence: Synthetic oligonucleotide
cagccccuggccuaucaua

SEQ ID NO: 475617 - RNA, 19 nt, Artificial Sequence
  Description of Artificial Sequence: Synthetic oligonucleotide
cccuaagcaagguuugacu

SEQ ID NO: 475618 - RNA, 19 nt, Artificial Sequence
  Description of Artificial Sequence: Synthetic oligonucleotide
gguuugacugauagucacu

SEQ ID NO: 475619 - RNA, 19 nt, Artificial Sequence
  Description of Artificial Sequence: Synthetic oligonucleotide
cuccauaacuagacugguu

SEQ ID NO: 475620 - RNA, 19 nt, Artificial Sequence
  Description of Artificial Sequence: Synthetic oligonucleotide
ggguccuauuucaaugugu

SEQ ID NO: 475621 - RNA, 19 nt, Artificial Sequence
  Description of Artificial Sequence: Synthetic oligonucleotide
ccuuccuacucuauccagu

SEQ ID NO: 475622 - RNA, 19 nt, Artificial Sequence
  Description of Artificial Sequence: Synthetic oligonucleotide
cuacucuauccaguuccua

SEQ ID NO: 475623 - RNA, 19 nt, Artificial Sequence
  Description of Artificial Sequence: Synthetic oligonucleotide
cccuguggugcucuggaaa

SEQ ID NO: 475624 - RNA, 19 nt, Artificial Sequence
  Description of Artificial Sequence: Synthetic oligonucleotide
gcuugguauccuuccuacu

SEQ ID NO: 475625 - RNA, 19 nt, Artificial Sequence
  Description of Artificial Sequence: Synthetic oligonucleotide
cggguccuauuucaaugug

SEQ ID NO: 475626 - RNA, 19 nt, Artificial Sequence
  Description of Artificial Sequence: Synthetic oligonucleotide
gcgcaucacuuccucagcu

SEQ ID NO: 475627 - RNA, 19 nt, Artificial Sequence
  Description of Artificial Sequence: Synthetic oligonucleotide
cacuucagguaugugucuu

SEQ ID NO: 475628 - RNA, 19 nt, Artificial Sequence
  Description of Artificial Sequence: Synthetic oligonucleotide
cccgucauuauagccucca

SEQ ID NO: 475629 - RNA, 19 nt, Artificial Sequence
  Description of Artificial Sequence: Synthetic oligonucleotide
ccuacucuauccaguuccu

SEQ ID NO: 475630 - RNA, 19 nt, Artificial Sequence
  Description of Artificial Sequence: Synthetic oligonucleotide
cacgugccuuacagaauau

SEQ ID NO: 475631 - RNA, 19 nt, Artificial Sequence
  Description of Artificial Sequence: Synthetic oligonucleotide
gguauccuuccuacucuau

SEQ ID NO: 475632 - RNA, 19 nt, Artificial Sequence
  Description of Artificial Sequence: Synthetic oligonucleotide
gacccgggcgcugcauagu

SEQ ID NO: 475633 - RNA, 19 nt, Artificial Sequence
  Description of Artificial Sequence: Synthetic oligonucleotide
ccacuucagguaugugucu

SEQ ID NO: 475634 - RNA, 19 nt, Artificial Sequence
  Description of Artificial Sequence: Synthetic oligonucleotide
ccuccauaacuagacuggu

SEQ ID NO: 475635 - RNA, 19 nt, Artificial Sequence
  Description of Artificial Sequence: Synthetic oligonucleotide
cuggacccaccaucuccau

SEQ ID NO: 475636 - RNA, 19 nt, Artificial Sequence
  Description of Artificial Sequence: Synthetic oligonucleotide
cccgggcgcugcauaguca

SEQ ID NO: 475637 - RNA, 19 nt, Artificial Sequence
  Description of Artificial Sequence: Synthetic oligonucleotide
ccgggcgcugcauagucau

SEQ ID NO: 475638 - RNA, 19 nt, Artificial Sequence
  Description of Artificial Sequence: Synthetic oligonucleotide
ccgucauuauagccuccau

SEQ ID NO: 475639 - RNA, 19 nt, Artificial Sequence
  Description of Artificial Sequence: Synthetic oligonucleotide
cgggcgcugcauagucaua

SEQ ID NO: 475640 - RNA, 19 nt, Artificial Sequence
  Description of Artificial Sequence: Synthetic oligonucleotide
uuaacaacuuaaaagaugg

SEQ ID NO: 475641 - RNA, 19 nt, Artificial Sequence
  Description of Artificial Sequence: Synthetic oligonucleotide
aagaacuuuauucaaagug

SEQ ID NO: 475642 - RNA, 19 nt, Artificial Sequence
  Description of Artificial Sequence: Synthetic oligonucleotide
aaugaaacuuguuaacaac

SEQ ID NO: 475643 - RNA, 19 nt, Artificial Sequence
  Description of Artificial Sequence: Synthetic oligonucleotide
aauuaaaacaccuccccuc

SEQ ID NO: 475644 - RNA, 19 nt, Artificial Sequence
  Description of Artificial Sequence: Synthetic oligonucleotide
aaugcaagaacuuuauuca

SEQ ID NO: 475645 - RNA, 19 nt, Artificial Sequence
  Description of Artificial Sequence: Synthetic oligonucleotide
aacaacuuaaaagaugggg

SEQ ID NO: 475646 - RNA, 19 nt, Artificial Sequence
  Description of Artificial Sequence: Synthetic oligonucleotide
uaaauuaaaacaccucccc

SEQ ID NO: 475647 - RNA, 19 nt, Artificial Sequence
  Description of Artificial Sequence: Synthetic oligonucleotide
aguguagugagaaaggugc

SEQ ID NO: 475648 - RNA, 19 nt, Artificial Sequence
  Description of Artificial Sequence: Synthetic oligonucleotide
agaacuuuauucaaagugc

SEQ ID NO: 475649 - RNA, 19 nt, Artificial Sequence
  Description of Artificial Sequence: Synthetic oligonucleotide
aaaacaccuccccucaagc

SEQ ID NO: 475650 - RNA, 19 nt, Artificial Sequence
  Description of Artificial Sequence: Synthetic oligonucleotide
aaagaucaaccucugcugg

SEQ ID NO: 475651 - RNA, 19 nt, Artificial Sequence
  Description of Artificial Sequence: Synthetic oligonucleotide
aacaccuccccucaagccc

SEQ ID NO: 475652 - RNA, 19 nt, Artificial Sequence
  Description of Artificial Sequence: Synthetic oligonucleotide
uaaugcaagaacuuuauuc

SEQ ID NO: 475653 - RNA, 19 nt, Artificial Sequence
  Description of Artificial Sequence: Synthetic oligonucleotide
gaugggguaaauuaaaaca

SEQ ID NO: 475654 - RNA, 19 nt, Artificial Sequence
  Description of Artificial Sequence: Synthetic oligonucleotide
uaaaagaugggguaaauua

SEQ ID NO: 475655 - RNA, 19 nt, Artificial Sequence
  Description of Artificial Sequence: Synthetic oligonucleotide
uuuugguaaugcaagaacu

SEQ ID NO: 475656 - RNA, 19 nt, Artificial Sequence
  Description of Artificial Sequence: Synthetic oligonucleotide
gguaaauuaaaacaccucc

SEQ ID NO: 475657 - RNA, 19 nt, Artificial Sequence
  Description of Artificial Sequence: Synthetic oligonucleotide
uguuugcuuuucuugaugg

SEQ ID NO: 475658 - RNA, 19 nt, Artificial Sequence
  Description of Artificial Sequence: Synthetic oligonucleotide
auucaaagugcaaugaaac

SEQ ID NO: 475659 - RNA, 19 nt, Artificial Sequence
  Description of Artificial Sequence: Synthetic oligonucleotide
aaauuaaaacaccuccccu

SEQ ID NO: 475660 - RNA, 19 nt, Artificial Sequence
  Description of Artificial Sequence: Synthetic oligonucleotide
agaugggguaaauuaaaac

SEQ ID NO: 475661 - RNA, 19 nt, Artificial Sequence
  Description of Artificial Sequence: Synthetic oligonucleotide
aaagaucugcauccacccc

SEQ ID NO: 475662 - RNA, 19 nt, Artificial Sequence
  Description of Artificial Sequence: Synthetic oligonucleotide
uucuugaugguguuacugg

SEQ ID NO: 475663 - RNA, 19 nt, Artificial Sequence
  Description of Artificial Sequence: Synthetic oligonucleotide
uuugccuugacauucucga

SEQ ID NO: 475664 - RNA, 19 nt, Artificial Sequence
  Description of Artificial Sequence: Synthetic oligonucleotide
uucuagacaguguagugag

SEQ ID NO: 475665 - RNA, 19 nt, Artificial Sequence
  Description of Artificial Sequence: Synthetic oligonucleotide
aaaggugcguccaucuucc

SEQ ID NO: 475666 - RNA, 19 nt, Artificial Sequence
  Description of Artificial Sequence: Synthetic oligonucleotide
uauucaaagugcaaugaaa

SEQ ID NO: 475667 - RNA, 19 nt, Artificial Sequence
  Description of Artificial Sequence: Synthetic oligonucleotide
cuuuauucaaagugcaaug

SEQ ID NO: 475668 - RNA, 19 nt, Artificial Sequence
  Description of Artificial Sequence: Synthetic oligonucleotide
augggguaaauuaaaacac

SEQ ID NO: 475669 - RNA, 19 nt, Artificial Sequence
  Description of Artificial Sequence: Synthetic oligonucleotide
ucuugaugguguuacuggg

SEQ ID NO: 475670 - RNA, 19 nt, Artificial Sequence
  Description of Artificial Sequence: Synthetic oligonucleotide
agugcaaugaaacuuguua

SEQ ID NO: 475671 - RNA, 19 nt, Artificial Sequence
  Description of Artificial Sequence: Synthetic oligonucleotide
acaaagaucugcauccacc

SEQ ID NO: 475672 - RNA, 19 nt, Artificial Sequence
  Description of Artificial Sequence: Synthetic oligonucleotide
aagaacaagcacaaggugu

SEQ ID NO: 475673 - RNA, 19 nt, Artificial Sequence
  Description of Artificial Sequence: Synthetic oligonucleotide
gaugguuuugccugucagg

SEQ ID NO: 475674 - RNA, 19 nt, Artificial Sequence
  Description of Artificial Sequence: Synthetic oligonucleotide
acaaagaucugcaugccac

SEQ ID NO: 475675 - RNA, 19 nt, Artificial Sequence
  Description of Artificial Sequence: Synthetic oligonucleotide
uuuauucaaagugcaauga

SEQ ID NO: 475676 - RNA, 19 nt, Artificial Sequence
  Description of Artificial Sequence: Synthetic oligonucleotide
uaaaacaccuccccucaag

SEQ ID NO: 475677 - RNA, 19 nt, Artificial Sequence
  Description of Artificial Sequence: Synthetic oligonucleotide
ugggguaaauuaaaacacc

SEQ ID NO: 475678 - RNA, 19 nt, Artificial Sequence
  Description of Artificial Sequence: Synthetic oligonucleotide
uggaucuuugccuugacau

SEQ ID NO: 475679 - RNA, 19 nt, Artificial Sequence
  Description of Artificial Sequence: Synthetic oligonucleotide
ucgaccuccagggugaugg

SEQ ID NO: 475680 - RNA, 19 nt, Artificial Sequence
  Description of Artificial Sequence: Synthetic oligonucleotide
guaaauuaaaacaccuccc

SEQ ID NO: 475681 - RNA, 19 nt, Artificial Sequence
  Description of Artificial Sequence: Synthetic oligonucleotide
caaagaucugcauccaccc

SEQ ID NO: 475682 - RNA, 19 nt, Artificial Sequence
  Description of Artificial Sequence: Synthetic oligonucleotide
auuaaaacaccuccccuca

SEQ ID NO: 475683 - RNA, 19 nt, Artificial Sequence
  Description of Artificial Sequence: Synthetic oligonucleotide
uuauucaaagugcaaugaa

SEQ ID NO: 475684 - RNA, 19 nt, Artificial Sequence
  Description of Artificial Sequence: Synthetic oligonucleotide
uuugcuuuucuugauggug

SEQ ID NO: 475685 - RNA, 19 nt, Artificial Sequence
  Description of Artificial Sequence: Synthetic oligonucleotide
aaacuuguuaacaacuuaa

SEQ ID NO: 475686 - RNA, 19 nt, Artificial Sequence
  Description of Artificial Sequence: Synthetic oligonucleotide
augguuuugccugucaggg

SEQ ID NO: 475687 - RNA, 19 nt, Artificial Sequence
  Description of Artificial Sequence: Synthetic oligonucleotide
uaacaacuuaaaagauggg

SEQ ID NO: 475688 - RNA, 19 nt, Artificial Sequence
  Description of Artificial Sequence: Synthetic oligonucleotide
uucaaagugcaaugaaacu

SEQ ID NO: 475689 - RNA, 19 nt, Artificial Sequence
  Description of Artificial Sequence: Synthetic oligonucleotide
acaacuuaaaagauggggu

SEQ ID NO: 475690 - RNA, 19 nt, Artificial Sequence
  Description of Artificial Sequence: Synthetic oligonucleotide
ugcaaugaaacuuguuaac

SEQ ID NO: 475691 - RNA, 19 nt, Artificial Sequence
  Description of Artificial Sequence: Synthetic oligonucleotide
cucaagcccaagaacaagc

SEQ ID NO: 475692 - RNA, 19 nt, Artificial Sequence
  Description of Artificial Sequence: Synthetic oligonucleotide
ugaugguuuugccugucag

SEQ ID NO: 475693 - RNA, 19 nt, Artificial Sequence
  Description of Artificial Sequence: Synthetic oligonucleotide
agacaguguagugagaaag

SEQ ID NO: 475694 - RNA, 19 nt, Artificial Sequence
  Description of Artificial Sequence: Synthetic oligonucleotide
uugaugguguuacugggcu

SEQ ID NO: 475695 - RNA, 19 nt, Artificial Sequence
  Description of Artificial Sequence: Synthetic oligonucleotide
agggugaugguuuugccug

SEQ ID NO: 475696 - RNA, 19 nt, Artificial Sequence
  Description of Artificial Sequence: Synthetic oligonucleotide
aaaagaugggguaaauuaa

SEQ ID NO: 475697 - RNA, 19 nt, Artificial Sequence
  Description of Artificial Sequence: Synthetic oligonucleotide
uuucuagacaguguaguga

SEQ ID NO: 475698 - RNA, 19 nt, Artificial Sequence
  Description of Artificial Sequence: Synthetic oligonucleotide
uugcuuuucuugauggugu

SEQ ID NO: 475699 - RNA, 19 nt, Artificial Sequence
  Description of Artificial Sequence: Synthetic oligonucleotide
uuugguaaugcaagaacuu

SEQ ID NO: 475700 - RNA, 19 nt, Artificial Sequence
  Description of Artificial Sequence: Synthetic oligonucleotide
ucuuucuagacaguguagu

SEQ ID NO: 475701 - RNA, 19 nt, Artificial Sequence
  Description of Artificial Sequence: Synthetic oligonucleotide
aagcccaagaacaagcaca

SEQ ID NO: 475702 - RNA, 19 nt, Artificial Sequence
  Description of Artificial Sequence: Synthetic oligonucleotide
uuucuugaugguguuacug

SEQ ID NO: 475703 - RNA, 19 nt, Artificial Sequence
  Description of Artificial Sequence: Synthetic oligonucleotide
gacaguguagugagaaagg

SEQ ID NO: 475704 - RNA, 19 nt, Artificial Sequence
  Description of Artificial Sequence: Synthetic oligonucleotide
gugugcucuuucuagacag

SEQ ID NO: 475705 - RNA, 19 nt, Artificial Sequence
  Description of Artificial Sequence: Synthetic oligonucleotide
caaggugugcucuuucuag

SEQ ID NO: 475706 - RNA, 19 nt, Artificial Sequence
  Description of Artificial Sequence: Synthetic oligonucleotide
ugaaacuuguuaacaacuu

SEQ ID NO: 475707 - RNA, 19 nt, Artificial Sequence
  Description of Artificial Sequence: Synthetic oligonucleotide
ugcaagaacuuuauucaaa

SEQ ID NO: 475708 - RNA, 19 nt, Artificial Sequence
  Description of Artificial Sequence: Synthetic oligonucleotide
uugccggcaaagaucaacc

SEQ ID NO: 475709 - RNA, 19 nt, Artificial Sequence
  Description of Artificial Sequence: Synthetic oligonucleotide
gcaagaacuuuauucaaag

SEQ ID NO: 475710 - RNA, 19 nt, Artificial Sequence
  Description of Artificial Sequence: Synthetic oligonucleotide
uccuguuugcuuuucuuga

SEQ ID NO: 475711 - RNA, 19 nt, Artificial Sequence
  Description of Artificial Sequence: Synthetic oligonucleotide
uuccuguuugcuuuucuug

SEQ ID NO: 475712 - RNA, 19 nt, Artificial Sequence
  Description of Artificial Sequence: Synthetic oligonucleotide
acaagcacaaggugugcuc

SEQ ID NO: 475713 - RNA, 19 nt, Artificial Sequence
  Description of Artificial Sequence: Synthetic oligonucleotide
cugggcucaaccuccaggg

SEQ ID NO: 475714 - RNA, 19 nt, Artificial Sequence
  Description of Artificial Sequence: Synthetic oligonucleotide
uguuacugggcucaaccuc

SEQ ID NO: 475715 - RNA, 19 nt, Artificial Sequence
  Description of Artificial Sequence: Synthetic oligonucleotide
cuuugccuugacauucucg

SEQ ID NO: 475716 - RNA, 19 nt, Artificial Sequence
  Description of Artificial Sequence: Synthetic oligonucleotide
ucaagcccaagaacaagca

SEQ ID NO: 475717 - RNA, 19 nt, Artificial Sequence
  Description of Artificial Sequence: Synthetic oligonucleotide
cccaagaacaagcacaagg

SEQ ID NO: 475718 - RNA, 19 nt, Artificial Sequence
  Description of Artificial Sequence: Synthetic oligonucleotide
gaaaggugcguccaucuuc

SEQ ID NO: 475719 - RNA, 19 nt, Artificial Sequence
  Description of Artificial Sequence: Synthetic oligonucleotide
cuugaugguguuacugggc

SEQ ID NO: 475720 - RNA, 19 nt, Artificial Sequence
  Description of Artificial Sequence: Synthetic oligonucleotide
ugguaaugcaagaacuuua

SEQ ID NO: 475721 - RNA, 19 nt, Artificial Sequence
  Description of Artificial Sequence: Synthetic oligonucleotide
cuuucuagacaguguagug

SEQ ID NO: 475722 - RNA, 19 nt, Artificial Sequence
  Description of Artificial Sequence: Synthetic oligonucleotide
aaagaugggguaaauuaaa

SEQ ID NO: 475723 - RNA, 19 nt, Artificial Sequence
  Description of Artificial Sequence: Synthetic oligonucleotide
aacuuaaaagaugggguaa

SEQ ID NO: 475724 - RNA, 19 nt, Artificial Sequence
  Description of Artificial Sequence: Synthetic oligonucleotide
agaacaagcacaaggugug

SEQ ID NO: 475725 - RNA, 19 nt, Artificial Sequence
  Description of Artificial Sequence: Synthetic oligonucleotide
caaagaucugcaucccacc

SEQ ID NO: 475726 - RNA, 19 nt, Artificial Sequence
  Description of Artificial Sequence: Synthetic oligonucleotide
ugcaucccaccccugaggc

SEQ ID NO: 475727 - RNA, 19 nt, Artificial Sequence
  Description of Artificial Sequence: Synthetic oligonucleotide
augaaacuuguuaacaacu

SEQ ID NO: 475728 - RNA, 19 nt, Artificial Sequence
  Description of Artificial Sequence: Synthetic oligonucleotide
aagaucaaccucugcuggu

SEQ ID NO: 475729 - RNA, 19 nt, Artificial Sequence
  Description of Artificial Sequence: Synthetic oligonucleotide
aaggugugcucuuucuaga

SEQ ID NO: 475730 - RNA, 19 nt, Artificial Sequence
  Description of Artificial Sequence: Synthetic oligonucleotide
gaucuuugccuugacauuc

SEQ ID NO: 475731 - RNA, 19 nt, Artificial Sequence
  Description of Artificial Sequence: Synthetic oligonucleotide
aggugugcucuuucuagac

SEQ ID NO: 475732 - RNA, 19 nt, Artificial Sequence
  Description of Artificial Sequence: Synthetic oligonucleotide
gguguuacugggcucaacc

SEQ ID NO: 475733 - RNA, 19 nt, Artificial Sequence
  Description of Artificial Sequence: Synthetic oligonucleotide
caagaacaagcacaaggug

SEQ ID NO: 475734 - RNA, 19 nt, Artificial Sequence
  Description of Artificial Sequence: Synthetic oligonucleotide
guuacugggcucaaccucc

SEQ ID NO: 475735 - RNA, 19 nt, Artificial Sequence
  Description of Artificial Sequence: Synthetic oligonucleotide
cuuguccuggaucuuugcc

SEQ ID NO: 475736 - RNA, 19 nt, Artificial Sequence
  Description of Artificial Sequence: Synthetic oligonucleotide
gaaacuuguuaacaacuua

SEQ ID NO: 475737 - RNA, 19 nt, Artificial Sequence
  Description of Artificial Sequence: Synthetic oligonucleotide
uccuucuggauguuguagu

SEQ ID NO: 475738 - RNA, 19 nt, Artificial Sequence
  Description of Artificial Sequence: Synthetic oligonucleotide
ucugcaucccaccccugag

SEQ ID NO: 475739 - RNA, 19 nt, Artificial Sequence
  Description of Artificial Sequence: Synthetic oligonucleotide
uguagucggacagggugcg

SEQ ID NO: 475740 - RNA, 19 nt, Artificial Sequence
  Description of Artificial Sequence: Synthetic oligonucleotide
uuaaaagaugggguaaauu

SEQ ID NO: 475741 - RNA, 19 nt, Artificial Sequence
  Description of Artificial Sequence: Synthetic oligonucleotide
caaugaaacuuguuaacaa

SEQ ID NO: 475742 - RNA, 19 nt, Artificial Sequence
  Description of Artificial Sequence: Synthetic oligonucleotide
aacaagcacaaggugugcu

SEQ ID NO: 475743 - RNA, 19 nt, Artificial Sequence
  Description of Artificial Sequence: Synthetic oligonucleotide
ugcucuuucuagacagugu

SEQ ID NO: 475744 - RNA, 19 nt, Artificial Sequence
  Description of Artificial Sequence: Synthetic oligonucleotide
gugcaaugaaacuuguuaa

SEQ ID NO: 475745 - RNA, 19 nt, Artificial Sequence
  Description of Artificial Sequence: Synthetic oligonucleotide
aacuuguuaacaacuuaaa

SEQ ID NO: 475746 - RNA, 19 nt, Artificial Sequence
  Description of Artificial Sequence: Synthetic oligonucleotide
caguguagugagaaaggug

SEQ ID NO: 475747 - RNA, 19 nt, Artificial Sequence
  Description of Artificial Sequence: Synthetic oligonucleotide
agaucaaccucugcugguc

SEQ ID NO: 475748 - RNA, 19 nt, Artificial Sequence
  Description of Artificial Sequence: Synthetic oligonucleotide
agucggacagggugcggcc

SEQ ID NO: 475749 - RNA, 19 nt, Artificial Sequence
  Description of Artificial Sequence: Synthetic oligonucleotide
cucuuucuagacaguguag

SEQ ID NO: 475750 - RNA, 19 nt, Artificial Sequence
  Description of Artificial Sequence: Synthetic oligonucleotide
uguagugagaaaggugcgu

SEQ ID NO: 475751 - RNA, 19 nt, Artificial Sequence
  Description of Artificial Sequence: Synthetic oligonucleotide
aagaugggguaaauuaaaa

SEQ ID NO: 475752 - RNA, 19 nt, Artificial Sequence
  Description of Artificial Sequence: Synthetic oligonucleotide
ucaaccucugcuggucagg

SEQ ID NO: 475753 - RNA, 19 nt, Artificial Sequence
  Description of Artificial Sequence: Synthetic oligonucleotide
acaguguagugagaaaggu

SEQ ID NO: 475754 - RNA, 19 nt, Artificial Sequence
  Description of Artificial Sequence: Synthetic oligonucleotide
cugcauccaccccugaggc

SEQ ID NO: 475755 - RNA, 19 nt, Artificial Sequence
  Description of Artificial Sequence: Synthetic oligonucleotide
uuuucuugaugguguuacu

SEQ ID NO: 475756 - RNA, 19 nt, Artificial Sequence
  Description of Artificial Sequence: Synthetic oligonucleotide
caacuuaaaagauggggua

SEQ ID NO: 475757 - RNA, 19 nt, Artificial Sequence
  Description of Artificial Sequence: Synthetic oligonucleotide
aaagugcaaugaaacuugu

SEQ ID NO: 475758 - RNA, 19 nt, Artificial Sequence
  Description of Artificial Sequence: Synthetic oligonucleotide
uugguaaugcaagaacuuu

SEQ ID NO: 475759 - RNA, 19 nt, Artificial Sequence
  Description of Artificial Sequence: Synthetic oligonucleotide
aucugcauccaccccugag

SEQ ID NO: 475760 - RNA, 19 nt, Artificial Sequence
  Description of Artificial Sequence: Synthetic oligonucleotide
gguuuugccugucaggguc

SEQ ID NO: 475761 - RNA, 19 nt, Artificial Sequence
  Description of Artificial Sequence: Synthetic oligonucleotide
uuaaaacaccuccccucaa

SEQ ID NO: 475762 - RNA, 19 nt, Artificial Sequence
  Description of Artificial Sequence: Synthetic oligonucleotide
ucuagacaguguagugaga

SEQ ID NO: 475763 - RNA, 19 nt, Artificial Sequence
  Description of Artificial Sequence: Synthetic oligonucleotide
augcaagaacuuuauucaa

SEQ ID NO: 475764 - RNA, 19 nt, Artificial Sequence
  Description of Artificial Sequence: Synthetic oligonucleotide
aacuuuauucaaagugcaa

SEQ ID NO: 475765 - RNA, 19 nt, Artificial Sequence
  Description of Artificial Sequence: Synthetic oligonucleotide
aucaaccucugcuggucag

SEQ ID NO: 475766 - RNA, 19 nt, Artificial Sequence
  Description of Artificial Sequence: Synthetic oligonucleotide
cuugccggcaaagaucaac

SEQ ID NO: 475767 - RNA, 19 nt, Artificial Sequence
  Description of Artificial Sequence: Synthetic oligonucleotide
uguccuggaucuuugccuu

SEQ ID NO: 475768 - RNA, 19 nt, Artificial Sequence
  Description of Artificial Sequence: Synthetic oligonucleotide
agugagaaaggugcgucca

SEQ ID NO: 475769 - RNA, 19 nt, Artificial Sequence
  Description of Artificial Sequence: Synthetic oligonucleotide
acuuaaaagaugggguaaa

SEQ ID NO: 475770 - RNA, 19 nt, Artificial Sequence
  Description of Artificial Sequence: Synthetic oligonucleotide
uccccucaagcccaagaac

SEQ ID NO: 475771 - RNA, 19 nt, Artificial Sequence
  Description of Artificial Sequence: Synthetic oligonucleotide
uugccugucagggucuuca

SEQ ID NO: 475772 - RNA, 19 nt, Artificial Sequence
  Description of Artificial Sequence: Synthetic oligonucleotide
gaggcggaggacagggugg

SEQ ID NO: 475773 - RNA, 19 nt, Artificial Sequence
  Description of Artificial Sequence: Synthetic oligonucleotide
guagugagaaaggugcguc

SEQ ID NO: 475774 - RNA, 19 nt, Artificial Sequence
  Description of Artificial Sequence: Synthetic oligonucleotide
caagcccaagaacaagcac

SEQ ID NO: 475775 - RNA, 19 nt, Artificial Sequence
  Description of Artificial Sequence: Synthetic oligonucleotide
aaccuccagggugaugguc

SEQ ID NO: 475776 - RNA, 19 nt, Artificial Sequence
  Description of Artificial Sequence: Synthetic oligonucleotide
ugcauccaccccugaggcg

SEQ ID NO: 475777 - RNA, 19 nt, Artificial Sequence
  Description of Artificial Sequence: Synthetic oligonucleotide
guguagugagaaaggugcg

SEQ ID NO: 475778 - RNA, 19 nt, Artificial Sequence
  Description of Artificial Sequence: Synthetic oligonucleotide
uccaucuuccuguuugcuu

SEQ ID NO: 475779 - RNA, 19 nt, Artificial Sequence
  Description of Artificial Sequence: Synthetic oligonucleotide
ugugcucuuucuagacagu

SEQ ID NO: 475780 - RNA, 19 nt, Artificial Sequence
  Description of Artificial Sequence: Synthetic oligonucleotide
uagucggacagggugcggc

SEQ ID NO: 475781 - RNA, 19 nt, Artificial Sequence
  Description of Artificial Sequence: Synthetic oligonucleotide
ugagaaaggugcguccauc

SEQ ID NO: 475782 - RNA, 19 nt, Artificial Sequence
  Description of Artificial Sequence: Synthetic oligonucleotide
uagacaguguagugagaaa

SEQ ID NO: 475783 - RNA, 19 nt, Artificial Sequence
  Description of Artificial Sequence: Synthetic oligonucleotide
gcauccaccccugaggcgg

SEQ ID NO: 475784 - RNA, 19 nt, Artificial Sequence
  Description of Artificial Sequence: Synthetic oligonucleotide
cugcaucccaccccugagg

SEQ ID NO: 475785 - RNA, 19 nt, Artificial Sequence
  Description of Artificial Sequence: Synthetic oligonucleotide
ucacaaagaucugcaucca

SEQ ID NO: 475786 - RNA, 19 nt, Artificial Sequence
  Description of Artificial Sequence: Synthetic oligonucleotide
aucugcaucccaccccuga

SEQ ID NO: 475787 - RNA, 19 nt, Artificial Sequence
  Description of Artificial Sequence: Synthetic oligonucleotide
gaucaaccucugcugguca

SEQ ID NO: 475788 - RNA, 19 nt, Artificial Sequence
  Description of Artificial Sequence: Synthetic oligonucleotide
gagaaaggugcguccaucu

SEQ ID NO: 475789 - RNA, 19 nt, Artificial Sequence
  Description of Artificial Sequence: Synthetic oligonucleotide
cuccuucuggauguuguag

SEQ ID NO: 475790 - RNA, 19 nt, Artificial Sequence
  Description of Artificial Sequence: Synthetic oligonucleotide
acaaggugugcucuuucua

SEQ ID NO: 475791 - RNA, 19 nt, Artificial Sequence
  Description of Artificial Sequence: Synthetic oligonucleotide
gcguccaucuuccuguuug

SEQ ID NO: 475792 - RNA, 19 nt, Artificial Sequence
  Description of Artificial Sequence: Synthetic oligonucleotide
aggugcguccaucuuccug

SEQ ID NO: 475793 - RNA, 19 nt, Artificial Sequence
  Description of Artificial Sequence: Synthetic oligonucleotide
uuacugggcucaaccucca

SEQ ID NO: 475794 - RNA, 19 nt, Artificial Sequence
  Description of Artificial Sequence: Synthetic oligonucleotide
gaacaagcacaaggugugc

SEQ ID NO: 475795 - RNA, 19 nt, Artificial Sequence
  Description of Artificial Sequence: Synthetic oligonucleotide
caaccucugcuggucaggg

SEQ ID NO: 475796 - RNA, 19 nt, Artificial Sequence
  Description of Artificial Sequence: Synthetic oligonucleotide
gugcucuuucuagacagug

SEQ ID NO: 475797 - RNA, 19 nt, Artificial Sequence
  Description of Artificial Sequence: Synthetic oligonucleotide
ucuuugccuugacauucuc

SEQ ID NO: 475798 - RNA, 19 nt, Artificial Sequence
  Description of Artificial Sequence: Synthetic oligonucleotide
ugguuuugccugucagggu

SEQ ID NO: 475799 - RNA, 19 nt, Artificial Sequence
  Description of Artificial Sequence: Synthetic oligonucleotide
agaaaggugcguccaucuu

SEQ ID NO: 475800 - RNA, 19 nt, Artificial Sequence
  Description of Artificial Sequence: Synthetic oligonucleotide
ugccggcaaagaucaaccu

SEQ ID NO: 475801 - RNA, 19 nt, Artificial Sequence
  Description of Artificial Sequence: Synthetic oligonucleotide
gggcucaaccuccagggug

SEQ ID NO: 475802 - RNA, 19 nt, Artificial Sequence
  Description of Artificial Sequence: Synthetic oligonucleotide
ugcuuuucuugaugguguu

SEQ ID NO: 475803 - RNA, 19 nt, Artificial Sequence
  Description of Artificial Sequence: Synthetic oligonucleotide
gacaggguggacuccuucu

SEQ ID NO: 475804 - RNA, 19 nt, Artificial Sequence
  Description of Artificial Sequence: Synthetic oligonucleotide
gcucuuucuagacagugua

SEQ ID NO: 475805 - RNA, 19 nt, Artificial Sequence
  Description of Artificial Sequence: Synthetic oligonucleotide
ggguaaauuaaaacaccuc

SEQ ID NO: 475806 - RNA, 19 nt, Artificial Sequence
  Description of Artificial Sequence: Synthetic oligonucleotide
ggugcguccaucuuccugu

SEQ ID NO: 475807 - RNA, 19 nt, Artificial Sequence
  Description of Artificial Sequence: Synthetic oligonucleotide
agaucugcauccaccccug

SEQ ID NO: 475808 - RNA, 19 nt, Artificial Sequence
  Description of Artificial Sequence: Synthetic oligonucleotide
caagaacuuuauucaaagu

SEQ ID NO: 475809 - RNA, 19 nt, Artificial Sequence
  Description of Artificial Sequence: Synthetic oligonucleotide
uugccuugacauucucgau

SEQ ID NO: 475810 - RNA, 19 nt, Artificial Sequence
  Description of Artificial Sequence: Synthetic oligonucleotide
agcccaagaacaagcacaa

SEQ ID NO: 475811 - RNA, 19 nt, Artificial Sequence
  Description of Artificial Sequence: Synthetic oligonucleotide
ugggcucaaccuccagggu

SEQ ID NO: 475812 - RNA, 19 nt, Artificial Sequence
  Description of Artificial Sequence: Synthetic oligonucleotide
ccaagaacaagcacaaggu

SEQ ID NO: 475813 - RNA, 19 nt, Artificial Sequence
  Description of Artificial Sequence: Synthetic oligonucleotide
aagugcaaugaaacuuguu

SEQ ID NO: 475814 - RNA, 19 nt, Artificial Sequence
  Description of Artificial Sequence: Synthetic oligonucleotide
ccugaggcggaggacaggg

SEQ ID NO: 475815 - RNA, 19 nt, Artificial Sequence
  Description of Artificial Sequence: Synthetic oligonucleotide
acuccuucuggauguugua

SEQ ID NO: 475816 - RNA, 19 nt, Artificial Sequence
  Description of Artificial Sequence: Synthetic oligonucleotide
ggugugcucuuucuagaca

SEQ ID NO: 475817 - RNA, 19 nt, Artificial Sequence
  Description of Artificial Sequence: Synthetic oligonucleotide
ccccucaagcccaagaaca

SEQ ID NO: 475818 - RNA, 19 nt, Artificial Sequence
  Description of Artificial Sequence: Synthetic oligonucleotide
gugaugguuuugccuguca

SEQ ID NO: 475819 - RNA, 19 nt, Artificial Sequence
  Description of Artificial Sequence: Synthetic oligonucleotide
gacuccuucuggauguugu

SEQ ID NO: 475820 - RNA, 19 nt, Artificial Sequence
  Description of Artificial Sequence: Synthetic oligonucleotide
aaggugcguccaucuuccu

SEQ ID NO: 475821 - RNA, 19 nt, Artificial Sequence
  Description of Artificial Sequence: Synthetic oligonucleotide
guuugcuuuucuugauggu

SEQ ID NO: 475822 - RNA, 19 nt, Artificial Sequence
  Description of Artificial Sequence: Synthetic oligonucleotide
guguuacugggcucaaccu

SEQ ID NO: 475823 - RNA, 19 nt, Artificial Sequence
  Description of Artificial Sequence: Synthetic oligonucleotide
aucuuugccuugacauucu

SEQ ID NO: 475824 - RNA, 19 nt, Artificial Sequence
  Description of Artificial Sequence: Synthetic oligonucleotide
ucggacagggugcggccau

SEQ ID NO: 475825 - RNA, 19 nt, Artificial Sequence
  Description of Artificial Sequence: Synthetic oligonucleotide
acaccuccccucaagccca

SEQ ID NO: 475826 - RNA, 19 nt, Artificial Sequence
  Description of Artificial Sequence: Synthetic oligonucleotide
gccggcaaagaucaaccuc

SEQ ID NO: 475827 - RNA, 19 nt, Artificial Sequence
  Description of Artificial Sequence: Synthetic oligonucleotide
cuccccucaagcccaagaa

SEQ ID NO: 475828 - RNA, 19 nt, Artificial Sequence
  Description of Artificial Sequence: Synthetic oligonucleotide
ugccugucagggucuucac

SEQ ID NO: 475829 - RNA, 19 nt, Artificial Sequence
  Description of Artificial Sequence: Synthetic oligonucleotide
accuccagggugaugguuu

SEQ ID NO: 475830 - RNA, 19 nt, Artificial Sequence
  Description of Artificial Sequence: Synthetic oligonucleotide
ccggcaaagaucaaccucu

SEQ ID NO: 475831 - RNA, 19 nt, Artificial Sequence
  Description of Artificial Sequence: Synthetic oligonucleotide
cacaaggugugcucuuucu

SEQ ID NO: 475832 - RNA, 19 nt, Artificial Sequence
  Description of Artificial Sequence: Synthetic oligonucleotide
guaaugcaagaacuuuauu

SEQ ID NO: 475833 - RNA, 19 nt, Artificial Sequence
  Description of Artificial Sequence: Synthetic oligonucleotide
ggcucaaccuccaggguga

SEQ ID NO: 475834 - RNA, 19 nt, Artificial Sequence
  Description of Artificial Sequence: Synthetic oligonucleotide
ccagggugaugguuuugcc

SEQ ID NO: 475835 - RNA, 19 nt, Artificial Sequence
  Description of Artificial Sequence: Synthetic oligonucleotide
guagucggacagggugcgg

SEQ ID NO: 475836 - RNA, 19 nt, Artificial Sequence
  Description of Artificial Sequence: Synthetic oligonucleotide
gcaucccaccccugaggcg

SEQ ID NO: 475837 - RNA, 19 nt, Artificial Sequence
  Description of Artificial Sequence: Synthetic oligonucleotide
ccuuguccuggaucuuugc

SEQ ID NO: 475838 - RNA, 19 nt, Artificial Sequence
  Description of Artificial Sequence: Synthetic oligonucleotide
cuuaaaagaugggguaaau

SEQ ID NO: 475839 - RNA, 19 nt, Artificial Sequence
  Description of Artificial Sequence: Synthetic oligonucleotide
ugguguuacugggcucaac

SEQ ID NO: 475840 - RNA, 19 nt, Artificial Sequence
  Description of Artificial Sequence: Synthetic oligonucleotide
agcacaaggugugcucuuu

SEQ ID NO: 475841 - RNA, 19 nt, Artificial Sequence
  Description of Artificial Sequence: Synthetic oligonucleotide
gaccuccagggugaugguc

SEQ ID NO: 475842 - RNA, 19 nt, Artificial Sequence
  Description of Artificial Sequence: Synthetic oligonucleotide
gaucugcauccaccccuga

SEQ ID NO: 475843 - RNA, 19 nt, Artificial Sequence
  Description of Artificial Sequence: Synthetic oligonucleotide
ccucaagcccaagaacaag

SEQ ID NO: 475844 - RNA, 19 nt, Artificial Sequence
  Description of Artificial Sequence: Synthetic oligonucleotide
caagcacaaggugugcucu

SEQ ID NO: 475845 - RNA, 19 nt, Artificial Sequence
  Description of Artificial Sequence: Synthetic oligonucleotide
uuuugccugucagggucuu

SEQ ID NO: 475846 - RNA, 19 nt, Artificial Sequence
  Description of Artificial Sequence: Synthetic oligonucleotide
ugcguccaucuuccuguuu

SEQ ID NO: 475847 - RNA, 19 nt, Artificial Sequence
  Description of Artificial Sequence: Synthetic oligonucleotide
aggcggaggacagggugga

SEQ ID NO: 475848 - RNA, 19 nt, Artificial Sequence
  Description of Artificial Sequence: Synthetic oligonucleotide
uuugccugucagggucuuc

SEQ ID NO: 475849 - RNA, 19 nt, Artificial Sequence
  Description of Artificial Sequence: Synthetic oligonucleotide
ggacaggguggacuccuuc

SEQ ID NO: 475850 - RNA, 19 nt, Artificial Sequence
  Description of Artificial Sequence: Synthetic oligonucleotide
gcacaaggugugcucuuuc

SEQ ID NO: 475851 - RNA, 19 nt, Artificial Sequence
  Description of Artificial Sequence: Synthetic oligonucleotide
cguccaucuuccuguuugc

SEQ ID NO: 475852 - RNA, 19 nt, Artificial Sequence
  Description of Artificial Sequence: Synthetic oligonucleotide
guuuugccugucagggucu

SEQ ID NO: 475853 - RNA, 19 nt, Artificial Sequence
  Description of Artificial Sequence: Synthetic oligonucleotide
ggaucuuugccuugacauu

SEQ ID NO: 475854 - RNA, 19 nt, Artificial Sequence
  Description of Artificial Sequence: Synthetic oligonucleotide
cucaaccuccagggugaug

SEQ ID NO: 475855 - RNA, 19 nt, Artificial Sequence
  Description of Artificial Sequence: Synthetic oligonucleotide
ucuugccugucagggucuu

SEQ ID NO: 475856 - RNA, 19 nt, Artificial Sequence
  Description of Artificial Sequence: Synthetic oligonucleotide
cggaggacaggguggacuc

SEQ ID NO: 475857 - RNA, 19 nt, Artificial Sequence
  Description of Artificial Sequence: Synthetic oligonucleotide
gccugucagggucuucaca

SEQ ID NO: 475858 - RNA, 19 nt, Artificial Sequence
  Description of Artificial Sequence: Synthetic oligonucleotide
cuugccugucagggucuuc

SEQ ID NO: 475859 - RNA, 19 nt, Artificial Sequence
  Description of Artificial Sequence: Synthetic oligonucleotide
gucggacagggugcggcca

SEQ ID NO: 475860 - RNA, 19 nt, Artificial Sequence
  Description of Artificial Sequence: Synthetic oligonucleotide
augguguuacugggcucaa

SEQ ID NO: 475861 - RNA, 19 nt, Artificial Sequence
  Description of Artificial Sequence: Synthetic oligonucleotide
cauccaccccugaggcgga

SEQ ID NO: 475862 - RNA, 19 nt, Artificial Sequence
  Description of Artificial Sequence: Synthetic oligonucleotide
cccucaagcccaagaacaa

SEQ ID NO: 475863 - RNA, 19 nt, Artificial Sequence
  Description of Artificial Sequence: Synthetic oligonucleotide
guccaucuuccuguuugcu

SEQ ID NO: 475864 - RNA, 19 nt, Artificial Sequence
  Description of Artificial Sequence: Synthetic oligonucleotide
auccaccccugaggcggag

SEQ ID NO: 475865 - RNA, 19 nt, Artificial Sequence
  Description of Artificial Sequence: Synthetic oligonucleotide
caucuuccuguuugcuuuu

SEQ ID NO: 475866 - RNA, 19 nt, Artificial Sequence
  Description of Artificial Sequence: Synthetic oligonucleotide
gucuugccugucagggucu

SEQ ID NO: 475867 - RNA, 19 nt, Artificial Sequence
  Description of Artificial Sequence: Synthetic oligonucleotide
accuccccucaagcccaag

SEQ ID NO: 475868 - RNA, 19 nt, Artificial Sequence
  Description of Artificial Sequence: Synthetic oligonucleotide
gcggaggacaggguggacu

SEQ ID NO: 475869 - RNA, 19 nt, Artificial Sequence
  Description of Artificial Sequence: Synthetic oligonucleotide
gaccuccagggugaugguu

SEQ ID NO: 475870 - RNA, 19 nt, Artificial Sequence
  Description of Artificial Sequence: Synthetic oligonucleotide
aucccaccccugaggcgga

SEQ ID NO: 475871 - RNA, 19 nt, Artificial Sequence
  Description of Artificial Sequence: Synthetic oligonucleotide
cccugaggcggaggacagg

SEQ ID NO: 475872 - RNA, 19 nt, Artificial Sequence
  Description of Artificial Sequence: Synthetic oligonucleotide
gugcguccaucuuccuguu

SEQ ID NO: 475873 - RNA, 19 nt, Artificial Sequence
  Description of Artificial Sequence: Synthetic oligonucleotide
caccuccccucaagcccaa

SEQ ID NO: 475874 - RNA, 19 nt, Artificial Sequence
  Description of Artificial Sequence: Synthetic oligonucleotide
ggcggaggacaggguggac

SEQ ID NO: 475875 - RNA, 19 nt, Artificial Sequence
  Description of Artificial Sequence: Synthetic oligonucleotide
ccuccagggugaugguuuu

SEQ ID NO: 475876 - RNA, 19 nt, Artificial Sequence
  Description of Artificial Sequence: Synthetic oligonucleotide
cggacagggugcggccauc

SEQ ID NO: 475877 - RNA, 19 nt, Artificial Sequence
  Description of Artificial Sequence: Synthetic oligonucleotide
gcucaaccuccagggugau

SEQ ID NO: 475878 - RNA, 19 nt, Artificial Sequence
  Description of Artificial Sequence: Synthetic oligonucleotide
cgaccuccagggugauggu

SEQ ID NO: 475879 - RNA, 19 nt, Artificial Sequence
  Description of Artificial Sequence: Synthetic oligonucleotide
aauagaaggagucaaauga

SEQ ID NO: 475880 - RNA, 19 nt, Artificial Sequence
  Description of Artificial Sequence: Synthetic oligonucleotide
augaauuugagaucuaagc

SEQ ID NO: 475881 - RNA, 19 nt, Artificial Sequence
  Description of Artificial Sequence: Synthetic oligonucleotide
uaauaaagaguccagguag

SEQ ID NO: 475882 - RNA, 19 nt, Artificial Sequence
  Description of Artificial Sequence: Synthetic oligonucleotide
aaugcuaugcuccccuucc

SEQ ID NO: 475883 - RNA, 19 nt, Artificial Sequence
  Description of Artificial Sequence: Synthetic oligonucleotide
uucauucuaacucucaugc

SEQ ID NO: 475884 - RNA, 19 nt, Artificial Sequence
  Description of Artificial Sequence: Synthetic oligonucleotide
uguagaauaucuacaaugc

SEQ ID NO: 475885 - RNA, 19 nt, Artificial Sequence
  Description of Artificial Sequence: Synthetic oligonucleotide
aaacaaaacaaaacaaaac

SEQ ID NO: 475886 - RNA, 19 nt, Artificial Sequence
  Description of Artificial Sequence: Synthetic oligonucleotide
aaagguuugagucuggcga

SEQ ID NO: 475887 - RNA, 19 nt, Artificial Sequence
  Description of Artificial Sequence: Synthetic oligonucleotide
aaacauagcggcaagcugc

SEQ ID NO: 475888 - RNA, 19 nt, Artificial Sequence
  Description of Artificial Sequence: Synthetic oligonucleotide
uacuacuaggauuucaucg

SEQ ID NO: 475889 - RNA, 19 nt, Artificial Sequence
  Description of Artificial Sequence: Synthetic oligonucleotide
ugauuguucuaauaaagag

SEQ ID NO: 475890 - RNA, 19 nt, Artificial Sequence
  Description of Artificial Sequence: Synthetic oligonucleotide
uacauaacauggaagacgc

SEQ ID NO: 475891 - RNA, 19 nt, Artificial Sequence
  Description of Artificial Sequence: Synthetic oligonucleotide
ugucaauccacaaagcagc

SEQ ID NO: 475892 - RNA, 19 nt, Artificial Sequence
  Description of Artificial Sequence: Synthetic oligonucleotide
uuaaacauuuugcugacgu

SEQ ID NO: 475893 - RNA, 19 nt, Artificial Sequence
  Description of Artificial Sequence: Synthetic oligonucleotide
uaauauggcagucuagaag

SEQ ID NO: 475894 - RNA, 19 nt, Artificial Sequence
  Description of Artificial Sequence: Synthetic oligonucleotide
uaacaauuccccaucaacc

SEQ ID NO: 475895 - RNA, 19 nt, Artificial Sequence
  Description of Artificial Sequence: Synthetic oligonucleotide
uucgaacuuuguaagaggg

SEQ ID NO: 475896 - RNA, 19 nt, Artificial Sequence
  Description of Artificial Sequence: Synthetic oligonucleotide
aauucaagaagaagguuac

SEQ ID NO: 475897 - RNA, 19 nt, Artificial Sequence
  Description of Artificial Sequence: Synthetic oligonucleotide
aaaauugcucucaagauga

SEQ ID NO: 475898 - RNA, 19 nt, Artificial Sequence
  Description of Artificial Sequence: Synthetic oligonucleotide
acuacuaggauuucaucgg

SEQ ID NO: 475899 - RNA, 19 nt, Artificial Sequence
  Description of Artificial Sequence: Synthetic oligonucleotide
uagccugucaacauagugg

SEQ ID NO: 475900 - RNA, 19 nt, Artificial Sequence
  Description of Artificial Sequence: Synthetic oligonucleotide
ucuagaagagacuugacau

SEQ ID NO: 475901 - RNA, 19 nt, Artificial Sequence
  Description of Artificial Sequence: Synthetic oligonucleotide
uuuuaucuauaugaggccg

SEQ ID NO: 475902 - RNA, 19 nt, Artificial Sequence
  Description of Artificial Sequence: Synthetic oligonucleotide
uuuacugcacauucgaaca

SEQ ID NO: 475903 - RNA, 19 nt, Artificial Sequence
  Description of Artificial Sequence: Synthetic oligonucleotide
uuuguguagaauaucuaca

SEQ ID NO: 475904 - RNA, 19 nt, Artificial Sequence
  Description of Artificial Sequence: Synthetic oligonucleotide
acucagacaagccagucac

SEQ ID NO: 475905 - RNA, 19 nt, Artificial Sequence
  Description of Artificial Sequence: Synthetic oligonucleotide
ucuaauaaagaguccaggu

SEQ ID NO: 475906 - RNA, 19 nt, Artificial Sequence
  Description of Artificial Sequence: Synthetic oligonucleotide
uuaacuucaaugcuaugcu

SEQ ID NO: 475907 - RNA, 19 nt, Artificial Sequence
  Description of Artificial Sequence: Synthetic oligonucleotide
agcuguucaguacucaagc

SEQ ID NO: 475908 - RNA, 19 nt, Artificial Sequence
  Description of Artificial Sequence: Synthetic oligonucleotide
ucaaaucggaaucugacaa

SEQ ID NO: 475909 - RNA, 19 nt, Artificial Sequence
  Description of Artificial Sequence: Synthetic oligonucleotide
uccauucuugcucacaaag

SEQ ID NO: 475910 - RNA, 19 nt, Artificial Sequence
  Description of Artificial Sequence: Synthetic oligonucleotide
aucuauaugaggccgagug

SEQ ID NO: 475911 - RNA, 19 nt, Artificial Sequence
  Description of Artificial Sequence: Synthetic oligonucleotide
ucggaaucugacaauaacc

SEQ ID NO: 475912 - RNA, 19 nt, Artificial Sequence
  Description of Artificial Sequence: Synthetic oligonucleotide
ucuacaaugcccaugucuc

SEQ ID NO: 475913 - RNA, 19 nt, Artificial Sequence
  Description of Artificial Sequence: Synthetic oligonucleotide
agaggcauagcuucaacuc

SEQ ID NO: 475914 - RNA, 19 nt, Artificial Sequence
  Description of Artificial Sequence: Synthetic oligonucleotide
ucuaagccuacuaaacugc

SEQ ID NO: 475915 - RNA, 19 nt, Artificial Sequence
  Description of Artificial Sequence: Synthetic oligonucleotide
uccccuuccaguaucagag

SEQ ID NO: 475916 - RNA, 19 nt, Artificial Sequence
  Description of Artificial Sequence: Synthetic oligonucleotide
aggcuuaucccuuuguaac

SEQ ID NO: 475917 - RNA, 19 nt, Artificial Sequence
  Description of Artificial Sequence: Synthetic oligonucleotide
uaaacggcaggcuucaaug

SEQ ID NO: 475918 - RNA, 19 nt, Artificial Sequence
  Description of Artificial Sequence: Synthetic oligonucleotide
aagguuugagucuggcgac

SEQ ID NO: 475919 - RNA, 19 nt, Artificial Sequence
  Description of Artificial Sequence: Synthetic oligonucleotide
ucuauaugaggccgagugg

SEQ ID NO: 475920 - RNA, 19 nt, Artificial Sequence
  Description of Artificial Sequence: Synthetic oligonucleotide
uggaacacuaaacaauugu

SEQ ID NO: 475921 - RNA, 19 nt, Artificial Sequence
  Description of Artificial Sequence: Synthetic oligonucleotide
aguuaaacauuuugcugac

SEQ ID NO: 475922 - RNA, 19 nt, Artificial Sequence
  Description of Artificial Sequence: Synthetic oligonucleotide
ugcauucgaacuuuguaag

SEQ ID NO: 475923 - RNA, 19 nt, Artificial Sequence
  Description of Artificial Sequence: Synthetic oligonucleotide
uauacaaaacauagcggca

SEQ ID NO: 475924 - RNA, 19 nt, Artificial Sequence
  Description of Artificial Sequence: Synthetic oligonucleotide
uauucauuaaagcccaaau

SEQ ID NO: 475925 - RNA, 19 nt, Artificial Sequence
  Description of Artificial Sequence: Synthetic oligonucleotide
uuaaacaaagguguggggu

SEQ ID NO: 475926 - RNA, 19 nt, Artificial Sequence
  Description of Artificial Sequence: Synthetic oligonucleotide
agaaggagucaaaugaggc

SEQ ID NO: 475927 - RNA, 19 nt, Artificial Sequence
  Description of Artificial Sequence: Synthetic oligonucleotide
aucggaaucugacaauaac

SEQ ID NO: 475928 - RNA, 19 nt, Artificial Sequence
  Description of Artificial Sequence: Synthetic oligonucleotide
uguucaguacucaagcuuc

SEQ ID NO: 475929 - RNA, 19 nt, Artificial Sequence
  Description of Artificial Sequence: Synthetic oligonucleotide
agcaagcaaugcuuaaacc

SEQ ID NO: 475930 - RNA, 19 nt, Artificial Sequence
  Description of Artificial Sequence: Synthetic oligonucleotide
agguuugauauacaaaaca

SEQ ID NO: 475931 - RNA, 19 nt, Artificial Sequence
  Description of Artificial Sequence: Synthetic oligonucleotide
uuuacaagggucaucgaua

SEQ ID NO: 475932 - RNA, 19 nt, Artificial Sequence
  Description of Artificial Sequence: Synthetic oligonucleotide
aucuaagccuacuaaacug

SEQ ID NO: 475933 - RNA, 19 nt, Artificial Sequence
  Description of Artificial Sequence: Synthetic oligonucleotide
cuugacauuguuuucugug

SEQ ID NO: 475934 - RNA, 19 nt, Artificial Sequence
  Description of Artificial Sequence: Synthetic oligonucleotide
ucuaagaagucccaauguc

SEQ ID NO: 475935 - RNA, 19 nt, Artificial Sequence
  Description of Artificial Sequence: Synthetic oligonucleotide
cuuuacugcacauucgaac

SEQ ID NO: 475936 - RNA, 19 nt, Artificial Sequence
  Description of Artificial Sequence: Synthetic oligonucleotide
aagacucccuaacaccacg

SEQ ID NO: 475937 - RNA, 19 nt, Artificial Sequence
  Description of Artificial Sequence: Synthetic oligonucleotide
guaucccucacccacacag

SEQ ID NO: 475938 - RNA, 19 nt, Artificial Sequence
  Description of Artificial Sequence: Synthetic oligonucleotide
uugacauuguuuucugugc

SEQ ID NO: 475939 - RNA, 19 nt, Artificial Sequence
  Description of Artificial Sequence: Synthetic oligonucleotide
auacaauaaucuuggaaca

SEQ ID NO: 475940 - RNA, 19 nt, Artificial Sequence
  Description of Artificial Sequence: Synthetic oligonucleotide
ucaagcuucguaaaauauc

SEQ ID NO: 475941 - RNA, 19 nt, Artificial Sequence
  Description of Artificial Sequence: Synthetic oligonucleotide
aagaagaagguuacauaac

SEQ ID NO: 475942 - RNA, 19 nt, Artificial Sequence
  Description of Artificial Sequence: Synthetic oligonucleotide
auucgaacuuuguaagagg

SEQ ID NO: 475943 - RNA, 19 nt, Artificial Sequence
  Description of Artificial Sequence: Synthetic oligonucleotide
cuggaaacugguucgaagc

SEQ ID NO: 475944 - RNA, 19 nt, Artificial Sequence
  Description of Artificial Sequence: Synthetic oligonucleotide
aauaagaucuuuugcuguu

SEQ ID NO: 475945 - RNA, 19 nt, Artificial Sequence
  Description of Artificial Sequence: Synthetic oligonucleotide
aggauaucaucauugguca

SEQ ID NO: 475946 - RNA, 19 nt, Artificial Sequence
  Description of Artificial Sequence: Synthetic oligonucleotide
aaacauuuugcugacguaa

SEQ ID NO: 475947 - RNA, 19 nt, Artificial Sequence
  Description of Artificial Sequence: Synthetic oligonucleotide
caugucucguaacuuaucc

SEQ ID NO: 475948 - RNA, 19 nt, Artificial Sequence
  Description of Artificial Sequence: Synthetic oligonucleotide
uuaucccuuuguaacaucu

SEQ ID NO: 475949 - RNA, 19 nt, Artificial Sequence
  Description of Artificial Sequence: Synthetic oligonucleotide
ugacccauauaauauuuga

SEQ ID NO: 475950 - RNA, 19 nt, Artificial Sequence
  Description of Artificial Sequence: Synthetic oligonucleotide
guaacaauuccccaucaac

SEQ ID NO: 475951 - RNA, 19 nt, Artificial Sequence
  Description of Artificial Sequence: Synthetic oligonucleotide
uuuaucuauaugaggccga

SEQ ID NO: 475952 - RNA, 19 nt, Artificial Sequence
  Description of Artificial Sequence: Synthetic oligonucleotide
uaaagguuuccacaccgca

SEQ ID NO: 475953 - RNA, 19 nt, Artificial Sequence
  Description of Artificial Sequence: Synthetic oligonucleotide
uucuaagaagucccaaugu

SEQ ID NO: 475954 - RNA, 19 nt, Artificial Sequence
  Description of Artificial Sequence: Synthetic oligonucleotide
ugaguacucauuauuuuau

SEQ ID NO: 475955 - RNA, 19 nt, Artificial Sequence
  Description of Artificial Sequence: Synthetic oligonucleotide
cauaugagguuugauauac

SEQ ID NO: 475956 - RNA, 19 nt, Artificial Sequence
  Description of Artificial Sequence: Synthetic oligonucleotide
gguuacauaacauggaaga

SEQ ID NO: 475957 - RNA, 19 nt, Artificial Sequence
  Description of Artificial Sequence: Synthetic oligonucleotide
ugugcgcacacacacacac

SEQ ID NO: 475958 - RNA, 19 nt, Artificial Sequence
  Description of Artificial Sequence: Synthetic oligonucleotide
aaugauugauuguucuaau

SEQ ID NO: 475959 - RNA, 19 nt, Artificial Sequence
  Description of Artificial Sequence: Synthetic oligonucleotide
uaugaggccgaguggagag

SEQ ID NO: 475960 - RNA, 19 nt, Artificial Sequence
  Description of Artificial Sequence: Synthetic oligonucleotide
uaaacugugcaaacaucug

SEQ ID NO: 475961 - RNA, 19 nt, Artificial Sequence
  Description of Artificial Sequence: Synthetic oligonucleotide
aagccuacuaaacugcuuu

SEQ ID NO: 475962 - RNA, 19 nt, Artificial Sequence
  Description of Artificial Sequence: Synthetic oligonucleotide
gaaucugacaauaaccgga

SEQ ID NO: 475963 - RNA, 19 nt, Artificial Sequence
  Description of Artificial Sequence: Synthetic oligonucleotide
uucaaaucggaaucugaca

SEQ ID NO: 475964 - RNA, 19 nt, Artificial Sequence
  Description of Artificial Sequence: Synthetic oligonucleotide
ugcauaaucugcuuuccgu

SEQ ID NO: 475965 - RNA, 19 nt, Artificial Sequence
  Description of Artificial Sequence: Synthetic oligonucleotide
auuuacaagggucaucgau

SEQ ID NO: 475966 - RNA, 19 nt, Artificial Sequence
  Description of Artificial Sequence: Synthetic oligonucleotide
agcacauucaaaucggaau

SEQ ID NO: 475967 - RNA, 19 nt, Artificial Sequence
  Description of Artificial Sequence: Synthetic oligonucleotide
agaggagauuucuaagaag

SEQ ID NO: 475968 - RNA, 19 nt, Artificial Sequence
  Description of Artificial Sequence: Synthetic oligonucleotide
acacacacacacuccauuc

SEQ ID NO: 475969 - RNA, 19 nt, Artificial Sequence
  Description of Artificial Sequence: Synthetic oligonucleotide
uucguaaaauaucugcuuu

SEQ ID NO: 475970 - RNA, 19 nt, Artificial Sequence
  Description of Artificial Sequence: Synthetic oligonucleotide
agaauaucuacaaugccca

SEQ ID NO: 475971 - RNA, 19 nt, Artificial Sequence
  Description of Artificial Sequence: Synthetic oligonucleotide
aauaucugugguaacaauu

SEQ ID NO: 475972 - RNA, 19 nt, Artificial Sequence
  Description of Artificial Sequence: Synthetic oligonucleotide
uuacaagggucaucgauac

SEQ ID NO: 475973 - RNA, 19 nt, Artificial Sequence
  Description of Artificial Sequence: Synthetic oligonucleotide
gauugauuguucuaauaaa

SEQ ID NO: 475974 - RNA, 19 nt, Artificial Sequence
  Description of Artificial Sequence: Synthetic oligonucleotide
uugcauaaucugcuuuccg

SEQ ID NO: 475975 - RNA, 19 nt, Artificial Sequence
  Description of Artificial Sequence: Synthetic oligonucleotide
aaucccauucacucguaga

SEQ ID NO: 475976 - RNA, 19 nt, Artificial Sequence
  Description of Artificial Sequence: Synthetic oligonucleotide
uuaaagguuuccacaccgc

SEQ ID NO: 475977 - RNA, 19 nt, Artificial Sequence
  Description of Artificial Sequence: Synthetic oligonucleotide
ugcgcacacacacacacac

SEQ ID NO: 475978 - RNA, 19 nt, Artificial Sequence
  Description of Artificial Sequence: Synthetic oligonucleotide
aaauaucugugguaacaau

SEQ ID NO: 475979 - RNA, 19 nt, Artificial Sequence
  Description of Artificial Sequence: Synthetic oligonucleotide
acccauauaauauuugauu

SEQ ID NO: 475980 - RNA, 19 nt, Artificial Sequence
  Description of Artificial Sequence: Synthetic oligonucleotide
cauucgaacuuuguaagag

SEQ ID NO: 475981 - RNA, 19 nt, Artificial Sequence
  Description of Artificial Sequence: Synthetic oligonucleotide
auaaucugcuuuccgugag

SEQ ID NO: 475982 - RNA, 19 nt, Artificial Sequence
  Description of Artificial Sequence: Synthetic oligonucleotide
cacacacacacacacacac

SEQ ID NO: 475983 - RNA, 19 nt, Artificial Sequence
  Description of Artificial Sequence: Synthetic oligonucleotide
ugacguaaguugcaucuca

SEQ ID NO: 475984 - RNA, 19 nt, Artificial Sequence
  Description of Artificial Sequence: Synthetic oligonucleotide
uggcgacugacucaguuug

SEQ ID NO: 475985 - RNA, 19 nt, Artificial Sequence
  Description of Artificial Sequence: Synthetic oligonucleotide
ucauuugcuccaagagagg

SEQ ID NO: 475986 - RNA, 19 nt, Artificial Sequence
  Description of Artificial Sequence: Synthetic oligonucleotide
gaaacugguucgaagcugc

SEQ ID NO: 475987 - RNA, 19 nt, Artificial Sequence
  Description of Artificial Sequence: Synthetic oligonucleotide
ucguaacuuauccuggcgu

SEQ ID NO: 475988 - RNA, 19 nt, Artificial Sequence
  Description of Artificial Sequence: Synthetic oligonucleotide
aguuugacaugagaaugac

SEQ ID NO: 475989 - RNA, 19 nt, Artificial Sequence
  Description of Artificial Sequence: Synthetic oligonucleotide
cauucgaacagacaaggca

SEQ ID NO: 475990 - RNA, 19 nt, Artificial Sequence
  Description of Artificial Sequence: Synthetic oligonucleotide
agauuuucacacaaaauaa

SEQ ID NO: 475991 - RNA, 19 nt, Artificial Sequence
  Description of Artificial Sequence: Synthetic oligonucleotide
aauuugagaucuaagccua

SEQ ID NO: 475992 - RNA, 19 nt, Artificial Sequence
  Description of Artificial Sequence: Synthetic oligonucleotide
uauaugaggccgaguggag

SEQ ID NO: 475993 - RNA, 19 nt, Artificial Sequence
  Description of Artificial Sequence: Synthetic oligonucleotide
auagaaggagucaaaugag

SEQ ID NO: 475994 - RNA, 19 nt, Artificial Sequence
  Description of Artificial Sequence: Synthetic oligonucleotide
uuuccgugaguacucauua

SEQ ID NO: 475995 - RNA, 19 nt, Artificial Sequence
  Description of Artificial Sequence: Synthetic oligonucleotide
uccucugaggaaauuacua

SEQ ID NO: 475996 - RNA, 19 nt, Artificial Sequence
  Description of Artificial Sequence: Synthetic oligonucleotide
cucccuaacaccacggcac

SEQ ID NO: 475997 - RNA, 19 nt, Artificial Sequence
  Description of Artificial Sequence: Synthetic oligonucleotide
aaccggaagagcuguucag

SEQ ID NO: 475998 - RNA, 19 nt, Artificial Sequence
  Description of Artificial Sequence: Synthetic oligonucleotide
gacaauaaccggaagagcu

SEQ ID NO: 475999 - RNA, 19 nt, Artificial Sequence
  Description of Artificial Sequence: Synthetic oligonucleotide
ucacaaagguuugagucug

SEQ ID NO: 476000 - RNA, 19 nt, Artificial Sequence
  Description of Artificial Sequence: Synthetic oligonucleotide
cacacacacacacacacuc

SEQ ID NO: 476001 - RNA, 19 nt, Artificial Sequence
  Description of Artificial Sequence: Synthetic oligonucleotide
acaaagguuugagucuggc

SEQ ID NO: 476002 - RNA, 19 nt, Artificial Sequence
  Description of Artificial Sequence: Synthetic oligonucleotide
cuaggauuucaucgggugc

SEQ ID NO: 476003 - RNA, 19 nt, Artificial Sequence
  Description of Artificial Sequence: Synthetic oligonucleotide
aaaucggaaucugacaaua

SEQ ID NO: 476004 - RNA, 19 nt, Artificial Sequence
  Description of Artificial Sequence: Synthetic oligonucleotide
uguguagaauaucuacaau

SEQ ID NO: 476005 - RNA, 19 nt, Artificial Sequence
  Description of Artificial Sequence: Synthetic oligonucleotide
uuaucuauaugaggccgag

SEQ ID NO: 476006 - RNA, 19 nt, Artificial Sequence
  Description of Artificial Sequence: Synthetic oligonucleotide
acauaguggcgacugcuag

SEQ ID NO: 476007 - RNA, 19 nt, Artificial Sequence
  Description of Artificial Sequence: Synthetic oligonucleotide
uuaaacggcaggcuucaau

SEQ ID NO: 476008 - RNA, 19 nt, Artificial Sequence
  Description of Artificial Sequence: Synthetic oligonucleotide
cuacuaggauuucaucggg

SEQ ID NO: 476009 - RNA, 19 nt, Artificial Sequence
  Description of Artificial Sequence: Synthetic oligonucleotide
uguacagaucuggauaaac

SEQ ID NO: 476010 - RNA, 19 nt, Artificial Sequence
  Description of Artificial Sequence: Synthetic oligonucleotide
aaacggcaggcuucaauga

SEQ ID NO: 476011 - RNA, 19 nt, Artificial Sequence
  Description of Artificial Sequence: Synthetic oligonucleotide
ucucguaacuuauccuggc

SEQ ID NO: 476012 - RNA, 19 nt, Artificial Sequence
  Description of Artificial Sequence: Synthetic oligonucleotide
uuguagguccaaaggaaaa

SEQ ID NO: 476013 - RNA, 19 nt, Artificial Sequence
  Description of Artificial Sequence: Synthetic oligonucleotide
ucuuggaacagcuccuaaa

SEQ ID NO: 476014 - RNA, 19 nt, Artificial Sequence
  Description of Artificial Sequence: Synthetic oligonucleotide
ugcaacgccgucuuugccu

SEQ ID NO: 476015 - RNA, 19 nt, Artificial Sequence
  Description of Artificial Sequence: Synthetic oligonucleotide
uguacugccccaugguuaa

SEQ ID NO: 476016 - RNA, 19 nt, Artificial Sequence
  Description of Artificial Sequence: Synthetic oligonucleotide
agagaggcauagcuucaac

SEQ ID NO: 476017 - RNA, 19 nt, Artificial Sequence
  Description of Artificial Sequence: Synthetic oligonucleotide
uaggcuuaucccuuuguaa

SEQ ID NO: 476018 - RNA, 19 nt, Artificial Sequence
  Description of Artificial Sequence: Synthetic oligonucleotide
ugaggcuagcuccuguacu

SEQ ID NO: 476019 - RNA, 19 nt, Artificial Sequence
  Description of Artificial Sequence: Synthetic oligonucleotide
agaucuggauaaacugugc

SEQ ID NO: 476020 - RNA, 19 nt, Artificial Sequence
  Description of Artificial Sequence: Synthetic oligonucleotide
augaggcuagcuccuguac

SEQ ID NO: 476021 - RNA, 19 nt, Artificial Sequence
  Description of Artificial Sequence: Synthetic oligonucleotide
agugucugcucuuuaacuu

SEQ ID NO: 476022 - RNA, 19 nt, Artificial Sequence
  Description of Artificial Sequence: Synthetic oligonucleotide
acugccccaugguuaaacg

SEQ ID NO: 476023 - RNA, 19 nt, Artificial Sequence
  Description of Artificial Sequence: Synthetic oligonucleotide
caagcuucguaaaauaucu

SEQ ID NO: 476024 - RNA, 19 nt, Artificial Sequence
  Description of Artificial Sequence: Synthetic oligonucleotide
agacuugacauuguuuucu

SEQ ID NO: 476025 - RNA, 19 nt, Artificial Sequence
  Description of Artificial Sequence: Synthetic oligonucleotide
gaagacgcuacuacuagga

SEQ ID NO: 476026 - RNA, 19 nt, Artificial Sequence
  Description of Artificial Sequence: Synthetic oligonucleotide
uguuggcuaggaugcacag

SEQ ID NO: 476027 - RNA, 19 nt, Artificial Sequence
  Description of Artificial Sequence: Synthetic oligonucleotide
cucguaacuuauccuggcg

SEQ ID NO: 476028 - RNA, 19 nt, Artificial Sequence
  Description of Artificial Sequence: Synthetic oligonucleotide
aucgggugcauuuuguaaa

SEQ ID NO: 476029 - RNA, 19 nt, Artificial Sequence
  Description of Artificial Sequence: Synthetic oligonucleotide
aguacucaagcuucguaaa

SEQ ID NO: 476030 - RNA, 19 nt, Artificial Sequence
  Description of Artificial Sequence: Synthetic oligonucleotide
cuacaaugcccaugucucg

SEQ ID NO: 476031 - RNA, 19 nt, Artificial Sequence
  Description of Artificial Sequence: Synthetic oligonucleotide
cauaguggcgacugcuagc

SEQ ID NO: 476032 - RNA, 19 nt, Artificial Sequence
  Description of Artificial Sequence: Synthetic oligonucleotide
gcuaaccgcaccuugacac

SEQ ID NO: 476033 - RNA, 19 nt, Artificial Sequence
  Description of Artificial Sequence: Synthetic oligonucleotide
uccgugaguacucauuauu

SEQ ID NO: 476034 - RNA, 19 nt, Artificial Sequence
  Description of Artificial Sequence: Synthetic oligonucleotide
cuaauaaagaguccaggua

SEQ ID NO: 476035 - RNA, 19 nt, Artificial Sequence
  Description of Artificial Sequence: Synthetic oligonucleotide
uuucagugcuugcauucga

SEQ ID NO: 476036 - RNA, 19 nt, Artificial Sequence
  Description of Artificial Sequence: Synthetic oligonucleotide
uucuaacucucaugcgugc

SEQ ID NO: 476037 - RNA, 19 nt, Artificial Sequence
  Description of Artificial Sequence: Synthetic oligonucleotide
ucgaacuuuguaagagggu

SEQ ID NO: 476038 - RNA, 19 nt, Artificial Sequence
  Description of Artificial Sequence: Synthetic oligonucleotide
ccuuaaacaaagguguggg

SEQ ID NO: 476039 - RNA, 19 nt, Artificial Sequence
  Description of Artificial Sequence: Synthetic oligonucleotide
uuggucauaauaagaucuu

SEQ ID NO: 476040 - RNA, 19 nt, Artificial Sequence
  Description of Artificial Sequence: Synthetic oligonucleotide
uuguugaagcaaauacaau

SEQ ID NO: 476041 - RNA, 19 nt, Artificial Sequence
  Description of Artificial Sequence: Synthetic oligonucleotide
guagguccaaaggaaaaug

SEQ ID NO: 476042 - RNA, 19 nt, Artificial Sequence
  Description of Artificial Sequence: Synthetic oligonucleotide
uucaucgggugcauuuugu

SEQ ID NO: 476043 - RNA, 19 nt, Artificial Sequence
  Description of Artificial Sequence: Synthetic oligonucleotide
uugucacaaagguuugagu

SEQ ID NO: 476044 - RNA, 19 nt, Artificial Sequence
  Description of Artificial Sequence: Synthetic oligonucleotide
uuugagaucuaagccuacu

SEQ ID NO: 476045 - RNA, 19 nt, Artificial Sequence
  Description of Artificial Sequence: Synthetic oligonucleotide
ugcacacucuuuugugugc

SEQ ID NO: 476046 - RNA, 19 nt, Artificial Sequence
  Description of Artificial Sequence: Synthetic oligonucleotide
ucaguacucaagcuucgua

SEQ ID NO: 476047 - RNA, 19 nt, Artificial Sequence
  Description of Artificial Sequence: Synthetic oligonucleotide
agguaucccucacccacac

SEQ ID NO: 476048 - RNA, 19 nt, Artificial Sequence
  Description of Artificial Sequence: Synthetic oligonucleotide
cuauaugaggccgagugga

SEQ ID NO: 476049 - RNA, 19 nt, Artificial Sequence
  Description of Artificial Sequence: Synthetic oligonucleotide
cuuggaacagcuccuaaaa

SEQ ID NO: 476050 - RNA, 19 nt, Artificial Sequence
  Description of Artificial Sequence: Synthetic oligonucleotide
ucacucguagagcaggguu

SEQ ID NO: 476051 - RNA, 19 nt, Artificial Sequence
  Description of Artificial Sequence: Synthetic oligonucleotide
gagguuugauauacaaaac

SEQ ID NO: 476052 - RNA, 19 nt, Artificial Sequence
  Description of Artificial Sequence: Synthetic oligonucleotide
uacucaagcuucguaaaau

SEQ ID NO: 476053 - RNA, 19 nt, Artificial Sequence
  Description of Artificial Sequence: Synthetic oligonucleotide
acacacacacacacacucc

SEQ ID NO: 476054 - RNA, 19 nt, Artificial Sequence
  Description of Artificial Sequence: Synthetic oligonucleotide
aagacgcuacuacuaggau

SEQ ID NO: 476055 - RNA, 19 nt, Artificial Sequence
  Description of Artificial Sequence: Synthetic oligonucleotide
cuaagaagucccaaugucu

SEQ ID NO: 476056 - RNA, 19 nt, Artificial Sequence
  Description of Artificial Sequence: Synthetic oligonucleotide
agucuggcgacugacucag

SEQ ID NO: 476057 - RNA, 19 nt, Artificial Sequence
  Description of Artificial Sequence: Synthetic oligonucleotide
gcauaaucugcuuuccgug

SEQ ID NO: 476058 - RNA, 19 nt, Artificial Sequence
  Description of Artificial Sequence: Synthetic oligonucleotide
cuuuguaagagggugaggu

SEQ ID NO: 476059 - RNA, 19 nt, Artificial Sequence
  Description of Artificial Sequence: Synthetic oligonucleotide
uuaguaggugagcaauguu

SEQ ID NO: 476060 - RNA, 19 nt, Artificial Sequence
  Description of Artificial Sequence: Synthetic oligonucleotide
acucaagcuucguaaaaua

SEQ ID NO: 476061 - RNA, 19 nt, Artificial Sequence
  Description of Artificial Sequence: Synthetic oligonucleotide
gugaguacucauuauuuua

SEQ ID NO: 476062 - RNA, 19 nt, Artificial Sequence
  Description of Artificial Sequence: Synthetic oligonucleotide
acaauaaccggaagagcug

SEQ ID NO: 476063 - RNA, 19 nt, Artificial Sequence
  Description of Artificial Sequence: Synthetic oligonucleotide
guuaaacauuuugcugacg

SEQ ID NO: 476064 - RNA, 19 nt, Artificial Sequence
  Description of Artificial Sequence: Synthetic oligonucleotide
gaggaaauuacuaccucaa

SEQ ID NO: 476065 - RNA, 19 nt, Artificial Sequence
  Description of Artificial Sequence: Synthetic oligonucleotide
ggaucagggucaaauagcc

SEQ ID NO: 476066 - RNA, 19 nt, Artificial Sequence
  Description of Artificial Sequence: Synthetic oligonucleotide
ucuaacucucaugcgugca

SEQ ID NO: 476067 - RNA, 19 nt, Artificial Sequence
  Description of Artificial Sequence: Synthetic oligonucleotide
auagcggcaagcugcaguu

SEQ ID NO: 476068 - RNA, 19 nt, Artificial Sequence
  Description of Artificial Sequence: Synthetic oligonucleotide
cugcacauguaaguuaaac

SEQ ID NO: 476069 - RNA, 19 nt, Artificial Sequence
  Description of Artificial Sequence: Synthetic oligonucleotide
aggugacgugugcaaauag

SEQ ID NO: 476070 - RNA, 19 nt, Artificial Sequence
  Description of Artificial Sequence: Synthetic oligonucleotide
agacgcuacuacuaggauu

SEQ ID NO: 476071 - RNA, 19 nt, Artificial Sequence
  Description of Artificial Sequence: Synthetic oligonucleotide
caucgcaagacucccuaac

SEQ ID NO: 476072 - RNA, 19 nt, Artificial Sequence
  Description of Artificial Sequence: Synthetic oligonucleotide
uccaaggugacgugugcaa

SEQ ID NO: 476073 - RNA, 19 nt, Artificial Sequence
  Description of Artificial Sequence: Synthetic oligonucleotide
gugguaacaauuccccauc

SEQ ID NO: 476074 - RNA, 19 nt, Artificial Sequence
  Description of Artificial Sequence: Synthetic oligonucleotide
uugcucucaagaugaauuu

SEQ ID NO: 476075 - RNA, 19 nt, Artificial Sequence
  Description of Artificial Sequence: Synthetic oligonucleotide
cuacuacuaggauuucauc

SEQ ID NO: 476076 - RNA, 19 nt, Artificial Sequence
  Description of Artificial Sequence: Synthetic oligonucleotide
caguacucaagcuucguaa

SEQ ID NO: 476077 - RNA, 19 nt, Artificial Sequence
  Description of Artificial Sequence: Synthetic oligonucleotide
acaugagaaugacccauau

SEQ ID NO: 476078 - RNA, 19 nt, Artificial Sequence
  Description of Artificial Sequence: Synthetic oligonucleotide
aacugguucgaagcugcug

SEQ ID NO: 476079 - RNA, 19 nt, Artificial Sequence
  Description of Artificial Sequence: Synthetic oligonucleotide
cuuaaacccuggaaaaucu

SEQ ID NO: 476080 - RNA, 19 nt, Artificial Sequence
  Description of Artificial Sequence: Synthetic oligonucleotide
guacgaauggcuccagcuc

SEQ ID NO: 476081 - RNA, 19 nt, Artificial Sequence
  Description of Artificial Sequence: Synthetic oligonucleotide
cuugcauucgaacuuugua

SEQ ID NO: 476082 - RNA, 19 nt, Artificial Sequence
  Description of Artificial Sequence: Synthetic oligonucleotide
cagcuccuaaaacaaugag

SEQ ID NO: 476083 - RNA, 19 nt, Artificial Sequence
  Description of Artificial Sequence: Synthetic oligonucleotide
cucugcacauguaaguuaa

SEQ ID NO: 476084 - RNA, 19 nt, Artificial Sequence
  Description of Artificial Sequence: Synthetic oligonucleotide
gggucaucgauaccugggg

SEQ ID NO: 476085 - RNA, 19 nt, Artificial Sequence
  Description of Artificial Sequence: Synthetic oligonucleotide
uaacucucaugcgugcaca

SEQ ID NO: 476086 - RNA, 19 nt, Artificial Sequence
  Description of Artificial Sequence: Synthetic oligonucleotide
aggaaauuacuaccucaaa

SEQ ID NO: 476087 - RNA, 19 nt, Artificial Sequence
  Description of Artificial Sequence: Synthetic oligonucleotide
gcugucaucuguacgaaug

SEQ ID NO: 476088 - RNA, 19 nt, Artificial Sequence
  Description of Artificial Sequence: Synthetic oligonucleotide
aucugacaauaaccggaag

SEQ ID NO: 476089 - RNA, 19 nt, Artificial Sequence
  Description of Artificial Sequence: Synthetic oligonucleotide
agccuacuaaacugcuuug

SEQ ID NO: 476090 - RNA, 19 nt, Artificial Sequence
  Description of Artificial Sequence: Synthetic oligonucleotide
gucacaaagguuugagucu

SEQ ID NO: 476091 - RNA, 19 nt, Artificial Sequence
  Description of Artificial Sequence: Synthetic oligonucleotide
ucuuuugugugcgcacaca

SEQ ID NO: 476092 - RNA, 19 nt, Artificial Sequence
  Description of Artificial Sequence: Synthetic oligonucleotide
ucgggugcauuuuguaaaa

SEQ ID NO: 476093 - RNA, 19 nt, Artificial Sequence
  Description of Artificial Sequence: Synthetic oligonucleotide
uaagccuacuaaacugcuu

SEQ ID NO: 476094 - RNA, 19 nt, Artificial Sequence
  Description of Artificial Sequence: Synthetic oligonucleotide
uuccacaccgcaugauccu

SEQ ID NO: 476095 - RNA, 19 nt, Artificial Sequence
  Description of Artificial Sequence: Synthetic oligonucleotide
auucacucguagagcaggg

SEQ ID NO: 476096 - RNA, 19 nt, Artificial Sequence
  Description of Artificial Sequence: Synthetic oligonucleotide
cuguacuuccuuaaacaaa

SEQ ID NO: 476097 - RNA, 19 nt, Artificial Sequence
  Description of Artificial Sequence: Synthetic oligonucleotide
gacgcuacuacuaggauuu

SEQ ID NO: 476098 - RNA, 19 nt, Artificial Sequence
  Description of Artificial Sequence: Synthetic oligonucleotide
agcuaaaacugagaagcau

SEQ ID NO: 476099 - RNA, 19 nt, Artificial Sequence
  Description of Artificial Sequence: Synthetic oligonucleotide
uaugcuccccuuccaguau

SEQ ID NO: 476100 - RNA, 19 nt, Artificial Sequence
  Description of Artificial Sequence: Synthetic oligonucleotide
ugcuuaaacccuggaaaau

SEQ ID NO: 476101 - RNA, 19 nt, Artificial Sequence
  Description of Artificial Sequence: Synthetic oligonucleotide
cacacacacacacacucca

SEQ ID NO: 476102 - RNA, 19 nt, Artificial Sequence
  Description of Artificial Sequence: Synthetic oligonucleotide
gaggcauagcuucaacucu

SEQ ID NO: 476103 - RNA, 19 nt, Artificial Sequence
  Description of Artificial Sequence: Synthetic oligonucleotide
ucaucgggugcauuuugua

SEQ ID NO: 476104 - RNA, 19 nt, Artificial Sequence
  Description of Artificial Sequence: Synthetic oligonucleotide
acgugugcaaauagaagga

SEQ ID NO: 476105 - RNA, 19 nt, Artificial Sequence
  Description of Artificial Sequence: Synthetic oligonucleotide
cacucuuuugugugcgcac

SEQ ID NO: 476106 - RNA, 19 nt, Artificial Sequence
  Description of Artificial Sequence: Synthetic oligonucleotide
ccucugaggaaauuacuac

SEQ ID NO: 476107 - RNA, 19 nt, Artificial Sequence
  Description of Artificial Sequence: Synthetic oligonucleotide
caaugcuuaaacccuggaa

SEQ ID NO: 476108 - RNA, 19 nt, Artificial Sequence
  Description of Artificial Sequence: Synthetic oligonucleotide
guaggugagcaauguucug

SEQ ID NO: 476109 - RNA, 19 nt, Artificial Sequence
  Description of Artificial Sequence: Synthetic oligonucleotide
caagacucccuaacaccac

SEQ ID NO: 476110 - RNA, 19 nt, Artificial Sequence
  Description of Artificial Sequence: Synthetic oligonucleotide
aaucggaaucugacaauaa

SEQ ID NO: 476111 - RNA, 19 nt, Artificial Sequence
  Description of Artificial Sequence: Synthetic oligonucleotide
caguccuuguaguaaggca

SEQ ID NO: 476112 - RNA, 19 nt, Artificial Sequence
  Description of Artificial Sequence: Synthetic oligonucleotide
agcuugcauaaucugcuuu

SEQ ID NO: 476113 - RNA, 19 nt, Artificial Sequence
  Description of Artificial Sequence: Synthetic oligonucleotide
gugagcaauguucuguacu

SEQ ID NO: 476114 - RNA, 19 nt, Artificial Sequence
  Description of Artificial Sequence: Synthetic oligonucleotide
ugaggccgaguggagagga

SEQ ID NO: 476115 - RNA, 19 nt, Artificial Sequence
  Description of Artificial Sequence: Synthetic oligonucleotide
gguagcucagaaacaaaac

SEQ ID NO: 476116 - RNA, 19 nt, Artificial Sequence
  Description of Artificial Sequence: Synthetic oligonucleotide
gugacgugugcaaauagaa

SEQ ID NO: 476117 - RNA, 19 nt, Artificial Sequence
  Description of Artificial Sequence: Synthetic oligonucleotide
gagucuggcgacugacuca

SEQ ID NO: 476118 - RNA, 19 nt, Artificial Sequence
  Description of Artificial Sequence: Synthetic oligonucleotide
aauuggcucuuuacuugga

SEQ ID NO: 476119 - RNA, 19 nt, Artificial Sequence
  Description of Artificial Sequence: Synthetic oligonucleotide
auaugaggccgaguggaga

SEQ ID NO: 476120 - RNA, 19 nt, Artificial Sequence
  Description of Artificial Sequence: Synthetic oligonucleotide
uggucauaauaagaucuuu

SEQ ID NO: 476121 - RNA, 19 nt, Artificial Sequence
  Description of Artificial Sequence: Synthetic oligonucleotide
acucuuuugugugcgcaca

SEQ ID NO: 476122 - RNA, 19 nt, Artificial Sequence
  Description of Artificial Sequence: Synthetic oligonucleotide
caccuugacacuagacuca

SEQ ID NO: 476123 - RNA, 19 nt, Artificial Sequence
  Description of Artificial Sequence: Synthetic oligonucleotide
ugcugacguaaguugcauc

SEQ ID NO: 476124 - RNA, 19 nt, Artificial Sequence
  Description of Artificial Sequence: Synthetic oligonucleotide
aaggugacgugugcaaaua

SEQ ID NO: 476125 - RNA, 19 nt, Artificial Sequence
  Description of Artificial Sequence: Synthetic oligonucleotide
cuucaaugcuaugcucccc

SEQ ID NO: 476126 - RNA, 19 nt, Artificial Sequence
  Description of Artificial Sequence: Synthetic oligonucleotide
uacugccccaugguuaaac

SEQ ID NO: 476127 - RNA, 19 nt, Artificial Sequence
  Description of Artificial Sequence: Synthetic oligonucleotide
guaacuuauccuggcguuc

SEQ ID NO: 476128 - RNA, 19 nt, Artificial Sequence
  Description of Artificial Sequence: Synthetic oligonucleotide
ggaacagcuccuaaaacaa

SEQ ID NO: 476129 - RNA, 19 nt, Artificial Sequence
  Description of Artificial Sequence: Synthetic oligonucleotide
gaagaagguuacauaacau

SEQ ID NO: 476130 - RNA, 19 nt, Artificial Sequence
  Description of Artificial Sequence: Synthetic oligonucleotide
acacucuuuugugugcgca

SEQ ID NO: 476131 - RNA, 19 nt, Artificial Sequence
  Description of Artificial Sequence: Synthetic oligonucleotide
aacgccgucuuugccuugu

SEQ ID NO: 476132 - RNA, 19 nt, Artificial Sequence
  Description of Artificial Sequence: Synthetic oligonucleotide
gcugacguaaguugcaucu

SEQ ID NO: 476133 - RNA, 19 nt, Artificial Sequence
  Description of Artificial Sequence: Synthetic oligonucleotide
uaucuauaugaggccgagu

SEQ ID NO: 476134 - RNA, 19 nt, Artificial Sequence
  Description of Artificial Sequence: Synthetic oligonucleotide
guacagaucuggauaaacu

SEQ ID NO: 476135 - RNA, 19 nt, Artificial Sequence
  Description of Artificial Sequence: Synthetic oligonucleotide
ugcccaucgcaagacuccc

SEQ ID NO: 476136 - RNA, 19 nt, Artificial Sequence
  Description of Artificial Sequence: Synthetic oligonucleotide
ugcuugcaggugcccgggg

SEQ ID NO: 476137 - RNA, 19 nt, Artificial Sequence
  Description of Artificial Sequence: Synthetic oligonucleotide
agguuuccacaccgcauga

SEQ ID NO: 476138 - RNA, 19 nt, Artificial Sequence
  Description of Artificial Sequence: Synthetic oligonucleotide
caucgggugcauuuuguaa

SEQ ID NO: 476139 - RNA, 19 nt, Artificial Sequence
  Description of Artificial Sequence: Synthetic oligonucleotide
cacacucuuuugugugcgc

SEQ ID NO: 476140 - RNA, 19 nt, Artificial Sequence
  Description of Artificial Sequence: Synthetic oligonucleotide
gccgucuuugccuugucac

SEQ ID NO: 476141 - RNA, 19 nt, Artificial Sequence
  Description of Artificial Sequence: Synthetic oligonucleotide
cuccaagagaggcauagcu

SEQ ID NO: 476142 - RNA, 19 nt, Artificial Sequence
  Description of Artificial Sequence: Synthetic oligonucleotide
gggauaauauggcagucua

SEQ ID NO: 476143 - RNA, 19 nt, Artificial Sequence
  Description of Artificial Sequence: Synthetic oligonucleotide
guuaguaggugagcaaugu

SEQ ID NO: 476144 - RNA, 19 nt, Artificial Sequence
  Description of Artificial Sequence: Synthetic oligonucleotide
ugguucgaagcugcuguac

SEQ ID NO: 476145 - RNA, 19 nt, Artificial Sequence
  Description of Artificial Sequence: Synthetic oligonucleotide
uuccgugaguacucauuau

SEQ ID NO: 476146 - RNA, 19 nt, Artificial Sequence
  Description of Artificial Sequence: Synthetic oligonucleotide
uccacaccgcaugauccug

SEQ ID NO: 476147 - RNA, 19 nt, Artificial Sequence
  Description of Artificial Sequence: Synthetic oligonucleotide
gguucgaagcugcuguaca

SEQ ID NO: 476148 - RNA, 19 nt, Artificial Sequence
  Description of Artificial Sequence: Synthetic oligonucleotide
acaauccgguccaucauau

SEQ ID NO: 476149 - RNA, 19 nt, Artificial Sequence
  Description of Artificial Sequence: Synthetic oligonucleotide
caucauauuucagucucaa

SEQ ID NO: 476150 - RNA, 19 nt, Artificial Sequence
  Description of Artificial Sequence: Synthetic oligonucleotide
gguuaguaggugagcaaug

SEQ ID NO: 476151 - RNA, 19 nt, Artificial Sequence
  Description of Artificial Sequence: Synthetic oligonucleotide
agcucugcacauguaaguu

SEQ ID NO: 476152 - RNA, 19 nt, Artificial Sequence
  Description of Artificial Sequence: Synthetic oligonucleotide
cuucguaaaauaucugcuu

SEQ ID NO: 476153 - RNA, 19 nt, Artificial Sequence
  Description of Artificial Sequence: Synthetic oligonucleotide
aaccgcaccuugacacuag

SEQ ID NO: 476154 - RNA, 19 nt, Artificial Sequence
  Description of Artificial Sequence: Synthetic oligonucleotide
cccaugguuaaacggcagg

SEQ ID NO: 476155 - RNA, 19 nt, Artificial Sequence
  Description of Artificial Sequence: Synthetic oligonucleotide
cugugguaacaauucccca

SEQ ID NO: 476156 - RNA, 19 nt, Artificial Sequence
  Description of Artificial Sequence: Synthetic oligonucleotide
agggugagguuaguaggug

SEQ ID NO: 476157 - RNA, 19 nt, Artificial Sequence
  Description of Artificial Sequence: Synthetic oligonucleotide
ggcuaggaugcacaguguc

SEQ ID NO: 476158 - RNA, 19 nt, Artificial Sequence
  Description of Artificial Sequence: Synthetic oligonucleotide
gcugcaacgccgucuuugc

SEQ ID NO: 476159 - RNA, 19 nt, Artificial Sequence
  Description of Artificial Sequence: Synthetic oligonucleotide
cucaagcuucguaaaauau

SEQ ID NO: 476160 - RNA, 19 nt, Artificial Sequence
  Description of Artificial Sequence: Synthetic oligonucleotide
cacggcacauucaguuuuc

SEQ ID NO: 476161 - RNA, 19 nt, Artificial Sequence
  Description of Artificial Sequence: Synthetic oligonucleotide
uucacucguagagcagggu

SEQ ID NO: 476162 - RNA, 19 nt, Artificial Sequence
  Description of Artificial Sequence: Synthetic oligonucleotide
cgcacacacacacacacac

SEQ ID NO: 476163 - RNA, 19 nt, Artificial Sequence
  Description of Artificial Sequence: Synthetic oligonucleotide
ugcuuuccgugaguacuca

SEQ ID NO: 476164 - RNA, 19 nt, Artificial Sequence
  Description of Artificial Sequence: Synthetic oligonucleotide
auaugagguuugauauaca

SEQ ID NO: 476165 - RNA, 19 nt, Artificial Sequence
  Description of Artificial Sequence: Synthetic oligonucleotide
cauucauucuaacucucau

SEQ ID NO: 476166 - RNA, 19 nt, Artificial Sequence
  Description of Artificial Sequence: Synthetic oligonucleotide
cagcacauucaaaucggaa

SEQ ID NO: 476167 - RNA, 19 nt, Artificial Sequence
  Description of Artificial Sequence: Synthetic oligonucleotide
ucaaugcuaugcuccccuu

SEQ ID NO: 476168 - RNA, 19 nt, Artificial Sequence
  Description of Artificial Sequence: Synthetic oligonucleotide
uaaccgcaccuugacacua

SEQ ID NO: 476169 - RNA, 19 nt, Artificial Sequence
  Description of Artificial Sequence: Synthetic oligonucleotide
augcuaugcuccccuucca

SEQ ID NO: 476170 - RNA, 19 nt, Artificial Sequence
  Description of Artificial Sequence: Synthetic oligonucleotide
cccauucacucguagagca

SEQ ID NO: 476171 - RNA, 19 nt, Artificial Sequence
  Description of Artificial Sequence: Synthetic oligonucleotide
gacccauauaauauuugau

SEQ ID NO: 476172 - RNA, 19 nt, Artificial Sequence
  Description of Artificial Sequence: Synthetic oligonucleotide
cuaagccuacuaaacugcu

SEQ ID NO: 476173 - RNA, 19 nt, Artificial Sequence
  Description of Artificial Sequence: Synthetic oligonucleotide
augaggccgaguggagagg

SEQ ID NO: 476174 - RNA, 19 nt, Artificial Sequence
  Description of Artificial Sequence: Synthetic oligonucleotide
aauaaccggaagagcuguu

SEQ ID NO: 476175 - RNA, 19 nt, Artificial Sequence
  Description of Artificial Sequence: Synthetic oligonucleotide
uugcugacguaaguugcau

SEQ ID NO: 476176 - RNA, 19 nt, Artificial Sequence
  Description of Artificial Sequence: Synthetic oligonucleotide
gacaugagaaugacccaua

SEQ ID NO: 476177 - RNA, 19 nt, Artificial Sequence
  Description of Artificial Sequence: Synthetic oligonucleotide
aguaucagagugacagcuu

SEQ ID NO: 476178 - RNA, 19 nt, Artificial Sequence
  Description of Artificial Sequence: Synthetic oligonucleotide
gcauuuuguaaaaccuuca

SEQ ID NO: 476179 - RNA, 19 nt, Artificial Sequence
  Description of Artificial Sequence: Synthetic oligonucleotide
caugauccuggaaacuggu

SEQ ID NO: 476180 - RNA, 19 nt, Artificial Sequence
  Description of Artificial Sequence: Synthetic oligonucleotide
gaggcuagcuccuguacuu

SEQ ID NO: 476181 - RNA, 19 nt, Artificial Sequence
  Description of Artificial Sequence: Synthetic oligonucleotide
gguuaaacggcaggcuuca

SEQ ID NO: 476182 - RNA, 19 nt, Artificial Sequence
  Description of Artificial Sequence: Synthetic oligonucleotide
agcugucaucuguacgaau

SEQ ID NO: 476183 - RNA, 19 nt, Artificial Sequence
  Description of Artificial Sequence: Synthetic oligonucleotide
cugacguaaguugcaucuc

SEQ ID NO: 476184 - RNA, 19 nt, Artificial Sequence
  Description of Artificial Sequence: Synthetic oligonucleotide
cauuccauaugagguuuga

SEQ ID NO: 476185 - RNA, 19 nt, Artificial Sequence
  Description of Artificial Sequence: Synthetic oligonucleotide
ggguucucccaucaugcca

SEQ ID NO: 476186 - RNA, 19 nt, Artificial Sequence
  Description of Artificial Sequence: Synthetic oligonucleotide
cugcaacgccgucuuugcc

SEQ ID NO: 476187 - RNA, 19 nt, Artificial Sequence
  Description of Artificial Sequence: Synthetic oligonucleotide
gcgugcacacucuuuugug

SEQ ID NO: 476188 - RNA, 19 nt, Artificial Sequence
  Description of Artificial Sequence: Synthetic oligonucleotide
cacaauccgguccaucaua

SEQ ID NO: 476189 - RNA, 19 nt, Artificial Sequence
  Description of Artificial Sequence: Synthetic oligonucleotide
gcagggauaauauggcagu

SEQ ID NO: 476190 - RNA, 19 nt, Artificial Sequence
  Description of Artificial Sequence: Synthetic oligonucleotide
gagguaucccucacccaca

SEQ ID NO: 476191 - RNA, 19 nt, Artificial Sequence
  Description of Artificial Sequence: Synthetic oligonucleotide
acacacacacacacacaca

SEQ ID NO: 476192 - RNA, 19 nt, Artificial Sequence
  Description of Artificial Sequence: Synthetic oligonucleotide
acacacacacacacacacu

SEQ ID NO: 476193 - RNA, 19 nt, Artificial Sequence
  Description of Artificial Sequence: Synthetic oligonucleotide
uaguggcgacugcuagcug

SEQ ID NO: 476194 - RNA, 19 nt, Artificial Sequence
  Description of Artificial Sequence: Synthetic oligonucleotide
cuguucaguacucaagcuu

SEQ ID NO: 476195 - RNA, 19 nt, Artificial Sequence
  Description of Artificial Sequence: Synthetic oligonucleotide
ucgauaccuggggauuuuc

SEQ ID NO: 476196 - RNA, 19 nt, Artificial Sequence
  Description of Artificial Sequence: Synthetic oligonucleotide
ggucaucgauaccugggga

SEQ ID NO: 476197 - RNA, 19 nt, Artificial Sequence
  Description of Artificial Sequence: Synthetic oligonucleotide
accgcaccuugacacuaga

SEQ ID NO: 476198 - RNA, 19 nt, Artificial Sequence
  Description of Artificial Sequence: Synthetic oligonucleotide
gggugagguuaguagguga

SEQ ID NO: 476199 - RNA, 19 nt, Artificial Sequence
  Description of Artificial Sequence: Synthetic oligonucleotide
uccuggaaacugguucgaa

SEQ ID NO: 476200 - RNA, 19 nt, Artificial Sequence
  Description of Artificial Sequence: Synthetic oligonucleotide
cucagacaagccagucaca

SEQ ID NO: 476201 - RNA, 19 nt, Artificial Sequence
  Description of Artificial Sequence: Synthetic oligonucleotide
gugcuugcaggugcccggg

SEQ ID NO: 476202 - RNA, 19 nt, Artificial Sequence
  Description of Artificial Sequence: Synthetic oligonucleotide
agguuugagucuggcgacu

SEQ ID NO: 476203 - RNA, 19 nt, Artificial Sequence
  Description of Artificial Sequence: Synthetic oligonucleotide
caauaaccggaagagcugu

SEQ ID NO: 476204 - RNA, 19 nt, Artificial Sequence
  Description of Artificial Sequence: Synthetic oligonucleotide
cauauucauuaaagcccaa

SEQ ID NO: 476205 - RNA, 19 nt, Artificial Sequence
  Description of Artificial Sequence: Synthetic oligonucleotide
ccucuucauuccauaugag

SEQ ID NO: 476206 - RNA, 19 nt, Artificial Sequence
  Description of Artificial Sequence: Synthetic oligonucleotide
cuuuccgugaguacucauu

SEQ ID NO: 476207 - RNA, 19 nt, Artificial Sequence
  Description of Artificial Sequence: Synthetic oligonucleotide
caaaucggaaucugacaau

SEQ ID NO: 476208 - RNA, 19 nt, Artificial Sequence
  Description of Artificial Sequence: Synthetic oligonucleotide
cugagguaucccucaccca

SEQ ID NO: 476209 - RNA, 19 nt, Artificial Sequence
  Description of Artificial Sequence: Synthetic oligonucleotide
ggaacacuaaacaauuguu

SEQ ID NO: 476210 - RNA, 19 nt, Artificial Sequence
  Description of Artificial Sequence: Synthetic oligonucleotide
guccaaggugacgugugca

SEQ ID NO: 476211 - RNA, 19 nt, Artificial Sequence
  Description of Artificial Sequence: Synthetic oligonucleotide
ccacaccgcaugauccugg

SEQ ID NO: 476212 - RNA, 19 nt, Artificial Sequence
  Description of Artificial Sequence: Synthetic oligonucleotide
gcaaauagaaggagucaaa

SEQ ID NO: 476213 - RNA, 19 nt, Artificial Sequence
  Description of Artificial Sequence: Synthetic oligonucleotide
caugguuaaacggcaggcu

SEQ ID NO: 476214 - RNA, 19 nt, Artificial Sequence
  Description of Artificial Sequence: Synthetic oligonucleotide
gcuaaaacugagaagcauu

SEQ ID NO: 476215 - RNA, 19 nt, Artificial Sequence
  Description of Artificial Sequence: Synthetic oligonucleotide
caacauaguggcgacugcu

SEQ ID NO: 476216 - RNA, 19 nt, Artificial Sequence
  Description of Artificial Sequence: Synthetic oligonucleotide
gcaaugcuuaaacccugga

SEQ ID NO: 476217 - RNA, 19 nt, Artificial Sequence
  Description of Artificial Sequence: Synthetic oligonucleotide
gcgacugacucaguuugug

SEQ ID NO: 476218 - RNA, 19 nt, Artificial Sequence
  Description of Artificial Sequence: Synthetic oligonucleotide
cgcaugauccuggaaacug

SEQ ID NO: 476219 - RNA, 19 nt, Artificial Sequence
  Description of Artificial Sequence: Synthetic oligonucleotide
ggucauaauaagaucuuuu

SEQ ID NO: 476220 - RNA, 19 nt, Artificial Sequence
  Description of Artificial Sequence: Synthetic oligonucleotide
cacaccgcaugauccugga

SEQ ID NO: 476221 - RNA, 19 nt, Artificial Sequence
  Description of Artificial Sequence: Synthetic oligonucleotide
gguuuucacucugugucaa

SEQ ID NO: 476222 - RNA, 19 nt, Artificial Sequence
  Description of Artificial Sequence: Synthetic oligonucleotide
gcuacuacuaggauuucau

SEQ ID NO: 476223 - RNA, 19 nt, Artificial Sequence
  Description of Artificial Sequence: Synthetic oligonucleotide
acgccgucuuugccuuguc

SEQ ID NO: 476224 - RNA, 19 nt, Artificial Sequence
  Description of Artificial Sequence: Synthetic oligonucleotide
acacacacacacacuccau

SEQ ID NO: 476225 - RNA, 19 nt, Artificial Sequence
  Description of Artificial Sequence: Synthetic oligonucleotide
gcucugcacauguaaguua

SEQ ID NO: 476226 - RNA, 19 nt, Artificial Sequence
  Description of Artificial Sequence: Synthetic oligonucleotide
gucaauccacaaagcagcu

SEQ ID NO: 476227 - RNA, 19 nt, Artificial Sequence
  Description of Artificial Sequence: Synthetic oligonucleotide
gcuguucaguacucaagcu

SEQ ID NO: 476228 - RNA, 19 nt, Artificial Sequence
  Description of Artificial Sequence: Synthetic oligonucleotide
acgcuacuacuaggauuuc

SEQ ID NO: 476229 - RNA, 19 nt, Artificial Sequence
  Description of Artificial Sequence: Synthetic oligonucleotide
ccaucauauuucagucuca

SEQ ID NO: 476230 - RNA, 19 nt, Artificial Sequence
  Description of Artificial Sequence: Synthetic oligonucleotide
cacacacacacacuccauu

SEQ ID NO: 476231 - RNA, 19 nt, Artificial Sequence
  Description of Artificial Sequence: Synthetic oligonucleotide
ccccaugguuaaacggcag

SEQ ID NO: 476232 - RNA, 19 nt, Artificial Sequence
  Description of Artificial Sequence: Synthetic oligonucleotide
ccauaugagguuugauaua

SEQ ID NO: 476233 - RNA, 19 nt, Artificial Sequence
  Description of Artificial Sequence: Synthetic oligonucleotide
gccugucaacauaguggcg

SEQ ID NO: 476234 - RNA, 19 nt, Artificial Sequence
  Description of Artificial Sequence: Synthetic oligonucleotide
cacaaaguggcugcagcau

SEQ ID NO: 476235 - RNA, 19 nt, Artificial Sequence
  Description of Artificial Sequence: Synthetic oligonucleotide
cugguucgaagcugcugua

SEQ ID NO: 476236 - RNA, 19 nt, Artificial Sequence
  Description of Artificial Sequence: Synthetic oligonucleotide
ugcccgggguucucccauc

SEQ ID NO: 476237 - RNA, 19 nt, Artificial Sequence
  Description of Artificial Sequence: Synthetic oligonucleotide
ccgucuuugccuugucaca

SEQ ID NO: 476238 - RNA, 19 nt, Artificial Sequence
  Description of Artificial Sequence: Synthetic oligonucleotide
caacgccgucuuugccuug

SEQ ID NO: 476239 - RNA, 19 nt, Artificial Sequence
  Description of Artificial Sequence: Synthetic oligonucleotide
guacugcugcaacgccguc

SEQ ID NO: 476240 - RNA, 19 nt, Artificial Sequence
  Description of Artificial Sequence: Synthetic oligonucleotide
cuccuaaaacaaugagguu

SEQ ID NO: 476241 - RNA, 19 nt, Artificial Sequence
  Description of Artificial Sequence: Synthetic oligonucleotide
ccgcaccuugacacuagac

SEQ ID NO: 476242 - RNA, 19 nt, Artificial Sequence
  Description of Artificial Sequence: Synthetic oligonucleotide
gguaucccucacccacaca

SEQ ID NO: 476243 - RNA, 19 nt, Artificial Sequence
  Description of Artificial Sequence: Synthetic oligonucleotide
gugcgcacacacacacaca

SEQ ID NO: 476244 - RNA, 19 nt, Artificial Sequence
  Description of Artificial Sequence: Synthetic oligonucleotide
ccgguccaucauauuucag

SEQ ID NO: 476245 - RNA, 19 nt, Artificial Sequence
  Description of Artificial Sequence: Synthetic oligonucleotide
cgcaccuugacacuagacu

SEQ ID NO: 476246 - RNA, 19 nt, Artificial Sequence
  Description of Artificial Sequence: Synthetic oligonucleotide
gccccaugguuaaacggca

SEQ ID NO: 476247 - RNA, 19 nt, Artificial Sequence
  Description of Artificial Sequence: Synthetic oligonucleotide
gcuuaucccuuuguaacau

SEQ ID NO: 476248 - RNA, 19 nt, Artificial Sequence
  Description of Artificial Sequence: Synthetic oligonucleotide
gugugcgcacacacacaca

SEQ ID NO: 476249 - RNA, 19 nt, Artificial Sequence
  Description of Artificial Sequence: Synthetic oligonucleotide
gcacacacacacacacaca

SEQ ID NO: 476250 - RNA, 19 nt, Artificial Sequence
  Description of Artificial Sequence: Synthetic oligonucleotide
gccuacuaaacugcuuugu

SEQ ID NO: 476251 - RNA, 19 nt, Artificial Sequence
  Description of Artificial Sequence: Synthetic oligonucleotide
guuaaacggcaggcuucaa

SEQ ID NO: 476252 - RNA, 19 nt, Artificial Sequence
  Description of Artificial Sequence: Synthetic oligonucleotide
ccgugaguacucauuauuu

SEQ ID NO: 476253 - RNA, 19 nt, Artificial Sequence
  Description of Artificial Sequence: Synthetic oligonucleotide
uagcggcaagcugcaguuu

SEQ ID NO: 476254 - RNA, 19 nt, Artificial Sequence
  Description of Artificial Sequence: Synthetic oligonucleotide
gcguuccugggaaccuucc

SEQ ID NO: 476255 - RNA, 19 nt, Artificial Sequence
  Description of Artificial Sequence: Synthetic oligonucleotide
ggugcccgggguucuccca

SEQ ID NO: 476256 - RNA, 19 nt, Artificial Sequence
  Description of Artificial Sequence: Synthetic oligonucleotide
guaagagggugagguuagu

SEQ ID NO: 476257 - RNA, 19 nt, Artificial Sequence
  Description of Artificial Sequence: Synthetic oligonucleotide
gcuccccuuccaguaucag

SEQ ID NO: 476258 - RNA, 19 nt, Artificial Sequence
  Description of Artificial Sequence: Synthetic oligonucleotide
gcuugcauucgaacuuugu

SEQ ID NO: 476259 - RNA, 19 nt, Artificial Sequence
  Description of Artificial Sequence: Synthetic oligonucleotide
cccaugucucguaacuuau

SEQ ID NO: 476260 - RNA, 19 nt, Artificial Sequence
  Description of Artificial Sequence: Synthetic oligonucleotide
ccacacagccauucauucu

SEQ ID NO: 476261 - RNA, 19 nt, Artificial Sequence
  Description of Artificial Sequence: Synthetic oligonucleotide
cgugaguacucauuauuuu

SEQ ID NO: 476262 - RNA, 19 nt, Artificial Sequence
  Description of Artificial Sequence: Synthetic oligonucleotide
cguaacuuauccuggcguu

SEQ ID NO: 476263 - RNA, 19 nt, Artificial Sequence
  Description of Artificial Sequence: Synthetic oligonucleotide
cgaacagacaaggcaaagu

SEQ ID NO: 476264 - RNA, 19 nt, Artificial Sequence
  Description of Artificial Sequence: Synthetic oligonucleotide
ccaucgcaagacucccuaa

SEQ ID NO: 476265 - RNA, 19 nt, Artificial Sequence
  Description of Artificial Sequence: Synthetic oligonucleotide
gcccgggguucucccauca

SEQ ID NO: 476266 - RNA, 19 nt, Artificial Sequence
  Description of Artificial Sequence: Synthetic oligonucleotide
gcgcacacacacacacaca

SEQ ID NO: 476267 - RNA, 19 nt, Artificial Sequence
  Description of Artificial Sequence: Synthetic oligonucleotide
ccgaguggagaggagauuu

SEQ ID NO: 476268 - RNA, 19 nt, Artificial Sequence
  Description of Artificial Sequence: Synthetic oligonucleotide
gcuuuccgugaguacucau

SEQ ID NO: 476269 - RNA, 19 nt, Artificial Sequence
  Description of Artificial Sequence: Synthetic oligonucleotide
gguuuccacaccgcaugau

SEQ ID NO: 476270 - RNA, 19 nt, Artificial Sequence
  Description of Artificial Sequence: Synthetic oligonucleotide
guacugccccaugguuaaa

SEQ ID NO: 476271 - RNA, 19 nt, Artificial Sequence
  Description of Artificial Sequence: Synthetic oligonucleotide
cgacugacucaguuugugu

SEQ ID NO: 476272 - RNA, 19 nt, Artificial Sequence
  Description of Artificial Sequence: Synthetic oligonucleotide
ccuaacaccacggcacauu

SEQ ID NO: 476273 - RNA, 19 nt, Artificial Sequence
  Description of Artificial Sequence: Synthetic oligonucleotide
ggcgacugacucaguuugu

SEQ ID NO: 476274 - RNA, 19 nt, Artificial Sequence
  Description of Artificial Sequence: Synthetic oligonucleotide
cgccgucuuugccuuguca

SEQ ID NO: 476275 - RNA, 19 nt, Artificial Sequence
  Description of Artificial Sequence: Synthetic oligonucleotide
gucuggcgacugacucagu

SEQ ID NO: 476276 - RNA, 19 nt, Artificial Sequence
  Description of Artificial Sequence: Synthetic oligonucleotide
cccgggguucucccaucau

SEQ ID NO: 476277 - RNA, 19 nt, Artificial Sequence
  Description of Artificial Sequence: Synthetic oligonucleotide
auaugaaucguauaaaagc

SEQ ID NO: 476278 - RNA, 19 nt, Artificial Sequence
  Description of Artificial Sequence: Synthetic oligonucleotide
acaacuaaaauuuacaauc

SEQ ID NO: 476279 - RNA, 19 nt, Artificial Sequence
  Description of Artificial Sequence: Synthetic oligonucleotide
uuaaugauuacaaagccag

SEQ ID NO: 476280 - RNA, 19 nt, Artificial Sequence
  Description of Artificial Sequence: Synthetic oligonucleotide
aauagauuagcaugguccc

SEQ ID NO: 476281 - RNA, 19 nt, Artificial Sequence
  Description of Artificial Sequence: Synthetic oligonucleotide
uguauaaaagcuccgacgg

SEQ ID NO: 476282 - RNA, 19 nt, Artificial Sequence
  Description of Artificial Sequence: Synthetic oligonucleotide
aaguaaauugcccuuuggc

SEQ ID NO: 476283 - RNA, 19 nt, Artificial Sequence
  Description of Artificial Sequence: Synthetic oligonucleotide
aauucguacaacuugacaa

SEQ ID NO: 476284 - RNA, 19 nt, Artificial Sequence
  Description of Artificial Sequence: Synthetic oligonucleotide
uguacgauagauaguaagg

SEQ ID NO: 476285 - RNA, 19 nt, Artificial Sequence
  Description of Artificial Sequence: Synthetic oligonucleotide
uuagacagcacaaugcuag

SEQ ID NO: 476286 - RNA, 19 nt, Artificial Sequence
  Description of Artificial Sequence: Synthetic oligonucleotide
uaugaaauuaccuuugggu

SEQ ID NO: 476287 - RNA, 19 nt, Artificial Sequence
  Description of Artificial Sequence: Synthetic oligonucleotide
aucaauagaagucugaagu

SEQ ID NO: 476288 - RNA, 19 nt, Artificial Sequence
  Description of Artificial Sequence: Synthetic oligonucleotide
accaauuccgacuuaagac

SEQ ID NO: 476289 - RNA, 19 nt, Artificial Sequence
  Description of Artificial Sequence: Synthetic oligonucleotide
uaugaaucguauaaaagcu

SEQ ID NO: 476290 - RNA, 19 nt, Artificial Sequence
  Description of Artificial Sequence: Synthetic oligonucleotide
augaaauuaccuuuggguc

SEQ ID NO: 476291 - RNA, 19 nt, Artificial Sequence
  Description of Artificial Sequence: Synthetic oligonucleotide
guuaaauagauuagcaugg

SEQ ID NO: 476292 - RNA, 19 nt, Artificial Sequence
  Description of Artificial Sequence: Synthetic oligonucleotide
gaaagauugggagagagag

SEQ ID NO: 476293 - RNA, 19 nt, Artificial Sequence
  Description of Artificial Sequence: Synthetic oligonucleotide
uuguauaaaagcuccgacg

SEQ ID NO: 476294 - RNA, 19 nt, Artificial Sequence
  Description of Artificial Sequence: Synthetic oligonucleotide
gagagauguauguacaacg

SEQ ID NO: 476295 - RNA, 19 nt, Artificial Sequence
  Description of Artificial Sequence: Synthetic oligonucleotide
auaaucaagucauuuugac

SEQ ID NO: 476296 - RNA, 19 nt, Artificial Sequence
  Description of Artificial Sequence: Synthetic oligonucleotide
auaaaacucaccacaagcc

SEQ ID NO: 476297 - RNA, 19 nt, Artificial Sequence
  Description of Artificial Sequence: Synthetic oligonucleotide
aauaugaaucguauaaaag

SEQ ID NO: 476298 - RNA, 19 nt, Artificial Sequence
  Description of Artificial Sequence: Synthetic oligonucleotide
aauaucccuagucagaaau

SEQ ID NO: 476299 - RNA, 19 nt, Artificial Sequence
  Description of Artificial Sequence: Synthetic oligonucleotide
ucuacuacggcucuguuaa

SEQ ID NO: 476300 - RNA, 19 nt, Artificial Sequence
  Description of Artificial Sequence: Synthetic oligonucleotide
ucaacgacaucuacuacgg

SEQ ID NO: 476301 - RNA, 19 nt, Artificial Sequence
  Description of Artificial Sequence: Synthetic oligonucleotide
auuuacuacagcucugugg

SEQ ID NO: 476302 - RNA, 19 nt, Artificial Sequence
  Description of Artificial Sequence: Synthetic oligonucleotide
uugacaaucaauagaaguc

SEQ ID NO: 476303 - RNA, 19 nt, Artificial Sequence
  Description of Artificial Sequence: Synthetic oligonucleotide
ugaugagugacucaugaga

SEQ ID NO: 476304 - RNA, 19 nt, Artificial Sequence
  Description of Artificial Sequence: Synthetic oligonucleotide
ugaaucguauaaaagcuca

SEQ ID NO: 476305 - RNA, 19 nt, Artificial Sequence
  Description of Artificial Sequence: Synthetic oligonucleotide
aaucaauagaagucugaag

SEQ ID NO: 476306 - RNA, 19 nt, Artificial Sequence
  Description of Artificial Sequence: Synthetic oligonucleotide
uaaggcauaauauaacccu

SEQ ID NO: 476307 - RNA, 19 nt, Artificial Sequence
  Description of Artificial Sequence: Synthetic oligonucleotide
aacccaacagguucuacgg

SEQ ID NO: 476308 - RNA, 19 nt, Artificial Sequence
  Description of Artificial Sequence: Synthetic oligonucleotide
aacgacaucuacuacggcu

SEQ ID NO: 476309 - RNA, 19 nt, Artificial Sequence
  Description of Artificial Sequence: Synthetic oligonucleotide
uuaguauuaugcaaauugu

SEQ ID NO: 476310 - RNA, 19 nt, Artificial Sequence
  Description of Artificial Sequence: Synthetic oligonucleotide
uuaagguugcccuuucagg

SEQ ID NO: 476311 - RNA, 19 nt, Artificial Sequence
  Description of Artificial Sequence: Synthetic oligonucleotide
cucaacgacaucuacuacg

SEQ ID NO: 476312 - RNA, 19 nt, Artificial Sequence
  Description of Artificial Sequence: Synthetic oligonucleotide
aguuagaccagauuguacu

SEQ ID NO: 476313 - RNA, 19 nt, Artificial Sequence
  Description of Artificial Sequence: Synthetic oligonucleotide
aguaaauugcccuuuggcu

SEQ ID NO: 476314 - RNA, 19 nt, Artificial Sequence
  Description of Artificial Sequence: Synthetic oligonucleotide
uguacaacgaucagaacau

SEQ ID NO: 476315 - RNA, 19 nt, Artificial Sequence
  Description of Artificial Sequence: Synthetic oligonucleotide
uacaauucguacaacuuga

SEQ ID NO: 476316 - RNA, 19 nt, Artificial Sequence
  Description of Artificial Sequence: Synthetic oligonucleotide
ugugaugagugacucauga

SEQ ID NO: 476317 - RNA, 19 nt, Artificial Sequence
  Description of Artificial Sequence: Synthetic oligonucleotide
gauugggagagagagagag

SEQ ID NO: 476318 - RNA, 19 nt, Artificial Sequence
  Description of Artificial Sequence: Synthetic oligonucleotide
gagagagagagagagagag

SEQ ID NO: 476319 - RNA, 19 nt, Artificial Sequence
  Description of Artificial Sequence: Synthetic oligonucleotide
ugccuuucuaauaaaggcc

SEQ ID NO: 476320 - RNA, 19 nt, Artificial Sequence
  Description of Artificial Sequence: Synthetic oligonucleotide
ugaaauuaccuuugggucu

SEQ ID NO: 476321 - RNA, 19 nt, Artificial Sequence
  Description of Artificial Sequence: Synthetic oligonucleotide
auaaccuacaggcagucug

SEQ ID NO: 476322 - RNA, 19 nt, Artificial Sequence
  Description of Artificial Sequence: Synthetic oligonucleotide
uaaaacucaccacaagccu

SEQ ID NO: 476323 - RNA, 19 nt, Artificial Sequence
  Description of Artificial Sequence: Synthetic oligonucleotide
guaaacgacauaugcaggc

SEQ ID NO: 476324 - RNA, 19 nt, Artificial Sequence
  Description of Artificial Sequence: Synthetic oligonucleotide
accaaauuuaagguugccc

SEQ ID NO: 476325 - RNA, 19 nt, Artificial Sequence
  Description of Artificial Sequence: Synthetic oligonucleotide
uugggagagagagagagag

SEQ ID NO: 476326 - RNA, 19 nt, Artificial Sequence
  Description of Artificial Sequence: Synthetic oligonucleotide
uuaguggaucacaauagcu

SEQ ID NO: 476327 - RNA, 19 nt, Artificial Sequence
  Description of Artificial Sequence: Synthetic oligonucleotide
aaaacuauuaggccugcua

SEQ ID NO: 476328 - RNA, 19 nt, Artificial Sequence
  Description of Artificial Sequence: Synthetic oligonucleotide
ugucaugcacccuaggaug

SEQ ID NO: 476329 - RNA, 19 nt, Artificial Sequence
  Description of Artificial Sequence: Synthetic oligonucleotide
acgaucagaacauucauaa

SEQ ID NO: 476330 - RNA, 19 nt, Artificial Sequence
  Description of Artificial Sequence: Synthetic oligonucleotide
gaauaugaaucguauaaaa

SEQ ID NO: 476331 - RNA, 19 nt, Artificial Sequence
  Description of Artificial Sequence: Synthetic oligonucleotide
uaucaagagagauguaugu

SEQ ID NO: 476332 - RNA, 19 nt, Artificial Sequence
  Description of Artificial Sequence: Synthetic oligonucleotide
gcuaauguaaucuaaauua

SEQ ID NO: 476333 - RNA, 19 nt, Artificial Sequence
  Description of Artificial Sequence: Synthetic oligonucleotide
guugcuagcugauaaaaca

SEQ ID NO: 476334 - RNA, 19 nt, Artificial Sequence
  Description of Artificial Sequence: Synthetic oligonucleotide
uugcacuauaaccuacagg

SEQ ID NO: 476335 - RNA, 19 nt, Artificial Sequence
  Description of Artificial Sequence: Synthetic oligonucleotide
aaugauuacaaagccagua

SEQ ID NO: 476336 - RNA, 19 nt, Artificial Sequence
  Description of Artificial Sequence: Synthetic oligonucleotide
cagaacggcaauaaauuag

SEQ ID NO: 476337 - RNA, 19 nt, Artificial Sequence
  Description of Artificial Sequence: Synthetic oligonucleotide
ugcuaaacugugcauuugc

SEQ ID NO: 476338 - RNA, 19 nt, Artificial Sequence
  Description of Artificial Sequence: Synthetic oligonucleotide
guacgauagauaguaaggg

SEQ ID NO: 476339 - RNA, 19 nt, Artificial Sequence
  Description of Artificial Sequence: Synthetic oligonucleotide
cacaauagaagagagagca

SEQ ID NO: 476340 - RNA, 19 nt, Artificial Sequence
  Description of Artificial Sequence: Synthetic oligonucleotide
cuaugaaauuaccuuuggg

SEQ ID NO: 476341 - RNA, 19 nt, Artificial Sequence
  Description of Artificial Sequence: Synthetic oligonucleotide
ugcccuuucaggcaagcag

SEQ ID NO: 476342 - RNA, 19 nt, Artificial Sequence
  Description of Artificial Sequence: Synthetic oligonucleotide
agauacauaucgauacagc

SEQ ID NO: 476343 - RNA, 19 nt, Artificial Sequence
  Description of Artificial Sequence: Synthetic oligonucleotide
uuuugacccaaauccagca

SEQ ID NO: 476344 - RNA, 19 nt, Artificial Sequence
  Description of Artificial Sequence: Synthetic oligonucleotide
caaucacaauagaagagag

SEQ ID NO: 476345 - RNA, 19 nt, Artificial Sequence
  Description of Artificial Sequence: Synthetic oligonucleotide
uaaauugcccuuuggcuga

SEQ ID NO: 476346 - RNA, 19 nt, Artificial Sequence
  Description of Artificial Sequence: Synthetic oligonucleotide
auuuugacccaaauccagc

SEQ ID NO: 476347 - RNA, 19 nt, Artificial Sequence
  Description of Artificial Sequence: Synthetic oligonucleotide
caaauaggaauucuccgug

SEQ ID NO: 476348 - RNA, 19 nt, Artificial Sequence
  Description of Artificial Sequence: Synthetic oligonucleotide
aaggcauaauauaacccuc

SEQ ID NO: 476349 - RNA, 19 nt, Artificial Sequence
  Description of Artificial Sequence: Synthetic oligonucleotide
ucuguaaacggcacacugu

SEQ ID NO: 476350 - RNA, 19 nt, Artificial Sequence
  Description of Artificial Sequence: Synthetic oligonucleotide
uucuacgggacuuacugac

SEQ ID NO: 476351 - RNA, 19 nt, Artificial Sequence
  Description of Artificial Sequence: Synthetic oligonucleotide
uacgauagauaguaagggu

SEQ ID NO: 476352 - RNA, 19 nt, Artificial Sequence
  Description of Artificial Sequence: Synthetic oligonucleotide
uauaaaagcuccgacggau

SEQ ID NO: 476353 - RNA, 19 nt, Artificial Sequence
  Description of Artificial Sequence: Synthetic oligonucleotide
agggauucugucaugcacc

SEQ ID NO: 476354 - RNA, 19 nt, Artificial Sequence
  Description of Artificial Sequence: Synthetic oligonucleotide
ucaggaugacucaacgaca

SEQ ID NO: 476355 - RNA, 19 nt, Artificial Sequence
  Description of Artificial Sequence: Synthetic oligonucleotide
gagagagagagagagagga

SEQ ID NO: 476356 - RNA, 19 nt, Artificial Sequence
  Description of Artificial Sequence: Synthetic oligonucleotide
  modified_base (3)..(3): a, c, u, g, unknown or other
cunaccccuucaauaaacc

SEQ ID NO: 476357 - RNA, 19 nt, Artificial Sequence
  Description of Artificial Sequence: Synthetic oligonucleotide
aaugcuaguaccgcucugu

SEQ ID NO: 476358 - RNA, 19 nt, Artificial Sequence
  Description of Artificial Sequence: Synthetic oligonucleotide
ugugucuaggcaucacucc

SEQ ID NO: 476359 - RNA, 19 nt, Artificial Sequence
  Description of Artificial Sequence: Synthetic oligonucleotide
  modified_base (2)..(2): a, c, u, g, unknown or other
unaccccuucaauaaaccc

SEQ ID NO: 476360 - RNA, 19 nt, Artificial Sequence
  Description of Artificial Sequence: Synthetic oligonucleotide
guggauacaauuauguguc

SEQ ID NO: 476361 - RNA, 19 nt, Artificial Sequence
  Description of Artificial Sequence: Synthetic oligonucleotide
caucacuccggcuagggug

SEQ ID NO: 476362 - RNA, 19 nt, Artificial Sequence
  Description of Artificial Sequence: Synthetic oligonucleotide
uaaaagcuccgacggaugu

SEQ ID NO: 476363 - RNA, 19 nt, Artificial Sequence
  Description of Artificial Sequence: Synthetic oligonucleotide
gguucuacgggacuuacug

SEQ ID NO: 476364 - RNA, 19 nt, Artificial Sequence
  Description of Artificial Sequence: Synthetic oligonucleotide
auugcacuauaaccuacag

SEQ ID NO: 476365 - RNA, 19 nt, Artificial Sequence
  Description of Artificial Sequence: Synthetic oligonucleotide
agagagagcaugaguaaac

SEQ ID NO: 476366 - RNA, 19 nt, Artificial Sequence
  Description of Artificial Sequence: Synthetic oligonucleotide
agugguugcuagcugauaa

SEQ ID NO: 476367 - RNA, 19 nt, Artificial Sequence
  Description of Artificial Sequence: Synthetic oligonucleotide
cuacggcucuguuaaauag

SEQ ID NO: 476368 - RNA, 19 nt, Artificial Sequence
  Description of Artificial Sequence: Synthetic oligonucleotide
acauaugcaggcuccuaag

SEQ ID NO: 476369 - RNA, 19 nt, Artificial Sequence
  Description of Artificial Sequence: Synthetic oligonucleotide
gacucaacgacaucuacua

SEQ ID NO: 476370 - RNA, 19 nt, Artificial Sequence
  Description of Artificial Sequence: Synthetic oligonucleotide
acaugucgccuguggaugc

SEQ ID NO: 476371 - RNA, 19 nt, Artificial Sequence
  Description of Artificial Sequence: Synthetic oligonucleotide
aaucauguggcaguauaaa

SEQ ID NO: 476372 - RNA, 19 nt, Artificial Sequence
  Description of Artificial Sequence: Synthetic oligonucleotide
acuauuaggccugcuaaug

SEQ ID NO: 476373 - RNA, 19 nt, Artificial Sequence
  Description of Artificial Sequence: Synthetic oligonucleotide
auaucaagagagauguaug

SEQ ID NO: 476374 - RNA, 19 nt, Artificial Sequence
  Description of Artificial Sequence: Synthetic oligonucleotide
auucguacaacuugacaau

SEQ ID NO: 476375 - RNA, 19 nt, Artificial Sequence
  Description of Artificial Sequence: Synthetic oligonucleotide
aagucauuuugacccaaau

SEQ ID NO: 476376 - RNA, 19 nt, Artificial Sequence
  Description of Artificial Sequence: Synthetic oligonucleotide
cauugacuaguguggauac

SEQ ID NO: 476377 - RNA, 19 nt, Artificial Sequence
  Description of Artificial Sequence: Synthetic oligonucleotide
cgauacagcacauucaacc

SEQ ID NO: 476378 - RNA, 19 nt, Artificial Sequence
  Description of Artificial Sequence: Synthetic oligonucleotide
aaacucaccacaagccuug

SEQ ID NO: 476379 - RNA, 19 nt, Artificial Sequence
  Description of Artificial Sequence: Synthetic oligonucleotide
augaaucguauaaaagcuc

SEQ ID NO: 476380 - RNA, 19 nt, Artificial Sequence
  Description of Artificial Sequence: Synthetic oligonucleotide
agagagagagaggaaaugu

SEQ ID NO: 476381 - RNA, 19 nt, Artificial Sequence
  Description of Artificial Sequence: Synthetic oligonucleotide
uugacuaguguggauacaa

SEQ ID NO: 476382 - RNA, 19 nt, Artificial Sequence
  Description of Artificial Sequence: Synthetic oligonucleotide
uacggcucuguuaaauaga

SEQ ID NO: 476383 - RNA, 19 nt, Artificial Sequence
  Description of Artificial Sequence: Synthetic oligonucleotide
ucauugacuaguguggaua

SEQ ID NO: 476384 - RNA, 19 nt, Artificial Sequence
  Description of Artificial Sequence: Synthetic oligonucleotide
aaucguauaaaagcucaua

SEQ ID NO: 476385 - RNA, 19 nt, Artificial Sequence
  Description of Artificial Sequence: Synthetic oligonucleotide
auaugaggcacagacuucu

SEQ ID NO: 476386 - RNA, 19 nt, Artificial Sequence
  Description of Artificial Sequence: Synthetic oligonucleotide
uaucccuagucagaaauaa

SEQ ID NO: 476387 - RNA, 19 nt, Artificial Sequence
  Description of Artificial Sequence: Synthetic oligonucleotide
guacaaaacugagaagccc

SEQ ID NO: 476388 - RNA, 19 nt, Artificial Sequence
  Description of Artificial Sequence: Synthetic oligonucleotide
agaacggcaauaaauuagu

SEQ ID NO: 476389 - RNA, 19 nt, Artificial Sequence
  Description of Artificial Sequence: Synthetic oligonucleotide
uuacaugucgccuguggau

SEQ ID NO: 476390 - RNA, 19 nt, Artificial Sequence
  Description of Artificial Sequence: Synthetic oligonucleotide
ucaccaauuccgacuuaag

SEQ ID NO: 476391 - RNA, 19 nt, Artificial Sequence
  Description of Artificial Sequence: Synthetic oligonucleotide
gggagagagagagagagag

SEQ ID NO: 476392 - RNA, 19 nt, Artificial Sequence
  Description of Artificial Sequence: Synthetic oligonucleotide
gacuuacugacuuuugugu

SEQ ID NO: 476393 - RNA, 19 nt, Artificial Sequence
  Description of Artificial Sequence: Synthetic oligonucleotide
agaauaugaaucguauaaa

SEQ ID NO: 476394 - RNA, 19 nt, Artificial Sequence
  Description of Artificial Sequence: Synthetic oligonucleotide
uacaugucgccuguggaug

SEQ ID NO: 476395 - RNA, 19 nt, Artificial Sequence
  Description of Artificial Sequence: Synthetic oligonucleotide
cuagcugauaaaacaucuc

SEQ ID NO: 476396 - RNA, 19 nt, Artificial Sequence
  Description of Artificial Sequence: Synthetic oligonucleotide
gcuaugaaauuaccuuugg

SEQ ID NO: 476397 - RNA, 19 nt, Artificial Sequence
  Description of Artificial Sequence: Synthetic oligonucleotide
ugcccuuuggcugaauuac

SEQ ID NO: 476398 - RNA, 19 nt, Artificial Sequence
  Description of Artificial Sequence: Synthetic oligonucleotide
ccuuaguggaucacaauag

SEQ ID NO: 476399 - RNA, 19 nt, Artificial Sequence
  Description of Artificial Sequence: Synthetic oligonucleotide
augugucuaggcaucacuc

SEQ ID NO: 476400 - RNA, 19 nt, Artificial Sequence
  Description of Artificial Sequence: Synthetic oligonucleotide
gagcuugagaucaggauga

SEQ ID NO: 476401 - RNA, 19 nt, Artificial Sequence
  Description of Artificial Sequence: Synthetic oligonucleotide
auaggaauucuccgugggu

SEQ ID NO: 476402 - RNA, 19 nt, Artificial Sequence
  Description of Artificial Sequence: Synthetic oligonucleotide
auuacaauucguacaacuu

SEQ ID NO: 476403 - RNA, 19 nt, Artificial Sequence
  Description of Artificial Sequence: Synthetic oligonucleotide
cacaaugcuaguaccgcuc

SEQ ID NO: 476404 - RNA, 19 nt, Artificial Sequence
  Description of Artificial Sequence: Synthetic oligonucleotide
gagagagagagaggaaaug

SEQ ID NO: 476405 - RNA, 19 nt, Artificial Sequence
  Description of Artificial Sequence: Synthetic oligonucleotide
uuaaaacuauuaggccugc

SEQ ID NO: 476406 - RNA, 19 nt, Artificial Sequence
  Description of Artificial Sequence: Synthetic oligonucleotide
acaaugcuaguaccgcucu

SEQ ID NO: 476407 - RNA, 19 nt, Artificial Sequence
  Description of Artificial Sequence: Synthetic oligonucleotide
ucuacgggacuuacugacu

SEQ ID NO: 476408 - RNA, 19 nt, Artificial Sequence
  Description of Artificial Sequence: Synthetic oligonucleotide
gagagagagagagaggaaa

SEQ ID NO: 476409 - RNA, 19 nt, Artificial Sequence
  Description of Artificial Sequence: Synthetic oligonucleotide
aauuaccuuugggucuuag

SEQ ID NO: 476410 - RNA, 19 nt, Artificial Sequence
  Description of Artificial Sequence: Synthetic oligonucleotide
auuaagcucuguaaggcau

SEQ ID NO: 476411 - RNA, 19 nt, Artificial Sequence
  Description of Artificial Sequence: Synthetic oligonucleotide
aggacugucaacacuuaug

SEQ ID NO: 476412 - RNA, 19 nt, Artificial Sequence
  Description of Artificial Sequence: Synthetic oligonucleotide
auucauaauugcacuauaa

SEQ ID NO: 476413 - RNA, 19 nt, Artificial Sequence
  Description of Artificial Sequence: Synthetic oligonucleotide
agcugauaaaacaucuccu

SEQ ID NO: 476414 - RNA, 19 nt, Artificial Sequence
  Description of Artificial Sequence: Synthetic oligonucleotide
acuauaaccuacaggcagu

SEQ ID NO: 476415 - RNA, 19 nt, Artificial Sequence
  Description of Artificial Sequence: Synthetic oligonucleotide
acgauagauaguaaggguu

SEQ ID NO: 476416 - RNA, 19 nt, Artificial Sequence
  Description of Artificial Sequence: Synthetic oligonucleotide
cucuacucaggaaugugca

SEQ ID NO: 476417 - RNA, 19 nt, Artificial Sequence
  Description of Artificial Sequence: Synthetic oligonucleotide
caguuagaccagauuguac

SEQ ID NO: 476418 - RNA, 19 nt, Artificial Sequence
  Description of Artificial Sequence: Synthetic oligonucleotide
cgcucuguacgauagauag

SEQ ID NO: 476419 - RNA, 19 nt, Artificial Sequence
  Description of Artificial Sequence: Synthetic oligonucleotide
cucuguacgauagauagua

SEQ ID NO: 476420 - RNA, 19 nt, Artificial Sequence
  Description of Artificial Sequence: Synthetic oligonucleotide
uuaggccugcuaauguaau

SEQ ID NO: 476421 - RNA, 19 nt, Artificial Sequence
  Description of Artificial Sequence: Synthetic oligonucleotide
cacccuaggaugagcagug

SEQ ID NO: 476422 - RNA, 19 nt, Artificial Sequence
  Description of Artificial Sequence: Synthetic oligonucleotide
ucuguacgauagauaguaa

SEQ ID NO: 476423 - RNA, 19 nt, Artificial Sequence
  Description of Artificial Sequence: Synthetic oligonucleotide
acaucuccuuaguggauca

SEQ ID NO: 476424 - RNA, 19 nt, Artificial Sequence
  Description of Artificial Sequence: Synthetic oligonucleotide
aacgaucagaacauucaua

SEQ ID NO: 476425 - RNA, 19 nt, Artificial Sequence
  Description of Artificial Sequence: Synthetic oligonucleotide
ugguugcuagcugauaaaa

SEQ ID NO: 476426 - RNA, 19 nt, Artificial Sequence
  Description of Artificial Sequence: Synthetic oligonucleotide
acccuccauuuacaaauag

SEQ ID NO: 476427 - RNA, 19 nt, Artificial Sequence
  Description of Artificial Sequence: Synthetic oligonucleotide
gaauucuccgugggugggg

SEQ ID NO: 476428 - RNA, 19 nt, Artificial Sequence
  Description of Artificial Sequence: Synthetic oligonucleotide
ugcuaguaccgcucuguac

SEQ ID NO: 476429 - RNA, 19 nt, Artificial Sequence
  Description of Artificial Sequence: Synthetic oligonucleotide
acuacggcucuguuaaaua

SEQ ID NO: 476430 - RNA, 19 nt, Artificial Sequence
  Description of Artificial Sequence: Synthetic oligonucleotide
uucauugacuaguguggau

SEQ ID NO: 476431 - RNA, 19 nt, Artificial Sequence
  Description of Artificial Sequence: Synthetic oligonucleotide
guauaaaagcuccgacgga

SEQ ID NO: 476432 - RNA, 19 nt, Artificial Sequence
  Description of Artificial Sequence: Synthetic oligonucleotide
guaaacggcacacugugau

SEQ ID NO: 476433 - RNA, 19 nt, Artificial Sequence
  Description of Artificial Sequence: Synthetic oligonucleotide
  modified_base (4)..(4): a, c, u, g, unknown or other
ccunaccccuucaauaaac

SEQ ID NO: 476434 - RNA, 19 nt, Artificial Sequence
  Description of Artificial Sequence: Synthetic oligonucleotide
agagagagagagagagagg

SEQ ID NO: 476435 - RNA, 19 nt, Artificial Sequence
  Description of Artificial Sequence: Synthetic oligonucleotide
auaaaagcuccgacggaug

SEQ ID NO: 476436 - RNA, 19 nt, Artificial Sequence
  Description of Artificial Sequence: Synthetic oligonucleotide
uggauacaauuaugugucu

SEQ ID NO: 476437 - RNA, 19 nt, Artificial Sequence
  Description of Artificial Sequence: Synthetic oligonucleotide
aggaugacucaacgacauc

SEQ ID NO: 476438 - RNA, 19 nt, Artificial Sequence
  Description of Artificial Sequence: Synthetic oligonucleotide
gaugagugacucaugagau

SEQ ID NO: 476439 - RNA, 19 nt, Artificial Sequence
  Description of Artificial Sequence: Synthetic oligonucleotide
caccaauuccgacuuaaga

SEQ ID NO: 476440 - RNA, 19 nt, Artificial Sequence
  Description of Artificial Sequence: Synthetic oligonucleotide
caauuccgacuuaagacaa

SEQ ID NO: 476441 - RNA, 19 nt, Artificial Sequence
  Description of Artificial Sequence: Synthetic oligonucleotide
acaucuacuacggcucugu

SEQ ID NO: 476442 - RNA, 19 nt, Artificial Sequence
  Description of Artificial Sequence: Synthetic oligonucleotide
aucuacuacggcucuguua

SEQ ID NO: 476443 - RNA, 19 nt, Artificial Sequence
  Description of Artificial Sequence: Synthetic oligonucleotide
acuccggcuagggugauca

SEQ ID NO: 476444 - RNA, 19 nt, Artificial Sequence
  Description of Artificial Sequence: Synthetic oligonucleotide
ccucuacucaggaaugugc

SEQ ID NO: 476445 - RNA, 19 nt, Artificial Sequence
  Description of Artificial Sequence: Synthetic oligonucleotide
ugggagagagagagagaga

SEQ ID NO: 476446 - RNA, 19 nt, Artificial Sequence
  Description of Artificial Sequence: Synthetic oligonucleotide
ucaugagaugggugcuuga

SEQ ID NO: 476447 - RNA, 19 nt, Artificial Sequence
  Description of Artificial Sequence: Synthetic oligonucleotide
uacuacggcucuguuaaau

SEQ ID NO: 476448 - RNA, 19 nt, Artificial Sequence
  Description of Artificial Sequence: Synthetic oligonucleotide
caaucauguggcaguauaa

SEQ ID NO: 476449 - RNA, 19 nt, Artificial Sequence
  Description of Artificial Sequence: Synthetic oligonucleotide
aggucagcacaccucuacu

SEQ ID NO: 476450 - RNA, 19 nt, Artificial Sequence
  Description of Artificial Sequence: Synthetic oligonucleotide
agagagagagagaggaaau

SEQ ID NO: 476451 - RNA, 19 nt, Artificial Sequence
  Description of Artificial Sequence: Synthetic oligonucleotide
cuauaaccuacaggcaguc

SEQ ID NO: 476452 - RNA, 19 nt, Artificial Sequence
  Description of Artificial Sequence: Synthetic oligonucleotide
acaguuagaccagauugua

SEQ ID NO: 476453 - RNA, 19 nt, Artificial Sequence
  Description of Artificial Sequence: Synthetic oligonucleotide
ccaguaaacgacauaugca

SEQ ID NO: 476454 - RNA, 19 nt, Artificial Sequence
  Description of Artificial Sequence: Synthetic oligonucleotide
guucuacgggacuuacuga

SEQ ID NO: 476455 - RNA, 19 nt, Artificial Sequence
  Description of Artificial Sequence: Synthetic oligonucleotide
gacggauguuguguauuug

SEQ ID NO: 476456 - RNA, 19 nt, Artificial Sequence
  Description of Artificial Sequence: Synthetic oligonucleotide
aaaagcuccgacggauguu

SEQ ID NO: 476457 - RNA, 19 nt, Artificial Sequence
  Description of Artificial Sequence: Synthetic oligonucleotide
ggcauaauauaacccucca

SEQ ID NO: 476458 - RNA, 19 nt, Artificial Sequence
  Description of Artificial Sequence: Synthetic oligonucleotide
gcuaaacugugcauuugcc

SEQ ID NO: 476459 - RNA, 19 nt, Artificial Sequence
  Description of Artificial Sequence: Synthetic oligonucleotide
gaugacucaacgacaucua

SEQ ID NO: 476460 - RNA, 19 nt, Artificial Sequence
  Description of Artificial Sequence: Synthetic oligonucleotide
caugcacccuaggaugagc

SEQ ID NO: 476461 - RNA, 19 nt, Artificial Sequence
  Description of Artificial Sequence: Synthetic oligonucleotide
aucacuccggcuaggguga

SEQ ID NO: 476462 - RNA, 19 nt, Artificial Sequence
  Description of Artificial Sequence: Synthetic oligonucleotide
auugacuaguguggauaca

SEQ ID NO: 476463 - RNA, 19 nt, Artificial Sequence
  Description of Artificial Sequence: Synthetic oligonucleotide
ggaugacucaacgacaucu

SEQ ID NO: 476464 - RNA, 19 nt, Artificial Sequence
  Description of Artificial Sequence: Synthetic oligonucleotide
gacaucuacuacggcucug

SEQ ID NO: 476465 - RNA, 19 nt, Artificial Sequence
  Description of Artificial Sequence: Synthetic oligonucleotide
ccggcuagggugaucaaug

SEQ ID NO: 476466 - RNA, 19 nt, Artificial Sequence
  Description of Artificial Sequence: Synthetic oligonucleotide
guuguguauuugcuaugaa

SEQ ID NO: 476467 - RNA, 19 nt, Artificial Sequence
  Description of Artificial Sequence: Synthetic oligonucleotide
gguugcuagcugauaaaac

SEQ ID NO: 476468 - RNA, 19 nt, Artificial Sequence
  Description of Artificial Sequence: Synthetic oligonucleotide
cuaguaccgcucuguacga

SEQ ID NO: 476469 - RNA, 19 nt, Artificial Sequence
  Description of Artificial Sequence: Synthetic oligonucleotide
gaaauuaccuuugggucuu

SEQ ID NO: 476470 - RNA, 19 nt, Artificial Sequence
  Description of Artificial Sequence: Synthetic oligonucleotide
caacgacaucuacuacggc

SEQ ID NO: 476471 - RNA, 19 nt, Artificial Sequence
  Description of Artificial Sequence: Synthetic oligonucleotide
agagagagagagagagaga

SEQ ID NO: 476472 - RNA, 19 nt, Artificial Sequence
  Description of Artificial Sequence: Synthetic oligonucleotide
guaggccaucaaauguuac

SEQ ID NO: 476473 - RNA, 19 nt, Artificial Sequence
  Description of Artificial Sequence: Synthetic oligonucleotide
gucaugcacccuaggauga

SEQ ID NO: 476474 - RNA, 19 nt, Artificial Sequence
  Description of Artificial Sequence: Synthetic oligonucleotide
uccggcuagggugaucaau

SEQ ID NO: 476475 - RNA, 19 nt, Artificial Sequence
  Description of Artificial Sequence: Synthetic oligonucleotide
auugggagagagagagaga

SEQ ID NO: 476476 - RNA, 19 nt, Artificial Sequence
  Description of Artificial Sequence: Synthetic oligonucleotide
uacgggacuuacugacuuu

SEQ ID NO: 476477 - RNA, 19 nt, Artificial Sequence
  Description of Artificial Sequence: Synthetic oligonucleotide
gcuagcugauaaaacaucu

SEQ ID NO: 476478 - RNA, 19 nt, Artificial Sequence
  Description of Artificial Sequence: Synthetic oligonucleotide
augcuaguaccgcucugua

SEQ ID NO: 476479 - RNA, 19 nt, Artificial Sequence
  Description of Artificial Sequence: Synthetic oligonucleotide
cugucaugcacccuaggau

SEQ ID NO: 476480 - RNA, 19 nt, Artificial Sequence
  Description of Artificial Sequence: Synthetic oligonucleotide
guugcccuuucaggcaagc

SEQ ID NO: 476481 - RNA, 19 nt, Artificial Sequence
  Description of Artificial Sequence: Synthetic oligonucleotide
  modified_base (7)..(7): a, c, u, g, unknown or other
gccccunaccccuucaaua

SEQ ID NO: 476482 - RNA, 19 nt, Artificial Sequence
  Description of Artificial Sequence: Synthetic oligonucleotide
acgggacuuacugacuuuu

SEQ ID NO: 476483 - RNA, 19 nt, Artificial Sequence
  Description of Artificial Sequence: Synthetic oligonucleotide
agagagagagagagaggaa

SEQ ID NO: 476484 - RNA, 19 nt, Artificial Sequence
  Description of Artificial Sequence: Synthetic oligonucleotide
acgacauaugcaggcuccu

SEQ ID NO: 476485 - RNA, 19 nt, Artificial Sequence
  Description of Artificial Sequence: Synthetic oligonucleotide
acauaucgauacagcacau

SEQ ID NO: 476486 - RNA, 19 nt, Artificial Sequence
  Description of Artificial Sequence: Synthetic oligonucleotide
gaaucguauaaaagcucau

SEQ ID NO: 476487 - RNA, 19 nt, Artificial Sequence
  Description of Artificial Sequence: Synthetic oligonucleotide
aaauugcccuuuggcugaa

SEQ ID NO: 476488 - RNA, 19 nt, Artificial Sequence
  Description of Artificial Sequence: Synthetic oligonucleotide
aucccuagucagaaauaaa

SEQ ID NO: 476489 - RNA, 19 nt, Artificial Sequence
  Description of Artificial Sequence: Synthetic oligonucleotide
caacgaucagaacauucau

SEQ ID NO: 476490 - RNA, 19 nt, Artificial Sequence
  Description of Artificial Sequence: Synthetic oligonucleotide
gcuagggugaucaauguuu

SEQ ID NO: 476491 - RNA, 19 nt, Artificial Sequence
  Description of Artificial Sequence: Synthetic oligonucleotide
  modified_base (13)..(13): a, c, u, g, unknown or other
cuucccgccccunaccccu

SEQ ID NO: 476492 - RNA, 19 nt, Artificial Sequence
  Description of Artificial Sequence: Synthetic oligonucleotide
agauugggagagagagaga

SEQ ID NO: 476493 - RNA, 19 nt, Artificial Sequence
  Description of Artificial Sequence: Synthetic oligonucleotide
aagcuccgacggauguugu

SEQ ID NO: 476494 - RNA, 19 nt, Artificial Sequence
  Description of Artificial Sequence: Synthetic oligonucleotide
agguucuacgggacuuacu

SEQ ID NO: 476495 - RNA, 19 nt, Artificial Sequence
  Description of Artificial Sequence: Synthetic oligonucleotide
cuacgggacuuacugacuu

SEQ ID NO: 476496 - RNA, 19 nt, Artificial Sequence
  Description of Artificial Sequence: Synthetic oligonucleotide
  modified_base (6)..(6): a, c, u, g, unknown or other
ccccunaccccuucaauaa

SEQ ID NO: 476497 - RNA, 19 nt, Artificial Sequence
  Description of Artificial Sequence: Synthetic oligonucleotide
gcacuauaaccuacaggca

SEQ ID NO: 476498 - RNA, 19 nt, Artificial Sequence
  Description of Artificial Sequence: Synthetic oligonucleotide
aauugcccuuuggcugaau

SEQ ID NO: 476499 - RNA, 19 nt, Artificial Sequence
  Description of Artificial Sequence: Synthetic oligonucleotide
ggagagagagagagagaga

SEQ ID NO: 476500 - RNA, 19 nt, Artificial Sequence
  Description of Artificial Sequence: Synthetic oligonucleotide
cuccgacggauguugugua

SEQ ID NO: 476501 - RNA, 19 nt, Artificial Sequence
  Description of Artificial Sequence: Synthetic oligonucleotide
acccuaggaugagcaguga

SEQ ID NO: 476502 - RNA, 19 nt, Artificial Sequence
  Description of Artificial Sequence: Synthetic oligonucleotide
ggcacaguuagaccagauu

SEQ ID NO: 476503 - RNA, 19 nt, Artificial Sequence
  Description of Artificial Sequence: Synthetic oligonucleotide
gcuccgacggauguugugu

SEQ ID NO: 476504 - RNA, 19 nt, Artificial Sequence
  Description of Artificial Sequence: Synthetic oligonucleotide
cgauagauaguaaggguuu

SEQ ID NO: 476505 - RNA, 19 nt, Artificial Sequence
  Description of Artificial Sequence: Synthetic oligonucleotide
cgggacuuacugacuuuug

SEQ ID NO: 476506 - RNA, 19 nt, Artificial Sequence
  Description of Artificial Sequence: Synthetic oligonucleotide
ggcuagggugaucaauguu

SEQ ID NO: 476507 - RNA, 19 nt, Artificial Sequence
  Description of Artificial Sequence: Synthetic oligonucleotide
  modified_base (5)..(5): a, c, u, g, unknown or other
cccunaccccuucaauaaa

SEQ ID NO: 476508 - RNA, 19 nt, Artificial Sequence
  Description of Artificial Sequence: Synthetic oligonucleotide
gcaucacuccggcuagggu

SEQ ID NO: 476509 - RNA, 19 nt, Artificial Sequence
  Description of Artificial Sequence: Synthetic oligonucleotide
gcucuguacgauagauagu

SEQ ID NO: 476510 - RNA, 19 nt, Artificial Sequence
  Description of Artificial Sequence: Synthetic oligonucleotide
caucuacuacggcucuguu

SEQ ID NO: 476511 - RNA, 19 nt, Artificial Sequence
  Description of Artificial Sequence: Synthetic oligonucleotide
ccgcucuguacgauagaua

SEQ ID NO: 476512 - RNA, 19 nt, Artificial Sequence
  Description of Artificial Sequence: Synthetic oligonucleotide
cuccggcuagggugaucaa

SEQ ID NO: 476513 - RNA, 19 nt, Artificial Sequence
  Description of Artificial Sequence: Synthetic oligonucleotide
  modified_base (9)..(9): a, c, u, g, unknown or other
ccgccccunaccccuucaa

SEQ ID NO: 476514 - RNA, 19 nt, Artificial Sequence
  Description of Artificial Sequence: Synthetic oligonucleotide
cgacaucuacuacggcucu

SEQ ID NO: 476515 - RNA, 19 nt, Artificial Sequence
  Description of Artificial Sequence: Synthetic oligonucleotide
cggcuagggugaucaaugu

SEQ ID NO: 476516 - RNA, 19 nt, Artificial Sequence
  Description of Artificial Sequence: Synthetic oligonucleotide
ccgacggauguuguguauu

SEQ ID NO: 476517 - RNA, 19 nt, Artificial Sequence
  Description of Artificial Sequence: Synthetic oligonucleotide
  modified_base (1)..(1): a, c, u, g, unknown or other
naccccuucaauaaaccca

SEQ ID NO: 476518 - RNA, 19 nt, Artificial Sequence
  Description of Artificial Sequence: Synthetic oligonucleotide
aaauagaaccaacaaugcc

SEQ ID NO: 476519 - RNA, 19 nt, Artificial Sequence
  Description of Artificial Sequence: Synthetic oligonucleotide
uuaguuauucccuauaccu

SEQ ID NO: 476520 - RNA, 19 nt, Artificial Sequence
  Description of Artificial Sequence: Synthetic oligonucleotide
augaaaacgcagcugaggc

SEQ ID NO: 476521 - RNA, 19 nt, Artificial Sequence
  Description of Artificial Sequence: Synthetic oligonucleotide
ugaaauaaucacaaaguga

SEQ ID NO: 476522 - RNA, 19 nt, Artificial Sequence
  Description of Artificial Sequence: Synthetic oligonucleotide
ucuaaagugaaauaaucac

SEQ ID NO: 476523 - RNA, 19 nt, Artificial Sequence
  Description of Artificial Sequence: Synthetic oligonucleotide
aauagaaccaacaaugcca

SEQ ID NO: 476524 - RNA, 19 nt, Artificial Sequence
  Description of Artificial Sequence: Synthetic oligonucleotide
ucuaacauuaucuuguguc

SEQ ID NO: 476525 - RNA, 19 nt, Artificial Sequence
  Description of Artificial Sequence: Synthetic oligonucleotide
guuuaaucacuuuaaaacc

SEQ ID NO: 476526 - RNA, 19 nt, Artificial Sequence
  Description of Artificial Sequence: Synthetic oligonucleotide
acaagagugaacuugguca

SEQ ID NO: 476527 - RNA, 19 nt, Artificial Sequence
  Description of Artificial Sequence: Synthetic oligonucleotide
guuagaaagggcuuggugc

SEQ ID NO: 476528 - RNA, 19 nt, Artificial Sequence
  Description of Artificial Sequence: Synthetic oligonucleotide
ucuuacaaaaccagccagg

SEQ ID NO: 476529 - RNA, 19 nt, Artificial Sequence
  Description of Artificial Sequence: Synthetic oligonucleotide
uauagcacaagagugaacu

SEQ ID NO: 476530 - RNA, 19 nt, Artificial Sequence
  Description of Artificial Sequence: Synthetic oligonucleotide
uuucaggagguguagagag

SEQ ID NO: 476531 - RNA, 19 nt, Artificial Sequence
  Description of Artificial Sequence: Synthetic oligonucleotide
uggucaaggacccagagaa

SEQ ID NO: 476532 - RNA, 19 nt, Artificial Sequence
  Description of Artificial Sequence: Synthetic oligonucleotide
aaugaaaacgcagcugagg

SEQ ID NO: 476533 - RNA, 19 nt, Artificial Sequence
  Description of Artificial Sequence: Synthetic oligonucleotide
ggaagcuaaagccugagcg

SEQ ID NO: 476534 - RNA, 19 nt, Artificial Sequence
  Description of Artificial Sequence: Synthetic oligonucleotide
gaaaacgcagcugaggccg

SEQ ID NO: 476535 - RNA, 19 nt, Artificial Sequence
  Description of Artificial Sequence: Synthetic oligonucleotide
aaaaccagccaggauggcc

SEQ ID NO: 476536 - RNA, 19 nt, Artificial Sequence
  Description of Artificial Sequence: Synthetic oligonucleotide
gacugauuguccuaauggg

SEQ ID NO: 476537 - RNA, 19 nt, Artificial Sequence
  Description of Artificial Sequence: Synthetic oligonucleotide
agagcuuuagcuuggcccg

SEQ ID NO: 476538 - RNA, 19 nt, Artificial Sequence
  Description of Artificial Sequence: Synthetic oligonucleotide
auaaaggcgguccucucgc

SEQ ID NO: 476539 - RNA, 19 nt, Artificial Sequence
  Description of Artificial Sequence: Synthetic oligonucleotide
ugugccauauagcacaaga

SEQ ID NO: 476540 - RNA, 19 nt, Artificial Sequence
  Description of Artificial Sequence: Synthetic oligonucleotide
agcacaaugaaaacgcagc

SEQ ID NO: 476541 - RNA, 19 nt, Artificial Sequence
  Description of Artificial Sequence: Synthetic oligonucleotide
gugaaauaaucacaaagug

SEQ ID NO: 476542 - RNA, 19 nt, Artificial Sequence
  Description of Artificial Sequence: Synthetic oligonucleotide
uaucuuacaaaaccagcca

SEQ ID NO: 476543 - RNA, 19 nt, Artificial Sequence
  Description of Artificial Sequence: Synthetic oligonucleotide
agggcauguaaguaugggc

SEQ ID NO: 476544 - RNA, 19 nt, Artificial Sequence
  Description of Artificial Sequence: Synthetic oligonucleotide
gauaaaggcgguccucucg

SEQ ID NO: 476545 - RNA, 19 nt, Artificial Sequence
  Description of Artificial Sequence: Synthetic oligonucleotide
acaaccgcagcuuuugcgg

SEQ ID NO: 476546 - RNA, 19 nt, Artificial Sequence
  Description of Artificial Sequence: Synthetic oligonucleotide
ugccauauagcacaagagu

SEQ ID NO: 476547 - RNA, 19 nt, Artificial Sequence
  Description of Artificial Sequence: Synthetic oligonucleotide
gaucaaauugauggggugg

SEQ ID NO: 476548 - RNA, 19 nt, Artificial Sequence
  Description of Artificial Sequence: Synthetic oligonucleotide
guaaguaugggcacgcugg

SEQ ID NO: 476549 - RNA, 19 nt, Artificial Sequence
  Description of Artificial Sequence: Synthetic oligonucleotide
ucaaagggcgcucuggucu

SEQ ID NO: 476550 - RNA, 19 nt, Artificial Sequence
  Description of Artificial Sequence: Synthetic oligonucleotide
aguuauucccuauaccuca

SEQ ID NO: 476551 - RNA, 19 nt, Artificial Sequence
  Description of Artificial Sequence: Synthetic oligonucleotide
uguaucgaggacuuggggu

SEQ ID NO: 476552 - RNA, 19 nt, Artificial Sequence
  Description of Artificial Sequence: Synthetic oligonucleotide
aaugguccagcugcuaccc

SEQ ID NO: 476553 - RNA, 19 nt, Artificial Sequence
  Description of Artificial Sequence: Synthetic oligonucleotide
uaucuuguguccauuaaau

SEQ ID NO: 476554 - RNA, 19 nt, Artificial Sequence
  Description of Artificial Sequence: Synthetic oligonucleotide
acccauaagcccuuggcac

SEQ ID NO: 476555 - RNA, 19 nt, Artificial Sequence
  Description of Artificial Sequence: Synthetic oligonucleotide
guaucuuacaaaaccagcc

SEQ ID NO: 476556 - RNA, 19 nt, Artificial Sequence
  Description of Artificial Sequence: Synthetic oligonucleotide
uguguaucgaggacuuggg

SEQ ID NO: 476557 - RNA, 19 nt, Artificial Sequence
  Description of Artificial Sequence: Synthetic oligonucleotide
cagagcuuuagcuuggccc

SEQ ID NO: 476558 - RNA, 19 nt, Artificial Sequence
  Description of Artificial Sequence: Synthetic oligonucleotide
uguuagaaagggcuuggug

SEQ ID NO: 476559 - RNA, 19 nt, Artificial Sequence
  Description of Artificial Sequence: Synthetic oligonucleotide
aaaggcgguccucucgccc

SEQ ID NO: 476560 - RNA, 19 nt, Artificial Sequence
  Description of Artificial Sequence: Synthetic oligonucleotide
uuaaucacuuuaaaaccuc

SEQ ID NO: 476561 - RNA, 19 nt, Artificial Sequence
  Description of Artificial Sequence: Synthetic oligonucleotide
caucuaaagugaaauaauc

SEQ ID NO: 476562 - RNA, 19 nt, Artificial Sequence
  Description of Artificial Sequence: Synthetic oligonucleotide
cuuaguuauucccuauacc

SEQ ID NO: 476563 - RNA, 19 nt, Artificial Sequence
  Description of Artificial Sequence: Synthetic oligonucleotide
uucaaguaccuccuggcca

SEQ ID NO: 476564 - RNA, 19 nt, Artificial Sequence
  Description of Artificial Sequence: Synthetic oligonucleotide
uagucugcacguuuaauca

SEQ ID NO: 476565 - RNA, 19 nt, Artificial Sequence
  Description of Artificial Sequence: Synthetic oligonucleotide
ucuucaaguaccuccuggc

SEQ ID NO: 476566 - RNA, 19 nt, Artificial Sequence
  Description of Artificial Sequence: Synthetic oligonucleotide
uguaaguaugggcacgcug

SEQ ID NO: 476567 - RNA, 19 nt, Artificial Sequence
  Description of Artificial Sequence: Synthetic oligonucleotide
uucuggugcagugagaagc

SEQ ID NO: 476568 - RNA, 19 nt, Artificial Sequence
  Description of Artificial Sequence: Synthetic oligonucleotide
uuggaagcugcccuaaaga

SEQ ID NO: 476569 - RNA, 19 nt, Artificial Sequence
  Description of Artificial Sequence: Synthetic oligonucleotide
auggggcuuaguuauuccc

SEQ ID NO: 476570 - RNA, 19 nt, Artificial Sequence
  Description of Artificial Sequence: Synthetic oligonucleotide
ugauuguccuaaugggagg

SEQ ID NO: 476571 - RNA, 19 nt, Artificial Sequence
  Description of Artificial Sequence: Synthetic oligonucleotide
uacaaccgcagcuuuugcg

SEQ ID NO: 476572 - RNA, 19 nt, Artificial Sequence
  Description of Artificial Sequence: Synthetic oligonucleotide
aaaaccggggcucccaggu

SEQ ID NO: 476573 - RNA, 19 nt, Artificial Sequence
  Description of Artificial Sequence: Synthetic oligonucleotide
ucgcacaccacacaggccu

SEQ ID NO: 476574 - RNA, 19 nt, Artificial Sequence
  Description of Artificial Sequence: Synthetic oligonucleotide
aaguaggcuggguaccagg

SEQ ID NO: 476575 - RNA, 19 nt, Artificial Sequence
  Description of Artificial Sequence: Synthetic oligonucleotide
gacgugaggguuuugcagc

SEQ ID NO: 476576 - RNA, 19 nt, Artificial Sequence
  Description of Artificial Sequence: Synthetic oligonucleotide
ucuaggacccauucgccag

SEQ ID NO: 476577 - RNA, 19 nt, Artificial Sequence
  Description of Artificial Sequence: Synthetic oligonucleotide
aaaccucuaacauuaucuu

SEQ ID NO: 476578 - RNA, 19 nt, Artificial Sequence
  Description of Artificial Sequence: Synthetic oligonucleotide
gauuguccuaaugggaggg

SEQ ID NO: 476579 - RNA, 19 nt, Artificial Sequence
  Description of Artificial Sequence: Synthetic oligonucleotide
aaaaggcacaucagaagag

SEQ ID NO: 476580 - RNA, 19 nt, Artificial Sequence
  Description of Artificial Sequence: Synthetic oligonucleotide
uaggguccaaaccuagucc

SEQ ID NO: 476581 - RNA, 19 nt, Artificial Sequence
  Description of Artificial Sequence: Synthetic oligonucleotide
aaaggcugccccucuucac

SEQ ID NO: 476582 - RNA, 19 nt, Artificial Sequence
  Description of Artificial Sequence: Synthetic oligonucleotide
aucacugugcaccagccca

SEQ ID NO: 476583 - RNA, 19 nt, Artificial Sequence
  Description of Artificial Sequence: Synthetic oligonucleotide
guaucgaggacuuggggug

SEQ ID NO: 476584 - RNA, 19 nt, Artificial Sequence
  Description of Artificial Sequence: Synthetic oligonucleotide
uuugucgggagcagguuug

SEQ ID NO: 476585 - RNA, 19 nt, Artificial Sequence
  Description of Artificial Sequence: Synthetic oligonucleotide
ugucagucuacccuccuac

SEQ ID NO: 476586 - RNA, 19 nt, Artificial Sequence
  Description of Artificial Sequence: Synthetic oligonucleotide
aaagugaaauaaucacaaa

SEQ ID NO: 476587 - RNA, 19 nt, Artificial Sequence
  Description of Artificial Sequence: Synthetic oligonucleotide
agcaucuaaagugaaauaa

SEQ ID NO: 476588 - RNA, 19 nt, Artificial Sequence
  Description of Artificial Sequence: Synthetic oligonucleotide
ugguauuuucaaucucuag

SEQ ID NO: 476589 - RNA, 19 nt, Artificial Sequence
  Description of Artificial Sequence: Synthetic oligonucleotide
agagugaacuuggucagcg

SEQ ID NO: 476590 - RNA, 19 nt, Artificial Sequence
  Description of Artificial Sequence: Synthetic oligonucleotide
augcaaaagcccuuggaga

SEQ ID NO: 476591 - RNA, 19 nt, Artificial Sequence
  Description of Artificial Sequence: Synthetic oligonucleotide
cuccccggaagcuaaagcc

SEQ ID NO: 476592 - RNA, 19 nt, Artificial Sequence
  Description of Artificial Sequence: Synthetic oligonucleotide
auagaaccaacaaugccag

SEQ ID NO: 476593 - RNA, 19 nt, Artificial Sequence
  Description of Artificial Sequence: Synthetic oligonucleotide
agucugcacguuuaaucac

SEQ ID NO: 476594 - RNA, 19 nt, Artificial Sequence
  Description of Artificial Sequence: Synthetic oligonucleotide
acguuuaaucacuuuaaaa

SEQ ID NO: 476595 - RNA, 19 nt, Artificial Sequence
  Description of Artificial Sequence: Synthetic oligonucleotide
ucagucuacccuccuacca

SEQ ID NO: 476596 - RNA, 19 nt, Artificial Sequence
  Description of Artificial Sequence: Synthetic oligonucleotide
uuauucccuauaccucagg

SEQ ID NO: 476597 - RNA, 19 nt, Artificial Sequence
  Description of Artificial Sequence: Synthetic oligonucleotide
ugaaaacgcagcugaggcc

SEQ ID NO: 476598 - RNA, 19 nt, Artificial Sequence
  Description of Artificial Sequence: Synthetic oligonucleotide
ugggguaggaagcaguguc

SEQ ID NO: 476599 - RNA, 19 nt, Artificial Sequence
  Description of Artificial Sequence: Synthetic oligonucleotide
agggaucaaauugaugggg

SEQ ID NO: 476600 - RNA, 19 nt, Artificial Sequence
  Description of Artificial Sequence: Synthetic oligonucleotide
ucgggagcagguuugcucc

SEQ ID NO: 476601 - RNA, 19 nt, Artificial Sequence
  Description of Artificial Sequence: Synthetic oligonucleotide
cacaugaggcaugacaggg

SEQ ID NO: 476602 - RNA, 19 nt, Artificial Sequence
  Description of Artificial Sequence: Synthetic oligonucleotide
guguguaucgaggacuugg

SEQ ID NO: 476603 - RNA, 19 nt, Artificial Sequence
  Description of Artificial Sequence: Synthetic oligonucleotide
caugaggcaugacagggag

SEQ ID NO: 476604 - RNA, 19 nt, Artificial Sequence
  Description of Artificial Sequence: Synthetic oligonucleotide
ugagaagccuuccucgcac

SEQ ID NO: 476605 - RNA, 19 nt, Artificial Sequence
  Description of Artificial Sequence: Synthetic oligonucleotide
gagggugccauagaggaug

SEQ ID NO: 476606 - RNA, 19 nt, Artificial Sequence
  Description of Artificial Sequence: Synthetic oligonucleotide
uuugcggaggcucauccau

SEQ ID NO: 476607 - RNA, 19 nt, Artificial Sequence
  Description of Artificial Sequence: Synthetic oligonucleotide
aguguuagaaagggcuugg

SEQ ID NO: 476608 - RNA, 19 nt, Artificial Sequence
  Description of Artificial Sequence: Synthetic oligonucleotide
aguaugggcacgcuggaaa

SEQ ID NO: 476609 - RNA, 19 nt, Artificial Sequence
  Description of Artificial Sequence: Synthetic oligonucleotide
acaaccccauuugaaacac

SEQ ID NO: 476610 - RNA, 19 nt, Artificial Sequence
  Description of Artificial Sequence: Synthetic oligonucleotide
gaggccacgguccauggug

SEQ ID NO: 476611 - RNA, 19 nt, Artificial Sequence
  Description of Artificial Sequence: Synthetic oligonucleotide
cuuuugcggaggcucaucc

SEQ ID NO: 476612 - RNA, 19 nt, Artificial Sequence
  Description of Artificial Sequence: Synthetic oligonucleotide
cuuggcacaaccccauuug

SEQ ID NO: 476613 - RNA, 19 nt, Artificial Sequence
  Description of Artificial Sequence: Synthetic oligonucleotide
cuuggaagcugcccuaaag

SEQ ID NO: 476614 - RNA, 19 nt, Artificial Sequence
  Description of Artificial Sequence: Synthetic oligonucleotide
agugccaacagcccaggca

SEQ ID NO: 476615 - RNA, 19 nt, Artificial Sequence
  Description of Artificial Sequence: Synthetic oligonucleotide
agcccaguaucuuacaaaa

SEQ ID NO: 476616 - RNA, 19 nt, Artificial Sequence
  Description of Artificial Sequence: Synthetic oligonucleotide
uguccuaaugggaggggug

SEQ ID NO: 476617 - RNA, 19 nt, Artificial Sequence
  Description of Artificial Sequence: Synthetic oligonucleotide
guaggaagcagugucugcc

SEQ ID NO: 476618 - RNA, 19 nt, Artificial Sequence
  Description of Artificial Sequence: Synthetic oligonucleotide
cagcacaaugaaaacgcag

SEQ ID NO: 476619 - RNA, 19 nt, Artificial Sequence
  Description of Artificial Sequence: Synthetic oligonucleotide
cuucaaguaccuccuggcc

SEQ ID NO: 476620 - RNA, 19 nt, Artificial Sequence
  Description of Artificial Sequence: Synthetic oligonucleotide
auuaucuuguguccauuaa

SEQ ID NO: 476621 - RNA, 19 nt, Artificial Sequence
  Description of Artificial Sequence: Synthetic oligonucleotide
uggggcuuaguuauucccu

SEQ ID NO: 476622 - RNA, 19 nt, Artificial Sequence
  Description of Artificial Sequence: Synthetic oligonucleotide
caaggacccagagaaaggc

SEQ ID NO: 476623 - RNA, 19 nt, Artificial Sequence
  Description of Artificial Sequence: Synthetic oligonucleotide
cuacccuccuaccaugacc

SEQ ID NO: 476624 - RNA, 19 nt, Artificial Sequence
  Description of Artificial Sequence: Synthetic oligonucleotide
guaggaaacgaggccacgg

SEQ ID NO: 476625 - RNA, 19 nt, Artificial Sequence
  Description of Artificial Sequence: Synthetic oligonucleotide
gacaccagcauaaggcccc

SEQ ID NO: 476626 - RNA, 19 nt, Artificial Sequence
  Description of Artificial Sequence: Synthetic oligonucleotide
gcaaaaggcacaucagaag

SEQ ID NO: 476627 - RNA, 19 nt, Artificial Sequence
  Description of Artificial Sequence: Synthetic oligonucleotide
uaaguaugggcacgcugga

SEQ ID NO: 476628 - RNA, 19 nt, Artificial Sequence
  Description of Artificial Sequence: Synthetic oligonucleotide
gaggaagggaucaaauuga

SEQ ID NO: 476629 - RNA, 19 nt, Artificial Sequence
  Description of Artificial Sequence: Synthetic oligonucleotide
agaagccuuccucgcacac

SEQ ID NO: 476630 - RNA, 19 nt, Artificial Sequence
  Description of Artificial Sequence: Synthetic oligonucleotide
gguuugcauagucugcacg

SEQ ID NO: 476631 - RNA, 19 nt, Artificial Sequence
  Description of Artificial Sequence: Synthetic oligonucleotide
cugagggcauguaaguaug

SEQ ID NO: 476632 - RNA, 19 nt, Artificial Sequence
  Description of Artificial Sequence: Synthetic oligonucleotide
cagaugucagucuacccuc

SEQ ID NO: 476633 - RNA, 19 nt, Artificial Sequence
  Description of Artificial Sequence: Synthetic oligonucleotide
agccgcugcuuucaggagg

SEQ ID NO: 476634 - RNA, 19 nt, Artificial Sequence
  Description of Artificial Sequence: Synthetic oligonucleotide
uuguaggaaacgaggccac

SEQ ID NO: 476635 - RNA, 19 nt, Artificial Sequence
  Description of Artificial Sequence: Synthetic oligonucleotide
cauguaaguaugggcacgc

SEQ ID NO: 476636 - RNA, 19 nt, Artificial Sequence
  Description of Artificial Sequence: Synthetic oligonucleotide
caaugaaaacgcagcugag

SEQ ID NO: 476637 - RNA, 19 nt, Artificial Sequence
  Description of Artificial Sequence: Synthetic oligonucleotide
uuuggucccuuccuacaac

SEQ ID NO: 476638 - RNA, 19 nt, Artificial Sequence
  Description of Artificial Sequence: Synthetic oligonucleotide
uggucagcgucccauaguu

SEQ ID NO: 476639 - RNA, 19 nt, Artificial Sequence
  Description of Artificial Sequence: Synthetic oligonucleotide
aacuaggguccaaaccuag

SEQ ID NO: 476640 - RNA, 19 nt, Artificial Sequence
  Description of Artificial Sequence: Synthetic oligonucleotide
caccucaggcagaugagag

SEQ ID NO: 476641 - RNA, 19 nt, Artificial Sequence
  Description of Artificial Sequence: Synthetic oligonucleotide
aaccgcagcuuuugcggag

SEQ ID NO: 476642 - RNA, 19 nt, Artificial Sequence
  Description of Artificial Sequence: Synthetic oligonucleotide
gacccauaagcccuuggca

SEQ ID NO: 476643 - RNA, 19 nt, Artificial Sequence
  Description of Artificial Sequence: Synthetic oligonucleotide
acugauuguccuaauggga

SEQ ID NO: 476644 - RNA, 19 nt, Artificial Sequence
  Description of Artificial Sequence: Synthetic oligonucleotide
ucgcugguauuuucaaucu

SEQ ID NO: 476645 - RNA, 19 nt, Artificial Sequence
  Description of Artificial Sequence: Synthetic oligonucleotide
uuugcagccgcugcuuuca

SEQ ID NO: 476646 - RNA, 19 nt, Artificial Sequence
  Description of Artificial Sequence: Synthetic oligonucleotide
gugggcucgucaaagggcg

SEQ ID NO: 476647 - RNA, 19 nt, Artificial Sequence
  Description of Artificial Sequence: Synthetic oligonucleotide
caaucucuaggacccauuc

SEQ ID NO: 476648 - RNA, 19 nt, Artificial Sequence
  Description of Artificial Sequence: Synthetic oligonucleotide
guguaucgaggacuugggg

SEQ ID NO: 476649 - RNA, 19 nt, Artificial Sequence
  Description of Artificial Sequence: Synthetic oligonucleotide
uguaggaaacgaggccacg

SEQ ID NO: 476650 - RNA, 19 nt, Artificial Sequence
  Description of Artificial Sequence: Synthetic oligonucleotide
uuacaaaaccagccaggau

SEQ ID NO: 476651 - RNA, 19 nt, Artificial Sequence
  Description of Artificial Sequence: Synthetic oligonucleotide
cacaaugaaaacgcagcug

SEQ ID NO: 476652 - RNA, 19 nt, Artificial Sequence
  Description of Artificial Sequence: Synthetic oligonucleotide
cagugggcucgucaaaggg

SEQ ID NO: 476653 - RNA, 19 nt, Artificial Sequence
  Description of Artificial Sequence: Synthetic oligonucleotide
aaggacaccccugggcaag

SEQ ID NO: 476654 - RNA, 19 nt, Artificial Sequence
  Description of Artificial Sequence: Synthetic oligonucleotide
cauggggcuuaguuauucc

SEQ ID NO: 476655 - RNA, 19 nt, Artificial Sequence
  Description of Artificial Sequence: Synthetic oligonucleotide
agucuacccuccuaccaug

SEQ ID NO: 476656 - RNA, 19 nt, Artificial Sequence
  Description of Artificial Sequence: Synthetic oligonucleotide
aggacauggggcuuaguua

SEQ ID NO: 476657 - RNA, 19 nt, Artificial Sequence
  Description of Artificial Sequence: Synthetic oligonucleotide
agcgucccauaguuguugg

SEQ ID NO: 476658 - RNA, 19 nt, Artificial Sequence
  Description of Artificial Sequence: Synthetic oligonucleotide
cuuggucagcgucccauag

SEQ ID NO: 476659 - RNA, 19 nt, Artificial Sequence
  Description of Artificial Sequence: Synthetic oligonucleotide
gcuuaguuauucccuauac

SEQ ID NO: 476660 - RNA, 19 nt, Artificial Sequence
  Description of Artificial Sequence: Synthetic oligonucleotide
gugccauauagcacaagag

SEQ ID NO: 476661 - RNA, 19 nt, Artificial Sequence
  Description of Artificial Sequence: Synthetic oligonucleotide
uggacgugaggguuuugca

SEQ ID NO: 476662 - RNA, 19 nt, Artificial Sequence
  Description of Artificial Sequence: Synthetic oligonucleotide
uuuugcggaggcucaucca

SEQ ID NO: 476663 - RNA, 19 nt, Artificial Sequence
  Description of Artificial Sequence: Synthetic oligonucleotide
gaagcugcccuaaagauuu

SEQ ID NO: 476664 - RNA, 19 nt, Artificial Sequence
  Description of Artificial Sequence: Synthetic oligonucleotide
auucucagugcuguagugu

SEQ ID NO: 476665 - RNA, 19 nt, Artificial Sequence
  Description of Artificial Sequence: Synthetic oligonucleotide
gguacugugagugccaaca

SEQ ID NO: 476666 - RNA, 19 nt, Artificial Sequence
  Description of Artificial Sequence: Synthetic oligonucleotide
aggcucauccaugagccag

SEQ ID NO: 476667 - RNA, 19 nt, Artificial Sequence
  Description of Artificial Sequence: Synthetic oligonucleotide
agccgguugggccaccguc

SEQ ID NO: 476668 - RNA, 19 nt, Artificial Sequence
  Description of Artificial Sequence: Synthetic oligonucleotide
ggaucaaauugauggggug

SEQ ID NO: 476669 - RNA, 19 nt, Artificial Sequence
  Description of Artificial Sequence: Synthetic oligonucleotide
aucuuguguccauuaaaua

SEQ ID NO: 476670 - RNA, 19 nt, Artificial Sequence
  Description of Artificial Sequence: Synthetic oligonucleotide
ggacgugaggguuuugcag

SEQ ID NO: 476671 - RNA, 19 nt, Artificial Sequence
  Description of Artificial Sequence: Synthetic oligonucleotide
gacaccccugggcaaguag

SEQ ID NO: 476672 - RNA, 19 nt, Artificial Sequence
  Description of Artificial Sequence: Synthetic oligonucleotide
uuggucagcgucccauagu

SEQ ID NO: 476673 - RNA, 19 nt, Artificial Sequence
  Description of Artificial Sequence: Synthetic oligonucleotide
gauggggaccauuauugcu

SEQ ID NO: 476674 - RNA, 19 nt, Artificial Sequence
  Description of Artificial Sequence: Synthetic oligonucleotide
ucaaauugauggggugggc

SEQ ID NO: 476675 - RNA, 19 nt, Artificial Sequence
  Description of Artificial Sequence: Synthetic oligonucleotide
auacuuuggugaauuaaaa

SEQ ID NO: 476676 - RNA, 19 nt, Artificial Sequence
  Description of Artificial Sequence: Synthetic oligonucleotide
auuguccuaaugggagggg

SEQ ID NO: 476677 - RNA, 19 nt, Artificial Sequence
  Description of Artificial Sequence: Synthetic oligonucleotide
cgaggaagggaucaaauug

SEQ ID NO: 476678 - RNA, 19 nt, Artificial Sequence
  Description of Artificial Sequence: Synthetic oligonucleotide
agugcagacgcuggcgcgg

SEQ ID NO: 476679 - RNA, 19 nt, Artificial Sequence
  Description of Artificial Sequence: Synthetic oligonucleotide
uaaagccugagcgcagcug

SEQ ID NO: 476680 - RNA, 19 nt, Artificial Sequence
  Description of Artificial Sequence: Synthetic oligonucleotide
cucgccccggcccucaucc

SEQ ID NO: 476681 - RNA, 19 nt, Artificial Sequence
  Description of Artificial Sequence: Synthetic oligonucleotide
gugaggguuuugcagccgc

SEQ ID NO: 476682 - RNA, 19 nt, Artificial Sequence
  Description of Artificial Sequence: Synthetic oligonucleotide
cuggacgugaggguuuugc

SEQ ID NO: 476683 - RNA, 19 nt, Artificial Sequence
  Description of Artificial Sequence: Synthetic oligonucleotide
guuauucccuauaccucag

SEQ ID NO: 476684 - RNA, 19 nt, Artificial Sequence
  Description of Artificial Sequence: Synthetic oligonucleotide
uccuagagcccaccugcca

SEQ ID NO: 476685 - RNA, 19 nt, Artificial Sequence
  Description of Artificial Sequence: Synthetic oligonucleotide
ucaaucucuaggacccauu

SEQ ID NO: 476686 - RNA, 19 nt, Artificial Sequence
  Description of Artificial Sequence: Synthetic oligonucleotide
gguguagagagccccucag

SEQ ID NO: 476687 - RNA, 19 nt, Artificial Sequence
  Description of Artificial Sequence: Synthetic oligonucleotide
ucuacccuccuaccaugac

SEQ ID NO: 476688 - RNA, 19 nt, Artificial Sequence
  Description of Artificial Sequence: Synthetic oligonucleotide
acgagggguaggcaggaga

SEQ ID NO: 476689 - RNA, 19 nt, Artificial Sequence
  Description of Artificial Sequence: Synthetic oligonucleotide
cauagaggauggucaggac

SEQ ID NO: 476690 - RNA, 19 nt, Artificial Sequence
  Description of Artificial Sequence: Synthetic oligonucleotide
auugauggggugggcagug

SEQ ID NO: 476691 - RNA, 19 nt, Artificial Sequence
  Description of Artificial Sequence: Synthetic oligonucleotide
acaccccugggcaaguagg

SEQ ID NO: 476692 - RNA, 19 nt, Artificial Sequence
  Description of Artificial Sequence: Synthetic oligonucleotide
cacaucagaagagggcuug

SEQ ID NO: 476693 - RNA, 19 nt, Artificial Sequence
  Description of Artificial Sequence: Synthetic oligonucleotide
caguguuagaaagggcuug

SEQ ID NO: 476694 - RNA, 19 nt, Artificial Sequence
  Description of Artificial Sequence: Synthetic oligonucleotide
uuguccuaaugggaggggu

SEQ ID NO: 476695 - RNA, 19 nt, Artificial Sequence
  Description of Artificial Sequence: Synthetic oligonucleotide
uugcggaggcucauccaug

SEQ ID NO: 476696 - RNA, 19 nt, Artificial Sequence
  Description of Artificial Sequence: Synthetic oligonucleotide
gucagucuacccuccuacc

SEQ ID NO: 476697 - RNA, 19 nt, Artificial Sequence
  Description of Artificial Sequence: Synthetic oligonucleotide
gcccuaaagauuugacucc

SEQ ID NO: 476698 - RNA, 19 nt, Artificial Sequence
  Description of Artificial Sequence: Synthetic oligonucleotide
cauauagcacaagagugaa

SEQ ID NO: 476699 - RNA, 19 nt, Artificial Sequence
  Description of Artificial Sequence: Synthetic oligonucleotide
ccccuuguaggaaacgagg

SEQ ID NO: 476700 - RNA, 19 nt, Artificial Sequence
  Description of Artificial Sequence: Synthetic oligonucleotide
gggugugaagccugguggg

SEQ ID NO: 476701 - RNA, 19 nt, Artificial Sequence
  Description of Artificial Sequence: Synthetic oligonucleotide
gucagcgucccauaguugu

SEQ ID NO: 476702 - RNA, 19 nt, Artificial Sequence
  Description of Artificial Sequence: Synthetic oligonucleotide
gaagccuuccucgcacacc

SEQ ID NO: 476703 - RNA, 19 nt, Artificial Sequence
  Description of Artificial Sequence: Synthetic oligonucleotide
guccuaaugggaggggugc

SEQ ID NO: 476704 - RNA, 19 nt, Artificial Sequence
  Description of Artificial Sequence: Synthetic oligonucleotide
uaaaggcgguccucucgcc

SEQ ID NO: 476705 - RNA, 19 nt, Artificial Sequence
  Description of Artificial Sequence: Synthetic oligonucleotide
gggcauguaaguaugggca

SEQ ID NO: 476706 - RNA, 19 nt, Artificial Sequence
  Description of Artificial Sequence: Synthetic oligonucleotide
ggugcaaaaggcacaucag

SEQ ID NO: 476707 - RNA, 19 nt, Artificial Sequence
  Description of Artificial Sequence: Synthetic oligonucleotide
cagcugcaagaccaggaag

SEQ ID NO: 476708 - RNA, 19 nt, Artificial Sequence
  Description of Artificial Sequence: Synthetic oligonucleotide
ugaggguuuugcagccgcu

SEQ ID NO: 476709 - RNA, 19 nt, Artificial Sequence
  Description of Artificial Sequence: Synthetic oligonucleotide
uguugccuggauggggacc

SEQ ID NO: 476710 - RNA, 19 nt, Artificial Sequence
  Description of Artificial Sequence: Synthetic oligonucleotide
gcacaaccccauuugaaac

SEQ ID NO: 476711 - RNA, 19 nt, Artificial Sequence
  Description of Artificial Sequence: Synthetic oligonucleotide
gucgggagcagguuugcuc

SEQ ID NO: 476712 - RNA, 19 nt, Artificial Sequence
  Description of Artificial Sequence: Synthetic oligonucleotide
uggagagccagcgacccau

SEQ ID NO: 476713 - RNA, 19 nt, Artificial Sequence
  Description of Artificial Sequence: Synthetic oligonucleotide
ccauauagcacaagaguga

SEQ ID NO: 476714 - RNA, 19 nt, Artificial Sequence
  Description of Artificial Sequence: Synthetic oligonucleotide
agccagcgacccauaagcc

SEQ ID NO: 476715 - RNA, 19 nt, Artificial Sequence
  Description of Artificial Sequence: Synthetic oligonucleotide
accuagucccaagauaaaa

SEQ ID NO: 476716 - RNA, 19 nt, Artificial Sequence
  Description of Artificial Sequence: Synthetic oligonucleotide
ucccaacuaggguccaaac

SEQ ID NO: 476717 - RNA, 19 nt, Artificial Sequence
  Description of Artificial Sequence: Synthetic oligonucleotide
uuucuccacguggaggggu

SEQ ID NO: 476718 - RNA, 19 nt, Artificial Sequence
  Description of Artificial Sequence: Synthetic oligonucleotide
cuacaaccgcagcuuuugc

SEQ ID NO: 476719 - RNA, 19 nt, Artificial Sequence
  Description of Artificial Sequence: Synthetic oligonucleotide
ggcauguaaguaugggcac

SEQ ID NO: 476720 - RNA, 19 nt, Artificial Sequence
  Description of Artificial Sequence: Synthetic oligonucleotide
auagcacaagagugaacuu

SEQ ID NO: 476721 - RNA, 19 nt, Artificial Sequence
  Description of Artificial Sequence: Synthetic oligonucleotide
gcauguaaguaugggcacg

SEQ ID NO: 476722 - RNA, 19 nt, Artificial Sequence
  Description of Artificial Sequence: Synthetic oligonucleotide
gaggguuuugcagccgcug

SEQ ID NO: 476723 - RNA, 19 nt, Artificial Sequence
  Description of Artificial Sequence: Synthetic oligonucleotide
auggggaccauuauugcuu

SEQ ID NO: 476724 - RNA, 19 nt, Artificial Sequence
  Description of Artificial Sequence: Synthetic oligonucleotide
caccccugggcaaguaggc

SEQ ID NO: 476725 - RNA, 19 nt, Artificial Sequence
  Description of Artificial Sequence: Synthetic oligonucleotide
ggauggggaccauuauugc

SEQ ID NO: 476726 - RNA, 19 nt, Artificial Sequence
  Description of Artificial Sequence: Synthetic oligonucleotide
ggagugcagacgcuggcgc

SEQ ID NO: 476727 - RNA, 19 nt, Artificial Sequence
  Description of Artificial Sequence: Synthetic oligonucleotide
ggcacaaccccauuugaaa

SEQ ID NO: 476728 - RNA, 19 nt, Artificial Sequence
  Description of Artificial Sequence: Synthetic oligonucleotide
ggaccauuauugcuuucug

SEQ ID NO: 476729 - RNA, 19 nt, Artificial Sequence
  Description of Artificial Sequence: Synthetic oligonucleotide
cuccgguacugugagugcc

SEQ ID NO: 476730 - RNA, 19 nt, Artificial Sequence
  Description of Artificial Sequence: Synthetic oligonucleotide
aguaggcuggguaccagga

SEQ ID NO: 476731 - RNA, 19 nt, Artificial Sequence
  Description of Artificial Sequence: Synthetic oligonucleotide
uuugcauagucugcacguu

SEQ ID NO: 476732 - RNA, 19 nt, Artificial Sequence
  Description of Artificial Sequence: Synthetic oligonucleotide
cacguuuaaucacuuuaaa

SEQ ID NO: 476733 - RNA, 19 nt, Artificial Sequence
  Description of Artificial Sequence: Synthetic oligonucleotide
acgaggccacgguccaugg

SEQ ID NO: 476734 - RNA, 19 nt, Artificial Sequence
  Description of Artificial Sequence: Synthetic oligonucleotide
ggcuccgguacugugagug

SEQ ID NO: 476735 - RNA, 19 nt, Artificial Sequence
  Description of Artificial Sequence: Synthetic oligonucleotide
cugagcgcagcugcaagac

SEQ ID NO: 476736 - RNA, 19 nt, Artificial Sequence
  Description of Artificial Sequence: Synthetic oligonucleotide
gagagccccucagaggcug

SEQ ID NO: 476737 - RNA, 19 nt, Artificial Sequence
  Description of Artificial Sequence: Synthetic oligonucleotide
uccuacaaccgcagcuuuu

SEQ ID NO: 476738 - RNA, 19 nt, Artificial Sequence
  Description of Artificial Sequence: Synthetic oligonucleotide
ccucaggcgaacagguagg

SEQ ID NO: 476739 - RNA, 19 nt, Artificial Sequence
  Description of Artificial Sequence: Synthetic oligonucleotide
ccaacuaggguccaaaccu

SEQ ID NO: 476740 - RNA, 19 nt, Artificial Sequence
  Description of Artificial Sequence: Synthetic oligonucleotide
ccuagagcccaccugccag

SEQ ID NO: 476741 - RNA, 19 nt, Artificial Sequence
  Description of Artificial Sequence: Synthetic oligonucleotide
gcugaggccggccaccacc

SEQ ID NO: 476742 - RNA, 19 nt, Artificial Sequence
  Description of Artificial Sequence: Synthetic oligonucleotide
ccuagcucagccuggcuac

SEQ ID NO: 476743 - RNA, 19 nt, Artificial Sequence
  Description of Artificial Sequence: Synthetic oligonucleotide
gccagcgacccauaagccc

SEQ ID NO: 476744 - RNA, 19 nt, Artificial Sequence
  Description of Artificial Sequence: Synthetic oligonucleotide
accgcagcuuuugcggagg

SEQ ID NO: 476745 - RNA, 19 nt, Artificial Sequence
  Description of Artificial Sequence: Synthetic oligonucleotide
cugguauuuucaaucucua

SEQ ID NO: 476746 - RNA, 19 nt, Artificial Sequence
  Description of Artificial Sequence: Synthetic oligonucleotide
agcaucgggugggaggcag

SEQ ID NO: 476747 - RNA, 19 nt, Artificial Sequence
  Description of Artificial Sequence: Synthetic oligonucleotide
cuuuggucccuuccuacaa

SEQ ID NO: 476748 - RNA, 19 nt, Artificial Sequence
  Description of Artificial Sequence: Synthetic oligonucleotide
uggggaccauuauugcuuu

SEQ ID NO: 476749 - RNA, 19 nt, Artificial Sequence
  Description of Artificial Sequence: Synthetic oligonucleotide
gucaaagggcgcucugguc

SEQ ID NO: 476750 - RNA, 19 nt, Artificial Sequence
  Description of Artificial Sequence: Synthetic oligonucleotide
cucaggcgaacagguaggc

SEQ ID NO: 476751 - RNA, 19 nt, Artificial Sequence
  Description of Artificial Sequence: Synthetic oligonucleotide
uccuaaugggaggggugca

SEQ ID NO: 476752 - RNA, 19 nt, Artificial Sequence
  Description of Artificial Sequence: Synthetic oligonucleotide
guguagagagccccucaga

SEQ ID NO: 476753 - RNA, 19 nt, Artificial Sequence
  Description of Artificial Sequence: Synthetic oligonucleotide
gucaggacaccagcauaag

SEQ ID NO: 476754 - RNA, 19 nt, Artificial Sequence
  Description of Artificial Sequence: Synthetic oligonucleotide
ggacauggggcuuaguuau

SEQ ID NO: 476755 - RNA, 19 nt, Artificial Sequence
  Description of Artificial Sequence: Synthetic oligonucleotide
gaaggacaccccugggcaa

SEQ ID NO: 476756 - RNA, 19 nt, Artificial Sequence
  Description of Artificial Sequence: Synthetic oligonucleotide
gggaugcaaaagcccuugg

SEQ ID NO: 476757 - RNA, 19 nt, Artificial Sequence
  Description of Artificial Sequence: Synthetic oligonucleotide
cuggucaaggacccagaga

SEQ ID NO: 476758 - RNA, 19 nt, Artificial Sequence
  Description of Artificial Sequence: Synthetic oligonucleotide
gaggggugcaaaaggcaca

SEQ ID NO: 476759 - RNA, 19 nt, Artificial Sequence
  Description of Artificial Sequence: Synthetic oligonucleotide
aggaagggaucaaauugau

SEQ ID NO: 476760 - RNA, 19 nt, Artificial Sequence
  Description of Artificial Sequence: Synthetic oligonucleotide
gguaucauaggcaaugcuu

SEQ ID NO: 476761 - RNA, 19 nt, Artificial Sequence
  Description of Artificial Sequence: Synthetic oligonucleotide
ugggcucgucaaagggcgc

SEQ ID NO: 476762 - RNA, 19 nt, Artificial Sequence
  Description of Artificial Sequence: Synthetic oligonucleotide
acuaggguccaaaccuagu

SEQ ID NO: 476763 - RNA, 19 nt, Artificial Sequence
  Description of Artificial Sequence: Synthetic oligonucleotide
gggcgagggugccauagag

SEQ ID NO: 476764 - RNA, 19 nt, Artificial Sequence
  Description of Artificial Sequence: Synthetic oligonucleotide
caaguaggcuggguaccag

SEQ ID NO: 476765 - RNA, 19 nt, Artificial Sequence
  Description of Artificial Sequence: Synthetic oligonucleotide
ugucugccccucuuaccuc

SEQ ID NO: 476766 - RNA, 19 nt, Artificial Sequence
  Description of Artificial Sequence: Synthetic oligonucleotide
uuggcccgugccagccuag

SEQ ID NO: 476767 - RNA, 19 nt, Artificial Sequence
  Description of Artificial Sequence: Synthetic oligonucleotide
aggggacugauuguccuaa

SEQ ID NO: 476768 - RNA, 19 nt, Artificial Sequence
  Description of Artificial Sequence: Synthetic oligonucleotide
ccuacaaccgcagcuuuug

SEQ ID NO: 476769 - RNA, 19 nt, Artificial Sequence
  Description of Artificial Sequence: Synthetic oligonucleotide
agggugccauagaggaugg

SEQ ID NO: 476770 - RNA, 19 nt, Artificial Sequence
  Description of Artificial Sequence: Synthetic oligonucleotide
aaccuagucccaagauaaa

SEQ ID NO: 476771 - RNA, 19 nt, Artificial Sequence
  Description of Artificial Sequence: Synthetic oligonucleotide
gcugguauuuucaaucucu

SEQ ID NO: 476772 - RNA, 19 nt, Artificial Sequence
  Description of Artificial Sequence: Synthetic oligonucleotide
cagcgucccauaguuguug

SEQ ID NO: 476773 - RNA, 19 nt, Artificial Sequence
  Description of Artificial Sequence: Synthetic oligonucleotide
ggcgagggugccauagagg

SEQ ID NO: 476774 - RNA, 19 nt, Artificial Sequence
  Description of Artificial Sequence: Synthetic oligonucleotide
cucgucaaagggcgcucug

SEQ ID NO: 476775 - RNA, 19 nt, Artificial Sequence
  Description of Artificial Sequence: Synthetic oligonucleotide
agcugcccuaaagauuuga

SEQ ID NO: 476776 - RNA, 19 nt, Artificial Sequence
  Description of Artificial Sequence: Synthetic oligonucleotide
aagcagcaucgggugggag

SEQ ID NO: 476777 - RNA, 19 nt, Artificial Sequence
  Description of Artificial Sequence: Synthetic oligonucleotide
uuggcuucgcugguauuuu

SEQ ID NO: 476778 - RNA, 19 nt, Artificial Sequence
  Description of Artificial Sequence: Synthetic oligonucleotide
caacuaggguccaaaccua

SEQ ID NO: 476779 - RNA, 19 nt, Artificial Sequence
  Description of Artificial Sequence: Synthetic oligonucleotide
agauccccacaggggaaag

SEQ ID NO: 476780 - RNA, 19 nt, Artificial Sequence
  Description of Artificial Sequence: Synthetic oligonucleotide
ccuuccucgcacaccacac

SEQ ID NO: 476781 - RNA, 19 nt, Artificial Sequence
  Description of Artificial Sequence: Synthetic oligonucleotide
cagcaucuaaagugaaaua

SEQ ID NO: 476782 - RNA, 19 nt, Artificial Sequence
  Description of Artificial Sequence: Synthetic oligonucleotide
uggcuucgcugguauuuuc

SEQ ID NO: 476783 - RNA, 19 nt, Artificial Sequence
  Description of Artificial Sequence: Synthetic oligonucleotide
gaugucagucuacccuccu

SEQ ID NO: 476784 - RNA, 19 nt, Artificial Sequence
  Description of Artificial Sequence: Synthetic oligonucleotide
gcuggcgcggaugaucucc

SEQ ID NO: 476785 - RNA, 19 nt, Artificial Sequence
  Description of Artificial Sequence: Synthetic oligonucleotide
cuagcucagccuggcuacc

SEQ ID NO: 476786 - RNA, 19 nt, Artificial Sequence
  Description of Artificial Sequence: Synthetic oligonucleotide
ggucaggacaccagcauaa

SEQ ID NO: 476787 - RNA, 19 nt, Artificial Sequence
  Description of Artificial Sequence: Synthetic oligonucleotide
ggggaugcaaaagcccuug

SEQ ID NO: 476788 - RNA, 19 nt, Artificial Sequence
  Description of Artificial Sequence: Synthetic oligonucleotide
cccuauaccucagggcugg

SEQ ID NO: 476789 - RNA, 19 nt, Artificial Sequence
  Description of Artificial Sequence: Synthetic oligonucleotide
gcuaaagccugagcgcagc

SEQ ID NO: 476790 - RNA, 19 nt, Artificial Sequence
  Description of Artificial Sequence: Synthetic oligonucleotide
cagacgcuggcgcggauga

SEQ ID NO: 476791 - RNA, 19 nt, Artificial Sequence
  Description of Artificial Sequence: Synthetic oligonucleotide
cuuccucgcacaccacaca

SEQ ID NO: 476792 - RNA, 19 nt, Artificial Sequence
  Description of Artificial Sequence: Synthetic oligonucleotide
auguaaguaugggcacgcu

SEQ ID NO: 476793 - RNA, 19 nt, Artificial Sequence
  Description of Artificial Sequence: Synthetic oligonucleotide
gcgcucuggucuuugauaa

SEQ ID NO: 476794 - RNA, 19 nt, Artificial Sequence
  Description of Artificial Sequence: Synthetic oligonucleotide
cugcggccccaccucaggc

SEQ ID NO: 476795 - RNA, 19 nt, Artificial Sequence
  Description of Artificial Sequence: Synthetic oligonucleotide
gggguaucauaggcaaugc

SEQ ID NO: 476796 - RNA, 19 nt, Artificial Sequence
  Description of Artificial Sequence: Synthetic oligonucleotide
agcuuuagcuuggcccgug

SEQ ID NO: 476797 - RNA, 19 nt, Artificial Sequence
  Description of Artificial Sequence: Synthetic oligonucleotide
agcccuuggcacaacccca

SEQ ID NO: 476798 - RNA, 19 nt, Artificial Sequence
  Description of Artificial Sequence: Synthetic oligonucleotide
gaggggacugauuguccua

SEQ ID NO: 476799 - RNA, 19 nt, Artificial Sequence
  Description of Artificial Sequence: Synthetic oligonucleotide
ccauagaggauggucagga

SEQ ID NO: 476800 - RNA, 19 nt, Artificial Sequence
  Description of Artificial Sequence: Synthetic oligonucleotide
ccuggucaaggacccagag

SEQ ID NO: 476801 - RNA, 19 nt, Artificial Sequence
  Description of Artificial Sequence: Synthetic oligonucleotide
uggcuggacgugaggguuu

SEQ ID NO: 476802 - RNA, 19 nt, Artificial Sequence
  Description of Artificial Sequence: Synthetic oligonucleotide
gagagccagcgacccauaa

SEQ ID NO: 476803 - RNA, 19 nt, Artificial Sequence
  Description of Artificial Sequence: Synthetic oligonucleotide
aggcgaacagguaggccca

SEQ ID NO: 476804 - RNA, 19 nt, Artificial Sequence
  Description of Artificial Sequence: Synthetic oligonucleotide
gcugagggcauguaaguau

SEQ ID NO: 476805 - RNA, 19 nt, Artificial Sequence
  Description of Artificial Sequence: Synthetic oligonucleotide
cacuccccggaagcuaaag

SEQ ID NO: 476806 - RNA, 19 nt, Artificial Sequence
  Description of Artificial Sequence: Synthetic oligonucleotide
cauaguuguuggcuucgcu

SEQ ID NO: 476807 - RNA, 19 nt, Artificial Sequence
  Description of Artificial Sequence: Synthetic oligonucleotide
caggacauggggcuuaguu

SEQ ID NO: 476808 - RNA, 19 nt, Artificial Sequence
  Description of Artificial Sequence: Synthetic oligonucleotide
accccauuugaaacacaga

SEQ ID NO: 476809 - RNA, 19 nt, Artificial Sequence
  Description of Artificial Sequence: Synthetic oligonucleotide
ugucgggagcagguuugcu

SEQ ID NO: 476810 - RNA, 19 nt, Artificial Sequence
  Description of Artificial Sequence: Synthetic oligonucleotide
cucuaacauuaucuugugu

SEQ ID NO: 476811 - RNA, 19 nt, Artificial Sequence
  Description of Artificial Sequence: Synthetic oligonucleotide
agccccgggcucagaaaac

SEQ ID NO: 476812 - RNA, 19 nt, Artificial Sequence
  Description of Artificial Sequence: Synthetic oligonucleotide
ggcuuaguuauucccuaua

SEQ ID NO: 476813 - RNA, 19 nt, Artificial Sequence
  Description of Artificial Sequence: Synthetic oligonucleotide
gcuuuagcuuggcccgugc

SEQ ID NO: 476814 - RNA, 19 nt, Artificial Sequence
  Description of Artificial Sequence: Synthetic oligonucleotide
ucacuccccggaagcuaaa

SEQ ID NO: 476815 - RNA, 19 nt, Artificial Sequence
  Description of Artificial Sequence: Synthetic oligonucleotide
gaacuuggucagcguccca

SEQ ID NO: 476816 - RNA, 19 nt, Artificial Sequence
  Description of Artificial Sequence: Synthetic oligonucleotide
cuccacguggagggguggc

SEQ ID NO: 476817 - RNA, 19 nt, Artificial Sequence
  Description of Artificial Sequence: Synthetic oligonucleotide
ugccaaagaccagcacaau

SEQ ID NO: 476818 - RNA, 19 nt, Artificial Sequence
  Description of Artificial Sequence: Synthetic oligonucleotide
ucucggcugcucuggcuuu

SEQ ID NO: 476819 - RNA, 19 nt, Artificial Sequence
  Description of Artificial Sequence: Synthetic oligonucleotide
aagcugcccuaaagauuug

SEQ ID NO: 476820 - RNA, 19 nt, Artificial Sequence
  Description of Artificial Sequence: Synthetic oligonucleotide
ggcgcucuggucuuugaua

SEQ ID NO: 476821 - RNA, 19 nt, Artificial Sequence
  Description of Artificial Sequence: Synthetic oligonucleotide
ggggcuuaguuauucccua

SEQ ID NO: 476822 - RNA, 19 nt, Artificial Sequence
  Description of Artificial Sequence: Synthetic oligonucleotide
gcgacccauaagcccuugg

SEQ ID NO: 476823 - RNA, 19 nt, Artificial Sequence
  Description of Artificial Sequence: Synthetic oligonucleotide
gucuacccuccuaccauga

SEQ ID NO: 476824 - RNA, 19 nt, Artificial Sequence
  Description of Artificial Sequence: Synthetic oligonucleotide
augaggcaugacagggagu

SEQ ID NO: 476825 - RNA, 19 nt, Artificial Sequence
  Description of Artificial Sequence: Synthetic oligonucleotide
gugcuggacacagcuuuuc

SEQ ID NO: 476826 - RNA, 19 nt, Artificial Sequence
  Description of Artificial Sequence: Synthetic oligonucleotide
cugugccauauagcacaag

SEQ ID NO: 476827 - RNA, 19 nt, Artificial Sequence
  Description of Artificial Sequence: Synthetic oligonucleotide
gggaccauuauugcuuucu

SEQ ID NO: 476828 - RNA, 19 nt, Artificial Sequence
  Description of Artificial Sequence: Synthetic oligonucleotide
uuggggugugaagccuggu

SEQ ID NO: 476829 - RNA, 19 nt, Artificial Sequence
  Description of Artificial Sequence: Synthetic oligonucleotide
cauaagcccuuggcacaac

SEQ ID NO: 476830 - RNA, 19 nt, Artificial Sequence
  Description of Artificial Sequence: Synthetic oligonucleotide
agugcuggacacagcuuuu

SEQ ID NO: 476831 - RNA, 19 nt, Artificial Sequence
  Description of Artificial Sequence: Synthetic oligonucleotide
augggcgugaggaggugaa

SEQ ID NO: 476832 - RNA, 19 nt, Artificial Sequence
  Description of Artificial Sequence: Synthetic oligonucleotide
accccugggcaaguaggcu

SEQ ID NO: 476833 - RNA, 19 nt, Artificial Sequence
  Description of Artificial Sequence: Synthetic oligonucleotide
ggcuucgcugguauuuuca

SEQ ID NO: 476834 - RNA, 19 nt, Artificial Sequence
  Description of Artificial Sequence: Synthetic oligonucleotide
cuggauggggaccauuauu

SEQ ID NO: 476835 - RNA, 19 nt, Artificial Sequence
  Description of Artificial Sequence: Synthetic oligonucleotide
ccagcgacccauaagcccu

SEQ ID NO: 476836 - RNA, 19 nt, Artificial Sequence
  Description of Artificial Sequence: Synthetic oligonucleotide
gccuagcucagccuggcua

SEQ ID NO: 476837 - RNA, 19 nt, Artificial Sequence
  Description of Artificial Sequence: Synthetic oligonucleotide
ucucgccccggcccucauc

SEQ ID NO: 476838 - RNA, 19 nt, Artificial Sequence
  Description of Artificial Sequence: Synthetic oligonucleotide
gccgguugggccaccgucc

SEQ ID NO: 476839 - RNA, 19 nt, Artificial Sequence
  Description of Artificial Sequence: Synthetic oligonucleotide
ggguaucauaggcaaugcu

SEQ ID NO: 476840 - RNA, 19 nt, Artificial Sequence
  Description of Artificial Sequence: Synthetic oligonucleotide
cuaaagccugagcgcagcu

SEQ ID NO: 476841 - RNA, 19 nt, Artificial Sequence
  Description of Artificial Sequence: Synthetic oligonucleotide
ccuuccuacaaccgcagcu

SEQ ID NO: 476842 - RNA, 19 nt, Artificial Sequence
  Description of Artificial Sequence: Synthetic oligonucleotide
agagagccccucagaggcu

SEQ ID NO: 476843 - RNA, 19 nt, Artificial Sequence
  Description of Artificial Sequence: Synthetic oligonucleotide
ucaggacauggggcuuagu

SEQ ID NO: 476844 - RNA, 19 nt, Artificial Sequence
  Description of Artificial Sequence: Synthetic oligonucleotide
cuuggcccgugccagccua

SEQ ID NO: 476845 - RNA, 19 nt, Artificial Sequence
  Description of Artificial Sequence: Synthetic oligonucleotide
aaagggcgcucuggucuuu

SEQ ID NO: 476846 - RNA, 19 nt, Artificial Sequence
  Description of Artificial Sequence: Synthetic oligonucleotide
gcuaccagcuggaggccug

SEQ ID NO: 476847 - RNA, 19 nt, Artificial Sequence
  Description of Artificial Sequence: Synthetic oligonucleotide
ggucagcgucccauaguug

SEQ ID NO: 476848 - RNA, 19 nt, Artificial Sequence
  Description of Artificial Sequence: Synthetic oligonucleotide
gcgucccauaguuguuggc

SEQ ID NO: 476849 - RNA, 19 nt, Artificial Sequence
  Description of Artificial Sequence: Synthetic oligonucleotide
uggccacgagggguaggca

SEQ ID NO: 476850 - RNA, 19 nt, Artificial Sequence
  Description of Artificial Sequence: Synthetic oligonucleotide
ugggcgugaggaggugaau

SEQ ID NO: 476851 - RNA, 19 nt, Artificial Sequence
  Description of Artificial Sequence: Synthetic oligonucleotide
agcgacccauaagcccuug

SEQ ID NO: 476852 - RNA, 19 nt, Artificial Sequence
  Description of Artificial Sequence: Synthetic oligonucleotide
aggacaccccugggcaagu

SEQ ID NO: 476853 - RNA, 19 nt, Artificial Sequence
  Description of Artificial Sequence: Synthetic oligonucleotide
ggcucauccaugagccaga

SEQ ID NO: 476854 - RNA, 19 nt, Artificial Sequence
  Description of Artificial Sequence: Synthetic oligonucleotide
ugcagacgcuggcgcggau

SEQ ID NO: 476855 - RNA, 19 nt, Artificial Sequence
  Description of Artificial Sequence: Synthetic oligonucleotide
cucucggcugcucuggcuu

SEQ ID NO: 476856 - RNA, 19 nt, Artificial Sequence
  Description of Artificial Sequence: Synthetic oligonucleotide
gcggaggcucauccaugag

SEQ ID NO: 476857 - RNA, 19 nt, Artificial Sequence
  Description of Artificial Sequence: Synthetic oligonucleotide
guguuagaaagggcuuggu

SEQ ID NO: 476858 - RNA, 19 nt, Artificial Sequence
  Description of Artificial Sequence: Synthetic oligonucleotide
ccggaagcuaaagccugag

SEQ ID NO: 476859 - RNA, 19 nt, Artificial Sequence
  Description of Artificial Sequence: Synthetic oligonucleotide
ccgguugggccaccguccc

SEQ ID NO: 476860 - RNA, 19 nt, Artificial Sequence
  Description of Artificial Sequence: Synthetic oligonucleotide
cacuccucuugccaggcuu

SEQ ID NO: 476861 - RNA, 19 nt, Artificial Sequence
  Description of Artificial Sequence: Synthetic oligonucleotide
gugaaugguccagcugcua

SEQ ID NO: 476862 - RNA, 19 nt, Artificial Sequence
  Description of Artificial Sequence: Synthetic oligonucleotide
gcaucgggugggaggcagg

SEQ ID NO: 476863 - RNA, 19 nt, Artificial Sequence
  Description of Artificial Sequence: Synthetic oligonucleotide
gacagggagugcagacgcu

SEQ ID NO: 476864 - RNA, 19 nt, Artificial Sequence
  Description of Artificial Sequence: Synthetic oligonucleotide
ggcugagggcauguaagua

SEQ ID NO: 476865 - RNA, 19 nt, Artificial Sequence
  Description of Artificial Sequence: Synthetic oligonucleotide
caaagggcgcucuggucuu

SEQ ID NO: 476866 - RNA, 19 nt, Artificial Sequence
  Description of Artificial Sequence: Synthetic oligonucleotide
gcgcagcugcaagaccagg

SEQ ID NO: 476867 - RNA, 19 nt, Artificial Sequence
  Description of Artificial Sequence: Synthetic oligonucleotide
gcgaacagguaggcccaag

SEQ ID NO: 476868 - RNA, 19 nt, Artificial Sequence
  Description of Artificial Sequence: Synthetic oligonucleotide
gcggccccaccucaggcga

SEQ ID NO: 476869 - RNA, 19 nt, Artificial Sequence
  Description of Artificial Sequence: Synthetic oligonucleotide
gggagcagguuugcuccac

SEQ ID NO: 476870 - RNA, 19 nt, Artificial Sequence
  Description of Artificial Sequence: Synthetic oligonucleotide
ggggaccauuauugcuuuc

SEQ ID NO: 476871 - RNA, 19 nt, Artificial Sequence
  Description of Artificial Sequence: Synthetic oligonucleotide
ucgccccggcccucauccu

SEQ ID NO: 476872 - RNA, 19 nt, Artificial Sequence
  Description of Artificial Sequence: Synthetic oligonucleotide
gccuggauggggaccauua

SEQ ID NO: 476873 - RNA, 19 nt, Artificial Sequence
  Description of Artificial Sequence: Synthetic oligonucleotide
gggguaggaagcagugucu

SEQ ID NO: 476874 - RNA, 19 nt, Artificial Sequence
  Description of Artificial Sequence: Synthetic oligonucleotide
gugcagacgcuggcgcgga

SEQ ID NO: 476875 - RNA, 19 nt, Artificial Sequence
  Description of Artificial Sequence: Synthetic oligonucleotide
gggcuuaguuauucccuau

SEQ ID NO: 476876 - RNA, 19 nt, Artificial Sequence
  Description of Artificial Sequence: Synthetic oligonucleotide
ggcucgucaaagggcgcuc

SEQ ID NO: 476877 - RNA, 19 nt, Artificial Sequence
  Description of Artificial Sequence: Synthetic oligonucleotide
cccagagcuuuagcuuggc

SEQ ID NO: 476878 - RNA, 19 nt, Artificial Sequence
  Description of Artificial Sequence: Synthetic oligonucleotide
cccggaagcuaaagccuga

SEQ ID NO: 476879 - RNA, 19 nt, Artificial Sequence
  Description of Artificial Sequence: Synthetic oligonucleotide
ggagguguagagagccccu

SEQ ID NO: 476880 - RNA, 19 nt, Artificial Sequence
  Description of Artificial Sequence: Synthetic oligonucleotide
ccauaagcccuuggcacaa

SEQ ID NO: 476881 - RNA, 19 nt, Artificial Sequence
  Description of Artificial Sequence: Synthetic oligonucleotide
guccucucgccccggcccu

SEQ ID NO: 476882 - RNA, 19 nt, Artificial Sequence
  Description of Artificial Sequence: Synthetic oligonucleotide
gacauggggcuuaguuauu

SEQ ID NO: 476883 - RNA, 19 nt, Artificial Sequence
  Description of Artificial Sequence: Synthetic oligonucleotide
gggccaccgucccuuccca

SEQ ID NO: 476884 - RNA, 19 nt, Artificial Sequence
  Description of Artificial Sequence: Synthetic oligonucleotide
ccgaggaagggaucaaauu

SEQ ID NO: 476885 - RNA, 19 nt, Artificial Sequence
  Description of Artificial Sequence: Synthetic oligonucleotide
gagccgguugggccaccgu

SEQ ID NO: 476886 - RNA, 19 nt, Artificial Sequence
  Description of Artificial Sequence: Synthetic oligonucleotide
gcaugggcgugaggaggug

SEQ ID NO: 476887 - RNA, 19 nt, Artificial Sequence
  Description of Artificial Sequence: Synthetic oligonucleotide
gccgcugcuuucaggaggu

SEQ ID NO: 476888 - RNA, 19 nt, Artificial Sequence
  Description of Artificial Sequence: Synthetic oligonucleotide
gccuuggaagcugcccuaa

SEQ ID NO: 476889 - RNA, 19 nt, Artificial Sequence
  Description of Artificial Sequence: Synthetic oligonucleotide
gugaagccuggugggcagu

SEQ ID NO: 476890 - RNA, 19 nt, Artificial Sequence
  Description of Artificial Sequence: Synthetic oligonucleotide
gggcucgucaaagggcgcu

SEQ ID NO: 476891 - RNA, 19 nt, Artificial Sequence
  Description of Artificial Sequence: Synthetic oligonucleotide
cgguacugugagugccaac

SEQ ID NO: 476892 - RNA, 19 nt, Artificial Sequence
  Description of Artificial Sequence: Synthetic oligonucleotide
ccuuggcacaaccccauuu

SEQ ID NO: 476893 - RNA, 19 nt, Artificial Sequence
  Description of Artificial Sequence: Synthetic oligonucleotide
gcacaagagugaacuuggu

SEQ ID NO: 476894 - RNA, 19 nt, Artificial Sequence
  Description of Artificial Sequence: Synthetic oligonucleotide
ggggugcaaaaggcacauc

SEQ ID NO: 476895 - RNA, 19 nt, Artificial Sequence
  Description of Artificial Sequence: Synthetic oligonucleotide
ccgugccagccuagcucag

SEQ ID NO: 476896 - RNA, 19 nt, Artificial Sequence
  Description of Artificial Sequence: Synthetic oligonucleotide
gcuggacgugaggguuuug

SEQ ID NO: 476897 - RNA, 19 nt, Artificial Sequence
  Description of Artificial Sequence: Synthetic oligonucleotide
gggcgcucuggucuuugau

SEQ ID NO: 476898 - RNA, 19 nt, Artificial Sequence
  Description of Artificial Sequence: Synthetic oligonucleotide
ggggacugauuguccuaau

SEQ ID NO: 476899 - RNA, 19 nt, Artificial Sequence
  Description of Artificial Sequence: Synthetic oligonucleotide
gcucgucaaagggcgcucu

SEQ ID NO: 476900 - RNA, 19 nt, Artificial Sequence
  Description of Artificial Sequence: Synthetic oligonucleotide
ccaccagggcacaguguua

SEQ ID NO: 476901 - RNA, 19 nt, Artificial Sequence
  Description of Artificial Sequence: Synthetic oligonucleotide
ggcccgugccagccuagcu

SEQ ID NO: 476902 - RNA, 19 nt, Artificial Sequence
  Description of Artificial Sequence: Synthetic oligonucleotide
ggcgaacagguaggcccaa

SEQ ID NO: 476903 - RNA, 19 nt, Artificial Sequence
  Description of Artificial Sequence: Synthetic oligonucleotide
cagcgacccauaagcccuu

SEQ ID NO: 476904 - RNA, 19 nt, Artificial Sequence
  Description of Artificial Sequence: Synthetic oligonucleotide
ccgguacugugagugccaa

SEQ ID NO: 476905 - RNA, 19 nt, Artificial Sequence
  Description of Artificial Sequence: Synthetic oligonucleotide
ccgagacucucggcugcuc

SEQ ID NO: 476906 - RNA, 19 nt, Artificial Sequence
  Description of Artificial Sequence: Synthetic oligonucleotide
ggugggcagugggcucguc

SEQ ID NO: 476907 - RNA, 19 nt, Artificial Sequence
  Description of Artificial Sequence: Synthetic oligonucleotide
ggcuggacgugaggguuuu

SEQ ID NO: 476908 - RNA, 19 nt, Artificial Sequence
  Description of Artificial Sequence: Synthetic oligonucleotide
cgcugcuuucaggaggugu

SEQ ID NO: 476909 - RNA, 19 nt, Artificial Sequence
  Description of Artificial Sequence: Synthetic oligonucleotide
ccgcugcuuucaggaggug

SEQ ID NO: 476910 - RNA, 19 nt, Artificial Sequence
  Description of Artificial Sequence: Synthetic oligonucleotide
cgcuggcgcggaugaucuc

SEQ ID NO: 476911 - RNA, 19 nt, Artificial Sequence
  Description of Artificial Sequence: Synthetic oligonucleotide
cgagggugccauagaggau

SEQ ID NO: 476912 - RNA, 19 nt, Artificial Sequence
  Description of Artificial Sequence: Synthetic oligonucleotide
cucucgccccggcccucau

SEQ ID NO: 476913 - RNA, 19 nt, Artificial Sequence
  Description of Artificial Sequence: Synthetic oligonucleotide
cccuuggcacaaccccauu

SEQ ID NO: 476914 - RNA, 19 nt, Artificial Sequence
  Description of Artificial Sequence: Synthetic oligonucleotide
ccggggcucccagguggga

SEQ ID NO: 476915 - RNA, 19 nt, Artificial Sequence
  Description of Artificial Sequence: Synthetic oligonucleotide
auauaauuaauccuccgcc

SEQ ID NO: 476916 - RNA, 19 nt, Artificial Sequence
  Description of Artificial Sequence: Synthetic oligonucleotide
cuuugaaugacuuauaaug

SEQ ID NO: 476917 - RNA, 19 nt, Artificial Sequence
  Description of Artificial Sequence: Synthetic oligonucleotide
uuuauucgaacaaagagug

SEQ ID NO: 476918 - RNA, 19 nt, Artificial Sequence
  Description of Artificial Sequence: Synthetic oligonucleotide
ucagaaucgauugagaugg

SEQ ID NO: 476919 - RNA, 19 nt, Artificial Sequence
  Description of Artificial Sequence: Synthetic oligonucleotide
uuugaaugacuuauaaugg

SEQ ID NO: 476920 - RNA, 19 nt, Artificial Sequence
  Description of Artificial Sequence: Synthetic oligonucleotide
uuuaaauaccgcaugacug

SEQ ID NO: 476921 - RNA, 19 nt, Artificial Sequence
  Description of Artificial Sequence: Synthetic oligonucleotide
aacauagguggauugagac

SEQ ID NO: 476922 - RNA, 19 nt, Artificial Sequence
  Description of Artificial Sequence: Synthetic oligonucleotide
aauacuuuucaaccagggc

SEQ ID NO: 476923 - RNA, 19 nt, Artificial Sequence
  Description of Artificial Sequence: Synthetic oligonucleotide
aaacagugaucuuaacucc

SEQ ID NO: 476924 - RNA, 19 nt, Artificial Sequence
  Description of Artificial Sequence: Synthetic oligonucleotide
aaugacuuauaaugguggc

SEQ ID NO: 476925 - RNA, 19 nt, Artificial Sequence
  Description of Artificial Sequence: Synthetic oligonucleotide
uuaaugaccaaauuaguca

SEQ ID NO: 476926 - RNA, 19 nt, Artificial Sequence
  Description of Artificial Sequence: Synthetic oligonucleotide
gucaugaccacuuagauac

SEQ ID NO: 476927 - RNA, 19 nt, Artificial Sequence
  Description of Artificial Sequence: Synthetic oligonucleotide
aauaccgcaugacuggggc

SEQ ID NO: 476928 - RNA, 19 nt, Artificial Sequence
  Description of Artificial Sequence: Synthetic oligonucleotide
uuaauauugaauacgugac

SEQ ID NO: 476929 - RNA, 19 nt, Artificial Sequence
  Description of Artificial Sequence: Synthetic oligonucleotide
uuucugauucguaacaggg

SEQ ID NO: 476930 - RNA, 19 nt, Artificial Sequence
  Description of Artificial Sequence: Synthetic oligonucleotide
uuaaauaccgcaugacugg

SEQ ID NO: 476931 - RNA, 19 nt, Artificial Sequence
  Description of Artificial Sequence: Synthetic oligonucleotide
aguauaggugcuuauaguc

SEQ ID NO: 476932 - RNA, 19 nt, Artificial Sequence
  Description of Artificial Sequence: Synthetic oligonucleotide
aaacaaauggcacaguuaa

SEQ ID NO: 476933 - RNA, 19 nt, Artificial Sequence
  Description of Artificial Sequence: Synthetic oligonucleotide
uuaacuacuggcuaagccc

SEQ ID NO: 476934 - RNA, 19 nt, Artificial Sequence
  Description of Artificial Sequence: Synthetic oligonucleotide
gauacgugaguuuaaauac

SEQ ID NO: 476935 - RNA, 19 nt, Artificial Sequence
  Description of Artificial Sequence: Synthetic oligonucleotide
auaauuaauccuccgcccc

SEQ ID NO: 476936 - RNA, 19 nt, Artificial Sequence
  Description of Artificial Sequence: Synthetic oligonucleotide
auuugaucaaguugcaagg

SEQ ID NO: 476937 - RNA, 19 nt, Artificial Sequence
  Description of Artificial Sequence: Synthetic oligonucleotide
aaaacgguccaccauacca

SEQ ID NO: 476938 - RNA, 19 nt, Artificial Sequence
  Description of Artificial Sequence: Synthetic oligonucleotide
gaaguauaggugcuuauag

SEQ ID NO: 476939 - RNA, 19 nt, Artificial Sequence
  Description of Artificial Sequence: Synthetic oligonucleotide
uggauugagacaucgaccc

SEQ ID NO: 476940 - RNA, 19 nt, Artificial Sequence
  Description of Artificial Sequence: Synthetic oligonucleotide
agauaauauaauuaauccu

SEQ ID NO: 476941 - RNA, 19 nt, Artificial Sequence
  Description of Artificial Sequence: Synthetic oligonucleotide
uuaauccaaaacuuagugc

SEQ ID NO: 476942 - RNA, 19 nt, Artificial Sequence
  Description of Artificial Sequence: Synthetic oligonucleotide
ugcuuaauccaaaacuuag

SEQ ID NO: 476943 - RNA, 19 nt, Artificial Sequence
  Description of Artificial Sequence: Synthetic oligonucleotide
uauaauuaauccuccgccc

SEQ ID NO: 476944 - RNA, 19 nt, Artificial Sequence
  Description of Artificial Sequence: Synthetic oligonucleotide
uacgugaguuuaaauaccg

SEQ ID NO: 476945 - RNA, 19 nt, Artificial Sequence
  Description of Artificial Sequence: Synthetic oligonucleotide
ugaaugacuuauaauggug

SEQ ID NO: 476946 - RNA, 19 nt, Artificial Sequence
  Description of Artificial Sequence: Synthetic oligonucleotide
cuuaauccaaaacuuagug

SEQ ID NO: 476947 - RNA, 19 nt, Artificial Sequence
  Description of Artificial Sequence: Synthetic oligonucleotide
uuugaggguauuuucaaac

SEQ ID NO: 476948 - RNA, 19 nt, Artificial Sequence
  Description of Artificial Sequence: Synthetic oligonucleotide
ucaaguugcaaggagaugu

SEQ ID NO: 476949 - RNA, 19 nt, Artificial Sequence
  Description of Artificial Sequence: Synthetic oligonucleotide
auccccuacuucuaaaccc

SEQ ID NO: 476950 - RNA, 19 nt, Artificial Sequence
  Description of Artificial Sequence: Synthetic oligonucleotide
agauuuaaugaccaaauua

SEQ ID NO: 476951 - RNA, 19 nt, Artificial Sequence
  Description of Artificial Sequence: Synthetic oligonucleotide
agcuacaaauaauauaucu

SEQ ID NO: 476952 - RNA, 19 nt, Artificial Sequence
  Description of Artificial Sequence: Synthetic oligonucleotide
ucuuuguuugcuuuaagaa

SEQ ID NO: 476953 - RNA, 19 nt, Artificial Sequence
  Description of Artificial Sequence: Synthetic oligonucleotide
agagacaucugguguaggc

SEQ ID NO: 476954 - RNA, 19 nt, Artificial Sequence
  Description of Artificial Sequence: Synthetic oligonucleotide
uauagucaugaccacuuag

SEQ ID NO: 476955 - RNA, 19 nt, Artificial Sequence
  Description of Artificial Sequence: Synthetic oligonucleotide
acuaugauaaagaguacac

SEQ ID NO: 476956 - RNA, 19 nt, Artificial Sequence
  Description of Artificial Sequence: Synthetic oligonucleotide
gagaugaauacuuuucaac

SEQ ID NO: 476957 - RNA, 19 nt, Artificial Sequence
  Description of Artificial Sequence: Synthetic oligonucleotide
ugguauacugccaacagau

SEQ ID NO: 476958 - RNA, 19 nt, Artificial Sequence
  Description of Artificial Sequence: Synthetic oligonucleotide
uaauauugaauacgugaca

SEQ ID NO: 476959 - RNA, 19 nt, Artificial Sequence
  Description of Artificial Sequence: Synthetic oligonucleotide
ucugauucguaacaggguc

SEQ ID NO: 476960 - RNA, 19 nt, Artificial Sequence
  Description of Artificial Sequence: Synthetic oligonucleotide
auuuauucgaacaaagagu

SEQ ID NO: 476961 - RNA, 19 nt, Artificial Sequence
  Description of Artificial Sequence: Synthetic oligonucleotide
aacuaugauaaagaguaca

SEQ ID NO: 476962 - RNA, 19 nt, Artificial Sequence
  Description of Artificial Sequence: Synthetic oligonucleotide
ugagcuuuggcucccgucc

SEQ ID NO: 476963 - RNA, 19 nt, Artificial Sequence
  Description of Artificial Sequence: Synthetic oligonucleotide
ucugcuuaauccaaaacuu

SEQ ID NO: 476964 - RNA, 19 nt, Artificial Sequence
  Description of Artificial Sequence: Synthetic oligonucleotide
ucucggaccaggcagaacu

SEQ ID NO: 476965 - RNA, 19 nt, Artificial Sequence
  Description of Artificial Sequence: Synthetic oligonucleotide
ucuaaacccuccccuaggg

SEQ ID NO: 476966 - RNA, 19 nt, Artificial Sequence
  Description of Artificial Sequence: Synthetic oligonucleotide
auaugcaggcaguaggcac

SEQ ID NO: 476967 - RNA, 19 nt, Artificial Sequence
  Description of Artificial Sequence: Synthetic oligonucleotide
ugggcauugcuacuuaaag

SEQ ID NO: 476968 - RNA, 19 nt, Artificial Sequence
  Description of Artificial Sequence: Synthetic oligonucleotide
aaaauguucuaaacauagg

SEQ ID NO: 476969 - RNA, 19 nt, Artificial Sequence
  Description of Artificial Sequence: Synthetic oligonucleotide
ugacuuauaaugguggcug

SEQ ID NO: 476970 - RNA, 19 nt, Artificial Sequence
  Description of Artificial Sequence: Synthetic oligonucleotide
agcacgauuucacugacug

SEQ ID NO: 476971 - RNA, 19 nt, Artificial Sequence
  Description of Artificial Sequence: Synthetic oligonucleotide
agauacgugaguuuaaaua

SEQ ID NO: 476972 - RNA, 19 nt, Artificial Sequence
  Description of Artificial Sequence: Synthetic oligonucleotide
aaguauaggugcuuauagu

SEQ ID NO: 476973 - RNA, 19 nt, Artificial Sequence
  Description of Artificial Sequence: Synthetic oligonucleotide
uguucuaaacauaggugga

SEQ ID NO: 476974 - RNA, 19 nt, Artificial Sequence
  Description of Artificial Sequence: Synthetic oligonucleotide
uugaaugacuuauaauggu

SEQ ID NO: 476975 - RNA, 19 nt, Artificial Sequence
  Description of Artificial Sequence: Synthetic oligonucleotide
guuaacuacuggcuaagcc

SEQ ID NO: 476976 - RNA, 19 nt, Artificial Sequence
  Description of Artificial Sequence: Synthetic oligonucleotide
agugaucuuaacuccuggg

SEQ ID NO: 476977 - RNA, 19 nt, Artificial Sequence
  Description of Artificial Sequence: Synthetic oligonucleotide
uaaagaguacaccuguuua

SEQ ID NO: 476978 - RNA, 19 nt, Artificial Sequence
  Description of Artificial Sequence: Synthetic oligonucleotide
cauuagaaaaggguguucc

SEQ ID NO: 476979 - RNA, 19 nt, Artificial Sequence
  Description of Artificial Sequence: Synthetic oligonucleotide
ugaauacgugacaagauuu

SEQ ID NO: 476980 - RNA, 19 nt, Artificial Sequence
  Description of Artificial Sequence: Synthetic oligonucleotide
uauucgaacaaagagugau

SEQ ID NO: 476981 - RNA, 19 nt, Artificial Sequence
  Description of Artificial Sequence: Synthetic oligonucleotide
auugucaccacggucauug

SEQ ID NO: 476982 - RNA, 19 nt, Artificial Sequence
  Description of Artificial Sequence: Synthetic oligonucleotide
acaaauggcacaguuaacu

SEQ ID NO: 476983 - RNA, 19 nt, Artificial Sequence
  Description of Artificial Sequence: Synthetic oligonucleotide
uaaacauagguggauugag

SEQ ID NO: 476984 - RNA, 19 nt, Artificial Sequence
  Description of Artificial Sequence: Synthetic oligonucleotide
uuauaaugguggcugcuca

SEQ ID NO: 476985 - RNA, 19 nt, Artificial Sequence
  Description of Artificial Sequence: Synthetic oligonucleotide
uaccaacuaugauaaagag

SEQ ID NO: 476986 - RNA, 19 nt, Artificial Sequence
  Description of Artificial Sequence: Synthetic oligonucleotide
cuuucugauucguaacagg

SEQ ID NO: 476987 - RNA, 19 nt, Artificial Sequence
  Description of Artificial Sequence: Synthetic oligonucleotide
uaaugaccaaauuagucau

SEQ ID NO: 476988 - RNA, 19 nt, Artificial Sequence
  Description of Artificial Sequence: Synthetic oligonucleotide
uguagcgaugucaauuugu

SEQ ID NO: 476989 - RNA, 19 nt, Artificial Sequence
  Description of Artificial Sequence: Synthetic oligonucleotide
ucggacucgaaguauaggu

SEQ ID NO: 476990 - RNA, 19 nt, Artificial Sequence
  Description of Artificial Sequence: Synthetic oligonucleotide
uccggagauaccuaacugc

SEQ ID NO: 476991 - RNA, 19 nt, Artificial Sequence
  Description of Artificial Sequence: Synthetic oligonucleotide
aaaacuuagugcuggcuuu

SEQ ID NO: 476992 - RNA, 19 nt, Artificial Sequence
  Description of Artificial Sequence: Synthetic oligonucleotide
aacgguccaccauaccaac

SEQ ID NO: 476993 - RNA, 19 nt, Artificial Sequence
  Description of Artificial Sequence: Synthetic oligonucleotide
uaacuacuggcuaagcccu

SEQ ID NO: 476994 - RNA, 19 nt, Artificial Sequence
  Description of Artificial Sequence: Synthetic oligonucleotide
caauaugcaggcaguaggc

SEQ ID NO: 476995 - RNA, 19 nt, Artificial Sequence
  Description of Artificial Sequence: Synthetic oligonucleotide
uguacgucuguucaguuuu

SEQ ID NO: 476996 - RNA, 19 nt, Artificial Sequence
  Description of Artificial Sequence: Synthetic oligonucleotide
uucuaaacccuccccuagg

SEQ ID NO: 476997 - RNA, 19 nt, Artificial Sequence
  Description of Artificial Sequence: Synthetic oligonucleotide
ugugaaccgaagucugugg

SEQ ID NO: 476998 - RNA, 19 nt, Artificial Sequence
  Description of Artificial Sequence: Synthetic oligonucleotide
ggugcuuauagucaugacc

SEQ ID NO: 476999 - RNA, 19 nt, Artificial Sequence
  Description of Artificial Sequence: Synthetic oligonucleotide
aaucgauugagaugggcuu

SEQ ID NO: 477000 - RNA, 19 nt, Artificial Sequence
  Description of Artificial Sequence: Synthetic oligonucleotide
uuucaguccaauggcaucc

SEQ ID NO: 477001 - RNA, 19 nt, Artificial Sequence
  Description of Artificial Sequence: Synthetic oligonucleotide
guauacugccaacagauga

SEQ ID NO: 477002 - RNA, 19 nt, Artificial Sequence
  Description of Artificial Sequence: Synthetic oligonucleotide
uugaauacgugacaagauu

SEQ ID NO: 477003 - RNA, 19 nt, Artificial Sequence
  Description of Artificial Sequence: Synthetic oligonucleotide
agcaggucagaaucgauug

SEQ ID NO: 477004 - RNA, 19 nt, Artificial Sequence
  Description of Artificial Sequence: Synthetic oligonucleotide
agacaucugguguaggcag

SEQ ID NO: 477005 - RNA, 19 nt, Artificial Sequence
  Description of Artificial Sequence: Synthetic oligonucleotide
acugacuguggcugcaucg

SEQ ID NO: 477006 - RNA, 19 nt, Artificial Sequence
  Description of Artificial Sequence: Synthetic oligonucleotide
ugcaaagacacaccugacu

SEQ ID NO: 477007 - RNA, 19 nt, Artificial Sequence
  Description of Artificial Sequence: Synthetic oligonucleotide
auauugaauacgugacaag

SEQ ID NO: 477008 - RNA, 19 nt, Artificial Sequence
  Description of Artificial Sequence: Synthetic oligonucleotide
uugagcacgauuucacuga

SEQ ID NO: 477009 - RNA, 19 nt, Artificial Sequence
  Description of Artificial Sequence: Synthetic oligonucleotide
acuggcuaagcccuaaaca

SEQ ID NO: 477010 - RNA, 19 nt, Artificial Sequence
  Description of Artificial Sequence: Synthetic oligonucleotide
ccaacuaugauaaagagua

SEQ ID NO: 477011 - RNA, 19 nt, Artificial Sequence
  Description of Artificial Sequence: Synthetic oligonucleotide
cuucguguuguccaccugg

SEQ ID NO: 477012 - RNA, 19 nt, Artificial Sequence
  Description of Artificial Sequence: Synthetic oligonucleotide
caauuugugagucuuccuc

SEQ ID NO: 477013 - RNA, 19 nt, Artificial Sequence
  Description of Artificial Sequence: Synthetic oligonucleotide
cauauccuguacuguagcg

SEQ ID NO: 477014 - RNA, 19 nt, Artificial Sequence
  Description of Artificial Sequence: Synthetic oligonucleotide
gcaauaugcaggcaguagg

SEQ ID NO: 477015 - RNA, 19 nt, Artificial Sequence
  Description of Artificial Sequence: Synthetic oligonucleotide
aacagggucuaucucuacu

SEQ ID NO: 477016 - RNA, 19 nt, Artificial Sequence
  Description of Artificial Sequence: Synthetic oligonucleotide
uaggaauggaagacauuag

SEQ ID NO: 477017 - RNA, 19 nt, Artificial Sequence
  Description of Artificial Sequence: Synthetic oligonucleotide
ugcgauguuaggcucacuc

SEQ ID NO: 477018 - RNA, 19 nt, Artificial Sequence
  Description of Artificial Sequence: Synthetic oligonucleotide
ugaccacuuagauacguga

SEQ ID NO: 477019 - RNA, 19 nt, Artificial Sequence
  Description of Artificial Sequence: Synthetic oligonucleotide
ugcuacuuaaagccauugc

SEQ ID NO: 477020 - RNA, 19 nt, Artificial Sequence
  Description of Artificial Sequence: Synthetic oligonucleotide
cuugagcacgauuucacug

SEQ ID NO: 477021 - RNA, 19 nt, Artificial Sequence
  Description of Artificial Sequence: Synthetic oligonucleotide
aacauugcuucugagcgcu

SEQ ID NO: 477022 - RNA, 19 nt, Artificial Sequence
  Description of Artificial Sequence: Synthetic oligonucleotide
uugaggguauuuucaaaca

SEQ ID NO: 477023 - RNA, 19 nt, Artificial Sequence
  Description of Artificial Sequence: Synthetic oligonucleotide
cuaugauaaagaguacacc

SEQ ID NO: 477024 - RNA, 19 nt, Artificial Sequence
  Description of Artificial Sequence: Synthetic oligonucleotide
gauugagacaucgacccug

SEQ ID NO: 477025 - RNA, 19 nt, Artificial Sequence
  Description of Artificial Sequence: Synthetic oligonucleotide
uuugagcaaaauagucagc

SEQ ID NO: 477026 - RNA, 19 nt, Artificial Sequence
  Description of Artificial Sequence: Synthetic oligonucleotide
gucagaaucgauugagaug

SEQ ID NO: 477027 - RNA, 19 nt, Artificial Sequence
  Description of Artificial Sequence: Synthetic oligonucleotide
uugugagucuuccucaaaa

SEQ ID NO: 477028 - RNA, 19 nt, Artificial Sequence
  Description of Artificial Sequence: Synthetic oligonucleotide
agaaucgauugagaugggc

SEQ ID NO: 477029 - RNA, 19 nt, Artificial Sequence
  Description of Artificial Sequence: Synthetic oligonucleotide
uaaauaccgcaugacuggg

SEQ ID NO: 477030 - RNA, 19 nt, Artificial Sequence
  Description of Artificial Sequence: Synthetic oligonucleotide
uccccuagggcccagcagc

SEQ ID NO: 477031 - RNA, 19 nt, Artificial Sequence
  Description of Artificial Sequence: Synthetic oligonucleotide
guuccuguugucugaacag

SEQ ID NO: 477032 - RNA, 19 nt, Artificial Sequence
  Description of Artificial Sequence: Synthetic oligonucleotide
uucgaacaaagagugauuc

SEQ ID NO: 477033 - RNA, 19 nt, Artificial Sequence
  Description of Artificial Sequence: Synthetic oligonucleotide
uucaauacaggaacagauu

SEQ ID NO: 477034 - RNA, 19 nt, Artificial Sequence
  Description of Artificial Sequence: Synthetic oligonucleotide
guuaggcucacucugcuuc

SEQ ID NO: 477035 - RNA, 19 nt, Artificial Sequence
  Description of Artificial Sequence: Synthetic oligonucleotide
aucaguugugaaccgaagu

SEQ ID NO: 477036 - RNA, 19 nt, Artificial Sequence
  Description of Artificial Sequence: Synthetic oligonucleotide
uucugauucguaacagggu

SEQ ID NO: 477037 - RNA, 19 nt, Artificial Sequence
  Description of Artificial Sequence: Synthetic oligonucleotide
gaagacauuagaaaagggu

SEQ ID NO: 477038 - RNA, 19 nt, Artificial Sequence
  Description of Artificial Sequence: Synthetic oligonucleotide
uaccuaacugcacaucagu

SEQ ID NO: 477039 - RNA, 19 nt, Artificial Sequence
  Description of Artificial Sequence: Synthetic oligonucleotide
gaugcuauucucaaagcaa

SEQ ID NO: 477040 - RNA, 19 nt, Artificial Sequence
  Description of Artificial Sequence: Synthetic oligonucleotide
acuuugaaugacuuauaau

SEQ ID NO: 477041 - RNA, 19 nt, Artificial Sequence
  Description of Artificial Sequence: Synthetic oligonucleotide
aacaaauggcacaguuaac

SEQ ID NO: 477042 - RNA, 19 nt, Artificial Sequence
  Description of Artificial Sequence: Synthetic oligonucleotide
ucuccggagauaccuaacu

SEQ ID NO: 477043 - RNA, 19 nt, Artificial Sequence
  Description of Artificial Sequence: Synthetic oligonucleotide
uauccuguacuguagcgau

SEQ ID NO: 477044 - RNA, 19 nt, Artificial Sequence
  Description of Artificial Sequence: Synthetic oligonucleotide
gauugagaugggcuucugc

SEQ ID NO: 477045 - RNA, 19 nt, Artificial Sequence
  Description of Artificial Sequence: Synthetic oligonucleotide
uuugaucaaguugcaagga

SEQ ID NO: 477046 - RNA, 19 nt, Artificial Sequence
  Description of Artificial Sequence: Synthetic oligonucleotide
acaguuaacuacuggcuaa

SEQ ID NO: 477047 - RNA, 19 nt, Artificial Sequence
  Description of Artificial Sequence: Synthetic oligonucleotide
uucgcugguauacugccaa

SEQ ID NO: 477048 - RNA, 19 nt, Artificial Sequence
  Description of Artificial Sequence: Synthetic oligonucleotide
uagucaugaccacuuagau

SEQ ID NO: 477049 - RNA, 19 nt, Artificial Sequence
  Description of Artificial Sequence: Synthetic oligonucleotide
gucaauuugugagucuucc

SEQ ID NO: 477050 - RNA, 19 nt, Artificial Sequence
  Description of Artificial Sequence: Synthetic oligonucleotide
uaagcccuaaacauugcuu

SEQ ID NO: 477051 - RNA, 19 nt, Artificial Sequence
  Description of Artificial Sequence: Synthetic oligonucleotide
aaucugccuguucaauaca

SEQ ID NO: 477052 - RNA, 19 nt, Artificial Sequence
  Description of Artificial Sequence: Synthetic oligonucleotide
aauacagagcaagcuacaa

SEQ ID NO: 477053 - RNA, 19 nt, Artificial Sequence
  Description of Artificial Sequence: Synthetic oligonucleotide
gauguuaggcucacucugc

SEQ ID NO: 477054 - RNA, 19 nt, Artificial Sequence
  Description of Artificial Sequence: Synthetic oligonucleotide
uuagauacgugaguuuaaa

SEQ ID NO: 477055 - RNA, 19 nt, Artificial Sequence
  Description of Artificial Sequence: Synthetic oligonucleotide
aauccaaaacuuagugcug

SEQ ID NO: 477056 - RNA, 19 nt, Artificial Sequence
  Description of Artificial Sequence: Synthetic oligonucleotide
gguggauugagacaucgac

SEQ ID NO: 477057 - RNA, 19 nt, Artificial Sequence
  Description of Artificial Sequence: Synthetic oligonucleotide
ggacucgaaguauaggugc

SEQ ID NO: 477058 - RNA, 19 nt, Artificial Sequence
  Description of Artificial Sequence: Synthetic oligonucleotide
acuguagcgaugucaauuu

SEQ ID NO: 477059 - RNA, 19 nt, Artificial Sequence
  Description of Artificial Sequence: Synthetic oligonucleotide
auagucaugaccacuuaga

SEQ ID NO: 477060 - RNA, 19 nt, Artificial Sequence
  Description of Artificial Sequence: Synthetic oligonucleotide
aggcaguaggcacugacgu

SEQ ID NO: 477061 - RNA, 19 nt, Artificial Sequence
  Description of Artificial Sequence: Synthetic oligonucleotide
uuuggaugucagaccagga

SEQ ID NO: 477062 - RNA, 19 nt, Artificial Sequence
  Description of Artificial Sequence: Synthetic oligonucleotide
gacuuauaaugguggcugc

SEQ ID NO: 477063 - RNA, 19 nt, Artificial Sequence
  Description of Artificial Sequence: Synthetic oligonucleotide
agacacaccugacucugag

SEQ ID NO: 477064 - RNA, 19 nt, Artificial Sequence
  Description of Artificial Sequence: Synthetic oligonucleotide
ucaauuugugagucuuccu

SEQ ID NO: 477065 - RNA, 19 nt, Artificial Sequence
  Description of Artificial Sequence: Synthetic oligonucleotide
aaacauagguggauugaga

SEQ ID NO: 477066 - RNA, 19 nt, Artificial Sequence
  Description of Artificial Sequence: Synthetic oligonucleotide
uccuucgcugguauacugc

SEQ ID NO: 477067 - RNA, 19 nt, Artificial Sequence
  Description of Artificial Sequence: Synthetic oligonucleotide
guagcgaugucaauuugug

SEQ ID NO: 477068 - RNA, 19 nt, Artificial Sequence
  Description of Artificial Sequence: Synthetic oligonucleotide
aaauaccgcaugacugggg

SEQ ID NO: 477069 - RNA, 19 nt, Artificial Sequence
  Description of Artificial Sequence: Synthetic oligonucleotide
ucgaacaaagagugauucu

SEQ ID NO: 477070 - RNA, 19 nt, Artificial Sequence
  Description of Artificial Sequence: Synthetic oligonucleotide
aacugcacaucaguuguga

SEQ ID NO: 477071 - RNA, 19 nt, Artificial Sequence
  Description of Artificial Sequence: Synthetic oligonucleotide
aguacugaagccaaacuua

SEQ ID NO: 477072 - RNA, 19 nt, Artificial Sequence
  Description of Artificial Sequence: Synthetic oligonucleotide
aacagaccagaaugaggca

SEQ ID NO: 477073 - RNA, 19 nt, Artificial Sequence
  Description of Artificial Sequence: Synthetic oligonucleotide
gaccacuuagauacgugag

SEQ ID NO: 477074 - RNA, 19 nt, Artificial Sequence
  Description of Artificial Sequence: Synthetic oligonucleotide
aaggguguuccuguugucu

SEQ ID NO: 477075 - RNA, 19 nt, Artificial Sequence
  Description of Artificial Sequence: Synthetic oligonucleotide
acuuagauacgugaguuua

SEQ ID NO: 477076 - RNA, 19 nt, Artificial Sequence
  Description of Artificial Sequence: Synthetic oligonucleotide
uugugaaccgaagucugug

SEQ ID NO: 477077 - RNA, 19 nt, Artificial Sequence
  Description of Artificial Sequence: Synthetic oligonucleotide
caccauaccaacuaugaua

SEQ ID NO: 477078 - RNA, 19 nt, Artificial Sequence
  Description of Artificial Sequence: Synthetic oligonucleotide
gcauucaucuagaugaccc

SEQ ID NO: 477079 - RNA, 19 nt, Artificial Sequence
  Description of Artificial Sequence: Synthetic oligonucleotide
cauccccuacuucuaaacc

SEQ ID NO: 477080 - RNA, 19 nt, Artificial Sequence
  Description of Artificial Sequence: Synthetic oligonucleotide
uauacacccuuagugggac

SEQ ID NO: 477081 - RNA, 19 nt, Artificial Sequence
  Description of Artificial Sequence: Synthetic oligonucleotide
aagcugaagcuuguacguc

SEQ ID NO: 477082 - RNA, 19 nt, Artificial Sequence
  Description of Artificial Sequence: Synthetic oligonucleotide
uacuggcuaagcccuaaac

SEQ ID NO: 477083 - RNA, 19 nt, Artificial Sequence
  Description of Artificial Sequence: Synthetic oligonucleotide
uaggugcuuauagucauga

SEQ ID NO: 477084 - RNA, 19 nt, Artificial Sequence
  Description of Artificial Sequence: Synthetic oligonucleotide
acauuagaaaaggguguuc

SEQ ID NO: 477085 - RNA, 19 nt, Artificial Sequence
  Description of Artificial Sequence: Synthetic oligonucleotide
guggauugagacaucgacc

SEQ ID NO: 477086 - RNA, 19 nt, Artificial Sequence
  Description of Artificial Sequence: Synthetic oligonucleotide
agcaauaugcaggcaguag

SEQ ID NO: 477087 - RNA, 19 nt, Artificial Sequence
  Description of Artificial Sequence: Synthetic oligonucleotide
uccaaaacuuagugcuggc

SEQ ID NO: 477088 - RNA, 19 nt, Artificial Sequence
  Description of Artificial Sequence: Synthetic oligonucleotide
aucgauugagaugggcuuc

SEQ ID NO: 477089 - RNA, 19 nt, Artificial Sequence
  Description of Artificial Sequence: Synthetic oligonucleotide
uacuguagcgaugucaauu

SEQ ID NO: 477090 - RNA, 19 nt, Artificial Sequence
  Description of Artificial Sequence: Synthetic oligonucleotide
augguaugaaaggaugcug

SEQ ID NO: 477091 - RNA, 19 nt, Artificial Sequence
  Description of Artificial Sequence: Synthetic oligonucleotide
cuuauaaugguggcugcuc

SEQ ID NO: 477092 - RNA, 19 nt, Artificial Sequence
  Description of Artificial Sequence: Synthetic oligonucleotide
gggacugccaggcagugag

SEQ ID NO: 477093 - RNA, 19 nt, Artificial Sequence
  Description of Artificial Sequence: Synthetic oligonucleotide
uaguugaccuugagcacga

SEQ ID NO: 477094 - RNA, 19 nt, Artificial Sequence
  Description of Artificial Sequence: Synthetic oligonucleotide
acaucgacccuggugcugg

SEQ ID NO: 477095 - RNA, 19 nt, Artificial Sequence
  Description of Artificial Sequence: Synthetic oligonucleotide
uucguguuguccaccugga

SEQ ID NO: 477096 - RNA, 19 nt, Artificial Sequence
  Description of Artificial Sequence: Synthetic oligonucleotide
uaaagccauugccagguuu

SEQ ID NO: 477097 - RNA, 19 nt, Artificial Sequence
  Description of Artificial Sequence: Synthetic oligonucleotide
accaacuaugauaaagagu

SEQ ID NO: 477098 - RNA, 19 nt, Artificial Sequence
  Description of Artificial Sequence: Synthetic oligonucleotide
guauaggugcuuauaguca

SEQ ID NO: 477099 - RNA, 19 nt, Artificial Sequence
  Description of Artificial Sequence: Synthetic oligonucleotide
auuagucauuuaaauuuca

SEQ ID NO: 477100 - RNA, 19 nt, Artificial Sequence
  Description of Artificial Sequence: Synthetic oligonucleotide
agucaugaccacuuagaua

SEQ ID NO: 477101 - RNA, 19 nt, Artificial Sequence
  Description of Artificial Sequence: Synthetic oligonucleotide
ucgacccuggugcuggccc

SEQ ID NO: 477102 - RNA, 19 nt, Artificial Sequence
  Description of Artificial Sequence: Synthetic oligonucleotide
uugucugaacagaccagaa

SEQ ID NO: 477103 - RNA, 19 nt, Artificial Sequence
  Description of Artificial Sequence: Synthetic oligonucleotide
aaacgguccaccauaccaa

SEQ ID NO: 477104 - RNA, 19 nt, Artificial Sequence
  Description of Artificial Sequence: Synthetic oligonucleotide
augacuuauaaugguggcu

SEQ ID NO: 477105 - RNA, 19 nt, Artificial Sequence
  Description of Artificial Sequence: Synthetic oligonucleotide
agauaccuaacugcacauc

SEQ ID NO: 477106 - RNA, 19 nt, Artificial Sequence
  Description of Artificial Sequence: Synthetic oligonucleotide
aggugcuuauagucaugac

SEQ ID NO: 477107 - RNA, 19 nt, Artificial Sequence
  Description of Artificial Sequence: Synthetic oligonucleotide
agugcucgcucgugacucc

SEQ ID NO: 477108 - RNA, 19 nt, Artificial Sequence
  Description of Artificial Sequence: Synthetic oligonucleotide
ggggagauaggaauggaag

SEQ ID NO: 477109 - RNA, 19 nt, Artificial Sequence
  Description of Artificial Sequence: Synthetic oligonucleotide
uguccaccuggauaaggga

SEQ ID NO: 477110 - RNA, 19 nt, Artificial Sequence
  Description of Artificial Sequence: Synthetic oligonucleotide
ugaaccgaagucuguggau

SEQ ID NO: 477111 - RNA, 19 nt, Artificial Sequence
  Description of Artificial Sequence: Synthetic oligonucleotide
acgugaguuuaaauaccgc

SEQ ID NO: 477112 - RNA, 19 nt, Artificial Sequence
  Description of Artificial Sequence: Synthetic oligonucleotide
uagauacgugaguuuaaau

SEQ ID NO: 477113 - RNA, 19 nt, Artificial Sequence
  Description of Artificial Sequence: Synthetic oligonucleotide
cuaaacccuccccuagggc

SEQ ID NO: 477114 - RNA, 19 nt, Artificial Sequence
  Description of Artificial Sequence: Synthetic oligonucleotide
caucuagaugacccuuugc

SEQ ID NO: 477115 - RNA, 19 nt, Artificial Sequence
  Description of Artificial Sequence: Synthetic oligonucleotide
ucgugacuccaggauauag

SEQ ID NO: 477116 - RNA, 19 nt, Artificial Sequence
  Description of Artificial Sequence: Synthetic oligonucleotide
guuucaguccaauggcauc

SEQ ID NO: 477117 - RNA, 19 nt, Artificial Sequence
  Description of Artificial Sequence: Synthetic oligonucleotide
caucggacucgaaguauag

SEQ ID NO: 477118 - RNA, 19 nt, Artificial Sequence
  Description of Artificial Sequence: Synthetic oligonucleotide
agauaggaauggaagacau

SEQ ID NO: 477119 - RNA, 19 nt, Artificial Sequence
  Description of Artificial Sequence: Synthetic oligonucleotide
gggagaauccaugagcagc

SEQ ID NO: 477120 - RNA, 19 nt, Artificial Sequence
  Description of Artificial Sequence: Synthetic oligonucleotide
acagagcaggucagaaucg

SEQ ID NO: 477121 - RNA, 19 nt, Artificial Sequence
  Description of Artificial Sequence: Synthetic oligonucleotide
gucuggcauggcuauauac

SEQ ID NO: 477122 - RNA, 19 nt, Artificial Sequence
  Description of Artificial Sequence: Synthetic oligonucleotide
gcugguauacugccaacag

SEQ ID NO: 477123 - RNA, 19 nt, Artificial Sequence
  Description of Artificial Sequence: Synthetic oligonucleotide
uagcgaugucaauuuguga

SEQ ID NO: 477124 - RNA, 19 nt, Artificial Sequence
  Description of Artificial Sequence: Synthetic oligonucleotide
uccgucugcccuugaacug

SEQ ID NO: 477125 - RNA, 19 nt, Artificial Sequence
  Description of Artificial Sequence: Synthetic oligonucleotide
cugagcgcuccaaccauag

SEQ ID NO: 477126 - RNA, 19 nt, Artificial Sequence
  Description of Artificial Sequence: Synthetic oligonucleotide
agggagaauccaugagcag

SEQ ID NO: 477127 - RNA, 19 nt, Artificial Sequence
  Description of Artificial Sequence: Synthetic oligonucleotide
cuaaacauagguggauuga

SEQ ID NO: 477128 - RNA, 19 nt, Artificial Sequence
  Description of Artificial Sequence: Synthetic oligonucleotide
auguuaggcucacucugcu

SEQ ID NO: 477129 - RNA, 19 nt, Artificial Sequence
  Description of Artificial Sequence: Synthetic oligonucleotide
gaugguaugaaaggaugcu

SEQ ID NO: 477130 - RNA, 19 nt, Artificial Sequence
  Description of Artificial Sequence: Synthetic oligonucleotide
ugcuuauagucaugaccac

SEQ ID NO: 477131 - RNA, 19 nt, Artificial Sequence
  Description of Artificial Sequence: Synthetic oligonucleotide
cuggcuuucugauucguaa

SEQ ID NO: 477132 - RNA, 19 nt, Artificial Sequence
  Description of Artificial Sequence: Synthetic oligonucleotide
gacguugucauugagcuuu

SEQ ID NO: 477133 - RNA, 19 nt, Artificial Sequence
  Description of Artificial Sequence: Synthetic oligonucleotide
acgauuucacugacugugg

SEQ ID NO: 477134 - RNA, 19 nt, Artificial Sequence
  Description of Artificial Sequence: Synthetic oligonucleotide
acuuauaaugguggcugcu

SEQ ID NO: 477135 - RNA, 19 nt, Artificial Sequence
  Description of Artificial Sequence: Synthetic oligonucleotide
aucggacucgaaguauagg

SEQ ID NO: 477136 - RNA, 19 nt, Artificial Sequence
  Description of Artificial Sequence: Synthetic oligonucleotide
acugcgauguuaggcucac

SEQ ID NO: 477137 - RNA, 19 nt, Artificial Sequence
  Description of Artificial Sequence: Synthetic oligonucleotide
gaauccaugagcagcauuu

SEQ ID NO: 477138 - RNA, 19 nt, Artificial Sequence
  Description of Artificial Sequence: Synthetic oligonucleotide
caguuaacuacuggcuaag

SEQ ID NO: 477139 - RNA, 19 nt, Artificial Sequence
  Description of Artificial Sequence: Synthetic oligonucleotide
ugauucguaacagggucua

SEQ ID NO: 477140 - RNA, 19 nt, Artificial Sequence
  Description of Artificial Sequence: Synthetic oligonucleotide
acggucauuggcagcaguc

SEQ ID NO: 477141 - RNA, 19 nt, Artificial Sequence
  Description of Artificial Sequence: Synthetic oligonucleotide
gucaccacggucauuggca

SEQ ID NO: 477142 - RNA, 19 nt, Artificial Sequence
  Description of Artificial Sequence: Synthetic oligonucleotide
cuccggagauaccuaacug

SEQ ID NO: 477143 - RNA, 19 nt, Artificial Sequence
  Description of Artificial Sequence: Synthetic oligonucleotide
ggcugcaucggacucgaag

SEQ ID NO: 477144 - RNA, 19 nt, Artificial Sequence
  Description of Artificial Sequence: Synthetic oligonucleotide
cuuaaagccauugccaggu

SEQ ID NO: 477145 - RNA, 19 nt, Artificial Sequence
  Description of Artificial Sequence: Synthetic oligonucleotide
uuguacgucuguucaguuu

SEQ ID NO: 477146 - RNA, 19 nt, Artificial Sequence
  Description of Artificial Sequence: Synthetic oligonucleotide
cauagguggauugagacau

SEQ ID NO: 477147 - RNA, 19 nt, Artificial Sequence
  Description of Artificial Sequence: Synthetic oligonucleotide
ucguaacagggucuaucuc

SEQ ID NO: 477148 - RNA, 19 nt, Artificial Sequence
  Description of Artificial Sequence: Synthetic oligonucleotide
gugaaccgaagucugugga

SEQ ID NO: 477149 - RNA, 19 nt, Artificial Sequence
  Description of Artificial Sequence: Synthetic oligonucleotide
ucgaaguauaggugcuuau

SEQ ID NO: 477150 - RNA, 19 nt, Artificial Sequence
  Description of Artificial Sequence: Synthetic oligonucleotide
agaccagaaugaggcauuc

SEQ ID NO: 477151 - RNA, 19 nt, Artificial Sequence
  Description of Artificial Sequence: Synthetic oligonucleotide
agaugcucagacacaacga

SEQ ID NO: 477152 - RNA, 19 nt, Artificial Sequence
  Description of Artificial Sequence: Synthetic oligonucleotide
auauacacccuuaguggga

SEQ ID NO: 477153 - RNA, 19 nt, Artificial Sequence
  Description of Artificial Sequence: Synthetic oligonucleotide
gcaagcuacaaauaauaua

SEQ ID NO: 477154 - RNA, 19 nt, Artificial Sequence
  Description of Artificial Sequence: Synthetic oligonucleotide
uggcucuugggcauugcua

SEQ ID NO: 477155 - RNA, 19 nt, Artificial Sequence
  Description of Artificial Sequence: Synthetic oligonucleotide
cuuagauacgugaguuuaa

SEQ ID NO: 477156 - RNA, 19 nt, Artificial Sequence
  Description of Artificial Sequence: Synthetic oligonucleotide
ugaccuucguguuguccac

SEQ ID NO: 477157 - RNA, 19 nt, Artificial Sequence
  Description of Artificial Sequence: Synthetic oligonucleotide
uuagugggacugccaggca

SEQ ID NO: 477158 - RNA, 19 nt, Artificial Sequence
  Description of Artificial Sequence: Synthetic oligonucleotide
augaaaggaugcugccaca

SEQ ID NO: 477159 - RNA, 19 nt, Artificial Sequence
  Description of Artificial Sequence: Synthetic oligonucleotide
ugucaaggugcuggguacc

SEQ ID NO: 477160 - RNA, 19 nt, Artificial Sequence
  Description of Artificial Sequence: Synthetic oligonucleotide
agaaaaggguguuccuguu

SEQ ID NO: 477161 - RNA, 19 nt, Artificial Sequence
  Description of Artificial Sequence: Synthetic oligonucleotide
gaugucagaccaggagaug

SEQ ID NO: 477162 - RNA, 19 nt, Artificial Sequence
  Description of Artificial Sequence: Synthetic oligonucleotide
agcagcagcagcagcagca

SEQ ID NO: 477163 - RNA, 19 nt, Artificial Sequence
  Description of Artificial Sequence: Synthetic oligonucleotide
accuucguguuguccaccu

SEQ ID NO: 477164 - RNA, 19 nt, Artificial Sequence
  Description of Artificial Sequence: Synthetic oligonucleotide
agcccgaugaggucuugca

SEQ ID NO: 477165 - RNA, 19 nt, Artificial Sequence
  Description of Artificial Sequence: Synthetic oligonucleotide
ucgcucgugacuccaggau

SEQ ID NO: 477166 - RNA, 19 nt, Artificial Sequence
  Description of Artificial Sequence: Synthetic oligonucleotide
ucuugggcauugcuacuua

SEQ ID NO: 477167 - RNA, 19 nt, Artificial Sequence
  Description of Artificial Sequence: Synthetic oligonucleotide
guagcagcagcagcagcag

SEQ ID NO: 477168 - RNA, 19 nt, Artificial Sequence
  Description of Artificial Sequence: Synthetic oligonucleotide
uaccgcaugacuggggcuc

SEQ ID NO: 477169 - RNA, 19 nt, Artificial Sequence
  Description of Artificial Sequence: Synthetic oligonucleotide
agcagcagcagcagcagga

SEQ ID NO: 477170 - RNA, 19 nt, Artificial Sequence
  Description of Artificial Sequence: Synthetic oligonucleotide
ugucuaccuccccaucauc

SEQ ID NO: 477171 - RNA, 19 nt, Artificial Sequence
  Description of Artificial Sequence: Synthetic oligonucleotide
gcagcauuuauucgaacaa

SEQ ID NO: 477172 - RNA, 19 nt, Artificial Sequence
  Description of Artificial Sequence: Synthetic oligonucleotide
cugguauacugccaacaga

SEQ ID NO: 477173 - RNA, 19 nt, Artificial Sequence
  Description of Artificial Sequence: Synthetic oligonucleotide
ucugagcgcuccaaccaua

SEQ ID NO: 477174 - RNA, 19 nt, Artificial Sequence
  Description of Artificial Sequence: Synthetic oligonucleotide
ggaaaucugugucuaccuc

SEQ ID NO: 477175 - RNA, 19 nt, Artificial Sequence
  Description of Artificial Sequence: Synthetic oligonucleotide
uagcagcagcagcagcagc

SEQ ID NO: 477176 - RNA, 19 nt, Artificial Sequence
  Description of Artificial Sequence: Synthetic oligonucleotide
cuguacuguagcgauguca

SEQ ID NO: 477177 - RNA, 19 nt, Artificial Sequence
  Description of Artificial Sequence: Synthetic oligonucleotide
guaggcagagucauggugu

SEQ ID NO: 477178 - RNA, 19 nt, Artificial Sequence
  Description of Artificial Sequence: Synthetic oligonucleotide
gacacaccugacucugaga

SEQ ID NO: 477179 - RNA, 19 nt, Artificial Sequence
  Description of Artificial Sequence: Synthetic oligonucleotide
guccuucgcugguauacug

SEQ ID NO: 477180 - RNA, 19 nt, Artificial Sequence
  Description of Artificial Sequence: Synthetic oligonucleotide
uggccauugucaccacggu

SEQ ID NO: 477181 - RNA, 19 nt, Artificial Sequence
  Description of Artificial Sequence: Synthetic oligonucleotide
ggagaauccaugagcagca

SEQ ID NO: 477182 - RNA, 19 nt, Artificial Sequence
  Description of Artificial Sequence: Synthetic oligonucleotide
ccuucgcugguauacugcc

SEQ ID NO: 477183 - RNA, 19 nt, Artificial Sequence
  Description of Artificial Sequence: Synthetic oligonucleotide
cucccaggcguucuggcuc

SEQ ID NO: 477184 - RNA, 19 nt, Artificial Sequence
  Description of Artificial Sequence: Synthetic oligonucleotide
aacuuaugaaugggcucau

SEQ ID NO: 477185 - RNA, 19 nt, Artificial Sequence
  Description of Artificial Sequence: Synthetic oligonucleotide
agucagcccgggcagugcu

SEQ ID NO: 477186 - RNA, 19 nt, Artificial Sequence
  Description of Artificial Sequence: Synthetic oligonucleotide
gcagcacuaugccugugag

SEQ ID NO: 477187 - RNA, 19 nt, Artificial Sequence
  Description of Artificial Sequence: Synthetic oligonucleotide
cagaaucgauugagauggg

SEQ ID NO: 477188 - RNA, 19 nt, Artificial Sequence
  Description of Artificial Sequence: Synthetic oligonucleotide
gcaaaauagucagcccggg

SEQ ID NO: 477189 - RNA, 19 nt, Artificial Sequence
  Description of Artificial Sequence: Synthetic oligonucleotide
ugcaucggacucgaaguau

SEQ ID NO: 477190 - RNA, 19 nt, Artificial Sequence
  Description of Artificial Sequence: Synthetic oligonucleotide
gcccaaagcuuguagcagc

SEQ ID NO: 477191 - RNA, 19 nt, Artificial Sequence
  Description of Artificial Sequence: Synthetic oligonucleotide
cgugaguuuaaauaccgca

SEQ ID NO: 477192 - RNA, 19 nt, Artificial Sequence
  Description of Artificial Sequence: Synthetic oligonucleotide
ccuaaacauugcuucugag

SEQ ID NO: 477193 - RNA, 19 nt, Artificial Sequence
  Description of Artificial Sequence: Synthetic oligonucleotide
cagcauauccuguacugua

SEQ ID NO: 477194 - RNA, 19 nt, Artificial Sequence
  Description of Artificial Sequence: Synthetic oligonucleotide
auaccgcaugacuggggcu

SEQ ID NO: 477195 - RNA, 19 nt, Artificial Sequence
  Description of Artificial Sequence: Synthetic oligonucleotide
gagauaccuaacugcacau

SEQ ID NO: 477196 - RNA, 19 nt, Artificial Sequence
  Description of Artificial Sequence: Synthetic oligonucleotide
agacaucgacccuggugcu

SEQ ID NO: 477197 - RNA, 19 nt, Artificial Sequence
  Description of Artificial Sequence: Synthetic oligonucleotide
ugcucgcucgugacuccag

SEQ ID NO: 477198 - RNA, 19 nt, Artificial Sequence
  Description of Artificial Sequence: Synthetic oligonucleotide
ccucagcaaggucacaagc

SEQ ID NO: 477199 - RNA, 19 nt, Artificial Sequence
  Description of Artificial Sequence: Synthetic oligonucleotide
ugagcgcuccaaccauagu

SEQ ID NO: 477200 - RNA, 19 nt, Artificial Sequence
  Description of Artificial Sequence: Synthetic oligonucleotide
gugacuccaggauauaguu

SEQ ID NO: 477201 - RNA, 19 nt, Artificial Sequence
  Description of Artificial Sequence: Synthetic oligonucleotide
guccaccauaccaacuaug

SEQ ID NO: 477202 - RNA, 19 nt, Artificial Sequence
  Description of Artificial Sequence: Synthetic oligonucleotide
auggcuauauacacccuua

SEQ ID NO: 477203 - RNA, 19 nt, Artificial Sequence
  Description of Artificial Sequence: Synthetic oligonucleotide
cucagacacaacgauuuaa

SEQ ID NO: 477204 - RNA, 19 nt, Artificial Sequence
  Description of Artificial Sequence: Synthetic oligonucleotide
cgauguuaggcucacucug

SEQ ID NO: 477205 - RNA, 19 nt, Artificial Sequence
  Description of Artificial Sequence: Synthetic oligonucleotide
auucgaacaaagagugauu

SEQ ID NO: 477206 - RNA, 19 nt, Artificial Sequence
  Description of Artificial Sequence: Synthetic oligonucleotide
cccuuagugggacugccag

SEQ ID NO: 477207 - RNA, 19 nt, Artificial Sequence
  Description of Artificial Sequence: Synthetic oligonucleotide
gacaucgacccuggugcug

SEQ ID NO: 477208 - RNA, 19 nt, Artificial Sequence
  Description of Artificial Sequence: Synthetic oligonucleotide
cauucaucuagaugacccu

SEQ ID NO: 477209 - RNA, 19 nt, Artificial Sequence
  Description of Artificial Sequence: Synthetic oligonucleotide
gcugcaucggacucgaagu

SEQ ID NO: 477210 - RNA, 19 nt, Artificial Sequence
  Description of Artificial Sequence: Synthetic oligonucleotide
ggccaaaguacugaagcca

SEQ ID NO: 477211 - RNA, 19 nt, Artificial Sequence
  Description of Artificial Sequence: Synthetic oligonucleotide
auagguggauugagacauc

SEQ ID NO: 477212 - RNA, 19 nt, Artificial Sequence
  Description of Artificial Sequence: Synthetic oligonucleotide
ucccaggcguucuggcucu

SEQ ID NO: 477213 - RNA, 19 nt, Artificial Sequence
  Description of Artificial Sequence: Synthetic oligonucleotide
gaagucuguggaucaugcu

SEQ ID NO: 477214 - RNA, 19 nt, Artificial Sequence
  Description of Artificial Sequence: Synthetic oligonucleotide
cuaagcccuaaacauugcu

SEQ ID NO: 477215 - RNA, 19 nt, Artificial Sequence
  Description of Artificial Sequence: Synthetic oligonucleotide
gaauccagcggugggaaau

SEQ ID NO: 477216 - RNA, 19 nt, Artificial Sequence
  Description of Artificial Sequence: Synthetic oligonucleotide
ccuuagugggacugccagg

SEQ ID NO: 477217 - RNA, 19 nt, Artificial Sequence
  Description of Artificial Sequence: Synthetic oligonucleotide
ucguguuguccaccuggau

SEQ ID NO: 477218 - RNA, 19 nt, Artificial Sequence
  Description of Artificial Sequence: Synthetic oligonucleotide
cacccuuagugggacugcc

SEQ ID NO: 477219 - RNA, 19 nt, Artificial Sequence
  Description of Artificial Sequence: Synthetic oligonucleotide
gguauacugccaacagaug

SEQ ID NO: 477220 - RNA, 19 nt, Artificial Sequence
  Description of Artificial Sequence: Synthetic oligonucleotide
cagcagcagcagcagcagg

SEQ ID NO: 477221 - RNA, 19 nt, Artificial Sequence
  Description of Artificial Sequence: Synthetic oligonucleotide
cagagacaucugguguagg

SEQ ID NO: 477222 - RNA, 19 nt, Artificial Sequence
  Description of Artificial Sequence: Synthetic oligonucleotide
cucggaccaggcagaacuc

SEQ ID NO: 477223 - RNA, 19 nt, Artificial Sequence
  Description of Artificial Sequence: Synthetic oligonucleotide
cugauucguaacagggucu

SEQ ID NO: 477224 - RNA, 19 nt, Artificial Sequence
  Description of Artificial Sequence: Synthetic oligonucleotide
ucgcugguauacugccaac

SEQ ID NO: 477225 - RNA, 19 nt, Artificial Sequence
  Description of Artificial Sequence: Synthetic oligonucleotide
ggucuaucucuacuuuguc

SEQ ID NO: 477226 - RNA, 19 nt, Artificial Sequence
  Description of Artificial Sequence: Synthetic oligonucleotide
cuccgucugcccuugaacu

SEQ ID NO: 477227 - RNA, 19 nt, Artificial Sequence
  Description of Artificial Sequence: Synthetic oligonucleotide
cauugagcuuuggcucccg

SEQ ID NO: 477228 - RNA, 19 nt, Artificial Sequence
  Description of Artificial Sequence: Synthetic oligonucleotide
ccggagauaccuaacugca

SEQ ID NO: 477229 - RNA, 19 nt, Artificial Sequence
  Description of Artificial Sequence: Synthetic oligonucleotide
acuacuggcuaagcccuaa

SEQ ID NO: 477230 - RNA, 19 nt, Artificial Sequence
  Description of Artificial Sequence: Synthetic oligonucleotide
gaccuucguguuguccacc

SEQ ID NO: 477231 - RNA, 19 nt, Artificial Sequence
  Description of Artificial Sequence: Synthetic oligonucleotide
gauaaagaguacaccuguu

SEQ ID NO: 477232 - RNA, 19 nt, Artificial Sequence
  Description of Artificial Sequence: Synthetic oligonucleotide
gcuacaaauaauauaucuu

SEQ ID NO: 477233 - RNA, 19 nt, Artificial Sequence
  Description of Artificial Sequence: Synthetic oligonucleotide
auacacccuuagugggacu

SEQ ID NO: 477234 - RNA, 19 nt, Artificial Sequence
  Description of Artificial Sequence: Synthetic oligonucleotide
gacccuuugcaaagacaca

SEQ ID NO: 477235 - RNA, 19 nt, Artificial Sequence
  Description of Artificial Sequence: Synthetic oligonucleotide
acagagcaagcuacaaaua

SEQ ID NO: 477236 - RNA, 19 nt, Artificial Sequence
  Description of Artificial Sequence: Synthetic oligonucleotide
cuugggcauugcuacuuaa

SEQ ID NO: 477237 - RNA, 19 nt, Artificial Sequence
  Description of Artificial Sequence: Synthetic oligonucleotide
cuucgcugguauacugcca

SEQ ID NO: 477238 - RNA, 19 nt, Artificial Sequence
  Description of Artificial Sequence: Synthetic oligonucleotide
cucgcucgugacuccagga

SEQ ID NO: 477239 - RNA, 19 nt, Artificial Sequence
  Description of Artificial Sequence: Synthetic oligonucleotide
augcaggcaguaggcacug

SEQ ID NO: 477240 - RNA, 19 nt, Artificial Sequence
  Description of Artificial Sequence: Synthetic oligonucleotide
gcucgcucgugacuccagg

SEQ ID NO: 477241 - RNA, 19 nt, Artificial Sequence
  Description of Artificial Sequence: Synthetic oligonucleotide
aggggccauggugaggucu

SEQ ID NO: 477242 - RNA, 19 nt, Artificial Sequence
  Description of Artificial Sequence: Synthetic oligonucleotide
cagcagcagcagcagcagc

SEQ ID NO: 477243 - RNA, 19 nt, Artificial Sequence
  Description of Artificial Sequence: Synthetic oligonucleotide
cacugacuguggcugcauc

SEQ ID NO: 477244 - RNA, 19 nt, Artificial Sequence
  Description of Artificial Sequence: Synthetic oligonucleotide
cauggcuauauacacccuu

SEQ ID NO: 477245 - RNA, 19 nt, Artificial Sequence
  Description of Artificial Sequence: Synthetic oligonucleotide
ggguauuuaugacuuuuau

SEQ ID NO: 477246 - RNA, 19 nt, Artificial Sequence
  Description of Artificial Sequence: Synthetic oligonucleotide
cgcuucacugccuuuagca

SEQ ID NO: 477247 - RNA, 19 nt, Artificial Sequence
  Description of Artificial Sequence: Synthetic oligonucleotide
cucgaaguauaggugcuua

SEQ ID NO: 477248 - RNA, 19 nt, Artificial Sequence
  Description of Artificial Sequence: Synthetic oligonucleotide
cagagcaggucagaaucga

SEQ ID NO: 477249 - RNA, 19 nt, Artificial Sequence
  Description of Artificial Sequence: Synthetic oligonucleotide
augcucagacacaacgauu

SEQ ID NO: 477250 - RNA, 19 nt, Artificial Sequence
  Description of Artificial Sequence: Synthetic oligonucleotide
cuaugccugugagcccagg

SEQ ID NO: 477251 - RNA, 19 nt, Artificial Sequence
  Description of Artificial Sequence: Synthetic oligonucleotide
cggacucgaaguauaggug

SEQ ID NO: 477252 - RNA, 19 nt, Artificial Sequence
  Description of Artificial Sequence: Synthetic oligonucleotide
ggcagugcucgcucgugac

SEQ ID NO: 477253 - RNA, 19 nt, Artificial Sequence
  Description of Artificial Sequence: Synthetic oligonucleotide
agagcaggucagaaucgau

SEQ ID NO: 477254 - RNA, 19 nt, Artificial Sequence
  Description of Artificial Sequence: Synthetic oligonucleotide
acucgaaguauaggugcuu

SEQ ID NO: 477255 - RNA, 19 nt, Artificial Sequence
  Description of Artificial Sequence: Synthetic oligonucleotide
auccuguacuguagcgaug

SEQ ID NO: 477256 - RNA, 19 nt, Artificial Sequence
  Description of Artificial Sequence: Synthetic oligonucleotide
gagcaggucagaaucgauu

SEQ ID NO: 477257 - RNA, 19 nt, Artificial Sequence
  Description of Artificial Sequence: Synthetic oligonucleotide
gcaggucagaaucgauuga

SEQ ID NO: 477258 - RNA, 19 nt, Artificial Sequence
  Description of Artificial Sequence: Synthetic oligonucleotide
agguggauugagacaucga

SEQ ID NO: 477259 - RNA, 19 nt, Artificial Sequence
  Description of Artificial Sequence: Synthetic oligonucleotide
gucuccggagauaccuaac

SEQ ID NO: 477260 - RNA, 19 nt, Artificial Sequence
  Description of Artificial Sequence: Synthetic oligonucleotide
ggugggaaaucugugucua

SEQ ID NO: 477261 - RNA, 19 nt, Artificial Sequence
  Description of Artificial Sequence: Synthetic oligonucleotide
gcagcagcagcagcagcag

SEQ ID NO: 477262 - RNA, 19 nt, Artificial Sequence
  Description of Artificial Sequence: Synthetic oligonucleotide
acuuaugaaugggcucauu

SEQ ID NO: 477263 - RNA, 19 nt, Artificial Sequence
  Description of Artificial Sequence: Synthetic oligonucleotide
guugugaaccgaagucugu

SEQ ID NO: 477264 - RNA, 19 nt, Artificial Sequence
  Description of Artificial Sequence: Synthetic oligonucleotide
aacuacuggcuaagcccua

SEQ ID NO: 477265 - RNA, 19 nt, Artificial Sequence
  Description of Artificial Sequence: Synthetic oligonucleotide
cugcaucggacucgaagua

SEQ ID NO: 477266 - RNA, 19 nt, Artificial Sequence
  Description of Artificial Sequence: Synthetic oligonucleotide
guacgucuguucaguuuuc

SEQ ID NO: 477267 - RNA, 19 nt, Artificial Sequence
  Description of Artificial Sequence: Synthetic oligonucleotide
gcaacagauuggaggccag

SEQ ID NO: 477268 - RNA, 19 nt, Artificial Sequence
  Description of Artificial Sequence: Synthetic oligonucleotide
acguugucauugagcuuug

SEQ ID NO: 477269 - RNA, 19 nt, Artificial Sequence
  Description of Artificial Sequence: Synthetic oligonucleotide
gcccgaugaggucuugcac

SEQ ID NO: 477270 - RNA, 19 nt, Artificial Sequence
  Description of Artificial Sequence: Synthetic oligonucleotide
gggucuaucucuacuuugu

SEQ ID NO: 477271 - RNA, 19 nt, Artificial Sequence
  Description of Artificial Sequence: Synthetic oligonucleotide
acgguccaccauaccaacu

SEQ ID NO: 477272 - RNA, 19 nt, Artificial Sequence
  Description of Artificial Sequence: Synthetic oligonucleotide
ggaugucagaccaggagau

SEQ ID NO: 477273 - RNA, 19 nt, Artificial Sequence
  Description of Artificial Sequence: Synthetic oligonucleotide
gcgauguuaggcucacucu

SEQ ID NO: 477274 - RNA, 19 nt, Artificial Sequence
  Description of Artificial Sequence: Synthetic oligonucleotide
cuacuggcuaagcccuaaa

SEQ ID NO: 477275 - RNA, 19 nt, Artificial Sequence
  Description of Artificial Sequence: Synthetic oligonucleotide
cacuguuguccugauuucu

SEQ ID NO: 477276 - RNA, 19 nt, Artificial Sequence
  Description of Artificial Sequence: Synthetic oligonucleotide
ugagcccgaugaggucuug

SEQ ID NO: 477277 - RNA, 19 nt, Artificial Sequence
  Description of Artificial Sequence: Synthetic oligonucleotide
gcuuguacgucuguucagu

SEQ ID NO: 477278 - RNA, 19 nt, Artificial Sequence
  Description of Artificial Sequence: Synthetic oligonucleotide
cuuguacgucuguucaguu

SEQ ID NO: 477279 - RNA, 19 nt, Artificial Sequence
  Description of Artificial Sequence: Synthetic oligonucleotide
accgcaugacuggggcucu

SEQ ID NO: 477280 - RNA, 19 nt, Artificial Sequence
  Description of Artificial Sequence: Synthetic oligonucleotide
cguguuguccaccuggaua

SEQ ID NO: 477281 - RNA, 19 nt, Artificial Sequence
  Description of Artificial Sequence: Synthetic oligonucleotide
cgcacgcaugcaugcaugc

SEQ ID NO: 477282 - RNA, 19 nt, Artificial Sequence
  Description of Artificial Sequence: Synthetic oligonucleotide
cggagauaccuaacugcac

SEQ ID NO: 477283 - RNA, 19 nt, Artificial Sequence
  Description of Artificial Sequence: Synthetic oligonucleotide
gguguuccuguugucugaa

SEQ ID NO: 477284 - RNA, 19 nt, Artificial Sequence
  Description of Artificial Sequence: Synthetic oligonucleotide
ccgaagucuguggaucaug

SEQ ID NO: 477285 - RNA, 19 nt, Artificial Sequence
  Description of Artificial Sequence: Synthetic oligonucleotide
gauucguaacagggucuau

SEQ ID NO: 477286 - RNA, 19 nt, Artificial Sequence
  Description of Artificial Sequence: Synthetic oligonucleotide
guacuguagcgaugucaau

SEQ ID NO: 477287 - RNA, 19 nt, Artificial Sequence
  Description of Artificial Sequence: Synthetic oligonucleotide
gcucagacacaacgauuua

SEQ ID NO: 477288 - RNA, 19 nt, Artificial Sequence
  Description of Artificial Sequence: Synthetic oligonucleotide
aguugaccuugagcacgau

SEQ ID NO: 477289 - RNA, 19 nt, Artificial Sequence
  Description of Artificial Sequence: Synthetic oligonucleotide
ccuucguguuguccaccug

SEQ ID NO: 477290 - RNA, 19 nt, Artificial Sequence
  Description of Artificial Sequence: Synthetic oligonucleotide
cauuggcagcagucugucu

SEQ ID NO: 477291 - RNA, 19 nt, Artificial Sequence
  Description of Artificial Sequence: Synthetic oligonucleotide
cgugacuccaggauauagu

SEQ ID NO: 477292 - RNA, 19 nt, Artificial Sequence
  Description of Artificial Sequence: Synthetic oligonucleotide
cgguccaccauaccaacua

SEQ ID NO: 477293 - RNA, 19 nt, Artificial Sequence
  Description of Artificial Sequence: Synthetic oligonucleotide
ccaaaacuuagugcuggcu

SEQ ID NO: 477294 - RNA, 19 nt, Artificial Sequence
  Description of Artificial Sequence: Synthetic oligonucleotide
cucgugacuccaggauaua

SEQ ID NO: 477295 - RNA, 19 nt, Artificial Sequence
  Description of Artificial Sequence: Synthetic oligonucleotide
gcaugacuggggcucuuuu

SEQ ID NO: 477296 - RNA, 19 nt, Artificial Sequence
  Description of Artificial Sequence: Synthetic oligonucleotide
gcccgggcagugcucgcuc

SEQ ID NO: 477297 - RNA, 19 nt, Artificial Sequence
  Description of Artificial Sequence: Synthetic oligonucleotide
ccaccauaccaacuaugau

SEQ ID NO: 477298 - RNA, 19 nt, Artificial Sequence
  Description of Artificial Sequence: Synthetic oligonucleotide
cgcucgugacuccaggaua

SEQ ID NO: 477299 - RNA, 19 nt, Artificial Sequence
  Description of Artificial Sequence: Synthetic oligonucleotide
gcgcuccaaccauaguuuu

SEQ ID NO: 477300 - RNA, 19 nt, Artificial Sequence
  Description of Artificial Sequence: Synthetic oligonucleotide
cgauugagaugggcuucug

SEQ ID NO: 477301 - RNA, 19 nt, Artificial Sequence
  Description of Artificial Sequence: Synthetic oligonucleotide
gcucccguccuucgcuggu

SEQ ID NO: 477302 - RNA, 19 nt, Artificial Sequence
  Description of Artificial Sequence: Synthetic oligonucleotide
gcauggcuauauacacccu

SEQ ID NO: 477303 - RNA, 19 nt, Artificial Sequence
  Description of Artificial Sequence: Synthetic oligonucleotide
cauugucaccacggucauu

SEQ ID NO: 477304 - RNA, 19 nt, Artificial Sequence
  Description of Artificial Sequence: Synthetic oligonucleotide
cgacccuggugcuggccca

SEQ ID NO: 477305 - RNA, 19 nt, Artificial Sequence
  Description of Artificial Sequence: Synthetic oligonucleotide
cugcgauguuaggcucacu

SEQ ID NO: 477306 - RNA, 19 nt, Artificial Sequence
  Description of Artificial Sequence: Synthetic oligonucleotide
cguccuucgcugguauacu

SEQ ID NO: 477307 - RNA, 19 nt, Artificial Sequence
  Description of Artificial Sequence: Synthetic oligonucleotide
ccgcaugacuggggcucuu

SEQ ID NO: 477308 - RNA, 19 nt, Artificial Sequence
  Description of Artificial Sequence: Synthetic oligonucleotide
aaaauugugugugggaggc

SEQ ID NO: 477309 - RNA, 19 nt, Artificial Sequence
  Description of Artificial Sequence: Synthetic oligonucleotide
auuauagucacaaaccuac

SEQ ID NO: 477310 - RNA, 19 nt, Artificial Sequence
  Description of Artificial Sequence: Synthetic oligonucleotide
aagggauaggcuucaaccc

SEQ ID NO: 477311 - RNA, 19 nt, Artificial Sequence
  Description of Artificial Sequence: Synthetic oligonucleotide
aauggaguagcauccuggc

SEQ ID NO: 477312 - RNA, 19 nt, Artificial Sequence
  Description of Artificial Sequence: Synthetic oligonucleotide
uuaaaagcgcaucaaacac

SEQ ID NO: 477313 - RNA, 19 nt, Artificial Sequence
  Description of Artificial Sequence: Synthetic oligonucleotide
aauugcaacuccuccuccc

SEQ ID NO: 477314 - RNA, 19 nt, Artificial Sequence
  Description of Artificial Sequence: Synthetic oligonucleotide
uuuauaagggucccuagug

SEQ ID NO: 477315 - RNA, 19 nt, Artificial Sequence
  Description of Artificial Sequence: Synthetic oligonucleotide
ucagagacggaacuagugg

SEQ ID NO: 477316 - RNA, 19 nt, Artificial Sequence
  Description of Artificial Sequence: Synthetic oligonucleotide
uaaaagcgcaucaaacacg

SEQ ID NO: 477317 - RNA, 19 nt, Artificial Sequence
  Description of Artificial Sequence: Synthetic oligonucleotide
aaugagggguacaauauac

SEQ ID NO: 477318 - RNA, 19 nt, Artificial Sequence
  Description of Artificial Sequence: Synthetic oligonucleotide
uguugaaucgccugcgucg

SEQ ID NO: 477319 - RNA, 19 nt, Artificial Sequence
  Description of Artificial Sequence: Synthetic oligonucleotide
uuauaagggucccuagugg

SEQ ID NO: 477320 - RNA, 19 nt, Artificial Sequence
  Description of Artificial Sequence: Synthetic oligonucleotide
cuaucguuaauguugaauc

SEQ ID NO: 477321 - RNA, 19 nt, Artificial Sequence
  Description of Artificial Sequence: Synthetic oligonucleotide
gauccuaucguuaauguug

SEQ ID NO: 477322 - RNA, 19 nt, Artificial Sequence
  Description of Artificial Sequence: Synthetic oligonucleotide
uaucguuaauguugaaucg

SEQ ID NO: 477323 - RNA, 19 nt, Artificial Sequence
  Description of Artificial Sequence: Synthetic oligonucleotide
gauauugggaggcuggagc

SEQ ID NO: 477324 - RNA, 19 nt, Artificial Sequence
  Description of Artificial Sequence: Synthetic oligonucleotide
aaaacagccuggaugugcc

SEQ ID NO: 477325 - RNA, 19 nt, Artificial Sequence
  Description of Artificial Sequence: Synthetic oligonucleotide
cuaggcuuuucuuauagag

SEQ ID NO: 477326 - RNA, 19 nt, Artificial Sequence
  Description of Artificial Sequence: Synthetic oligonucleotide
aguucuagcuccugaauuc

SEQ ID NO: 477327 - RNA, 19 nt, Artificial Sequence
  Description of Artificial Sequence: Synthetic oligonucleotide
acacucuuacuucggaucc

SEQ ID NO: 477328 - RNA, 19 nt, Artificial Sequence
  Description of Artificial Sequence: Synthetic oligonucleotide
guugcagagaaguacuggg

SEQ ID NO: 477329 - RNA, 19 nt, Artificial Sequence
  Description of Artificial Sequence: Synthetic oligonucleotide
agacuuuagccccuugggc

SEQ ID NO: 477330 - RNA, 19 nt, Artificial Sequence
  Description of Artificial Sequence: Synthetic oligonucleotide
aagcgcaucaaacacgccu

SEQ ID NO: 477331 - RNA, 19 nt, Artificial Sequence
  Description of Artificial Sequence: Synthetic oligonucleotide
cuagcauuuauuauaguca

SEQ ID NO: 477332 - RNA, 19 nt, Artificial Sequence
  Description of Artificial Sequence: Synthetic oligonucleotide
uauaagggucccuaguggc

SEQ ID NO: 477333 - RNA, 19 nt, Artificial Sequence
  Description of Artificial Sequence: Synthetic oligonucleotide
uccucuauaccugaaauac

SEQ ID NO: 477334 - RNA, 19 nt, Artificial Sequence
  Description of Artificial Sequence: Synthetic oligonucleotide
uuuuguaauuugcggaugu

SEQ ID NO: 477335 - RNA, 19 nt, Artificial Sequence
  Description of Artificial Sequence: Synthetic oligonucleotide
gagacuuuagccccuuggg

SEQ ID NO: 477336 - RNA, 19 nt, Artificial Sequence
  Description of Artificial Sequence: Synthetic oligonucleotide
aaaccuacagaccccucag

SEQ ID NO: 477337 - RNA, 19 nt, Artificial Sequence
  Description of Artificial Sequence: Synthetic oligonucleotide
agacaaguacuguuucacc

SEQ ID NO: 477338 - RNA, 19 nt, Artificial Sequence
  Description of Artificial Sequence: Synthetic oligonucleotide
auauugggaggcuggagcg

SEQ ID NO: 477339 - RNA, 19 nt, Artificial Sequence
  Description of Artificial Sequence: Synthetic oligonucleotide
uguaauuugcggauguaau

SEQ ID NO: 477340 - RNA, 19 nt, Artificial Sequence
  Description of Artificial Sequence: Synthetic oligonucleotide
uuugcuacccuucauccaa

SEQ ID NO: 477341 - RNA, 19 nt, Artificial Sequence
  Description of Artificial Sequence: Synthetic oligonucleotide
guuaauguugaaucgccug

SEQ ID NO: 477342 - RNA, 19 nt, Artificial Sequence
  Description of Artificial Sequence: Synthetic oligonucleotide
ucuuauagagggauguguc

SEQ ID NO: 477343 - RNA, 19 nt, Artificial Sequence
  Description of Artificial Sequence: Synthetic oligonucleotide
uuggcuuuugagcucguag

SEQ ID NO: 477344 - RNA, 19 nt, Artificial Sequence
  Description of Artificial Sequence: Synthetic oligonucleotide
ucguuaauguugaaucgcc

SEQ ID NO: 477345 - RNA, 19 nt, Artificial Sequence
  Description of Artificial Sequence: Synthetic oligonucleotide
ggaacuaguggcuagggag

SEQ ID NO: 477346 - RNA, 19 nt, Artificial Sequence
  Description of Artificial Sequence: Synthetic oligonucleotide
aggagugagacccaaucag

SEQ ID NO: 477347 - RNA, 19 nt, Artificial Sequence
  Description of Artificial Sequence: Synthetic oligonucleotide
uuugauccuaucguuaaug

SEQ ID NO: 477348 - RNA, 19 nt, Artificial Sequence
  Description of Artificial Sequence: Synthetic oligonucleotide
uuacgggagacuuuagccc

SEQ ID NO: 477349 - RNA, 19 nt, Artificial Sequence
  Description of Artificial Sequence: Synthetic oligonucleotide
uggaguagcauccuggcau

SEQ ID NO: 477350 - RNA, 19 nt, Artificial Sequence
  Description of Artificial Sequence: Synthetic oligonucleotide
gaagacgaugcagagagug

SEQ ID NO: 477351 - RNA, 19 nt, Artificial Sequence
  Description of Artificial Sequence: Synthetic oligonucleotide
gaauggaguagcauccugg

SEQ ID NO: 477352 - RNA, 19 nt, Artificial Sequence
  Description of Artificial Sequence: Synthetic oligonucleotide
ugcuaggcuuuucuuauag

SEQ ID NO: 477353 - RNA, 19 nt, Artificial Sequence
  Description of Artificial Sequence: Synthetic oligonucleotide
ucuaauucgaugucagcaa

SEQ ID NO: 477354 - RNA, 19 nt, Artificial Sequence
  Description of Artificial Sequence: Synthetic oligonucleotide
uauuauagucacaaaccua

SEQ ID NO: 477355 - RNA, 19 nt, Artificial Sequence
  Description of Artificial Sequence: Synthetic oligonucleotide
cuuacuucggauccuugcc

SEQ ID NO: 477356 - RNA, 19 nt, Artificial Sequence
  Description of Artificial Sequence: Synthetic oligonucleotide
aauucggagcugcagacuu

SEQ ID NO: 477357 - RNA, 19 nt, Artificial Sequence
  Description of Artificial Sequence: Synthetic oligonucleotide
ugaucuaguuucugaguag

SEQ ID NO: 477358 - RNA, 19 nt, Artificial Sequence
  Description of Artificial Sequence: Synthetic oligonucleotide
uguuuauaagggucccuag

SEQ ID NO: 477359 - RNA, 19 nt, Artificial Sequence
  Description of Artificial Sequence: Synthetic oligonucleotide
uauaccuuugcuacccuuc

SEQ ID NO: 477360 - RNA, 19 nt, Artificial Sequence
  Description of Artificial Sequence: Synthetic oligonucleotide
uccagaagggcauccgagg

SEQ ID NO: 477361 - RNA, 19 nt, Artificial Sequence
  Description of Artificial Sequence: Synthetic oligonucleotide
aaauaccugugcuaggcuu

SEQ ID NO: 477362 - RNA, 19 nt, Artificial Sequence
  Description of Artificial Sequence: Synthetic oligonucleotide
aucuccggaucauuggaac

SEQ ID NO: 477363 - RNA, 19 nt, Artificial Sequence
  Description of Artificial Sequence: Synthetic oligonucleotide
uaauucgaugucagcaaca

SEQ ID NO: 477364 - RNA, 19 nt, Artificial Sequence
  Description of Artificial Sequence: Synthetic oligonucleotide
ucauagggaagggauaggc

SEQ ID NO: 477365 - RNA, 19 nt, Artificial Sequence
  Description of Artificial Sequence: Synthetic oligonucleotide
uacgggagacuuuagcccc

SEQ ID NO: 477366 - RNA, 19 nt, Artificial Sequence
  Description of Artificial Sequence: Synthetic oligonucleotide
gaugcagagaguguagcug

SEQ ID NO: 477367 - RNA, 19 nt, Artificial Sequence
  Description of Artificial Sequence: Synthetic oligonucleotide
ucaaacacgccuagcauuu

SEQ ID NO: 477368 - RNA, 19 nt, Artificial Sequence
  Description of Artificial Sequence: Synthetic oligonucleotide
caguaaacccuccuugggg

SEQ ID NO: 477369 - RNA, 19 nt, Artificial Sequence
  Description of Artificial Sequence: Synthetic oligonucleotide
auggaaaauuguguguggg

SEQ ID NO: 477370 - RNA, 19 nt, Artificial Sequence
  Description of Artificial Sequence: Synthetic oligonucleotide
cagagacggaacuaguggc

SEQ ID NO: 477371 - RNA, 19 nt, Artificial Sequence
  Description of Artificial Sequence: Synthetic oligonucleotide
uuacuucggauccuugcca

SEQ ID NO: 477372 - RNA, 19 nt, Artificial Sequence
  Description of Artificial Sequence: Synthetic oligonucleotide
aauguugaaucgccugcgu

SEQ ID NO: 477373 - RNA, 19 nt, Artificial Sequence
  Description of Artificial Sequence: Synthetic oligonucleotide
uugauccuaucguuaaugu

SEQ ID NO: 477374 - RNA, 19 nt, Artificial Sequence
  Description of Artificial Sequence: Synthetic oligonucleotide
aaaugagggguacaauaua

SEQ ID NO: 477375 - RNA, 19 nt, Artificial Sequence
  Description of Artificial Sequence: Synthetic oligonucleotide
cuaauugcaacuccuccuc

SEQ ID NO: 477376 - RNA, 19 nt, Artificial Sequence
  Description of Artificial Sequence: Synthetic oligonucleotide
caaaguuaaaagcgcauca

SEQ ID NO: 477377 - RNA, 19 nt, Artificial Sequence
  Description of Artificial Sequence: Synthetic oligonucleotide
ucuagcuccugaauucgga

SEQ ID NO: 477378 - RNA, 19 nt, Artificial Sequence
  Description of Artificial Sequence: Synthetic oligonucleotide
agagauauugggaggcugg

SEQ ID NO: 477379 - RNA, 19 nt, Artificial Sequence
  Description of Artificial Sequence: Synthetic oligonucleotide
accaccuuaucccgccucc

SEQ ID NO: 477380 - RNA, 19 nt, Artificial Sequence
  Description of Artificial Sequence: Synthetic oligonucleotide
uagacaaguacuguuucac

SEQ ID NO: 477381 - RNA, 19 nt, Artificial Sequence
  Description of Artificial Sequence: Synthetic oligonucleotide
agcucguagaagcugucag

SEQ ID NO: 477382 - RNA, 19 nt, Artificial Sequence
  Description of Artificial Sequence: Synthetic oligonucleotide
uguuuucuaauucgauguc

SEQ ID NO: 477383 - RNA, 19 nt, Artificial Sequence
  Description of Artificial Sequence: Synthetic oligonucleotide
auguugaaucgccugcguc

SEQ ID NO: 477384 - RNA, 19 nt, Artificial Sequence
  Description of Artificial Sequence: Synthetic oligonucleotide
uuauagucacaaaccuaca

SEQ ID NO: 477385 - RNA, 19 nt, Artificial Sequence
  Description of Artificial Sequence: Synthetic oligonucleotide
uucuagcuccugaauucgg

SEQ ID NO: 477386 - RNA, 19 nt, Artificial Sequence
  Description of Artificial Sequence: Synthetic oligonucleotide
uccggaagcaaagaauuca

SEQ ID NO: 477387 - RNA, 19 nt, Artificial Sequence
  Description of Artificial Sequence: Synthetic oligonucleotide
aauauaccuuugcuacccu

SEQ ID NO: 477388 - RNA, 19 nt, Artificial Sequence
  Description of Artificial Sequence: Synthetic oligonucleotide
agcgccauggggcuguuag

SEQ ID NO: 477389 - RNA, 19 nt, Artificial Sequence
  Description of Artificial Sequence: Synthetic oligonucleotide
agggagagcaguccugggg

SEQ ID NO: 477390 - RNA, 19 nt, Artificial Sequence
  Description of Artificial Sequence: Synthetic oligonucleotide
cuaauucgaugucagcaac

SEQ ID NO: 477391 - RNA, 19 nt, Artificial Sequence
  Description of Artificial Sequence: Synthetic oligonucleotide
augagggguacaauauacc

SEQ ID NO: 477392 - RNA, 19 nt, Artificial Sequence
  Description of Artificial Sequence: Synthetic oligonucleotide
uaauugcaacuccuccucc

SEQ ID NO: 477393 - RNA, 19 nt, Artificial Sequence
  Description of Artificial Sequence: Synthetic oligonucleotide
agagaguguagcuggggug

SEQ ID NO: 477394 - RNA, 19 nt, Artificial Sequence
  Description of Artificial Sequence: Synthetic oligonucleotide
aaagcugggcuggcaauuc

SEQ ID NO: 477395 - RNA, 19 nt, Artificial Sequence
  Description of Artificial Sequence: Synthetic oligonucleotide
uccuccaaugccaggaaaa

SEQ ID NO: 477396 - RNA, 19 nt, Artificial Sequence
  Description of Artificial Sequence: Synthetic oligonucleotide
ugacgcagcaagacccgcg

SEQ ID NO: 477397 - RNA, 19 nt, Artificial Sequence
  Description of Artificial Sequence: Synthetic oligonucleotide
aucaaacacgccuagcauu

SEQ ID NO: 477398 - RNA, 19 nt, Artificial Sequence
  Description of Artificial Sequence: Synthetic oligonucleotide
gggagaccuguuuauaagg

SEQ ID NO: 477399 - RNA, 19 nt, Artificial Sequence
  Description of Artificial Sequence: Synthetic oligonucleotide
uuguaauuugcggauguaa

SEQ ID NO: 477400 - RNA, 19 nt, Artificial Sequence
  Description of Artificial Sequence: Synthetic oligonucleotide
aaacacgccuagcauuuau

SEQ ID NO: 477401 - RNA, 19 nt, Artificial Sequence
  Description of Artificial Sequence: Synthetic oligonucleotide
gaccuguuuauaagggucc

SEQ ID NO: 477402 - RNA, 19 nt, Artificial Sequence
  Description of Artificial Sequence: Synthetic oligonucleotide
uugggagaccuguuuauaa

SEQ ID NO: 477403 - RNA, 19 nt, Artificial Sequence
  Description of Artificial Sequence: Synthetic oligonucleotide
gcgucguucaauuagguuc

SEQ ID NO: 477404 - RNA, 19 nt, Artificial Sequence
  Description of Artificial Sequence: Synthetic oligonucleotide
agggauaggcuucaacccu

SEQ ID NO: 477405 - RNA, 19 nt, Artificial Sequence
  Description of Artificial Sequence: Synthetic oligonucleotide
ggccccagcaauuuaaagc

SEQ ID NO: 477406 - RNA, 19 nt, Artificial Sequence
  Description of Artificial Sequence: Synthetic oligonucleotide
ggagacuuuagccccuugg

SEQ ID NO: 477407 - RNA, 19 nt, Artificial Sequence
  Description of Artificial Sequence: Synthetic oligonucleotide
aacuaguggcuagggagag

SEQ ID NO: 477408 - RNA, 19 nt, Artificial Sequence
  Description of Artificial Sequence: Synthetic oligonucleotide
uggacgacccagugugugg

SEQ ID NO: 477409 - RNA, 19 nt, Artificial Sequence
  Description of Artificial Sequence: Synthetic oligonucleotide
agacccgcgaugaagauga

SEQ ID NO: 477410 - RNA, 19 nt, Artificial Sequence
  Description of Artificial Sequence: Synthetic oligonucleotide
accuguuuauaaggguccc

SEQ ID NO: 477411 - RNA, 19 nt, Artificial Sequence
  Description of Artificial Sequence: Synthetic oligonucleotide
agcuggauccaauggugag

SEQ ID NO: 477412 - RNA, 19 nt, Artificial Sequence
  Description of Artificial Sequence: Synthetic oligonucleotide
acgccuagcauuuauuaua

SEQ ID NO: 477413 - RNA, 19 nt, Artificial Sequence
  Description of Artificial Sequence: Synthetic oligonucleotide
caggguuggggccuaauug

SEQ ID NO: 477414 - RNA, 19 nt, Artificial Sequence
  Description of Artificial Sequence: Synthetic oligonucleotide
gucccuaguggccaggggc

SEQ ID NO: 477415 - RNA, 19 nt, Artificial Sequence
  Description of Artificial Sequence: Synthetic oligonucleotide
gauuggggaagggagcagc

SEQ ID NO: 477416 - RNA, 19 nt, Artificial Sequence
  Description of Artificial Sequence: Synthetic oligonucleotide
auaccuuugcuacccuuca

SEQ ID NO: 477417 - RNA, 19 nt, Artificial Sequence
  Description of Artificial Sequence: Synthetic oligonucleotide
uacaaguugcagagaagua

SEQ ID NO: 477418 - RNA, 19 nt, Artificial Sequence
  Description of Artificial Sequence: Synthetic oligonucleotide
agcaagacccgcgaugaag

SEQ ID NO: 477419 - RNA, 19 nt, Artificial Sequence
  Description of Artificial Sequence: Synthetic oligonucleotide
gaggagugagacccaauca

SEQ ID NO: 477420 - RNA, 19 nt, Artificial Sequence
  Description of Artificial Sequence: Synthetic oligonucleotide
ugucagagacggaacuagu

SEQ ID NO: 477421 - RNA, 19 nt, Artificial Sequence
  Description of Artificial Sequence: Synthetic oligonucleotide
gaugugcccuuccuuuacc

SEQ ID NO: 477422 - RNA, 19 nt, Artificial Sequence
  Description of Artificial Sequence: Synthetic oligonucleotide
caggauuggggaagggagc

SEQ ID NO: 477423 - RNA, 19 nt, Artificial Sequence
  Description of Artificial Sequence: Synthetic oligonucleotide
uuccucuauaccugaaaua

SEQ ID NO: 477424 - RNA, 19 nt, Artificial Sequence
  Description of Artificial Sequence: Synthetic oligonucleotide
cugucagagacggaacuag

SEQ ID NO: 477425 - RNA, 19 nt, Artificial Sequence
  Description of Artificial Sequence: Synthetic oligonucleotide
guagacaaguacuguuuca

SEQ ID NO: 477426 - RNA, 19 nt, Artificial Sequence
  Description of Artificial Sequence: Synthetic oligonucleotide
ggagaccuguuuauaaggg

SEQ ID NO: 477427 - RNA, 19 nt, Artificial Sequence
  Description of Artificial Sequence: Synthetic oligonucleotide
guuggggccuaauugcaac

SEQ ID NO: 477428 - RNA, 19 nt, Artificial Sequence
  Description of Artificial Sequence: Synthetic oligonucleotide
ucuccggaucauuggaacu

SEQ ID NO: 477429 - RNA, 19 nt, Artificial Sequence
  Description of Artificial Sequence: Synthetic oligonucleotide
gacggaacuaguggcuagg

SEQ ID NO: 477430 - RNA, 19 nt, Artificial Sequence
  Description of Artificial Sequence: Synthetic oligonucleotide
uucaacccuccagggaugg

SEQ ID NO: 477431 - RNA, 19 nt, Artificial Sequence
  Description of Artificial Sequence: Synthetic oligonucleotide
ggucauagggaagggauag

SEQ ID NO: 477432 - RNA, 19 nt, Artificial Sequence
  Description of Artificial Sequence: Synthetic oligonucleotide
ggguggacgacccagugug

SEQ ID NO: 477433 - RNA, 19 nt, Artificial Sequence
  Description of Artificial Sequence: Synthetic oligonucleotide
aaagcgcaucaaacacgcc

SEQ ID NO: 477434 - RNA, 19 nt, Artificial Sequence
  Description of Artificial Sequence: Synthetic oligonucleotide
cuuuuguaauuugcggaug

SEQ ID NO: 477435 - RNA, 19 nt, Artificial Sequence
  Description of Artificial Sequence: Synthetic oligonucleotide
aagacccgcgaugaagaug

SEQ ID NO: 477436 - RNA, 19 nt, Artificial Sequence
  Description of Artificial Sequence: Synthetic oligonucleotide
ccuuugcuacccuucaucc

SEQ ID NO: 477437 - RNA, 19 nt, Artificial Sequence
  Description of Artificial Sequence: Synthetic oligonucleotide
cuauaccugaaauaccugu

SEQ ID NO: 477438 - RNA, 19 nt, Artificial Sequence
  Description of Artificial Sequence: Synthetic oligonucleotide
uuccggaagcaaagaauuc

SEQ ID NO: 477439 - RNA, 19 nt, Artificial Sequence
  Description of Artificial Sequence: Synthetic oligonucleotide
gacgaugcagagaguguag

SEQ ID NO: 477440 - RNA, 19 nt, Artificial Sequence
  Description of Artificial Sequence: Synthetic oligonucleotide
uugcuacccuucauccaag

SEQ ID NO: 477441 - RNA, 19 nt, Artificial Sequence
  Description of Artificial Sequence: Synthetic oligonucleotide
cuucggauccuugccagag

SEQ ID NO: 477442 - RNA, 19 nt, Artificial Sequence
  Description of Artificial Sequence: Synthetic oligonucleotide
cuaguggcuagggagagca

SEQ ID NO: 477443 - RNA, 19 nt, Artificial Sequence
  Description of Artificial Sequence: Synthetic oligonucleotide
aaguugcagagaaguacug

SEQ ID NO: 477444 - RNA, 19 nt, Artificial Sequence
  Description of Artificial Sequence: Synthetic oligonucleotide
ggagugagacccaaucagg

SEQ ID NO: 477445 - RNA, 19 nt, Artificial Sequence
  Description of Artificial Sequence: Synthetic oligonucleotide
uguuaggagcacugccugu

SEQ ID NO: 477446 - RNA, 19 nt, Artificial Sequence
  Description of Artificial Sequence: Synthetic oligonucleotide
cugauacaugaaaugaugu

SEQ ID NO: 477447 - RNA, 19 nt, Artificial Sequence
  Description of Artificial Sequence: Synthetic oligonucleotide
uucggauccuugccagagc

SEQ ID NO: 477448 - RNA, 19 nt, Artificial Sequence
  Description of Artificial Sequence: Synthetic oligonucleotide
accuacagaccccucagua

SEQ ID NO: 477449 - RNA, 19 nt, Artificial Sequence
  Description of Artificial Sequence: Synthetic oligonucleotide
caaucccggauuccggaag

SEQ ID NO: 477450 - RNA, 19 nt, Artificial Sequence
  Description of Artificial Sequence: Synthetic oligonucleotide
guuuauaagggucccuagu

SEQ ID NO: 477451 - RNA, 19 nt, Artificial Sequence
  Description of Artificial Sequence: Synthetic oligonucleotide
cuacagaccccucaguaaa

SEQ ID NO: 477452 - RNA, 19 nt, Artificial Sequence
  Description of Artificial Sequence: Synthetic oligonucleotide
uggccccagcaauuuaaag

SEQ ID NO: 477453 - RNA, 19 nt, Artificial Sequence
  Description of Artificial Sequence: Synthetic oligonucleotide
ggguacaauauaccuuugc

SEQ ID NO: 477454 - RNA, 19 nt, Artificial Sequence
  Description of Artificial Sequence: Synthetic oligonucleotide
cuuuuacgggagacuuuag

SEQ ID NO: 477455 - RNA, 19 nt, Artificial Sequence
  Description of Artificial Sequence: Synthetic oligonucleotide
gugugguagacaaguacug

SEQ ID NO: 477456 - RNA, 19 nt, Artificial Sequence
  Description of Artificial Sequence: Synthetic oligonucleotide
ggauccaauggugagcagc

SEQ ID NO: 477457 - RNA, 19 nt, Artificial Sequence
  Description of Artificial Sequence: Synthetic oligonucleotide
uagcgugugggguucucca

SEQ ID NO: 477458 - RNA, 19 nt, Artificial Sequence
  Description of Artificial Sequence: Synthetic oligonucleotide
gcucguagaagcugucagg

SEQ ID NO: 477459 - RNA, 19 nt, Artificial Sequence
  Description of Artificial Sequence: Synthetic oligonucleotide
ugaugucgugcuuggccug

SEQ ID NO: 477460 - RNA, 19 nt, Artificial Sequence
  Description of Artificial Sequence: Synthetic oligonucleotide
cccgcgaugaagaugauga

SEQ ID NO: 477461 - RNA, 19 nt, Artificial Sequence
  Description of Artificial Sequence: Synthetic oligonucleotide
uuggggccuaauugcaacu

SEQ ID NO: 477462 - RNA, 19 nt, Artificial Sequence
  Description of Artificial Sequence: Synthetic oligonucleotide
gccuaauugcaacuccucc

SEQ ID NO: 477463 - RNA, 19 nt, Artificial Sequence
  Description of Artificial Sequence: Synthetic oligonucleotide
ucguucaauuagguucucc

SEQ ID NO: 477464 - RNA, 19 nt, Artificial Sequence
  Description of Artificial Sequence: Synthetic oligonucleotide
ugaaucgccugcgucguuc

SEQ ID NO: 477465 - RNA, 19 nt, Artificial Sequence
  Description of Artificial Sequence: Synthetic oligonucleotide
cauggggcuguuaggagca

SEQ ID NO: 477466 - RNA, 19 nt, Artificial Sequence
  Description of Artificial Sequence: Synthetic oligonucleotide
uuaucccgccuccuuccca

SEQ ID NO: 477467 - RNA, 19 nt, Artificial Sequence
  Description of Artificial Sequence: Synthetic oligonucleotide
ccugcgucguucaauuagg

SEQ ID NO: 477468 - RNA, 19 nt, Artificial Sequence
  Description of Artificial Sequence: Synthetic oligonucleotide
cugcugacgcagcaagacc

SEQ ID NO: 477469 - RNA, 19 nt, Artificial Sequence
  Description of Artificial Sequence: Synthetic oligonucleotide
agcggagggguagagguug

SEQ ID NO: 477470 - RNA, 19 nt, Artificial Sequence
  Description of Artificial Sequence: Synthetic oligonucleotide
ugcuacccuucauccaagc

SEQ ID NO: 477471 - RNA, 19 nt, Artificial Sequence
  Description of Artificial Sequence: Synthetic oligonucleotide
auggaguagcauccuggca

SEQ ID NO: 477472 - RNA, 19 nt, Artificial Sequence
  Description of Artificial Sequence: Synthetic oligonucleotide
auccuaucguuaauguuga

SEQ ID NO: 477473 - RNA, 19 nt, Artificial Sequence
  Description of Artificial Sequence: Synthetic oligonucleotide
uuuguaauuugcggaugua

SEQ ID NO: 477474 - RNA, 19 nt, Artificial Sequence
  Description of Artificial Sequence: Synthetic oligonucleotide
auauaccuuugcuacccuu

SEQ ID NO: 477475 - RNA, 19 nt, Artificial Sequence
  Description of Artificial Sequence: Synthetic oligonucleotide
uccggaucauuggaacuug

SEQ ID NO: 477476 - RNA, 19 nt, Artificial Sequence
  Description of Artificial Sequence: Synthetic oligonucleotide
cagacuucgguuggcuugc

SEQ ID NO: 477477 - RNA, 19 nt, Artificial Sequence
  Description of Artificial Sequence: Synthetic oligonucleotide
cugaggugcauucuggaua

SEQ ID NO: 477478 - RNA, 19 nt, Artificial Sequence
  Description of Artificial Sequence: Synthetic oligonucleotide
gccugcgucguucaauuag

SEQ ID NO: 477479 - RNA, 19 nt, Artificial Sequence
  Description of Artificial Sequence: Synthetic oligonucleotide
gaugucgugcuuggccugc

SEQ ID NO: 477480 - RNA, 19 nt, Artificial Sequence
  Description of Artificial Sequence: Synthetic oligonucleotide
caugccuaggcaggaguag

SEQ ID NO: 477481 - RNA, 19 nt, Artificial Sequence
  Description of Artificial Sequence: Synthetic oligonucleotide
cuuaucccgccuccuuccc

SEQ ID NO: 477482 - RNA, 19 nt, Artificial Sequence
  Description of Artificial Sequence: Synthetic oligonucleotide
cucacgccucuccugcucc

SEQ ID NO: 477483 - RNA, 19 nt, Artificial Sequence
  Description of Artificial Sequence: Synthetic oligonucleotide
gucauagggaagggauagg

SEQ ID NO: 477484 - RNA, 19 nt, Artificial Sequence
  Description of Artificial Sequence: Synthetic oligonucleotide
acggaacuaguggcuaggg

SEQ ID NO: 477485 - RNA, 19 nt, Artificial Sequence
  Description of Artificial Sequence: Synthetic oligonucleotide
ggaaagugcagguccagaa

SEQ ID NO: 477486 - RNA, 19 nt, Artificial Sequence
  Description of Artificial Sequence: Synthetic oligonucleotide
cuuugcuacccuucaucca

SEQ ID NO: 477487 - RNA, 19 nt, Artificial Sequence
  Description of Artificial Sequence: Synthetic oligonucleotide
gauuccggaagcaaagaau

SEQ ID NO: 477488 - RNA, 19 nt, Artificial Sequence
  Description of Artificial Sequence: Synthetic oligonucleotide
ggaauggaguagcauccug

SEQ ID NO: 477489 - RNA, 19 nt, Artificial Sequence
  Description of Artificial Sequence: Synthetic oligonucleotide
ccucuauaccugaaauacc

SEQ ID NO: 477490 - RNA, 19 nt, Artificial Sequence
  Description of Artificial Sequence: Synthetic oligonucleotide
guuccucuauaccugaaau

SEQ ID NO: 477491 - RNA, 19 nt, Artificial Sequence
  Description of Artificial Sequence: Synthetic oligonucleotide
agacgaugcagagagugua

SEQ ID NO: 477492 - RNA, 19 nt, Artificial Sequence
  Description of Artificial Sequence: Synthetic oligonucleotide
ugcgucguucaauuagguu

SEQ ID NO: 477493 - RNA, 19 nt, Artificial Sequence
  Description of Artificial Sequence: Synthetic oligonucleotide
cagagauauugggaggcug

SEQ ID NO: 477494 - RNA, 19 nt, Artificial Sequence
  Description of Artificial Sequence: Synthetic oligonucleotide
cugggguuccucuauaccu

SEQ ID NO: 477495 - RNA, 19 nt, Artificial Sequence
  Description of Artificial Sequence: Synthetic oligonucleotide
cugaagaccuuggcuguag

SEQ ID NO: 477496 - RNA, 19 nt, Artificial Sequence
  Description of Artificial Sequence: Synthetic oligonucleotide
cauggccccagcaauuuaa

SEQ ID NO: 477497 - RNA, 19 nt, Artificial Sequence
  Description of Artificial Sequence: Synthetic oligonucleotide
agggguaguuccccauaug

SEQ ID NO: 477498 - RNA, 19 nt, Artificial Sequence
  Description of Artificial Sequence: Synthetic oligonucleotide
gcaggugguagcguguggg

SEQ ID NO: 477499 - RNA, 19 nt, Artificial Sequence
  Description of Artificial Sequence: Synthetic oligonucleotide
gagauauugggaggcugga

SEQ ID NO: 477500 - RNA, 19 nt, Artificial Sequence
  Description of Artificial Sequence: Synthetic oligonucleotide
caggucuuuggagcguugc

SEQ ID NO: 477501 - RNA, 19 nt, Artificial Sequence
  Description of Artificial Sequence: Synthetic oligonucleotide
gaagaccuuggcuguaggu

SEQ ID NO: 477502 - RNA, 19 nt, Artificial Sequence
  Description of Artificial Sequence: Synthetic oligonucleotide
ugccuauuacaggguuggg

SEQ ID NO: 477503 - RNA, 19 nt, Artificial Sequence
  Description of Artificial Sequence: Synthetic oligonucleotide
gacgccaaucacagagaug

SEQ ID NO: 477504 - RNA, 19 nt, Artificial Sequence
  Description of Artificial Sequence: Synthetic oligonucleotide
uucgguuggcuugcuccag

SEQ ID NO: 477505 - RNA, 19 nt, Artificial Sequence
  Description of Artificial Sequence: Synthetic oligonucleotide
cugugcuaggcuuuucuua

SEQ ID NO: 477506 - RNA, 19 nt, Artificial Sequence
  Description of Artificial Sequence: Synthetic oligonucleotide
guuccagcgcaucuccgga

SEQ ID NO: 477507 - RNA, 19 nt, Artificial Sequence
  Description of Artificial Sequence: Synthetic oligonucleotide
ccuuaucccgccuccuucc

SEQ ID NO: 477508 - RNA, 19 nt, Artificial Sequence
  Description of Artificial Sequence: Synthetic oligonucleotide
gacgacccaguguguggcc

SEQ ID NO: 477509 - RNA, 19 nt, Artificial Sequence
  Description of Artificial Sequence: Synthetic oligonucleotide
gccccagcaauuuaaagcu

SEQ ID NO: 477510 - RNA, 19 nt, Artificial Sequence
  Description of Artificial Sequence: Synthetic oligonucleotide
aaacccuccuuggggcaug

SEQ ID NO: 477511 - RNA, 19 nt, Artificial Sequence
  Description of Artificial Sequence: Synthetic oligonucleotide
ccggauuccggaagcaaag

SEQ ID NO: 477512 - RNA, 19 nt, Artificial Sequence
  Description of Artificial Sequence: Synthetic oligonucleotide
cuguuuauaagggucccua

SEQ ID NO: 477513 - RNA, 19 nt, Artificial Sequence
  Description of Artificial Sequence: Synthetic oligonucleotide
uggauccaauggugagcag

SEQ ID NO: 477514 - RNA, 19 nt, Artificial Sequence
  Description of Artificial Sequence: Synthetic oligonucleotide
guggacgacccagugugug

SEQ ID NO: 477515 - RNA, 19 nt, Artificial Sequence
  Description of Artificial Sequence: Synthetic oligonucleotide
ugcagacuucgguuggcuu

SEQ ID NO: 477516 - RNA, 19 nt, Artificial Sequence
  Description of Artificial Sequence: Synthetic oligonucleotide
ucaacccuccagggauggg

SEQ ID NO: 477517 - RNA, 19 nt, Artificial Sequence
  Description of Artificial Sequence: Synthetic oligonucleotide
aggaauggaguagcauccu

SEQ ID NO: 477518 - RNA, 19 nt, Artificial Sequence
  Description of Artificial Sequence: Synthetic oligonucleotide
cgccuagcauuuauuauag

SEQ ID NO: 477519 - RNA, 19 nt, Artificial Sequence
  Description of Artificial Sequence: Synthetic oligonucleotide
guagcgugugggguucucc

SEQ ID NO: 477520 - RNA, 19 nt, Artificial Sequence
  Description of Artificial Sequence: Synthetic oligonucleotide
uaaacccuccuuggggcau

SEQ ID NO: 477521 - RNA, 19 nt, Artificial Sequence
  Description of Artificial Sequence: Synthetic oligonucleotide
guuaggagcacugccugua

SEQ ID NO: 477522 - RNA, 19 nt, Artificial Sequence
  Description of Artificial Sequence: Synthetic oligonucleotide
ggauuccggaagcaaagaa

SEQ ID NO: 477523 - RNA, 19 nt, Artificial Sequence
  Description of Artificial Sequence: Synthetic oligonucleotide
gagacgccaaucacagaga

SEQ ID NO: 477524 - RNA, 19 nt, Artificial Sequence
  Description of Artificial Sequence: Synthetic oligonucleotide
agcgcaucaaacacgccua

SEQ ID NO: 477525 - RNA, 19 nt, Artificial Sequence
  Description of Artificial Sequence: Synthetic oligonucleotide
ggaguagcauccuggcauc

SEQ ID NO: 477526 - RNA, 19 nt, Artificial Sequence
  Description of Artificial Sequence: Synthetic oligonucleotide
caucuccggaucauuggaa

SEQ ID NO: 477527 - RNA, 19 nt, Artificial Sequence
  Description of Artificial Sequence: Synthetic oligonucleotide
cuuuccuugggagaccugu

SEQ ID NO: 477528 - RNA, 19 nt, Artificial Sequence
  Description of Artificial Sequence: Synthetic oligonucleotide
gcugcugacgcagcaagac

SEQ ID NO: 477529 - RNA, 19 nt, Artificial Sequence
  Description of Artificial Sequence: Synthetic oligonucleotide
gagacggaacuaguggcua

SEQ ID NO: 477530 - RNA, 19 nt, Artificial Sequence
  Description of Artificial Sequence: Synthetic oligonucleotide
gagcucguagaagcuguca

SEQ ID NO: 477531 - RNA, 19 nt, Artificial Sequence
  Description of Artificial Sequence: Synthetic oligonucleotide
guacuggcagaccauggau

SEQ ID NO: 477532 - RNA, 19 nt, Artificial Sequence
  Description of Artificial Sequence: Synthetic oligonucleotide
aggugugucugaaccuuga

SEQ ID NO: 477533 - RNA, 19 nt, Artificial Sequence
  Description of Artificial Sequence: Synthetic oligonucleotide
caucaaacacgccuagcau

SEQ ID NO: 477534 - RNA, 19 nt, Artificial Sequence
  Description of Artificial Sequence: Synthetic oligonucleotide
cccauauggaaaauugugu

SEQ ID NO: 477535 - RNA, 19 nt, Artificial Sequence
  Description of Artificial Sequence: Synthetic oligonucleotide
ccuaauugcaacuccuccu

SEQ ID NO: 477536 - RNA, 19 nt, Artificial Sequence
  Description of Artificial Sequence: Synthetic oligonucleotide
cugacgcagcaagacccgc

SEQ ID NO: 477537 - RNA, 19 nt, Artificial Sequence
  Description of Artificial Sequence: Synthetic oligonucleotide
gcugacgcagcaagacccg

SEQ ID NO: 477538 - RNA, 19 nt, Artificial Sequence
  Description of Artificial Sequence: Synthetic oligonucleotide
ggacgacccaguguguggc

SEQ ID NO: 477539 - RNA, 19 nt, Artificial Sequence
  Description of Artificial Sequence: Synthetic oligonucleotide
ggggcuguuaggagcacug

SEQ ID NO: 477540 - RNA, 19 nt, Artificial Sequence
  Description of Artificial Sequence: Synthetic oligonucleotide
cgcaucuccggaucauugg

SEQ ID NO: 477541 - RNA, 19 nt, Artificial Sequence
  Description of Artificial Sequence: Synthetic oligonucleotide
acccgcgaugaagaugaug

SEQ ID NO: 477542 - RNA, 19 nt, Artificial Sequence
  Description of Artificial Sequence: Synthetic oligonucleotide
agggaucgcugccggcucu

SEQ ID NO: 477543 - RNA, 19 nt, Artificial Sequence
  Description of Artificial Sequence: Synthetic oligonucleotide
ccccagauuuccuuggaca

SEQ ID NO: 477544 - RNA, 19 nt, Artificial Sequence
  Description of Artificial Sequence: Synthetic oligonucleotide
cugcaggugguagcgugug

SEQ ID NO: 477545 - RNA, 19 nt, Artificial Sequence
  Description of Artificial Sequence: Synthetic oligonucleotide
ucccggauuccggaagcaa

SEQ ID NO: 477546 - RNA, 19 nt, Artificial Sequence
  Description of Artificial Sequence: Synthetic oligonucleotide
ggaugggacaccaucauuu

SEQ ID NO: 477547 - RNA, 19 nt, Artificial Sequence
  Description of Artificial Sequence: Synthetic oligonucleotide
gaauucggagcugcagacu

SEQ ID NO: 477548 - RNA, 19 nt, Artificial Sequence
  Description of Artificial Sequence: Synthetic oligonucleotide
ccggaucauuggaacuugg

SEQ ID NO: 477549 - RNA, 19 nt, Artificial Sequence
  Description of Artificial Sequence: Synthetic oligonucleotide
guugaaucgccugcgucgu

SEQ ID NO: 477550 - RNA, 19 nt, Artificial Sequence
  Description of Artificial Sequence: Synthetic oligonucleotide
caguucuagcuccugaauu

SEQ ID NO: 477551 - RNA, 19 nt, Artificial Sequence
  Description of Artificial Sequence: Synthetic oligonucleotide
acgacccaguguguggcca

SEQ ID NO: 477552 - RNA, 19 nt, Artificial Sequence
  Description of Artificial Sequence: Synthetic oligonucleotide
gccccagucuucuuugauc

SEQ ID NO: 477553 - RNA, 19 nt, Artificial Sequence
  Description of Artificial Sequence: Synthetic oligonucleotide
gcugcgacggcugcuggcc

SEQ ID NO: 477554 - RNA, 19 nt, Artificial Sequence
  Description of Artificial Sequence: Synthetic oligonucleotide
ggcuucaacccuccaggga

SEQ ID NO: 477555 - RNA, 19 nt, Artificial Sequence
  Description of Artificial Sequence: Synthetic oligonucleotide
agccggggauacugaagaa

SEQ ID NO: 477556 - RNA, 19 nt, Artificial Sequence
  Description of Artificial Sequence: Synthetic oligonucleotide
gcgcaucaaacacgccuag

SEQ ID NO: 477557 - RNA, 19 nt, Artificial Sequence
  Description of Artificial Sequence: Synthetic oligonucleotide
cuugggagaccuguuuaua

SEQ ID NO: 477558 - RNA, 19 nt, Artificial Sequence
  Description of Artificial Sequence: Synthetic oligonucleotide
gcugccggcgagcuugcug

SEQ ID NO: 477559 - RNA, 19 nt, Artificial Sequence
  Description of Artificial Sequence: Synthetic oligonucleotide
ccuuuuguaauuugcggau

SEQ ID NO: 477560 - RNA, 19 nt, Artificial Sequence
  Description of Artificial Sequence: Synthetic oligonucleotide
uugaaucgccugcgucguu

SEQ ID NO: 477561 - RNA, 19 nt, Artificial Sequence
  Description of Artificial Sequence: Synthetic oligonucleotide
gggguuccucuauaccuga

SEQ ID NO: 477562 - RNA, 19 nt, Artificial Sequence
  Description of Artificial Sequence: Synthetic oligonucleotide
auaccugugcuaggcuuuu

SEQ ID NO: 477563 - RNA, 19 nt, Artificial Sequence
  Description of Artificial Sequence: Synthetic oligonucleotide
gugguagcgugugggguuc

SEQ ID NO: 477564 - RNA, 19 nt, Artificial Sequence
  Description of Artificial Sequence: Synthetic oligonucleotide
gggcauccgaggguggugc

SEQ ID NO: 477565 - RNA, 19 nt, Artificial Sequence
  Description of Artificial Sequence: Synthetic oligonucleotide
gcccgcaucagcugcugac

SEQ ID NO: 477566 - RNA, 19 nt, Artificial Sequence
  Description of Artificial Sequence: Synthetic oligonucleotide
gcuguuaggagcacugccu

SEQ ID NO: 477567 - RNA, 19 nt, Artificial Sequence
  Description of Artificial Sequence: Synthetic oligonucleotide
cccgcaucagcugcugacg

SEQ ID NO: 477568 - RNA, 19 nt, Artificial Sequence
  Description of Artificial Sequence: Synthetic oligonucleotide
cuggagcggagggguagag

SEQ ID NO: 477569 - RNA, 19 nt, Artificial Sequence
  Description of Artificial Sequence: Synthetic oligonucleotide
guacugggguuccucuaua

SEQ ID NO: 477570 - RNA, 19 nt, Artificial Sequence
  Description of Artificial Sequence: Synthetic oligonucleotide
cacagccggggauacugaa

SEQ ID NO: 477571 - RNA, 19 nt, Artificial Sequence
  Description of Artificial Sequence: Synthetic oligonucleotide
gcgccauggggcuguuagg

SEQ ID NO: 477572 - RNA, 19 nt, Artificial Sequence
  Description of Artificial Sequence: Synthetic oligonucleotide
ggccuaauugcaacuccuc

SEQ ID NO: 477573 - RNA, 19 nt, Artificial Sequence
  Description of Artificial Sequence: Synthetic oligonucleotide
ggcugucagagacggaacu

SEQ ID NO: 477574 - RNA, 19 nt, Artificial Sequence
  Description of Artificial Sequence: Synthetic oligonucleotide
gcgcaucuccggaucauug

SEQ ID NO: 477575 - RNA, 19 nt, Artificial Sequence
  Description of Artificial Sequence: Synthetic oligonucleotide
gucgugcuuggccugcccu

SEQ ID NO: 477576 - RNA, 19 nt, Artificial Sequence
  Description of Artificial Sequence: Synthetic oligonucleotide
acgcagcaagacccgcgau

SEQ ID NO: 477577 - RNA, 19 nt, Artificial Sequence
  Description of Artificial Sequence: Synthetic oligonucleotide
ggucgcugggaaagugcag

SEQ ID NO: 477578 - RNA, 19 nt, Artificial Sequence
  Description of Artificial Sequence: Synthetic oligonucleotide
agcgcaucuccggaucauu

SEQ ID NO: 477579 - RNA, 19 nt, Artificial Sequence
  Description of Artificial Sequence: Synthetic oligonucleotide
ccccagcaauuuaaagcug

SEQ ID NO: 477580 - RNA, 19 nt, Artificial Sequence
  Description of Artificial Sequence: Synthetic oligonucleotide
gagcaguccugggguagga

SEQ ID NO: 477581 - RNA, 19 nt, Artificial Sequence
  Description of Artificial Sequence: Synthetic oligonucleotide
ggcaggggucauagggaag

SEQ ID NO: 477582 - RNA, 19 nt, Artificial Sequence
  Description of Artificial Sequence: Synthetic oligonucleotide
cagagacgccaaucacaga

SEQ ID NO: 477583 - RNA, 19 nt, Artificial Sequence
  Description of Artificial Sequence: Synthetic oligonucleotide
acccaguguguggccacca

SEQ ID NO: 477584 - RNA, 19 nt, Artificial Sequence
  Description of Artificial Sequence: Synthetic oligonucleotide
gugccccagucuucuuuga

SEQ ID NO: 477585 - RNA, 19 nt, Artificial Sequence
  Description of Artificial Sequence: Synthetic oligonucleotide
gcuacccuucauccaagcu

SEQ ID NO: 477586 - RNA, 19 nt, Artificial Sequence
  Description of Artificial Sequence: Synthetic oligonucleotide
cugcgucguucaauuaggu

SEQ ID NO: 477587 - RNA, 19 nt, Artificial Sequence
  Description of Artificial Sequence: Synthetic oligonucleotide
uaccugugcuaggcuuuuc

SEQ ID NO: 477588 - RNA, 19 nt, Artificial Sequence
  Description of Artificial Sequence: Synthetic oligonucleotide
ggugguagcgugugggguu

SEQ ID NO: 477589 - RNA, 19 nt, Artificial Sequence
  Description of Artificial Sequence: Synthetic oligonucleotide
guuccccauauggaaaauu

SEQ ID NO: 477590 - RNA, 19 nt, Artificial Sequence
  Description of Artificial Sequence: Synthetic oligonucleotide
cccggauuccggaagcaaa

SEQ ID NO: 477591 - RNA, 19 nt, Artificial Sequence
  Description of Artificial Sequence: Synthetic oligonucleotide
cgucguucaauuagguucu

SEQ ID NO: 477592 - RNA, 19 nt, Artificial Sequence
  Description of Artificial Sequence: Synthetic oligonucleotide
gccggggauacugaagaaa

SEQ ID NO: 477593 - RNA, 19 nt, Artificial Sequence
  Description of Artificial Sequence: Synthetic oligonucleotide
ugguagcgugugggguucu

SEQ ID NO: 477594 - RNA, 19 nt, Artificial Sequence
  Description of Artificial Sequence: Synthetic oligonucleotide
cuccggaucauuggaacuu

SEQ ID NO: 477595 - RNA, 19 nt, Artificial Sequence
  Description of Artificial Sequence: Synthetic oligonucleotide
gcugucagagacggaacua

SEQ ID NO: 477596 - RNA, 19 nt, Artificial Sequence
  Description of Artificial Sequence: Synthetic oligonucleotide
gucguucaauuagguucuc

SEQ ID NO: 477597 - RNA, 19 nt, Artificial Sequence
  Description of Artificial Sequence: Synthetic oligonucleotide
uuacaggguuggggccuaa

SEQ ID NO: 477598 - RNA, 19 nt, Artificial Sequence
  Description of Artificial Sequence: Synthetic oligonucleotide
caagacccgcgaugaagau

SEQ ID NO: 477599 - RNA, 19 nt, Artificial Sequence
  Description of Artificial Sequence: Synthetic oligonucleotide
gggccuaauugcaacuccu

SEQ ID NO: 477600 - RNA, 19 nt, Artificial Sequence
  Description of Artificial Sequence: Synthetic oligonucleotide
agacuucgguuggcuugcu

SEQ ID NO: 477601 - RNA, 19 nt, Artificial Sequence
  Description of Artificial Sequence: Synthetic oligonucleotide
cgcaucaaacacgccuagc

SEQ ID NO: 477602 - RNA, 19 nt, Artificial Sequence
  Description of Artificial Sequence: Synthetic oligonucleotide
cguuaauguugaaucgccu

SEQ ID NO: 477603 - RNA, 19 nt, Artificial Sequence
  Description of Artificial Sequence: Synthetic oligonucleotide
caaacacgccuagcauuua

SEQ ID NO: 477604 - RNA, 19 nt, Artificial Sequence
  Description of Artificial Sequence: Synthetic oligonucleotide
cacucuuacuucggauccu

SEQ ID NO: 477605 - RNA, 19 nt, Artificial Sequence
  Description of Artificial Sequence: Synthetic oligonucleotide
ccagcgcaucuccggauca

SEQ ID NO: 477606 - RNA, 19 nt, Artificial Sequence
  Description of Artificial Sequence: Synthetic oligonucleotide
cggggauacugaagaaaga

SEQ ID NO: 477607 - RNA, 19 nt, Artificial Sequence
  Description of Artificial Sequence: Synthetic oligonucleotide
cagcaagacccgcgaugaa

SEQ ID NO: 477608 - RNA, 19 nt, Artificial Sequence
  Description of Artificial Sequence: Synthetic oligonucleotide
gguagcgugugggguucuc

SEQ ID NO: 477609 - RNA, 19 nt, Artificial Sequence
  Description of Artificial Sequence: Synthetic oligonucleotide
acccuucauccaagcuccu

SEQ ID NO: 477610 - RNA, 19 nt, Artificial Sequence
  Description of Artificial Sequence: Synthetic oligonucleotide
gcagagauauugggaggcu

SEQ ID NO: 477611 - RNA, 19 nt, Artificial Sequence
  Description of Artificial Sequence: Synthetic oligonucleotide
gcguugcuguuccuuuugu

SEQ ID NO: 477612 - RNA, 19 nt, Artificial Sequence
  Description of Artificial Sequence: Synthetic oligonucleotide
gcuggagcggagggguaga

SEQ ID NO: 477613 - RNA, 19 nt, Artificial Sequence
  Description of Artificial Sequence: Synthetic oligonucleotide
caccuuaucccgccuccuu

SEQ ID NO: 477614 - RNA, 19 nt, Artificial Sequence
  Description of Artificial Sequence: Synthetic oligonucleotide
gcauggccccagcaauuua

SEQ ID NO: 477615 - RNA, 19 nt, Artificial Sequence
  Description of Artificial Sequence: Synthetic oligonucleotide
ccuugccuauuacaggguu

SEQ ID NO: 477616 - RNA, 19 nt, Artificial Sequence
  Description of Artificial Sequence: Synthetic oligonucleotide
gcgagucucacaggagggu

SEQ ID NO: 477617 - RNA, 19 nt, Artificial Sequence
  Description of Artificial Sequence: Synthetic oligonucleotide
gggaucgcugccggcucuc

SEQ ID NO: 477618 - RNA, 19 nt, Artificial Sequence
  Description of Artificial Sequence: Synthetic oligonucleotide
ccuuggacagggcgagucu

SEQ ID NO: 477619 - RNA, 19 nt, Artificial Sequence
  Description of Artificial Sequence: Synthetic oligonucleotide
ccagggaucgcugccggcu

SEQ ID NO: 477620 - RNA, 19 nt, Artificial Sequence
  Description of Artificial Sequence: Synthetic oligonucleotide
cggauuccggaagcaaaga

SEQ ID NO: 477621 - RNA, 19 nt, Artificial Sequence
  Description of Artificial Sequence: Synthetic oligonucleotide
cgagucucacaggagggua

SEQ ID NO: 477622 - RNA, 19 nt, Artificial Sequence
  Description of Artificial Sequence: Synthetic oligonucleotide
gguggacgacccagugugu

SEQ ID NO: 477623 - RNA, 19 nt, Artificial Sequence
  Description of Artificial Sequence: Synthetic oligonucleotide
gcucugaaacagggguagu

SEQ ID NO: 477624 - RNA, 19 nt, Artificial Sequence
  Description of Artificial Sequence: Synthetic oligonucleotide
gccuuuuacgggagacuuu

SEQ ID NO: 477625 - RNA, 19 nt, Artificial Sequence
  Description of Artificial Sequence: Synthetic oligonucleotide
cagcgcaucuccggaucau

SEQ ID NO: 477626 - RNA, 19 nt, Artificial Sequence
  Description of Artificial Sequence: Synthetic oligonucleotide
ccgcgaugaagaugaugau

SEQ ID NO: 477627 - RNA, 19 nt, Artificial Sequence
  Description of Artificial Sequence: Synthetic oligonucleotide
ccaccuuaucccgccuccu

SEQ ID NO: 477628 - RNA, 19 nt, Artificial Sequence
  Description of Artificial Sequence: Synthetic oligonucleotide
cgccugcgucguucaauua

SEQ ID NO: 477629 - RNA, 19 nt, Artificial Sequence
  Description of Artificial Sequence: Synthetic oligonucleotide
aaauaguauauguaugccc

SEQ ID NO: 477630 - RNA, 19 nt, Artificial Sequence
  Description of Artificial Sequence: Synthetic oligonucleotide
aaaagucuggacuaaacac

SEQ ID NO: 477631 - RNA, 19 nt, Artificial Sequence
  Description of Artificial Sequence: Synthetic oligonucleotide
ugcucuagaacccauaugc

SEQ ID NO: 477632 - RNA, 19 nt, Artificial Sequence
  Description of Artificial Sequence: Synthetic oligonucleotide
uccucuaaaagaaaauuag

SEQ ID NO: 477633 - RNA, 19 nt, Artificial Sequence
  Description of Artificial Sequence: Synthetic oligonucleotide
acuaucuaaaagugcaacc

SEQ ID NO: 477634 - RNA, 19 nt, Artificial Sequence
  Description of Artificial Sequence: Synthetic oligonucleotide
ucuaaacuaaccaaaucug

SEQ ID NO: 477635 - RNA, 19 nt, Artificial Sequence
  Description of Artificial Sequence: Synthetic oligonucleotide
aaaucuuacccugaacccc

SEQ ID NO: 477636 - RNA, 19 nt, Artificial Sequence
  Description of Artificial Sequence: Synthetic oligonucleotide
ucuagcaagcacaauauga

SEQ ID NO: 477637 - RNA, 19 nt, Artificial Sequence
  Description of Artificial Sequence: Synthetic oligonucleotide
uggacuaaacaccugaggc

SEQ ID NO: 477638 - RNA, 19 nt, Artificial Sequence
  Description of Artificial Sequence: Synthetic oligonucleotide
uggccuauaagcaaagucc

SEQ ID NO: 477639 - RNA, 19 nt, Artificial Sequence
  Description of Artificial Sequence: Synthetic oligonucleotide
ucuaaauaucccaucacca

SEQ ID NO: 477640 - RNA, 19 nt, Artificial Sequence
  Description of Artificial Sequence: Synthetic oligonucleotide
acugaguuaccccacuucc

SEQ ID NO: 477641 - RNA, 19 nt, Artificial Sequence
  Description of Artificial Sequence: Synthetic oligonucleotide
aauaguauauguaugcccu

SEQ ID NO: 477642 - RNA, 19 nt, Artificial Sequence
  Description of Artificial Sequence: Synthetic oligonucleotide
agauucgacaaacagcccg

SEQ ID NO: 477643 - RNA, 19 nt, Artificial Sequence
  Description of Artificial Sequence: Synthetic oligonucleotide
ugguaagugcucuagaacc

SEQ ID NO: 477644 - RNA, 19 nt, Artificial Sequence
  Description of Artificial Sequence: Synthetic oligonucleotide
uaucccaucaccagauucg

SEQ ID NO: 477645 - RNA, 19 nt, Artificial Sequence
  Description of Artificial Sequence: Synthetic oligonucleotide
auaauacccaugcaaagag

SEQ ID NO: 477646 - RNA, 19 nt, Artificial Sequence
  Description of Artificial Sequence: Synthetic oligonucleotide
uuuguccugagcaagugag

SEQ ID NO: 477647 - RNA, 19 nt, Artificial Sequence
  Description of Artificial Sequence: Synthetic oligonucleotide
aagagcacggcuucaaaag

SEQ ID NO: 477648 - RNA, 19 nt, Artificial Sequence
  Description of Artificial Sequence: Synthetic oligonucleotide
agugaaaaguagucgaguc

SEQ ID NO: 477649 - RNA, 19 nt, Artificial Sequence
  Description of Artificial Sequence: Synthetic oligonucleotide
agucaaaugaacuuggcau

SEQ ID NO: 477650 - RNA, 19 nt, Artificial Sequence
  Description of Artificial Sequence: Synthetic oligonucleotide
ugggauuaauaaaugcagg

SEQ ID NO: 477651 - RNA, 19 nt, Artificial Sequence
  Description of Artificial Sequence: Synthetic oligonucleotide
uaugcccuaguauaagugg

SEQ ID NO: 477652 - RNA, 19 nt, Artificial Sequence
  Description of Artificial Sequence: Synthetic oligonucleotide
aauaauacccaugcaaaga

SEQ ID NO: 477653 - RNA, 19 nt, Artificial Sequence
  Description of Artificial Sequence: Synthetic oligonucleotide
ucuaggaccaagugaaaag

SEQ ID NO: 477654 - RNA, 19 nt, Artificial Sequence
  Description of Artificial Sequence: Synthetic oligonucleotide
aacugaauucuagaucagc

SEQ ID NO: 477655 - RNA, 19 nt, Artificial Sequence
  Description of Artificial Sequence: Synthetic oligonucleotide
uccuaaaggacuccugagg

SEQ ID NO: 477656 - RNA, 19 nt, Artificial Sequence
  Description of Artificial Sequence: Synthetic oligonucleotide
aauaugaugccacauucua

SEQ ID NO: 477657 - RNA, 19 nt, Artificial Sequence
  Description of Artificial Sequence: Synthetic oligonucleotide
aacacuuuagguaccauug

SEQ ID NO: 477658 - RNA, 19 nt, Artificial Sequence
  Description of Artificial Sequence: Synthetic oligonucleotide
ucaguuguggucuagcuaa

SEQ ID NO: 477659 - RNA, 19 nt, Artificial Sequence
  Description of Artificial Sequence: Synthetic oligonucleotide
ucuagauacaguauuccuc

SEQ ID NO: 477660 - RNA, 19 nt, Artificial Sequence
  Description of Artificial Sequence: Synthetic oligonucleotide
cuaaauaucccaucaccag

SEQ ID NO: 477661 - RNA, 19 nt, Artificial Sequence
  Description of Artificial Sequence: Synthetic oligonucleotide
uguggucuagcuaagcuga

SEQ ID NO: 477662 - RNA, 19 nt, Artificial Sequence
  Description of Artificial Sequence: Synthetic oligonucleotide
ugaccauuacauauuacac

SEQ ID NO: 477663 - RNA, 19 nt, Artificial Sequence
  Description of Artificial Sequence: Synthetic oligonucleotide
uaggcaacacuuuagguac

SEQ ID NO: 477664 - RNA, 19 nt, Artificial Sequence
  Description of Artificial Sequence: Synthetic oligonucleotide
ugaaccccgauacauaaga

SEQ ID NO: 477665 - RNA, 19 nt, Artificial Sequence
  Description of Artificial Sequence: Synthetic oligonucleotide
caaagagcuaauccaaagg

SEQ ID NO: 477666 - RNA, 19 nt, Artificial Sequence
  Description of Artificial Sequence: Synthetic oligonucleotide
cucuaaauaucccaucacc

SEQ ID NO: 477667 - RNA, 19 nt, Artificial Sequence
  Description of Artificial Sequence: Synthetic oligonucleotide
cagaccaugcccuuuaccc

SEQ ID NO: 477668 - RNA, 19 nt, Artificial Sequence
  Description of Artificial Sequence: Synthetic oligonucleotide
aacccauaugccuggcccc

SEQ ID NO: 477669 - RNA, 19 nt, Artificial Sequence
  Description of Artificial Sequence: Synthetic oligonucleotide
ucugcuaagcuucugggaa

SEQ ID NO: 477670 - RNA, 19 nt, Artificial Sequence
  Description of Artificial Sequence: Synthetic oligonucleotide
ccagauucgacaaacagcc

SEQ ID NO: 477671 - RNA, 19 nt, Artificial Sequence
  Description of Artificial Sequence: Synthetic oligonucleotide
ugaucagugcucaggauca

SEQ ID NO: 477672 - RNA, 19 nt, Artificial Sequence
  Description of Artificial Sequence: Synthetic oligonucleotide
auaucccaucaccagauuc

SEQ ID NO: 477673 - RNA, 19 nt, Artificial Sequence
  Description of Artificial Sequence: Synthetic oligonucleotide
gacacuaucuaaaagugca

SEQ ID NO: 477674 - RNA, 19 nt, Artificial Sequence
  Description of Artificial Sequence: Synthetic oligonucleotide
uacaggaauauauauuuau

SEQ ID NO: 477675 - RNA, 19 nt, Artificial Sequence
  Description of Artificial Sequence: Synthetic oligonucleotide
uaauaaaugcaggacugag

SEQ ID NO: 477676 - RNA, 19 nt, Artificial Sequence
  Description of Artificial Sequence: Synthetic oligonucleotide
aaucuuacccugaaccccg

SEQ ID NO: 477677 - RNA, 19 nt, Artificial Sequence
  Description of Artificial Sequence: Synthetic oligonucleotide
cuagcuaagcugaucagug

SEQ ID NO: 477678 - RNA, 19 nt, Artificial Sequence
  Description of Artificial Sequence: Synthetic oligonucleotide
ugaauucuagaucagcguu

SEQ ID NO: 477679 - RNA, 19 nt, Artificial Sequence
  Description of Artificial Sequence: Synthetic oligonucleotide
auaagacagcuacaagggg

SEQ ID NO: 477680 - RNA, 19 nt, Artificial Sequence
  Description of Artificial Sequence: Synthetic oligonucleotide
uuggagugaauaauuuucu

SEQ ID NO: 477681 - RNA, 19 nt, Artificial Sequence
  Description of Artificial Sequence: Synthetic oligonucleotide
aaauuagagccccaauuua

SEQ ID NO: 477682 - RNA, 19 nt, Artificial Sequence
  Description of Artificial Sequence: Synthetic oligonucleotide
gaacccauaugccuggccc

SEQ ID NO: 477683 - RNA, 19 nt, Artificial Sequence
  Description of Artificial Sequence: Synthetic oligonucleotide
aaccccgauacauaagaca

SEQ ID NO: 477684 - RNA, 19 nt, Artificial Sequence
  Description of Artificial Sequence: Synthetic oligonucleotide
aguauaaguggggaguggg

SEQ ID NO: 477685 - RNA, 19 nt, Artificial Sequence
  Description of Artificial Sequence: Synthetic oligonucleotide
aaaguguuuaggucauggu

SEQ ID NO: 477686 - RNA, 19 nt, Artificial Sequence
  Description of Artificial Sequence: Synthetic oligonucleotide
ggagugaauaauuuucucc

SEQ ID NO: 477687 - RNA, 19 nt, Artificial Sequence
  Description of Artificial Sequence: Synthetic oligonucleotide
gagugggauuaauaaaugc

SEQ ID NO: 477688 - RNA, 19 nt, Artificial Sequence
  Description of Artificial Sequence: Synthetic oligonucleotide
acacccaccacacagaaua

SEQ ID NO: 477689 - RNA, 19 nt, Artificial Sequence
  Description of Artificial Sequence: Synthetic oligonucleotide
uacccaugcaaagagcacg

SEQ ID NO: 477690 - RNA, 19 nt, Artificial Sequence
  Description of Artificial Sequence: Synthetic oligonucleotide
cucagagcuggaauggucc

SEQ ID NO: 477691 - RNA, 19 nt, Artificial Sequence
  Description of Artificial Sequence: Synthetic oligonucleotide
agagagguccuagaaauag

SEQ ID NO: 477692 - RNA, 19 nt, Artificial Sequence
  Description of Artificial Sequence: Synthetic oligonucleotide
uucuuagaucagcacacug

SEQ ID NO: 477693 - RNA, 19 nt, Artificial Sequence
  Description of Artificial Sequence: Synthetic oligonucleotide
gauucgacaaacagcccgg

SEQ ID NO: 477694 - RNA, 19 nt, Artificial Sequence
  Description of Artificial Sequence: Synthetic oligonucleotide
acugucccgaauucuugcc

SEQ ID NO: 477695 - RNA, 19 nt, Artificial Sequence
  Description of Artificial Sequence: Synthetic oligonucleotide
cuuuagguaccauuguguc

SEQ ID NO: 477696 - RNA, 19 nt, Artificial Sequence
  Description of Artificial Sequence: Synthetic oligonucleotide
aaaucaccaagccugugua

SEQ ID NO: 477697 - RNA, 19 nt, Artificial Sequence
  Description of Artificial Sequence: Synthetic oligonucleotide
agugaacugucccgaauuc

SEQ ID NO: 477698 - RNA, 19 nt, Artificial Sequence
  Description of Artificial Sequence: Synthetic oligonucleotide
caagugaaaaguagucgag

SEQ ID NO: 477699 - RNA, 19 nt, Artificial Sequence
  Description of Artificial Sequence: Synthetic oligonucleotide
agucgagucaguugugguc

SEQ ID NO: 477700 - RNA, 19 nt, Artificial Sequence
  Description of Artificial Sequence: Synthetic oligonucleotide
augcagaacuuuugucucc

SEQ ID NO: 477701 - RNA, 19 nt, Artificial Sequence
  Description of Artificial Sequence: Synthetic oligonucleotide
aggaaugcuaacuugggua

SEQ ID NO: 477702 - RNA, 19 nt, Artificial Sequence
  Description of Artificial Sequence: Synthetic oligonucleotide
aauuuggucccacauucua

SEQ ID NO: 477703 - RNA, 19 nt, Artificial Sequence
  Description of Artificial Sequence: Synthetic oligonucleotide
cugugugaaggcuggaggg

SEQ ID NO: 477704 - RNA, 19 nt, Artificial Sequence
  Description of Artificial Sequence: Synthetic oligonucleotide
uuaauaugaccauuacaua

SEQ ID NO: 477705 - RNA, 19 nt, Artificial Sequence
  Description of Artificial Sequence: Synthetic oligonucleotide
aaucaccaagccuguguag

SEQ ID NO: 477706 - RNA, 19 nt, Artificial Sequence
  Description of Artificial Sequence: Synthetic oligonucleotide
ugcccuaguauaagugggg

SEQ ID NO: 477707 - RNA, 19 nt, Artificial Sequence
  Description of Artificial Sequence: Synthetic oligonucleotide
ucauaacacagccucuccu

SEQ ID NO: 477708 - RNA, 19 nt, Artificial Sequence
  Description of Artificial Sequence: Synthetic oligonucleotide
agacacuaucuaaaagugc

SEQ ID NO: 477709 - RNA, 19 nt, Artificial Sequence
  Description of Artificial Sequence: Synthetic oligonucleotide
ugguaaccgaccaugguuc

SEQ ID NO: 477710 - RNA, 19 nt, Artificial Sequence
  Description of Artificial Sequence: Synthetic oligonucleotide
cuaguguuagcaucuucag

SEQ ID NO: 477711 - RNA, 19 nt, Artificial Sequence
  Description of Artificial Sequence: Synthetic oligonucleotide
aucguuagcaccucggcaa

SEQ ID NO: 477712 - RNA, 19 nt, Artificial Sequence
  Description of Artificial Sequence: Synthetic oligonucleotide
gaaggguagaacaaucuuc

SEQ ID NO: 477713 - RNA, 19 nt, Artificial Sequence
  Description of Artificial Sequence: Synthetic oligonucleotide
agaagcuauagucuggauu

SEQ ID NO: 477714 - RNA, 19 nt, Artificial Sequence
  Description of Artificial Sequence: Synthetic oligonucleotide
cucauuuccuaaaggacuc

SEQ ID NO: 477715 - RNA, 19 nt, Artificial Sequence
  Description of Artificial Sequence: Synthetic oligonucleotide
cacagaauaagccagucaa

SEQ ID NO: 477716 - RNA, 19 nt, Artificial Sequence
  Description of Artificial Sequence: Synthetic oligonucleotide
uguaugcccuaguauaagu

SEQ ID NO: 477717 - RNA, 19 nt, Artificial Sequence
  Description of Artificial Sequence: Synthetic oligonucleotide
uaguauauguaugcccuag

SEQ ID NO: 477718 - RNA, 19 nt, Artificial Sequence
  Description of Artificial Sequence: Synthetic oligonucleotide
cucacugagaccguucagg

SEQ ID NO: 477719 - RNA, 19 nt, Artificial Sequence
  Description of Artificial Sequence: Synthetic oligonucleotide
uuccuaaaggacuccugag

SEQ ID NO: 477720 - RNA, 19 nt, Artificial Sequence
  Description of Artificial Sequence: Synthetic oligonucleotide
aaugcuaacuuggguaggu

SEQ ID NO: 477721 - RNA, 19 nt, Artificial Sequence
  Description of Artificial Sequence: Synthetic oligonucleotide
aagugaaaaguagucgagu

SEQ ID NO: 477722 - RNA, 19 nt, Artificial Sequence
  Description of Artificial Sequence: Synthetic oligonucleotide
agcuaagcugaucagugcu

SEQ ID NO: 477723 - RNA, 19 nt, Artificial Sequence
  Description of Artificial Sequence: Synthetic oligonucleotide
aguuaccccacuuccgcuc

SEQ ID NO: 477724 - RNA, 19 nt, Artificial Sequence
  Description of Artificial Sequence: Synthetic oligonucleotide
ggaaugcuaacuuggguag

SEQ ID NO: 477725 - RNA, 19 nt, Artificial Sequence
  Description of Artificial Sequence: Synthetic oligonucleotide
uaaccgaccaugguucccg

SEQ ID NO: 477726 - RNA, 19 nt, Artificial Sequence
  Description of Artificial Sequence: Synthetic oligonucleotide
agugaauaauuuucucccu

SEQ ID NO: 477727 - RNA, 19 nt, Artificial Sequence
  Description of Artificial Sequence: Synthetic oligonucleotide
cagccuaaccuuuugucag

SEQ ID NO: 477728 - RNA, 19 nt, Artificial Sequence
  Description of Artificial Sequence: Synthetic oligonucleotide
aguguuuaggucaugguaa

SEQ ID NO: 477729 - RNA, 19 nt, Artificial Sequence
  Description of Artificial Sequence: Synthetic oligonucleotide
agaacccauaugccuggcc

SEQ ID NO: 477730 - RNA, 19 nt, Artificial Sequence
  Description of Artificial Sequence: Synthetic oligonucleotide
accccgauacauaagacag

SEQ ID NO: 477731 - RNA, 19 nt, Artificial Sequence
  Description of Artificial Sequence: Synthetic oligonucleotide
ucuagcuaagcugaucagu

SEQ ID NO: 477732 - RNA, 19 nt, Artificial Sequence
  Description of Artificial Sequence: Synthetic oligonucleotide
cugggaauccagaccaugc

SEQ ID NO: 477733 - RNA, 19 nt, Artificial Sequence
  Description of Artificial Sequence: Synthetic oligonucleotide
agccuaaccuuuugucagc

SEQ ID NO: 477734 - RNA, 19 nt, Artificial Sequence
  Description of Artificial Sequence: Synthetic oligonucleotide
gaaugguccucucaaggca

SEQ ID NO: 477735 - RNA, 19 nt, Artificial Sequence
  Description of Artificial Sequence: Synthetic oligonucleotide
uagcaagcacaauaugaug

SEQ ID NO: 477736 - RNA, 19 nt, Artificial Sequence
  Description of Artificial Sequence: Synthetic oligonucleotide
ugccguuuaugauuuaaaa

SEQ ID NO: 477737 - RNA, 19 nt, Artificial Sequence
  Description of Artificial Sequence: Synthetic oligonucleotide
aggguagaacaaucuuccc

SEQ ID NO: 477738 - RNA, 19 nt, Artificial Sequence
  Description of Artificial Sequence: Synthetic oligonucleotide
uucuagcaagcacaauaug

SEQ ID NO: 477739 - RNA, 19 nt, Artificial Sequence
  Description of Artificial Sequence: Synthetic oligonucleotide
cuuagaucagcacacugga

SEQ ID NO: 477740 - RNA, 19 nt, Artificial Sequence
  Description of Artificial Sequence: Synthetic oligonucleotide
caggccaacgggcacaugc

SEQ ID NO: 477741 - RNA, 19 nt, Artificial Sequence
  Description of Artificial Sequence: Synthetic oligonucleotide
ugucccgugggaaggguag

SEQ ID NO: 477742 - RNA, 19 nt, Artificial Sequence
  Description of Artificial Sequence: Synthetic oligonucleotide
caucuagauacaguauucc

SEQ ID NO: 477743 - RNA, 19 nt, Artificial Sequence
  Description of Artificial Sequence: Synthetic oligonucleotide
ugcuaacuuggguaggugu

SEQ ID NO: 477744 - RNA, 19 nt, Artificial Sequence
  Description of Artificial Sequence: Synthetic oligonucleotide
caccagauucgacaaacag

SEQ ID NO: 477745 - RNA, 19 nt, Artificial Sequence
  Description of Artificial Sequence: Synthetic oligonucleotide
cugaguuaccccacuuccg

SEQ ID NO: 477746 - RNA, 19 nt, Artificial Sequence
  Description of Artificial Sequence: Synthetic oligonucleotide
cagaacaggucacaacccc

SEQ ID NO: 477747 - RNA, 19 nt, Artificial Sequence
  Description of Artificial Sequence: Synthetic oligonucleotide
uaccacaaauaaaaucuua

SEQ ID NO: 477748 - RNA, 19 nt, Artificial Sequence
  Description of Artificial Sequence: Synthetic oligonucleotide
uaugaccauuacauauuac

SEQ ID NO: 477749 - RNA, 19 nt, Artificial Sequence
  Description of Artificial Sequence: Synthetic oligonucleotide
cuaaccuuuugucagccca

SEQ ID NO: 477750 - RNA, 19 nt, Artificial Sequence
  Description of Artificial Sequence: Synthetic oligonucleotide
aguucuaguguuagcaucu

SEQ ID NO: 477751 - RNA, 19 nt, Artificial Sequence
  Description of Artificial Sequence: Synthetic oligonucleotide
ugcauuuggagugaauaau

SEQ ID NO: 477752 - RNA, 19 nt, Artificial Sequence
  Description of Artificial Sequence: Synthetic oligonucleotide
cucaaggcaucgcagacuc

SEQ ID NO: 477753 - RNA, 19 nt, Artificial Sequence
  Description of Artificial Sequence: Synthetic oligonucleotide
gugaauaauuuucucccuc

SEQ ID NO: 477754 - RNA, 19 nt, Artificial Sequence
  Description of Artificial Sequence: Synthetic oligonucleotide
aaagucccuauuugucccu

SEQ ID NO: 477755 - RNA, 19 nt, Artificial Sequence
  Description of Artificial Sequence: Synthetic oligonucleotide
aauucuagaucagcguuua

SEQ ID NO: 477756 - RNA, 19 nt, Artificial Sequence
  Description of Artificial Sequence: Synthetic oligonucleotide
cugauaaagcagcaccaac

SEQ ID NO: 477757 - RNA, 19 nt, Artificial Sequence
  Description of Artificial Sequence: Synthetic oligonucleotide
cuauuugucccuuugggcu

SEQ ID NO: 477758 - RNA, 19 nt, Artificial Sequence
  Description of Artificial Sequence: Synthetic oligonucleotide
auaugaccauuacauauua

SEQ ID NO: 477759 - RNA, 19 nt, Artificial Sequence
  Description of Artificial Sequence: Synthetic oligonucleotide
ccuaaaggacuccugaggc

SEQ ID NO: 477760 - RNA, 19 nt, Artificial Sequence
  Description of Artificial Sequence: Synthetic oligonucleotide
aguauauguaugcccuagu

SEQ ID NO: 477761 - RNA, 19 nt, Artificial Sequence
  Description of Artificial Sequence: Synthetic oligonucleotide
cagucaaggagcaucuguc

SEQ ID NO: 477762 - RNA, 19 nt, Artificial Sequence
  Description of Artificial Sequence: Synthetic oligonucleotide
agugcucuagaacccauau

SEQ ID NO: 477763 - RNA, 19 nt, Artificial Sequence
  Description of Artificial Sequence: Synthetic oligonucleotide
auacucagcccucuuggca

SEQ ID NO: 477764 - RNA, 19 nt, Artificial Sequence
  Description of Artificial Sequence: Synthetic oligonucleotide
ucauuaaauuucugggcuu

SEQ ID NO: 477765 - RNA, 19 nt, Artificial Sequence
  Description of Artificial Sequence: Synthetic oligonucleotide
acggcuucaaaagaaacaa

SEQ ID NO: 477766 - RNA, 19 nt, Artificial Sequence
  Description of Artificial Sequence: Synthetic oligonucleotide
auuuguucuagaggaccgg

SEQ ID NO: 477767 - RNA, 19 nt, Artificial Sequence
  Description of Artificial Sequence: Synthetic oligonucleotide
ucaccaagccuguguagcc

SEQ ID NO: 477768 - RNA, 19 nt, Artificial Sequence
  Description of Artificial Sequence: Synthetic oligonucleotide
uggagugaauaauuuucuc

SEQ ID NO: 477769 - RNA, 19 nt, Artificial Sequence
  Description of Artificial Sequence: Synthetic oligonucleotide
cuaacuuggguaggugucc

SEQ ID NO: 477770 - RNA, 19 nt, Artificial Sequence
  Description of Artificial Sequence: Synthetic oligonucleotide
agcacaauaugaugccaca

SEQ ID NO: 477771 - RNA, 19 nt, Artificial Sequence
  Description of Artificial Sequence: Synthetic oligonucleotide
uaguauaaguggggagugg

SEQ ID NO: 477772 - RNA, 19 nt, Artificial Sequence
  Description of Artificial Sequence: Synthetic oligonucleotide
augcauuuggagugaauaa

SEQ ID NO: 477773 - RNA, 19 nt, Artificial Sequence
  Description of Artificial Sequence: Synthetic oligonucleotide
guagucgagucaguugugg

SEQ ID NO: 477774 - RNA, 19 nt, Artificial Sequence
  Description of Artificial Sequence: Synthetic oligonucleotide
uagcaccucggcaagugca

SEQ ID NO: 477775 - RNA, 19 nt, Artificial Sequence
  Description of Artificial Sequence: Synthetic oligonucleotide
uuagcaccucggcaagugc

SEQ ID NO: 477776 - RNA, 19 nt, Artificial Sequence
  Description of Artificial Sequence: Synthetic oligonucleotide
agagccucguacuccagcu

SEQ ID NO: 477777 - RNA, 19 nt, Artificial Sequence
  Description of Artificial Sequence: Synthetic oligonucleotide
uuuugucagcccaggugca

SEQ ID NO: 477778 - RNA, 19 nt, Artificial Sequence
  Description of Artificial Sequence: Synthetic oligonucleotide
cucauaacacagccucucc

SEQ ID NO: 477779 - RNA, 19 nt, Artificial Sequence
  Description of Artificial Sequence: Synthetic oligonucleotide
uucuaggaccaagugaaaa

SEQ ID NO: 477780 - RNA, 19 nt, Artificial Sequence
  Description of Artificial Sequence: Synthetic oligonucleotide
agccccuaccaacccaggc

SEQ ID NO: 477781 - RNA, 19 nt, Artificial Sequence
  Description of Artificial Sequence: Synthetic oligonucleotide
aaacugaauucuagaucag

SEQ ID NO: 477782 - RNA, 19 nt, Artificial Sequence
  Description of Artificial Sequence: Synthetic oligonucleotide
uagcuaagcugaucagugc

SEQ ID NO: 477783 - RNA, 19 nt, Artificial Sequence
  Description of Artificial Sequence: Synthetic oligonucleotide
ggucuagcuaagcugauca

SEQ ID NO: 477784 - RNA, 19 nt, Artificial Sequence
  Description of Artificial Sequence: Synthetic oligonucleotide
aacaaaguguuuaggucau

SEQ ID NO: 477785 - RNA, 19 nt, Artificial Sequence
  Description of Artificial Sequence: Synthetic oligonucleotide
agucaguuguggucuagcu

SEQ ID NO: 477786 - RNA, 19 nt, Artificial Sequence
  Description of Artificial Sequence: Synthetic oligonucleotide
auuuggucccacauucuag

SEQ ID NO: 477787 - RNA, 19 nt, Artificial Sequence
  Description of Artificial Sequence: Synthetic oligonucleotide
augcccuaguauaaguggg

SEQ ID NO: 477788 - RNA, 19 nt, Artificial Sequence
  Description of Artificial Sequence: Synthetic oligonucleotide
ucguuagcaccucggcaag

SEQ ID NO: 477789 - RNA, 19 nt, Artificial Sequence
  Description of Artificial Sequence: Synthetic oligonucleotide
gacugaguuaccccacuuc

SEQ ID NO: 477790 - RNA, 19 nt, Artificial Sequence
  Description of Artificial Sequence: Synthetic oligonucleotide
uuagaucagcacacuggaa

SEQ ID NO: 477791 - RNA, 19 nt, Artificial Sequence
  Description of Artificial Sequence: Synthetic oligonucleotide
uaggugucccgugggaagg

SEQ ID NO: 477792 - RNA, 19 nt, Artificial Sequence
  Description of Artificial Sequence: Synthetic oligonucleotide
guaugcccuaguauaagug

SEQ ID NO: 477793 - RNA, 19 nt, Artificial Sequence
  Description of Artificial Sequence: Synthetic oligonucleotide
ugucccuuugggcuuugga

SEQ ID NO: 477794 - RNA, 19 nt, Artificial Sequence
  Description of Artificial Sequence: Synthetic oligonucleotide
acugcaagaaggaauguuu

SEQ ID NO: 477795 - RNA, 19 nt, Artificial Sequence
  Description of Artificial Sequence: Synthetic oligonucleotide
uucgacaaacagcccggca

SEQ ID NO: 477796 - RNA, 19 nt, Artificial Sequence
  Description of Artificial Sequence: Synthetic oligonucleotide
cacggcuucaaaagaaaca

SEQ ID NO: 477797 - RNA, 19 nt, Artificial Sequence
  Description of Artificial Sequence: Synthetic oligonucleotide
auuagagccccaauuuaga

SEQ ID NO: 477798 - RNA, 19 nt, Artificial Sequence
  Description of Artificial Sequence: Synthetic oligonucleotide
cugaggccaauuugguccc

SEQ ID NO: 477799 - RNA, 19 nt, Artificial Sequence
  Description of Artificial Sequence: Synthetic oligonucleotide
gaccaugcccuuuacccuc

SEQ ID NO: 477800 - RNA, 19 nt, Artificial Sequence
  Description of Artificial Sequence: Synthetic oligonucleotide
auucgacaaacagcccggc

SEQ ID NO: 477801 - RNA, 19 nt, Artificial Sequence
  Description of Artificial Sequence: Synthetic oligonucleotide
agaucagcguuuaugucca

SEQ ID NO: 477802 - RNA, 19 nt, Artificial Sequence
  Description of Artificial Sequence: Synthetic oligonucleotide
auuuauauuuauagagcuu

SEQ ID NO: 477803 - RNA, 19 nt, Artificial Sequence
  Description of Artificial Sequence: Synthetic oligonucleotide
auacccaugcaaagagcac

SEQ ID NO: 477804 - RNA, 19 nt, Artificial Sequence
  Description of Artificial Sequence: Synthetic oligonucleotide
cuggcccuuacacgaaggg

SEQ ID NO: 477805 - RNA, 19 nt, Artificial Sequence
  Description of Artificial Sequence: Synthetic oligonucleotide
cauagagagguccuagaaa

SEQ ID NO: 477806 - RNA, 19 nt, Artificial Sequence
  Description of Artificial Sequence: Synthetic oligonucleotide
cucucaaggcaucgcagac

SEQ ID NO: 477807 - RNA, 19 nt, Artificial Sequence
  Description of Artificial Sequence: Synthetic oligonucleotide
uuauauccauuucccucau

SEQ ID NO: 477808 - RNA, 19 nt, Artificial Sequence
  Description of Artificial Sequence: Synthetic oligonucleotide
uagucgagucaguuguggu

SEQ ID NO: 477809 - RNA, 19 nt, Artificial Sequence
  Description of Artificial Sequence: Synthetic oligonucleotide
aagaagcuauagucuggau

SEQ ID NO: 477810 - RNA, 19 nt, Artificial Sequence
  Description of Artificial Sequence: Synthetic oligonucleotide
gggaauccagaccaugccc

SEQ ID NO: 477811 - RNA, 19 nt, Artificial Sequence
  Description of Artificial Sequence: Synthetic oligonucleotide
ugccgucuaccacaucccc

SEQ ID NO: 477812 - RNA, 19 nt, Artificial Sequence
  Description of Artificial Sequence: Synthetic oligonucleotide
gucuagcuaagcugaucag

SEQ ID NO: 477813 - RNA, 19 nt, Artificial Sequence
  Description of Artificial Sequence: Synthetic oligonucleotide
gccuaguuuguccugagca

SEQ ID NO: 477814 - RNA, 19 nt, Artificial Sequence
  Description of Artificial Sequence: Synthetic oligonucleotide
ucacagguccgguucuaga

SEQ ID NO: 477815 - RNA, 19 nt, Artificial Sequence
  Description of Artificial Sequence: Synthetic oligonucleotide
cccuauuugucccuuuggg

SEQ ID NO: 477816 - RNA, 19 nt, Artificial Sequence
  Description of Artificial Sequence: Synthetic oligonucleotide
cccaauuuagagucucugc

SEQ ID NO: 477817 - RNA, 19 nt, Artificial Sequence
  Description of Artificial Sequence: Synthetic oligonucleotide
auaguauauguaugcccua

SEQ ID NO: 477818 - RNA, 19 nt, Artificial Sequence
  Description of Artificial Sequence: Synthetic oligonucleotide
gguaagugcucuagaaccc

SEQ ID NO: 477819 - RNA, 19 nt, Artificial Sequence
  Description of Artificial Sequence: Synthetic oligonucleotide
augcccuuuacccucucau

SEQ ID NO: 477820 - RNA, 19 nt, Artificial Sequence
  Description of Artificial Sequence: Synthetic oligonucleotide
cagagcgugcugguaaccg

SEQ ID NO: 477821 - RNA, 19 nt, Artificial Sequence
  Description of Artificial Sequence: Synthetic oligonucleotide
uccaacuacugaagccccu

SEQ ID NO: 477822 - RNA, 19 nt, Artificial Sequence
  Description of Artificial Sequence: Synthetic oligonucleotide
ggccuauaagcaaaguccc

SEQ ID NO: 477823 - RNA, 19 nt, Artificial Sequence
  Description of Artificial Sequence: Synthetic oligonucleotide
cacuauggucccaucucug

SEQ ID NO: 477824 - RNA, 19 nt, Artificial Sequence
  Description of Artificial Sequence: Synthetic oligonucleotide
aagcuauagucuggauuug

SEQ ID NO: 477825 - RNA, 19 nt, Artificial Sequence
  Description of Artificial Sequence: Synthetic oligonucleotide
acucacugagaccguucag

SEQ ID NO: 477826 - RNA, 19 nt, Artificial Sequence
  Description of Artificial Sequence: Synthetic oligonucleotide
gcggugaagaacaagguca

SEQ ID NO: 477827 - RNA, 19 nt, Artificial Sequence
  Description of Artificial Sequence: Synthetic oligonucleotide
cgcagacucacugagaccg

SEQ ID NO: 477828 - RNA, 19 nt, Artificial Sequence
  Description of Artificial Sequence: Synthetic oligonucleotide
accguucaggacccaaacu

SEQ ID NO: 477829 - RNA, 19 nt, Artificial Sequence
  Description of Artificial Sequence: Synthetic oligonucleotide
aggcuccacagccuaaccu

SEQ ID NO: 477830 - RNA, 19 nt, Artificial Sequence
  Description of Artificial Sequence: Synthetic oligonucleotide
cucggcaagugcagcagug

SEQ ID NO: 477831 - RNA, 19 nt, Artificial Sequence
  Description of Artificial Sequence: Synthetic oligonucleotide
uccuagaaauaggcaacac

SEQ ID NO: 477832 - RNA, 19 nt, Artificial Sequence
  Description of Artificial Sequence: Synthetic oligonucleotide
gcaucgcagacucacugag

SEQ ID NO: 477833 - RNA, 19 nt, Artificial Sequence
  Description of Artificial Sequence: Synthetic oligonucleotide
uggcccuuacacgaagggc

SEQ ID NO: 477834 - RNA, 19 nt, Artificial Sequence
  Description of Artificial Sequence: Synthetic oligonucleotide
cucuagaacccauaugccu

SEQ ID NO: 477835 - RNA, 19 nt, Artificial Sequence
  Description of Artificial Sequence: Synthetic oligonucleotide
cugcauagagagguccuag

SEQ ID NO: 477836 - RNA, 19 nt, Artificial Sequence
  Description of Artificial Sequence: Synthetic oligonucleotide
ucccgaauucuugccacug

SEQ ID NO: 477837 - RNA, 19 nt, Artificial Sequence
  Description of Artificial Sequence: Synthetic oligonucleotide
cagauucgacaaacagccc

SEQ ID NO: 477838 - RNA, 19 nt, Artificial Sequence
  Description of Artificial Sequence: Synthetic oligonucleotide
cuaagcugaucagugcuca

SEQ ID NO: 477839 - RNA, 19 nt, Artificial Sequence
  Description of Artificial Sequence: Synthetic oligonucleotide
gaggccaccccuagaacac

SEQ ID NO: 477840 - RNA, 19 nt, Artificial Sequence
  Description of Artificial Sequence: Synthetic oligonucleotide
gugcucuagaacccauaug

SEQ ID NO: 477841 - RNA, 19 nt, Artificial Sequence
  Description of Artificial Sequence: Synthetic oligonucleotide
ccccuagaacacuucaggg

SEQ ID NO: 477842 - RNA, 19 nt, Artificial Sequence
  Description of Artificial Sequence: Synthetic oligonucleotide
agcuaauccaaaggaacua

SEQ ID NO: 477843 - RNA, 19 nt, Artificial Sequence
  Description of Artificial Sequence: Synthetic oligonucleotide
agcuauagucuggauuugu

SEQ ID NO: 477844 - RNA, 19 nt, Artificial Sequence
  Description of Artificial Sequence: Synthetic oligonucleotide
ucgcagacucacugagacc

SEQ ID NO: 477845 - RNA, 19 nt, Artificial Sequence
  Description of Artificial Sequence: Synthetic oligonucleotide
guuuccacuggcccuuaca

SEQ ID NO: 477846 - RNA, 19 nt, Artificial Sequence
  Description of Artificial Sequence: Synthetic oligonucleotide
caucguuagcaccucggca

SEQ ID NO: 477847 - RNA, 19 nt, Artificial Sequence
  Description of Artificial Sequence: Synthetic oligonucleotide
gcucuaaagacagucccug

SEQ ID NO: 477848 - RNA, 19 nt, Artificial Sequence
  Description of Artificial Sequence: Synthetic oligonucleotide
caaaucaccaagccugugu

SEQ ID NO: 477849 - RNA, 19 nt, Artificial Sequence
  Description of Artificial Sequence: Synthetic oligonucleotide
uacccugaaccccgauaca

SEQ ID NO: 477850 - RNA, 19 nt, Artificial Sequence
  Description of Artificial Sequence: Synthetic oligonucleotide
agucuggauuuguucuaga

SEQ ID NO: 477851 - RNA, 19 nt, Artificial Sequence
  Description of Artificial Sequence: Synthetic oligonucleotide
agacucacugagaccguuc

SEQ ID NO: 477852 - RNA, 19 nt, Artificial Sequence
  Description of Artificial Sequence: Synthetic oligonucleotide
caugcaaagagcacggcuu

SEQ ID NO: 477853 - RNA, 19 nt, Artificial Sequence
  Description of Artificial Sequence: Synthetic oligonucleotide
caauaugaugccacauucu

SEQ ID NO: 477854 - RNA, 19 nt, Artificial Sequence
  Description of Artificial Sequence: Synthetic oligonucleotide
cagguccgguucuagagca

SEQ ID NO: 477855 - RNA, 19 nt, Artificial Sequence
  Description of Artificial Sequence: Synthetic oligonucleotide
uucugucugagggcaaauc

SEQ ID NO: 477856 - RNA, 19 nt, Artificial Sequence
  Description of Artificial Sequence: Synthetic oligonucleotide
cucugcuaagcuucuggga

SEQ ID NO: 477857 - RNA, 19 nt, Artificial Sequence
  Description of Artificial Sequence: Synthetic oligonucleotide
agcgugcugguaaccgacc

SEQ ID NO: 477858 - RNA, 19 nt, Artificial Sequence
  Description of Artificial Sequence: Synthetic oligonucleotide
caggacugaguuaccccac

SEQ ID NO: 477859 - RNA, 19 nt, Artificial Sequence
  Description of Artificial Sequence: Synthetic oligonucleotide
cuagucaguggucuuucaa

SEQ ID NO: 477860 - RNA, 19 nt, Artificial Sequence
  Description of Artificial Sequence: Synthetic oligonucleotide
agagcacugugaaggaagu

SEQ ID NO: 477861 - RNA, 19 nt, Artificial Sequence
  Description of Artificial Sequence: Synthetic oligonucleotide
ggcccuuacacgaagggca

SEQ ID NO: 477862 - RNA, 19 nt, Artificial Sequence
  Description of Artificial Sequence: Synthetic oligonucleotide
ggcggugaagaacaagguc

SEQ ID NO: 477863 - RNA, 19 nt, Artificial Sequence
  Description of Artificial Sequence: Synthetic oligonucleotide
agaggaccggacugugagu

SEQ ID NO: 477864 - RNA, 19 nt, Artificial Sequence
  Description of Artificial Sequence: Synthetic oligonucleotide
uccgguucuagagcacugu

SEQ ID NO: 477865 - RNA, 19 nt, Artificial Sequence
  Description of Artificial Sequence: Synthetic oligonucleotide
gguaaccgaccaugguucc

SEQ ID NO: 477866 - RNA, 19 nt, Artificial Sequence
  Description of Artificial Sequence: Synthetic oligonucleotide
cuaagcuucugggaaucca

SEQ ID NO: 477867 - RNA, 19 nt, Artificial Sequence
  Description of Artificial Sequence: Synthetic oligonucleotide
ucaaggcaucgcagacuca

SEQ ID NO: 477868 - RNA, 19 nt, Artificial Sequence
  Description of Artificial Sequence: Synthetic oligonucleotide
gagcgugcugguaaccgac

SEQ ID NO: 477869 - RNA, 19 nt, Artificial Sequence
  Description of Artificial Sequence: Synthetic oligonucleotide
gcaucguuagcaccucggc

SEQ ID NO: 477870 - RNA, 19 nt, Artificial Sequence
  Description of Artificial Sequence: Synthetic oligonucleotide
caagugagagccucguacu

SEQ ID NO: 477871 - RNA, 19 nt, Artificial Sequence
  Description of Artificial Sequence: Synthetic oligonucleotide
uuugucagcccaggugcaa

SEQ ID NO: 477872 - RNA, 19 nt, Artificial Sequence
  Description of Artificial Sequence: Synthetic oligonucleotide
cacuuccgcucuuuccuug

SEQ ID NO: 477873 - RNA, 19 nt, Artificial Sequence
  Description of Artificial Sequence: Synthetic oligonucleotide
uccagaccaugcccuuuac

SEQ ID NO: 477874 - RNA, 19 nt, Artificial Sequence
  Description of Artificial Sequence: Synthetic oligonucleotide
acccugaaccccgauacau

SEQ ID NO: 477875 - RNA, 19 nt, Artificial Sequence
  Description of Artificial Sequence: Synthetic oligonucleotide
aaagcccugccaacaacuu

SEQ ID NO: 477876 - RNA, 19 nt, Artificial Sequence
  Description of Artificial Sequence: Synthetic oligonucleotide
auuaaauuucugggcuuua

SEQ ID NO: 477877 - RNA, 19 nt, Artificial Sequence
  Description of Artificial Sequence: Synthetic oligonucleotide
guauaaguggggaguggga

SEQ ID NO: 477878 - RNA, 19 nt, Artificial Sequence
  Description of Artificial Sequence: Synthetic oligonucleotide
gagccucguacuccagcug

SEQ ID NO: 477879 - RNA, 19 nt, Artificial Sequence
  Description of Artificial Sequence: Synthetic oligonucleotide
gagcacggcuucaaaagaa

SEQ ID NO: 477880 - RNA, 19 nt, Artificial Sequence
  Description of Artificial Sequence: Synthetic oligonucleotide
ugucacacccaggggcuca

SEQ ID NO: 477881 - RNA, 19 nt, Artificial Sequence
  Description of Artificial Sequence: Synthetic oligonucleotide
ggguagaacaaucuucccu

SEQ ID NO: 477882 - RNA, 19 nt, Artificial Sequence
  Description of Artificial Sequence: Synthetic oligonucleotide
cuuacacgaagggcagaac

SEQ ID NO: 477883 - RNA, 19 nt, Artificial Sequence
  Description of Artificial Sequence: Synthetic oligonucleotide
guaaccgaccaugguuccc

SEQ ID NO: 477884 - RNA, 19 nt, Artificial Sequence
  Description of Artificial Sequence: Synthetic oligonucleotide
agcaaaagucuggacuaaa

SEQ ID NO: 477885 - RNA, 19 nt, Artificial Sequence
  Description of Artificial Sequence: Synthetic oligonucleotide
caacaacuuucagcugugc

SEQ ID NO: 477886 - RNA, 19 nt, Artificial Sequence
  Description of Artificial Sequence: Synthetic oligonucleotide
uggucuagcuaagcugauc

SEQ ID NO: 477887 - RNA, 19 nt, Artificial Sequence
  Description of Artificial Sequence: Synthetic oligonucleotide
gucgagucaguuguggucu

SEQ ID NO: 477888 - RNA, 19 nt, Artificial Sequence
  Description of Artificial Sequence: Synthetic oligonucleotide
ggccaacgggcacaugccg

SEQ ID NO: 477889 - RNA, 19 nt, Artificial Sequence
  Description of Artificial Sequence: Synthetic oligonucleotide
aguagucgagucaguugug

SEQ ID NO: 477890 - RNA, 19 nt, Artificial Sequence
  Description of Artificial Sequence: Synthetic oligonucleotide
cccuaguauaaguggggag

SEQ ID NO: 477891 - RNA, 19 nt, Artificial Sequence
  Description of Artificial Sequence: Synthetic oligonucleotide
ucuuacccugaaccccgau

SEQ ID NO: 477892 - RNA, 19 nt, Artificial Sequence
  Description of Artificial Sequence: Synthetic oligonucleotide
cuuacccugaaccccgaua

SEQ ID NO: 477893 - RNA, 19 nt, Artificial Sequence
  Description of Artificial Sequence: Synthetic oligonucleotide
aacgggcacaugccgucua

SEQ ID NO: 477894 - RNA, 19 nt, Artificial Sequence
  Description of Artificial Sequence: Synthetic oligonucleotide
acacuaucuaaaagugcaa

SEQ ID NO: 477895 - RNA, 19 nt, Artificial Sequence
  Description of Artificial Sequence: Synthetic oligonucleotide
caggcuccacagccuaacc

SEQ ID NO: 477896 - RNA, 19 nt, Artificial Sequence
  Description of Artificial Sequence: Synthetic oligonucleotide
augcuaacuuggguaggug

SEQ ID NO: 477897 - RNA, 19 nt, Artificial Sequence
  Description of Artificial Sequence: Synthetic oligonucleotide
agagcccuuaccacaaaua

SEQ ID NO: 477898 - RNA, 19 nt, Artificial Sequence
  Description of Artificial Sequence: Synthetic oligonucleotide
ccuagaacacuucagggcu

SEQ ID NO: 477899 - RNA, 19 nt, Artificial Sequence
  Description of Artificial Sequence: Synthetic oligonucleotide
agcccuuaccacaaauaaa

SEQ ID NO: 477900 - RNA, 19 nt, Artificial Sequence
  Description of Artificial Sequence: Synthetic oligonucleotide
cugucccgaauucuugcca

SEQ ID NO: 477901 - RNA, 19 nt, Artificial Sequence
  Description of Artificial Sequence: Synthetic oligonucleotide
auucuagaucagcguuuau

SEQ ID NO: 477902 - RNA, 19 nt, Artificial Sequence
  Description of Artificial Sequence: Synthetic oligonucleotide
agcacggcuucaaaagaaa

SEQ ID NO: 477903 - RNA, 19 nt, Artificial Sequence
  Description of Artificial Sequence: Synthetic oligonucleotide
gucuagucaguggucuuuc

SEQ ID NO: 477904 - RNA, 19 nt, Artificial Sequence
  Description of Artificial Sequence: Synthetic oligonucleotide
gcuaaaggcuuccaggaau

SEQ ID NO: 477905 - RNA, 19 nt, Artificial Sequence
  Description of Artificial Sequence: Synthetic oligonucleotide
ggcacaugccgucuaccac

SEQ ID NO: 477906 - RNA, 19 nt, Artificial Sequence
  Description of Artificial Sequence: Synthetic oligonucleotide
cagcguuuauguccacauc

SEQ ID NO: 477907 - RNA, 19 nt, Artificial Sequence
  Description of Artificial Sequence: Synthetic oligonucleotide
aagugcucuagaacccaua

SEQ ID NO: 477908 - RNA, 19 nt, Artificial Sequence
  Description of Artificial Sequence: Synthetic oligonucleotide
gcucugaguuucuuagauc

SEQ ID NO: 477909 - RNA, 19 nt, Artificial Sequence
  Description of Artificial Sequence: Synthetic oligonucleotide
caucgcagacucacugaga

SEQ ID NO: 477910 - RNA, 19 nt, Artificial Sequence
  Description of Artificial Sequence: Synthetic oligonucleotide
ccuuggccuauaagcaaag

SEQ ID NO: 477911 - RNA, 19 nt, Artificial Sequence
  Description of Artificial Sequence: Synthetic oligonucleotide
cccuuuacccucucauaac

SEQ ID NO: 477912 - RNA, 19 nt, Artificial Sequence
  Description of Artificial Sequence: Synthetic oligonucleotide
aagucccuauuugucccuu

SEQ ID NO: 477913 - RNA, 19 nt, Artificial Sequence
  Description of Artificial Sequence: Synthetic oligonucleotide
gaucagugcucaggaucac

SEQ ID NO: 477914 - RNA, 19 nt, Artificial Sequence
  Description of Artificial Sequence: Synthetic oligonucleotide
gaguuaccccacuuccgcu

SEQ ID NO: 477915 - RNA, 19 nt, Artificial Sequence
  Description of Artificial Sequence: Synthetic oligonucleotide
agcaagugagagccucgua

SEQ ID NO: 477916 - RNA, 19 nt, Artificial Sequence
  Description of Artificial Sequence: Synthetic oligonucleotide
gaaaaguagucgagucagu

SEQ ID NO: 477917 - RNA, 19 nt, Artificial Sequence
  Description of Artificial Sequence: Synthetic oligonucleotide
ugcuugcuacagacagcuc

SEQ ID NO: 477918 - RNA, 19 nt, Artificial Sequence
  Description of Artificial Sequence: Synthetic oligonucleotide
ccuaaccuuuugucagccc

SEQ ID NO: 477919 - RNA, 19 nt, Artificial Sequence
  Description of Artificial Sequence: Synthetic oligonucleotide
caauuuggucccacauucu

SEQ ID NO: 477920 - RNA, 19 nt, Artificial Sequence
  Description of Artificial Sequence: Synthetic oligonucleotide
ccagaccaugcccuuuacc

SEQ ID NO: 477921 - RNA, 19 nt, Artificial Sequence
  Description of Artificial Sequence: Synthetic oligonucleotide
gcuacaaggggagcuguuc

SEQ ID NO: 477922 - RNA, 19 nt, Artificial Sequence
  Description of Artificial Sequence: Synthetic oligonucleotide
ccgaccaugguucccgcug

SEQ ID NO: 477923 - RNA, 19 nt, Artificial Sequence
  Description of Artificial Sequence: Synthetic oligonucleotide
gggcacaugccgucuacca

SEQ ID NO: 477924 - RNA, 19 nt, Artificial Sequence
  Description of Artificial Sequence: Synthetic oligonucleotide
cugcaagaaggaauguuuu

SEQ ID NO: 477925 - RNA, 19 nt, Artificial Sequence
  Description of Artificial Sequence: Synthetic oligonucleotide
ccgugggaaggguagaaca

SEQ ID NO: 477926 - RNA, 19 nt, Artificial Sequence
  Description of Artificial Sequence: Synthetic oligonucleotide
ucgagucaguuguggucua

SEQ ID NO: 477927 - RNA, 19 nt, Artificial Sequence
  Description of Artificial Sequence: Synthetic oligonucleotide
ccacccugugugaaggcug

SEQ ID NO: 477928 - RNA, 19 nt, Artificial Sequence
  Description of Artificial Sequence: Synthetic oligonucleotide
augccacauucuaggacca

SEQ ID NO: 477929 - RNA, 19 nt, Artificial Sequence
  Description of Artificial Sequence: Synthetic oligonucleotide
gcacaugagcauccgugca

SEQ ID NO: 477930 - RNA, 19 nt, Artificial Sequence
  Description of Artificial Sequence: Synthetic oligonucleotide
ccuaguauaaguggggagu

SEQ ID NO: 477931 - RNA, 19 nt, Artificial Sequence
  Description of Artificial Sequence: Synthetic oligonucleotide
gccuaaccuuuugucagcc

SEQ ID NO: 477932 - RNA, 19 nt, Artificial Sequence
  Description of Artificial Sequence: Synthetic oligonucleotide
ggccuaguuuguccugagc

SEQ ID NO: 477933 - RNA, 19 nt, Artificial Sequence
  Description of Artificial Sequence: Synthetic oligonucleotide
ggaaggguagaacaaucuu

SEQ ID NO: 477934 - RNA, 19 nt, Artificial Sequence
  Description of Artificial Sequence: Synthetic oligonucleotide
agaccguucaggacccaaa

SEQ ID NO: 477935 - RNA, 19 nt, Artificial Sequence
  Description of Artificial Sequence: Synthetic oligonucleotide
guccgguucuagagcacug

SEQ ID NO: 477936 - RNA, 19 nt, Artificial Sequence
  Description of Artificial Sequence: Synthetic oligonucleotide
cccgaauucuugccacugc

SEQ ID NO: 477937 - RNA, 19 nt, Artificial Sequence
  Description of Artificial Sequence: Synthetic oligonucleotide
gcaugcacaugagcauccg

SEQ ID NO: 477938 - RNA, 19 nt, Artificial Sequence
  Description of Artificial Sequence: Synthetic oligonucleotide
auucuaggaccaagugaaa

SEQ ID NO: 477939 - RNA, 19 nt, Artificial Sequence
  Description of Artificial Sequence: Synthetic oligonucleotide
cuggccuaguuuguccuga

SEQ ID NO: 477940 - RNA, 19 nt, Artificial Sequence
  Description of Artificial Sequence: Synthetic oligonucleotide
ccuauaagcaaagucccua

SEQ ID NO: 477941 - RNA, 19 nt, Artificial Sequence
  Description of Artificial Sequence: Synthetic oligonucleotide
cagugaacugucccgaauu

SEQ ID NO: 477942 - RNA, 19 nt, Artificial Sequence
  Description of Artificial Sequence: Synthetic oligonucleotide
gugaacugucccgaauucu

SEQ ID NO: 477943 - RNA, 19 nt, Artificial Sequence
  Description of Artificial Sequence: Synthetic oligonucleotide
gagaccguucaggacccaa

SEQ ID NO: 477944 - RNA, 19 nt, Artificial Sequence
  Description of Artificial Sequence: Synthetic oligonucleotide
ccgaauucuugccacugca

SEQ ID NO: 477945 - RNA, 19 nt, Artificial Sequence
  Description of Artificial Sequence: Synthetic oligonucleotide
ccaacgggcacaugccguc

SEQ ID NO: 477946 - RNA, 19 nt, Artificial Sequence
  Description of Artificial Sequence: Synthetic oligonucleotide
ccccuaccaacccaggcuc

SEQ ID NO: 477947 - RNA, 19 nt, Artificial Sequence
  Description of Artificial Sequence: Synthetic oligonucleotide
gcuaagcuucugggaaucc

SEQ ID NO: 477948 - RNA, 19 nt, Artificial Sequence
  Description of Artificial Sequence: Synthetic oligonucleotide
ccccaauuuagagucucug

SEQ ID NO: 477949 - RNA, 19 nt, Artificial Sequence
  Description of Artificial Sequence: Synthetic oligonucleotide
gcucaggaucacagguccg

SEQ ID NO: 477950 - RNA, 19 nt, Artificial Sequence
  Description of Artificial Sequence: Synthetic oligonucleotide
gcccuuacacgaagggcag

SEQ ID NO: 477951 - RNA, 19 nt, Artificial Sequence
  Description of Artificial Sequence: Synthetic oligonucleotide
ugccacauucuaggaccaa

SEQ ID NO: 477952 - RNA, 19 nt, Artificial Sequence
  Description of Artificial Sequence: Synthetic oligonucleotide
gagcuggaaugguccucuc

SEQ ID NO: 477953 - RNA, 19 nt, Artificial Sequence
  Description of Artificial Sequence: Synthetic oligonucleotide
ccgguucuagagcacugug

SEQ ID NO: 477954 - RNA, 19 nt, Artificial Sequence
  Description of Artificial Sequence: Synthetic oligonucleotide
aaguggggagugggauuaa

SEQ ID NO: 477955 - RNA, 19 nt, Artificial Sequence
  Description of Artificial Sequence: Synthetic oligonucleotide
uuaccccacuuccgcucuu

SEQ ID NO: 477956 - RNA, 19 nt, Artificial Sequence
  Description of Artificial Sequence: Synthetic oligonucleotide
cugcuaagcuucugggaau

SEQ ID NO: 477957 - RNA, 19 nt, Artificial Sequence
  Description of Artificial Sequence: Synthetic oligonucleotide
cuccugccguuuaugauuu

SEQ ID NO: 477958 - RNA, 19 nt, Artificial Sequence
  Description of Artificial Sequence: Synthetic oligonucleotide
gcgugcugguaaccgacca

SEQ ID NO: 477959 - RNA, 19 nt, Artificial Sequence
  Description of Artificial Sequence: Synthetic oligonucleotide
ugagaccguucaggaccca

SEQ ID NO: 477960 - RNA, 19 nt, Artificial Sequence
  Description of Artificial Sequence: Synthetic oligonucleotide
cccuaccaacccaggcucc

SEQ ID NO: 477961 - RNA, 19 nt, Artificial Sequence
  Description of Artificial Sequence: Synthetic oligonucleotide
aucuuacccugaaccccga

SEQ ID NO: 477962 - RNA, 19 nt, Artificial Sequence
  Description of Artificial Sequence: Synthetic oligonucleotide
ggaucacagguccgguucu

SEQ ID NO: 477963 - RNA, 19 nt, Artificial Sequence
  Description of Artificial Sequence: Synthetic oligonucleotide
ggccaauuuggucccacau

SEQ ID NO: 477964 - RNA, 19 nt, Artificial Sequence
  Description of Artificial Sequence: Synthetic oligonucleotide
agcccggcaugcacaugag

SEQ ID NO: 477965 - RNA, 19 nt, Artificial Sequence
  Description of Artificial Sequence: Synthetic oligonucleotide
ccuuacacgaagggcagaa

SEQ ID NO: 477966 - RNA, 19 nt, Artificial Sequence
  Description of Artificial Sequence: Synthetic oligonucleotide
ccaccccuagaacacuuca

SEQ ID NO: 477967 - RNA, 19 nt, Artificial Sequence
  Description of Artificial Sequence: Synthetic oligonucleotide
cagagcccuuaccacaaau

SEQ ID NO: 477968 - RNA, 19 nt, Artificial Sequence
  Description of Artificial Sequence: Synthetic oligonucleotide
gcccggcaugcacaugagc

SEQ ID NO: 477969 - RNA, 19 nt, Artificial Sequence
  Description of Artificial Sequence: Synthetic oligonucleotide
uccugccguuuaugauuua

SEQ ID NO: 477970 - RNA, 19 nt, Artificial Sequence
  Description of Artificial Sequence: Synthetic oligonucleotide
gcguuuauguccacauccu

SEQ ID NO: 477971 - RNA, 19 nt, Artificial Sequence
  Description of Artificial Sequence: Synthetic oligonucleotide
cuaaacaccugaggccaau

SEQ ID NO: 477972 - RNA, 19 nt, Artificial Sequence
  Description of Artificial Sequence: Synthetic oligonucleotide
gccgucuaccacaucccca

SEQ ID NO: 477973 - RNA, 19 nt, Artificial Sequence
  Description of Artificial Sequence: Synthetic oligonucleotide
acagcccggcaugcacaug

SEQ ID NO: 477974 - RNA, 19 nt, Artificial Sequence
  Description of Artificial Sequence: Synthetic oligonucleotide
ccugccguuuaugauuuaa

SEQ ID NO: 477975 - RNA, 19 nt, Artificial Sequence
  Description of Artificial Sequence: Synthetic oligonucleotide
ggcaaaucaccaagccugu

SEQ ID NO: 477976 - RNA, 19 nt, Artificial Sequence
  Description of Artificial Sequence: Synthetic oligonucleotide
gucccgugggaaggguaga

SEQ ID NO: 477977 - RNA, 19 nt, Artificial Sequence
  Description of Artificial Sequence: Synthetic oligonucleotide
gcugcauagagagguccua

SEQ ID NO: 477978 - RNA, 19 nt, Artificial Sequence
  Description of Artificial Sequence: Synthetic oligonucleotide
cccgugggaaggguagaac

SEQ ID NO: 477979 - RNA, 19 nt, Artificial Sequence
  Description of Artificial Sequence: Synthetic oligonucleotide
ccauaugccuggccccuga

SEQ ID NO: 477980 - RNA, 19 nt, Artificial Sequence
  Description of Artificial Sequence: Synthetic oligonucleotide
gugucccgugggaagggua

SEQ ID NO: 477981 - RNA, 19 nt, Artificial Sequence
  Description of Artificial Sequence: Synthetic oligonucleotide
gccuauaagcaaagucccu

SEQ ID NO: 477982 - RNA, 19 nt, Artificial Sequence
  Description of Artificial Sequence: Synthetic oligonucleotide
cccugaaccccgauacaua

SEQ ID NO: 477983 - RNA, 19 nt, Artificial Sequence
  Description of Artificial Sequence: Synthetic oligonucleotide
gccaccccuagaacacuuc

SEQ ID NO: 477984 - RNA, 19 nt, Artificial Sequence
  Description of Artificial Sequence: Synthetic oligonucleotide
gcccugccaacaacuuuca

SEQ ID NO: 477985 - RNA, 19 nt, Artificial Sequence
  Description of Artificial Sequence: Synthetic oligonucleotide
guggucuagcuaagcugau

SEQ ID NO: 477986 - RNA, 19 nt, Artificial Sequence
  Description of Artificial Sequence: Synthetic oligonucleotide
gcccucaucuagauacagu

SEQ ID NO: 477987 - RNA, 19 nt, Artificial Sequence
  Description of Artificial Sequence: Synthetic oligonucleotide
cagacucacugagaccguu

SEQ ID NO: 477988 - RNA, 19 nt, Artificial Sequence
  Description of Artificial Sequence: Synthetic oligonucleotide
caacgggcacaugccgucu

SEQ ID NO: 477989 - RNA, 19 nt, Artificial Sequence
  Description of Artificial Sequence: Synthetic oligonucleotide
cgggcacaugccgucuacc

SEQ ID NO: 477990 - RNA, 19 nt, Artificial Sequence
  Description of Artificial Sequence: Synthetic oligonucleotide
ggucaaggguagggacaga

SEQ ID NO: 477991 - RNA, 19 nt, Artificial Sequence
  Description of Artificial Sequence: Synthetic oligonucleotide
cccauaugccuggccccug

SEQ ID NO: 477992 - RNA, 19 nt, Artificial Sequence
  Description of Artificial Sequence: Synthetic oligonucleotide
ccacuggcccuuacacgaa

SEQ ID NO: 477993 - RNA, 19 nt, Artificial Sequence
  Description of Artificial Sequence: Synthetic oligonucleotide
ccggacugugaguucuagu

SEQ ID NO: 477994 - RNA, 19 nt, Artificial Sequence
  Description of Artificial Sequence: Synthetic oligonucleotide
gcaacacuuuagguaccau

SEQ ID NO: 477995 - RNA, 19 nt, Artificial Sequence
  Description of Artificial Sequence: Synthetic oligonucleotide
ccaugcccuuuacccucuc

SEQ ID NO: 477996 - RNA, 19 nt, Artificial Sequence
  Description of Artificial Sequence: Synthetic oligonucleotide
ccgcucuuuccuuggccua

SEQ ID NO: 477997 - RNA, 19 nt, Artificial Sequence
  Description of Artificial Sequence: Synthetic oligonucleotide
cgugcugguaaccgaccau

SEQ ID NO: 477998 - RNA, 19 nt, Artificial Sequence
  Description of Artificial Sequence: Synthetic oligonucleotide
ccacuuccgcucuuuccuu

SEQ ID NO: 477999 - RNA, 19 nt, Artificial Sequence
  Description of Artificial Sequence: Synthetic oligonucleotide
cguuagcaccucggcaagu

SEQ ID NO: 478000 - RNA, 19 nt, Artificial Sequence
  Description of Artificial Sequence: Synthetic oligonucleotide
aauaguuccugguaugugg

SEQ ID NO: 478001 - RNA, 19 nt, Artificial Sequence
  Description of Artificial Sequence: Synthetic oligonucleotide
uuugguacagcaucuaugg

SEQ ID NO: 478002 - RNA, 19 nt, Artificial Sequence
  Description of Artificial Sequence: Synthetic oligonucleotide
aagguuuaaucuccaaacc

SEQ ID NO: 478003 - RNA, 19 nt, Artificial Sequence
  Description of Artificial Sequence: Synthetic oligonucleotide
ugggauauaaccuugcuga

SEQ ID NO: 478004 - RNA, 19 nt, Artificial Sequence
  Description of Artificial Sequence: Synthetic oligonucleotide
ugauauuuagguaacugug

SEQ ID NO: 478005 - RNA, 19 nt, Artificial Sequence
  Description of Artificial Sequence: Synthetic oligonucleotide
aaaccuauuagacucgaug

SEQ ID NO: 478006 - RNA, 19 nt, Artificial Sequence
  Description of Artificial Sequence: Synthetic oligonucleotide
aagccuuauagacggaagc

SEQ ID NO: 478007 - RNA, 19 nt, Artificial Sequence
  Description of Artificial Sequence: Synthetic oligonucleotide
uuuacuauuacuucacuuc

SEQ ID NO: 478008 - RNA, 19 nt, Artificial Sequence
  Description of Artificial Sequence: Synthetic oligonucleotide
aucauuauguuuucaccgc

SEQ ID NO: 478009 - RNA, 19 nt, Artificial Sequence
  Description of Artificial Sequence: Synthetic oligonucleotide
ucuuauggcauauaugaca

SEQ ID NO: 478010 - RNA, 19 nt, Artificial Sequence
  Description of Artificial Sequence: Synthetic oligonucleotide
aaccuauuagacucgauga

SEQ ID NO: 478011 - RNA, 19 nt, Artificial Sequence
  Description of Artificial Sequence: Synthetic oligonucleotide
gucuauuaagaauaccugg

SEQ ID NO: 478012 - RNA, 19 nt, Artificial Sequence
  Description of Artificial Sequence: Synthetic oligonucleotide
caaugaauagcuaacccag

SEQ ID NO: 478013 - RNA, 19 nt, Artificial Sequence
  Description of Artificial Sequence: Synthetic oligonucleotide
ugauauauccucaucugga

SEQ ID NO: 478014 - RNA, 19 nt, Artificial Sequence
  Description of Artificial Sequence: Synthetic oligonucleotide
aggcuuaguaacuggaggc

SEQ ID NO: 478015 - RNA, 19 nt, Artificial Sequence
  Description of Artificial Sequence: Synthetic oligonucleotide
uggauuaccaaucggaguc

SEQ ID NO: 478016 - RNA, 19 nt, Artificial Sequence
  Description of Artificial Sequence: Synthetic oligonucleotide
uguauuuucucugaugaug

SEQ ID NO: 478017 - RNA, 19 nt, Artificial Sequence
  Description of Artificial Sequence: Synthetic oligonucleotide
uuuaacgaaccaaauuuac

SEQ ID NO: 478018 - RNA, 19 nt, Artificial Sequence
  Description of Artificial Sequence: Synthetic oligonucleotide
uaagaugguauguucaugu

SEQ ID NO: 478019 - RNA, 19 nt, Artificial Sequence
  Description of Artificial Sequence: Synthetic oligonucleotide
auuacgcugauauuuaggu

SEQ ID NO: 478020 - RNA, 19 nt, Artificial Sequence
  Description of Artificial Sequence: Synthetic oligonucleotide
uacgcugauauuuagguaa

SEQ ID NO: 478021 - RNA, 19 nt, Artificial Sequence
  Description of Artificial Sequence: Synthetic oligonucleotide
uaagcuuacagaacuugcc

SEQ ID NO: 478022 - RNA, 19 nt, Artificial Sequence
  Description of Artificial Sequence: Synthetic oligonucleotide
aauguaaccuggcaugccu

SEQ ID NO: 478023 - RNA, 19 nt, Artificial Sequence
  Description of Artificial Sequence: Synthetic oligonucleotide
uuaaucuccaaaccuauua

SEQ ID NO: 478024 - RNA, 19 nt, Artificial Sequence
  Description of Artificial Sequence: Synthetic oligonucleotide
uuaaagucacaaugaagcc

SEQ ID NO: 478025 - RNA, 19 nt, Artificial Sequence
  Description of Artificial Sequence: Synthetic oligonucleotide
cuugcgacauaacaggagg

SEQ ID NO: 478026 - RNA, 19 nt, Artificial Sequence
  Description of Artificial Sequence: Synthetic oligonucleotide
uaacgaaccaaauuuacua

SEQ ID NO: 478027 - RNA, 19 nt, Artificial Sequence
  Description of Artificial Sequence: Synthetic oligonucleotide
uuacaauaccagcaccacg

SEQ ID NO: 478028 - RNA, 19 nt, Artificial Sequence
  Description of Artificial Sequence: Synthetic oligonucleotide
uguuuucaccgcaaaauga

SEQ ID NO: 478029 - RNA, 19 nt, Artificial Sequence
  Description of Artificial Sequence: Synthetic oligonucleotide
uuucaccgcaaaaugacug

SEQ ID NO: 478030 - RNA, 19 nt, Artificial Sequence
  Description of Artificial Sequence: Synthetic oligonucleotide
uggaucaacuuacugguug

SEQ ID NO: 478031 - RNA, 19 nt, Artificial Sequence
  Description of Artificial Sequence: Synthetic oligonucleotide
uuaacgaaccaaauuuacu

SEQ ID NO: 478032 - RNA, 19 nt, Artificial Sequence
  Description of Artificial Sequence: Synthetic oligonucleotide
auaaccgcgcucuacggac

SEQ ID NO: 478033 - RNA, 19 nt, Artificial Sequence
  Description of Artificial Sequence: Synthetic oligonucleotide
auuauguggacgucuacug

SEQ ID NO: 478034 - RNA, 19 nt, Artificial Sequence
  Description of Artificial Sequence: Synthetic oligonucleotide
uuuguuguacuagugguug

SEQ ID NO: 478035 - RNA, 19 nt, Artificial Sequence
  Description of Artificial Sequence: Synthetic oligonucleotide
ucuaugucuguucucccag

SEQ ID NO: 478036 - RNA, 19 nt, Artificial Sequence
  Description of Artificial Sequence: Synthetic oligonucleotide
agugauauauccucaucug

SEQ ID NO: 478037 - RNA, 19 nt, Artificial Sequence
  Description of Artificial Sequence: Synthetic oligonucleotide
aggaauguaaccuggcaug

SEQ ID NO: 478038 - RNA, 19 nt, Artificial Sequence
  Description of Artificial Sequence: Synthetic oligonucleotide
uauaaccuugcugagguug

SEQ ID NO: 478039 - RNA, 19 nt, Artificial Sequence
  Description of Artificial Sequence: Synthetic oligonucleotide
cuugcgacccauaaccgcg

SEQ ID NO: 478040 - RNA, 19 nt, Artificial Sequence
  Description of Artificial Sequence: Synthetic oligonucleotide
uuguuacacauucagacuu

SEQ ID NO: 478041 - RNA, 19 nt, Artificial Sequence
  Description of Artificial Sequence: Synthetic oligonucleotide
ugguggauuaccaaucgga

SEQ ID NO: 478042 - RNA, 19 nt, Artificial Sequence
  Description of Artificial Sequence: Synthetic oligonucleotide
gauauaaccuugcugaggu

SEQ ID NO: 478043 - RNA, 19 nt, Artificial Sequence
  Description of Artificial Sequence: Synthetic oligonucleotide
uucaccgcaaaaugacugg

SEQ ID NO: 478044 - RNA, 19 nt, Artificial Sequence
  Description of Artificial Sequence: Synthetic oligonucleotide
agguuuaaucuccaaaccu

SEQ ID NO: 478045 - RNA, 19 nt, Artificial Sequence
  Description of Artificial Sequence: Synthetic oligonucleotide
uauguucauguaauuccag

SEQ ID NO: 478046 - RNA, 19 nt, Artificial Sequence
  Description of Artificial Sequence: Synthetic oligonucleotide
cuacggaccagguaggaag

SEQ ID NO: 478047 - RNA, 19 nt, Artificial Sequence
  Description of Artificial Sequence: Synthetic oligonucleotide
uauuuagguaacugugccc

SEQ ID NO: 478048 - RNA, 19 nt, Artificial Sequence
  Description of Artificial Sequence: Synthetic oligonucleotide
uuuauuauguggacgucua

SEQ ID NO: 478049 - RNA, 19 nt, Artificial Sequence
  Description of Artificial Sequence: Synthetic oligonucleotide
gauuacgcugauauuuagg

SEQ ID NO: 478050 - RNA, 19 nt, Artificial Sequence
  Description of Artificial Sequence: Synthetic oligonucleotide
guaacggccaccuugcgac

SEQ ID NO: 478051 - RNA, 19 nt, Artificial Sequence
  Description of Artificial Sequence: Synthetic oligonucleotide
accuagaugaaacaugaaa

SEQ ID NO: 478052 - RNA, 19 nt, Artificial Sequence
  Description of Artificial Sequence: Synthetic oligonucleotide
ugugaaggcauaacuuuac

SEQ ID NO: 478053 - RNA, 19 nt, Artificial Sequence
  Description of Artificial Sequence: Synthetic oligonucleotide
uccaaaccuauuagacucg

SEQ ID NO: 478054 - RNA, 19 nt, Artificial Sequence
  Description of Artificial Sequence: Synthetic oligonucleotide
caccuugcgacauaacagg

SEQ ID NO: 478055 - RNA, 19 nt, Artificial Sequence
  Description of Artificial Sequence: Synthetic oligonucleotide
uguguauaagcagggaaug

SEQ ID NO: 478056 - RNA, 19 nt, Artificial Sequence
  Description of Artificial Sequence: Synthetic oligonucleotide
cuauuaagaauaccuggug

SEQ ID NO: 478057 - RNA, 19 nt, Artificial Sequence
  Description of Artificial Sequence: Synthetic oligonucleotide
guagacuguguauaagcag

SEQ ID NO: 478058 - RNA, 19 nt, Artificial Sequence
  Description of Artificial Sequence: Synthetic oligonucleotide
ucauuauguuuucaccgca

SEQ ID NO: 478059 - RNA, 19 nt, Artificial Sequence
  Description of Artificial Sequence: Synthetic oligonucleotide
aguguagcaggcuuacuug

SEQ ID NO: 478060 - RNA, 19 nt, Artificial Sequence
  Description of Artificial Sequence: Synthetic oligonucleotide
cuguacaaaccuuucaguc

SEQ ID NO: 478061 - RNA, 19 nt, Artificial Sequence
  Description of Artificial Sequence: Synthetic oligonucleotide
uguaagcuuacagaacuug

SEQ ID NO: 478062 - RNA, 19 nt, Artificial Sequence
  Description of Artificial Sequence: Synthetic oligonucleotide
guacaaaccuuucagucac

SEQ ID NO: 478063 - RNA, 19 nt, Artificial Sequence
  Description of Artificial Sequence: Synthetic oligonucleotide
uauuauguggacgucuacu

SEQ ID NO: 478064 - RNA, 19 nt, Artificial Sequence
  Description of Artificial Sequence: Synthetic oligonucleotide
uauagacggaagcuugucu

SEQ ID NO: 478065 - RNA, 19 nt, Artificial Sequence
  Description of Artificial Sequence: Synthetic oligonucleotide
aguacuauuuguuguacua

SEQ ID NO: 478066 - RNA, 19 nt, Artificial Sequence
  Description of Artificial Sequence: Synthetic oligonucleotide
aacugguggauuaccaauc

SEQ ID NO: 478067 - RNA, 19 nt, Artificial Sequence
  Description of Artificial Sequence: Synthetic oligonucleotide
gguguauuuucucugauga

SEQ ID NO: 478068 - RNA, 19 nt, Artificial Sequence
  Description of Artificial Sequence: Synthetic oligonucleotide
augaauagcuaacccaggu

SEQ ID NO: 478069 - RNA, 19 nt, Artificial Sequence
  Description of Artificial Sequence: Synthetic oligonucleotide
uucuugcgacccauaaccg

SEQ ID NO: 478070 - RNA, 19 nt, Artificial Sequence
  Description of Artificial Sequence: Synthetic oligonucleotide
ugaauagcuaacccagguc

SEQ ID NO: 478071 - RNA, 19 nt, Artificial Sequence
  Description of Artificial Sequence: Synthetic oligonucleotide
aauuucucccaugucaaau

SEQ ID NO: 478072 - RNA, 19 nt, Artificial Sequence
  Description of Artificial Sequence: Synthetic oligonucleotide
uuuucaccgcaaaaugacu

SEQ ID NO: 478073 - RNA, 19 nt, Artificial Sequence
  Description of Artificial Sequence: Synthetic oligonucleotide
aaacccugcaacacgagga

SEQ ID NO: 478074 - RNA, 19 nt, Artificial Sequence
  Description of Artificial Sequence: Synthetic oligonucleotide
uccaauaguuccugguaug

SEQ ID NO: 478075 - RNA, 19 nt, Artificial Sequence
  Description of Artificial Sequence: Synthetic oligonucleotide
aauugcaacuucaggaaaa

SEQ ID NO: 478076 - RNA, 19 nt, Artificial Sequence
  Description of Artificial Sequence: Synthetic oligonucleotide
accugcaugcaaugaauag

SEQ ID NO: 478077 - RNA, 19 nt, Artificial Sequence
  Description of Artificial Sequence: Synthetic oligonucleotide
accgcaaaaugacugggug

SEQ ID NO: 478078 - RNA, 19 nt, Artificial Sequence
  Description of Artificial Sequence: Synthetic oligonucleotide
agauuacgcugauauuuag

SEQ ID NO: 478079 - RNA, 19 nt, Artificial Sequence
  Description of Artificial Sequence: Synthetic oligonucleotide
guuuucaccgcaaaaugac

SEQ ID NO: 478080 - RNA, 19 nt, Artificial Sequence
  Description of Artificial Sequence: Synthetic oligonucleotide
aucucuguuacaauaccag

SEQ ID NO: 478081 - RNA, 19 nt, Artificial Sequence
  Description of Artificial Sequence: Synthetic oligonucleotide
uguaaguguagcaggcuua

SEQ ID NO: 478082 - RNA, 19 nt, Artificial Sequence
  Description of Artificial Sequence: Synthetic oligonucleotide
ucuugcgacccauaaccgc

SEQ ID NO: 478083 - RNA, 19 nt, Artificial Sequence
  Description of Artificial Sequence: Synthetic oligonucleotide
uuaagaugguauguucaug

SEQ ID NO: 478084 - RNA, 19 nt, Artificial Sequence
  Description of Artificial Sequence: Synthetic oligonucleotide
aguacuauuuaagggcuug

SEQ ID NO: 478085 - RNA, 19 nt, Artificial Sequence
  Description of Artificial Sequence: Synthetic oligonucleotide
aagccauacaguauaaauu

SEQ ID NO: 478086 - RNA, 19 nt, Artificial Sequence
  Description of Artificial Sequence: Synthetic oligonucleotide
uuggugggauauaaccuug

SEQ ID NO: 478087 - RNA, 19 nt, Artificial Sequence
  Description of Artificial Sequence: Synthetic oligonucleotide
agaugguauguucauguaa

SEQ ID NO: 478088 - RNA, 19 nt, Artificial Sequence
  Description of Artificial Sequence: Synthetic oligonucleotide
caccguacugaccaugagg

SEQ ID NO: 478089 - RNA, 19 nt, Artificial Sequence
  Description of Artificial Sequence: Synthetic oligonucleotide
uacuagugguugaagcugu

SEQ ID NO: 478090 - RNA, 19 nt, Artificial Sequence
  Description of Artificial Sequence: Synthetic oligonucleotide
ucauguaauuccagcgccu

SEQ ID NO: 478091 - RNA, 19 nt, Artificial Sequence
  Description of Artificial Sequence: Synthetic oligonucleotide
gacucgaugaaguuaagau

SEQ ID NO: 478092 - RNA, 19 nt, Artificial Sequence
  Description of Artificial Sequence: Synthetic oligonucleotide
uggaaacaguuacagcccu

SEQ ID NO: 478093 - RNA, 19 nt, Artificial Sequence
  Description of Artificial Sequence: Synthetic oligonucleotide
gaagccauacaguauaaau

SEQ ID NO: 478094 - RNA, 19 nt, Artificial Sequence
  Description of Artificial Sequence: Synthetic oligonucleotide
gaagauuacgcugauauuu

SEQ ID NO: 478095 - RNA, 19 nt, Artificial Sequence
  Description of Artificial Sequence: Synthetic oligonucleotide
guacuauuuguuguacuag

SEQ ID NO: 478096 - RNA, 19 nt, Artificial Sequence
  Description of Artificial Sequence: Synthetic oligonucleotide
auaacuggaggcaugccug

SEQ ID NO: 478097 - RNA, 19 nt, Artificial Sequence
  Description of Artificial Sequence: Synthetic oligonucleotide
guaagcuuacagaacuugc

SEQ ID NO: 478098 - RNA, 19 nt, Artificial Sequence
  Description of Artificial Sequence: Synthetic oligonucleotide
cuaggaaacagagcuuuag

SEQ ID NO: 478099 - RNA, 19 nt, Artificial Sequence
  Description of Artificial Sequence: Synthetic oligonucleotide
caauguacaaguacuugga

SEQ ID NO: 478100 - RNA, 19 nt, Artificial Sequence
  Description of Artificial Sequence: Synthetic oligonucleotide
gugggauauaaccuugcug

SEQ ID NO: 478101 - RNA, 19 nt, Artificial Sequence
  Description of Artificial Sequence: Synthetic oligonucleotide
auugcaacuucaggaaaag

SEQ ID NO: 478102 - RNA, 19 nt, Artificial Sequence
  Description of Artificial Sequence: Synthetic oligonucleotide
uccuaauugguaacugaau

SEQ ID NO: 478103 - RNA, 19 nt, Artificial Sequence
  Description of Artificial Sequence: Synthetic oligonucleotide
aagaagucgccgucuuuca

SEQ ID NO: 478104 - RNA, 19 nt, Artificial Sequence
  Description of Artificial Sequence: Synthetic oligonucleotide
uuauuauguggacgucuac

SEQ ID NO: 478105 - RNA, 19 nt, Artificial Sequence
  Description of Artificial Sequence: Synthetic oligonucleotide
ccaugucaaauaaaugucc

SEQ ID NO: 478106 - RNA, 19 nt, Artificial Sequence
  Description of Artificial Sequence: Synthetic oligonucleotide
gaagccuuauagacggaag

SEQ ID NO: 478107 - RNA, 19 nt, Artificial Sequence
  Description of Artificial Sequence: Synthetic oligonucleotide
ugcccggcauaacuggagg

SEQ ID NO: 478108 - RNA, 19 nt, Artificial Sequence
  Description of Artificial Sequence: Synthetic oligonucleotide
gaagucgccgucuuucauc

SEQ ID NO: 478109 - RNA, 19 nt, Artificial Sequence
  Description of Artificial Sequence: Synthetic oligonucleotide
agcuuguuacagguguccc

SEQ ID NO: 478110 - RNA, 19 nt, Artificial Sequence
  Description of Artificial Sequence: Synthetic oligonucleotide
uucagucacuaguccacag

SEQ ID NO: 478111 - RNA, 19 nt, Artificial Sequence
  Description of Artificial Sequence: Synthetic oligonucleotide
ucaccgcaaaaugacuggg

SEQ ID NO: 478112 - RNA, 19 nt, Artificial Sequence
  Description of Artificial Sequence: Synthetic oligonucleotide
accguacugaccaugaggu

SEQ ID NO: 478113 - RNA, 19 nt, Artificial Sequence
  Description of Artificial Sequence: Synthetic oligonucleotide
uggcaugccuugaugguga

SEQ ID NO: 478114 - RNA, 19 nt, Artificial Sequence
  Description of Artificial Sequence: Synthetic oligonucleotide
uaccaaucggagucugucc

SEQ ID NO: 478115 - RNA, 19 nt, Artificial Sequence
  Description of Artificial Sequence: Synthetic oligonucleotide
auaauuucucccaugucaa

SEQ ID NO: 478116 - RNA, 19 nt, Artificial Sequence
  Description of Artificial Sequence: Synthetic oligonucleotide
guuacagcccucaccaagc

SEQ ID NO: 478117 - RNA, 19 nt, Artificial Sequence
  Description of Artificial Sequence: Synthetic oligonucleotide
uuaccaaucggagucuguc

SEQ ID NO: 478118 - RNA, 19 nt, Artificial Sequence
  Description of Artificial Sequence: Synthetic oligonucleotide
guacuagugguugaagcug

SEQ ID NO: 478119 - RNA, 19 nt, Artificial Sequence
  Description of Artificial Sequence: Synthetic oligonucleotide
acgaggaacucucuaaaua

SEQ ID NO: 478120 - RNA, 19 nt, Artificial Sequence
  Description of Artificial Sequence: Synthetic oligonucleotide
uauuagacucgaugaaguu

SEQ ID NO: 478121 - RNA, 19 nt, Artificial Sequence
  Description of Artificial Sequence: Synthetic oligonucleotide
auguccaauaguuccuggu

SEQ ID NO: 478122 - RNA, 19 nt, Artificial Sequence
  Description of Artificial Sequence: Synthetic oligonucleotide
aguaacggccaccuugcga

SEQ ID NO: 478123 - RNA, 19 nt, Artificial Sequence
  Description of Artificial Sequence: Synthetic oligonucleotide
guggucccuguccauaggg

SEQ ID NO: 478124 - RNA, 19 nt, Artificial Sequence
  Description of Artificial Sequence: Synthetic oligonucleotide
cuaugucuguucucccagg

SEQ ID NO: 478125 - RNA, 19 nt, Artificial Sequence
  Description of Artificial Sequence: Synthetic oligonucleotide
aagauuacgcugauauuua

SEQ ID NO: 478126 - RNA, 19 nt, Artificial Sequence
  Description of Artificial Sequence: Synthetic oligonucleotide
uggcaugcccggcauaacu

SEQ ID NO: 478127 - RNA, 19 nt, Artificial Sequence
  Description of Artificial Sequence: Synthetic oligonucleotide
aacccugcaacacgaggaa

SEQ ID NO: 478128 - RNA, 19 nt, Artificial Sequence
  Description of Artificial Sequence: Synthetic oligonucleotide
cugauauuuagguaacugu

SEQ ID NO: 478129 - RNA, 19 nt, Artificial Sequence
  Description of Artificial Sequence: Synthetic oligonucleotide
ggaucaacuuacugguugc

SEQ ID NO: 478130 - RNA, 19 nt, Artificial Sequence
  Description of Artificial Sequence: Synthetic oligonucleotide
guauguucauguaauucca

SEQ ID NO: 478131 - RNA, 19 nt, Artificial Sequence
  Description of Artificial Sequence: Synthetic oligonucleotide
gcgccuucacaauuuaacg

SEQ ID NO: 478132 - RNA, 19 nt, Artificial Sequence
  Description of Artificial Sequence: Synthetic oligonucleotide
cugguaugugggaagauaa

SEQ ID NO: 478133 - RNA, 19 nt, Artificial Sequence
  Description of Artificial Sequence: Synthetic oligonucleotide
guuacaauaccagcaccac

SEQ ID NO: 478134 - RNA, 19 nt, Artificial Sequence
  Description of Artificial Sequence: Synthetic oligonucleotide
uggacgucuacuguggcau

SEQ ID NO: 478135 - RNA, 19 nt, Artificial Sequence
  Description of Artificial Sequence: Synthetic oligonucleotide
uguggacgucuacuguggc

SEQ ID NO: 478136 - RNA, 19 nt, Artificial Sequence
  Description of Artificial Sequence: Synthetic oligonucleotide
agguggucuauuaagaaua

SEQ ID NO: 478137 - RNA, 19 nt, Artificial Sequence
  Description of Artificial Sequence: Synthetic oligonucleotide
ugagcuuguuacagguguc

SEQ ID NO: 478138 - RNA, 19 nt, Artificial Sequence
  Description of Artificial Sequence: Synthetic oligonucleotide
aauugguaacugaauuuua

SEQ ID NO: 478139 - RNA, 19 nt, Artificial Sequence
  Description of Artificial Sequence: Synthetic oligonucleotide
uuaguaacuggaggcugug

SEQ ID NO: 478140 - RNA, 19 nt, Artificial Sequence
  Description of Artificial Sequence: Synthetic oligonucleotide
gguggauuaccaaucggag

SEQ ID NO: 478141 - RNA, 19 nt, Artificial Sequence
  Description of Artificial Sequence: Synthetic oligonucleotide
acaauuuaacgaaccaaau

SEQ ID NO: 478142 - RNA, 19 nt, Artificial Sequence
  Description of Artificial Sequence: Synthetic oligonucleotide
uuacgcugauauuuaggua

SEQ ID NO: 478143 - RNA, 19 nt, Artificial Sequence
  Description of Artificial Sequence: Synthetic oligonucleotide
uuauagacggaagcuuguc

SEQ ID NO: 478144 - RNA, 19 nt, Artificial Sequence
  Description of Artificial Sequence: Synthetic oligonucleotide
agccuuauagacggaagcu

SEQ ID NO: 478145 - RNA, 19 nt, Artificial Sequence
  Description of Artificial Sequence: Synthetic oligonucleotide
uguagcaggcuuacuugua

SEQ ID NO: 478146 - RNA, 19 nt, Artificial Sequence
  Description of Artificial Sequence: Synthetic oligonucleotide
aucuguccggcacugggga

SEQ ID NO: 478147 - RNA, 19 nt, Artificial Sequence
  Description of Artificial Sequence: Synthetic oligonucleotide
uucaagaagucgccgucuu

SEQ ID NO: 478148 - RNA, 19 nt, Artificial Sequence
  Description of Artificial Sequence: Synthetic oligonucleotide
uuucagucacuaguccaca

SEQ ID NO: 478149 - RNA, 19 nt, Artificial Sequence
  Description of Artificial Sequence: Synthetic oligonucleotide
auguggacgucuacugugg

SEQ ID NO: 478150 - RNA, 19 nt, Artificial Sequence
  Description of Artificial Sequence: Synthetic oligonucleotide
uaacccaggucccguguac

SEQ ID NO: 478151 - RNA, 19 nt, Artificial Sequence
  Description of Artificial Sequence: Synthetic oligonucleotide
ugguaugugggaagauaau

SEQ ID NO: 478152 - RNA, 19 nt, Artificial Sequence
  Description of Artificial Sequence: Synthetic oligonucleotide
cagugauauauccucaucu

SEQ ID NO: 478153 - RNA, 19 nt, Artificial Sequence
  Description of Artificial Sequence: Synthetic oligonucleotide
ggggacaugaaguccaaca

SEQ ID NO: 478154 - RNA, 19 nt, Artificial Sequence
  Description of Artificial Sequence: Synthetic oligonucleotide
agaaaagguuuaaucucca

SEQ ID NO: 478155 - RNA, 19 nt, Artificial Sequence
  Description of Artificial Sequence: Synthetic oligonucleotide
cguacugaccaugaggugg

SEQ ID NO: 478156 - RNA, 19 nt, Artificial Sequence
  Description of Artificial Sequence: Synthetic oligonucleotide
cauuggugggauauaaccu

SEQ ID NO: 478157 - RNA, 19 nt, Artificial Sequence
  Description of Artificial Sequence: Synthetic oligonucleotide
cuaauugguaacugaauuu

SEQ ID NO: 478158 - RNA, 19 nt, Artificial Sequence
  Description of Artificial Sequence: Synthetic oligonucleotide
gacauaacaggaggucuca

SEQ ID NO: 478159 - RNA, 19 nt, Artificial Sequence
  Description of Artificial Sequence: Synthetic oligonucleotide
acgcugauauuuagguaac

SEQ ID NO: 478160 - RNA, 19 nt, Artificial Sequence
  Description of Artificial Sequence: Synthetic oligonucleotide
gaauuggaugaagcuguac

SEQ ID NO: 478161 - RNA, 19 nt, Artificial Sequence
  Description of Artificial Sequence: Synthetic oligonucleotide
uaaccgcgcucuacggacc

SEQ ID NO: 478162 - RNA, 19 nt, Artificial Sequence
  Description of Artificial Sequence: Synthetic oligonucleotide
agugggccagauuucuuaa

SEQ ID NO: 478163 - RNA, 19 nt, Artificial Sequence
  Description of Artificial Sequence: Synthetic oligonucleotide
uugcgacccauaaccgcgc

SEQ ID NO: 478164 - RNA, 19 nt, Artificial Sequence
  Description of Artificial Sequence: Synthetic oligonucleotide
cgcucuacggaccagguag

SEQ ID NO: 478165 - RNA, 19 nt, Artificial Sequence
  Description of Artificial Sequence: Synthetic oligonucleotide
agcaggcuuacuuguaauu

SEQ ID NO: 478166 - RNA, 19 nt, Artificial Sequence
  Description of Artificial Sequence: Synthetic oligonucleotide
ggaauguaaccuggcaugc

SEQ ID NO: 478167 - RNA, 19 nt, Artificial Sequence
  Description of Artificial Sequence: Synthetic oligonucleotide
gugaaggcauaacuuuaca

SEQ ID NO: 478168 - RNA, 19 nt, Artificial Sequence
  Description of Artificial Sequence: Synthetic oligonucleotide
aggcauaagaggugguauu

SEQ ID NO: 478169 - RNA, 19 nt, Artificial Sequence
  Description of Artificial Sequence: Synthetic oligonucleotide
gccuucacaauuuaacgaa

SEQ ID NO: 478170 - RNA, 19 nt, Artificial Sequence
  Description of Artificial Sequence: Synthetic oligonucleotide
cucuaugucuguucuccca

SEQ ID NO: 478171 - RNA, 19 nt, Artificial Sequence
  Description of Artificial Sequence: Synthetic oligonucleotide
aaccgcgcucuacggacca

SEQ ID NO: 478172 - RNA, 19 nt, Artificial Sequence
  Description of Artificial Sequence: Synthetic oligonucleotide
ugugggaugccuggcugug

SEQ ID NO: 478173 - RNA, 19 nt, Artificial Sequence
  Description of Artificial Sequence: Synthetic oligonucleotide
agguccaacugguggauua

SEQ ID NO: 478174 - RNA, 19 nt, Artificial Sequence
  Description of Artificial Sequence: Synthetic oligonucleotide
cguguacaacuucuuaugg

SEQ ID NO: 478175 - RNA, 19 nt, Artificial Sequence
  Description of Artificial Sequence: Synthetic oligonucleotide
acccauaaccgcgcucuac

SEQ ID NO: 478176 - RNA, 19 nt, Artificial Sequence
  Description of Artificial Sequence: Synthetic oligonucleotide
gcaugcccggcauaacugg

SEQ ID NO: 478177 - RNA, 19 nt, Artificial Sequence
  Description of Artificial Sequence: Synthetic oligonucleotide
caccaagcuagguugggga

SEQ ID NO: 478178 - RNA, 19 nt, Artificial Sequence
  Description of Artificial Sequence: Synthetic oligonucleotide
cuguguauaagcagggaau

SEQ ID NO: 478179 - RNA, 19 nt, Artificial Sequence
  Description of Artificial Sequence: Synthetic oligonucleotide
guggucuauuaagaauacc

SEQ ID NO: 478180 - RNA, 19 nt, Artificial Sequence
  Description of Artificial Sequence: Synthetic oligonucleotide
guacaaguacuuggaaaca

SEQ ID NO: 478181 - RNA, 19 nt, Artificial Sequence
  Description of Artificial Sequence: Synthetic oligonucleotide
ccgucuuucauccauaucu

SEQ ID NO: 478182 - RNA, 19 nt, Artificial Sequence
  Description of Artificial Sequence: Synthetic oligonucleotide
ucuacggaccagguaggaa

SEQ ID NO: 478183 - RNA, 19 nt, Artificial Sequence
  Description of Artificial Sequence: Synthetic oligonucleotide
ggcauaacuggaggcaugc

SEQ ID NO: 478184 - RNA, 19 nt, Artificial Sequence
  Description of Artificial Sequence: Synthetic oligonucleotide
cuuauagacggaagcuugu

SEQ ID NO: 478185 - RNA, 19 nt, Artificial Sequence
  Description of Artificial Sequence: Synthetic oligonucleotide
cauaaccgcgcucuacgga

SEQ ID NO: 478186 - RNA, 19 nt, Artificial Sequence
  Description of Artificial Sequence: Synthetic oligonucleotide
agaagucgccgucuuucau

SEQ ID NO: 478187 - RNA, 19 nt, Artificial Sequence
  Description of Artificial Sequence: Synthetic oligonucleotide
ccuugcgacauaacaggag

SEQ ID NO: 478188 - RNA, 19 nt, Artificial Sequence
  Description of Artificial Sequence: Synthetic oligonucleotide
agcuaacccaggucccgug

SEQ ID NO: 478189 - RNA, 19 nt, Artificial Sequence
  Description of Artificial Sequence: Synthetic oligonucleotide
caacucuaugucuguucuc

SEQ ID NO: 478190 - RNA, 19 nt, Artificial Sequence
  Description of Artificial Sequence: Synthetic oligonucleotide
acccaucggcaucauuaug

SEQ ID NO: 478191 - RNA, 19 nt, Artificial Sequence
  Description of Artificial Sequence: Synthetic oligonucleotide
uggugaccaccguacugac

SEQ ID NO: 478192 - RNA, 19 nt, Artificial Sequence
  Description of Artificial Sequence: Synthetic oligonucleotide
gcuuaguaacuggaggcug

SEQ ID NO: 478193 - RNA, 19 nt, Artificial Sequence
  Description of Artificial Sequence: Synthetic oligonucleotide
gacggaagcuugucuauau

SEQ ID NO: 478194 - RNA, 19 nt, Artificial Sequence
  Description of Artificial Sequence: Synthetic oligonucleotide
ggcauaagaggugguauuc

SEQ ID NO: 478195 - RNA, 19 nt, Artificial Sequence
  Description of Artificial Sequence: Synthetic oligonucleotide
guccaauaguuccugguau

SEQ ID NO: 478196 - RNA, 19 nt, Artificial Sequence
  Description of Artificial Sequence: Synthetic oligonucleotide
ccauaaccgcgcucuacgg

SEQ ID NO: 478197 - RNA, 19 nt, Artificial Sequence
  Description of Artificial Sequence: Synthetic oligonucleotide
aaccuagaugaaacaugaa

SEQ ID NO: 478198 - RNA, 19 nt, Artificial Sequence
  Description of Artificial Sequence: Synthetic oligonucleotide
gguggucuauuaagaauac

SEQ ID NO: 478199 - RNA, 19 nt, Artificial Sequence
  Description of Artificial Sequence: Synthetic oligonucleotide
gaccaccguacugaccaug

SEQ ID NO: 478200 - RNA, 19 nt, Artificial Sequence
  Description of Artificial Sequence: Synthetic oligonucleotide
ggaagcuugucuauauaaa

SEQ ID NO: 478201 - RNA, 19 nt, Artificial Sequence
  Description of Artificial Sequence: Synthetic oligonucleotide
ugcgacccauaaccgcgcu

SEQ ID NO: 478202 - RNA, 19 nt, Artificial Sequence
  Description of Artificial Sequence: Synthetic oligonucleotide
accaccguacugaccauga

SEQ ID NO: 478203 - RNA, 19 nt, Artificial Sequence
  Description of Artificial Sequence: Synthetic oligonucleotide
caggaauguaaccuggcau

SEQ ID NO: 478204 - RNA, 19 nt, Artificial Sequence
  Description of Artificial Sequence: Synthetic oligonucleotide
agucacaaugaagccuuau

SEQ ID NO: 478205 - RNA, 19 nt, Artificial Sequence
  Description of Artificial Sequence: Synthetic oligonucleotide
acggaagcuugucuauaua

SEQ ID NO: 478206 - RNA, 19 nt, Artificial Sequence
  Description of Artificial Sequence: Synthetic oligonucleotide
accuugcgacauaacagga

SEQ ID NO: 478207 - RNA, 19 nt, Artificial Sequence
  Description of Artificial Sequence: Synthetic oligonucleotide
caguaacggccaccuugcg

SEQ ID NO: 478208 - RNA, 19 nt, Artificial Sequence
  Description of Artificial Sequence: Synthetic oligonucleotide
caacugguggauuaccaau

SEQ ID NO: 478209 - RNA, 19 nt, Artificial Sequence
  Description of Artificial Sequence: Synthetic oligonucleotide
caugcccggcauaacugga

SEQ ID NO: 478210 - RNA, 19 nt, Artificial Sequence
  Description of Artificial Sequence: Synthetic oligonucleotide
ucgccgucuuucauccaua

SEQ ID NO: 478211 - RNA, 19 nt, Artificial Sequence
  Description of Artificial Sequence: Synthetic oligonucleotide
cauaacaggaggucucauu

SEQ ID NO: 478212 - RNA, 19 nt, Artificial Sequence
  Description of Artificial Sequence: Synthetic oligonucleotide
ccagugauauauccucauc

SEQ ID NO: 478213 - RNA, 19 nt, Artificial Sequence
  Description of Artificial Sequence: Synthetic oligonucleotide
guaauugaagcugcugguu

SEQ ID NO: 478214 - RNA, 19 nt, Artificial Sequence
  Description of Artificial Sequence: Synthetic oligonucleotide
ccuaauugguaacugaauu

SEQ ID NO: 478215 - RNA, 19 nt, Artificial Sequence
  Description of Artificial Sequence: Synthetic oligonucleotide
gugggaugccuggcugugg

SEQ ID NO: 478216 - RNA, 19 nt, Artificial Sequence
  Description of Artificial Sequence: Synthetic oligonucleotide
guguauaagcagggaaugu

SEQ ID NO: 478217 - RNA, 19 nt, Artificial Sequence
  Description of Artificial Sequence: Synthetic oligonucleotide
cccaucggcaucauuaugu

SEQ ID NO: 478218 - RNA, 19 nt, Artificial Sequence
  Description of Artificial Sequence: Synthetic oligonucleotide
guguauuuucucugaugau

SEQ ID NO: 478219 - RNA, 19 nt, Artificial Sequence
  Description of Artificial Sequence: Synthetic oligonucleotide
caacacgaggaacucucua

SEQ ID NO: 478220 - RNA, 19 nt, Artificial Sequence
  Description of Artificial Sequence: Synthetic oligonucleotide
uccugguaugugggaagau

SEQ ID NO: 478221 - RNA, 19 nt, Artificial Sequence
  Description of Artificial Sequence: Synthetic oligonucleotide
auguaaccuggcaugccuu

SEQ ID NO: 478222 - RNA, 19 nt, Artificial Sequence
  Description of Artificial Sequence: Synthetic oligonucleotide
cuaacccaggucccgugua

SEQ ID NO: 478223 - RNA, 19 nt, Artificial Sequence
  Description of Artificial Sequence: Synthetic oligonucleotide
ugaccaccguacugaccau

SEQ ID NO: 478224 - RNA, 19 nt, Artificial Sequence
  Description of Artificial Sequence: Synthetic oligonucleotide
ggugggauauaaccuugcu

SEQ ID NO: 478225 - RNA, 19 nt, Artificial Sequence
  Description of Artificial Sequence: Synthetic oligonucleotide
cuacuguggcaugcaucug

SEQ ID NO: 478226 - RNA, 19 nt, Artificial Sequence
  Description of Artificial Sequence: Synthetic oligonucleotide
cgccuucacaauuuaacga

SEQ ID NO: 478227 - RNA, 19 nt, Artificial Sequence
  Description of Artificial Sequence: Synthetic oligonucleotide
gcccggcauaacuggaggc

SEQ ID NO: 478228 - RNA, 19 nt, Artificial Sequence
  Description of Artificial Sequence: Synthetic oligonucleotide
gguccaacugguggauuac

SEQ ID NO: 478229 - RNA, 19 nt, Artificial Sequence
  Description of Artificial Sequence: Synthetic oligonucleotide
gguggcaugcccggcauaa

SEQ ID NO: 478230 - RNA, 19 nt, Artificial Sequence
  Description of Artificial Sequence: Synthetic oligonucleotide
uacugaccaugagguggca

SEQ ID NO: 478231 - RNA, 19 nt, Artificial Sequence
  Description of Artificial Sequence: Synthetic oligonucleotide
ccaacucuaugucuguucu

SEQ ID NO: 478232 - RNA, 19 nt, Artificial Sequence
  Description of Artificial Sequence: Synthetic oligonucleotide
caaaaugacuggguguauu

SEQ ID NO: 478233 - RNA, 19 nt, Artificial Sequence
  Description of Artificial Sequence: Synthetic oligonucleotide
ggacgucuacuguggcaug

SEQ ID NO: 478234 - RNA, 19 nt, Artificial Sequence
  Description of Artificial Sequence: Synthetic oligonucleotide
auggaucaacuuacugguu

SEQ ID NO: 478235 - RNA, 19 nt, Artificial Sequence
  Description of Artificial Sequence: Synthetic oligonucleotide
agucgccgucuuucaucca

SEQ ID NO: 478236 - RNA, 19 nt, Artificial Sequence
  Description of Artificial Sequence: Synthetic oligonucleotide
ggcuuaguaacuggaggcu

SEQ ID NO: 478237 - RNA, 19 nt, Artificial Sequence
  Description of Artificial Sequence: Synthetic oligonucleotide
cucuacggaccagguagga

SEQ ID NO: 478238 - RNA, 19 nt, Artificial Sequence
  Description of Artificial Sequence: Synthetic oligonucleotide
augaagccuuauagacgga

SEQ ID NO: 478239 - RNA, 19 nt, Artificial Sequence
  Description of Artificial Sequence: Synthetic oligonucleotide
gcgacauaacaggaggucu

SEQ ID NO: 478240 - RNA, 19 nt, Artificial Sequence
  Description of Artificial Sequence: Synthetic oligonucleotide
ggggcaccauugguggucc

SEQ ID NO: 478241 - RNA, 19 nt, Artificial Sequence
  Description of Artificial Sequence: Synthetic oligonucleotide
ggaagauuacgcugauauu

SEQ ID NO: 478242 - RNA, 19 nt, Artificial Sequence
  Description of Artificial Sequence: Synthetic oligonucleotide
acuagugguugaagcugua

SEQ ID NO: 478243 - RNA, 19 nt, Artificial Sequence
  Description of Artificial Sequence: Synthetic oligonucleotide
caaaccuauuagacucgau

SEQ ID NO: 478244 - RNA, 19 nt, Artificial Sequence
  Description of Artificial Sequence: Synthetic oligonucleotide
cacccaucggcaucauuau

SEQ ID NO: 478245 - RNA, 19 nt, Artificial Sequence
  Description of Artificial Sequence: Synthetic oligonucleotide
gacccauaaccgcgcucua

SEQ ID NO: 478246 - RNA, 19 nt, Artificial Sequence
  Description of Artificial Sequence: Synthetic oligonucleotide
acggccaccuugcgacaua

SEQ ID NO: 478247 - RNA, 19 nt, Artificial Sequence
  Description of Artificial Sequence: Synthetic oligonucleotide
ccaccguacugaccaugag

SEQ ID NO: 478248 - RNA, 19 nt, Artificial Sequence
  Description of Artificial Sequence: Synthetic oligonucleotide
ccaaaccuauuagacucga

SEQ ID NO: 478249 - RNA, 19 nt, Artificial Sequence
  Description of Artificial Sequence: Synthetic oligonucleotide
accgcgcucuacggaccag

SEQ ID NO: 478250 - RNA, 19 nt, Artificial Sequence
  Description of Artificial Sequence: Synthetic oligonucleotide
ggaauaccuuccaugccau

SEQ ID NO: 478251 - RNA, 19 nt, Artificial Sequence
  Description of Artificial Sequence: Synthetic oligonucleotide
cccggcauaacuggaggca

SEQ ID NO: 478252 - RNA, 19 nt, Artificial Sequence
  Description of Artificial Sequence: Synthetic oligonucleotide
gcauaccugguggcauccc

SEQ ID NO: 478253 - RNA, 19 nt, Artificial Sequence
  Description of Artificial Sequence: Synthetic oligonucleotide
gccuuauagacggaagcuu

SEQ ID NO: 478254 - RNA, 19 nt, Artificial Sequence
  Description of Artificial Sequence: Synthetic oligonucleotide
gcgacccauaaccgcgcuc

SEQ ID NO: 478255 - RNA, 19 nt, Artificial Sequence
  Description of Artificial Sequence: Synthetic oligonucleotide
gcggaggaacaccuggcau

SEQ ID NO: 478256 - RNA, 19 nt, Artificial Sequence
  Description of Artificial Sequence: Synthetic oligonucleotide
gcaacacgaggaacucucu

SEQ ID NO: 478257 - RNA, 19 nt, Artificial Sequence
  Description of Artificial Sequence: Synthetic oligonucleotide
cgacccauaaccgcgcucu

SEQ ID NO: 478258 - RNA, 19 nt, Artificial Sequence
  Description of Artificial Sequence: Synthetic oligonucleotide
ccaucggcaucauuauguu

SEQ ID NO: 478259 - RNA, 19 nt, Artificial Sequence
  Description of Artificial Sequence: Synthetic oligonucleotide
caggucccguguacaacuu

SEQ ID NO: 478260 - RNA, 19 nt, Artificial Sequence
  Description of Artificial Sequence: Synthetic oligonucleotide
aagaguauuaccuucugag

SEQ ID NO: 478261 - RNA, 19 nt, Artificial Sequence
  Description of Artificial Sequence: Synthetic oligonucleotide
uaugcucugaacuauaaag

SEQ ID NO: 478262 - RNA, 19 nt, Artificial Sequence
  Description of Artificial Sequence: Synthetic oligonucleotide
aguucuucaagguauauag

SEQ ID NO: 478263 - RNA, 19 nt, Artificial Sequence
  Description of Artificial Sequence: Synthetic oligonucleotide
ucuacauacuccauaagag

SEQ ID NO: 478264 - RNA, 19 nt, Artificial Sequence
  Description of Artificial Sequence: Synthetic oligonucleotide
ucuccuaagucacaaaggg

SEQ ID NO: 478265 - RNA, 19 nt, Artificial Sequence
  Description of Artificial Sequence: Synthetic oligonucleotide
agagagacaagcucgaagg

SEQ ID NO: 478266 - RNA, 19 nt, Artificial Sequence
  Description of Artificial Sequence: Synthetic oligonucleotide
ugaucuacaagguucaggc

SEQ ID NO: 478267 - RNA, 19 nt, Artificial Sequence
  Description of Artificial Sequence: Synthetic oligonucleotide
acauguuccacuuagauua

SEQ ID NO: 478268 - RNA, 19 nt, Artificial Sequence
  Description of Artificial Sequence: Synthetic oligonucleotide
ucuuuuggugguuauaugc

SEQ ID NO: 478269 - RNA, 19 nt, Artificial Sequence
  Description of Artificial Sequence: Synthetic oligonucleotide
guuauguaguuugagaugg

SEQ ID NO: 478270 - RNA, 19 nt, Artificial Sequence
  Description of Artificial Sequence: Synthetic oligonucleotide
aacuauaaaguuaucgaag

SEQ ID NO: 478271 - RNA, 19 nt, Artificial Sequence
  Description of Artificial Sequence: Synthetic oligonucleotide
ucuacauauagaaaaggaa

SEQ ID NO: 478272 - RNA, 19 nt, Artificial Sequence
  Description of Artificial Sequence: Synthetic oligonucleotide
gaguauuaccuucugaggc

SEQ ID NO: 478273 - RNA, 19 nt, Artificial Sequence
  Description of Artificial Sequence: Synthetic oligonucleotide
uuuauauggccccaggaac

SEQ ID NO: 478274 - RNA, 19 nt, Artificial Sequence
  Description of Artificial Sequence: Synthetic oligonucleotide
cauagauccaccaccaaag

SEQ ID NO: 478275 - RNA, 19 nt, Artificial Sequence
  Description of Artificial Sequence: Synthetic oligonucleotide
uauaaaguuaucgaagccu

SEQ ID NO: 478276 - RNA, 19 nt, Artificial Sequence
  Description of Artificial Sequence: Synthetic oligonucleotide
ugucauaggaaaugagagg

SEQ ID NO: 478277 - RNA, 19 nt, Artificial Sequence
  Description of Artificial Sequence: Synthetic oligonucleotide
aaguuaucgaagccucagc

SEQ ID NO: 478278 - RNA, 19 nt, Artificial Sequence
  Description of Artificial Sequence: Synthetic oligonucleotide
aaugguacggacaauggug

SEQ ID NO: 478279 - RNA, 19 nt, Artificial Sequence
  Description of Artificial Sequence: Synthetic oligonucleotide
ucuucaagguauauaggcc

SEQ ID NO: 478280 - RNA, 19 nt, Artificial Sequence
  Description of Artificial Sequence: Synthetic oligonucleotide
ggacuuuuaagccugaugc

SEQ ID NO: 478281 - RNA, 19 nt, Artificial Sequence
  Description of Artificial Sequence: Synthetic oligonucleotide
uaucauguaagcugaagcu

SEQ ID NO: 478282 - RNA, 19 nt, Artificial Sequence
  Description of Artificial Sequence: Synthetic oligonucleotide
ugguuauaugcucugaacu

SEQ ID NO: 478283 - RNA, 19 nt, Artificial Sequence
  Description of Artificial Sequence: Synthetic oligonucleotide
cuuagauuacaagugagag

SEQ ID NO: 478284 - RNA, 19 nt, Artificial Sequence
  Description of Artificial Sequence: Synthetic oligonucleotide
gguguagcuguuuauaugg

SEQ ID NO: 478285 - RNA, 19 nt, Artificial Sequence
  Description of Artificial Sequence: Synthetic oligonucleotide
aagguauauaggccaugcc

SEQ ID NO: 478286 - RNA, 19 nt, Artificial Sequence
  Description of Artificial Sequence: Synthetic oligonucleotide
cugaacuauaaaguuaucg

SEQ ID NO: 478287 - RNA, 19 nt, Artificial Sequence
  Description of Artificial Sequence: Synthetic oligonucleotide
uggucuuagggcuagaggu

SEQ ID NO: 478288 - RNA, 19 nt, Artificial Sequence
  Description of Artificial Sequence: Synthetic oligonucleotide
uuaucgaagccucagcacu

SEQ ID NO: 478289 - RNA, 19 nt, Artificial Sequence
  Description of Artificial Sequence: Synthetic oligonucleotide
auuucauaccuucucaacu

SEQ ID NO: 478290 - RNA, 19 nt, Artificial Sequence
  Description of Artificial Sequence: Synthetic oligonucleotide
aaauaacccuccaaguuuc

SEQ ID NO: 478291 - RNA, 19 nt, Artificial Sequence
  Description of Artificial Sequence: Synthetic oligonucleotide
ucauguaagcugaagcuga

SEQ ID NO: 478292 - RNA, 19 nt, Artificial Sequence
  Description of Artificial Sequence: Synthetic oligonucleotide
agaguauuaccuucugagg

SEQ ID NO: 478293 - RNA, 19 nt, Artificial Sequence
  Description of Artificial Sequence: Synthetic oligonucleotide
aucuacaagguucaggcug

SEQ ID NO: 478294 - RNA, 19 nt, Artificial Sequence
  Description of Artificial Sequence: Synthetic oligonucleotide
uccuaagucacaaaggguu

SEQ ID NO: 478295 - RNA, 19 nt, Artificial Sequence
  Description of Artificial Sequence: Synthetic oligonucleotide
gucauaggaaaugagaggc

SEQ ID NO: 478296 - RNA, 19 nt, Artificial Sequence
  Description of Artificial Sequence: Synthetic oligonucleotide
ucgcucaggaauuucaaag

SEQ ID NO: 478297 - RNA, 19 nt, Artificial Sequence
  Description of Artificial Sequence: Synthetic oligonucleotide
uccugauccgucuacauac

SEQ ID NO: 478298 - RNA, 19 nt, Artificial Sequence
  Description of Artificial Sequence: Synthetic oligonucleotide
agguauauaggccaugccu

SEQ ID NO: 478299 - RNA, 19 nt, Artificial Sequence
  Description of Artificial Sequence: Synthetic oligonucleotide
agggauaggacauaucgcu

SEQ ID NO: 478300 - RNA, 19 nt, Artificial Sequence
  Description of Artificial Sequence: Synthetic oligonucleotide
gagccuauagggcuuagag

SEQ ID NO: 478301 - RNA, 19 nt, Artificial Sequence
  Description of Artificial Sequence: Synthetic oligonucleotide
aguuauguaguuugagaug

SEQ ID NO: 478302 - RNA, 19 nt, Artificial Sequence
  Description of Artificial Sequence: Synthetic oligonucleotide
aucuacagacuccagccac

SEQ ID NO: 478303 - RNA, 19 nt, Artificial Sequence
  Description of Artificial Sequence: Synthetic oligonucleotide
acacguuuucuuugguucc

SEQ ID NO: 478304 - RNA, 19 nt, Artificial Sequence
  Description of Artificial Sequence: Synthetic oligonucleotide
cuaauaucauguaagcuga

SEQ ID NO: 478305 - RNA, 19 nt, Artificial Sequence
  Description of Artificial Sequence: Synthetic oligonucleotide
uucuugucgggucaguccc

SEQ ID NO: 478306 - RNA, 19 nt, Artificial Sequence
  Description of Artificial Sequence: Synthetic oligonucleotide
ggcaauuucacaccagugg

SEQ ID NO: 478307 - RNA, 19 nt, Artificial Sequence
  Description of Artificial Sequence: Synthetic oligonucleotide
auagguaggguaaagcauc

SEQ ID NO: 478308 - RNA, 19 nt, Artificial Sequence
  Description of Artificial Sequence: Synthetic oligonucleotide
uucucaacuucaccgaaca

SEQ ID NO: 478309 - RNA, 19 nt, Artificial Sequence
  Description of Artificial Sequence: Synthetic oligonucleotide
ugauccgucuacauacucc

SEQ ID NO: 478310 - RNA, 19 nt, Artificial Sequence
  Description of Artificial Sequence: Synthetic oligonucleotide
uuggucuuagggcuagagg

SEQ ID NO: 478311 - RNA, 19 nt, Artificial Sequence
  Description of Artificial Sequence: Synthetic oligonucleotide
uguuuauauggccccagga

SEQ ID NO: 478312 - RNA, 19 nt, Artificial Sequence
  Description of Artificial Sequence: Synthetic oligonucleotide
aguuaucgaagccucagca

SEQ ID NO: 478313 - RNA, 19 nt, Artificial Sequence
  Description of Artificial Sequence: Synthetic oligonucleotide
uguuuguggguuagcacag

SEQ ID NO: 478314 - RNA, 19 nt, Artificial Sequence
  Description of Artificial Sequence: Synthetic oligonucleotide
caaagucacauugagcugc

SEQ ID NO: 478315 - RNA, 19 nt, Artificial Sequence
  Description of Artificial Sequence: Synthetic oligonucleotide
gugucauaggaaaugagag

SEQ ID NO: 478316 - RNA, 19 nt, Artificial Sequence
  Description of Artificial Sequence: Synthetic oligonucleotide
gccuauagggcuuagagug

SEQ ID NO: 478317 - RNA, 19 nt, Artificial Sequence
  Description of Artificial Sequence: Synthetic oligonucleotide
ugcuugccaacuuagcgag

SEQ ID NO: 478318 - RNA, 19 nt, Artificial Sequence
  Description of Artificial Sequence: Synthetic oligonucleotide
gauuucauaccuucucaac

SEQ ID NO: 478319 - RNA, 19 nt, Artificial Sequence
  Description of Artificial Sequence: Synthetic oligonucleotide
agcauccugaucccggggc

SEQ ID NO: 478320 - RNA, 19 nt, Artificial Sequence
  Description of Artificial Sequence: Synthetic oligonucleotide
gucuuauccucucuuuugg

SEQ ID NO: 478321 - RNA, 19 nt, Artificial Sequence
  Description of Artificial Sequence: Synthetic oligonucleotide
agucuuauccucucuuuug

SEQ ID NO: 478322 - RNA, 19 nt, Artificial Sequence
  Description of Artificial Sequence: Synthetic oligonucleotide
gucuacauacuccauaaga

SEQ ID NO: 478323 - RNA, 19 nt, Artificial Sequence
  Description of Artificial Sequence: Synthetic oligonucleotide
uucagcacgagugagcacu

SEQ ID NO: 478324 - RNA, 19 nt, Artificial Sequence
  Description of Artificial Sequence: Synthetic oligonucleotide
cugcuaauaucauguaagc

SEQ ID NO: 478325 - RNA, 19 nt, Artificial Sequence
  Description of Artificial Sequence: Synthetic oligonucleotide
cacuacauguuccacuuag

SEQ ID NO: 478326 - RNA, 19 nt, Artificial Sequence
  Description of Artificial Sequence: Synthetic oligonucleotide
uuauguaguuugagauggg

SEQ ID NO: 478327 - RNA, 19 nt, Artificial Sequence
  Description of Artificial Sequence: Synthetic oligonucleotide
aagccagguagacugcuug

SEQ ID NO: 478328 - RNA, 19 nt, Artificial Sequence
  Description of Artificial Sequence: Synthetic oligonucleotide
augguacggacaauggugc

SEQ ID NO: 478329 - RNA, 19 nt, Artificial Sequence
  Description of Artificial Sequence: Synthetic oligonucleotide
acauaucgcuggcacauuc

SEQ ID NO: 478330 - RNA, 19 nt, Artificial Sequence
  Description of Artificial Sequence: Synthetic oligonucleotide
cuuauccucucuuuuggug

SEQ ID NO: 478331 - RNA, 19 nt, Artificial Sequence
  Description of Artificial Sequence: Synthetic oligonucleotide
ugaugcuugguuagaaauc

SEQ ID NO: 478332 - RNA, 19 nt, Artificial Sequence
  Description of Artificial Sequence: Synthetic oligonucleotide
cacuuagauuacaagugag

SEQ ID NO: 478333 - RNA, 19 nt, Artificial Sequence
  Description of Artificial Sequence: Synthetic oligonucleotide
caauuucacaccaguggcc

SEQ ID NO: 478334 - RNA, 19 nt, Artificial Sequence
  Description of Artificial Sequence: Synthetic oligonucleotide
acaguagucacuacaaccu

SEQ ID NO: 478335 - RNA, 19 nt, Artificial Sequence
  Description of Artificial Sequence: Synthetic oligonucleotide
gauccgucuacauacucca

SEQ ID NO: 478336 - RNA, 19 nt, Artificial Sequence
  Description of Artificial Sequence: Synthetic oligonucleotide
caagugagaggcuuuggug

SEQ ID NO: 478337 - RNA, 19 nt, Artificial Sequence
  Description of Artificial Sequence: Synthetic oligonucleotide
aaugaacucugaagcacag

SEQ ID NO: 478338 - RNA, 19 nt, Artificial Sequence
  Description of Artificial Sequence: Synthetic oligonucleotide
aaaggguuguucagggcuc

SEQ ID NO: 478339 - RNA, 19 nt, Artificial Sequence
  Description of Artificial Sequence: Synthetic oligonucleotide
gauaggacauaucgcuggc

SEQ ID NO: 478340 - RNA, 19 nt, Artificial Sequence
  Description of Artificial Sequence: Synthetic oligonucleotide
caugggauguacauagauc

SEQ ID NO: 478341 - RNA, 19 nt, Artificial Sequence
  Description of Artificial Sequence: Synthetic oligonucleotide
uaucgcuggcacauucagg

SEQ ID NO: 478342 - RNA, 19 nt, Artificial Sequence
  Description of Artificial Sequence: Synthetic oligonucleotide
ucauaccuucucaacuuca

SEQ ID NO: 478343 - RNA, 19 nt, Artificial Sequence
  Description of Artificial Sequence: Synthetic oligonucleotide
acuccucaacacuacaugu

SEQ ID NO: 478344 - RNA, 19 nt, Artificial Sequence
  Description of Artificial Sequence: Synthetic oligonucleotide
uaacccuccaaguuucaga

SEQ ID NO: 478345 - RNA, 19 nt, Artificial Sequence
  Description of Artificial Sequence: Synthetic oligonucleotide
acauagauccaccaccaaa

SEQ ID NO: 478346 - RNA, 19 nt, Artificial Sequence
  Description of Artificial Sequence: Synthetic oligonucleotide
uaucgaagccucagcacug

SEQ ID NO: 478347 - RNA, 19 nt, Artificial Sequence
  Description of Artificial Sequence: Synthetic oligonucleotide
ugguguagcuguuuauaug

SEQ ID NO: 478348 - RNA, 19 nt, Artificial Sequence
  Description of Artificial Sequence: Synthetic oligonucleotide
uugcuccugagccuauagg

SEQ ID NO: 478349 - RNA, 19 nt, Artificial Sequence
  Description of Artificial Sequence: Synthetic oligonucleotide
ucgacugccucgcucagga

SEQ ID NO: 478350 - RNA, 19 nt, Artificial Sequence
  Description of Artificial Sequence: Synthetic oligonucleotide
acaagcucgaaggaaagga

SEQ ID NO: 478351 - RNA, 19 nt, Artificial Sequence
  Description of Artificial Sequence: Synthetic oligonucleotide
aucauguaagcugaagcug

SEQ ID NO: 478352 - RNA, 19 nt, Artificial Sequence
  Description of Artificial Sequence: Synthetic oligonucleotide
gaacaaagucacauugagc

SEQ ID NO: 478353 - RNA, 19 nt, Artificial Sequence
  Description of Artificial Sequence: Synthetic oligonucleotide
ugauggaaacuuucuacau

SEQ ID NO: 478354 - RNA, 19 nt, Artificial Sequence
  Description of Artificial Sequence: Synthetic oligonucleotide
uucucaucuugauggaaac

SEQ ID NO: 478355 - RNA, 19 nt, Artificial Sequence
  Description of Artificial Sequence: Synthetic oligonucleotide
guacggacaauggugcucg

SEQ ID NO: 478356 - RNA, 19 nt, Artificial Sequence
  Description of Artificial Sequence: Synthetic oligonucleotide
uucaccgaacaccuucuga

SEQ ID NO: 478357 - RNA, 19 nt, Artificial Sequence
  Description of Artificial Sequence: Synthetic oligonucleotide
caagguauauaggccaugc

SEQ ID NO: 478358 - RNA, 19 nt, Artificial Sequence
  Description of Artificial Sequence: Synthetic oligonucleotide
aaccuaaauaacccuccaa

SEQ ID NO: 478359 - RNA, 19 nt, Artificial Sequence
  Description of Artificial Sequence: Synthetic oligonucleotide
ugcuaauaucauguaagcu

SEQ ID NO: 478360 - RNA, 19 nt, Artificial Sequence
  Description of Artificial Sequence: Synthetic oligonucleotide
aagcgggcuccucggaugg

SEQ ID NO: 478361 - RNA, 19 nt, Artificial Sequence
  Description of Artificial Sequence: Synthetic oligonucleotide
cuucuaagcagagagacaa

SEQ ID NO: 478362 - RNA, 19 nt, Artificial Sequence
  Description of Artificial Sequence: Synthetic oligonucleotide
ugcacaugucuuuucagua

SEQ ID NO: 478363 - RNA, 19 nt, Artificial Sequence
  Description of Artificial Sequence: Synthetic oligonucleotide
cagagagacaagcucgaag

SEQ ID NO: 478364 - RNA, 19 nt, Artificial Sequence
  Description of Artificial Sequence: Synthetic oligonucleotide
agauuucauaccuucucaa

SEQ ID NO: 478365 - RNA, 19 nt, Artificial Sequence
  Description of Artificial Sequence: Synthetic oligonucleotide
guuaucgaagccucagcac

SEQ ID NO: 478366 - RNA, 19 nt, Artificial Sequence
  Description of Artificial Sequence: Synthetic oligonucleotide
uccagauuucauaccuucu

SEQ ID NO: 478367 - RNA, 19 nt, Artificial Sequence
  Description of Artificial Sequence: Synthetic oligonucleotide
ugcgcuggcuauaacucca

SEQ ID NO: 478368 - RNA, 19 nt, Artificial Sequence
  Description of Artificial Sequence: Synthetic oligonucleotide
uuugguguagcuguuuaua

SEQ ID NO: 478369 - RNA, 19 nt, Artificial Sequence
  Description of Artificial Sequence: Synthetic oligonucleotide
uucuaagcagagagacaag

SEQ ID NO: 478370 - RNA, 19 nt, Artificial Sequence
  Description of Artificial Sequence: Synthetic oligonucleotide
cauaggaaaugagaggcuc

SEQ ID NO: 478371 - RNA, 19 nt, Artificial Sequence
  Description of Artificial Sequence: Synthetic oligonucleotide
uugguguagcuguuuauau

SEQ ID NO: 478372 - RNA, 19 nt, Artificial Sequence
  Description of Artificial Sequence: Synthetic oligonucleotide
ugagacuccucaacacuac

SEQ ID NO: 478373 - RNA, 19 nt, Artificial Sequence
  Description of Artificial Sequence: Synthetic oligonucleotide
aaaggagcaugcucuggaa

SEQ ID NO: 478374 - RNA, 19 nt, Artificial Sequence
  Description of Artificial Sequence: Synthetic oligonucleotide
ggcacauucagggugcugg

SEQ ID NO: 478375 - RNA, 19 nt, Artificial Sequence
  Description of Artificial Sequence: Synthetic oligonucleotide
uuaagccugaugcuugguu

SEQ ID NO: 478376 - RNA, 19 nt, Artificial Sequence
  Description of Artificial Sequence: Synthetic oligonucleotide
ucuacuccuaucacacauc

SEQ ID NO: 478377 - RNA, 19 nt, Artificial Sequence
  Description of Artificial Sequence: Synthetic oligonucleotide
uucaagguauauaggccau

SEQ ID NO: 478378 - RNA, 19 nt, Artificial Sequence
  Description of Artificial Sequence: Synthetic oligonucleotide
acuuagauuacaagugaga

SEQ ID NO: 478379 - RNA, 19 nt, Artificial Sequence
  Description of Artificial Sequence: Synthetic oligonucleotide
gucuuagggcuagaggugg

SEQ ID NO: 478380 - RNA, 19 nt, Artificial Sequence
  Description of Artificial Sequence: Synthetic oligonucleotide
ucuuauccucucuuuuggu

SEQ ID NO: 478381 - RNA, 19 nt, Artificial Sequence
  Description of Artificial Sequence: Synthetic oligonucleotide
gguaaagcauccuuuccac

SEQ ID NO: 478382 - RNA, 19 nt, Artificial Sequence
  Description of Artificial Sequence: Synthetic oligonucleotide
uuggugguuauaugcucug

SEQ ID NO: 478383 - RNA, 19 nt, Artificial Sequence
  Description of Artificial Sequence: Synthetic oligonucleotide
cuguuuauauggccccagg

SEQ ID NO: 478384 - RNA, 19 nt, Artificial Sequence
  Description of Artificial Sequence: Synthetic oligonucleotide
uccgucuacauacuccaua

SEQ ID NO: 478385 - RNA, 19 nt, Artificial Sequence
  Description of Artificial Sequence: Synthetic oligonucleotide
ucacccaugggauguacau

SEQ ID NO: 478386 - RNA, 19 nt, Artificial Sequence
  Description of Artificial Sequence: Synthetic oligonucleotide
agaagucacccaugggaug

SEQ ID NO: 478387 - RNA, 19 nt, Artificial Sequence
  Description of Artificial Sequence: Synthetic oligonucleotide
cacaagauagguaggguaa

SEQ ID NO: 478388 - RNA, 19 nt, Artificial Sequence
  Description of Artificial Sequence: Synthetic oligonucleotide
uugccugagacuccucaac

SEQ ID NO: 478389 - RNA, 19 nt, Artificial Sequence
  Description of Artificial Sequence: Synthetic oligonucleotide
guaguucaagcuguucucc

SEQ ID NO: 478390 - RNA, 19 nt, Artificial Sequence
  Description of Artificial Sequence: Synthetic oligonucleotide
acuuuuaagccugaugcuu

SEQ ID NO: 478391 - RNA, 19 nt, Artificial Sequence
  Description of Artificial Sequence: Synthetic oligonucleotide
cuacuggacacacuggaga

SEQ ID NO: 478392 - RNA, 19 nt, Artificial Sequence
  Description of Artificial Sequence: Synthetic oligonucleotide
agauccucggagcccgagg

SEQ ID NO: 478393 - RNA, 19 nt, Artificial Sequence
  Description of Artificial Sequence: Synthetic oligonucleotide
gaagcgggcuccucggaug

SEQ ID NO: 478394 - RNA, 19 nt, Artificial Sequence
  Description of Artificial Sequence: Synthetic oligonucleotide
uacaagugagaggcuuugg

SEQ ID NO: 478395 - RNA, 19 nt, Artificial Sequence
  Description of Artificial Sequence: Synthetic oligonucleotide
cacgcuuccuagaacagca

SEQ ID NO: 478396 - RNA, 19 nt, Artificial Sequence
  Description of Artificial Sequence: Synthetic oligonucleotide
ggccaaaucucuucgggcc

SEQ ID NO: 478397 - RNA, 19 nt, Artificial Sequence
  Description of Artificial Sequence: Synthetic oligonucleotide
uggcuauaacuccaccuuc

SEQ ID NO: 478398 - RNA, 19 nt, Artificial Sequence
  Description of Artificial Sequence: Synthetic oligonucleotide
ugccaaccuaaauaacccu

SEQ ID NO: 478399 - RNA, 19 nt, Artificial Sequence
  Description of Artificial Sequence: Synthetic oligonucleotide
gguauauaggccaugccuc

SEQ ID NO: 478400 - RNA, 19 nt, Artificial Sequence
  Description of Artificial Sequence: Synthetic oligonucleotide
auaugcucugaacuauaaa

SEQ ID NO: 478401 - RNA, 19 nt, Artificial Sequence
  Description of Artificial Sequence: Synthetic oligonucleotide
gagacaagcucgaaggaaa

SEQ ID NO: 478402 - RNA, 19 nt, Artificial Sequence
  Description of Artificial Sequence: Synthetic oligonucleotide
cagauuucauaccuucuca

SEQ ID NO: 478403 - RNA, 19 nt, Artificial Sequence
  Description of Artificial Sequence: Synthetic oligonucleotide
accuuccuacuucuaagca

SEQ ID NO: 478404 - RNA, 19 nt, Artificial Sequence
  Description of Artificial Sequence: Synthetic oligonucleotide
caccuucugaauuucagaa

SEQ ID NO: 478405 - RNA, 19 nt, Artificial Sequence
  Description of Artificial Sequence: Synthetic oligonucleotide
aggugaagaucaguuguag

SEQ ID NO: 478406 - RNA, 19 nt, Artificial Sequence
  Description of Artificial Sequence: Synthetic oligonucleotide
ggugaagaucaguuguagc

SEQ ID NO: 478407 - RNA, 19 nt, Artificial Sequence
  Description of Artificial Sequence: Synthetic oligonucleotide
uggguuagcacagcuucug

SEQ ID NO: 478408 - RNA, 19 nt, Artificial Sequence
  Description of Artificial Sequence: Synthetic oligonucleotide
cucgaaggaaaggaaauga

SEQ ID NO: 478409 - RNA, 19 nt, Artificial Sequence
  Description of Artificial Sequence: Synthetic oligonucleotide
uauagggcuuagaguggug

SEQ ID NO: 478410 - RNA, 19 nt, Artificial Sequence
  Description of Artificial Sequence: Synthetic oligonucleotide
aggucgacugccucgcuca

SEQ ID NO: 478411 - RNA, 19 nt, Artificial Sequence
  Description of Artificial Sequence: Synthetic oligonucleotide
cugcuugccaacuuagcga

SEQ ID NO: 478412 - RNA, 19 nt, Artificial Sequence
  Description of Artificial Sequence: Synthetic oligonucleotide
ucucaacuucaccgaacac

SEQ ID NO: 478413 - RNA, 19 nt, Artificial Sequence
  Description of Artificial Sequence: Synthetic oligonucleotide
gguuauaugcucugaacua

SEQ ID NO: 478414 - RNA, 19 nt, Artificial Sequence
  Description of Artificial Sequence: Synthetic oligonucleotide
auagggcuuagagugguga

SEQ ID NO: 478415 - RNA, 19 nt, Artificial Sequence
  Description of Artificial Sequence: Synthetic oligonucleotide
gaaugguacggacaauggu

SEQ ID NO: 478416 - RNA, 19 nt, Artificial Sequence
  Description of Artificial Sequence: Synthetic oligonucleotide
ccuuccuacuucuaagcag

SEQ ID NO: 478417 - RNA, 19 nt, Artificial Sequence
  Description of Artificial Sequence: Synthetic oligonucleotide
gcaucuuucaggagcagcc

SEQ ID NO: 478418 - RNA, 19 nt, Artificial Sequence
  Description of Artificial Sequence: Synthetic oligonucleotide
cuaaauaacccuccaaguu

SEQ ID NO: 478419 - RNA, 19 nt, Artificial Sequence
  Description of Artificial Sequence: Synthetic oligonucleotide
cagucaggaaguccacacc

SEQ ID NO: 478420 - RNA, 19 nt, Artificial Sequence
  Description of Artificial Sequence: Synthetic oligonucleotide
accgaacaccuucugaauu

SEQ ID NO: 478421 - RNA, 19 nt, Artificial Sequence
  Description of Artificial Sequence: Synthetic oligonucleotide
gggacuuuuaagccugaug

SEQ ID NO: 478422 - RNA, 19 nt, Artificial Sequence
  Description of Artificial Sequence: Synthetic oligonucleotide
acccgacauguccuucagc

SEQ ID NO: 478423 - RNA, 19 nt, Artificial Sequence
  Description of Artificial Sequence: Synthetic oligonucleotide
gauagguaggguaaagcau

SEQ ID NO: 478424 - RNA, 19 nt, Artificial Sequence
  Description of Artificial Sequence: Synthetic oligonucleotide
uacauagauccaccaccaa

SEQ ID NO: 478425 - RNA, 19 nt, Artificial Sequence
  Description of Artificial Sequence: Synthetic oligonucleotide
cauguuccacuuagauuac

SEQ ID NO: 478426 - RNA, 19 nt, Artificial Sequence
  Description of Artificial Sequence: Synthetic oligonucleotide
ucuucgggccaagucccgg

SEQ ID NO: 478427 - RNA, 19 nt, Artificial Sequence
  Description of Artificial Sequence: Synthetic oligonucleotide
agacccgacauguccuuca

SEQ ID NO: 478428 - RNA, 19 nt, Artificial Sequence
  Description of Artificial Sequence: Synthetic oligonucleotide
cggagugucagaguaaugg

SEQ ID NO: 478429 - RNA, 19 nt, Artificial Sequence
  Description of Artificial Sequence: Synthetic oligonucleotide
cuguccuacugccccacgc

SEQ ID NO: 478430 - RNA, 19 nt, Artificial Sequence
  Description of Artificial Sequence: Synthetic oligonucleotide
gcucagacccgacaugucc

SEQ ID NO: 478431 - RNA, 19 nt, Artificial Sequence
  Description of Artificial Sequence: Synthetic oligonucleotide
aaggugaagaucaguugua

SEQ ID NO: 478432 - RNA, 19 nt, Artificial Sequence
  Description of Artificial Sequence: Synthetic oligonucleotide
aguuugagaugggaucuga

SEQ ID NO: 478433 - RNA, 19 nt, Artificial Sequence
  Description of Artificial Sequence: Synthetic oligonucleotide
uaaagccuuccugauccgu

SEQ ID NO: 478434 - RNA, 19 nt, Artificial Sequence
  Description of Artificial Sequence: Synthetic oligonucleotide
aaaucucuucgggccaagu

SEQ ID NO: 478435 - RNA, 19 nt, Artificial Sequence
  Description of Artificial Sequence: Synthetic oligonucleotide
aucaguuguagcuccccuu

SEQ ID NO: 478436 - RNA, 19 nt, Artificial Sequence
  Description of Artificial Sequence: Synthetic oligonucleotide
uccuacugccccacgcuuc

SEQ ID NO: 478437 - RNA, 19 nt, Artificial Sequence
  Description of Artificial Sequence: Synthetic oligonucleotide
aauaacccuccaaguuuca

SEQ ID NO: 478438 - RNA, 19 nt, Artificial Sequence
  Description of Artificial Sequence: Synthetic oligonucleotide
acauuccaaguuauguagu

SEQ ID NO: 478439 - RNA, 19 nt, Artificial Sequence
  Description of Artificial Sequence: Synthetic oligonucleotide
gaagucacccaugggaugu

SEQ ID NO: 478440 - RNA, 19 nt, Artificial Sequence
  Description of Artificial Sequence: Synthetic oligonucleotide
cauaucgcuggcacauuca

SEQ ID NO: 478441 - RNA, 19 nt, Artificial Sequence
  Description of Artificial Sequence: Synthetic oligonucleotide
agcaugguggcugaucaau

SEQ ID NO: 478442 - RNA, 19 nt, Artificial Sequence
  Description of Artificial Sequence: Synthetic oligonucleotide
ugccccacgcuuccuagaa

SEQ ID NO: 478443 - RNA, 19 nt, Artificial Sequence
  Description of Artificial Sequence: Synthetic oligonucleotide
gacccgacauguccuucag

SEQ ID NO: 478444 - RNA, 19 nt, Artificial Sequence
  Description of Artificial Sequence: Synthetic oligonucleotide
agcgacucugcagugugug

SEQ ID NO: 478445 - RNA, 19 nt, Artificial Sequence
  Description of Artificial Sequence: Synthetic oligonucleotide
ccuauagggcuuagagugg

SEQ ID NO: 478446 - RNA, 19 nt, Artificial Sequence
  Description of Artificial Sequence: Synthetic oligonucleotide
cuuucuugucgggucaguc

SEQ ID NO: 478447 - RNA, 19 nt, Artificial Sequence
  Description of Artificial Sequence: Synthetic oligonucleotide
caaagcaggauacacguuu

SEQ ID NO: 478448 - RNA, 19 nt, Artificial Sequence
  Description of Artificial Sequence: Synthetic oligonucleotide
ccuaagucacaaaggguug

SEQ ID NO: 478449 - RNA, 19 nt, Artificial Sequence
  Description of Artificial Sequence: Synthetic oligonucleotide
uauuaccuucugaggcuau

SEQ ID NO: 478450 - RNA, 19 nt, Artificial Sequence
  Description of Artificial Sequence: Synthetic oligonucleotide
cuuccuagaacagcagaga

SEQ ID NO: 478451 - RNA, 19 nt, Artificial Sequence
  Description of Artificial Sequence: Synthetic oligonucleotide
cacucucuacuccuaucac

SEQ ID NO: 478452 - RNA, 19 nt, Artificial Sequence
  Description of Artificial Sequence: Synthetic oligonucleotide
aagucccgggguuucuuuu

SEQ ID NO: 478453 - RNA, 19 nt, Artificial Sequence
  Description of Artificial Sequence: Synthetic oligonucleotide
gacugcuugccaacuuagc

SEQ ID NO: 478454 - RNA, 19 nt, Artificial Sequence
  Description of Artificial Sequence: Synthetic oligonucleotide
caguuguagcuccccuucc

SEQ ID NO: 478455 - RNA, 19 nt, Artificial Sequence
  Description of Artificial Sequence: Synthetic oligonucleotide
aggauggagaccacucucu

SEQ ID NO: 478456 - RNA, 19 nt, Artificial Sequence
  Description of Artificial Sequence: Synthetic oligonucleotide
uuuaagccugaugcuuggu

SEQ ID NO: 478457 - RNA, 19 nt, Artificial Sequence
  Description of Artificial Sequence: Synthetic oligonucleotide
gggauguacauagauccac

SEQ ID NO: 478458 - RNA, 19 nt, Artificial Sequence
  Description of Artificial Sequence: Synthetic oligonucleotide
acuguccuacugccccacg

SEQ ID NO: 478459 - RNA, 19 nt, Artificial Sequence
  Description of Artificial Sequence: Synthetic oligonucleotide
acaagauagguaggguaaa

SEQ ID NO: 478460 - RNA, 19 nt, Artificial Sequence
  Description of Artificial Sequence: Synthetic oligonucleotide
uacuccuaucacacaucuc

SEQ ID NO: 478461 - RNA, 19 nt, Artificial Sequence
  Description of Artificial Sequence: Synthetic oligonucleotide
guuauaugcucugaacuau

SEQ ID NO: 478462 - RNA, 19 nt, Artificial Sequence
  Description of Artificial Sequence: Synthetic oligonucleotide
augggaucugaggaaugug

SEQ ID NO: 478463 - RNA, 19 nt, Artificial Sequence
  Description of Artificial Sequence: Synthetic oligonucleotide
ugguacggacaauggugcu

SEQ ID NO: 478464 - RNA, 19 nt, Artificial Sequence
  Description of Artificial Sequence: Synthetic oligonucleotide
cugaucccggggcucagac

SEQ ID NO: 478465 - RNA, 19 nt, Artificial Sequence
  Description of Artificial Sequence: Synthetic oligonucleotide
ucgaagccucagcacugca

SEQ ID NO: 478466 - RNA, 19 nt, Artificial Sequence
  Description of Artificial Sequence: Synthetic oligonucleotide
uagcugggaggucccaauc

SEQ ID NO: 478467 - RNA, 19 nt, Artificial Sequence
  Description of Artificial Sequence: Synthetic oligonucleotide
ugagccuauagggcuuaga

SEQ ID NO: 478468 - RNA, 19 nt, Artificial Sequence
  Description of Artificial Sequence: Synthetic oligonucleotide
ggaucugaggaaugugauc

SEQ ID NO: 478469 - RNA, 19 nt, Artificial Sequence
  Description of Artificial Sequence: Synthetic oligonucleotide
cuacauguuccacuuagau

SEQ ID NO: 478470 - RNA, 19 nt, Artificial Sequence
  Description of Artificial Sequence: Synthetic oligonucleotide
ccaaguuauguaguuugag

SEQ ID NO: 478471 - RNA, 19 nt, Artificial Sequence
  Description of Artificial Sequence: Synthetic oligonucleotide
auaggacauaucgcuggca

SEQ ID NO: 478472 - RNA, 19 nt, Artificial Sequence
  Description of Artificial Sequence: Synthetic oligonucleotide
ggcucugcaugggaguugg

SEQ ID NO: 478473 - RNA, 19 nt, Artificial Sequence
  Description of Artificial Sequence: Synthetic oligonucleotide
cucuucgggccaagucccg

SEQ ID NO: 478474 - RNA, 19 nt, Artificial Sequence
  Description of Artificial Sequence: Synthetic oligonucleotide
cuucaccgaacaccuucug

SEQ ID NO: 478475 - RNA, 19 nt, Artificial Sequence
  Description of Artificial Sequence: Synthetic oligonucleotide
cagguagacugcuugccaa

SEQ ID NO: 478476 - RNA, 19 nt, Artificial Sequence
  Description of Artificial Sequence: Synthetic oligonucleotide
agacuccucaacacuacau

SEQ ID NO: 478477 - RNA, 19 nt, Artificial Sequence
  Description of Artificial Sequence: Synthetic oligonucleotide
ggucuuagggcuagaggug

SEQ ID NO: 478478 - RNA, 19 nt, Artificial Sequence
  Description of Artificial Sequence: Synthetic oligonucleotide
agaauacagcccacucuga

SEQ ID NO: 478479 - RNA, 19 nt, Artificial Sequence
  Description of Artificial Sequence: Synthetic oligonucleotide
cugggaggucccaaucuga

SEQ ID NO: 478480 - RNA, 19 nt, Artificial Sequence
  Description of Artificial Sequence: Synthetic oligonucleotide
cuccagucaggaaguccac

SEQ ID NO: 478481 - RNA, 19 nt, Artificial Sequence
  Description of Artificial Sequence: Synthetic oligonucleotide
gcuacuggacacacuggag

SEQ ID NO: 478482 - RNA, 19 nt, Artificial Sequence
  Description of Artificial Sequence: Synthetic oligonucleotide
ccacuuagauuacaaguga

SEQ ID NO: 478483 - RNA, 19 nt, Artificial Sequence
  Description of Artificial Sequence: Synthetic oligonucleotide
ggcuauaacuccaccuuca

SEQ ID NO: 478484 - RNA, 19 nt, Artificial Sequence
  Description of Artificial Sequence: Synthetic oligonucleotide
gagauccucggagcccgag

SEQ ID NO: 478485 - RNA, 19 nt, Artificial Sequence
  Description of Artificial Sequence: Synthetic oligonucleotide
gccaaccuaaauaacccuc

SEQ ID NO: 478486 - RNA, 19 nt, Artificial Sequence
  Description of Artificial Sequence: Synthetic oligonucleotide
ucgggccaagucccggggu

SEQ ID NO: 478487 - RNA, 19 nt, Artificial Sequence
  Description of Artificial Sequence: Synthetic oligonucleotide
gcuguuuauauggccccag

SEQ ID NO: 478488 - RNA, 19 nt, Artificial Sequence
  Description of Artificial Sequence: Synthetic oligonucleotide
guauuaccuucugaggcua

SEQ ID NO: 478489 - RNA, 19 nt, Artificial Sequence
  Description of Artificial Sequence: Synthetic oligonucleotide
agggcucucugccaaccua

SEQ ID NO: 478490 - RNA, 19 nt, Artificial Sequence
  Description of Artificial Sequence: Synthetic oligonucleotide
auguuccacuuagauuaca

SEQ ID NO: 478491 - RNA, 19 nt, Artificial Sequence
  Description of Artificial Sequence: Synthetic oligonucleotide
cuccuaagucacaaagggu

SEQ ID NO: 478492 - RNA, 19 nt, Artificial Sequence
  Description of Artificial Sequence: Synthetic oligonucleotide
gagaugggaucugaggaau

SEQ ID NO: 478493 - RNA, 19 nt, Artificial Sequence
  Description of Artificial Sequence: Synthetic oligonucleotide
uggggcuacuggacacacu

SEQ ID NO: 478494 - RNA, 19 nt, Artificial Sequence
  Description of Artificial Sequence: Synthetic oligonucleotide
cucagacccgacauguccu

SEQ ID NO: 478495 - RNA, 19 nt, Artificial Sequence
  Description of Artificial Sequence: Synthetic oligonucleotide
gcuggcuauaacuccaccu

SEQ ID NO: 478496 - RNA, 19 nt, Artificial Sequence
  Description of Artificial Sequence: Synthetic oligonucleotide
gguggggacuuuuaagccu

SEQ ID NO: 478497 - RNA, 19 nt, Artificial Sequence
  Description of Artificial Sequence: Synthetic oligonucleotide
cugaggcuaugcccucaag

SEQ ID NO: 478498 - RNA, 19 nt, Artificial Sequence
  Description of Artificial Sequence: Synthetic oligonucleotide
gguacggacaauggugcuc

SEQ ID NO: 478499 - RNA, 19 nt, Artificial Sequence
  Description of Artificial Sequence: Synthetic oligonucleotide
gugauucugcuuggcuggc

SEQ ID NO: 478500 - RNA, 19 nt, Artificial Sequence
  Description of Artificial Sequence: Synthetic oligonucleotide
guggugauucugcuuggcu

SEQ ID NO: 478501 - RNA, 19 nt, Artificial Sequence
  Description of Artificial Sequence: Synthetic oligonucleotide
gucgacugccucgcucagg

SEQ ID NO: 478502 - RNA, 19 nt, Artificial Sequence
  Description of Artificial Sequence: Synthetic oligonucleotide
cuaagucacaaaggguugu

SEQ ID NO: 478503 - RNA, 19 nt, Artificial Sequence
  Description of Artificial Sequence: Synthetic oligonucleotide
ccgucuacauacuccauaa

SEQ ID NO: 478504 - RNA, 19 nt, Artificial Sequence
  Description of Artificial Sequence: Synthetic oligonucleotide
ugcucgugccugugguaau

SEQ ID NO: 478505 - RNA, 19 nt, Artificial Sequence
  Description of Artificial Sequence: Synthetic oligonucleotide
agguaggguaaagcauccu

SEQ ID NO: 478506 - RNA, 19 nt, Artificial Sequence
  Description of Artificial Sequence: Synthetic oligonucleotide
ggacucucagggauaggac

SEQ ID NO: 478507 - RNA, 19 nt, Artificial Sequence
  Description of Artificial Sequence: Synthetic oligonucleotide
ccccacgcuuccuagaaca

SEQ ID NO: 478508 - RNA, 19 nt, Artificial Sequence
  Description of Artificial Sequence: Synthetic oligonucleotide
gucacccaugggauguaca

SEQ ID NO: 478509 - RNA, 19 nt, Artificial Sequence
  Description of Artificial Sequence: Synthetic oligonucleotide
guggggcuacuggacacac

SEQ ID NO: 478510 - RNA, 19 nt, Artificial Sequence
  Description of Artificial Sequence: Synthetic oligonucleotide
cuccucaacacuacauguu

SEQ ID NO: 478511 - RNA, 19 nt, Artificial Sequence
  Description of Artificial Sequence: Synthetic oligonucleotide
uacggacaauggugcucgu

SEQ ID NO: 478512 - RNA, 19 nt, Artificial Sequence
  Description of Artificial Sequence: Synthetic oligonucleotide
gccccuggaagggagcugc

SEQ ID NO: 478513 - RNA, 19 nt, Artificial Sequence
  Description of Artificial Sequence: Synthetic oligonucleotide
guagcugggaggucccaau

SEQ ID NO: 478514 - RNA, 19 nt, Artificial Sequence
  Description of Artificial Sequence: Synthetic oligonucleotide
acggagugucagaguaaug

SEQ ID NO: 478515 - RNA, 19 nt, Artificial Sequence
  Description of Artificial Sequence: Synthetic oligonucleotide
ggcaggcgcugugaguuag

SEQ ID NO: 478516 - RNA, 19 nt, Artificial Sequence
  Description of Artificial Sequence: Synthetic oligonucleotide
auaggaacuugggcuuguu

SEQ ID NO: 478517 - RNA, 19 nt, Artificial Sequence
  Description of Artificial Sequence: Synthetic oligonucleotide
gcuagagguggggcuacug

SEQ ID NO: 478518 - RNA, 19 nt, Artificial Sequence
  Description of Artificial Sequence: Synthetic oligonucleotide
guagacugcuugccaacuu

SEQ ID NO: 478519 - RNA, 19 nt, Artificial Sequence
  Description of Artificial Sequence: Synthetic oligonucleotide
auugggcguggcacugcug

SEQ ID NO: 478520 - RNA, 19 nt, Artificial Sequence
  Description of Artificial Sequence: Synthetic oligonucleotide
ggcuccucggaugguguug

SEQ ID NO: 478521 - RNA, 19 nt, Artificial Sequence
  Description of Artificial Sequence: Synthetic oligonucleotide
cugagccuauagggcuuag

SEQ ID NO: 478522 - RNA, 19 nt, Artificial Sequence
  Description of Artificial Sequence: Synthetic oligonucleotide
cagacccgacauguccuuc

SEQ ID NO: 478523 - RNA, 19 nt, Artificial Sequence
  Description of Artificial Sequence: Synthetic oligonucleotide
cgucuacauacuccauaag

SEQ ID NO: 478524 - RNA, 19 nt, Artificial Sequence
  Description of Artificial Sequence: Synthetic oligonucleotide
gcucgugccugugguaaug

SEQ ID NO: 478525 - RNA, 19 nt, Artificial Sequence
  Description of Artificial Sequence: Synthetic oligonucleotide
gcuaugcccucaagucugc

SEQ ID NO: 478526 - RNA, 19 nt, Artificial Sequence
  Description of Artificial Sequence: Synthetic oligonucleotide
ccgugcccauaucaccagg

SEQ ID NO: 478527 - RNA, 19 nt, Artificial Sequence
  Description of Artificial Sequence: Synthetic oligonucleotide
cauugggcguggcacugcu

SEQ ID NO: 478528 - RNA, 19 nt, Artificial Sequence
  Description of Artificial Sequence: Synthetic oligonucleotide
ccacuuucuugucggguca

SEQ ID NO: 478529 - RNA, 19 nt, Artificial Sequence
  Description of Artificial Sequence: Synthetic oligonucleotide
caccgaacaccuucugaau

SEQ ID NO: 478530 - RNA, 19 nt, Artificial Sequence
  Description of Artificial Sequence: Synthetic oligonucleotide
guggguuagcacagcuucu

SEQ ID NO: 478531 - RNA, 19 nt, Artificial Sequence
  Description of Artificial Sequence: Synthetic oligonucleotide
auccgucuacauacuccau

SEQ ID NO: 478532 - RNA, 19 nt, Artificial Sequence
  Description of Artificial Sequence: Synthetic oligonucleotide
ccaugggauguacauagau

SEQ ID NO: 478533 - RNA, 19 nt, Artificial Sequence
  Description of Artificial Sequence: Synthetic oligonucleotide
cacccaugggauguacaua

SEQ ID NO: 478534 - RNA, 19 nt, Artificial Sequence
  Description of Artificial Sequence: Synthetic oligonucleotide
gggcucagacccgacaugu

SEQ ID NO: 478535 - RNA, 19 nt, Artificial Sequence
  Description of Artificial Sequence: Synthetic oligonucleotide
gggaggucccaaucugacu

SEQ ID NO: 478536 - RNA, 19 nt, Artificial Sequence
  Description of Artificial Sequence: Synthetic oligonucleotide
agagauccucggagcccga

SEQ ID NO: 478537 - RNA, 19 nt, Artificial Sequence
  Description of Artificial Sequence: Synthetic oligonucleotide
gcgcugugaguuagagggc

SEQ ID NO: 478538 - RNA, 19 nt, Artificial Sequence
  Description of Artificial Sequence: Synthetic oligonucleotide
ccgaacaccuucugaauuu

SEQ ID NO: 478539 - RNA, 19 nt, Artificial Sequence
  Description of Artificial Sequence: Synthetic oligonucleotide
gacauaucgcuggcacauu

SEQ ID NO: 478540 - RNA, 19 nt, Artificial Sequence
  Description of Artificial Sequence: Synthetic oligonucleotide
cgcuggcuauaacuccacc

SEQ ID NO: 478541 - RNA, 19 nt, Artificial Sequence
  Description of Artificial Sequence: Synthetic oligonucleotide
gccccacgcuuccuagaac

SEQ ID NO: 478542 - RNA, 19 nt, Artificial Sequence
  Description of Artificial Sequence: Synthetic oligonucleotide
gcgcuggcuauaacuccac

SEQ ID NO: 478543 - RNA, 19 nt, Artificial Sequence
  Description of Artificial Sequence: Synthetic oligonucleotide
ccugauccgucuacauacu

SEQ ID NO: 478544 - RNA, 19 nt, Artificial Sequence
  Description of Artificial Sequence: Synthetic oligonucleotide
gcucugcaugggaguuggc

SEQ ID NO: 478545 - RNA, 19 nt, Artificial Sequence
  Description of Artificial Sequence: Synthetic oligonucleotide
gcaggcgcugugaguuaga

SEQ ID NO: 478546 - RNA, 19 nt, Artificial Sequence
  Description of Artificial Sequence: Synthetic oligonucleotide
ccaagcgacucugcagugu

SEQ ID NO: 478547 - RNA, 19 nt, Artificial Sequence
  Description of Artificial Sequence: Synthetic oligonucleotide
ccucucuuuuggugguuau

SEQ ID NO: 478548 - RNA, 19 nt, Artificial Sequence
  Description of Artificial Sequence: Synthetic oligonucleotide
ccugagccuauagggcuua

SEQ ID NO: 478549 - RNA, 19 nt, Artificial Sequence
  Description of Artificial Sequence: Synthetic oligonucleotide
ggggacuuuuaagccugau

SEQ ID NO: 478550 - RNA, 19 nt, Artificial Sequence
  Description of Artificial Sequence: Synthetic oligonucleotide
ccccuuccgugcccauauc

SEQ ID NO: 478551 - RNA, 19 nt, Artificial Sequence
  Description of Artificial Sequence: Synthetic oligonucleotide
ccugaucccggggcucaga

SEQ ID NO: 478552 - RNA, 19 nt, Artificial Sequence
  Description of Artificial Sequence: Synthetic oligonucleotide
cuacugccccacgcuuccu

SEQ ID NO: 478553 - RNA, 19 nt, Artificial Sequence
  Description of Artificial Sequence: Synthetic oligonucleotide
ggcuagagguggggcuacu

SEQ ID NO: 478554 - RNA, 19 nt, Artificial Sequence
  Description of Artificial Sequence: Synthetic oligonucleotide
aaugauauugcucagaccu

SEQ ID NO: 478555 - RNA, 19 nt, Artificial Sequence
  Description of Artificial Sequence: Synthetic oligonucleotide
aauuguuaagacuauaguc

SEQ ID NO: 478556 - RNA, 19 nt, Artificial Sequence
  Description of Artificial Sequence: Synthetic oligonucleotide
aaagucuuaacucugaugu

SEQ ID NO: 478557 - RNA, 19 nt, Artificial Sequence
  Description of Artificial Sequence: Synthetic oligonucleotide
uuaaaaguggcuuaggaag

SEQ ID NO: 478558 - RNA, 19 nt, Artificial Sequence
  Description of Artificial Sequence: Synthetic oligonucleotide
auuguuaagacuauagucc

SEQ ID NO: 478559 - RNA, 19 nt, Artificial Sequence
  Description of Artificial Sequence: Synthetic oligonucleotide
aauuccaucaguccauccc

SEQ ID NO: 478560 - RNA, 19 nt, Artificial Sequence
  Description of Artificial Sequence: Synthetic oligonucleotide
ucucuguuaagauacagcg

SEQ ID NO: 478561 - RNA, 19 nt, Artificial Sequence
  Description of Artificial Sequence: Synthetic oligonucleotide
uuaaaguaaauuaaagacu

SEQ ID NO: 478562 - RNA, 19 nt, Artificial Sequence
  Description of Artificial Sequence: Synthetic oligonucleotide
cuuaauacuaccuacauga

SEQ ID NO: 478563 - RNA, 19 nt, Artificial Sequence
  Description of Artificial Sequence: Synthetic oligonucleotide
ucuguuaagauacagcgca

SEQ ID NO: 478564 - RNA, 19 nt, Artificial Sequence
  Description of Artificial Sequence: Synthetic oligonucleotide
guguaaaugagcuaugugg

SEQ ID NO: 478565 - RNA, 19 nt, Artificial Sequence
  Description of Artificial Sequence: Synthetic oligonucleotide
aacacgaauuuccuggcgc

SEQ ID NO: 478566 - RNA, 19 nt, Artificial Sequence
  Description of Artificial Sequence: Synthetic oligonucleotide
aauaucacguccccgcggc

SEQ ID NO: 478567 - RNA, 19 nt, Artificial Sequence
  Description of Artificial Sequence: Synthetic oligonucleotide
aaugaauguacauguguuc

SEQ ID NO: 478568 - RNA, 19 nt, Artificial Sequence
  Description of Artificial Sequence: Synthetic oligonucleotide
accuacaugagguuuauac

SEQ ID NO: 478569 - RNA, 19 nt, Artificial Sequence
  Description of Artificial Sequence: Synthetic oligonucleotide
uaguguuugguauagacug

SEQ ID NO: 478570 - RNA, 19 nt, Artificial Sequence
  Description of Artificial Sequence: Synthetic oligonucleotide
uggaauguagggaaaaugc

SEQ ID NO: 478571 - RNA, 19 nt, Artificial Sequence
  Description of Artificial Sequence: Synthetic oligonucleotide
acggucaugaccuucaccg

SEQ ID NO: 478572 - RNA, 19 nt, Artificial Sequence
  Description of Artificial Sequence: Synthetic oligonucleotide
cuuuaaaugggcaugcaag

SEQ ID NO: 478573 - RNA, 19 nt, Artificial Sequence
  Description of Artificial Sequence: Synthetic oligonucleotide
uaauacuaccuacaugagg

SEQ ID NO: 478574 - RNA, 19 nt, Artificial Sequence
  Description of Artificial Sequence: Synthetic oligonucleotide
auaacucugcccuucacac

SEQ ID NO: 478575 - RNA, 19 nt, Artificial Sequence
  Description of Artificial Sequence: Synthetic oligonucleotide
cuaaugcucagcaauacgc

SEQ ID NO: 478576 - RNA, 19 nt, Artificial Sequence
  Description of Artificial Sequence: Synthetic oligonucleotide
ugggaaaguaccaucauca

SEQ ID NO: 478577 - RNA, 19 nt, Artificial Sequence
  Description of Artificial Sequence: Synthetic oligonucleotide
uucuaucuaaucaaugucu

SEQ ID NO: 478578 - RNA, 19 nt, Artificial Sequence
  Description of Artificial Sequence: Synthetic oligonucleotide
aaaaccugcggagagcuac

SEQ ID NO: 478579 - RNA, 19 nt, Artificial Sequence
  Description of Artificial Sequence: Synthetic oligonucleotide
uguauauagguguacauua

SEQ ID NO: 478580 - RNA, 19 nt, Artificial Sequence
  Description of Artificial Sequence: Synthetic oligonucleotide
uauaaauggccuuucuuug

SEQ ID NO: 478581 - RNA, 19 nt, Artificial Sequence
  Description of Artificial Sequence: Synthetic oligonucleotide
aacauuaugucacucuuaa

SEQ ID NO: 478582 - RNA, 19 nt, Artificial Sequence
  Description of Artificial Sequence: Synthetic oligonucleotide
aaggaagcuuggcaguugc

SEQ ID NO: 478583 - RNA, 19 nt, Artificial Sequence
  Description of Artificial Sequence: Synthetic oligonucleotide
gauacagcgcauuaucugc

SEQ ID NO: 478584 - RNA, 19 nt, Artificial Sequence
  Description of Artificial Sequence: Synthetic oligonucleotide
agaaucuagauagaaccgc

SEQ ID NO: 478585 - RNA, 19 nt, Artificial Sequence
  Description of Artificial Sequence: Synthetic oligonucleotide
uuuuaaaggacaucuacua

SEQ ID NO: 478586 - RNA, 19 nt, Artificial Sequence
  Description of Artificial Sequence: Synthetic oligonucleotide
ucuaaugcucagcaauacg

SEQ ID NO: 478587 - RNA, 19 nt, Artificial Sequence
  Description of Artificial Sequence: Synthetic oligonucleotide
uaucuaaucaaugucuuca

SEQ ID NO: 478588 - RNA, 19 nt, Artificial Sequence
  Description of Artificial Sequence: Synthetic oligonucleotide
uugaauaucacguccccgc

SEQ ID NO: 478589 - RNA, 19 nt, Artificial Sequence
  Description of Artificial Sequence: Synthetic oligonucleotide
uuaagaguugaugcuagcg

SEQ ID NO: 478590 - RNA, 19 nt, Artificial Sequence
  Description of Artificial Sequence: Synthetic oligonucleotide
ugagagugaguuuaaaagu

SEQ ID NO: 478591 - RNA, 19 nt, Artificial Sequence
  Description of Artificial Sequence: Synthetic oligonucleotide
uaauuguuaagacuauagu

SEQ ID NO: 478592 - RNA, 19 nt, Artificial Sequence
  Description of Artificial Sequence: Synthetic oligonucleotide
uauacagacauguagccau

SEQ ID NO: 478593 - RNA, 19 nt, Artificial Sequence
  Description of Artificial Sequence: Synthetic oligonucleotide
uguuaagaguugaugcuag

SEQ ID NO: 478594 - RNA, 19 nt, Artificial Sequence
  Description of Artificial Sequence: Synthetic oligonucleotide
uaguucacggucaugaccu

SEQ ID NO: 478595 - RNA, 19 nt, Artificial Sequence
  Description of Artificial Sequence: Synthetic oligonucleotide
uauguuaagaguugaugcu

SEQ ID NO: 478596 - RNA, 19 nt, Artificial Sequence
  Description of Artificial Sequence: Synthetic oligonucleotide
uuaacuuguaaaucagugu

SEQ ID NO: 478597 - RNA, 19 nt, Artificial Sequence
  Description of Artificial Sequence: Synthetic oligonucleotide
auaauuguuaagacuauag

SEQ ID NO: 478598 - RNA, 19 nt, Artificial Sequence
  Description of Artificial Sequence: Synthetic oligonucleotide
auaaauggccuuucuuugg

SEQ ID NO: 478599 - RNA, 19 nt, Artificial Sequence
  Description of Artificial Sequence: Synthetic oligonucleotide
aauguagggaaaaugcuca

SEQ ID NO: 478600 - RNA, 19 nt, Artificial Sequence
  Description of Artificial Sequence: Synthetic oligonucleotide
gauagaaccgcaggaaggg

SEQ ID NO: 478601 - RNA, 19 nt, Artificial Sequence
  Description of Artificial Sequence: Synthetic oligonucleotide
gaagcuacccuucaucggc

SEQ ID NO: 478602 - RNA, 19 nt, Artificial Sequence
  Description of Artificial Sequence: Synthetic oligonucleotide
uuucuaucuaaucaauguc

SEQ ID NO: 478603 - RNA, 19 nt, Artificial Sequence
  Description of Artificial Sequence: Synthetic oligonucleotide
uugcuuaugugaauggaug

SEQ ID NO: 478604 - RNA, 19 nt, Artificial Sequence
  Description of Artificial Sequence: Synthetic oligonucleotide
gacuauaguccucagugcc

SEQ ID NO: 478605 - RNA, 19 nt, Artificial Sequence
  Description of Artificial Sequence: Synthetic oligonucleotide
uagauagaaccgcaggaag

SEQ ID NO: 478606 - RNA, 19 nt, Artificial Sequence
  Description of Artificial Sequence: Synthetic oligonucleotide
uauaacucugcccuucaca

SEQ ID NO: 478607 - RNA, 19 nt, Artificial Sequence
  Description of Artificial Sequence: Synthetic oligonucleotide
ccagaaucuagauagaacc

SEQ ID NO: 478608 - RNA, 19 nt, Artificial Sequence
  Description of Artificial Sequence: Synthetic oligonucleotide
uuaguguuugguauagacu

SEQ ID NO: 478609 - RNA, 19 nt, Artificial Sequence
  Description of Artificial Sequence: Synthetic oligonucleotide
uccaaguauaacacaagga

SEQ ID NO: 478610 - RNA, 19 nt, Artificial Sequence
  Description of Artificial Sequence: Synthetic oligonucleotide
agcgccuuuuacuaaaauc

SEQ ID NO: 478611 - RNA, 19 nt, Artificial Sequence
  Description of Artificial Sequence: Synthetic oligonucleotide
aucuagauagaaccgcagg

SEQ ID NO: 478612 - RNA, 19 nt, Artificial Sequence
  Description of Artificial Sequence: Synthetic oligonucleotide
cuuaugugaauggaugugg

SEQ ID NO: 478613 - RNA, 19 nt, Artificial Sequence
  Description of Artificial Sequence: Synthetic oligonucleotide
uuaccuuuugauuccaggu

SEQ ID NO: 478614 - RNA, 19 nt, Artificial Sequence
  Description of Artificial Sequence: Synthetic oligonucleotide
uguguaaaugagcuaugug

SEQ ID NO: 478615 - RNA, 19 nt, Artificial Sequence
  Description of Artificial Sequence: Synthetic oligonucleotide
aaacacgaauuuccuggcg

SEQ ID NO: 478616 - RNA, 19 nt, Artificial Sequence
  Description of Artificial Sequence: Synthetic oligonucleotide
uuuaaaggacaucuacuaa

SEQ ID NO: 478617 - RNA, 19 nt, Artificial Sequence
  Description of Artificial Sequence: Synthetic oligonucleotide
ugaauaucacguccccgcg

SEQ ID NO: 478618 - RNA, 19 nt, Artificial Sequence
  Description of Artificial Sequence: Synthetic oligonucleotide
ugguuguucaaucuugccu

SEQ ID NO: 478619 - RNA, 19 nt, Artificial Sequence
  Description of Artificial Sequence: Synthetic oligonucleotide
ugccauuaccuuuugauuc

SEQ ID NO: 478620 - RNA, 19 nt, Artificial Sequence
  Description of Artificial Sequence: Synthetic oligonucleotide
aguuauacuuuccaaguau

SEQ ID NO: 478621 - RNA, 19 nt, Artificial Sequence
  Description of Artificial Sequence: Synthetic oligonucleotide
acaugggucauuuggcuuc

SEQ ID NO: 478622 - RNA, 19 nt, Artificial Sequence
  Description of Artificial Sequence: Synthetic oligonucleotide
auagguguacauuauguau

SEQ ID NO: 478623 - RNA, 19 nt, Artificial Sequence
  Description of Artificial Sequence: Synthetic oligonucleotide
cagaaucuagauagaaccg

SEQ ID NO: 478624 - RNA, 19 nt, Artificial Sequence
  Description of Artificial Sequence: Synthetic oligonucleotide
gagagcuaccauuuuguag

SEQ ID NO: 478625 - RNA, 19 nt, Artificial Sequence
  Description of Artificial Sequence: Synthetic oligonucleotide
uuguauguaguuuggauuu

SEQ ID NO: 478626 - RNA, 19 nt, Artificial Sequence
  Description of Artificial Sequence: Synthetic oligonucleotide
caacuccaaaaugagaugg

SEQ ID NO: 478627 - RNA, 19 nt, Artificial Sequence
  Description of Artificial Sequence: Synthetic oligonucleotide
acacgaauuuccuggcgcc

SEQ ID NO: 478628 - RNA, 19 nt, Artificial Sequence
  Description of Artificial Sequence: Synthetic oligonucleotide
uucacacuauagaaaacac

SEQ ID NO: 478629 - RNA, 19 nt, Artificial Sequence
  Description of Artificial Sequence: Synthetic oligonucleotide
uccuugaauaucacguccc

SEQ ID NO: 478630 - RNA, 19 nt, Artificial Sequence
  Description of Artificial Sequence: Synthetic oligonucleotide
auuaugucacucuuaaguu

SEQ ID NO: 478631 - RNA, 19 nt, Artificial Sequence
  Description of Artificial Sequence: Synthetic oligonucleotide
uaaugcucagcaauacgca

SEQ ID NO: 478632 - RNA, 19 nt, Artificial Sequence
  Description of Artificial Sequence: Synthetic oligonucleotide
uccaaaaugagaugggguu

SEQ ID NO: 478633 - RNA, 19 nt, Artificial Sequence
  Description of Artificial Sequence: Synthetic oligonucleotide
aauguggcuuuguuguugu

SEQ ID NO: 478634 - RNA, 19 nt, Artificial Sequence
  Description of Artificial Sequence: Synthetic oligonucleotide
gacugaaugaauguacaug

SEQ ID NO: 478635 - RNA, 19 nt, Artificial Sequence
  Description of Artificial Sequence: Synthetic oligonucleotide
cuugcggggaccaaaguug

SEQ ID NO: 478636 - RNA, 19 nt, Artificial Sequence
  Description of Artificial Sequence: Synthetic oligonucleotide
cuagguguuuuguacuagg

SEQ ID NO: 478637 - RNA, 19 nt, Artificial Sequence
  Description of Artificial Sequence: Synthetic oligonucleotide
uauugcaagguuccuuuga

SEQ ID NO: 478638 - RNA, 19 nt, Artificial Sequence
  Description of Artificial Sequence: Synthetic oligonucleotide
gguuguucaaucuugccug

SEQ ID NO: 478639 - RNA, 19 nt, Artificial Sequence
  Description of Artificial Sequence: Synthetic oligonucleotide
augaucugcacccaagggu

SEQ ID NO: 478640 - RNA, 19 nt, Artificial Sequence
  Description of Artificial Sequence: Synthetic oligonucleotide
ugucuauguagagaguugc

SEQ ID NO: 478641 - RNA, 19 nt, Artificial Sequence
  Description of Artificial Sequence: Synthetic oligonucleotide
caucguugugucuauguag

SEQ ID NO: 478642 - RNA, 19 nt, Artificial Sequence
  Description of Artificial Sequence: Synthetic oligonucleotide
augguuguucaaucuugcc

SEQ ID NO: 478643 - RNA, 19 nt, Artificial Sequence
  Description of Artificial Sequence: Synthetic oligonucleotide
aagaguugaugcuagcguu

SEQ ID NO: 478644 - RNA, 19 nt, Artificial Sequence
  Description of Artificial Sequence: Synthetic oligonucleotide
ugugucauugccucuugug

SEQ ID NO: 478645 - RNA, 19 nt, Artificial Sequence
  Description of Artificial Sequence: Synthetic oligonucleotide
aguccuugaauaucacguc

SEQ ID NO: 478646 - RNA, 19 nt, Artificial Sequence
  Description of Artificial Sequence: Synthetic oligonucleotide
ucuaucuaaucaaugucuu

SEQ ID NO: 478647 - RNA, 19 nt, Artificial Sequence
  Description of Artificial Sequence: Synthetic oligonucleotide
ucccaauuaacuuguaaau

SEQ ID NO: 478648 - RNA, 19 nt, Artificial Sequence
  Description of Artificial Sequence: Synthetic oligonucleotide
aguguauauaauguugugu

SEQ ID NO: 478649 - RNA, 19 nt, Artificial Sequence
  Description of Artificial Sequence: Synthetic oligonucleotide
uuuccuggcgccuucgccc

SEQ ID NO: 478650 - RNA, 19 nt, Artificial Sequence
  Description of Artificial Sequence: Synthetic oligonucleotide
acucuuaaguuuuaguguu

SEQ ID NO: 478651 - RNA, 19 nt, Artificial Sequence
  Description of Artificial Sequence: Synthetic oligonucleotide
ucuuaccaauucauuuucc

SEQ ID NO: 478652 - RNA, 19 nt, Artificial Sequence
  Description of Artificial Sequence: Synthetic oligonucleotide
aucuaaucaaugucuucag

SEQ ID NO: 478653 - RNA, 19 nt, Artificial Sequence
  Description of Artificial Sequence: Synthetic oligonucleotide
uccacuucgcacaugcacu

SEQ ID NO: 478654 - RNA, 19 nt, Artificial Sequence
  Description of Artificial Sequence: Synthetic oligonucleotide
guguauauaauguugugua

SEQ ID NO: 478655 - RNA, 19 nt, Artificial Sequence
  Description of Artificial Sequence: Synthetic oligonucleotide
uuuauuacucuuggucucc

SEQ ID NO: 478656 - RNA, 19 nt, Artificial Sequence
  Description of Artificial Sequence: Synthetic oligonucleotide
uuaugagcgccuuuuacua

SEQ ID NO: 478657 - RNA, 19 nt, Artificial Sequence
  Description of Artificial Sequence: Synthetic oligonucleotide
uuauguggcucuuugcaaa

SEQ ID NO: 478658 - RNA, 19 nt, Artificial Sequence
  Description of Artificial Sequence: Synthetic oligonucleotide
uauagguguacauuaugua

SEQ ID NO: 478659 - RNA, 19 nt, Artificial Sequence
  Description of Artificial Sequence: Synthetic oligonucleotide
ugucauugccucuugugac

SEQ ID NO: 478660 - RNA, 19 nt, Artificial Sequence
  Description of Artificial Sequence: Synthetic oligonucleotide
uucaccgaguccuugaaua

SEQ ID NO: 478661 - RNA, 19 nt, Artificial Sequence
  Description of Artificial Sequence: Synthetic oligonucleotide
gaauaucacguccccgcgg

SEQ ID NO: 478662 - RNA, 19 nt, Artificial Sequence
  Description of Artificial Sequence: Synthetic oligonucleotide
aguaccaacuaguuuguau

SEQ ID NO: 478663 - RNA, 19 nt, Artificial Sequence
  Description of Artificial Sequence: Synthetic oligonucleotide
uuuaaaaccugcggagagc

SEQ ID NO: 478664 - RNA, 19 nt, Artificial Sequence
  Description of Artificial Sequence: Synthetic oligonucleotide
agauagaaccgcaggaagg

SEQ ID NO: 478665 - RNA, 19 nt, Artificial Sequence
  Description of Artificial Sequence: Synthetic oligonucleotide
aaaaugagaugggguuggc

SEQ ID NO: 478666 - RNA, 19 nt, Artificial Sequence
  Description of Artificial Sequence: Synthetic oligonucleotide
agugccucccaucagugug

SEQ ID NO: 478667 - RNA, 19 nt, Artificial Sequence
  Description of Artificial Sequence: Synthetic oligonucleotide
aaguuauacuuuccaagua

SEQ ID NO: 478668 - RNA, 19 nt, Artificial Sequence
  Description of Artificial Sequence: Synthetic oligonucleotide
uggcuuaauacuaccuaca

SEQ ID NO: 478669 - RNA, 19 nt, Artificial Sequence
  Description of Artificial Sequence: Synthetic oligonucleotide
caugguuguucaaucuugc

SEQ ID NO: 478670 - RNA, 19 nt, Artificial Sequence
  Description of Artificial Sequence: Synthetic oligonucleotide
ugcuuaugugaauggaugu

SEQ ID NO: 478671 - RNA, 19 nt, Artificial Sequence
  Description of Artificial Sequence: Synthetic oligonucleotide
augaauguacauguguuca

SEQ ID NO: 478672 - RNA, 19 nt, Artificial Sequence
  Description of Artificial Sequence: Synthetic oligonucleotide
aacuccaaaaugagauggg

SEQ ID NO: 478673 - RNA, 19 nt, Artificial Sequence
  Description of Artificial Sequence: Synthetic oligonucleotide
augagaucgcugcugcuuc

SEQ ID NO: 478674 - RNA, 19 nt, Artificial Sequence
  Description of Artificial Sequence: Synthetic oligonucleotide
uucacggucaugaccuuca

SEQ ID NO: 478675 - RNA, 19 nt, Artificial Sequence
  Description of Artificial Sequence: Synthetic oligonucleotide
ugugaauggauguggguau

SEQ ID NO: 478676 - RNA, 19 nt, Artificial Sequence
  Description of Artificial Sequence: Synthetic oligonucleotide
uauuuauacauggaaugua

SEQ ID NO: 478677 - RNA, 19 nt, Artificial Sequence
  Description of Artificial Sequence: Synthetic oligonucleotide
uguauaacucugcccuuca

SEQ ID NO: 478678 - RNA, 19 nt, Artificial Sequence
  Description of Artificial Sequence: Synthetic oligonucleotide
aauaauuguuaagacuaua

SEQ ID NO: 478679 - RNA, 19 nt, Artificial Sequence
  Description of Artificial Sequence: Synthetic oligonucleotide
aaucuagauagaaccgcag

SEQ ID NO: 478680 - RNA, 19 nt, Artificial Sequence
  Description of Artificial Sequence: Synthetic oligonucleotide
aggccuagaugacugaaug

SEQ ID NO: 478681 - RNA, 19 nt, Artificial Sequence
  Description of Artificial Sequence: Synthetic oligonucleotide
uugagugccucccaucagu

SEQ ID NO: 478682 - RNA, 19 nt, Artificial Sequence
  Description of Artificial Sequence: Synthetic oligonucleotide
uacaugagguuuauacuau

SEQ ID NO: 478683 - RNA, 19 nt, Artificial Sequence
  Description of Artificial Sequence: Synthetic oligonucleotide
ugcccuucacacuauagaa

SEQ ID NO: 478684 - RNA, 19 nt, Artificial Sequence
  Description of Artificial Sequence: Synthetic oligonucleotide
cauucacagaugccaaugc

SEQ ID NO: 478685 - RNA, 19 nt, Artificial Sequence
  Description of Artificial Sequence: Synthetic oligonucleotide
guaaaugagcuauguggug

SEQ ID NO: 478686 - RNA, 19 nt, Artificial Sequence
  Description of Artificial Sequence: Synthetic oligonucleotide
uuaccaauucauuuuccua

SEQ ID NO: 478687 - RNA, 19 nt, Artificial Sequence
  Description of Artificial Sequence: Synthetic oligonucleotide
uugcggggaccaaaguugg

SEQ ID NO: 478688 - RNA, 19 nt, Artificial Sequence
  Description of Artificial Sequence: Synthetic oligonucleotide
uuaugucacucuuaaguuu

SEQ ID NO: 478689 - RNA, 19 nt, Artificial Sequence
  Description of Artificial Sequence: Synthetic oligonucleotide
caucaguccaucccaaaug

SEQ ID NO: 478690 - RNA, 19 nt, Artificial Sequence
  Description of Artificial Sequence: Synthetic oligonucleotide
guggcuuaauacuaccuac

SEQ ID NO: 478691 - RNA, 19 nt, Artificial Sequence
  Description of Artificial Sequence: Synthetic oligonucleotide
guccuugaauaucacgucc

SEQ ID NO: 478692 - RNA, 19 nt, Artificial Sequence
  Description of Artificial Sequence: Synthetic oligonucleotide
cuacuaaaggaaaguucag

SEQ ID NO: 478693 - RNA, 19 nt, Artificial Sequence
  Description of Artificial Sequence: Synthetic oligonucleotide
cuucacacuauagaaaaca

SEQ ID NO: 478694 - RNA, 19 nt, Artificial Sequence
  Description of Artificial Sequence: Synthetic oligonucleotide
caugcaagcaggccuuucc

SEQ ID NO: 478695 - RNA, 19 nt, Artificial Sequence
  Description of Artificial Sequence: Synthetic oligonucleotide
aguguuugguauagacugc

SEQ ID NO: 478696 - RNA, 19 nt, Artificial Sequence
  Description of Artificial Sequence: Synthetic oligonucleotide
gggaagcuacccuucaucg

SEQ ID NO: 478697 - RNA, 19 nt, Artificial Sequence
  Description of Artificial Sequence: Synthetic oligonucleotide
gauggcgucauguucuuaa

SEQ ID NO: 478698 - RNA, 19 nt, Artificial Sequence
  Description of Artificial Sequence: Synthetic oligonucleotide
aaaacccgcauguucuuuu

SEQ ID NO: 478699 - RNA, 19 nt, Artificial Sequence
  Description of Artificial Sequence: Synthetic oligonucleotide
cacacaacucaagugcugg

SEQ ID NO: 478700 - RNA, 19 nt, Artificial Sequence
  Description of Artificial Sequence: Synthetic oligonucleotide
guucaacuaguuuuauaac

SEQ ID NO: 478701 - RNA, 19 nt, Artificial Sequence
  Description of Artificial Sequence: Synthetic oligonucleotide
aguucaguguggaauuuuc

SEQ ID NO: 478702 - RNA, 19 nt, Artificial Sequence
  Description of Artificial Sequence: Synthetic oligonucleotide
uguuguguauauaggugua

SEQ ID NO: 478703 - RNA, 19 nt, Artificial Sequence
  Description of Artificial Sequence: Synthetic oligonucleotide
cuugaauaucacguccccg

SEQ ID NO: 478704 - RNA, 19 nt, Artificial Sequence
  Description of Artificial Sequence: Synthetic oligonucleotide
ugcaucguugugucuaugu

SEQ ID NO: 478705 - RNA, 19 nt, Artificial Sequence
  Description of Artificial Sequence: Synthetic oligonucleotide
aaauaauuguuaagacuau

SEQ ID NO: 478706 - RNA, 19 nt, Artificial Sequence
  Description of Artificial Sequence: Synthetic oligonucleotide
cugaccuuccacuucgcac

SEQ ID NO: 478707 - RNA, 19 nt, Artificial Sequence
  Description of Artificial Sequence: Synthetic oligonucleotide
agcuucucaagccgcggac

SEQ ID NO: 478708 - RNA, 19 nt, Artificial Sequence
  Description of Artificial Sequence: Synthetic oligonucleotide
uaccuuuugauuccagguu

SEQ ID NO: 478709 - RNA, 19 nt, Artificial Sequence
  Description of Artificial Sequence: Synthetic oligonucleotide
ugauauugcucagaccuaa

SEQ ID NO: 478710 - RNA, 19 nt, Artificial Sequence
  Description of Artificial Sequence: Synthetic oligonucleotide
ggcauuuaaaacccgcaug

SEQ ID NO: 478711 - RNA, 19 nt, Artificial Sequence
  Description of Artificial Sequence: Synthetic oligonucleotide
uccuuugacagggauguac

SEQ ID NO: 478712 - RNA, 19 nt, Artificial Sequence
  Description of Artificial Sequence: Synthetic oligonucleotide
aaaccugcggagagcuacc

SEQ ID NO: 478713 - RNA, 19 nt, Artificial Sequence
  Description of Artificial Sequence: Synthetic oligonucleotide
uggcauuuaaaacccgcau

SEQ ID NO: 478714 - RNA, 19 nt, Artificial Sequence
  Description of Artificial Sequence: Synthetic oligonucleotide
gaaucuagauagaaccgca

SEQ ID NO: 478715 - RNA, 19 nt, Artificial Sequence
  Description of Artificial Sequence: Synthetic oligonucleotide
agacaugggucauuuggcu

SEQ ID NO: 478716 - RNA, 19 nt, Artificial Sequence
  Description of Artificial Sequence: Synthetic oligonucleotide
acuucuauguuaagaguug

SEQ ID NO: 478717 - RNA, 19 nt, Artificial Sequence
  Description of Artificial Sequence: Synthetic oligonucleotide
aucaucaguugucauccca

SEQ ID NO: 478718 - RNA, 19 nt, Artificial Sequence
  Description of Artificial Sequence: Synthetic oligonucleotide
cuaucuaaucaaugucuuc

SEQ ID NO: 478719 - RNA, 19 nt, Artificial Sequence
  Description of Artificial Sequence: Synthetic oligonucleotide
ugagugccucccaucagug

SEQ ID NO: 478720 - RNA, 19 nt, Artificial Sequence
  Description of Artificial Sequence: Synthetic oligonucleotide
uucuauguuaagaguugau

SEQ ID NO: 478721 - RNA, 19 nt, Artificial Sequence
  Description of Artificial Sequence: Synthetic oligonucleotide
uauuucuaaugcucagcaa

SEQ ID NO: 478722 - RNA, 19 nt, Artificial Sequence
  Description of Artificial Sequence: Synthetic oligonucleotide
ugaauguacauguguucau

SEQ ID NO: 478723 - RNA, 19 nt, Artificial Sequence
  Description of Artificial Sequence: Synthetic oligonucleotide
gaugcuagcguugcuuaug

SEQ ID NO: 478724 - RNA, 19 nt, Artificial Sequence
  Description of Artificial Sequence: Synthetic oligonucleotide
uuguuguuguggcuuaaua

SEQ ID NO: 478725 - RNA, 19 nt, Artificial Sequence
  Description of Artificial Sequence: Synthetic oligonucleotide
aucaguugucaucccaaca

SEQ ID NO: 478726 - RNA, 19 nt, Artificial Sequence
  Description of Artificial Sequence: Synthetic oligonucleotide
guuaugagcgccuuuuacu

SEQ ID NO: 478727 - RNA, 19 nt, Artificial Sequence
  Description of Artificial Sequence: Synthetic oligonucleotide
gaguccuugaauaucacgu

SEQ ID NO: 478728 - RNA, 19 nt, Artificial Sequence
  Description of Artificial Sequence: Synthetic oligonucleotide
ccaacuaguuuguauguag

SEQ ID NO: 478729 - RNA, 19 nt, Artificial Sequence
  Description of Artificial Sequence: Synthetic oligonucleotide
uucuaaugcucagcaauac

SEQ ID NO: 478730 - RNA, 19 nt, Artificial Sequence
  Description of Artificial Sequence: Synthetic oligonucleotide
aucuuuguacaguguauau

SEQ ID NO: 478731 - RNA, 19 nt, Artificial Sequence
  Description of Artificial Sequence: Synthetic oligonucleotide
agcguugcuuaugugaaug

SEQ ID NO: 478732 - RNA, 19 nt, Artificial Sequence
  Description of Artificial Sequence: Synthetic oligonucleotide
cuucucaagccgcggaccc

SEQ ID NO: 478733 - RNA, 19 nt, Artificial Sequence
  Description of Artificial Sequence: Synthetic oligonucleotide
acaacucaagugcuggaau

SEQ ID NO: 478734 - RNA, 19 nt, Artificial Sequence
  Description of Artificial Sequence: Synthetic oligonucleotide
uguaguucacggucaugac

SEQ ID NO: 478735 - RNA, 19 nt, Artificial Sequence
  Description of Artificial Sequence: Synthetic oligonucleotide
aucguugugucuauguaga

SEQ ID NO: 478736 - RNA, 19 nt, Artificial Sequence
  Description of Artificial Sequence: Synthetic oligonucleotide
agcgcauuaucugcucccc

SEQ ID NO: 478737 - RNA, 19 nt, Artificial Sequence
  Description of Artificial Sequence: Synthetic oligonucleotide
accgguuguauaacucugc

SEQ ID NO: 478738 - RNA, 19 nt, Artificial Sequence
  Description of Artificial Sequence: Synthetic oligonucleotide
uguagggaaaaugcucaac

SEQ ID NO: 478739 - RNA, 19 nt, Artificial Sequence
  Description of Artificial Sequence: Synthetic oligonucleotide
guuaagauacagcgcauua

SEQ ID NO: 478740 - RNA, 19 nt, Artificial Sequence
  Description of Artificial Sequence: Synthetic oligonucleotide
ugucacucuuaaguuuuag

SEQ ID NO: 478741 - RNA, 19 nt, Artificial Sequence
  Description of Artificial Sequence: Synthetic oligonucleotide
ggauguggguauugcaagg

SEQ ID NO: 478742 - RNA, 19 nt, Artificial Sequence
  Description of Artificial Sequence: Synthetic oligonucleotide
uugaugcuagcguugcuua

SEQ ID NO: 478743 - RNA, 19 nt, Artificial Sequence
  Description of Artificial Sequence: Synthetic oligonucleotide
gaccaaaguuggcuggaug

SEQ ID NO: 478744 - RNA, 19 nt, Artificial Sequence
  Description of Artificial Sequence: Synthetic oligonucleotide
auugagugccucccaucag

SEQ ID NO: 478745 - RNA, 19 nt, Artificial Sequence
  Description of Artificial Sequence: Synthetic oligonucleotide
ucccuuuagcugcacugug

SEQ ID NO: 478746 - RNA, 19 nt, Artificial Sequence
  Description of Artificial Sequence: Synthetic oligonucleotide
cccuucaucggcauggcgg

SEQ ID NO: 478747 - RNA, 19 nt, Artificial Sequence
  Description of Artificial Sequence: Synthetic oligonucleotide
ggcgucauguucuuaaaca

SEQ ID NO: 478748 - RNA, 19 nt, Artificial Sequence
  Description of Artificial Sequence: Synthetic oligonucleotide
gcgucauguucuuaaacag

SEQ ID NO: 478749 - RNA, 19 nt, Artificial Sequence
  Description of Artificial Sequence: Synthetic oligonucleotide
uaacacaaggaagcuuggc

SEQ ID NO: 478750 - RNA, 19 nt, Artificial Sequence
  Description of Artificial Sequence: Synthetic oligonucleotide
uauaggccuagaugacuga

SEQ ID NO: 478751 - RNA, 19 nt, Artificial Sequence
  Description of Artificial Sequence: Synthetic oligonucleotide
cauugagugccucccauca

SEQ ID NO: 478752 - RNA, 19 nt, Artificial Sequence
  Description of Artificial Sequence: Synthetic oligonucleotide
acuugcggggaccaaaguu

SEQ ID NO: 478753 - RNA, 19 nt, Artificial Sequence
  Description of Artificial Sequence: Synthetic oligonucleotide
gcuagcguugcuuauguga

SEQ ID NO: 478754 - RNA, 19 nt, Artificial Sequence
  Description of Artificial Sequence: Synthetic oligonucleotide
cuagcguugcuuaugugaa

SEQ ID NO: 478755 - RNA, 19 nt, Artificial Sequence
  Description of Artificial Sequence: Synthetic oligonucleotide
auaacacaaggaagcuugg

SEQ ID NO: 478756 - RNA, 19 nt, Artificial Sequence
  Description of Artificial Sequence: Synthetic oligonucleotide
uguguaugcccagaauuau

SEQ ID NO: 478757 - RNA, 19 nt, Artificial Sequence
  Description of Artificial Sequence: Synthetic oligonucleotide
ggcgccuucgcccagcucc

SEQ ID NO: 478758 - RNA, 19 nt, Artificial Sequence
  Description of Artificial Sequence: Synthetic oligonucleotide
ggucaugaccuucaccgag

SEQ ID NO: 478759 - RNA, 19 nt, Artificial Sequence
  Description of Artificial Sequence: Synthetic oligonucleotide
ugcucaacauuaugucacu

SEQ ID NO: 478760 - RNA, 19 nt, Artificial Sequence
  Description of Artificial Sequence: Synthetic oligonucleotide
uccaaacuucuauguuaag

SEQ ID NO: 478761 - RNA, 19 nt, Artificial Sequence
  Description of Artificial Sequence: Synthetic oligonucleotide
gcuuaauacuaccuacaug

SEQ ID NO: 478762 - RNA, 19 nt, Artificial Sequence
  Description of Artificial Sequence: Synthetic oligonucleotide
cuugggaccgguuguauaa

SEQ ID NO: 478763 - RNA, 19 nt, Artificial Sequence
  Description of Artificial Sequence: Synthetic oligonucleotide
uuguauaacucugcccuuc

SEQ ID NO: 478764 - RNA, 19 nt, Artificial Sequence
  Description of Artificial Sequence: Synthetic oligonucleotide
uucgcacaugcacucccgc

SEQ ID NO: 478765 - RNA, 19 nt, Artificial Sequence
  Description of Artificial Sequence: Synthetic oligonucleotide
augcuagcguugcuuaugu

SEQ ID NO: 478766 - RNA, 19 nt, Artificial Sequence
  Description of Artificial Sequence: Synthetic oligonucleotide
ggaagcuacccuucaucgg

SEQ ID NO: 478767 - RNA, 19 nt, Artificial Sequence
  Description of Artificial Sequence: Synthetic oligonucleotide
gagaaucugcaucguugug

SEQ ID NO: 478768 - RNA, 19 nt, Artificial Sequence
  Description of Artificial Sequence: Synthetic oligonucleotide
uaugagcgccuuuuacuaa

SEQ ID NO: 478769 - RNA, 19 nt, Artificial Sequence
  Description of Artificial Sequence: Synthetic oligonucleotide
uguuaagauacagcgcauu

SEQ ID NO: 478770 - RNA, 19 nt, Artificial Sequence
  Description of Artificial Sequence: Synthetic oligonucleotide
augagcgccuuuuacuaaa

SEQ ID NO: 478771 - RNA, 19 nt, Artificial Sequence
  Description of Artificial Sequence: Synthetic oligonucleotide
gggaaaaugcucaacauua

SEQ ID NO: 478772 - RNA, 19 nt, Artificial Sequence
  Description of Artificial Sequence: Synthetic oligonucleotide
ugagcuaugugguggcauu

SEQ ID NO: 478773 - RNA, 19 nt, Artificial Sequence
  Description of Artificial Sequence: Synthetic oligonucleotide
guauuuauacauggaaugu

SEQ ID NO: 478774 - RNA, 19 nt, Artificial Sequence
  Description of Artificial Sequence: Synthetic oligonucleotide
ugccugggguguuuuaaga

SEQ ID NO: 478775 - RNA, 19 nt, Artificial Sequence
  Description of Artificial Sequence: Synthetic oligonucleotide
gaauuuccuggcgccuucg

SEQ ID NO: 478776 - RNA, 19 nt, Artificial Sequence
  Description of Artificial Sequence: Synthetic oligonucleotide
gccauuaccuuuugauucc

SEQ ID NO: 478777 - RNA, 19 nt, Artificial Sequence
  Description of Artificial Sequence: Synthetic oligonucleotide
gcauuuaaaacccgcaugu

SEQ ID NO: 478778 - RNA, 19 nt, Artificial Sequence
  Description of Artificial Sequence: Synthetic oligonucleotide
agaguugaugcuagcguug

SEQ ID NO: 478779 - RNA, 19 nt, Artificial Sequence
  Description of Artificial Sequence: Synthetic oligonucleotide
gaaugaauguacauguguu

SEQ ID NO: 478780 - RNA, 19 nt, Artificial Sequence
  Description of Artificial Sequence: Synthetic oligonucleotide
uuauuacucuuggucucca

SEQ ID NO: 478781 - RNA, 19 nt, Artificial Sequence
  Description of Artificial Sequence: Synthetic oligonucleotide
cacgucuaccagcaccugc

SEQ ID NO: 478782 - RNA, 19 nt, Artificial Sequence
  Description of Artificial Sequence: Synthetic oligonucleotide
augccaaugcacacacaac

SEQ ID NO: 478783 - RNA, 19 nt, Artificial Sequence
  Description of Artificial Sequence: Synthetic oligonucleotide
cuauccuucuccccauguc

SEQ ID NO: 478784 - RNA, 19 nt, Artificial Sequence
  Description of Artificial Sequence: Synthetic oligonucleotide
acuauaguccucagugccu

SEQ ID NO: 478785 - RNA, 19 nt, Artificial Sequence
  Description of Artificial Sequence: Synthetic oligonucleotide
uugugucuauguagagagu

SEQ ID NO: 478786 - RNA, 19 nt, Artificial Sequence
  Description of Artificial Sequence: Synthetic oligonucleotide
gguaaaggcgccagggcag

SEQ ID NO: 478787 - RNA, 19 nt, Artificial Sequence
  Description of Artificial Sequence: Synthetic oligonucleotide
ugggaccgguuguauaacu

SEQ ID NO: 478788 - RNA, 19 nt, Artificial Sequence
  Description of Artificial Sequence: Synthetic oligonucleotide
gugucuauguagagaguug

SEQ ID NO: 478789 - RNA, 19 nt, Artificial Sequence
  Description of Artificial Sequence: Synthetic oligonucleotide
guacuugcggggaccaaag

SEQ ID NO: 478790 - RNA, 19 nt, Artificial Sequence
  Description of Artificial Sequence: Synthetic oligonucleotide
guaaaggcgccagggcagg

SEQ ID NO: 478791 - RNA, 19 nt, Artificial Sequence
  Description of Artificial Sequence: Synthetic oligonucleotide
gguggcauuuaaaacccgc

SEQ ID NO: 478792 - RNA, 19 nt, Artificial Sequence
  Description of Artificial Sequence: Synthetic oligonucleotide
uacuaccuacaugagguuu

SEQ ID NO: 478793 - RNA, 19 nt, Artificial Sequence
  Description of Artificial Sequence: Synthetic oligonucleotide
cagcgugcggcggauaggg

SEQ ID NO: 478794 - RNA, 19 nt, Artificial Sequence
  Description of Artificial Sequence: Synthetic oligonucleotide
ucuugggaccgguuguaua

SEQ ID NO: 478795 - RNA, 19 nt, Artificial Sequence
  Description of Artificial Sequence: Synthetic oligonucleotide
acacaacucaagugcugga

SEQ ID NO: 478796 - RNA, 19 nt, Artificial Sequence
  Description of Artificial Sequence: Synthetic oligonucleotide
ugagcgccuuuuacuaaaa

SEQ ID NO: 478797 - RNA, 19 nt, Artificial Sequence
  Description of Artificial Sequence: Synthetic oligonucleotide
aguacuugcggggaccaaa

SEQ ID NO: 478798 - RNA, 19 nt, Artificial Sequence
  Description of Artificial Sequence: Synthetic oligonucleotide
uucucaagccgcggacccg

SEQ ID NO: 478799 - RNA, 19 nt, Artificial Sequence
  Description of Artificial Sequence: Synthetic oligonucleotide
ucauugccucuugugacaa

SEQ ID NO: 478800 - RNA, 19 nt, Artificial Sequence
  Description of Artificial Sequence: Synthetic oligonucleotide
acgcacuuucaguuaauuu

SEQ ID NO: 478801 - RNA, 19 nt, Artificial Sequence
  Description of Artificial Sequence: Synthetic oligonucleotide
ucugcaucguugugucuau

SEQ ID NO: 478802 - RNA, 19 nt, Artificial Sequence
  Description of Artificial Sequence: Synthetic oligonucleotide
agggauguacuggugaauu

SEQ ID NO: 478803 - RNA, 19 nt, Artificial Sequence
  Description of Artificial Sequence: Synthetic oligonucleotide
gcuuaugugaauggaugug

SEQ ID NO: 478804 - RNA, 19 nt, Artificial Sequence
  Description of Artificial Sequence: Synthetic oligonucleotide
caaccugagagugaguuua

SEQ ID NO: 478805 - RNA, 19 nt, Artificial Sequence
  Description of Artificial Sequence: Synthetic oligonucleotide
agaaccgcaggaaggguga

SEQ ID NO: 478806 - RNA, 19 nt, Artificial Sequence
  Description of Artificial Sequence: Synthetic oligonucleotide
ugaugcuagcguugcuuau

SEQ ID NO: 478807 - RNA, 19 nt, Artificial Sequence
  Description of Artificial Sequence: Synthetic oligonucleotide
auguagggaaaaugcucaa

SEQ ID NO: 478808 - RNA, 19 nt, Artificial Sequence
  Description of Artificial Sequence: Synthetic oligonucleotide
acuaccuacaugagguuua

SEQ ID NO: 478809 - RNA, 19 nt, Artificial Sequence
  Description of Artificial Sequence: Synthetic oligonucleotide
cucagaccuaagugcuggc

SEQ ID NO: 478810 - RNA, 19 nt, Artificial Sequence
  Description of Artificial Sequence: Synthetic oligonucleotide
gugcaugguuaugagcgcc

SEQ ID NO: 478811 - RNA, 19 nt, Artificial Sequence
  Description of Artificial Sequence: Synthetic oligonucleotide
cacaugcacucccgcaagc

SEQ ID NO: 478812 - RNA, 19 nt, Artificial Sequence
  Description of Artificial Sequence: Synthetic oligonucleotide
uccccgugcguguuguagu

SEQ ID NO: 478813 - RNA, 19 nt, Artificial Sequence
  Description of Artificial Sequence: Synthetic oligonucleotide
cguguuguaguucacgguc

SEQ ID NO: 478814 - RNA, 19 nt, Artificial Sequence
  Description of Artificial Sequence: Synthetic oligonucleotide
augagaugggguuggccua

SEQ ID NO: 478815 - RNA, 19 nt, Artificial Sequence
  Description of Artificial Sequence: Synthetic oligonucleotide
guggcauuuaaaacccgca

SEQ ID NO: 478816 - RNA, 19 nt, Artificial Sequence
  Description of Artificial Sequence: Synthetic oligonucleotide
caaauuccaucaguccauc

SEQ ID NO: 478817 - RNA, 19 nt, Artificial Sequence
  Description of Artificial Sequence: Synthetic oligonucleotide
gcguugcuuaugugaaugg

SEQ ID NO: 478818 - RNA, 19 nt, Artificial Sequence
  Description of Artificial Sequence: Synthetic oligonucleotide
aggaaaguucaguguggaa

SEQ ID NO: 478819 - RNA, 19 nt, Artificial Sequence
  Description of Artificial Sequence: Synthetic oligonucleotide
auacagcgcauuaucugcu

SEQ ID NO: 478820 - RNA, 19 nt, Artificial Sequence
  Description of Artificial Sequence: Synthetic oligonucleotide
caguguucaacuaguuuua

SEQ ID NO: 478821 - RNA, 19 nt, Artificial Sequence
  Description of Artificial Sequence: Synthetic oligonucleotide
cccaauuaacuuguaaauc

SEQ ID NO: 478822 - RNA, 19 nt, Artificial Sequence
  Description of Artificial Sequence: Synthetic oligonucleotide
ccuugaauaucacgucccc

SEQ ID NO: 478823 - RNA, 19 nt, Artificial Sequence
  Description of Artificial Sequence: Synthetic oligonucleotide
ucaagccgcggacccgcgc

SEQ ID NO: 478824 - RNA, 19 nt, Artificial Sequence
  Description of Artificial Sequence: Synthetic oligonucleotide
gcgccuuuuacuaaaaucu

SEQ ID NO: 478825 - RNA, 19 nt, Artificial Sequence
  Description of Artificial Sequence: Synthetic oligonucleotide
gauguggguauugcaaggu

SEQ ID NO: 478826 - RNA, 19 nt, Artificial Sequence
  Description of Artificial Sequence: Synthetic oligonucleotide
caacuaguuuguauguagu

SEQ ID NO: 478827 - RNA, 19 nt, Artificial Sequence
  Description of Artificial Sequence: Synthetic oligonucleotide
ugcuagcguugcuuaugug

SEQ ID NO: 478828 - RNA, 19 nt, Artificial Sequence
  Description of Artificial Sequence: Synthetic oligonucleotide
caacauuaugucacucuua

SEQ ID NO: 478829 - RNA, 19 nt, Artificial Sequence
  Description of Artificial Sequence: Synthetic oligonucleotide
uaaaacccgcauguucuuu

SEQ ID NO: 478830 - RNA, 19 nt, Artificial Sequence
  Description of Artificial Sequence: Synthetic oligonucleotide
ccuagaacagggagcugcc

SEQ ID NO: 478831 - RNA, 19 nt, Artificial Sequence
  Description of Artificial Sequence: Synthetic oligonucleotide
ugcacccaaggguucuuau

SEQ ID NO: 478832 - RNA, 19 nt, Artificial Sequence
  Description of Artificial Sequence: Synthetic oligonucleotide
aagcuacccuucaucggca

SEQ ID NO: 478833 - RNA, 19 nt, Artificial Sequence
  Description of Artificial Sequence: Synthetic oligonucleotide
ggucuccacgucuaccagc

SEQ ID NO: 478834 - RNA, 19 nt, Artificial Sequence
  Description of Artificial Sequence: Synthetic oligonucleotide
caaaguuggcuggaugaga

SEQ ID NO: 478835 - RNA, 19 nt, Artificial Sequence
  Description of Artificial Sequence: Synthetic oligonucleotide
aaccgcaggaagggugaug

SEQ ID NO: 478836 - RNA, 19 nt, Artificial Sequence
  Description of Artificial Sequence: Synthetic oligonucleotide
auagaaccgcaggaagggu

SEQ ID NO: 478837 - RNA, 19 nt, Artificial Sequence
  Description of Artificial Sequence: Synthetic oligonucleotide
aguguucaacuaguuuuau

SEQ ID NO: 478838 - RNA, 19 nt, Artificial Sequence
  Description of Artificial Sequence: Synthetic oligonucleotide
ccaaaaugagaugggguug

SEQ ID NO: 478839 - RNA, 19 nt, Artificial Sequence
  Description of Artificial Sequence: Synthetic oligonucleotide
uacgcacuuucaguuaauu

SEQ ID NO: 478840 - RNA, 19 nt, Artificial Sequence
  Description of Artificial Sequence: Synthetic oligonucleotide
guuguaguucacggucaug

SEQ ID NO: 478841 - RNA, 19 nt, Artificial Sequence
  Description of Artificial Sequence: Synthetic oligonucleotide
gccuagaugacugaaugaa

SEQ ID NO: 478842 - RNA, 19 nt, Artificial Sequence
  Description of Artificial Sequence: Synthetic oligonucleotide
guuuuauaacugagaagcu

SEQ ID NO: 478843 - RNA, 19 nt, Artificial Sequence
  Description of Artificial Sequence: Synthetic oligonucleotide
ggagaaucugcaucguugu

SEQ ID NO: 478844 - RNA, 19 nt, Artificial Sequence
  Description of Artificial Sequence: Synthetic oligonucleotide
augagcuaugugguggcau

SEQ ID NO: 478845 - RNA, 19 nt, Artificial Sequence
  Description of Artificial Sequence: Synthetic oligonucleotide
uugggaccgguuguauaac

SEQ ID NO: 478846 - RNA, 19 nt, Artificial Sequence
  Description of Artificial Sequence: Synthetic oligonucleotide
gaugagaucgcugcugcuu

SEQ ID NO: 478847 - RNA, 19 nt, Artificial Sequence
  Description of Artificial Sequence: Synthetic oligonucleotide
uggguauugcaagguuccu

SEQ ID NO: 478848 - RNA, 19 nt, Artificial Sequence
  Description of Artificial Sequence: Synthetic oligonucleotide
aaccugcggagagcuacca

SEQ ID NO: 478849 - RNA, 19 nt, Artificial Sequence
  Description of Artificial Sequence: Synthetic oligonucleotide
ggugauggcgucauguucu

SEQ ID NO: 478850 - RNA, 19 nt, Artificial Sequence
  Description of Artificial Sequence: Synthetic oligonucleotide
uagcguugcuuaugugaau

SEQ ID NO: 478851 - RNA, 19 nt, Artificial Sequence
  Description of Artificial Sequence: Synthetic oligonucleotide
cuccccgugcguguuguag

SEQ ID NO: 478852 - RNA, 19 nt, Artificial Sequence
  Description of Artificial Sequence: Synthetic oligonucleotide
gcggauagggaagcuaccc

SEQ ID NO: 478853 - RNA, 19 nt, Artificial Sequence
  Description of Artificial Sequence: Synthetic oligonucleotide
cagagaauuccaucaaauu

SEQ ID NO: 478854 - RNA, 19 nt, Artificial Sequence
  Description of Artificial Sequence: Synthetic oligonucleotide
ucccuguguaaaugagcua

SEQ ID NO: 478855 - RNA, 19 nt, Artificial Sequence
  Description of Artificial Sequence: Synthetic oligonucleotide
cccaaaugauauugcucag

SEQ ID NO: 478856 - RNA, 19 nt, Artificial Sequence
  Description of Artificial Sequence: Synthetic oligonucleotide
ccuguguaaaugagcuaug

SEQ ID NO: 478857 - RNA, 19 nt, Artificial Sequence
  Description of Artificial Sequence: Synthetic oligonucleotide
auaucacguccccgcggcu

SEQ ID NO: 478858 - RNA, 19 nt, Artificial Sequence
  Description of Artificial Sequence: Synthetic oligonucleotide
guuguucaaucuugccugu

SEQ ID NO: 478859 - RNA, 19 nt, Artificial Sequence
  Description of Artificial Sequence: Synthetic oligonucleotide
guauauagguguacauuau

SEQ ID NO: 478860 - RNA, 19 nt, Artificial Sequence
  Description of Artificial Sequence: Synthetic oligonucleotide
caccgaguccuugaauauc

SEQ ID NO: 478861 - RNA, 19 nt, Artificial Sequence
  Description of Artificial Sequence: Synthetic oligonucleotide
cacuucgcacaugcacucc

SEQ ID NO: 478862 - RNA, 19 nt, Artificial Sequence
  Description of Artificial Sequence: Synthetic oligonucleotide
ccgcaagcaguacuugcgg

SEQ ID NO: 478863 - RNA, 19 nt, Artificial Sequence
  Description of Artificial Sequence: Synthetic oligonucleotide
gugccucccaucagugugc

SEQ ID NO: 478864 - RNA, 19 nt, Artificial Sequence
  Description of Artificial Sequence: Synthetic oligonucleotide
cuucaucggcauggcggcg

SEQ ID NO: 478865 - RNA, 19 nt, Artificial Sequence
  Description of Artificial Sequence: Synthetic oligonucleotide
gaccuaagugcuggcuuuc

SEQ ID NO: 478866 - RNA, 19 nt, Artificial Sequence
  Description of Artificial Sequence: Synthetic oligonucleotide
uucuugggaccgguuguau

SEQ ID NO: 478867 - RNA, 19 nt, Artificial Sequence
  Description of Artificial Sequence: Synthetic oligonucleotide
augauauugcucagaccua

SEQ ID NO: 478868 - RNA, 19 nt, Artificial Sequence
  Description of Artificial Sequence: Synthetic oligonucleotide
cgguuguauaacucugccc

SEQ ID NO: 478869 - RNA, 19 nt, Artificial Sequence
  Description of Artificial Sequence: Synthetic oligonucleotide
guucacggucaugaccuuc

SEQ ID NO: 478870 - RNA, 19 nt, Artificial Sequence
  Description of Artificial Sequence: Synthetic oligonucleotide
cccucaugguuguucaauc

SEQ ID NO: 478871 - RNA, 19 nt, Artificial Sequence
  Description of Artificial Sequence: Synthetic oligonucleotide
agcagcaaccugagaguga

SEQ ID NO: 478872 - RNA, 19 nt, Artificial Sequence
  Description of Artificial Sequence: Synthetic oligonucleotide
accuaagugcuggcuuuca

SEQ ID NO: 478873 - RNA, 19 nt, Artificial Sequence
  Description of Artificial Sequence: Synthetic oligonucleotide
ggcuuaauacuaccuacau

SEQ ID NO: 478874 - RNA, 19 nt, Artificial Sequence
  Description of Artificial Sequence: Synthetic oligonucleotide
acgaauuuccuggcgccuu

SEQ ID NO: 478875 - RNA, 19 nt, Artificial Sequence
  Description of Artificial Sequence: Synthetic oligonucleotide
ccuagguguuuuguacuag

SEQ ID NO: 478876 - RNA, 19 nt, Artificial Sequence
  Description of Artificial Sequence: Synthetic oligonucleotide
ccacuucgcacaugcacuc

SEQ ID NO: 478877 - RNA, 19 nt, Artificial Sequence
  Description of Artificial Sequence: Synthetic oligonucleotide
cgcauuaucugcuccccuc

SEQ ID NO: 478878 - RNA, 19 nt, Artificial Sequence
  Description of Artificial Sequence: Synthetic oligonucleotide
aguucacggucaugaccuu

SEQ ID NO: 478879 - RNA, 19 nt, Artificial Sequence
  Description of Artificial Sequence: Synthetic oligonucleotide
accugcggagagcuaccau

SEQ ID NO: 478880 - RNA, 19 nt, Artificial Sequence
  Description of Artificial Sequence: Synthetic oligonucleotide
gcaucguugugucuaugua

SEQ ID NO: 478881 - RNA, 19 nt, Artificial Sequence
  Description of Artificial Sequence: Synthetic oligonucleotide
ggagagcuaccauuuugua

SEQ ID NO: 478882 - RNA, 19 nt, Artificial Sequence
  Description of Artificial Sequence: Synthetic oligonucleotide
accugagagugaguuuaaa

SEQ ID NO: 478883 - RNA, 19 nt, Artificial Sequence
  Description of Artificial Sequence: Synthetic oligonucleotide
cgcacuuucaguuaauuuu

SEQ ID NO: 478884 - RNA, 19 nt, Artificial Sequence
  Description of Artificial Sequence: Synthetic oligonucleotide
gucaugaccuucaccgagu

SEQ ID NO: 478885 - RNA, 19 nt, Artificial Sequence
  Description of Artificial Sequence: Synthetic oligonucleotide
gucuauguagagaguugcu

SEQ ID NO: 478886 - RNA, 19 nt, Artificial Sequence
  Description of Artificial Sequence: Synthetic oligonucleotide
caguugcuaaaugaauccu

SEQ ID NO: 478887 - RNA, 19 nt, Artificial Sequence
  Description of Artificial Sequence: Synthetic oligonucleotide
cgugcggcggauagggaag

SEQ ID NO: 478888 - RNA, 19 nt, Artificial Sequence
  Description of Artificial Sequence: Synthetic oligonucleotide
cggcggauagggaagcuac

SEQ ID NO: 478889 - RNA, 19 nt, Artificial Sequence
  Description of Artificial Sequence: Synthetic oligonucleotide
gagugccucccaucagugu

SEQ ID NO: 478890 - RNA, 19 nt, Artificial Sequence
  Description of Artificial Sequence: Synthetic oligonucleotide
cauuaucugcuccccuccu

SEQ ID NO: 478891 - RNA, 19 nt, Artificial Sequence
  Description of Artificial Sequence: Synthetic oligonucleotide
ggcggauagggaagcuacc

SEQ ID NO: 478892 - RNA, 19 nt, Artificial Sequence
  Description of Artificial Sequence: Synthetic oligonucleotide
auacgcacuuucaguuaau

SEQ ID NO: 478893 - RNA, 19 nt, Artificial Sequence
  Description of Artificial Sequence: Synthetic oligonucleotide
cagaccuaagugcuggcuu

SEQ ID NO: 478894 - RNA, 19 nt, Artificial Sequence
  Description of Artificial Sequence: Synthetic oligonucleotide
gugcggcggauagggaagc

SEQ ID NO: 478895 - RNA, 19 nt, Artificial Sequence
  Description of Artificial Sequence: Synthetic oligonucleotide
agcuccccgugcguguugu

SEQ ID NO: 478896 - RNA, 19 nt, Artificial Sequence
  Description of Artificial Sequence: Synthetic oligonucleotide
cuguuaagauacagcgcau

SEQ ID NO: 478897 - RNA, 19 nt, Artificial Sequence
  Description of Artificial Sequence: Synthetic oligonucleotide
ggccuagguguuuuguacu

SEQ ID NO: 478898 - RNA, 19 nt, Artificial Sequence
  Description of Artificial Sequence: Synthetic oligonucleotide
ccgugcguguuguaguuca

SEQ ID NO: 478899 - RNA, 19 nt, Artificial Sequence
  Description of Artificial Sequence: Synthetic oligonucleotide
gcucaacauuaugucacuc

SEQ ID NO: 478900 - RNA, 19 nt, Artificial Sequence
  Description of Artificial Sequence: Synthetic oligonucleotide
cuucuccccauguccuuua

SEQ ID NO: 478901 - RNA, 19 nt, Artificial Sequence
  Description of Artificial Sequence: Synthetic oligonucleotide
gccuagguguuuuguacua

SEQ ID NO: 478902 - RNA, 19 nt, Artificial Sequence
  Description of Artificial Sequence: Synthetic oligonucleotide
ccauguauccaaacuucua

SEQ ID NO: 478903 - RNA, 19 nt, Artificial Sequence
  Description of Artificial Sequence: Synthetic oligonucleotide
ugcggcggauagggaagcu

SEQ ID NO: 478904 - RNA, 19 nt, Artificial Sequence
  Description of Artificial Sequence: Synthetic oligonucleotide
gagcgccuuuuacuaaaau

SEQ ID NO: 478905 - RNA, 19 nt, Artificial Sequence
  Description of Artificial Sequence: Synthetic oligonucleotide
uaccuacaugagguuuaua

SEQ ID NO: 478906 - RNA, 19 nt, Artificial Sequence
  Description of Artificial Sequence: Synthetic oligonucleotide
gcgugcggcggauagggaa

SEQ ID NO: 478907 - RNA, 19 nt, Artificial Sequence
  Description of Artificial Sequence: Synthetic oligonucleotide
cacucccgcaagcaguacu

SEQ ID NO: 478908 - RNA, 19 nt, Artificial Sequence
  Description of Artificial Sequence: Synthetic oligonucleotide
ccuuuugauuccagguuua

SEQ ID NO: 478909 - RNA, 19 nt, Artificial Sequence
  Description of Artificial Sequence: Synthetic oligonucleotide
cuaccauuuuguagcuuuu

SEQ ID NO: 478910 - RNA, 19 nt, Artificial Sequence
  Description of Artificial Sequence: Synthetic oligonucleotide
cugcaucguugugucuaug

SEQ ID NO: 478911 - RNA, 19 nt, Artificial Sequence
  Description of Artificial Sequence: Synthetic oligonucleotide
augucacucuuaaguuuua

SEQ ID NO: 478912 - RNA, 19 nt, Artificial Sequence
  Description of Artificial Sequence: Synthetic oligonucleotide
gcagcgugcggcggauagg

SEQ ID NO: 478913 - RNA, 19 nt, Artificial Sequence
  Description of Artificial Sequence: Synthetic oligonucleotide
gcaguacuugcggggacca

SEQ ID NO: 478914 - RNA, 19 nt, Artificial Sequence
  Description of Artificial Sequence: Synthetic oligonucleotide
ccuagaugacugaaugaau

SEQ ID NO: 478915 - RNA, 19 nt, Artificial Sequence
  Description of Artificial Sequence: Synthetic oligonucleotide
agccgcggacccgcgcguc

SEQ ID NO: 478916 - RNA, 19 nt, Artificial Sequence
  Description of Artificial Sequence: Synthetic oligonucleotide
gcguguuguaguucacggu

SEQ ID NO: 478917 - RNA, 19 nt, Artificial Sequence
  Description of Artificial Sequence: Synthetic oligonucleotide
gagcuaugugguggcauuu

SEQ ID NO: 478918 - RNA, 19 nt, Artificial Sequence
  Description of Artificial Sequence: Synthetic oligonucleotide
cacgaauuuccuggcgccu

SEQ ID NO: 478919 - RNA, 19 nt, Artificial Sequence
  Description of Artificial Sequence: Synthetic oligonucleotide
cuaccuacaugagguuuau

SEQ ID NO: 478920 - RNA, 19 nt, Artificial Sequence
  Description of Artificial Sequence: Synthetic oligonucleotide
cucugcccuucacacuaua

SEQ ID NO: 478921 - RNA, 19 nt, Artificial Sequence
  Description of Artificial Sequence: Synthetic oligonucleotide
ccugcggagagcuaccauu

SEQ ID NO: 478922 - RNA, 19 nt, Artificial Sequence
  Description of Artificial Sequence: Synthetic oligonucleotide
gugaauggauguggguauu

SEQ ID NO: 478923 - RNA, 19 nt, Artificial Sequence
  Description of Artificial Sequence: Synthetic oligonucleotide
cccuuuagcugcacugugu

SEQ ID NO: 478924 - RNA, 19 nt, Artificial Sequence
  Description of Artificial Sequence: Synthetic oligonucleotide
gcaugcaagcaggccuuuc

SEQ ID NO: 478925 - RNA, 19 nt, Artificial Sequence
  Description of Artificial Sequence: Synthetic oligonucleotide
ccgcaggaagggugauggc

SEQ ID NO: 478926 - RNA, 19 nt, Artificial Sequence
  Description of Artificial Sequence: Synthetic oligonucleotide
cccuauccuucuccccaug

SEQ ID NO: 478927 - RNA, 19 nt, Artificial Sequence
  Description of Artificial Sequence: Synthetic oligonucleotide
cgugcguguuguaguucac

SEQ ID NO: 478928 - RNA, 19 nt, Artificial Sequence
  Description of Artificial Sequence: Synthetic oligonucleotide
agcgugcggcggauaggga

SEQ ID NO: 478929 - RNA, 19 nt, Artificial Sequence
  Description of Artificial Sequence: Synthetic oligonucleotide
ccccgcggcucaaguacug

SEQ ID NO: 478930 - RNA, 19 nt, Artificial Sequence
  Description of Artificial Sequence: Synthetic oligonucleotide
gcgccuucgcccagcuccc

SEQ ID NO: 478931 - RNA, 19 nt, Artificial Sequence
  Description of Artificial Sequence: Synthetic oligonucleotide
cauugccucuugugacaau

SEQ ID NO: 478932 - RNA, 19 nt, Artificial Sequence
  Description of Artificial Sequence: Synthetic oligonucleotide
gaaccgcaggaagggugau

SEQ ID NO: 478933 - RNA, 19 nt, Artificial Sequence
  Description of Artificial Sequence: Synthetic oligonucleotide
ccuggcgccuucgcccagc

SEQ ID NO: 478934 - RNA, 19 nt, Artificial Sequence
  Description of Artificial Sequence: Synthetic oligonucleotide
gcgcauuaucugcuccccu

SEQ ID NO: 478935 - RNA, 19 nt, Artificial Sequence
  Description of Artificial Sequence: Synthetic oligonucleotide
gcggcggauagggaagcua

SEQ ID NO: 478936 - RNA, 19 nt, Artificial Sequence
  Description of Artificial Sequence: Synthetic oligonucleotide
cccgugcguguuguaguuc

SEQ ID NO: 478937 - RNA, 19 nt, Artificial Sequence
  Description of Artificial Sequence: Synthetic oligonucleotide
ccacgucuaccagcaccug

SEQ ID NO: 478938 - RNA, 19 nt, Artificial Sequence
  Description of Artificial Sequence: Synthetic oligonucleotide
gcacucccgcaagcaguac

SEQ ID NO: 478939 - RNA, 19 nt, Artificial Sequence
  Description of Artificial Sequence: Synthetic oligonucleotide
cuggcgccuucgcccagcu

SEQ ID NO: 478940 - RNA, 19 nt, Artificial Sequence
  Description of Artificial Sequence: Synthetic oligonucleotide
ccuucgcccagcuccccgu

SEQ ID NO: 478941 - RNA, 19 nt, Artificial Sequence
  Description of Artificial Sequence: Synthetic oligonucleotide
ccccucaugguuguucaau

SEQ ID NO: 478942 - RNA, 19 nt, Artificial Sequence
  Description of Artificial Sequence: Synthetic oligonucleotide
ccgcggacccgcgcgucuc

SEQ ID NO: 478943 - RNA, 19 nt, Artificial Sequence
  Description of Artificial Sequence: Synthetic oligonucleotide
ccccgugcguguuguaguu

SEQ ID NO: 478944 - RNA, 19 nt, Artificial Sequence
  Description of Artificial Sequence: Synthetic oligonucleotide
gcuccccgugcguguugua

SEQ ID NO: 478945 - RNA, 19 nt, Artificial Sequence
  Description of Artificial Sequence: Synthetic oligonucleotide
aaauguagaaucaucacgc

SEQ ID NO: 478946 - RNA, 19 nt, Artificial Sequence
  Description of Artificial Sequence: Synthetic oligonucleotide
aaucuuucaauucccaaac

SEQ ID NO: 478947 - RNA, 19 nt, Artificial Sequence
  Description of Artificial Sequence: Synthetic oligonucleotide
aaaagcacuaacuuaccuc

SEQ ID NO: 478948 - RNA, 19 nt, Artificial Sequence
  Description of Artificial Sequence: Synthetic oligonucleotide
uguagaaucaucacgcugc

SEQ ID NO: 478949 - RNA, 19 nt, Artificial Sequence
  Description of Artificial Sequence: Synthetic oligonucleotide
uaaagaguggucauaacug

SEQ ID NO: 478950 - RNA, 19 nt, Artificial Sequence
  Description of Artificial Sequence: Synthetic oligonucleotide
aaucuauugaugcagcacu

SEQ ID NO: 478951 - RNA, 19 nt, Artificial Sequence
  Description of Artificial Sequence: Synthetic oligonucleotide
aucugauagacugauaccc

SEQ ID NO: 478952 - RNA, 19 nt, Artificial Sequence
  Description of Artificial Sequence: Synthetic oligonucleotide
uccgguaucauuuuguccc

SEQ ID NO: 478953 - RNA, 19 nt, Artificial Sequence
  Description of Artificial Sequence: Synthetic oligonucleotide
aaccguauuaaggaaaggg

SEQ ID NO: 478954 - RNA, 19 nt, Artificial Sequence
  Description of Artificial Sequence: Synthetic oligonucleotide
ugaacuucgguuuagcaga

SEQ ID NO: 478955 - RNA, 19 nt, Artificial Sequence
  Description of Artificial Sequence: Synthetic oligonucleotide
uguuuucgagauuagagug

SEQ ID NO: 478956 - RNA, 19 nt, Artificial Sequence
  Description of Artificial Sequence: Synthetic oligonucleotide
cucgguuuaggauugacgg

SEQ ID NO: 478957 - RNA, 19 nt, Artificial Sequence
  Description of Artificial Sequence: Synthetic oligonucleotide
agcgcaaacacccauaucu

SEQ ID NO: 478958 - RNA, 19 nt, Artificial Sequence
  Description of Artificial Sequence: Synthetic oligonucleotide
aucgugucuagacaaagac

SEQ ID NO: 478959 - RNA, 19 nt, Artificial Sequence
  Description of Artificial Sequence: Synthetic oligonucleotide
agugaauggucguuaacac

SEQ ID NO: 478960 - RNA, 19 nt, Artificial Sequence
  Description of Artificial Sequence: Synthetic oligonucleotide
ugaauggucguuaacacua

SEQ ID NO: 478961 - RNA, 19 nt, Artificial Sequence
  Description of Artificial Sequence: Synthetic oligonucleotide
uucgagauuagagugaaug

SEQ ID NO: 478962 - RNA, 19 nt, Artificial Sequence
  Description of Artificial Sequence: Synthetic oligonucleotide
auauucacuugauaauccg

SEQ ID NO: 478963 - RNA, 19 nt, Artificial Sequence
  Description of Artificial Sequence: Synthetic oligonucleotide
gguucuuugaacaugaccc

SEQ ID NO: 478964 - RNA, 19 nt, Artificial Sequence
  Description of Artificial Sequence: Synthetic oligonucleotide
acauacauugggcaggauc

SEQ ID NO: 478965 - RNA, 19 nt, Artificial Sequence
  Description of Artificial Sequence: Synthetic oligonucleotide
aauccgguaucauuuuguc

SEQ ID NO: 478966 - RNA, 19 nt, Artificial Sequence
  Description of Artificial Sequence: Synthetic oligonucleotide
ucucgaauacuuaaugugu

SEQ ID NO: 478967 - RNA, 19 nt, Artificial Sequence
  Description of Artificial Sequence: Synthetic oligonucleotide
uuaacacuagauuauguau

SEQ ID NO: 478968 - RNA, 19 nt, Artificial Sequence
  Description of Artificial Sequence: Synthetic oligonucleotide
ucgagauuagagugaaugg

SEQ ID NO: 478969 - RNA, 19 nt, Artificial Sequence
  Description of Artificial Sequence: Synthetic oligonucleotide
aaacuauugaaagaucaca

SEQ ID NO: 478970 - RNA, 19 nt, Artificial Sequence
  Description of Artificial Sequence: Synthetic oligonucleotide
ucaugcacuacuuucuuca

SEQ ID NO: 478971 - RNA, 19 nt, Artificial Sequence
  Description of Artificial Sequence: Synthetic oligonucleotide
uuauaagacuaucauuuuc

SEQ ID NO: 478972 - RNA, 19 nt, Artificial Sequence
  Description of Artificial Sequence: Synthetic oligonucleotide
auuauuauugccaggggag

SEQ ID NO: 478973 - RNA, 19 nt, Artificial Sequence
  Description of Artificial Sequence: Synthetic oligonucleotide
aacauggcgucgaagaccg

SEQ ID NO: 478974 - RNA, 19 nt, Artificial Sequence
  Description of Artificial Sequence: Synthetic oligonucleotide
uguauauucacuugauaau

SEQ ID NO: 478975 - RNA, 19 nt, Artificial Sequence
  Description of Artificial Sequence: Synthetic oligonucleotide
aacacuagauuauguauaa

SEQ ID NO: 478976 - RNA, 19 nt, Artificial Sequence
  Description of Artificial Sequence: Synthetic oligonucleotide
ucucgguuuaggauugacg

SEQ ID NO: 478977 - RNA, 19 nt, Artificial Sequence
  Description of Artificial Sequence: Synthetic oligonucleotide
accguauuaaggaaagggc

SEQ ID NO: 478978 - RNA, 19 nt, Artificial Sequence
  Description of Artificial Sequence: Synthetic oligonucleotide
uugucuaucgugucuagac

SEQ ID NO: 478979 - RNA, 19 nt, Artificial Sequence
  Description of Artificial Sequence: Synthetic oligonucleotide
uuccgagcgacucuuagca

SEQ ID NO: 478980 - RNA, 19 nt, Artificial Sequence
  Description of Artificial Sequence: Synthetic oligonucleotide
ucugauagacugauacccc

SEQ ID NO: 478981 - RNA, 19 nt, Artificial Sequence
  Description of Artificial Sequence: Synthetic oligonucleotide
uguuaucucacuuguauuu

SEQ ID NO: 478982 - RNA, 19 nt, Artificial Sequence
  Description of Artificial Sequence: Synthetic oligonucleotide
ucuagacaaagacuagcca

SEQ ID NO: 478983 - RNA, 19 nt, Artificial Sequence
  Description of Artificial Sequence: Synthetic oligonucleotide
cuguauauucacuugauaa

SEQ ID NO: 478984 - RNA, 19 nt, Artificial Sequence
  Description of Artificial Sequence: Synthetic oligonucleotide
ucugcuacauaugacaaaa

SEQ ID NO: 478985 - RNA, 19 nt, Artificial Sequence
  Description of Artificial Sequence: Synthetic oligonucleotide
guaacauacauugggcagg

SEQ ID NO: 478986 - RNA, 19 nt, Artificial Sequence
  Description of Artificial Sequence: Synthetic oligonucleotide
acuaacuuaccucuggcau

SEQ ID NO: 478987 - RNA, 19 nt, Artificial Sequence
  Description of Artificial Sequence: Synthetic oligonucleotide
cauaagaucaugguaccag

SEQ ID NO: 478988 - RNA, 19 nt, Artificial Sequence
  Description of Artificial Sequence: Synthetic oligonucleotide
ugcccaacguacaauagcu

SEQ ID NO: 478989 - RNA, 19 nt, Artificial Sequence
  Description of Artificial Sequence: Synthetic oligonucleotide
agauuagagugaauggucg

SEQ ID NO: 478990 - RNA, 19 nt, Artificial Sequence
  Description of Artificial Sequence: Synthetic oligonucleotide
gauucgaucacucgugcca

SEQ ID NO: 478991 - RNA, 19 nt, Artificial Sequence
  Description of Artificial Sequence: Synthetic oligonucleotide
uuaggauugacgguaaaau

SEQ ID NO: 478992 - RNA, 19 nt, Artificial Sequence
  Description of Artificial Sequence: Synthetic oligonucleotide
auccgguaucauuuugucc

SEQ ID NO: 478993 - RNA, 19 nt, Artificial Sequence
  Description of Artificial Sequence: Synthetic oligonucleotide
aucacgcugccagauaucc

SEQ ID NO: 478994 - RNA, 19 nt, Artificial Sequence
  Description of Artificial Sequence: Synthetic oligonucleotide
ucgguuuagcagaauacac

SEQ ID NO: 478995 - RNA, 19 nt, Artificial Sequence
  Description of Artificial Sequence: Synthetic oligonucleotide
agugggaaccguauuaagg

SEQ ID NO: 478996 - RNA, 19 nt, Artificial Sequence
  Description of Artificial Sequence: Synthetic oligonucleotide
uuccaaacgucacaggcaa

SEQ ID NO: 478997 - RNA, 19 nt, Artificial Sequence
  Description of Artificial Sequence: Synthetic oligonucleotide
ugggcccaugaauagaucc

SEQ ID NO: 478998 - RNA, 19 nt, Artificial Sequence
  Description of Artificial Sequence: Synthetic oligonucleotide
gaucucuauagguucuuug

SEQ ID NO: 478999 - RNA, 19 nt, Artificial Sequence
  Description of Artificial Sequence: Synthetic oligonucleotide
aggauugacgguaaaauga

SEQ ID NO: 479000 - RNA, 19 nt, Artificial Sequence
  Description of Artificial Sequence: Synthetic oligonucleotide
ucuacucucgguuuaggau

SEQ ID NO: 479001 - RNA, 19 nt, Artificial Sequence
  Description of Artificial Sequence: Synthetic oligonucleotide
uaaauccgguaucauuuug

SEQ ID NO: 479002 - RNA, 19 nt, Artificial Sequence
  Description of Artificial Sequence: Synthetic oligonucleotide
aaacgucacaggcaauugu

SEQ ID NO: 479003 - RNA, 19 nt, Artificial Sequence
  Description of Artificial Sequence: Synthetic oligonucleotide
ucaguaaacccuucugcac

SEQ ID NO: 479004 - RNA, 19 nt, Artificial Sequence
  Description of Artificial Sequence: Synthetic oligonucleotide
agaauacacaucagugggc

SEQ ID NO: 479005 - RNA, 19 nt, Artificial Sequence
  Description of Artificial Sequence: Synthetic oligonucleotide
guauauucacuugauaauc

SEQ ID NO: 479006 - RNA, 19 nt, Artificial Sequence
  Description of Artificial Sequence: Synthetic oligonucleotide
ugucuaucgugucuagaca

SEQ ID NO: 479007 - RNA, 19 nt, Artificial Sequence
  Description of Artificial Sequence: Synthetic oligonucleotide
gaccuauggaaucauacaa

SEQ ID NO: 479008 - RNA, 19 nt, Artificial Sequence
  Description of Artificial Sequence: Synthetic oligonucleotide
uucgguuuagcagaauaca

SEQ ID NO: 479009 - RNA, 19 nt, Artificial Sequence
  Description of Artificial Sequence: Synthetic oligonucleotide
uggucgaucaauguauucu

SEQ ID NO: 479010 - RNA, 19 nt, Artificial Sequence
  Description of Artificial Sequence: Synthetic oligonucleotide
auguagaaucaucacgcug

SEQ ID NO: 479011 - RNA, 19 nt, Artificial Sequence
  Description of Artificial Sequence: Synthetic oligonucleotide
cuucgguuuagcagaauac

SEQ ID NO: 479012 - RNA, 19 nt, Artificial Sequence
  Description of Artificial Sequence: Synthetic oligonucleotide
uguaggaauacugacccau

SEQ ID NO: 479013 - RNA, 19 nt, Artificial Sequence
  Description of Artificial Sequence: Synthetic oligonucleotide
cuauggaaucauacaagac

SEQ ID NO: 479014 - RNA, 19 nt, Artificial Sequence
  Description of Artificial Sequence: Synthetic oligonucleotide
agagugaauggucguuaac

SEQ ID NO: 479015 - RNA, 19 nt, Artificial Sequence
  Description of Artificial Sequence: Synthetic oligonucleotide
gagugaauggucguuaaca

SEQ ID NO: 479016 - RNA, 19 nt, Artificial Sequence
  Description of Artificial Sequence: Synthetic oligonucleotide
agaccuauggaaucauaca

SEQ ID NO: 479017 - RNA, 19 nt, Artificial Sequence
  Description of Artificial Sequence: Synthetic oligonucleotide
uccauugugcuuuugucua

SEQ ID NO: 479018 - RNA, 19 nt, Artificial Sequence
  Description of Artificial Sequence: Synthetic oligonucleotide
cauuauuauugccagggga

SEQ ID NO: 479019 - RNA, 19 nt, Artificial Sequence
  Description of Artificial Sequence: Synthetic oligonucleotide
gccauuauuauugccaggg

SEQ ID NO: 479020 - RNA, 19 nt, Artificial Sequence
  Description of Artificial Sequence: Synthetic oligonucleotide
aaauccgguaucauuuugu

SEQ ID NO: 479021 - RNA, 19 nt, Artificial Sequence
  Description of Artificial Sequence: Synthetic oligonucleotide
gugggaaccguauuaagga

SEQ ID NO: 479022 - RNA, 19 nt, Artificial Sequence
  Description of Artificial Sequence: Synthetic oligonucleotide
augguuacuacagucuuug

SEQ ID NO: 479023 - RNA, 19 nt, Artificial Sequence
  Description of Artificial Sequence: Synthetic oligonucleotide
uuuaggauugacgguaaaa

SEQ ID NO: 479024 - RNA, 19 nt, Artificial Sequence
  Description of Artificial Sequence: Synthetic oligonucleotide
acuauaaccccagcggcuc

SEQ ID NO: 479025 - RNA, 19 nt, Artificial Sequence
  Description of Artificial Sequence: Synthetic oligonucleotide
gaauacacaucagugggca

SEQ ID NO: 479026 - RNA, 19 nt, Artificial Sequence
  Description of Artificial Sequence: Synthetic oligonucleotide
uuuaacgauuuuccacaac

SEQ ID NO: 479027 - RNA, 19 nt, Artificial Sequence
  Description of Artificial Sequence: Synthetic oligonucleotide
ucuguauauucacuugaua

SEQ ID NO: 479028 - RNA, 19 nt, Artificial Sequence
  Description of Artificial Sequence: Synthetic oligonucleotide
uucaccuaucuuucaaagu

SEQ ID NO: 479029 - RNA, 19 nt, Artificial Sequence
  Description of Artificial Sequence: Synthetic oligonucleotide
gagguucaucaaauaaccg

SEQ ID NO: 479030 - RNA, 19 nt, Artificial Sequence
  Description of Artificial Sequence: Synthetic oligonucleotide
auauccuuccgagcgacuc

SEQ ID NO: 479031 - RNA, 19 nt, Artificial Sequence
  Description of Artificial Sequence: Synthetic oligonucleotide
auaaccgcgccugaguaag

SEQ ID NO: 479032 - RNA, 19 nt, Artificial Sequence
  Description of Artificial Sequence: Synthetic oligonucleotide
auuaaggaaagggcuuuuc

SEQ ID NO: 479033 - RNA, 19 nt, Artificial Sequence
  Description of Artificial Sequence: Synthetic oligonucleotide
ucuauugaagugccauuau

SEQ ID NO: 479034 - RNA, 19 nt, Artificial Sequence
  Description of Artificial Sequence: Synthetic oligonucleotide
gucuagacaaagacuagcc

SEQ ID NO: 479035 - RNA, 19 nt, Artificial Sequence
  Description of Artificial Sequence: Synthetic oligonucleotide
cauacauugggcaggaucu

SEQ ID NO: 479036 - RNA, 19 nt, Artificial Sequence
  Description of Artificial Sequence: Synthetic oligonucleotide
uguuaaggaaugguuacua

SEQ ID NO: 479037 - RNA, 19 nt, Artificial Sequence
  Description of Artificial Sequence: Synthetic oligonucleotide
agucgacuuucucgaauac

SEQ ID NO: 479038 - RNA, 19 nt, Artificial Sequence
  Description of Artificial Sequence: Synthetic oligonucleotide
uggcaugcaauacuuguua

SEQ ID NO: 479039 - RNA, 19 nt, Artificial Sequence
  Description of Artificial Sequence: Synthetic oligonucleotide
aauaaccgcgccugaguaa

SEQ ID NO: 479040 - RNA, 19 nt, Artificial Sequence
  Description of Artificial Sequence: Synthetic oligonucleotide
aauggucguuaacacuaga

SEQ ID NO: 479041 - RNA, 19 nt, Artificial Sequence
  Description of Artificial Sequence: Synthetic oligonucleotide
uccaaaugcuaacaaccau

SEQ ID NO: 479042 - RNA, 19 nt, Artificial Sequence
  Description of Artificial Sequence: Synthetic oligonucleotide
uacucucgguuuaggauug

SEQ ID NO: 479043 - RNA, 19 nt, Artificial Sequence
  Description of Artificial Sequence: Synthetic oligonucleotide
uucuauugaagugccauua

SEQ ID NO: 479044 - RNA, 19 nt, Artificial Sequence
  Description of Artificial Sequence: Synthetic oligonucleotide
gcacuuauugcauccauug

SEQ ID NO: 479045 - RNA, 19 nt, Artificial Sequence
  Description of Artificial Sequence: Synthetic oligonucleotide
uuuugucuaucgugucuag

SEQ ID NO: 479046 - RNA, 19 nt, Artificial Sequence
  Description of Artificial Sequence: Synthetic oligonucleotide
acguacaauagcuccaaaa

SEQ ID NO: 479047 - RNA, 19 nt, Artificial Sequence
  Description of Artificial Sequence: Synthetic oligonucleotide
ucuuugcugaacuucgguu

SEQ ID NO: 479048 - RNA, 19 nt, Artificial Sequence
  Description of Artificial Sequence: Synthetic oligonucleotide
uuucuggcccaauuugaac

SEQ ID NO: 479049 - RNA, 19 nt, Artificial Sequence
  Description of Artificial Sequence: Synthetic oligonucleotide
ucuaucgugucuagacaaa

SEQ ID NO: 479050 - RNA, 19 nt, Artificial Sequence
  Description of Artificial Sequence: Synthetic oligonucleotide
ugacgguaaaaugaaggaa

SEQ ID NO: 479051 - RNA, 19 nt, Artificial Sequence
  Description of Artificial Sequence: Synthetic oligonucleotide
cauccauugugcuuuuguc

SEQ ID NO: 479052 - RNA, 19 nt, Artificial Sequence
  Description of Artificial Sequence: Synthetic oligonucleotide
uucuguuaacugugaaccu

SEQ ID NO: 479053 - RNA, 19 nt, Artificial Sequence
  Description of Artificial Sequence: Synthetic oligonucleotide
gauugacgguaaaaugaag

SEQ ID NO: 479054 - RNA, 19 nt, Artificial Sequence
  Description of Artificial Sequence: Synthetic oligonucleotide
uuaucucacuuguauuuua

SEQ ID NO: 479055 - RNA, 19 nt, Artificial Sequence
  Description of Artificial Sequence: Synthetic oligonucleotide
cugcccaacguacaauagc

SEQ ID NO: 479056 - RNA, 19 nt, Artificial Sequence
  Description of Artificial Sequence: Synthetic oligonucleotide
uaggaauacugacccauuu

SEQ ID NO: 479057 - RNA, 19 nt, Artificial Sequence
  Description of Artificial Sequence: Synthetic oligonucleotide
ccaaacuauugaaagauca

SEQ ID NO: 479058 - RNA, 19 nt, Artificial Sequence
  Description of Artificial Sequence: Synthetic oligonucleotide
gacgucguggccaugccgc

SEQ ID NO: 479059 - RNA, 19 nt, Artificial Sequence
  Description of Artificial Sequence: Synthetic oligonucleotide
cuaucgugucuagacaaag

SEQ ID NO: 479060 - RNA, 19 nt, Artificial Sequence
  Description of Artificial Sequence: Synthetic oligonucleotide
accccuuaaguuuaauuua

SEQ ID NO: 479061 - RNA, 19 nt, Artificial Sequence
  Description of Artificial Sequence: Synthetic oligonucleotide
cccaacguacaauagcucc

SEQ ID NO: 479062 - RNA, 19 nt, Artificial Sequence
  Description of Artificial Sequence: Synthetic oligonucleotide
ggucguuaacacuagauua

SEQ ID NO: 479063 - RNA, 19 nt, Artificial Sequence
  Description of Artificial Sequence: Synthetic oligonucleotide
uuagagugaauggucguua

SEQ ID NO: 479064 - RNA, 19 nt, Artificial Sequence
  Description of Artificial Sequence: Synthetic oligonucleotide
ucacucgugccacuauaac

SEQ ID NO: 479065 - RNA, 19 nt, Artificial Sequence
  Description of Artificial Sequence: Synthetic oligonucleotide
gucuaucgugucuagacaa

SEQ ID NO: 479066 - RNA, 19 nt, Artificial Sequence
  Description of Artificial Sequence: Synthetic oligonucleotide
uauccuuccgagcgacucu

SEQ ID NO: 479067 - RNA, 19 nt, Artificial Sequence
  Description of Artificial Sequence: Synthetic oligonucleotide
aucuauugaugcagcacuc

SEQ ID NO: 479068 - RNA, 19 nt, Artificial Sequence
  Description of Artificial Sequence: Synthetic oligonucleotide
ucgguuuaggauugacggu

SEQ ID NO: 479069 - RNA, 19 nt, Artificial Sequence
  Description of Artificial Sequence: Synthetic oligonucleotide
ggaaccguauuaaggaaag

SEQ ID NO: 479070 - RNA, 19 nt, Artificial Sequence
  Description of Artificial Sequence: Synthetic oligonucleotide
gaaccguauuaaggaaagg

SEQ ID NO: 479071 - RNA, 19 nt, Artificial Sequence
  Description of Artificial Sequence: Synthetic oligonucleotide
augaauagauccauacaaa

SEQ ID NO: 479072 - RNA, 19 nt, Artificial Sequence
  Description of Artificial Sequence: Synthetic oligonucleotide
uuugucuaucgugucuaga

SEQ ID NO: 479073 - RNA, 19 nt, Artificial Sequence
  Description of Artificial Sequence: Synthetic oligonucleotide
auaccccuuaaguuuaauu

SEQ ID NO: 479074 - RNA, 19 nt, Artificial Sequence
  Description of Artificial Sequence: Synthetic oligonucleotide
uccaacuacagagauucuu

SEQ ID NO: 479075 - RNA, 19 nt, Artificial Sequence
  Description of Artificial Sequence: Synthetic oligonucleotide
gaauggucguuaacacuag

SEQ ID NO: 479076 - RNA, 19 nt, Artificial Sequence
  Description of Artificial Sequence: Synthetic oligonucleotide
gauagacugauaccccuua

SEQ ID NO: 479077 - RNA, 19 nt, Artificial Sequence
  Description of Artificial Sequence: Synthetic oligonucleotide
aguauaaagaguggucaua

SEQ ID NO: 479078 - RNA, 19 nt, Artificial Sequence
  Description of Artificial Sequence: Synthetic oligonucleotide
uagagugaauggucguuaa

SEQ ID NO: 479079 - RNA, 19 nt, Artificial Sequence
  Description of Artificial Sequence: Synthetic oligonucleotide
ugggaaccguauuaaggaa

SEQ ID NO: 479080 - RNA, 19 nt, Artificial Sequence
  Description of Artificial Sequence: Synthetic oligonucleotide
gguaccagaguaaacaaaa

SEQ ID NO: 479081 - RNA, 19 nt, Artificial Sequence
  Description of Artificial Sequence: Synthetic oligonucleotide
aucucggccgacgucgugg

SEQ ID NO: 479082 - RNA, 19 nt, Artificial Sequence
  Description of Artificial Sequence: Synthetic oligonucleotide
uugcgcaugcuguguaaca

SEQ ID NO: 479083 - RNA, 19 nt, Artificial Sequence
  Description of Artificial Sequence: Synthetic oligonucleotide
uuauugccaggggagcuga

SEQ ID NO: 479084 - RNA, 19 nt, Artificial Sequence
  Description of Artificial Sequence: Synthetic oligonucleotide
caacuucaagagacccugg

SEQ ID NO: 479085 - RNA, 19 nt, Artificial Sequence
  Description of Artificial Sequence: Synthetic oligonucleotide
gauuagagugaauggucgu

SEQ ID NO: 479086 - RNA, 19 nt, Artificial Sequence
  Description of Artificial Sequence: Synthetic oligonucleotide
aaugguuacuacagucuuu

SEQ ID NO: 479087 - RNA, 19 nt, Artificial Sequence
  Description of Artificial Sequence: Synthetic oligonucleotide
agcguggucgaucaaugua

SEQ ID NO: 479088 - RNA, 19 nt, Artificial Sequence
  Description of Artificial Sequence: Synthetic oligonucleotide
agcaacauaaaggcauuau

SEQ ID NO: 479089 - RNA, 19 nt, Artificial Sequence
  Description of Artificial Sequence: Synthetic oligonucleotide
gaugccccaaugucaguga

SEQ ID NO: 479090 - RNA, 19 nt, Artificial Sequence
  Description of Artificial Sequence: Synthetic oligonucleotide
aacguacaauagcuccaaa

SEQ ID NO: 479091 - RNA, 19 nt, Artificial Sequence
  Description of Artificial Sequence: Synthetic oligonucleotide
ugguuacuacagucuuugc

SEQ ID NO: 479092 - RNA, 19 nt, Artificial Sequence
  Description of Artificial Sequence: Synthetic oligonucleotide
caaacgucacaggcaauug

SEQ ID NO: 479093 - RNA, 19 nt, Artificial Sequence
  Description of Artificial Sequence: Synthetic oligonucleotide
acgucguggccaugccgcc

SEQ ID NO: 479094 - RNA, 19 nt, Artificial Sequence
  Description of Artificial Sequence: Synthetic oligonucleotide
guguuagcagucccgucac

SEQ ID NO: 479095 - RNA, 19 nt, Artificial Sequence
  Description of Artificial Sequence: Synthetic oligonucleotide
auggucguuaacacuagau

SEQ ID NO: 479096 - RNA, 19 nt, Artificial Sequence
  Description of Artificial Sequence: Synthetic oligonucleotide
cucaaacuauuuguggcca

SEQ ID NO: 479097 - RNA, 19 nt, Artificial Sequence
  Description of Artificial Sequence: Synthetic oligonucleotide
ccacuauaaccccagcggc

SEQ ID NO: 479098 - RNA, 19 nt, Artificial Sequence
  Description of Artificial Sequence: Synthetic oligonucleotide
uguugcgcaugcuguguaa

SEQ ID NO: 479099 - RNA, 19 nt, Artificial Sequence
  Description of Artificial Sequence: Synthetic oligonucleotide
gaucacucgugccacuaua

SEQ ID NO: 479100 - RNA, 19 nt, Artificial Sequence
  Description of Artificial Sequence: Synthetic oligonucleotide
uauuaaggaaagggcuuuu

SEQ ID NO: 479101 - RNA, 19 nt, Artificial Sequence
  Description of Artificial Sequence: Synthetic oligonucleotide
ucggccgacgucguggcca

SEQ ID NO: 479102 - RNA, 19 nt, Artificial Sequence
  Description of Artificial Sequence: Synthetic oligonucleotide
uuguaccuuccagugacua

SEQ ID NO: 479103 - RNA, 19 nt, Artificial Sequence
  Description of Artificial Sequence: Synthetic oligonucleotide
uugucccaacguuuguuuu

SEQ ID NO: 479104 - RNA, 19 nt, Artificial Sequence
  Description of Artificial Sequence: Synthetic oligonucleotide
guauucuacucucgguuua

SEQ ID NO: 479105 - RNA, 19 nt, Artificial Sequence
  Description of Artificial Sequence: Synthetic oligonucleotide
agcucgaucucggccgacg

SEQ ID NO: 479106 - RNA, 19 nt, Artificial Sequence
  Description of Artificial Sequence: Synthetic oligonucleotide
ugauaccccuuaaguuuaa

SEQ ID NO: 479107 - RNA, 19 nt, Artificial Sequence
  Description of Artificial Sequence: Synthetic oligonucleotide
acacccauaucugcuacau

SEQ ID NO: 479108 - RNA, 19 nt, Artificial Sequence
  Description of Artificial Sequence: Synthetic oligonucleotide
gcacuaacuuaccucuggc

SEQ ID NO: 479109 - RNA, 19 nt, Artificial Sequence
  Description of Artificial Sequence: Synthetic oligonucleotide
ucucggccgacgucguggc

SEQ ID NO: 479110 - RNA, 19 nt, Artificial Sequence
  Description of Artificial Sequence: Synthetic oligonucleotide
gcgacucuuagcauuauuc

SEQ ID NO: 479111 - RNA, 19 nt, Artificial Sequence
  Description of Artificial Sequence: Synthetic oligonucleotide
cauugugcuuuugucuauc

SEQ ID NO: 479112 - RNA, 19 nt, Artificial Sequence
  Description of Artificial Sequence: Synthetic oligonucleotide
gugaauggucguuaacacu

SEQ ID NO: 479113 - RNA, 19 nt, Artificial Sequence
  Description of Artificial Sequence: Synthetic oligonucleotide
caguaaacccuucugcacu

SEQ ID NO: 479114 - RNA, 19 nt, Artificial Sequence
  Description of Artificial Sequence: Synthetic oligonucleotide
gcauauggauggcccaaag

SEQ ID NO: 479115 - RNA, 19 nt, Artificial Sequence
  Description of Artificial Sequence: Synthetic oligonucleotide
uuucgagauuagagugaau

SEQ ID NO: 479116 - RNA, 19 nt, Artificial Sequence
  Description of Artificial Sequence: Synthetic oligonucleotide
cugauagacugauaccccu

SEQ ID NO: 479117 - RNA, 19 nt, Artificial Sequence
  Description of Artificial Sequence: Synthetic oligonucleotide
ggauugacgguaaaaugaa

SEQ ID NO: 479118 - RNA, 19 nt, Artificial Sequence
  Description of Artificial Sequence: Synthetic oligonucleotide
aucuggacccuugaguguu

SEQ ID NO: 479119 - RNA, 19 nt, Artificial Sequence
  Description of Artificial Sequence: Synthetic oligonucleotide
gcccuaagauguuugguga

SEQ ID NO: 479120 - RNA, 19 nt, Artificial Sequence
  Description of Artificial Sequence: Synthetic oligonucleotide
guugcgcaugcuguguaac

SEQ ID NO: 479121 - RNA, 19 nt, Artificial Sequence
  Description of Artificial Sequence: Synthetic oligonucleotide
agcagcguggucgaucaau

SEQ ID NO: 479122 - RNA, 19 nt, Artificial Sequence
  Description of Artificial Sequence: Synthetic oligonucleotide
gucguuaacacuagauuau

SEQ ID NO: 479123 - RNA, 19 nt, Artificial Sequence
  Description of Artificial Sequence: Synthetic oligonucleotide
cauuacaguugcucagcaa

SEQ ID NO: 479124 - RNA, 19 nt, Artificial Sequence
  Description of Artificial Sequence: Synthetic oligonucleotide
uaaccgcgccugaguaagc

SEQ ID NO: 479125 - RNA, 19 nt, Artificial Sequence
  Description of Artificial Sequence: Synthetic oligonucleotide
gauaauccgugggcccaug

SEQ ID NO: 479126 - RNA, 19 nt, Artificial Sequence
  Description of Artificial Sequence: Synthetic oligonucleotide
caucacgcugccagauauc

SEQ ID NO: 479127 - RNA, 19 nt, Artificial Sequence
  Description of Artificial Sequence: Synthetic oligonucleotide
ccuugaguguugcgcaugc

SEQ ID NO: 479128 - RNA, 19 nt, Artificial Sequence
  Description of Artificial Sequence: Synthetic oligonucleotide
agcgacucuuagcauuauu

SEQ ID NO: 479129 - RNA, 19 nt, Artificial Sequence
  Description of Artificial Sequence: Synthetic oligonucleotide
cagauauccuuccgagcga

SEQ ID NO: 479130 - RNA, 19 nt, Artificial Sequence
  Description of Artificial Sequence: Synthetic oligonucleotide
uccaaacgucacaggcaau

SEQ ID NO: 479131 - RNA, 19 nt, Artificial Sequence
  Description of Artificial Sequence: Synthetic oligonucleotide
guuuaggauugacgguaaa

SEQ ID NO: 479132 - RNA, 19 nt, Artificial Sequence
  Description of Artificial Sequence: Synthetic oligonucleotide
cacuauaaccccagcggcu

SEQ ID NO: 479133 - RNA, 19 nt, Artificial Sequence
  Description of Artificial Sequence: Synthetic oligonucleotide
ccaacguacaauagcucca

SEQ ID NO: 479134 - RNA, 19 nt, Artificial Sequence
  Description of Artificial Sequence: Synthetic oligonucleotide
auccgugggcccaugaaua

SEQ ID NO: 479135 - RNA, 19 nt, Artificial Sequence
  Description of Artificial Sequence: Synthetic oligonucleotide
guauuaaggaaagggcuuu

SEQ ID NO: 479136 - RNA, 19 nt, Artificial Sequence
  Description of Artificial Sequence: Synthetic oligonucleotide
uccgagcgacucuuagcau

SEQ ID NO: 479137 - RNA, 19 nt, Artificial Sequence
  Description of Artificial Sequence: Synthetic oligonucleotide
ccguauuaaggaaagggcu

SEQ ID NO: 479138 - RNA, 19 nt, Artificial Sequence
  Description of Artificial Sequence: Synthetic oligonucleotide
uauugccaggggagcugaa

SEQ ID NO: 479139 - RNA, 19 nt, Artificial Sequence
  Description of Artificial Sequence: Synthetic oligonucleotide
caacguacaauagcuccaa

SEQ ID NO: 479140 - RNA, 19 nt, Artificial Sequence
  Description of Artificial Sequence: Synthetic oligonucleotide
ccgucacaacuaaauccgg

SEQ ID NO: 479141 - RNA, 19 nt, Artificial Sequence
  Description of Artificial Sequence: Synthetic oligonucleotide
gaacuucgguuuagcagaa

SEQ ID NO: 479142 - RNA, 19 nt, Artificial Sequence
  Description of Artificial Sequence: Synthetic oligonucleotide
guuaucucacuuguauuuu

SEQ ID NO: 479143 - RNA, 19 nt, Artificial Sequence
  Description of Artificial Sequence: Synthetic oligonucleotide
cuaaauccgguaucauuuu

SEQ ID NO: 479144 - RNA, 19 nt, Artificial Sequence
  Description of Artificial Sequence: Synthetic oligonucleotide
ccuuccgagcgacucuuag

SEQ ID NO: 479145 - RNA, 19 nt, Artificial Sequence
  Description of Artificial Sequence: Synthetic oligonucleotide
gggaaccguauuaaggaaa

SEQ ID NO: 479146 - RNA, 19 nt, Artificial Sequence
  Description of Artificial Sequence: Synthetic oligonucleotide
agcagaccuauggaaucau

SEQ ID NO: 479147 - RNA, 19 nt, Artificial Sequence
  Description of Artificial Sequence: Synthetic oligonucleotide
aacuucgguuuagcagaau

SEQ ID NO: 479148 - RNA, 19 nt, Artificial Sequence
  Description of Artificial Sequence: Synthetic oligonucleotide
aacauacauugggcaggau

SEQ ID NO: 479149 - RNA, 19 nt, Artificial Sequence
  Description of Artificial Sequence: Synthetic oligonucleotide
gccguugaacauggcgucg

SEQ ID NO: 479150 - RNA, 19 nt, Artificial Sequence
  Description of Artificial Sequence: Synthetic oligonucleotide
accgcgccugaguaagcaa

SEQ ID NO: 479151 - RNA, 19 nt, Artificial Sequence
  Description of Artificial Sequence: Synthetic oligonucleotide
gccaugccgccguugaaca

SEQ ID NO: 479152 - RNA, 19 nt, Artificial Sequence
  Description of Artificial Sequence: Synthetic oligonucleotide
guccggcagcucgaucucg

SEQ ID NO: 479153 - RNA, 19 nt, Artificial Sequence
  Description of Artificial Sequence: Synthetic oligonucleotide
gucgacuuucucgaauacu

SEQ ID NO: 479154 - RNA, 19 nt, Artificial Sequence
  Description of Artificial Sequence: Synthetic oligonucleotide
caugacccugaauguguua

SEQ ID NO: 479155 - RNA, 19 nt, Artificial Sequence
  Description of Artificial Sequence: Synthetic oligonucleotide
uccuuccgagcgacucuua

SEQ ID NO: 479156 - RNA, 19 nt, Artificial Sequence
  Description of Artificial Sequence: Synthetic oligonucleotide
gguuuaggauugacgguaa

SEQ ID NO: 479157 - RNA, 19 nt, Artificial Sequence
  Description of Artificial Sequence: Synthetic oligonucleotide
gcauuccagcuaacugagg

SEQ ID NO: 479158 - RNA, 19 nt, Artificial Sequence
  Description of Artificial Sequence: Synthetic oligonucleotide
ccauuacaguugcucagca

SEQ ID NO: 479159 - RNA, 19 nt, Artificial Sequence
  Description of Artificial Sequence: Synthetic oligonucleotide
gucguggccaugccgccgu

SEQ ID NO: 479160 - RNA, 19 nt, Artificial Sequence
  Description of Artificial Sequence: Synthetic oligonucleotide
caggggucucaugcacuac

SEQ ID NO: 479161 - RNA, 19 nt, Artificial Sequence
  Description of Artificial Sequence: Synthetic oligonucleotide
ugccgccguugaacauggc

SEQ ID NO: 479162 - RNA, 19 nt, Artificial Sequence
  Description of Artificial Sequence: Synthetic oligonucleotide
ccccuuaaguuuaauuuau

SEQ ID NO: 479163 - RNA, 19 nt, Artificial Sequence
  Description of Artificial Sequence: Synthetic oligonucleotide
cuauaaccccagcggcucu

SEQ ID NO: 479164 - RNA, 19 nt, Artificial Sequence
  Description of Artificial Sequence: Synthetic oligonucleotide
cugcacuuauugcauccau

SEQ ID NO: 479165 - RNA, 19 nt, Artificial Sequence
  Description of Artificial Sequence: Synthetic oligonucleotide
cguauuaaggaaagggcuu

SEQ ID NO: 479166 - RNA, 19 nt, Artificial Sequence
  Description of Artificial Sequence: Synthetic oligonucleotide
acucucgguuuaggauuga

SEQ ID NO: 479167 - RNA, 19 nt, Artificial Sequence
  Description of Artificial Sequence: Synthetic oligonucleotide
guaggaauacugacccauu

SEQ ID NO: 479168 - RNA, 19 nt, Artificial Sequence
  Description of Artificial Sequence: Synthetic oligonucleotide
guaaacccuucugcacuua

SEQ ID NO: 479169 - RNA, 19 nt, Artificial Sequence
  Description of Artificial Sequence: Synthetic oligonucleotide
ccgccguugaacauggcgu

SEQ ID NO: 479170 - RNA, 19 nt, Artificial Sequence
  Description of Artificial Sequence: Synthetic oligonucleotide
cgacgucguggccaugccg

SEQ ID NO: 479171 - RNA, 19 nt, Artificial Sequence
  Description of Artificial Sequence: Synthetic oligonucleotide
gcguggucgaucaauguau

SEQ ID NO: 479172 - RNA, 19 nt, Artificial Sequence
  Description of Artificial Sequence: Synthetic oligonucleotide
cagucccgucacaacuaaa

SEQ ID NO: 479173 - RNA, 19 nt, Artificial Sequence
  Description of Artificial Sequence: Synthetic oligonucleotide
cacguccggcagcucgauc

SEQ ID NO: 479174 - RNA, 19 nt, Artificial Sequence
  Description of Artificial Sequence: Synthetic oligonucleotide
cugcccuaagauguuuggu

SEQ ID NO: 479175 - RNA, 19 nt, Artificial Sequence
  Description of Artificial Sequence: Synthetic oligonucleotide
cacccauaucugcuacaua

SEQ ID NO: 479176 - RNA, 19 nt, Artificial Sequence
  Description of Artificial Sequence: Synthetic oligonucleotide
cagcguggucgaucaaugu

SEQ ID NO: 479177 - RNA, 19 nt, Artificial Sequence
  Description of Artificial Sequence: Synthetic oligonucleotide
gcgcaugcuguguaacaua

SEQ ID NO: 479178 - RNA, 19 nt, Artificial Sequence
  Description of Artificial Sequence: Synthetic oligonucleotide
cgguuuaggauugacggua

SEQ ID NO: 479179 - RNA, 19 nt, Artificial Sequence
  Description of Artificial Sequence: Synthetic oligonucleotide
gcccaacguacaauagcuc

SEQ ID NO: 479180 - RNA, 19 nt, Artificial Sequence
  Description of Artificial Sequence: Synthetic oligonucleotide
cccuugaguguugcgcaug

SEQ ID NO: 479181 - RNA, 19 nt, Artificial Sequence
  Description of Artificial Sequence: Synthetic oligonucleotide
cgucacaggcaauuguugu

SEQ ID NO: 479182 - RNA, 19 nt, Artificial Sequence
  Description of Artificial Sequence: Synthetic oligonucleotide
ccgacgucguggccaugcc

SEQ ID NO: 479183 - RNA, 19 nt, Artificial Sequence
  Description of Artificial Sequence: Synthetic oligonucleotide
cgcgccugaguaagcaaca

SEQ ID NO: 479184 - RNA, 19 nt, Artificial Sequence
  Description of Artificial Sequence: Synthetic oligonucleotide
gcagaccuauggaaucaua

SEQ ID NO: 479185 - RNA, 19 nt, Artificial Sequence
  Description of Artificial Sequence: Synthetic oligonucleotide
cgacuuucucgaauacuua

SEQ ID NO: 479186 - RNA, 19 nt, Artificial Sequence
  Description of Artificial Sequence: Synthetic oligonucleotide
cagcucgaucucggccgac

SEQ ID NO: 479187 - RNA, 19 nt, Artificial Sequence
  Description of Artificial Sequence: Synthetic oligonucleotide
ccauugugcuuuugucuau

SEQ ID NO: 479188 - RNA, 19 nt, Artificial Sequence
  Description of Artificial Sequence: Synthetic oligonucleotide
gcgccugaguaagcaacau

SEQ ID NO: 479189 - RNA, 19 nt, Artificial Sequence
  Description of Artificial Sequence: Synthetic oligonucleotide
ccaugccgccguugaacau

SEQ ID NO: 479190 - RNA, 19 nt, Artificial Sequence
  Description of Artificial Sequence: Synthetic oligonucleotide
ggccgacgucguggccaug

SEQ ID NO: 479191 - RNA, 19 nt, Artificial Sequence
  Description of Artificial Sequence: Synthetic oligonucleotide
cggccgacgucguggccau

SEQ ID NO: 479192 - RNA, 19 nt, Artificial Sequence
  Description of Artificial Sequence: Synthetic oligonucleotide
auauaaauagcuugggucc

SEQ ID NO: 479193 - RNA, 19 nt, Artificial Sequence
  Description of Artificial Sequence: Synthetic oligonucleotide
aacgguaucgcuuacagug

SEQ ID NO: 479194 - RNA, 19 nt, Artificial Sequence
  Description of Artificial Sequence: Synthetic oligonucleotide
aacgugaagacccauagca

SEQ ID NO: 479195 - RNA, 19 nt, Artificial Sequence
  Description of Artificial Sequence: Synthetic oligonucleotide
aguugaaccagucagacau

SEQ ID NO: 479196 - RNA, 19 nt, Artificial Sequence
  Description of Artificial Sequence: Synthetic oligonucleotide
aauagcuuggguccaaucu

SEQ ID NO: 479197 - RNA, 19 nt, Artificial Sequence
  Description of Artificial Sequence: Synthetic oligonucleotide
agaagcaagcgacacauuc

SEQ ID NO: 479198 - RNA, 19 nt, Artificial Sequence
  Description of Artificial Sequence: Synthetic oligonucleotide
ucguagucgaccuucaugc

SEQ ID NO: 479199 - RNA, 19 nt, Artificial Sequence
  Description of Artificial Sequence: Synthetic oligonucleotide
aggcgaugcacauaugacc

SEQ ID NO: 479200 - RNA, 19 nt, Artificial Sequence
  Description of Artificial Sequence: Synthetic oligonucleotide
uucgggauggguaucguag

SEQ ID NO: 479201 - RNA, 19 nt, Artificial Sequence
  Description of Artificial Sequence: Synthetic oligonucleotide
uucacaccuauacguaucg

SEQ ID NO: 479202 - RNA, 19 nt, Artificial Sequence
  Description of Artificial Sequence: Synthetic oligonucleotide
caaggaucaccucaggugg

SEQ ID NO: 479203 - RNA, 19 nt, Artificial Sequence
  Description of Artificial Sequence: Synthetic oligonucleotide
uucaucccaaaccaggccc

SEQ ID NO: 479204 - RNA, 19 nt, Artificial Sequence
  Description of Artificial Sequence: Synthetic oligonucleotide
uuuugaaagucuuggcgcc

SEQ ID NO: 479205 - RNA, 19 nt, Artificial Sequence
  Description of Artificial Sequence: Synthetic oligonucleotide
ucacauaccgcccaucaga

SEQ ID NO: 479206 - RNA, 19 nt, Artificial Sequence
  Description of Artificial Sequence: Synthetic oligonucleotide
aagcaagcgacacauucug

SEQ ID NO: 479207 - RNA, 19 nt, Artificial Sequence
  Description of Artificial Sequence: Synthetic oligonucleotide
cucccgacugguaagaccg

SEQ ID NO: 479208 - RNA, 19 nt, Artificial Sequence
  Description of Artificial Sequence: Synthetic oligonucleotide
aucauaaccaaguguucuc

SEQ ID NO: 479209 - RNA, 19 nt, Artificial Sequence
  Description of Artificial Sequence: Synthetic oligonucleotide
aaauagcuuggguccaauc

SEQ ID NO: 479210 - RNA, 19 nt, Artificial Sequence
  Description of Artificial Sequence: Synthetic oligonucleotide
augucgagaacgugaagac

SEQ ID NO: 479211 - RNA, 19 nt, Artificial Sequence
  Description of Artificial Sequence: Synthetic oligonucleotide
uaguacucgaagagaaugc

SEQ ID NO: 479212 - RNA, 19 nt, Artificial Sequence
  Description of Artificial Sequence: Synthetic oligonucleotide
cuuacagugaugcaucguc

SEQ ID NO: 479213 - RNA, 19 nt, Artificial Sequence
  Description of Artificial Sequence: Synthetic oligonucleotide
gaugcaucgucucccaggc

SEQ ID NO: 479214 - RNA, 19 nt, Artificial Sequence
  Description of Artificial Sequence: Synthetic oligonucleotide
gaugucgagaacgugaaga

SEQ ID NO: 479215 - RNA, 19 nt, Artificial Sequence
  Description of Artificial Sequence: Synthetic oligonucleotide
caucaggacacacaggaac

SEQ ID NO: 479216 - RNA, 19 nt, Artificial Sequence
  Description of Artificial Sequence: Synthetic oligonucleotide
ggugaaucaugugugaugg

SEQ ID NO: 479217 - RNA, 19 nt, Artificial Sequence
  Description of Artificial Sequence: Synthetic oligonucleotide
gaguguaaagccacgguag

SEQ ID NO: 479218 - RNA, 19 nt, Artificial Sequence
  Description of Artificial Sequence: Synthetic oligonucleotide
aagaguguaaagccacggu

SEQ ID NO: 479219 - RNA, 19 nt, Artificial Sequence
  Description of Artificial Sequence: Synthetic oligonucleotide
gcacauaugaccauggaag

SEQ ID NO: 479220 - RNA, 19 nt, Artificial Sequence
  Description of Artificial Sequence: Synthetic oligonucleotide
gucgagaacgugaagaccc

SEQ ID NO: 479221 - RNA, 19 nt, Artificial Sequence
  Description of Artificial Sequence: Synthetic oligonucleotide
uccccacgaucucauaucg

SEQ ID NO: 479222 - RNA, 19 nt, Artificial Sequence
  Description of Artificial Sequence: Synthetic oligonucleotide
gguacuugcccacauuacg

SEQ ID NO: 479223 - RNA, 19 nt, Artificial Sequence
  Description of Artificial Sequence: Synthetic oligonucleotide
cauuaauuucuagacgggc

SEQ ID NO: 479224 - RNA, 19 nt, Artificial Sequence
  Description of Artificial Sequence: Synthetic oligonucleotide
guaucgcuuacagugaugc

SEQ ID NO: 479225 - RNA, 19 nt, Artificial Sequence
  Description of Artificial Sequence: Synthetic oligonucleotide
gacgaaagcggacggugcg

SEQ ID NO: 479226 - RNA, 19 nt, Artificial Sequence
  Description of Artificial Sequence: Synthetic oligonucleotide
uuucuagacgggcagcuuc

SEQ ID NO: 479227 - RNA, 19 nt, Artificial Sequence
  Description of Artificial Sequence: Synthetic oligonucleotide
uacgguauggcccucucuc

SEQ ID NO: 479228 - RNA, 19 nt, Artificial Sequence
  Description of Artificial Sequence: Synthetic oligonucleotide
gaacccaccggacugccag

SEQ ID NO: 479229 - RNA, 19 nt, Artificial Sequence
  Description of Artificial Sequence: Synthetic oligonucleotide
auaaccaaguguucucugu

SEQ ID NO: 479230 - RNA, 19 nt, Artificial Sequence
  Description of Artificial Sequence: Synthetic oligonucleotide
guacuugcccacauuacgg

SEQ ID NO: 479231 - RNA, 19 nt, Artificial Sequence
  Description of Artificial Sequence: Synthetic oligonucleotide
uuacagugaugcaucgucu

SEQ ID NO: 479232 - RNA, 19 nt, Artificial Sequence
  Description of Artificial Sequence: Synthetic oligonucleotide
gucuccgaugucgagaacg

SEQ ID NO: 479233 - RNA, 19 nt, Artificial Sequence
  Description of Artificial Sequence: Synthetic oligonucleotide
cucauguagaaaucuaaga

SEQ ID NO: 479234 - RNA, 19 nt, Artificial Sequence
  Description of Artificial Sequence: Synthetic oligonucleotide
gaugcgcugagcagggucg

SEQ ID NO: 479235 - RNA, 19 nt, Artificial Sequence
  Description of Artificial Sequence: Synthetic oligonucleotide
agaguguaaagccacggua

SEQ ID NO: 479236 - RNA, 19 nt, Artificial Sequence
  Description of Artificial Sequence: Synthetic oligonucleotide
aggugggcgauagugacgg

SEQ ID NO: 479237 - RNA, 19 nt, Artificial Sequence
  Description of Artificial Sequence: Synthetic oligonucleotide
aacucgcaggcucugggga

SEQ ID NO: 479238 - RNA, 19 nt, Artificial Sequence
  Description of Artificial Sequence: Synthetic oligonucleotide
cuauacguaucgcugucac

SEQ ID NO: 479239 - RNA, 19 nt, Artificial Sequence
  Description of Artificial Sequence: Synthetic oligonucleotide
ggcgcuagagacgaaagcg

SEQ ID NO: 479240 - RNA, 19 nt, Artificial Sequence
  Description of Artificial Sequence: Synthetic oligonucleotide
gugaccgucuccgaugucg

SEQ ID NO: 479241 - RNA, 19 nt, Artificial Sequence
  Description of Artificial Sequence: Synthetic oligonucleotide
ugggcgauagugacgggug

SEQ ID NO: 479242 - RNA, 19 nt, Artificial Sequence
  Description of Artificial Sequence: Synthetic oligonucleotide
ucaucccaaaccaggcccc

SEQ ID NO: 479243 - RNA, 19 nt, Artificial Sequence
  Description of Artificial Sequence: Synthetic oligonucleotide
cuugcgcgcaagaagcaag

SEQ ID NO: 479244 - RNA, 19 nt, Artificial Sequence
  Description of Artificial Sequence: Synthetic oligonucleotide
aguguaaagccacgguagu

SEQ ID NO: 479245 - RNA, 19 nt, Artificial Sequence
  Description of Artificial Sequence: Synthetic oligonucleotide
accuauacguaucgcuguc

SEQ ID NO: 479246 - RNA, 19 nt, Artificial Sequence
  Description of Artificial Sequence: Synthetic oligonucleotide
ggaacgguaucgcuuacag

SEQ ID NO: 479247 - RNA, 19 nt, Artificial Sequence
  Description of Artificial Sequence: Synthetic oligonucleotide
ucuucacaccuauacguau

SEQ ID NO: 479248 - RNA, 19 nt, Artificial Sequence
  Description of Artificial Sequence: Synthetic oligonucleotide
ugugccggacaugugguag

SEQ ID NO: 479249 - RNA, 19 nt, Artificial Sequence
  Description of Artificial Sequence: Synthetic oligonucleotide
ucgcuuacagugaugcauc

SEQ ID NO: 479250 - RNA, 19 nt, Artificial Sequence
  Description of Artificial Sequence: Synthetic oligonucleotide
gagacgaaagcggacggug

SEQ ID NO: 479251 - RNA, 19 nt, Artificial Sequence
  Description of Artificial Sequence: Synthetic oligonucleotide
gaaggaccgcuccucgggg

SEQ ID NO: 479252 - RNA, 19 nt, Artificial Sequence
  Description of Artificial Sequence: Synthetic oligonucleotide
uggguaucguagucgaccu

SEQ ID NO: 479253 - RNA, 19 nt, Artificial Sequence
  Description of Artificial Sequence: Synthetic oligonucleotide
gggucgaacucuaacaucc

SEQ ID NO: 479254 - RNA, 19 nt, Artificial Sequence
  Description of Artificial Sequence: Synthetic oligonucleotide
uaauuucuagacgggcagc

SEQ ID NO: 479255 - RNA, 19 nt, Artificial Sequence
  Description of Artificial Sequence: Synthetic oligonucleotide
ucuccgaugucgagaacgu

SEQ ID NO: 479256 - RNA, 19 nt, Artificial Sequence
  Description of Artificial Sequence: Synthetic oligonucleotide
cuucacaccuauacguauc

SEQ ID NO: 479257 - RNA, 19 nt, Artificial Sequence
  Description of Artificial Sequence: Synthetic oligonucleotide
ucgccgauccggcacacca

SEQ ID NO: 479258 - RNA, 19 nt, Artificial Sequence
  Description of Artificial Sequence: Synthetic oligonucleotide
acaccuauacguaucgcug

SEQ ID NO: 479259 - RNA, 19 nt, Artificial Sequence
  Description of Artificial Sequence: Synthetic oligonucleotide
ugguaagaccgccuccucu

SEQ ID NO: 479260 - RNA, 19 nt, Artificial Sequence
  Description of Artificial Sequence: Synthetic oligonucleotide
aguacucgaagagaaugca

SEQ ID NO: 479261 - RNA, 19 nt, Artificial Sequence
  Description of Artificial Sequence: Synthetic oligonucleotide
uugcgcgcaagaagcaagc

SEQ ID NO: 479262 - RNA, 19 nt, Artificial Sequence
  Description of Artificial Sequence: Synthetic oligonucleotide
uacggugaaucauguguga

SEQ ID NO: 479263 - RNA, 19 nt, Artificial Sequence
  Description of Artificial Sequence: Synthetic oligonucleotide
ugucgagaacgugaagacc

SEQ ID NO: 479264 - RNA, 19 nt, Artificial Sequence
  Description of Artificial Sequence: Synthetic oligonucleotide
guacggugaaucaugugug

SEQ ID NO: 479265 - RNA, 19 nt, Artificial Sequence
  Description of Artificial Sequence: Synthetic oligonucleotide
cuucaugccucccgacugg

SEQ ID NO: 479266 - RNA, 19 nt, Artificial Sequence
  Description of Artificial Sequence: Synthetic oligonucleotide
agacgaaagcggacggugc

SEQ ID NO: 479267 - RNA, 19 nt, Artificial Sequence
  Description of Artificial Sequence: Synthetic oligonucleotide
gguacggugaaucaugugu

SEQ ID NO: 479268 - RNA, 19 nt, Artificial Sequence
  Description of Artificial Sequence: Synthetic oligonucleotide
uacggcguuugugacagug

SEQ ID NO: 479269 - RNA, 19 nt, Artificial Sequence
  Description of Artificial Sequence: Synthetic oligonucleotide
gguacggcguuugugacag

SEQ ID NO: 479270 - RNA, 19 nt, Artificial Sequence
  Description of Artificial Sequence: Synthetic oligonucleotide
uuugaaagucuuggcgcca

SEQ ID NO: 479271 - RNA, 19 nt, Artificial Sequence
  Description of Artificial Sequence: Synthetic oligonucleotide
gaagaugcccgcgagccuc

SEQ ID NO: 479272 - RNA, 19 nt, Artificial Sequence
  Description of Artificial Sequence: Synthetic oligonucleotide
agugaugcaucgucuccca

SEQ ID NO: 479273 - RNA, 19 nt, Artificial Sequence
  Description of Artificial Sequence: Synthetic oligonucleotide
ucgagaacgugaagaccca

SEQ ID NO: 479274 - RNA, 19 nt, Artificial Sequence
  Description of Artificial Sequence: Synthetic oligonucleotide
aacccaccggacugccagg

SEQ ID NO: 479275 - RNA, 19 nt, Artificial Sequence
  Description of Artificial Sequence: Synthetic oligonucleotide
acgaaagcggacggugcgc

SEQ ID NO: 479276 - RNA, 19 nt, Artificial Sequence
  Description of Artificial Sequence: Synthetic oligonucleotide
gagaguacguccccuucuc

SEQ ID NO: 479277 - RNA, 19 nt, Artificial Sequence
  Description of Artificial Sequence: Synthetic oligonucleotide
gaggcgcugcuacaagacc

SEQ ID NO: 479278 - RNA, 19 nt, Artificial Sequence
  Description of Artificial Sequence: Synthetic oligonucleotide
cauuacggaugaucuucag

SEQ ID NO: 479279 - RNA, 19 nt, Artificial Sequence
  Description of Artificial Sequence: Synthetic oligonucleotide
ugcggcuaggccccacucc

SEQ ID NO: 479280 - RNA, 19 nt, Artificial Sequence
  Description of Artificial Sequence: Synthetic oligonucleotide
ugaccgucuccgaugucga

SEQ ID NO: 479281 - RNA, 19 nt, Artificial Sequence
  Description of Artificial Sequence: Synthetic oligonucleotide
ggaggaacccaccggacug

SEQ ID NO: 479282 - RNA, 19 nt, Artificial Sequence
  Description of Artificial Sequence: Synthetic oligonucleotide
ugggguuacggcugcugug

SEQ ID NO: 479283 - RNA, 19 nt, Artificial Sequence
  Description of Artificial Sequence: Synthetic oligonucleotide
agcaagcgacacauucugc

SEQ ID NO: 479284 - RNA, 19 nt, Artificial Sequence
  Description of Artificial Sequence: Synthetic oligonucleotide
cuagacgggcagcuucccg

SEQ ID NO: 479285 - RNA, 19 nt, Artificial Sequence
  Description of Artificial Sequence: Synthetic oligonucleotide
uaucgcuuacagugaugca

SEQ ID NO: 479286 - RNA, 19 nt, Artificial Sequence
  Description of Artificial Sequence: Synthetic oligonucleotide
acguaucgcugucacggug

SEQ ID NO: 479287 - RNA, 19 nt, Artificial Sequence
  Description of Artificial Sequence: Synthetic oligonucleotide
ugguacggcguuugugaca

SEQ ID NO: 479288 - RNA, 19 nt, Artificial Sequence
  Description of Artificial Sequence: Synthetic oligonucleotide
gugccggacaugugguagg

SEQ ID NO: 479289 - RNA, 19 nt, Artificial Sequence
  Description of Artificial Sequence: Synthetic oligonucleotide
gaucaccucaggugggcga

SEQ ID NO: 479290 - RNA, 19 nt, Artificial Sequence
  Description of Artificial Sequence: Synthetic oligonucleotide
gguaucuccgaggguaggg

SEQ ID NO: 479291 - RNA, 19 nt, Artificial Sequence
  Description of Artificial Sequence: Synthetic oligonucleotide
uucucgaggaggcgcugcu

SEQ ID NO: 479292 - RNA, 19 nt, Artificial Sequence
  Description of Artificial Sequence: Synthetic oligonucleotide
aagcggacggugcgcccgg

SEQ ID NO: 479293 - RNA, 19 nt, Artificial Sequence
  Description of Artificial Sequence: Synthetic oligonucleotide
ugcgcgcaagaagcaagcg

SEQ ID NO: 479294 - RNA, 19 nt, Artificial Sequence
  Description of Artificial Sequence: Synthetic oligonucleotide
gguaucguagucgaccuuc

SEQ ID NO: 479295 - RNA, 19 nt, Artificial Sequence
  Description of Artificial Sequence: Synthetic oligonucleotide
acuugcccacauuacggau

SEQ ID NO: 479296 - RNA, 19 nt, Artificial Sequence
  Description of Artificial Sequence: Synthetic oligonucleotide
agccaaucgccgauccggc

SEQ ID NO: 479297 - RNA, 19 nt, Artificial Sequence
  Description of Artificial Sequence: Synthetic oligonucleotide
ugguacggugaaucaugug

SEQ ID NO: 479298 - RNA, 19 nt, Artificial Sequence
  Description of Artificial Sequence: Synthetic oligonucleotide
cuugcggguacgguauggc

SEQ ID NO: 479299 - RNA, 19 nt, Artificial Sequence
  Description of Artificial Sequence: Synthetic oligonucleotide
agaguacguccccuucucu

SEQ ID NO: 479300 - RNA, 19 nt, Artificial Sequence
  Description of Artificial Sequence: Synthetic oligonucleotide
aaucgccgauccggcacac

SEQ ID NO: 479301 - RNA, 19 nt, Artificial Sequence
  Description of Artificial Sequence: Synthetic oligonucleotide
uaucuccgaggguagggua

SEQ ID NO: 479302 - RNA, 19 nt, Artificial Sequence
  Description of Artificial Sequence: Synthetic oligonucleotide
ucgcgugacgcagccgucg

SEQ ID NO: 479303 - RNA, 19 nt, Artificial Sequence
  Description of Artificial Sequence: Synthetic oligonucleotide
gaagcaagcgacacauucu

SEQ ID NO: 479304 - RNA, 19 nt, Artificial Sequence
  Description of Artificial Sequence: Synthetic oligonucleotide
augccucccgacugguaag

SEQ ID NO: 479305 - RNA, 19 nt, Artificial Sequence
  Description of Artificial Sequence: Synthetic oligonucleotide
ucgagcuugcggagcaguc

SEQ ID NO: 479306 - RNA, 19 nt, Artificial Sequence
  Description of Artificial Sequence: Synthetic oligonucleotide
uacguaucgcugucacggu

SEQ ID NO: 479307 - RNA, 19 nt, Artificial Sequence
  Description of Artificial Sequence: Synthetic oligonucleotide
cugguacggcguuugugac

SEQ ID NO: 479308 - RNA, 19 nt, Artificial Sequence
  Description of Artificial Sequence: Synthetic oligonucleotide
ucacaccuauacguaucgc

SEQ ID NO: 479309 - RNA, 19 nt, Artificial Sequence
  Description of Artificial Sequence: Synthetic oligonucleotide
cacaccuauacguaucgcu

SEQ ID NO: 479310 - RNA, 19 nt, Artificial Sequence
  Description of Artificial Sequence: Synthetic oligonucleotide
cuacaagaccugguacggc

SEQ ID NO: 479311 - RNA, 19 nt, Artificial Sequence
  Description of Artificial Sequence: Synthetic oligonucleotide
ugcgcccgggcugaggaag

SEQ ID NO: 479312 - RNA, 19 nt, Artificial Sequence
  Description of Artificial Sequence: Synthetic oligonucleotide
gcucuucacaccuauacgu

SEQ ID NO: 479313 - RNA, 19 nt, Artificial Sequence
  Description of Artificial Sequence: Synthetic oligonucleotide
cacauaugaccauggaagu

SEQ ID NO: 479314 - RNA, 19 nt, Artificial Sequence
  Description of Artificial Sequence: Synthetic oligonucleotide
acauaugaccauggaaguu

SEQ ID NO: 479315 - RNA, 19 nt, Artificial Sequence
  Description of Artificial Sequence: Synthetic oligonucleotide
agagcuguuuucaucccaa

SEQ ID NO: 479316 - RNA, 19 nt, Artificial Sequence
  Description of Artificial Sequence: Synthetic oligonucleotide
gcucucucgagcuugcgga

SEQ ID NO: 479317 - RNA, 19 nt, Artificial Sequence
  Description of Artificial Sequence: Synthetic oligonucleotide
ugcagccgauacuccagac

SEQ ID NO: 479318 - RNA, 19 nt, Artificial Sequence
  Description of Artificial Sequence: Synthetic oligonucleotide
cacgaucucauaucgcucu

SEQ ID NO: 479319 - RNA, 19 nt, Artificial Sequence
  Description of Artificial Sequence: Synthetic oligonucleotide
cucuucacaccuauacgua

SEQ ID NO: 479320 - RNA, 19 nt, Artificial Sequence
  Description of Artificial Sequence: Synthetic oligonucleotide
acggcguuugugacagugg

SEQ ID NO: 479321 - RNA, 19 nt, Artificial Sequence
  Description of Artificial Sequence: Synthetic oligonucleotide
gcgcuagagacgaaagcgg

SEQ ID NO: 479322 - RNA, 19 nt, Artificial Sequence
  Description of Artificial Sequence: Synthetic oligonucleotide
agaccugguacggcguuug

SEQ ID NO: 479323 - RNA, 19 nt, Artificial Sequence
  Description of Artificial Sequence: Synthetic oligonucleotide
ccacuccccacuccgagcg

SEQ ID NO: 479324 - RNA, 19 nt, Artificial Sequence
  Description of Artificial Sequence: Synthetic oligonucleotide
accgucuccgaugucgaga

SEQ ID NO: 479325 - RNA, 19 nt, Artificial Sequence
  Description of Artificial Sequence: Synthetic oligonucleotide
ccugguacggcguuuguga

SEQ ID NO: 479326 - RNA, 19 nt, Artificial Sequence
  Description of Artificial Sequence: Synthetic oligonucleotide
gccgauccggcacaccagg

SEQ ID NO: 479327 - RNA, 19 nt, Artificial Sequence
  Description of Artificial Sequence: Synthetic oligonucleotide
uauggcccucucucucgug

SEQ ID NO: 479328 - RNA, 19 nt, Artificial Sequence
  Description of Artificial Sequence: Synthetic oligonucleotide
ccgcucuucacaccuauac

SEQ ID NO: 479329 - RNA, 19 nt, Artificial Sequence
  Description of Artificial Sequence: Synthetic oligonucleotide
agggcgcuagagacgaaag

SEQ ID NO: 479330 - RNA, 19 nt, Artificial Sequence
  Description of Artificial Sequence: Synthetic oligonucleotide
ugcuugcggguacgguaug

SEQ ID NO: 479331 - RNA, 19 nt, Artificial Sequence
  Description of Artificial Sequence: Synthetic oligonucleotide
guaagaccgccuccucuuc

SEQ ID NO: 479332 - RNA, 19 nt, Artificial Sequence
  Description of Artificial Sequence: Synthetic oligonucleotide
accugguacggcguuugug

SEQ ID NO: 479333 - RNA, 19 nt, Artificial Sequence
  Description of Artificial Sequence: Synthetic oligonucleotide
gcaagcgacacauucugcu

SEQ ID NO: 479334 - RNA, 19 nt, Artificial Sequence
  Description of Artificial Sequence: Synthetic oligonucleotide
gaccgucuccgaugucgag

SEQ ID NO: 479335 - RNA, 19 nt, Artificial Sequence
  Description of Artificial Sequence: Synthetic oligonucleotide
ucccgacugguaagaccgc

SEQ ID NO: 479336 - RNA, 19 nt, Artificial Sequence
  Description of Artificial Sequence: Synthetic oligonucleotide
acggugaaucaugugugau

SEQ ID NO: 479337 - RNA, 19 nt, Artificial Sequence
  Description of Artificial Sequence: Synthetic oligonucleotide
cucucgagcuugcggagca

SEQ ID NO: 479338 - RNA, 19 nt, Artificial Sequence
  Description of Artificial Sequence: Synthetic oligonucleotide
cuucgcgugacgcagccgu

SEQ ID NO: 479339 - RNA, 19 nt, Artificial Sequence
  Description of Artificial Sequence: Synthetic oligonucleotide
cucucucgugaccgucucc

SEQ ID NO: 479340 - RNA, 19 nt, Artificial Sequence
  Description of Artificial Sequence: Synthetic oligonucleotide
acgguaucgcuuacaguga

SEQ ID NO: 479341 - RNA, 19 nt, Artificial Sequence
  Description of Artificial Sequence: Synthetic oligonucleotide
ccaaucgccgauccggcac

SEQ ID NO: 479342 - RNA, 19 nt, Artificial Sequence
  Description of Artificial Sequence: Synthetic oligonucleotide
ggacuggcauuguucuccc

SEQ ID NO: 479343 - RNA, 19 nt, Artificial Sequence
  Description of Artificial Sequence: Synthetic oligonucleotide
ccgggagggcgcuagagac

SEQ ID NO: 479344 - RNA, 19 nt, Artificial Sequence
  Description of Artificial Sequence: Synthetic oligonucleotide
gcggagaggacuggcauug

SEQ ID NO: 479345 - RNA, 19 nt, Artificial Sequence
  Description of Artificial Sequence: Synthetic oligonucleotide
uccgagcgccucuuccgcu

SEQ ID NO: 479346 - RNA, 19 nt, Artificial Sequence
  Description of Artificial Sequence: Synthetic oligonucleotide
cugcgcgcggagaggacug

SEQ ID NO: 479347 - RNA, 19 nt, Artificial Sequence
  Description of Artificial Sequence: Synthetic oligonucleotide
guaucguagucgaccuuca

SEQ ID NO: 479348 - RNA, 19 nt, Artificial Sequence
  Description of Artificial Sequence: Synthetic oligonucleotide
ugccucccgacugguaaga

SEQ ID NO: 479349 - RNA, 19 nt, Artificial Sequence
  Description of Artificial Sequence: Synthetic oligonucleotide
gagggcgcuagagacgaaa

SEQ ID NO: 479350 - RNA, 19 nt, Artificial Sequence
  Description of Artificial Sequence: Synthetic oligonucleotide
gaguacguccccuucucuu

SEQ ID NO: 479351 - RNA, 19 nt, Artificial Sequence
  Description of Artificial Sequence: Synthetic oligonucleotide
aagaccugguacggcguuu

SEQ ID NO: 479352 - RNA, 19 nt, Artificial Sequence
  Description of Artificial Sequence: Synthetic oligonucleotide
guugaaccagucagacauc

SEQ ID NO: 479353 - RNA, 19 nt, Artificial Sequence
  Description of Artificial Sequence: Synthetic oligonucleotide
caccuauacguaucgcugu

SEQ ID NO: 479354 - RNA, 19 nt, Artificial Sequence
  Description of Artificial Sequence: Synthetic oligonucleotide
ccucccgacugguaagacc

SEQ ID NO: 479355 - RNA, 19 nt, Artificial Sequence
  Description of Artificial Sequence: Synthetic oligonucleotide
caaucgccgauccggcaca

SEQ ID NO: 479356 - RNA, 19 nt, Artificial Sequence
  Description of Artificial Sequence: Synthetic oligonucleotide
aucgccgauccggcacacc

SEQ ID NO: 479357 - RNA, 19 nt, Artificial Sequence
  Description of Artificial Sequence: Synthetic oligonucleotide
uuggagccaaucgccgauc

SEQ ID NO: 479358 - RNA, 19 nt, Artificial Sequence
  Description of Artificial Sequence: Synthetic oligonucleotide
gacuccgcuugcgcgcaag

SEQ ID NO: 479359 - RNA, 19 nt, Artificial Sequence
  Description of Artificial Sequence: Synthetic oligonucleotide
uucgcgugacgcagccguc

SEQ ID NO: 479360 - RNA, 19 nt, Artificial Sequence
  Description of Artificial Sequence: Synthetic oligonucleotide
gguaucgcuuacagugaug

SEQ ID NO: 479361 - RNA, 19 nt, Artificial Sequence
  Description of Artificial Sequence: Synthetic oligonucleotide
uaccgcccaucagagcugu

SEQ ID NO: 479362 - RNA, 19 nt, Artificial Sequence
  Description of Artificial Sequence: Synthetic oligonucleotide
cagcgguagcucagguaug

SEQ ID NO: 479363 - RNA, 19 nt, Artificial Sequence
  Description of Artificial Sequence: Synthetic oligonucleotide
ccgcucuagccccaacucg

SEQ ID NO: 479364 - RNA, 19 nt, Artificial Sequence
  Description of Artificial Sequence: Synthetic oligonucleotide
ggcucgacccggcccagag

SEQ ID NO: 479365 - RNA, 19 nt, Artificial Sequence
  Description of Artificial Sequence: Synthetic oligonucleotide
ugcgcgcggagaggacugg

SEQ ID NO: 479366 - RNA, 19 nt, Artificial Sequence
  Description of Artificial Sequence: Synthetic oligonucleotide
gcuugcggguacgguaugg

SEQ ID NO: 479367 - RNA, 19 nt, Artificial Sequence
  Description of Artificial Sequence: Synthetic oligonucleotide
cugguacggugaaucaugu

SEQ ID NO: 479368 - RNA, 19 nt, Artificial Sequence
  Description of Artificial Sequence: Synthetic oligonucleotide
gguaagaccgccuccucuu

SEQ ID NO: 479369 - RNA, 19 nt, Artificial Sequence
  Description of Artificial Sequence: Synthetic oligonucleotide
gcgcgcaagaagcaagcga

SEQ ID NO: 479370 - RNA, 19 nt, Artificial Sequence
  Description of Artificial Sequence: Synthetic oligonucleotide
ccacgaucucauaucgcuc

SEQ ID NO: 479371 - RNA, 19 nt, Artificial Sequence
  Description of Artificial Sequence: Synthetic oligonucleotide
ggagaguacguccccuucu

SEQ ID NO: 479372 - RNA, 19 nt, Artificial Sequence
  Description of Artificial Sequence: Synthetic oligonucleotide
cgcuuacagugaugcaucg

SEQ ID NO: 479373 - RNA, 19 nt, Artificial Sequence
  Description of Artificial Sequence: Synthetic oligonucleotide
ggcguuugugacaguggug

SEQ ID NO: 479374 - RNA, 19 nt, Artificial Sequence
  Description of Artificial Sequence: Synthetic oligonucleotide
cccacgaucucauaucgcu

SEQ ID NO: 479375 - RNA, 19 nt, Artificial Sequence
  Description of Artificial Sequence: Synthetic oligonucleotide
cuccgaugucgagaacgug

SEQ ID NO: 479376 - RNA, 19 nt, Artificial Sequence
  Description of Artificial Sequence: Synthetic oligonucleotide
guaucuccgaggguagggu

SEQ ID NO: 479377 - RNA, 19 nt, Artificial Sequence
  Description of Artificial Sequence: Synthetic oligonucleotide
ggcaugcuugcggguacgg

SEQ ID NO: 479378 - RNA, 19 nt, Artificial Sequence
  Description of Artificial Sequence: Synthetic oligonucleotide
uccugcgcgcggagaggac

SEQ ID NO: 479379 - RNA, 19 nt, Artificial Sequence
  Description of Artificial Sequence: Synthetic oligonucleotide
gguacgguauggcccucuc

SEQ ID NO: 479380 - RNA, 19 nt, Artificial Sequence
  Description of Artificial Sequence: Synthetic oligonucleotide
cguagucgaccuucaugcc

SEQ ID NO: 479381 - RNA, 19 nt, Artificial Sequence
  Description of Artificial Sequence: Synthetic oligonucleotide
ccgguaucuccgaggguag

SEQ ID NO: 479382 - RNA, 19 nt, Artificial Sequence
  Description of Artificial Sequence: Synthetic oligonucleotide
accgccccuucgcgugacg

SEQ ID NO: 479383 - RNA, 19 nt, Artificial Sequence
  Description of Artificial Sequence: Synthetic oligonucleotide
ucucgaggaggcgcugcua

SEQ ID NO: 479384 - RNA, 19 nt, Artificial Sequence
  Description of Artificial Sequence: Synthetic oligonucleotide
cugcggcuaggccccacuc

SEQ ID NO: 479385 - RNA, 19 nt, Artificial Sequence
  Description of Artificial Sequence: Synthetic oligonucleotide
cucccuucgggauggguau

SEQ ID NO: 479386 - RNA, 19 nt, Artificial Sequence
  Description of Artificial Sequence: Synthetic oligonucleotide
cacuccccacuccgagcgc

SEQ ID NO: 479387 - RNA, 19 nt, Artificial Sequence
  Description of Artificial Sequence: Synthetic oligonucleotide
ucuuggcgccacgccccag

SEQ ID NO: 479388 - RNA, 19 nt, Artificial Sequence
  Description of Artificial Sequence: Synthetic oligonucleotide
gccccuucgcgugacgcag

SEQ ID NO: 479389 - RNA, 19 nt, Artificial Sequence
  Description of Artificial Sequence: Synthetic oligonucleotide
cugggguuacggcugcugu

SEQ ID NO: 479390 - RNA, 19 nt, Artificial Sequence
  Description of Artificial Sequence: Synthetic oligonucleotide
ccccacgaucucauaucgc

SEQ ID NO: 479391 - RNA, 19 nt, Artificial Sequence
  Description of Artificial Sequence: Synthetic oligonucleotide
cgguacuugcccacauuac

SEQ ID NO: 479392 - RNA, 19 nt, Artificial Sequence
  Description of Artificial Sequence: Synthetic oligonucleotide
gcgacacauucugcucucg

SEQ ID NO: 479393 - RNA, 19 nt, Artificial Sequence
  Description of Artificial Sequence: Synthetic oligonucleotide
cgaaagcggacggugcgcc

SEQ ID NO: 479394 - RNA, 19 nt, Artificial Sequence
  Description of Artificial Sequence: Synthetic oligonucleotide
gggcaugcuugcggguacg

SEQ ID NO: 479395 - RNA, 19 nt, Artificial Sequence
  Description of Artificial Sequence: Synthetic oligonucleotide
ccgggaagaugcccgcgag

SEQ ID NO: 479396 - RNA, 19 nt, Artificial Sequence
  Description of Artificial Sequence: Synthetic oligonucleotide
cgcuagagacgaaagcgga

SEQ ID NO: 479397 - RNA, 19 nt, Artificial Sequence
  Description of Artificial Sequence: Synthetic oligonucleotide
ggguccacuccgccgccgc

SEQ ID NO: 479398 - RNA, 19 nt, Artificial Sequence
  Description of Artificial Sequence: Synthetic oligonucleotide
cgcgacuccgcuugcgcgc

SEQ ID NO: 479399 - RNA, 19 nt, Artificial Sequence
  Description of Artificial Sequence: Synthetic oligonucleotide
ucccuucgggauggguauc

SEQ ID NO: 479400 - RNA, 19 nt, Artificial Sequence
  Description of Artificial Sequence: Synthetic oligonucleotide
cucggcgguggggucugag

SEQ ID NO: 479401 - RNA, 19 nt, Artificial Sequence
  Description of Artificial Sequence: Synthetic oligonucleotide
cccgacugguaagaccgcc

SEQ ID NO: 479402 - RNA, 19 nt, Artificial Sequence
  Description of Artificial Sequence: Synthetic oligonucleotide
cccuucgcgugacgcagcc

SEQ ID NO: 479403 - RNA, 19 nt, Artificial Sequence
  Description of Artificial Sequence: Synthetic oligonucleotide
cccgguaucuccgagggua

SEQ ID NO: 479404 - RNA, 19 nt, Artificial Sequence
  Description of Artificial Sequence: Synthetic oligonucleotide
ugcgcugagcagggucgaa

SEQ ID NO: 479405 - RNA, 19 nt, Artificial Sequence
  Description of Artificial Sequence: Synthetic oligonucleotide
gggaacgguaucgcuuaca

SEQ ID NO: 479406 - RNA, 19 nt, Artificial Sequence
  Description of Artificial Sequence: Synthetic oligonucleotide
ccgucuccgaugucgagaa

SEQ ID NO: 479407 - RNA, 19 nt, Artificial Sequence
  Description of Artificial Sequence: Synthetic oligonucleotide
ccuauacguaucgcuguca

SEQ ID NO: 479408 - RNA, 19 nt, Artificial Sequence
  Description of Artificial Sequence: Synthetic oligonucleotide
gcggguacgguauggcccu

SEQ ID NO: 479409 - RNA, 19 nt, Artificial Sequence
  Description of Artificial Sequence: Synthetic oligonucleotide
ggguuacggcugcugugga

SEQ ID NO: 479410 - RNA, 19 nt, Artificial Sequence
  Description of Artificial Sequence: Synthetic oligonucleotide
gaccugguacggcguuugu

SEQ ID NO: 479411 - RNA, 19 nt, Artificial Sequence
  Description of Artificial Sequence: Synthetic oligonucleotide
agcggacggugcgcccggg

SEQ ID NO: 479412 - RNA, 19 nt, Artificial Sequence
  Description of Artificial Sequence: Synthetic oligonucleotide
cgaugucgagaacgugaag

SEQ ID NO: 479413 - RNA, 19 nt, Artificial Sequence
  Description of Artificial Sequence: Synthetic oligonucleotide
gcuugcgcgcaagaagcaa

SEQ ID NO: 479414 - RNA, 19 nt, Artificial Sequence
  Description of Artificial Sequence: Synthetic oligonucleotide
cuccgcucuucacaccuau

SEQ ID NO: 479415 - RNA, 19 nt, Artificial Sequence
  Description of Artificial Sequence: Synthetic oligonucleotide
cgcgugacgcagccgucgg

SEQ ID NO: 479416 - RNA, 19 nt, Artificial Sequence
  Description of Artificial Sequence: Synthetic oligonucleotide
gggucugaggagaguacgu

SEQ ID NO: 479417 - RNA, 19 nt, Artificial Sequence
  Description of Artificial Sequence: Synthetic oligonucleotide
gcgagccucggcggugggg

SEQ ID NO: 479418 - RNA, 19 nt, Artificial Sequence
  Description of Artificial Sequence: Synthetic oligonucleotide
gcuuacagugaugcaucgu

SEQ ID NO: 479419 - RNA, 19 nt, Artificial Sequence
  Description of Artificial Sequence: Synthetic oligonucleotide
ccccuucgcgugacgcagc

SEQ ID NO: 479420 - RNA, 19 nt, Artificial Sequence
  Description of Artificial Sequence: Synthetic oligonucleotide
gcgcccgggcugaggaagg

SEQ ID NO: 479421 - RNA, 19 nt, Artificial Sequence
  Description of Artificial Sequence: Synthetic oligonucleotide
ggucgaacucuaacauccu

SEQ ID NO: 479422 - RNA, 19 nt, Artificial Sequence
  Description of Artificial Sequence: Synthetic oligonucleotide
ccuucgcgugacgcagccg

SEQ ID NO: 479423 - RNA, 19 nt, Artificial Sequence
  Description of Artificial Sequence: Synthetic oligonucleotide
cgccgauccggcacaccag

SEQ ID NO: 479424 - RNA, 19 nt, Artificial Sequence
  Description of Artificial Sequence: Synthetic oligonucleotide
gcggacggugcgcccgggc

SEQ ID NO: 479425 - RNA, 19 nt, Artificial Sequence
  Description of Artificial Sequence: Synthetic oligonucleotide
cgguaucuccgaggguagg

SEQ ID NO: 479426 - RNA, 19 nt, Artificial Sequence
  Description of Artificial Sequence: Synthetic oligonucleotide
ccgccccuucgcgugacgc

SEQ ID NO: 479427 - RNA, 19 nt, Artificial Sequence
  Description of Artificial Sequence: Synthetic oligonucleotide
ggaacccaccggacugcca

SEQ ID NO: 479428 - RNA, 19 nt, Artificial Sequence
  Description of Artificial Sequence: Synthetic oligonucleotide
cugucacgguguucccggu

SEQ ID NO: 479429 - RNA, 19 nt, Artificial Sequence
  Description of Artificial Sequence: Synthetic oligonucleotide
ccgacugguaagaccgccu

SEQ ID NO: 479430 - RNA, 19 nt, Artificial Sequence
  Description of Artificial Sequence: Synthetic oligonucleotide
gccucccgacugguaagac

SEQ ID NO: 479431 - RNA, 19 nt, Artificial Sequence
  Description of Artificial Sequence: Synthetic oligonucleotide
gcugcggcuaggccccacu

SEQ ID NO: 479432 - RNA, 19 nt, Artificial Sequence
  Description of Artificial Sequence: Synthetic oligonucleotide
gcaugcuugcggguacggu

SEQ ID NO: 479433 - RNA, 19 nt, Artificial Sequence
  Description of Artificial Sequence: Synthetic oligonucleotide
cgcuugcgcgcaagaagca

SEQ ID NO: 479434 - RNA, 19 nt, Artificial Sequence
  Description of Artificial Sequence: Synthetic oligonucleotide
ggguaggguaggcggucau

SEQ ID NO: 479435 - RNA, 19 nt, Artificial Sequence
  Description of Artificial Sequence: Synthetic oligonucleotide
ggguacgguauggcccucu

SEQ ID NO: 479436 - RNA, 19 nt, Artificial Sequence
  Description of Artificial Sequence: Synthetic oligonucleotide
cuggccgcucuagccccaa

SEQ ID NO: 479437 - RNA, 19 nt, Artificial Sequence
  Description of Artificial Sequence: Synthetic oligonucleotide
cgucuccgaugucgagaac

SEQ ID NO: 479438 - RNA, 19 nt, Artificial Sequence
  Description of Artificial Sequence: Synthetic oligonucleotide
ccugcgcgcggagaggacu

SEQ ID NO: 479439 - RNA, 19 nt, Artificial Sequence
  Description of Artificial Sequence: Synthetic oligonucleotide
cgccccuucgcgugacgca

SEQ ID NO: 479440 - RNA, 19 nt, Artificial Sequence
  Description of Artificial Sequence: Synthetic oligonucleotide
ccgauccggcacaccaggu

SEQ ID NO: 479441 - RNA, 19 nt, Artificial Sequence
  Description of Artificial Sequence: Synthetic oligonucleotide
ggcugcggcuaggccccac

SEQ ID NO: 479442 - RNA, 19 nt, Artificial Sequence
  Description of Artificial Sequence: Synthetic oligonucleotide
gcuccgcucuucacaccua

SEQ ID NO: 479443 - RNA, 19 nt, Artificial Sequence
  Description of Artificial Sequence: Synthetic oligonucleotide
cgugaccgucuccgauguc

SEQ ID NO: 479444 - RNA, 19 nt, Artificial Sequence
  Description of Artificial Sequence: Synthetic oligonucleotide
ccgcccaucagagcuguuu

SEQ ID NO: 479445 - RNA, 19 nt, Artificial Sequence
  Description of Artificial Sequence: Synthetic oligonucleotide
ccuucgggauggguaucgu

SEQ ID NO: 479446 - RNA, 19 nt, Artificial Sequence
  Description of Artificial Sequence: Synthetic oligonucleotide
cccgguacuugcccacauu

SEQ ID NO: 479447 - RNA, 19 nt, Artificial Sequence
  Description of Artificial Sequence: Synthetic oligonucleotide
cgagaacgugaagacccau

SEQ ID NO: 479448 - RNA, 19 nt, Artificial Sequence
  Description of Artificial Sequence: Synthetic oligonucleotide
cggguacgguauggcccuc

SEQ ID NO: 479449 - RNA, 19 nt, Artificial Sequence
  Description of Artificial Sequence: Synthetic oligonucleotide
cggagaggacuggcauugu

SEQ ID NO: 479450 - RNA, 19 nt, Artificial Sequence
  Description of Artificial Sequence: Synthetic oligonucleotide
cgacuccgcuugcgcgcaa

SEQ ID NO: 479451 - RNA, 19 nt, Artificial Sequence
  Description of Artificial Sequence: Synthetic oligonucleotide
aauauauauauauauauuu

SEQ ID NO: 479452 - RNA, 19 nt, Artificial Sequence
  Description of Artificial Sequence: Synthetic oligonucleotide
uuuauauaaauauauauau

SEQ ID NO: 479453 - RNA, 19 nt, Artificial Sequence
  Description of Artificial Sequence: Synthetic oligonucleotide
uauauaaauauauauauau

SEQ ID NO: 479454 - RNA, 19 nt, Artificial Sequence
  Description of Artificial Sequence: Synthetic oligonucleotide
uauauauauauauauuuag

SEQ ID NO: 479455 - RNA, 19 nt, Artificial Sequence
  Description of Artificial Sequence: Synthetic oligonucleotide
uauaaauauauauauauau

SEQ ID NO: 479456 - RNA, 19 nt, Artificial Sequence
  Description of Artificial Sequence: Synthetic oligonucleotide
uaaauauauauauauauau

SEQ ID NO: 479457 - RNA, 19 nt, Artificial Sequence
  Description of Artificial Sequence: Synthetic oligonucleotide
agaauaauccuucugcugg

SEQ ID NO: 479458 - RNA, 19 nt, Artificial Sequence
  Description of Artificial Sequence: Synthetic oligonucleotide
uauauauauauauuuagaa

SEQ ID NO: 479459 - RNA, 19 nt, Artificial Sequence
  Description of Artificial Sequence: Synthetic oligonucleotide
aaauucucaacuccuggac

SEQ ID NO: 479460 - RNA, 19 nt, Artificial Sequence
  Description of Artificial Sequence: Synthetic oligonucleotide
agaacaaccauggaagucc

SEQ ID NO: 479461 - RNA, 19 nt, Artificial Sequence
  Description of Artificial Sequence: Synthetic oligonucleotide
aaauacuuucuucuucgac

SEQ ID NO: 479462 - RNA, 19 nt, Artificial Sequence
  Description of Artificial Sequence: Synthetic oligonucleotide
agugaaugaaugcauauug

SEQ ID NO: 479463 - RNA, 19 nt, Artificial Sequence
  Description of Artificial Sequence: Synthetic oligonucleotide
uauuugauuuauauggugu

SEQ ID NO: 479464 - RNA, 19 nt, Artificial Sequence
  Description of Artificial Sequence: Synthetic oligonucleotide
uucgaaaauacuuucuucu

SEQ ID NO: 479465 - RNA, 19 nt, Artificial Sequence
  Description of Artificial Sequence: Synthetic oligonucleotide
ucgaauuccagaauaugcc

SEQ ID NO: 479466 - RNA, 19 nt, Artificial Sequence
  Description of Artificial Sequence: Synthetic oligonucleotide
auauauauauauuuagaau

SEQ ID NO: 479467 - RNA, 19 nt, Artificial Sequence
  Description of Artificial Sequence: Synthetic oligonucleotide
ugcuuuguuaaauacauau

SEQ ID NO: 479468 - RNA, 19 nt, Artificial Sequence
  Description of Artificial Sequence: Synthetic oligonucleotide
uuugaacagaauagucucg

SEQ ID NO: 479469 - RNA, 19 nt, Artificial Sequence
  Description of Artificial Sequence: Synthetic oligonucleotide
ucauguauugucacguugc

SEQ ID NO: 479470 - RNA, 19 nt, Artificial Sequence
  Description of Artificial Sequence: Synthetic oligonucleotide
ucaguuuaccugaaccacg

SEQ ID NO: 479471 - RNA, 19 nt, Artificial Sequence
  Description of Artificial Sequence: Synthetic oligonucleotide
uggauagaugguuuuacag

SEQ ID NO: 479472 - RNA, 19 nt, Artificial Sequence
  Description of Artificial Sequence: Synthetic oligonucleotide
uuauauaaauauauauaua

SEQ ID NO: 479473 - RNA, 19 nt, Artificial Sequence
  Description of Artificial Sequence: Synthetic oligonucleotide
ugagauaaaucucaaguuu

SEQ ID NO: 479474 - RNA, 19 nt, Artificial Sequence
  Description of Artificial Sequence: Synthetic oligonucleotide
acuagggugaucugguugg

SEQ ID NO: 479475 - RNA, 19 nt, Artificial Sequence
  Description of Artificial Sequence: Synthetic oligonucleotide
uccgugucacaucauaggg

SEQ ID NO: 479476 - RNA, 19 nt, Artificial Sequence
  Description of Artificial Sequence: Synthetic oligonucleotide
accauggaaguccuggacc

SEQ ID NO: 479477 - RNA, 19 nt, Artificial Sequence
  Description of Artificial Sequence: Synthetic oligonucleotide
gaacagaauagucucguug

SEQ ID NO: 479478 - RNA, 19 nt, Artificial Sequence
  Description of Artificial Sequence: Synthetic oligonucleotide
aaagugaaugaaugcauau

SEQ ID NO: 479479 - RNA, 19 nt, Artificial Sequence
  Description of Artificial Sequence: Synthetic oligonucleotide
aacggaagagauguguuuc

SEQ ID NO: 479480 - RNA, 19 nt, Artificial Sequence
  Description of Artificial Sequence: Synthetic oligonucleotide
uucuggucuagcgacaucg

SEQ ID NO: 479481 - RNA, 19 nt, Artificial Sequence
  Description of Artificial Sequence: Synthetic oligonucleotide
ucugauucgaaaauacuuu

SEQ ID NO: 479482 - RNA, 19 nt, Artificial Sequence
  Description of Artificial Sequence: Synthetic oligonucleotide
uuuaccugaaccacggaaa

SEQ ID NO: 479483 - RNA, 19 nt, Artificial Sequence
  Description of Artificial Sequence: Synthetic oligonucleotide
ccaaauauggcccagucgg

SEQ ID NO: 479484 - RNA, 19 nt, Artificial Sequence
  Description of Artificial Sequence: Synthetic oligonucleotide
auguacuuccacuugacca

SEQ ID NO: 479485 - RNA, 19 nt, Artificial Sequence
  Description of Artificial Sequence: Synthetic oligonucleotide
aauucucaacuccuggaca

SEQ ID NO: 479486 - RNA, 19 nt, Artificial Sequence
  Description of Artificial Sequence: Synthetic oligonucleotide
uguacuuccacuugaccac

SEQ ID NO: 479487 - RNA, 19 nt, Artificial Sequence
  Description of Artificial Sequence: Synthetic oligonucleotide
aaauauauauauauauauu

SEQ ID NO: 479488 - RNA, 19 nt, Artificial Sequence
  Description of Artificial Sequence: Synthetic oligonucleotide
gaaugagcggguugcaccg

SEQ ID NO: 479489 - RNA, 19 nt, Artificial Sequence
  Description of Artificial Sequence: Synthetic oligonucleotide
ucgagugcaaacucgaagu

SEQ ID NO: 479490 - RNA, 19 nt, Artificial Sequence
  Description of Artificial Sequence: Synthetic oligonucleotide
ugaaagugaaugaaugcau

SEQ ID NO: 479491 - RNA, 19 nt, Artificial Sequence
  Description of Artificial Sequence: Synthetic oligonucleotide
uuuugagauucuucccucg

SEQ ID NO: 479492 - RNA, 19 nt, Artificial Sequence
  Description of Artificial Sequence: Synthetic oligonucleotide
ucuucccucggcaauacug

SEQ ID NO: 479493 - RNA, 19 nt, Artificial Sequence
  Description of Artificial Sequence: Synthetic oligonucleotide
agaauagucucguugugcu

SEQ ID NO: 479494 - RNA, 19 nt, Artificial Sequence
  Description of Artificial Sequence: Synthetic oligonucleotide
auauauauauauauuuaga

SEQ ID NO: 479495 - RNA, 19 nt, Artificial Sequence
  Description of Artificial Sequence: Synthetic oligonucleotide
uuauguucagaacaaccau

SEQ ID NO: 479496 - RNA, 19 nt, Artificial Sequence
  Description of Artificial Sequence: Synthetic oligonucleotide
uugccagagguacaccucg

SEQ ID NO: 479497 - RNA, 19 nt, Artificial Sequence
  Description of Artificial Sequence: Synthetic oligonucleotide
aggacugucuccauggcgc

SEQ ID NO: 479498 - RNA, 19 nt, Artificial Sequence
  Description of Artificial Sequence: Synthetic oligonucleotide
ugauucgaaaauacuuucu

SEQ ID NO: 479499 - RNA, 19 nt, Artificial Sequence
  Description of Artificial Sequence: Synthetic oligonucleotide
aauucccuuccaugggcac

SEQ ID NO: 479500 - RNA, 19 nt, Artificial Sequence
  Description of Artificial Sequence: Synthetic oligonucleotide
ucaacuagggugaucuggu

SEQ ID NO: 479501 - RNA, 19 nt, Artificial Sequence
  Description of Artificial Sequence: Synthetic oligonucleotide
aaagaacgaucccaagagu

SEQ ID NO: 479502 - RNA, 19 nt, Artificial Sequence
  Description of Artificial Sequence: Synthetic oligonucleotide
agucgggucguccuugccc

SEQ ID NO: 479503 - RNA, 19 nt, Artificial Sequence
  Description of Artificial Sequence: Synthetic oligonucleotide
aacuaucaaaauaacacuu

SEQ ID NO: 479504 - RNA, 19 nt, Artificial Sequence
  Description of Artificial Sequence: Synthetic oligonucleotide
caugucgagugcaaacucg

SEQ ID NO: 479505 - RNA, 19 nt, Artificial Sequence
  Description of Artificial Sequence: Synthetic oligonucleotide
auagccacggccaacguuc

SEQ ID NO: 479506 - RNA, 19 nt, Artificial Sequence
  Description of Artificial Sequence: Synthetic oligonucleotide
uaugccacacaucuacaga

SEQ ID NO: 479507 - RNA, 19 nt, Artificial Sequence
  Description of Artificial Sequence: Synthetic oligonucleotide
ucggcaauacugcaggacu

SEQ ID NO: 479508 - RNA, 19 nt, Artificial Sequence
  Description of Artificial Sequence: Synthetic oligonucleotide
gaauaagauaagacuuggg

SEQ ID NO: 479509 - RNA, 19 nt, Artificial Sequence
  Description of Artificial Sequence: Synthetic oligonucleotide
caguuuaccugaaccacgg

SEQ ID NO: 479510 - RNA, 19 nt, Artificial Sequence
  Description of Artificial Sequence: Synthetic oligonucleotide
auccgugucacaucauagg

SEQ ID NO: 479511 - RNA, 19 nt, Artificial Sequence
  Description of Artificial Sequence: Synthetic oligonucleotide
auaaauauauauauauaua

SEQ ID NO: 479512 - RNA, 19 nt, Artificial Sequence
  Description of Artificial Sequence: Synthetic oligonucleotide
aaugccgagcuagaacagg

SEQ ID NO: 479513 - RNA, 19 nt, Artificial Sequence
  Description of Artificial Sequence: Synthetic oligonucleotide
ucacacucauguauuguca

SEQ ID NO: 479514 - RNA, 19 nt, Artificial Sequence
  Description of Artificial Sequence: Synthetic oligonucleotide
ugucuaccuuguaauaaug

SEQ ID NO: 479515 - RNA, 19 nt, Artificial Sequence
  Description of Artificial Sequence: Synthetic oligonucleotide
ucuaccuuguaauaauguu

SEQ ID NO: 479516 - RNA, 19 nt, Artificial Sequence
  Description of Artificial Sequence: Synthetic oligonucleotide
ucgcacacaauacagucuc

SEQ ID NO: 479517 - RNA, 19 nt, Artificial Sequence
  Description of Artificial Sequence: Synthetic oligonucleotide
uaaucgaauuccagaauau

SEQ ID NO: 479518 - RNA, 19 nt, Artificial Sequence
  Description of Artificial Sequence: Synthetic oligonucleotide
auugucaacaaggaagagu

SEQ ID NO: 479519 - RNA, 19 nt, Artificial Sequence
  Description of Artificial Sequence: Synthetic oligonucleotide
auauauauauauauauuua

SEQ ID NO: 479520 - RNA, 19 nt, Artificial Sequence
  Description of Artificial Sequence: Synthetic oligonucleotide
auuugauuuauaugguguu

SEQ ID NO: 479521 - RNA, 19 nt, Artificial Sequence
  Description of Artificial Sequence: Synthetic oligonucleotide
ucuagcgacaucgcaagug

SEQ ID NO: 479522 - RNA, 19 nt, Artificial Sequence
  Description of Artificial Sequence: Synthetic oligonucleotide
uugagugccggccuugcca

SEQ ID NO: 479523 - RNA, 19 nt, Artificial Sequence
  Description of Artificial Sequence: Synthetic oligonucleotide
acagacugguggcaggccg

SEQ ID NO: 479524 - RNA, 19 nt, Artificial Sequence
  Description of Artificial Sequence: Synthetic oligonucleotide
acacucauguauugucacg

SEQ ID NO: 479525 - RNA, 19 nt, Artificial Sequence
  Description of Artificial Sequence: Synthetic oligonucleotide
guaaucgaauuccagaaua

SEQ ID NO: 479526 - RNA, 19 nt, Artificial Sequence
  Description of Artificial Sequence: Synthetic oligonucleotide
auauggcccagucgggucg

SEQ ID NO: 479527 - RNA, 19 nt, Artificial Sequence
  Description of Artificial Sequence: Synthetic oligonucleotide
agaagcgacucugucuacc

SEQ ID NO: 479528 - RNA, 19 nt, Artificial Sequence
  Description of Artificial Sequence: Synthetic oligonucleotide
gguacacgaacucaguggc

SEQ ID NO: 479529 - RNA, 19 nt, Artificial Sequence
  Description of Artificial Sequence: Synthetic oligonucleotide
aaguuuuagagggucuacu

SEQ ID NO: 479530 - RNA, 19 nt, Artificial Sequence
  Description of Artificial Sequence: Synthetic oligonucleotide
aagaacgaucccaagaguu

SEQ ID NO: 479531 - RNA, 19 nt, Artificial Sequence
  Description of Artificial Sequence: Synthetic oligonucleotide
uuaccugaaccacggaaaa

SEQ ID NO: 479532 - RNA, 19 nt, Artificial Sequence
  Description of Artificial Sequence: Synthetic oligonucleotide
uggucuagcgacaucgcaa

SEQ ID NO: 479533 - RNA, 19 nt, Artificial Sequence
  Description of Artificial Sequence: Synthetic oligonucleotide
aaauauggcccagucgggu

SEQ ID NO: 479534 - RNA, 19 nt, Artificial Sequence
  Description of Artificial Sequence: Synthetic oligonucleotide
agcgacaucgcaagugacc

SEQ ID NO: 479535 - RNA, 19 nt, Artificial Sequence
  Description of Artificial Sequence: Synthetic oligonucleotide
uuuacagagcuuggcuagg

SEQ ID NO: 479536 - RNA, 19 nt, Artificial Sequence
  Description of Artificial Sequence: Synthetic oligonucleotide
auauaaauauauauauaua

SEQ ID NO: 479537 - RNA, 19 nt, Artificial Sequence
  Description of Artificial Sequence: Synthetic oligonucleotide
ggguacacgaacucagugg

SEQ ID NO: 479538 - RNA, 19 nt, Artificial Sequence
  Description of Artificial Sequence: Synthetic oligonucleotide
agcgacucugucuaccuug

SEQ ID NO: 479539 - RNA, 19 nt, Artificial Sequence
  Description of Artificial Sequence: Synthetic oligonucleotide
ucucaguaggucucuucag

SEQ ID NO: 479540 - RNA, 19 nt, Artificial Sequence
  Description of Artificial Sequence: Synthetic oligonucleotide
cagagguucggauccuucg

SEQ ID NO: 479541 - RNA, 19 nt, Artificial Sequence
  Description of Artificial Sequence: Synthetic oligonucleotide
uuuagagggucuacucccu

SEQ ID NO: 479542 - RNA, 19 nt, Artificial Sequence
  Description of Artificial Sequence: Synthetic oligonucleotide
cauccgugucacaucauag

SEQ ID NO: 479543 - RNA, 19 nt, Artificial Sequence
  Description of Artificial Sequence: Synthetic oligonucleotide
agaacgaucccaagaguuc

SEQ ID NO: 479544 - RNA, 19 nt, Artificial Sequence
  Description of Artificial Sequence: Synthetic oligonucleotide
uuuugacaccaaaggaaaa

SEQ ID NO: 479545 - RNA, 19 nt, Artificial Sequence
  Description of Artificial Sequence: Synthetic oligonucleotide
uaaugccgagcuagaacag

SEQ ID NO: 479546 - RNA, 19 nt, Artificial Sequence
  Description of Artificial Sequence: Synthetic oligonucleotide
cuuuugagauucuucccuc

SEQ ID NO: 479547 - RNA, 19 nt, Artificial Sequence
  Description of Artificial Sequence: Synthetic oligonucleotide
accugaaccacggaaaaga

SEQ ID NO: 479548 - RNA, 19 nt, Artificial Sequence
  Description of Artificial Sequence: Synthetic oligonucleotide
caacguucaccccaucuag

SEQ ID NO: 479549 - RNA, 19 nt, Artificial Sequence
  Description of Artificial Sequence: Synthetic oligonucleotide
ugaacggaagagauguguu

SEQ ID NO: 479550 - RNA, 19 nt, Artificial Sequence
  Description of Artificial Sequence: Synthetic oligonucleotide
aucgcaagugaccucuucu

SEQ ID NO: 479551 - RNA, 19 nt, Artificial Sequence
  Description of Artificial Sequence: Synthetic oligonucleotide
augagggccuuguuuaugu

SEQ ID NO: 479552 - RNA, 19 nt, Artificial Sequence
  Description of Artificial Sequence: Synthetic oligonucleotide
aacguucaccccaucuagg

SEQ ID NO: 479553 - RNA, 19 nt, Artificial Sequence
  Description of Artificial Sequence: Synthetic oligonucleotide
agggucuacucccucuggg

SEQ ID NO: 479554 - RNA, 19 nt, Artificial Sequence
  Description of Artificial Sequence: Synthetic oligonucleotide
aggguuugaugucagcccu

SEQ ID NO: 479555 - RNA, 19 nt, Artificial Sequence
  Description of Artificial Sequence: Synthetic oligonucleotide
uuuugucggcuucccacug

SEQ ID NO: 479556 - RNA, 19 nt, Artificial Sequence
  Description of Artificial Sequence: Synthetic oligonucleotide
accacggaaaagaacgauc

SEQ ID NO: 479557 - RNA, 19 nt, Artificial Sequence
  Description of Artificial Sequence: Synthetic oligonucleotide
uucgucacacucauguauu

SEQ ID NO: 479558 - RNA, 19 nt, Artificial Sequence
  Description of Artificial Sequence: Synthetic oligonucleotide
ccacggaaaagaacgaucc

SEQ ID NO: 479559 - RNA, 19 nt, Artificial Sequence
  Description of Artificial Sequence: Synthetic oligonucleotide
ggaaugagcggguugcacc

SEQ ID NO: 479560 - RNA, 19 nt, Artificial Sequence
  Description of Artificial Sequence: Synthetic oligonucleotide
cucaguuuaccugaaccac

SEQ ID NO: 479561 - RNA, 19 nt, Artificial Sequence
  Description of Artificial Sequence: Synthetic oligonucleotide
uuugauuuauaugguguuu

SEQ ID NO: 479562 - RNA, 19 nt, Artificial Sequence
  Description of Artificial Sequence: Synthetic oligonucleotide
gcgaaguuaaaacucccag

SEQ ID NO: 479563 - RNA, 19 nt, Artificial Sequence
  Description of Artificial Sequence: Synthetic oligonucleotide
aagugaaugaaugcauauu

SEQ ID NO: 479564 - RNA, 19 nt, Artificial Sequence
  Description of Artificial Sequence: Synthetic oligonucleotide
ucucacuggguguucuccc

SEQ ID NO: 479565 - RNA, 19 nt, Artificial Sequence
  Description of Artificial Sequence: Synthetic oligonucleotide
ucacaguugagugccggcc

SEQ ID NO: 479566 - RNA, 19 nt, Artificial Sequence
  Description of Artificial Sequence: Synthetic oligonucleotide
acgaucccaagaguucucc

SEQ ID NO: 479567 - RNA, 19 nt, Artificial Sequence
  Description of Artificial Sequence: Synthetic oligonucleotide
uguuuauguucagaacaac

SEQ ID NO: 479568 - RNA, 19 nt, Artificial Sequence
  Description of Artificial Sequence: Synthetic oligonucleotide
uucccuucguccagagugc

SEQ ID NO: 479569 - RNA, 19 nt, Artificial Sequence
  Description of Artificial Sequence: Synthetic oligonucleotide
ucguccuugcccuuuccug

SEQ ID NO: 479570 - RNA, 19 nt, Artificial Sequence
  Description of Artificial Sequence: Synthetic oligonucleotide
auagucucguugugcuccg

SEQ ID NO: 479571 - RNA, 19 nt, Artificial Sequence
  Description of Artificial Sequence: Synthetic oligonucleotide
ugccauguacuuccacuug

SEQ ID NO: 479572 - RNA, 19 nt, Artificial Sequence
  Description of Artificial Sequence: Synthetic oligonucleotide
ucgaagucuucaucuguga

SEQ ID NO: 479573 - RNA, 19 nt, Artificial Sequence
  Description of Artificial Sequence: Synthetic oligonucleotide
cauaccucccuggaaacac

SEQ ID NO: 479574 - RNA, 19 nt, Artificial Sequence
  Description of Artificial Sequence: Synthetic oligonucleotide
ucucguugugcuccguaac

SEQ ID NO: 479575 - RNA, 19 nt, Artificial Sequence
  Description of Artificial Sequence: Synthetic oligonucleotide
aagugaccucuucuuggug

SEQ ID NO: 479576 - RNA, 19 nt, Artificial Sequence
  Description of Artificial Sequence: Synthetic oligonucleotide
ugaucugguuggaaacuuc

SEQ ID NO: 479577 - RNA, 19 nt, Artificial Sequence
  Description of Artificial Sequence: Synthetic oligonucleotide
ucucaacuccuggacaagc

SEQ ID NO: 479578 - RNA, 19 nt, Artificial Sequence
  Description of Artificial Sequence: Synthetic oligonucleotide
gguaaugccgagcuagaac

SEQ ID NO: 479579 - RNA, 19 nt, Artificial Sequence
  Description of Artificial Sequence: Synthetic oligonucleotide
uucggauccuucgucacac

SEQ ID NO: 479580 - RNA, 19 nt, Artificial Sequence
  Description of Artificial Sequence: Synthetic oligonucleotide
ucuggucuagcgacaucgc

SEQ ID NO: 479581 - RNA, 19 nt, Artificial Sequence
  Description of Artificial Sequence: Synthetic oligonucleotide
ggucuagcgacaucgcaag

SEQ ID NO: 479582 - RNA, 19 nt, Artificial Sequence
  Description of Artificial Sequence: Synthetic oligonucleotide
uccagagugcaccaccaua

SEQ ID NO: 479583 - RNA, 19 nt, Artificial Sequence
  Description of Artificial Sequence: Synthetic oligonucleotide
ucgaggaauuucucuuuga

SEQ ID NO: 479584 - RNA, 19 nt, Artificial Sequence
  Description of Artificial Sequence: Synthetic oligonucleotide
acguucaccccaucuagga

SEQ ID NO: 479585 - RNA, 19 nt, Artificial Sequence
  Description of Artificial Sequence: Synthetic oligonucleotide
cucuccucgcacacaauac

SEQ ID NO: 479586 - RNA, 19 nt, Artificial Sequence
  Description of Artificial Sequence: Synthetic oligonucleotide
uaccucccuggaaacacug

SEQ ID NO: 479587 - RNA, 19 nt, Artificial Sequence
  Description of Artificial Sequence: Synthetic oligonucleotide
ucgucacacucauguauug

SEQ ID NO: 479588 - RNA, 19 nt, Artificial Sequence
  Description of Artificial Sequence: Synthetic oligonucleotide
cacuuugcacauuuuccuc

SEQ ID NO: 479589 - RNA, 19 nt, Artificial Sequence
  Description of Artificial Sequence: Synthetic oligonucleotide
ggccgaacucaacagaagc

SEQ ID NO: 479590 - RNA, 19 nt, Artificial Sequence
  Description of Artificial Sequence: Synthetic oligonucleotide
ucucaaucugucuccuguc

SEQ ID NO: 479591 - RNA, 19 nt, Artificial Sequence
  Description of Artificial Sequence: Synthetic oligonucleotide
cuagaauaauccuucugcu

SEQ ID NO: 479592 - RNA, 19 nt, Artificial Sequence
  Description of Artificial Sequence: Synthetic oligonucleotide
cacggaaaagaacgauccc

SEQ ID NO: 479593 - RNA, 19 nt, Artificial Sequence
  Description of Artificial Sequence: Synthetic oligonucleotide
cuagcgacaucgcaaguga

SEQ ID NO: 479594 - RNA, 19 nt, Artificial Sequence
  Description of Artificial Sequence: Synthetic oligonucleotide
aguugagugccggccuugc

SEQ ID NO: 479595 - RNA, 19 nt, Artificial Sequence
  Description of Artificial Sequence: Synthetic oligonucleotide
gaugucagcccuagaauaa

SEQ ID NO: 479596 - RNA, 19 nt, Artificial Sequence
  Description of Artificial Sequence: Synthetic oligonucleotide
aacgaucccaagaguucuc

SEQ ID NO: 479597 - RNA, 19 nt, Artificial Sequence
  Description of Artificial Sequence: Synthetic oligonucleotide
agccuugccagagguacac

SEQ ID NO: 479598 - RNA, 19 nt, Artificial Sequence
  Description of Artificial Sequence: Synthetic oligonucleotide
gauguucccuucucacuca

SEQ ID NO: 479599 - RNA, 19 nt, Artificial Sequence
  Description of Artificial Sequence: Synthetic oligonucleotide
cgcucuuucggucugaggc

SEQ ID NO: 479600 - RNA, 19 nt, Artificial Sequence
  Description of Artificial Sequence: Synthetic oligonucleotide
acggaagagauguguuucu

SEQ ID NO: 479601 - RNA, 19 nt, Artificial Sequence
  Description of Artificial Sequence: Synthetic oligonucleotide
ccacagguaaaugagggcc

SEQ ID NO: 479602 - RNA, 19 nt, Artificial Sequence
  Description of Artificial Sequence: Synthetic oligonucleotide
agguucggauccuucguca

SEQ ID NO: 479603 - RNA, 19 nt, Artificial Sequence
  Description of Artificial Sequence: Synthetic oligonucleotide
uguccagucgaggaauuuc

SEQ ID NO: 479604 - RNA, 19 nt, Artificial Sequence
  Description of Artificial Sequence: Synthetic oligonucleotide
cucacuggguguucucccc

SEQ ID NO: 479605 - RNA, 19 nt, Artificial Sequence
  Description of Artificial Sequence: Synthetic oligonucleotide
guacaccucguggugauug

SEQ ID NO: 479606 - RNA, 19 nt, Artificial Sequence
  Description of Artificial Sequence: Synthetic oligonucleotide
agcuagaacaggagggcag

SEQ ID NO: 479607 - RNA, 19 nt, Artificial Sequence
  Description of Artificial Sequence: Synthetic oligonucleotide
agugcaaacucgaagucuu

SEQ ID NO: 479608 - RNA, 19 nt, Artificial Sequence
  Description of Artificial Sequence: Synthetic oligonucleotide
acucacaguugagugccgg

SEQ ID NO: 479609 - RNA, 19 nt, Artificial Sequence
  Description of Artificial Sequence: Synthetic oligonucleotide
cuugccagagguacaccuc

SEQ ID NO: 479610 - RNA, 19 nt, Artificial Sequence
  Description of Artificial Sequence: Synthetic oligonucleotide
cuuguucucagugggccac

SEQ ID NO: 479611 - RNA, 19 nt, Artificial Sequence
  Description of Artificial Sequence: Synthetic oligonucleotide
uaccugaaccacggaaaag

SEQ ID NO: 479612 - RNA, 19 nt, Artificial Sequence
  Description of Artificial Sequence: Synthetic oligonucleotide
aaccacggaaaagaacgau

SEQ ID NO: 479613 - RNA, 19 nt, Artificial Sequence
  Description of Artificial Sequence: Synthetic oligonucleotide
ggucaugucgagugcaaac

SEQ ID NO: 479614 - RNA, 19 nt, Artificial Sequence
  Description of Artificial Sequence: Synthetic oligonucleotide
cuaacccagcaugaauaag

SEQ ID NO: 479615 - RNA, 19 nt, Artificial Sequence
  Description of Artificial Sequence: Synthetic oligonucleotide
agauaaaucucaaguuuua

SEQ ID NO: 479616 - RNA, 19 nt, Artificial Sequence
  Description of Artificial Sequence: Synthetic oligonucleotide
uuacagagcuuggcuagga

SEQ ID NO: 479617 - RNA, 19 nt, Artificial Sequence
  Description of Artificial Sequence: Synthetic oligonucleotide
acucugauucgaaaauacu

SEQ ID NO: 479618 - RNA, 19 nt, Artificial Sequence
  Description of Artificial Sequence: Synthetic oligonucleotide
agagccgauguucccuucu

SEQ ID NO: 479619 - RNA, 19 nt, Artificial Sequence
  Description of Artificial Sequence: Synthetic oligonucleotide
agucgaggaauuucucuuu

SEQ ID NO: 479620 - RNA, 19 nt, Artificial Sequence
  Description of Artificial Sequence: Synthetic oligonucleotide
caugcagucauaggccuuc

SEQ ID NO: 479621 - RNA, 19 nt, Artificial Sequence
  Description of Artificial Sequence: Synthetic oligonucleotide
ugaacagaauagucucguu

SEQ ID NO: 479622 - RNA, 19 nt, Artificial Sequence
  Description of Artificial Sequence: Synthetic oligonucleotide
cuaccuuguaauaauguuu

SEQ ID NO: 479623 - RNA, 19 nt, Artificial Sequence
  Description of Artificial Sequence: Synthetic oligonucleotide
accgucaucagagccgaug

SEQ ID NO: 479624 - RNA, 19 nt, Artificial Sequence
  Description of Artificial Sequence: Synthetic oligonucleotide
acuugcuuccaggugggca

SEQ ID NO: 479625 - RNA, 19 nt, Artificial Sequence
  Description of Artificial Sequence: Synthetic oligonucleotide
ucgcaagugaccucuucuu

SEQ ID NO: 479626 - RNA, 19 nt, Artificial Sequence
  Description of Artificial Sequence: Synthetic oligonucleotide
uggcuaggacaucuucaac

SEQ ID NO: 479627 - RNA, 19 nt, Artificial Sequence
  Description of Artificial Sequence: Synthetic oligonucleotide
gacaucgcaagugaccucu

SEQ ID NO: 479628 - RNA, 19 nt, Artificial Sequence
  Description of Artificial Sequence: Synthetic oligonucleotide
gccgaacucaacagaagcg

SEQ ID NO: 479629 - RNA, 19 nt, Artificial Sequence
  Description of Artificial Sequence: Synthetic oligonucleotide
ccggcuguaaucgaauucc

SEQ ID NO: 479630 - RNA, 19 nt, Artificial Sequence
  Description of Artificial Sequence: Synthetic oligonucleotide
ggcuaggacaucuucaacu

SEQ ID NO: 479631 - RNA, 19 nt, Artificial Sequence
  Description of Artificial Sequence: Synthetic oligonucleotide
uucccucggcaauacugca

SEQ ID NO: 479632 - RNA, 19 nt, Artificial Sequence
  Description of Artificial Sequence: Synthetic oligonucleotide
gcuagaacaggagggcagg

SEQ ID NO: 479633 - RNA, 19 nt, Artificial Sequence
  Description of Artificial Sequence: Synthetic oligonucleotide
uagcgacaucgcaagugac

SEQ ID NO: 479634 - RNA, 19 nt, Artificial Sequence
  Description of Artificial Sequence: Synthetic oligonucleotide
aguuuaccugaaccacgga

SEQ ID NO: 479635 - RNA, 19 nt, Artificial Sequence
  Description of Artificial Sequence: Synthetic oligonucleotide
gauccuucgucacacucau

SEQ ID NO: 479636 - RNA, 19 nt, Artificial Sequence
  Description of Artificial Sequence: Synthetic oligonucleotide
gggguacacgaacucagug

SEQ ID NO: 479637 - RNA, 19 nt, Artificial Sequence
  Description of Artificial Sequence: Synthetic oligonucleotide
gaagcgacucugucuaccu

SEQ ID NO: 479638 - RNA, 19 nt, Artificial Sequence
  Description of Artificial Sequence: Synthetic oligonucleotide
ugcggcgcgcuguacagau

SEQ ID NO: 479639 - RNA, 19 nt, Artificial Sequence
  Description of Artificial Sequence: Synthetic oligonucleotide
augucgagugcaaacucga

SEQ ID NO: 479640 - RNA, 19 nt, Artificial Sequence
  Description of Artificial Sequence: Synthetic oligonucleotide
ggcgcgaaguuaaaacucc

SEQ ID NO: 479641 - RNA, 19 nt, Artificial Sequence
  Description of Artificial Sequence: Synthetic oligonucleotide
uacaccucguggugauugu

SEQ ID NO: 479642 - RNA, 19 nt, Artificial Sequence
  Description of Artificial Sequence: Synthetic oligonucleotide
gguuugaugucagcccuag

SEQ ID NO: 479643 - RNA, 19 nt, Artificial Sequence
  Description of Artificial Sequence: Synthetic oligonucleotide
gaacgaucccaagaguucu

SEQ ID NO: 479644 - RNA, 19 nt, Artificial Sequence
  Description of Artificial Sequence: Synthetic oligonucleotide
cagaaucccagagguucgg

SEQ ID NO: 479645 - RNA, 19 nt, Artificial Sequence
  Description of Artificial Sequence: Synthetic oligonucleotide
ucagagccgauguucccuu

SEQ ID NO: 479646 - RNA, 19 nt, Artificial Sequence
  Description of Artificial Sequence: Synthetic oligonucleotide
agcggguugcaccguucuc

SEQ ID NO: 479647 - RNA, 19 nt, Artificial Sequence
  Description of Artificial Sequence: Synthetic oligonucleotide
caggccgaacucaacagaa

SEQ ID NO: 479648 - RNA, 19 nt, Artificial Sequence
  Description of Artificial Sequence: Synthetic oligonucleotide
cuucaacuagggugaucug

SEQ ID NO: 479649 - RNA, 19 nt, Artificial Sequence
  Description of Artificial Sequence: Synthetic oligonucleotide
ucuuucggucugaggccca

SEQ ID NO: 479650 - RNA, 19 nt, Artificial Sequence
  Description of Artificial Sequence: Synthetic oligonucleotide
gaaccacggaaaagaacga

SEQ ID NO: 479651 - RNA, 19 nt, Artificial Sequence
  Description of Artificial Sequence: Synthetic oligonucleotide
acucauguauugucacguu

SEQ ID NO: 479652 - RNA, 19 nt, Artificial Sequence
  Description of Artificial Sequence: Synthetic oligonucleotide
gaacaggcggggcgcgaag

SEQ ID NO: 479653 - RNA, 19 nt, Artificial Sequence
  Description of Artificial Sequence: Synthetic oligonucleotide
cugugaucucagcaauguc

SEQ ID NO: 479654 - RNA, 19 nt, Artificial Sequence
  Description of Artificial Sequence: Synthetic oligonucleotide
aacaggcggggcgcgaagu

SEQ ID NO: 479655 - RNA, 19 nt, Artificial Sequence
  Description of Artificial Sequence: Synthetic oligonucleotide
ucgcgcgggguacacgaac

SEQ ID NO: 479656 - RNA, 19 nt, Artificial Sequence
  Description of Artificial Sequence: Synthetic oligonucleotide
ugccaguggauagaugguu

SEQ ID NO: 479657 - RNA, 19 nt, Artificial Sequence
  Description of Artificial Sequence: Synthetic oligonucleotide
gccgagaagucucccgagg

SEQ ID NO: 479658 - RNA, 19 nt, Artificial Sequence
  Description of Artificial Sequence: Synthetic oligonucleotide
cugcccgaugcucugccug

SEQ ID NO: 479659 - RNA, 19 nt, Artificial Sequence
  Description of Artificial Sequence: Synthetic oligonucleotide
guugagugccggccuugcc

SEQ ID NO: 479660 - RNA, 19 nt, Artificial Sequence
  Description of Artificial Sequence: Synthetic oligonucleotide
guucggauccuucgucaca

SEQ ID NO: 479661 - RNA, 19 nt, Artificial Sequence
  Description of Artificial Sequence: Synthetic oligonucleotide
gaacggaagagauguguuu

SEQ ID NO: 479662 - RNA, 19 nt, Artificial Sequence
  Description of Artificial Sequence: Synthetic oligonucleotide
aaugagcggguugcaccgu

SEQ ID NO: 479663 - RNA, 19 nt, Artificial Sequence
  Description of Artificial Sequence: Synthetic oligonucleotide
gugaacggaagagaugugu

SEQ ID NO: 479664 - RNA, 19 nt, Artificial Sequence
  Description of Artificial Sequence: Synthetic oligonucleotide
gucaugucgagugcaaacu

SEQ ID NO: 479665 - RNA, 19 nt, Artificial Sequence
  Description of Artificial Sequence: Synthetic oligonucleotide
uacuuccacuugaccacau

SEQ ID NO: 479666 - RNA, 19 nt, Artificial Sequence
  Description of Artificial Sequence: Synthetic oligonucleotide
guacacgaacucaguggcc

SEQ ID NO: 479667 - RNA, 19 nt, Artificial Sequence
  Description of Artificial Sequence: Synthetic oligonucleotide
caucgcaagugaccucuuc

SEQ ID NO: 479668 - RNA, 19 nt, Artificial Sequence
  Description of Artificial Sequence: Synthetic oligonucleotide
gaaucccagagguucggau

SEQ ID NO: 479669 - RNA, 19 nt, Artificial Sequence
  Description of Artificial Sequence: Synthetic oligonucleotide
gccgauguucccuucucac

SEQ ID NO: 479670 - RNA, 19 nt, Artificial Sequence
  Description of Artificial Sequence: Synthetic oligonucleotide
cuggucuagcgacaucgca

SEQ ID NO: 479671 - RNA, 19 nt, Artificial Sequence
  Description of Artificial Sequence: Synthetic oligonucleotide
ccagccuugccagagguac

SEQ ID NO: 479672 - RNA, 19 nt, Artificial Sequence
  Description of Artificial Sequence: Synthetic oligonucleotide
gguucggauccuucgucac

SEQ ID NO: 479673 - RNA, 19 nt, Artificial Sequence
  Description of Artificial Sequence: Synthetic oligonucleotide
cacgaacucaguggccgag

SEQ ID NO: 479674 - RNA, 19 nt, Artificial Sequence
  Description of Artificial Sequence: Synthetic oligonucleotide
augucagcccuagaauaau

SEQ ID NO: 479675 - RNA, 19 nt, Artificial Sequence
  Description of Artificial Sequence: Synthetic oligonucleotide
cacucauguauugucacgu

SEQ ID NO: 479676 - RNA, 19 nt, Artificial Sequence
  Description of Artificial Sequence: Synthetic oligonucleotide
agugaacggaagagaugug

SEQ ID NO: 479677 - RNA, 19 nt, Artificial Sequence
  Description of Artificial Sequence: Synthetic oligonucleotide
uggucaugucgagugcaaa

SEQ ID NO: 479678 - RNA, 19 nt, Artificial Sequence
  Description of Artificial Sequence: Synthetic oligonucleotide
ccaugccacagguaaauga

SEQ ID NO: 479679 - RNA, 19 nt, Artificial Sequence
  Description of Artificial Sequence: Synthetic oligonucleotide
guugcaccguucucaaagu

SEQ ID NO: 479680 - RNA, 19 nt, Artificial Sequence
  Description of Artificial Sequence: Synthetic oligonucleotide
agaaucccagagguucgga

SEQ ID NO: 479681 - RNA, 19 nt, Artificial Sequence
  Description of Artificial Sequence: Synthetic oligonucleotide
aggccgaacucaacagaag

SEQ ID NO: 479682 - RNA, 19 nt, Artificial Sequence
  Description of Artificial Sequence: Synthetic oligonucleotide
cccuagaauaauccuucug

SEQ ID NO: 479683 - RNA, 19 nt, Artificial Sequence
  Description of Artificial Sequence: Synthetic oligonucleotide
ggaagagugcuggcugcgg

SEQ ID NO: 479684 - RNA, 19 nt, Artificial Sequence
  Description of Artificial Sequence: Synthetic oligonucleotide
ugggaaugagcggguugca

SEQ ID NO: 479685 - RNA, 19 nt, Artificial Sequence
  Description of Artificial Sequence: Synthetic oligonucleotide
gacggcagagggcgcucgc

SEQ ID NO: 479686 - RNA, 19 nt, Artificial Sequence
  Description of Artificial Sequence: Synthetic oligonucleotide
acggcagagggcgcucgcg

SEQ ID NO: 479687 - RNA, 19 nt, Artificial Sequence
  Description of Artificial Sequence: Synthetic oligonucleotide
caagggcucuaacccagca

SEQ ID NO: 479688 - RNA, 19 nt, Artificial Sequence
  Description of Artificial Sequence: Synthetic oligonucleotide
gguucacuugcuuccaggu

SEQ ID NO: 479689 - RNA, 19 nt, Artificial Sequence
  Description of Artificial Sequence: Synthetic oligonucleotide
cucggcugagugaacggaa

SEQ ID NO: 479690 - RNA, 19 nt, Artificial Sequence
  Description of Artificial Sequence: Synthetic oligonucleotide
aucuggggcguugccacca

SEQ ID NO: 479691 - RNA, 19 nt, Artificial Sequence
  Description of Artificial Sequence: Synthetic oligonucleotide
ucccuucguccagagugca

SEQ ID NO: 479692 - RNA, 19 nt, Artificial Sequence
  Description of Artificial Sequence: Synthetic oligonucleotide
gcgggguacacgaacucag

SEQ ID NO: 479693 - RNA, 19 nt, Artificial Sequence
  Description of Artificial Sequence: Synthetic oligonucleotide
guacuuccacuugaccaca

SEQ ID NO: 479694 - RNA, 19 nt, Artificial Sequence
  Description of Artificial Sequence: Synthetic oligonucleotide
gcagagggcgcucgcgcgg

SEQ ID NO: 479695 - RNA, 19 nt, Artificial Sequence
  Description of Artificial Sequence: Synthetic oligonucleotide
guauugucacguugcugcu

SEQ ID NO: 479696 - RNA, 19 nt, Artificial Sequence
  Description of Artificial Sequence: Synthetic oligonucleotide
gugggcagugcguugaauu

SEQ ID NO: 479697 - RNA, 19 nt, Artificial Sequence
  Description of Artificial Sequence: Synthetic oligonucleotide
cucguugugcuccguaacu

SEQ ID NO: 479698 - RNA, 19 nt, Artificial Sequence
  Description of Artificial Sequence: Synthetic oligonucleotide
gucgggucguccuugcccu

SEQ ID NO: 479699 - RNA, 19 nt, Artificial Sequence
  Description of Artificial Sequence: Synthetic oligonucleotide
cagucgaggaauuucucuu

SEQ ID NO: 479700 - RNA, 19 nt, Artificial Sequence
  Description of Artificial Sequence: Synthetic oligonucleotide
uauggcccagucgggucgu

SEQ ID NO: 479701 - RNA, 19 nt, Artificial Sequence
  Description of Artificial Sequence: Synthetic oligonucleotide
acgaacucaguggccgaga

SEQ ID NO: 479702 - RNA, 19 nt, Artificial Sequence
  Description of Artificial Sequence: Synthetic oligonucleotide
augagcggguugcaccguu

SEQ ID NO: 479703 - RNA, 19 nt, Artificial Sequence
  Description of Artificial Sequence: Synthetic oligonucleotide
agccggcuguaaucgaauu

SEQ ID NO: 479704 - RNA, 19 nt, Artificial Sequence
  Description of Artificial Sequence: Synthetic oligonucleotide
gggcgcgaaguuaaaacuc

SEQ ID NO: 479705 - RNA, 19 nt, Artificial Sequence
  Description of Artificial Sequence: Synthetic oligonucleotide
cuggucaugucgagugcaa

SEQ ID NO: 479706 - RNA, 19 nt, Artificial Sequence
  Description of Artificial Sequence: Synthetic oligonucleotide
ggggcgcgaaguuaaaacu

SEQ ID NO: 479707 - RNA, 19 nt, Artificial Sequence
  Description of Artificial Sequence: Synthetic oligonucleotide
uugucacguugcugcugcu

SEQ ID NO: 479708 - RNA, 19 nt, Artificial Sequence
  Description of Artificial Sequence: Synthetic oligonucleotide
ucuucucaguaggucucuu

SEQ ID NO: 479709 - RNA, 19 nt, Artificial Sequence
  Description of Artificial Sequence: Synthetic oligonucleotide
ucuggggcguugccaccau

SEQ ID NO: 479710 - RNA, 19 nt, Artificial Sequence
  Description of Artificial Sequence: Synthetic oligonucleotide
gccggcuguaaucgaauuc

SEQ ID NO: 479711 - RNA, 19 nt, Artificial Sequence
  Description of Artificial Sequence: Synthetic oligonucleotide
cauggcgcucuuucggucu

SEQ ID NO: 479712 - RNA, 19 nt, Artificial Sequence
  Description of Artificial Sequence: Synthetic oligonucleotide
cagcacucggcugagugaa

SEQ ID NO: 479713 - RNA, 19 nt, Artificial Sequence
  Description of Artificial Sequence: Synthetic oligonucleotide
cuccauucacuuugcacau

SEQ ID NO: 479714 - RNA, 19 nt, Artificial Sequence
  Description of Artificial Sequence: Synthetic oligonucleotide
ccaagaguucuccuacaca

SEQ ID NO: 479715 - RNA, 19 nt, Artificial Sequence
  Description of Artificial Sequence: Synthetic oligonucleotide
uggcccagucgggucgucc

SEQ ID NO: 479716 - RNA, 19 nt, Artificial Sequence
  Description of Artificial Sequence: Synthetic oligonucleotide
acaggcggggcgcgaaguu

SEQ ID NO: 479717 - RNA, 19 nt, Artificial Sequence
  Description of Artificial Sequence: Synthetic oligonucleotide
cggcgcgcuguacagaucc

SEQ ID NO: 479718 - RNA, 19 nt, Artificial Sequence
  Description of Artificial Sequence: Synthetic oligonucleotide
agagggcgcucgcgcgggg

SEQ ID NO: 479719 - RNA, 19 nt, Artificial Sequence
  Description of Artificial Sequence: Synthetic oligonucleotide
cggggcgcgaaguuaaaac

SEQ ID NO: 479720 - RNA, 19 nt, Artificial Sequence
  Description of Artificial Sequence: Synthetic oligonucleotide
cagcccuagaauaauccuu

SEQ ID NO: 479721 - RNA, 19 nt, Artificial Sequence
  Description of Artificial Sequence: Synthetic oligonucleotide
gcucgcgcgggguacacga

SEQ ID NO: 479722 - RNA, 19 nt, Artificial Sequence
  Description of Artificial Sequence: Synthetic oligonucleotide
gagcggguugcaccguucu

SEQ ID NO: 479723 - RNA, 19 nt, Artificial Sequence
  Description of Artificial Sequence: Synthetic oligonucleotide
cagucgggucguccuugcc

SEQ ID NO: 479724 - RNA, 19 nt, Artificial Sequence
  Description of Artificial Sequence: Synthetic oligonucleotide
uccauucacuuugcacauu

SEQ ID NO: 479725 - RNA, 19 nt, Artificial Sequence
  Description of Artificial Sequence: Synthetic oligonucleotide
gggaaugagcggguugcac

SEQ ID NO: 479726 - RNA, 19 nt, Artificial Sequence
  Description of Artificial Sequence: Synthetic oligonucleotide
cgcaagugaccucuucuug

SEQ ID NO: 479727 - RNA, 19 nt, Artificial Sequence
  Description of Artificial Sequence: Synthetic oligonucleotide
cagagccgauguucccuuc

SEQ ID NO: 479728 - RNA, 19 nt, Artificial Sequence
  Description of Artificial Sequence: Synthetic oligonucleotide
gcgcgaaguuaaaacuccc

SEQ ID NO: 479729 - RNA, 19 nt, Artificial Sequence
  Description of Artificial Sequence: Synthetic oligonucleotide
ccugaaccacggaaaagaa

SEQ ID NO: 479730 - RNA, 19 nt, Artificial Sequence
  Description of Artificial Sequence: Synthetic oligonucleotide
ccaacguucaccccaucua

SEQ ID NO: 479731 - RNA, 19 nt, Artificial Sequence
  Description of Artificial Sequence: Synthetic oligonucleotide
gugccggccuugccagaag

SEQ ID NO: 479732 - RNA, 19 nt, Artificial Sequence
  Description of Artificial Sequence: Synthetic oligonucleotide
ucccagagguucggauccu

SEQ ID NO: 479733 - RNA, 19 nt, Artificial Sequence
  Description of Artificial Sequence: Synthetic oligonucleotide
gcgacaucgcaagugaccu

SEQ ID NO: 479734 - RNA, 19 nt, Artificial Sequence
  Description of Artificial Sequence: Synthetic oligonucleotide
cagccuugccagagguaca

SEQ ID NO: 479735 - RNA, 19 nt, Artificial Sequence
  Description of Artificial Sequence: Synthetic oligonucleotide
ccgagaagucucccgagga

SEQ ID NO: 479736 - RNA, 19 nt, Artificial Sequence
  Description of Artificial Sequence: Synthetic oligonucleotide
gccaacguucaccccaucu

SEQ ID NO: 479737 - RNA, 19 nt, Artificial Sequence
  Description of Artificial Sequence: Synthetic oligonucleotide
aggcggggcgcgaaguuaa

SEQ ID NO: 479738 - RNA, 19 nt, Artificial Sequence
  Description of Artificial Sequence: Synthetic oligonucleotide
ccagucgggucguccuugc

SEQ ID NO: 479739 - RNA, 19 nt, Artificial Sequence
  Description of Artificial Sequence: Synthetic oligonucleotide
ccagucgaggaauuucucu

SEQ ID NO: 479740 - RNA, 19 nt, Artificial Sequence
  Description of Artificial Sequence: Synthetic oligonucleotide
cgcgaaguuaaaacuccca

SEQ ID NO: 479741 - RNA, 19 nt, Artificial Sequence
  Description of Artificial Sequence: Synthetic oligonucleotide
cuugcccuuuccugggaau

SEQ ID NO: 479742 - RNA, 19 nt, Artificial Sequence
  Description of Artificial Sequence: Synthetic oligonucleotide
ccuugccagagguacaccu

SEQ ID NO: 479743 - RNA, 19 nt, Artificial Sequence
  Description of Artificial Sequence: Synthetic oligonucleotide
gacugguggcaggccgaac

SEQ ID NO: 479744 - RNA, 19 nt, Artificial Sequence
  Description of Artificial Sequence: Synthetic oligonucleotide
uagucucguugugcuccgu

SEQ ID NO: 479745 - RNA, 19 nt, Artificial Sequence
  Description of Artificial Sequence: Synthetic oligonucleotide
ggagccggcuguaaucgaa

SEQ ID NO: 479746 - RNA, 19 nt, Artificial Sequence
  Description of Artificial Sequence: Synthetic oligonucleotide
ccauggcgcucuuucgguc

SEQ ID NO: 479747 - RNA, 19 nt, Artificial Sequence
  Description of Artificial Sequence: Synthetic oligonucleotide
ggcgcucuuucggucugag

SEQ ID NO: 479748 - RNA, 19 nt, Artificial Sequence
  Description of Artificial Sequence: Synthetic oligonucleotide
gggcucuaacccagcauga

SEQ ID NO: 479749 - RNA, 19 nt, Artificial Sequence
  Description of Artificial Sequence: Synthetic oligonucleotide
cgaaugcgggcagagccag

SEQ ID NO: 479750 - RNA, 19 nt, Artificial Sequence
  Description of Artificial Sequence: Synthetic oligonucleotide
gcgaaugcgggcagagcca

SEQ ID NO: 479751 - RNA, 19 nt, Artificial Sequence
  Description of Artificial Sequence: Synthetic oligonucleotide
cgugucacaucauaggguu

SEQ ID NO: 479752 - RNA, 19 nt, Artificial Sequence
  Description of Artificial Sequence: Synthetic oligonucleotide
cggauccuucgucacacuc

SEQ ID NO: 479753 - RNA, 19 nt, Artificial Sequence
  Description of Artificial Sequence: Synthetic oligonucleotide
uggcgcucuuucggucuga

SEQ ID NO: 479754 - RNA, 19 nt, Artificial Sequence
  Description of Artificial Sequence: Synthetic oligonucleotide
gagugccggccuugccaga

SEQ ID NO: 479755 - RNA, 19 nt, Artificial Sequence
  Description of Artificial Sequence: Synthetic oligonucleotide
cccaucuaggauggugcug

SEQ ID NO: 479756 - RNA, 19 nt, Artificial Sequence
  Description of Artificial Sequence: Synthetic oligonucleotide
cuggggcguugccaccauc

SEQ ID NO: 479757 - RNA, 19 nt, Artificial Sequence
  Description of Artificial Sequence: Synthetic oligonucleotide
caccguucucaaagucaaa

SEQ ID NO: 479758 - RNA, 19 nt, Artificial Sequence
  Description of Artificial Sequence: Synthetic oligonucleotide
cccucauggaacugcccga

SEQ ID NO: 479759 - RNA, 19 nt, Artificial Sequence
  Description of Artificial Sequence: Synthetic oligonucleotide
gucuagcgacaucgcaagu

SEQ ID NO: 479760 - RNA, 19 nt, Artificial Sequence
  Description of Artificial Sequence: Synthetic oligonucleotide
ggcucuaacccagcaugaa

SEQ ID NO: 479761 - RNA, 19 nt, Artificial Sequence
  Description of Artificial Sequence: Synthetic oligonucleotide
ccguaacucucccaaauau

SEQ ID NO: 479762 - RNA, 19 nt, Artificial Sequence
  Description of Artificial Sequence: Synthetic oligonucleotide
gagccggcuguaaucgaau

SEQ ID NO: 479763 - RNA, 19 nt, Artificial Sequence
  Description of Artificial Sequence: Synthetic oligonucleotide
gcuccguaacucucccaaa

SEQ ID NO: 479764 - RNA, 19 nt, Artificial Sequence
  Description of Artificial Sequence: Synthetic oligonucleotide
ccgugucacaucauagggu

SEQ ID NO: 479765 - RNA, 19 nt, Artificial Sequence
  Description of Artificial Sequence: Synthetic oligonucleotide
auggcccagucgggucguc

SEQ ID NO: 479766 - RNA, 19 nt, Artificial Sequence
  Description of Artificial Sequence: Synthetic oligonucleotide
gggaguggccuggcaagca

SEQ ID NO: 479767 - RNA, 19 nt, Artificial Sequence
  Description of Artificial Sequence: Synthetic oligonucleotide
ggacugucuccauggcgcu

SEQ ID NO: 479768 - RNA, 19 nt, Artificial Sequence
  Description of Artificial Sequence: Synthetic oligonucleotide
ucgggucguccuugcccuu

SEQ ID NO: 479769 - RNA, 19 nt, Artificial Sequence
  Description of Artificial Sequence: Synthetic oligonucleotide
ccaccgucaucagagccga

SEQ ID NO: 479770 - RNA, 19 nt, Artificial Sequence
  Description of Artificial Sequence: Synthetic oligonucleotide
acaucgcaagugaccucuu

SEQ ID NO: 479771 - RNA, 19 nt, Artificial Sequence
  Description of Artificial Sequence: Synthetic oligonucleotide
gcccuagaauaauccuucu

SEQ ID NO: 479772 - RNA, 19 nt, Artificial Sequence
  Description of Artificial Sequence: Synthetic oligonucleotide
ccgauguucccuucucacu

SEQ ID NO: 479773 - RNA, 19 nt, Artificial Sequence
  Description of Artificial Sequence: Synthetic oligonucleotide
gcgcgggguacacgaacuc

SEQ ID NO: 479774 - RNA, 19 nt, Artificial Sequence
  Description of Artificial Sequence: Synthetic oligonucleotide
ggcccagucgggucguccu

SEQ ID NO: 479775 - RNA, 19 nt, Artificial Sequence
  Description of Artificial Sequence: Synthetic oligonucleotide
cucgcgcgggguacacgaa

SEQ ID NO: 479776 - RNA, 19 nt, Artificial Sequence
  Description of Artificial Sequence: Synthetic oligonucleotide
gcgcgcuguacagauccuc

SEQ ID NO: 479777 - RNA, 19 nt, Artificial Sequence
  Description of Artificial Sequence: Synthetic oligonucleotide
caggcggggcgcgaaguua

SEQ ID NO: 479778 - RNA, 19 nt, Artificial Sequence
  Description of Artificial Sequence: Synthetic oligonucleotide
gaaugcgggcagagccagu

SEQ ID NO: 479779 - RNA, 19 nt, Artificial Sequence
  Description of Artificial Sequence: Synthetic oligonucleotide
ccucggcaauacugcagga

SEQ ID NO: 479780 - RNA, 19 nt, Artificial Sequence
  Description of Artificial Sequence: Synthetic oligonucleotide
cgacaucgcaagugaccuc

SEQ ID NO: 479781 - RNA, 19 nt, Artificial Sequence
  Description of Artificial Sequence: Synthetic oligonucleotide
caguccuuccaaccuccuu

SEQ ID NO: 479782 - RNA, 19 nt, Artificial Sequence
  Description of Artificial Sequence: Synthetic oligonucleotide
cguugccaccauccguguc

SEQ ID NO: 479783 - RNA, 19 nt, Artificial Sequence
  Description of Artificial Sequence: Synthetic oligonucleotide
cugcggcgcgcuguacaga

SEQ ID NO: 479784 - RNA, 19 nt, Artificial Sequence
  Description of Artificial Sequence: Synthetic oligonucleotide
gagggcgcucgcgcggggu

SEQ ID NO: 479785 - RNA, 19 nt, Artificial Sequence
  Description of Artificial Sequence: Synthetic oligonucleotide
ggccaacguucaccccauc

SEQ ID NO: 479786 - RNA, 19 nt, Artificial Sequence
  Description of Artificial Sequence: Synthetic oligonucleotide
gcggggcgcgaaguuaaaa

SEQ ID NO: 479787 - RNA, 19 nt, Artificial Sequence
  Description of Artificial Sequence: Synthetic oligonucleotide
ccccaucuaggauggugcu

SEQ ID NO: 479788 - RNA, 19 nt, Artificial Sequence
  Description of Artificial Sequence: Synthetic oligonucleotide
cgcgggguacacgaacuca

SEQ ID NO: 479789 - RNA, 19 nt, Artificial Sequence
  Description of Artificial Sequence: Synthetic oligonucleotide
ggucugaggcccagcgaau

SEQ ID NO: 479790 - RNA, 19 nt, Artificial Sequence
  Description of Artificial Sequence: Synthetic oligonucleotide
gcguugccaccauccgugu

SEQ ID NO: 479791 - RNA, 19 nt, Artificial Sequence
  Description of Artificial Sequence: Synthetic oligonucleotide
cgucacacucauguauugu

SEQ ID NO: 479792 - RNA, 19 nt, Artificial Sequence
  Description of Artificial Sequence: Synthetic oligonucleotide
gcaugcagucauaggccuu

SEQ ID NO: 479793 - RNA, 19 nt, Artificial Sequence
  Description of Artificial Sequence: Synthetic oligonucleotide
cgcgcgggguacacgaacu

SEQ ID NO: 479794 - RNA, 19 nt, Artificial Sequence
  Description of Artificial Sequence: Synthetic oligonucleotide
gcaguccuuccaaccuccu

SEQ ID NO: 479795 - RNA, 19 nt, Artificial Sequence
  Description of Artificial Sequence: Synthetic oligonucleotide
cgggguacacgaacucagu

SEQ ID NO: 479796 - RNA, 19 nt, Artificial Sequence
  Description of Artificial Sequence: Synthetic oligonucleotide
ccgaggagcugcugaggau

SEQ ID NO: 479797 - RNA, 19 nt, Artificial Sequence
  Description of Artificial Sequence: Synthetic oligonucleotide
cgcucgcgcgggguacacg

SEQ ID NO: 479798 - RNA, 19 nt, Artificial Sequence
  Description of Artificial Sequence: Synthetic oligonucleotide
ggcggggcgcgaaguuaaa

SEQ ID NO: 479799 - RNA, 19 nt, Artificial Sequence
  Description of Artificial Sequence: Synthetic oligonucleotide
gcggcgcgcuguacagauc

SEQ ID NO: 479800 - RNA, 19 nt, Artificial Sequence
  Description of Artificial Sequence: Synthetic oligonucleotide
gcgcucgcgcgggguacac

SEQ ID NO: 479801 - RNA, 19 nt, Artificial Sequence
  Description of Artificial Sequence: Synthetic oligonucleotide
ggcgcgcuguacagauccu

SEQ ID NO: 479802 - RNA, 19 nt, Artificial Sequence
  Description of Artificial Sequence: Synthetic oligonucleotide
guaaauucaacacuuaacc

SEQ ID NO: 479803 - RNA, 19 nt, Artificial Sequence
  Description of Artificial Sequence: Synthetic oligonucleotide
aguauugccagcuuguugg

SEQ ID NO: 479804 - RNA, 19 nt, Artificial Sequence
  Description of Artificial Sequence: Synthetic oligonucleotide
uauuacuucaaauuaacaa

SEQ ID NO: 479805 - RNA, 19 nt, Artificial Sequence
  Description of Artificial Sequence: Synthetic oligonucleotide
aaaaucagguguuaaccag

SEQ ID NO: 479806 - RNA, 19 nt, Artificial Sequence
  Description of Artificial Sequence: Synthetic oligonucleotide
uugauagaggcauagcggg

SEQ ID NO: 479807 - RNA, 19 nt, Artificial Sequence
  Description of Artificial Sequence: Synthetic oligonucleotide
aaguaaaucaaagaaacaa

SEQ ID NO: 479808 - RNA, 19 nt, Artificial Sequence
  Description of Artificial Sequence: Synthetic oligonucleotide
agaaagaugggguugccac

SEQ ID NO: 479809 - RNA, 19 nt, Artificial Sequence
  Description of Artificial Sequence: Synthetic oligonucleotide
caacacuuaacccugaccc

SEQ ID NO: 479810 - RNA, 19 nt, Artificial Sequence
  Description of Artificial Sequence: Synthetic oligonucleotide
aaauucuuggaguggaugu

SEQ ID NO: 479811 - RNA, 19 nt, Artificial Sequence
  Description of Artificial Sequence: Synthetic oligonucleotide
aguaauaaagacaaucuug

SEQ ID NO: 479812 - RNA, 19 nt, Artificial Sequence
  Description of Artificial Sequence: Synthetic oligonucleotide
augaccaucacauuguagu

SEQ ID NO: 479813 - RNA, 19 nt, Artificial Sequence
  Description of Artificial Sequence: Synthetic oligonucleotide
aucucgacggcuuugcucg

SEQ ID NO: 479814 - RNA, 19 nt, Artificial Sequence
  Description of Artificial Sequence: Synthetic oligonucleotide
aauccgggagaccucuugc

SEQ ID NO: 479815 - RNA, 19 nt, Artificial Sequence
  Description of Artificial Sequence: Synthetic oligonucleotide
ucaaauggcacgcuugucu

SEQ ID NO: 479816 - RNA, 19 nt, Artificial Sequence
  Description of Artificial Sequence: Synthetic oligonucleotide
auuucggaagagcuggcgc

SEQ ID NO: 479817 - RNA, 19 nt, Artificial Sequence
  Description of Artificial Sequence: Synthetic oligonucleotide
uuaacccugacccaggguc

SEQ ID NO: 479818 - RNA, 19 nt, Artificial Sequence
  Description of Artificial Sequence: Synthetic oligonucleotide
cagguguuaaccaggaagg

SEQ ID NO: 479819 - RNA, 19 nt, Artificial Sequence
  Description of Artificial Sequence: Synthetic oligonucleotide
acuaagcaaacacugguug

SEQ ID NO: 479820 - RNA, 19 nt, Artificial Sequence
  Description of Artificial Sequence: Synthetic oligonucleotide
ugaugcaagcucuucaggc

SEQ ID NO: 479821 - RNA, 19 nt, Artificial Sequence
  Description of Artificial Sequence: Synthetic oligonucleotide
guauguugagaacucagag

SEQ ID NO: 479822 - RNA, 19 nt, Artificial Sequence
  Description of Artificial Sequence: Synthetic oligonucleotide
auuagaggaguguuggcag

SEQ ID NO: 479823 - RNA, 19 nt, Artificial Sequence
  Description of Artificial Sequence: Synthetic oligonucleotide
aaaucagguguuaaccagg

SEQ ID NO: 479824 - RNA, 19 nt, Artificial Sequence
  Description of Artificial Sequence: Synthetic oligonucleotide
aagacguagucguaggaga

SEQ ID NO: 479825 - RNA, 19 nt, Artificial Sequence
  Description of Artificial Sequence: Synthetic oligonucleotide
aaugguaagucagagccga

SEQ ID NO: 479826 - RNA, 19 nt, Artificial Sequence
  Description of Artificial Sequence: Synthetic oligonucleotide
ucccgagauggucaaaugg

SEQ ID NO: 479827 - RNA, 19 nt, Artificial Sequence
  Description of Artificial Sequence: Synthetic oligonucleotide
cagaaguugagguauguug

SEQ ID NO: 479828 - RNA, 19 nt, Artificial Sequence
  Description of Artificial Sequence: Synthetic oligonucleotide
aaauccauugucgacucug

SEQ ID NO: 479829 - RNA, 19 nt, Artificial Sequence
  Description of Artificial Sequence: Synthetic oligonucleotide
ucagguucuuguuuucccg

SEQ ID NO: 479830 - RNA, 19 nt, Artificial Sequence
  Description of Artificial Sequence: Synthetic oligonucleotide
ucugugaggcugaaauccg

SEQ ID NO: 479831 - RNA, 19 nt, Artificial Sequence
  Description of Artificial Sequence: Synthetic oligonucleotide
uccauugucgacucugugc

SEQ ID NO: 479832 - RNA, 19 nt, Artificial Sequence
  Description of Artificial Sequence: Synthetic oligonucleotide
ugaggcugaacuuucggga

SEQ ID NO: 479833 - RNA, 19 nt, Artificial Sequence
  Description of Artificial Sequence: Synthetic oligonucleotide
acuaaaugguaagucagag

SEQ ID NO: 479834 - RNA, 19 nt, Artificial Sequence
  Description of Artificial Sequence: Synthetic oligonucleotide
uugccuaagaucagguaug

SEQ ID NO: 479835 - RNA, 19 nt, Artificial Sequence
  Description of Artificial Sequence: Synthetic oligonucleotide
uuuacaucccgguggauaa

SEQ ID NO: 479836 - RNA, 19 nt, Artificial Sequence
  Description of Artificial Sequence: Synthetic oligonucleotide
auuaaagaaaaugcaguga

SEQ ID NO: 479837 - RNA, 19 nt, Artificial Sequence
  Description of Artificial Sequence: Synthetic oligonucleotide
aggaaggguaaauucaaca

SEQ ID NO: 479838 - RNA, 19 nt, Artificial Sequence
  Description of Artificial Sequence: Synthetic oligonucleotide
gagaaguauugccagcuug

SEQ ID NO: 479839 - RNA, 19 nt, Artificial Sequence
  Description of Artificial Sequence: Synthetic oligonucleotide
ucauuucccgagaugguca

SEQ ID NO: 479840 - RNA, 19 nt, Artificial Sequence
  Description of Artificial Sequence: Synthetic oligonucleotide
ugucauuagaggaguguug

SEQ ID NO: 479841 - RNA, 19 nt, Artificial Sequence
  Description of Artificial Sequence: Synthetic oligonucleotide
aguugagguauguugagaa

SEQ ID NO: 479842 - RNA, 19 nt, Artificial Sequence
  Description of Artificial Sequence: Synthetic oligonucleotide
agauggucaaauggcacgc

SEQ ID NO: 479843 - RNA, 19 nt, Artificial Sequence
  Description of Artificial Sequence: Synthetic oligonucleotide
gaaguugagguauguugag

SEQ ID NO: 479844 - RNA, 19 nt, Artificial Sequence
  Description of Artificial Sequence: Synthetic oligonucleotide
agucgauuggcaguagccc

SEQ ID NO: 479845 - RNA, 19 nt, Artificial Sequence
  Description of Artificial Sequence: Synthetic oligonucleotide
uguugagaacucagagggg

SEQ ID NO: 479846 - RNA, 19 nt, Artificial Sequence
  Description of Artificial Sequence: Synthetic oligonucleotide
aaaguccaauauuuacaca

SEQ ID NO: 479847 - RNA, 19 nt, Artificial Sequence
  Description of Artificial Sequence: Synthetic oligonucleotide
gacacuaagcaaacacugg

SEQ ID NO: 479848 - RNA, 19 nt, Artificial Sequence
  Description of Artificial Sequence: Synthetic oligonucleotide
aaaugguaagucagagccg

SEQ ID NO: 479849 - RNA, 19 nt, Artificial Sequence
  Description of Artificial Sequence: Synthetic oligonucleotide
aagacacuaagcaaacacu

SEQ ID NO: 479850 - RNA, 19 nt, Artificial Sequence
  Description of Artificial Sequence: Synthetic oligonucleotide
aacacuuaacccugaccca

SEQ ID NO: 479851 - RNA, 19 nt, Artificial Sequence
  Description of Artificial Sequence: Synthetic oligonucleotide
augcaagcucuucaggcac

SEQ ID NO: 479852 - RNA, 19 nt, Artificial Sequence
  Description of Artificial Sequence: Synthetic oligonucleotide
gaagacguagucguaggag

SEQ ID NO: 479853 - RNA, 19 nt, Artificial Sequence
  Description of Artificial Sequence: Synthetic oligonucleotide
aucucaugggacuugucug

SEQ ID NO: 479854 - RNA, 19 nt, Artificial Sequence
  Description of Artificial Sequence: Synthetic oligonucleotide
ucgaagacguagucguagg

SEQ ID NO: 479855 - RNA, 19 nt, Artificial Sequence
  Description of Artificial Sequence: Synthetic oligonucleotide
agaugggguugccacacac

SEQ ID NO: 479856 - RNA, 19 nt, Artificial Sequence
  Description of Artificial Sequence: Synthetic oligonucleotide
ugggacuugucugugacug

SEQ ID NO: 479857 - RNA, 19 nt, Artificial Sequence
  Description of Artificial Sequence: Synthetic oligonucleotide
aguaaaucaaagaaacaaa

SEQ ID NO: 479858 - RNA, 19 nt, Artificial Sequence
  Description of Artificial Sequence: Synthetic oligonucleotide
uccgcucauacuucugacg

SEQ ID NO: 479859 - RNA, 19 nt, Artificial Sequence
  Description of Artificial Sequence: Synthetic oligonucleotide
acccaaugucauuagagga

SEQ ID NO: 479860 - RNA, 19 nt, Artificial Sequence
  Description of Artificial Sequence: Synthetic oligonucleotide
cagaggaccucgaugggcg

SEQ ID NO: 479861 - RNA, 19 nt, Artificial Sequence
  Description of Artificial Sequence: Synthetic oligonucleotide
uggucaaauggcacgcuug

SEQ ID NO: 479862 - RNA, 19 nt, Artificial Sequence
  Description of Artificial Sequence: Synthetic oligonucleotide
ugagguauguugagaacuc

SEQ ID NO: 479863 - RNA, 19 nt, Artificial Sequence
  Description of Artificial Sequence: Synthetic oligonucleotide
ucgggcuugucaucgaacc

SEQ ID NO: 479864 - RNA, 19 nt, Artificial Sequence
  Description of Artificial Sequence: Synthetic oligonucleotide
cuuguuuucccgguagggg

SEQ ID NO: 479865 - RNA, 19 nt, Artificial Sequence
  Description of Artificial Sequence: Synthetic oligonucleotide
auucuuggaguggauguac

SEQ ID NO: 479866 - RNA, 19 nt, Artificial Sequence
  Description of Artificial Sequence: Synthetic oligonucleotide
ggaaggguaaauucaacac

SEQ ID NO: 479867 - RNA, 19 nt, Artificial Sequence
  Description of Artificial Sequence: Synthetic oligonucleotide
acugucaggaccagggaac

SEQ ID NO: 479868 - RNA, 19 nt, Artificial Sequence
  Description of Artificial Sequence: Synthetic oligonucleotide
agacacuaagcaaacacug

SEQ ID NO: 479869 - RNA, 19 nt, Artificial Sequence
  Description of Artificial Sequence: Synthetic oligonucleotide
acggcuuugcucgaugccc

SEQ ID NO: 479870 - RNA, 19 nt, Artificial Sequence
  Description of Artificial Sequence: Synthetic oligonucleotide
aaaaucucaugggacuugu

SEQ ID NO: 479871 - RNA, 19 nt, Artificial Sequence
  Description of Artificial Sequence: Synthetic oligonucleotide
ucaagacugggccccagca

SEQ ID NO: 479872 - RNA, 19 nt, Artificial Sequence
  Description of Artificial Sequence: Synthetic oligonucleotide
gguaagucagagccgaugc

SEQ ID NO: 479873 - RNA, 19 nt, Artificial Sequence
  Description of Artificial Sequence: Synthetic oligonucleotide
ugcgugucuccuuggaucc

SEQ ID NO: 479874 - RNA, 19 nt, Artificial Sequence
  Description of Artificial Sequence: Synthetic oligonucleotide
uccuacucagaagucaggc

SEQ ID NO: 479875 - RNA, 19 nt, Artificial Sequence
  Description of Artificial Sequence: Synthetic oligonucleotide
gcagccuucauguugggag

SEQ ID NO: 479876 - RNA, 19 nt, Artificial Sequence
  Description of Artificial Sequence: Synthetic oligonucleotide
ggaaaauacaagucaccgc

SEQ ID NO: 479877 - RNA, 19 nt, Artificial Sequence
  Description of Artificial Sequence: Synthetic oligonucleotide
aacuaaaugguaagucaga

SEQ ID NO: 479878 - RNA, 19 nt, Artificial Sequence
  Description of Artificial Sequence: Synthetic oligonucleotide
uuagaggaguguuggcagc

SEQ ID NO: 479879 - RNA, 19 nt, Artificial Sequence
  Description of Artificial Sequence: Synthetic oligonucleotide
caaauggcacgcuugucug

SEQ ID NO: 479880 - RNA, 19 nt, Artificial Sequence
  Description of Artificial Sequence: Synthetic oligonucleotide
acuuaacccugacccaggg

SEQ ID NO: 479881 - RNA, 19 nt, Artificial Sequence
  Description of Artificial Sequence: Synthetic oligonucleotide
caucgaaccgcagggagcg

SEQ ID NO: 479882 - RNA, 19 nt, Artificial Sequence
  Description of Artificial Sequence: Synthetic oligonucleotide
acgagaacagaaacuuggc

SEQ ID NO: 479883 - RNA, 19 nt, Artificial Sequence
  Description of Artificial Sequence: Synthetic oligonucleotide
gguaaauucaacacuuaac

SEQ ID NO: 479884 - RNA, 19 nt, Artificial Sequence
  Description of Artificial Sequence: Synthetic oligonucleotide
guagucgggcuugucaucg

SEQ ID NO: 479885 - RNA, 19 nt, Artificial Sequence
  Description of Artificial Sequence: Synthetic oligonucleotide
gucgauuggcaguagcccc

SEQ ID NO: 479886 - RNA, 19 nt, Artificial Sequence
  Description of Artificial Sequence: Synthetic oligonucleotide
agggguagccuuugcagag

SEQ ID NO: 479887 - RNA, 19 nt, Artificial Sequence
  Description of Artificial Sequence: Synthetic oligonucleotide
ucgaugggcguugacaucu

SEQ ID NO: 479888 - RNA, 19 nt, Artificial Sequence
  Description of Artificial Sequence: Synthetic oligonucleotide
gcucacaaaaucucauggg

SEQ ID NO: 479889 - RNA, 19 nt, Artificial Sequence
  Description of Artificial Sequence: Synthetic oligonucleotide
aaaauacaagucaccgccu

SEQ ID NO: 479890 - RNA, 19 nt, Artificial Sequence
  Description of Artificial Sequence: Synthetic oligonucleotide
acacuuaacccugacccag

SEQ ID NO: 479891 - RNA, 19 nt, Artificial Sequence
  Description of Artificial Sequence: Synthetic oligonucleotide
ucguaggagaaacccugcc

SEQ ID NO: 479892 - RNA, 19 nt, Artificial Sequence
  Description of Artificial Sequence: Synthetic oligonucleotide
uugccguccagugaggucu

SEQ ID NO: 479893 - RNA, 19 nt, Artificial Sequence
  Description of Artificial Sequence: Synthetic oligonucleotide
aaucagguguuaaccagga

SEQ ID NO: 479894 - RNA, 19 nt, Artificial Sequence
  Description of Artificial Sequence: Synthetic oligonucleotide
auccgcucauacuucugac

SEQ ID NO: 479895 - RNA, 19 nt, Artificial Sequence
  Description of Artificial Sequence: Synthetic oligonucleotide
gguggguguugauagaggc

SEQ ID NO: 479896 - RNA, 19 nt, Artificial Sequence
  Description of Artificial Sequence: Synthetic oligonucleotide
gggauccucaguaauaaag

SEQ ID NO: 479897 - RNA, 19 nt, Artificial Sequence
  Description of Artificial Sequence: Synthetic oligonucleotide
uucggagucgauuggcagu

SEQ ID NO: 479898 - RNA, 19 nt, Artificial Sequence
  Description of Artificial Sequence: Synthetic oligonucleotide
aaauggcacgcuugucugu

SEQ ID NO: 479899 - RNA, 19 nt, Artificial Sequence
  Description of Artificial Sequence: Synthetic oligonucleotide
ugccuaagaucagguaugg

SEQ ID NO: 479900 - RNA, 19 nt, Artificial Sequence
  Description of Artificial Sequence: Synthetic oligonucleotide
gacucuaugcccugaggga

SEQ ID NO: 479901 - RNA, 19 nt, Artificial Sequence
  Description of Artificial Sequence: Synthetic oligonucleotide
ugaaauccgggagaccucu

SEQ ID NO: 479902 - RNA, 19 nt, Artificial Sequence
  Description of Artificial Sequence: Synthetic oligonucleotide
ugggguugccacacacugg

SEQ ID NO: 479903 - RNA, 19 nt, Artificial Sequence
  Description of Artificial Sequence: Synthetic oligonucleotide
agaaguauugccagcuugu

SEQ ID NO: 479904 - RNA, 19 nt, Artificial Sequence
  Description of Artificial Sequence: Synthetic oligonucleotide
ugugacuggcaaaccacuc

SEQ ID NO: 479905 - RNA, 19 nt, Artificial Sequence
  Description of Artificial Sequence: Synthetic oligonucleotide
gcugcaccgaauuugagca

SEQ ID NO: 479906 - RNA, 19 nt, Artificial Sequence
  Description of Artificial Sequence: Synthetic oligonucleotide
acguccucgggauuccggg

SEQ ID NO: 479907 - RNA, 19 nt, Artificial Sequence
  Description of Artificial Sequence: Synthetic oligonucleotide
gaggcugaaauccgggaga

SEQ ID NO: 479908 - RNA, 19 nt, Artificial Sequence
  Description of Artificial Sequence: Synthetic oligonucleotide
cuucggagucgauuggcag

SEQ ID NO: 479909 - RNA, 19 nt, Artificial Sequence
  Description of Artificial Sequence: Synthetic oligonucleotide
caucacgguacuucuuggc

SEQ ID NO: 479910 - RNA, 19 nt, Artificial Sequence
  Description of Artificial Sequence: Synthetic oligonucleotide
ggugaaagagauuucggaa

SEQ ID NO: 479911 - RNA, 19 nt, Artificial Sequence
  Description of Artificial Sequence: Synthetic oligonucleotide
cugugaggcugaaauccgg

SEQ ID NO: 479912 - RNA, 19 nt, Artificial Sequence
  Description of Artificial Sequence: Synthetic oligonucleotide
guaagucagagccgaugcc

SEQ ID NO: 479913 - RNA, 19 nt, Artificial Sequence
  Description of Artificial Sequence: Synthetic oligonucleotide
aggacucuaugcccugagg

SEQ ID NO: 479914 - RNA, 19 nt, Artificial Sequence
  Description of Artificial Sequence: Synthetic oligonucleotide
ugguaagucagagccgaug

SEQ ID NO: 479915 - RNA, 19 nt, Artificial Sequence
  Description of Artificial Sequence: Synthetic oligonucleotide
auccucaguaauaaagaca

SEQ ID NO: 479916 - RNA, 19 nt, Artificial Sequence
  Description of Artificial Sequence: Synthetic oligonucleotide
agguauguugagaacucag

SEQ ID NO: 479917 - RNA, 19 nt, Artificial Sequence
  Description of Artificial Sequence: Synthetic oligonucleotide
aacuugccuaagaucaggu

SEQ ID NO: 479918 - RNA, 19 nt, Artificial Sequence
  Description of Artificial Sequence: Synthetic oligonucleotide
cgugagaucgcucugggag

SEQ ID NO: 479919 - RNA, 19 nt, Artificial Sequence
  Description of Artificial Sequence: Synthetic oligonucleotide
gaagaggggugaccacagg

SEQ ID NO: 479920 - RNA, 19 nt, Artificial Sequence
  Description of Artificial Sequence: Synthetic oligonucleotide
uuuugccauuggaaaagua

SEQ ID NO: 479921 - RNA, 19 nt, Artificial Sequence
  Description of Artificial Sequence: Synthetic oligonucleotide
gguagaagccacaggcucg

SEQ ID NO: 479922 - RNA, 19 nt, Artificial Sequence
  Description of Artificial Sequence: Synthetic oligonucleotide
uagaggaguguuggcagcc

SEQ ID NO: 479923 - RNA, 19 nt, Artificial Sequence
  Description of Artificial Sequence: Synthetic oligonucleotide
ugcaccucuguggaggcgc

SEQ ID NO: 479924 - RNA, 19 nt, Artificial Sequence
  Description of Artificial Sequence: Synthetic oligonucleotide
aauccauugucgacucugu

SEQ ID NO: 479925 - RNA, 19 nt, Artificial Sequence
  Description of Artificial Sequence: Synthetic oligonucleotide
agagccgaugccaucuggg

SEQ ID NO: 479926 - RNA, 19 nt, Artificial Sequence
  Description of Artificial Sequence: Synthetic oligonucleotide
agguguuaaccaggaaggg

SEQ ID NO: 479927 - RNA, 19 nt, Artificial Sequence
  Description of Artificial Sequence: Synthetic oligonucleotide
cacuuaacccugacccagg

SEQ ID NO: 479928 - RNA, 19 nt, Artificial Sequence
  Description of Artificial Sequence: Synthetic oligonucleotide
uggcacgcuugucugugag

SEQ ID NO: 479929 - RNA, 19 nt, Artificial Sequence
  Description of Artificial Sequence: Synthetic oligonucleotide
caaggucucugcagagagg

SEQ ID NO: 479930 - RNA, 19 nt, Artificial Sequence
  Description of Artificial Sequence: Synthetic oligonucleotide
cccgagauggucaaauggc

SEQ ID NO: 479931 - RNA, 19 nt, Artificial Sequence
  Description of Artificial Sequence: Synthetic oligonucleotide
cauuguccaccccaccuug

SEQ ID NO: 479932 - RNA, 19 nt, Artificial Sequence
  Description of Artificial Sequence: Synthetic oligonucleotide
aaaucucaugggacuuguc

SEQ ID NO: 479933 - RNA, 19 nt, Artificial Sequence
  Description of Artificial Sequence: Synthetic oligonucleotide
caucucgacggcuuugcuc

SEQ ID NO: 479934 - RNA, 19 nt, Artificial Sequence
  Description of Artificial Sequence: Synthetic oligonucleotide
acaagucaccgccuccuca

SEQ ID NO: 479935 - RNA, 19 nt, Artificial Sequence
  Description of Artificial Sequence: Synthetic oligonucleotide
cuugccuaagaucagguau

SEQ ID NO: 479936 - RNA, 19 nt, Artificial Sequence
  Description of Artificial Sequence: Synthetic oligonucleotide
cucauuucccgagaugguc

SEQ ID NO: 479937 - RNA, 19 nt, Artificial Sequence
  Description of Artificial Sequence: Synthetic oligonucleotide
aaaccacucccugaugcaa

SEQ ID NO: 479938 - RNA, 19 nt, Artificial Sequence
  Description of Artificial Sequence: Synthetic oligonucleotide
ggcugcaccgaauuugagc

SEQ ID NO: 479939 - RNA, 19 nt, Artificial Sequence
  Description of Artificial Sequence: Synthetic oligonucleotide
gcggcugaucaucuggucg

SEQ ID NO: 479940 - RNA, 19 nt, Artificial Sequence
  Description of Artificial Sequence: Synthetic oligonucleotide
agucagagccgaugccauc

SEQ ID NO: 479941 - RNA, 19 nt, Artificial Sequence
  Description of Artificial Sequence: Synthetic oligonucleotide
ugugcgugucuccuuggau

SEQ ID NO: 479942 - RNA, 19 nt, Artificial Sequence
  Description of Artificial Sequence: Synthetic oligonucleotide
aggucugaggaggagacau

SEQ ID NO: 479943 - RNA, 19 nt, Artificial Sequence
  Description of Artificial Sequence: Synthetic oligonucleotide
ucgaugcggcugaucaucu

SEQ ID NO: 479944 - RNA, 19 nt, Artificial Sequence
  Description of Artificial Sequence: Synthetic oligonucleotide
uguccaccccaccuugacu

SEQ ID NO: 479945 - RNA, 19 nt, Artificial Sequence
  Description of Artificial Sequence: Synthetic oligonucleotide
guugugcgugucuccuugg

SEQ ID NO: 479946 - RNA, 19 nt, Artificial Sequence
  Description of Artificial Sequence: Synthetic oligonucleotide
gccggugaaagagauuucg

SEQ ID NO: 479947 - RNA, 19 nt, Artificial Sequence
  Description of Artificial Sequence: Synthetic oligonucleotide
ccugaugcaagcucuucag

SEQ ID NO: 479948 - RNA, 19 nt, Artificial Sequence
  Description of Artificial Sequence: Synthetic oligonucleotide
agggaacuaaaugguaagu

SEQ ID NO: 479949 - RNA, 19 nt, Artificial Sequence
  Description of Artificial Sequence: Synthetic oligonucleotide
augucauuagaggaguguu

SEQ ID NO: 479950 - RNA, 19 nt, Artificial Sequence
  Description of Artificial Sequence: Synthetic oligonucleotide
cuucccguucguguucucg

SEQ ID NO: 479951 - RNA, 19 nt, Artificial Sequence
  Description of Artificial Sequence: Synthetic oligonucleotide
auccauugucgacucugug

SEQ ID NO: 479952 - RNA, 19 nt, Artificial Sequence
  Description of Artificial Sequence: Synthetic oligonucleotide
ggauccgaggcucacaaaa

SEQ ID NO: 479953 - RNA, 19 nt, Artificial Sequence
  Description of Artificial Sequence: Synthetic oligonucleotide
acgcuugucugugaggcug

SEQ ID NO: 479954 - RNA, 19 nt, Artificial Sequence
  Description of Artificial Sequence: Synthetic oligonucleotide
uuaggggaggggaccucug

SEQ ID NO: 479955 - RNA, 19 nt, Artificial Sequence
  Description of Artificial Sequence: Synthetic oligonucleotide
uguggaggcgcaugcucac

SEQ ID NO: 479956 - RNA, 19 nt, Artificial Sequence
  Description of Artificial Sequence: Synthetic oligonucleotide
caggugacugucaggacca

SEQ ID NO: 479957 - RNA, 19 nt, Artificial Sequence
  Description of Artificial Sequence: Synthetic oligonucleotide
ucgacggcuuugcucgaug

SEQ ID NO: 479958 - RNA, 19 nt, Artificial Sequence
  Description of Artificial Sequence: Synthetic oligonucleotide
aaccacaauaaagcucaaa

SEQ ID NO: 479959 - RNA, 19 nt, Artificial Sequence
  Description of Artificial Sequence: Synthetic oligonucleotide
cucgaugcggcugaucauc

SEQ ID NO: 479960 - RNA, 19 nt, Artificial Sequence
  Description of Artificial Sequence: Synthetic oligonucleotide
ugggcguugacaucuucuu

SEQ ID NO: 479961 - RNA, 19 nt, Artificial Sequence
  Description of Artificial Sequence: Synthetic oligonucleotide
cuacuuuauuacuucaaau

SEQ ID NO: 479962 - RNA, 19 nt, Artificial Sequence
  Description of Artificial Sequence: Synthetic oligonucleotide
uuguuggaugcgagaggca

SEQ ID NO: 479963 - RNA, 19 nt, Artificial Sequence
  Description of Artificial Sequence: Synthetic oligonucleotide
ccgcucauacuucugacgc

SEQ ID NO: 479964 - RNA, 19 nt, Artificial Sequence
  Description of Artificial Sequence: Synthetic oligonucleotide
ugcggugcuuuguuucaca

SEQ ID NO: 479965 - RNA, 19 nt, Artificial Sequence
  Description of Artificial Sequence: Synthetic oligonucleotide
cucuaugcccugagggaug

SEQ ID NO: 479966 - RNA, 19 nt, Artificial Sequence
  Description of Artificial Sequence: Synthetic oligonucleotide
ucucuucccguucguguuc

SEQ ID NO: 479967 - RNA, 19 nt, Artificial Sequence
  Description of Artificial Sequence: Synthetic oligonucleotide
acucuaugcccugagggau

SEQ ID NO: 479968 - RNA, 19 nt, Artificial Sequence
  Description of Artificial Sequence: Synthetic oligonucleotide
agaucgcucugggagaagu

SEQ ID NO: 479969 - RNA, 19 nt, Artificial Sequence
  Description of Artificial Sequence: Synthetic oligonucleotide
accucgaugggcguugaca

SEQ ID NO: 479970 - RNA, 19 nt, Artificial Sequence
  Description of Artificial Sequence: Synthetic oligonucleotide
gggaacuaaaugguaaguc

SEQ ID NO: 479971 - RNA, 19 nt, Artificial Sequence
  Description of Artificial Sequence: Synthetic oligonucleotide
ucugacgcuugguggcggc

SEQ ID NO: 479972 - RNA, 19 nt, Artificial Sequence
  Description of Artificial Sequence: Synthetic oligonucleotide
gggauuccgggcugcaccg

SEQ ID NO: 479973 - RNA, 19 nt, Artificial Sequence
  Description of Artificial Sequence: Synthetic oligonucleotide
ggguaaauucaacacuuaa

SEQ ID NO: 479974 - RNA, 19 nt, Artificial Sequence
  Description of Artificial Sequence: Synthetic oligonucleotide
ugagaucgcucugggagaa

SEQ ID NO: 479975 - RNA, 19 nt, Artificial Sequence
  Description of Artificial Sequence: Synthetic oligonucleotide
agagguccucaagacuggg

SEQ ID NO: 479976 - RNA, 19 nt, Artificial Sequence
  Description of Artificial Sequence: Synthetic oligonucleotide
ugucaucgaaccgcaggga

SEQ ID NO: 479977 - RNA, 19 nt, Artificial Sequence
  Description of Artificial Sequence: Synthetic oligonucleotide
auggucaaauggcacgcuu

SEQ ID NO: 479978 - RNA, 19 nt, Artificial Sequence
  Description of Artificial Sequence: Synthetic oligonucleotide
ucgaaccgcagggagcggc

SEQ ID NO: 479979 - RNA, 19 nt, Artificial Sequence
  Description of Artificial Sequence: Synthetic oligonucleotide
gugagaucgcucugggaga

SEQ ID NO: 479980 - RNA, 19 nt, Artificial Sequence
  Description of Artificial Sequence: Synthetic oligonucleotide
acuugccuaagaucaggua

SEQ ID NO: 479981 - RNA, 19 nt, Artificial Sequence
  Description of Artificial Sequence: Synthetic oligonucleotide
gcaucacgguacuucuugg

SEQ ID NO: 479982 - RNA, 19 nt, Artificial Sequence
  Description of Artificial Sequence: Synthetic oligonucleotide
caaaccacucccugaugca

SEQ ID NO: 479983 - RNA, 19 nt, Artificial Sequence
  Description of Artificial Sequence: Synthetic oligonucleotide
cacuucggagucgauuggc

SEQ ID NO: 479984 - RNA, 19 nt, Artificial Sequence
  Description of Artificial Sequence: Synthetic oligonucleotide
acucccugaugcaagcucu

SEQ ID NO: 479985 - RNA, 19 nt, Artificial Sequence
  Description of Artificial Sequence: Synthetic oligonucleotide
cugaaauccgggagaccuc

SEQ ID NO: 479986 - RNA, 19 nt, Artificial Sequence
  Description of Artificial Sequence: Synthetic oligonucleotide
cagagccgaugccaucugg

SEQ ID NO: 479987 - RNA, 19 nt, Artificial Sequence
  Description of Artificial Sequence: Synthetic oligonucleotide
cacucccugaugcaagcuc

SEQ ID NO: 479988 - RNA, 19 nt, Artificial Sequence
  Description of Artificial Sequence: Synthetic oligonucleotide
guucucgucgcucccgguc

SEQ ID NO: 479989 - RNA, 19 nt, Artificial Sequence
  Description of Artificial Sequence: Synthetic oligonucleotide
gcuggaguaugacccaaug

SEQ ID NO: 479990 - RNA, 19 nt, Artificial Sequence
  Description of Artificial Sequence: Synthetic oligonucleotide
ugucugugacuggcaaacc

SEQ ID NO: 479991 - RNA, 19 nt, Artificial Sequence
  Description of Artificial Sequence: Synthetic oligonucleotide
cauuccagcuugauggcua

SEQ ID NO: 479992 - RNA, 19 nt, Artificial Sequence
  Description of Artificial Sequence: Synthetic oligonucleotide
ucggagucgauuggcagua

SEQ ID NO: 479993 - RNA, 19 nt, Artificial Sequence
  Description of Artificial Sequence: Synthetic oligonucleotide
gccgaugccaucugggaac

SEQ ID NO: 479994 - RNA, 19 nt, Artificial Sequence
  Description of Artificial Sequence: Synthetic oligonucleotide
agccgaugccaucugggaa

SEQ ID NO: 479995 - RNA, 19 nt, Artificial Sequence
  Description of Artificial Sequence: Synthetic oligonucleotide
ggagucgauuggcaguagc

SEQ ID NO: 479996 - RNA, 19 nt, Artificial Sequence
  Description of Artificial Sequence: Synthetic oligonucleotide
cuguggaggcgcaugcuca

SEQ ID NO: 479997 - RNA, 19 nt, Artificial Sequence
  Description of Artificial Sequence: Synthetic oligonucleotide
ggacuugucugugacuggc

SEQ ID NO: 479998 - RNA, 19 nt, Artificial Sequence
  Description of Artificial Sequence: Synthetic oligonucleotide
ccggugaaagagauuucgg

SEQ ID NO: 479999 - RNA, 19 nt, Artificial Sequence
  Description of Artificial Sequence: Synthetic oligonucleotide
ucccgguaggggauaugcu

SEQ ID NO: 480000 - RNA, 19 nt, Artificial Sequence
  Description of Artificial Sequence: Synthetic oligonucleotide
aaccgcagggagcggcaga

SEQ ID NO: 480001 - RNA, 19 nt, Artificial Sequence
  Description of Artificial Sequence: Synthetic oligonucleotide
aucgcucugggagaaguau

SEQ ID NO: 480002 - RNA, 19 nt, Artificial Sequence
  Description of Artificial Sequence: Synthetic oligonucleotide
cuugccguccagugagguc

SEQ ID NO: 480003 - RNA, 19 nt, Artificial Sequence
  Description of Artificial Sequence: Synthetic oligonucleotide
ggagacauuggccggugca

SEQ ID NO: 480004 - RNA, 19 nt, Artificial Sequence
  Description of Artificial Sequence: Synthetic oligonucleotide
guccuacucagaagucagg

SEQ ID NO: 480005 - RNA, 19 nt, Artificial Sequence
  Description of Artificial Sequence: Synthetic oligonucleotide
gcggcuuugagacccugcc

SEQ ID NO: 480006 - RNA, 19 nt, Artificial Sequence
  Description of Artificial Sequence: Synthetic oligonucleotide
gucguaggagaaacccugc

SEQ ID NO: 480007 - RNA, 19 nt, Artificial Sequence
  Description of Artificial Sequence: Synthetic oligonucleotide
caggcucggcugcacuucg

SEQ ID NO: 480008 - RNA, 19 nt, Artificial Sequence
  Description of Artificial Sequence: Synthetic oligonucleotide
uuccgggcugcaccgaauu

SEQ ID NO: 480009 - RNA, 19 nt, Artificial Sequence
  Description of Artificial Sequence: Synthetic oligonucleotide
cauugucgacucugugcug

SEQ ID NO: 480010 - RNA, 19 nt, Artificial Sequence
  Description of Artificial Sequence: Synthetic oligonucleotide
acauuggccggugcaccuc

SEQ ID NO: 480011 - RNA, 19 nt, Artificial Sequence
  Description of Artificial Sequence: Synthetic oligonucleotide
cccgguaggggauaugcug

SEQ ID NO: 480012 - RNA, 19 nt, Artificial Sequence
  Description of Artificial Sequence: Synthetic oligonucleotide
gccuuugcagaggaccucg

SEQ ID NO: 480013 - RNA, 19 nt, Artificial Sequence
  Description of Artificial Sequence: Synthetic oligonucleotide
uuggccggugcaccucugu

SEQ ID NO: 480014 - RNA, 19 nt, Artificial Sequence
  Description of Artificial Sequence: Synthetic oligonucleotide
ccccaccuugacuuuaggg

SEQ ID NO: 480015 - RNA, 19 nt, Artificial Sequence
  Description of Artificial Sequence: Synthetic oligonucleotide
caccuuccucucccggucg

SEQ ID NO: 480016 - RNA, 19 nt, Artificial Sequence
  Description of Artificial Sequence: Synthetic oligonucleotide
caccccaccuugacuuuag

SEQ ID NO: 480017 - RNA, 19 nt, Artificial Sequence
  Description of Artificial Sequence: Synthetic oligonucleotide
gaugcgagaggcaggggua

SEQ ID NO: 480018 - RNA, 19 nt, Artificial Sequence
  Description of Artificial Sequence: Synthetic oligonucleotide
aucuggucggccagcagca

SEQ ID NO: 480019 - RNA, 19 nt, Artificial Sequence
  Description of Artificial Sequence: Synthetic oligonucleotide
caguaauaaagacaaucuu

SEQ ID NO: 480020 - RNA, 19 nt, Artificial Sequence
  Description of Artificial Sequence: Synthetic oligonucleotide
agacguagucguaggagaa

SEQ ID NO: 480021 - RNA, 19 nt, Artificial Sequence
  Description of Artificial Sequence: Synthetic oligonucleotide
acagggauccucaguaaua

SEQ ID NO: 480022 - RNA, 19 nt, Artificial Sequence
  Description of Artificial Sequence: Synthetic oligonucleotide
agccuuugcagaggaccuc

SEQ ID NO: 480023 - RNA, 19 nt, Artificial Sequence
  Description of Artificial Sequence: Synthetic oligonucleotide
gauuccgggcugcaccgaa

SEQ ID NO: 480024 - RNA, 19 nt, Artificial Sequence
  Description of Artificial Sequence: Synthetic oligonucleotide
gggacuugucugugacugg

SEQ ID NO: 480025 - RNA, 19 nt, Artificial Sequence
  Description of Artificial Sequence: Synthetic oligonucleotide
agucgggcuugucaucgaa

SEQ ID NO: 480026 - RNA, 19 nt, Artificial Sequence
  Description of Artificial Sequence: Synthetic oligonucleotide
cucccggucggcccgugag

SEQ ID NO: 480027 - RNA, 19 nt, Artificial Sequence
  Description of Artificial Sequence: Synthetic oligonucleotide
aggaccucgaugggcguug

SEQ ID NO: 480028 - RNA, 19 nt, Artificial Sequence
  Description of Artificial Sequence: Synthetic oligonucleotide
uauugccagcuuguuggau

SEQ ID NO: 480029 - RNA, 19 nt, Artificial Sequence
  Description of Artificial Sequence: Synthetic oligonucleotide
ggcacgcuugucugugagg

SEQ ID NO: 480030 - RNA, 19 nt, Artificial Sequence
  Description of Artificial Sequence: Synthetic oligonucleotide
agggauccucaguaauaaa

SEQ ID NO: 480031 - RNA, 19 nt, Artificial Sequence
  Description of Artificial Sequence: Synthetic oligonucleotide
caccacuugauggacggga

SEQ ID NO: 480032 - RNA, 19 nt, Artificial Sequence
  Description of Artificial Sequence: Synthetic oligonucleotide
aucagguguuaaccaggaa

SEQ ID NO: 480033 - RNA, 19 nt, Artificial Sequence
  Description of Artificial Sequence: Synthetic oligonucleotide
ugccggugaaagagauuuc

SEQ ID NO: 480034 - RNA, 19 nt, Artificial Sequence
  Description of Artificial Sequence: Synthetic oligonucleotide
cugagggauguggagguca

SEQ ID NO: 480035 - RNA, 19 nt, Artificial Sequence
  Description of Artificial Sequence: Synthetic oligonucleotide
ggaugcuuaggggagggga

SEQ ID NO: 480036 - RNA, 19 nt, Artificial Sequence
  Description of Artificial Sequence: Synthetic oligonucleotide
cagggauccucaguaauaa

SEQ ID NO: 480037 - RNA, 19 nt, Artificial Sequence
  Description of Artificial Sequence: Synthetic oligonucleotide
cggcugaucaucuggucgg

SEQ ID NO: 480038 - RNA, 19 nt, Artificial Sequence
  Description of Artificial Sequence: Synthetic oligonucleotide
cucgaugggcguugacauc

SEQ ID NO: 480039 - RNA, 19 nt, Artificial Sequence
  Description of Artificial Sequence: Synthetic oligonucleotide
cgcaccacuugauggacgg

SEQ ID NO: 480040 - RNA, 19 nt, Artificial Sequence
  Description of Artificial Sequence: Synthetic oligonucleotide
gacauuggccggugcaccu

SEQ ID NO: 480041 - RNA, 19 nt, Artificial Sequence
  Description of Artificial Sequence: Synthetic oligonucleotide
acucgaugcggcugaucau

SEQ ID NO: 480042 - RNA, 19 nt, Artificial Sequence
  Description of Artificial Sequence: Synthetic oligonucleotide
aggaugcuuaggggagggg

SEQ ID NO: 480043 - RNA, 19 nt, Artificial Sequence
  Description of Artificial Sequence: Synthetic oligonucleotide
cauuucccgagauggucaa

SEQ ID NO: 480044 - RNA, 19 nt, Artificial Sequence
  Description of Artificial Sequence: Synthetic oligonucleotide
uccaucggcugcccugcau

SEQ ID NO: 480045 - RNA, 19 nt, Artificial Sequence
  Description of Artificial Sequence: Synthetic oligonucleotide
ucccggucggcccgugaga

SEQ ID NO: 480046 - RNA, 19 nt, Artificial Sequence
  Description of Artificial Sequence: Synthetic oligonucleotide
gacguagucguaggagaaa

SEQ ID NO: 480047 - RNA, 19 nt, Artificial Sequence
  Description of Artificial Sequence: Synthetic oligonucleotide
cgagauggucaaauggcac

SEQ ID NO: 480048 - RNA, 19 nt, Artificial Sequence
  Description of Artificial Sequence: Synthetic oligonucleotide
gucgcucccggucuacguc

SEQ ID NO: 480049 - RNA, 19 nt, Artificial Sequence
  Description of Artificial Sequence: Synthetic oligonucleotide
agaggaccucgaugggcgu

SEQ ID NO: 480050 - RNA, 19 nt, Artificial Sequence
  Description of Artificial Sequence: Synthetic oligonucleotide
ggucauuguccaccccacc

SEQ ID NO: 480051 - RNA, 19 nt, Artificial Sequence
  Description of Artificial Sequence: Synthetic oligonucleotide
cuggaguaugacccaaugu

SEQ ID NO: 480052 - RNA, 19 nt, Artificial Sequence
  Description of Artificial Sequence: Synthetic oligonucleotide
gacuugucugugacuggca

SEQ ID NO: 480053 - RNA, 19 nt, Artificial Sequence
  Description of Artificial Sequence: Synthetic oligonucleotide
gagaaacccugccggugaa

SEQ ID NO: 480054 - RNA, 19 nt, Artificial Sequence
  Description of Artificial Sequence: Synthetic oligonucleotide
uagucgggcuugucaucga

SEQ ID NO: 480055 - RNA, 19 nt, Artificial Sequence
  Description of Artificial Sequence: Synthetic oligonucleotide
ccgaggcucacaaaaucuc

SEQ ID NO: 480056 - RNA, 19 nt, Artificial Sequence
  Description of Artificial Sequence: Synthetic oligonucleotide
gcgcagguaggaguagucg

SEQ ID NO: 480057 - RNA, 19 nt, Artificial Sequence
  Description of Artificial Sequence: Synthetic oligonucleotide
gaaccgcagggagcggcag

SEQ ID NO: 480058 - RNA, 19 nt, Artificial Sequence
  Description of Artificial Sequence: Synthetic oligonucleotide
guccaccccaccuugacuu

SEQ ID NO: 480059 - RNA, 19 nt, Artificial Sequence
  Description of Artificial Sequence: Synthetic oligonucleotide
ggucaaauggcacgcuugu

SEQ ID NO: 480060 - RNA, 19 nt, Artificial Sequence
  Description of Artificial Sequence: Synthetic oligonucleotide
gucagagccgaugccaucu

SEQ ID NO: 480061 - RNA, 19 nt, Artificial Sequence
  Description of Artificial Sequence: Synthetic oligonucleotide
uuacaucccgguggauaaa

SEQ ID NO: 480062 - RNA, 19 nt, Artificial Sequence
  Description of Artificial Sequence: Synthetic oligonucleotide
ggaugcgagaggcaggggu

SEQ ID NO: 480063 - RNA, 19 nt, Artificial Sequence
  Description of Artificial Sequence: Synthetic oligonucleotide
accagggaacuaaauggua

SEQ ID NO: 480064 - RNA, 19 nt, Artificial Sequence
  Description of Artificial Sequence: Synthetic oligonucleotide
uggauccgaggcucacaaa

SEQ ID NO: 480065 - RNA, 19 nt, Artificial Sequence
  Description of Artificial Sequence: Synthetic oligonucleotide
cccguucguguucucgucg

SEQ ID NO: 480066 - RNA, 19 nt, Artificial Sequence
  Description of Artificial Sequence: Synthetic oligonucleotide
cugccggugaaagagauuu

SEQ ID NO: 480067 - RNA, 19 nt, Artificial Sequence
  Description of Artificial Sequence: Synthetic oligonucleotide
auggcacgcuugucuguga

SEQ ID NO: 480068 - RNA, 19 nt, Artificial Sequence
  Description of Artificial Sequence: Synthetic oligonucleotide
uuucccgguaggggauaug

SEQ ID NO: 480069 - RNA, 19 nt, Artificial Sequence
  Description of Artificial Sequence: Synthetic oligonucleotide
gucaaauggcacgcuuguc

SEQ ID NO: 480070 - RNA, 19 nt, Artificial Sequence
  Description of Artificial Sequence: Synthetic oligonucleotide
agcaccgucuugaggcuga

SEQ ID NO: 480071 - RNA, 19 nt, Artificial Sequence
  Description of Artificial Sequence: Synthetic oligonucleotide
cacuaagcaaacacugguu

SEQ ID NO: 480072 - RNA, 19 nt, Artificial Sequence
  Description of Artificial Sequence: Synthetic oligonucleotide
uagaggcauagcgggcagu

SEQ ID NO: 480073 - RNA, 19 nt, Artificial Sequence
  Description of Artificial Sequence: Synthetic oligonucleotide
auuguccaccccaccuuga

SEQ ID NO: 480074 - RNA, 19 nt, Artificial Sequence
  Description of Artificial Sequence: Synthetic oligonucleotide
aggguaaauucaacacuua

SEQ ID NO: 480075 - RNA, 19 nt, Artificial Sequence
  Description of Artificial Sequence: Synthetic oligonucleotide
aggucaucucgacggcuuu

SEQ ID NO: 480076 - RNA, 19 nt, Artificial Sequence
  Description of Artificial Sequence: Synthetic oligonucleotide
gguguuaaccaggaagggu

SEQ ID NO: 480077 - RNA, 19 nt, Artificial Sequence
  Description of Artificial Sequence: Synthetic oligonucleotide
uccgggcugcaccgaauuu

SEQ ID NO: 480078 - RNA, 19 nt, Artificial Sequence
  Description of Artificial Sequence: Synthetic oligonucleotide
gagaucgcucugggagaag

SEQ ID NO: 480079 - RNA, 19 nt, Artificial Sequence
  Description of Artificial Sequence: Synthetic oligonucleotide
ccauugucgacucugugcu

SEQ ID NO: 480080 - RNA, 19 nt, Artificial Sequence
  Description of Artificial Sequence: Synthetic oligonucleotide
ccgagauggucaaauggca

SEQ ID NO: 480081 - RNA, 19 nt, Artificial Sequence
  Description of Artificial Sequence: Synthetic oligonucleotide
gucgggcuugucaucgaac

SEQ ID NO: 480082 - RNA, 19 nt, Artificial Sequence
  Description of Artificial Sequence: Synthetic oligonucleotide
ucucgacggcuuugcucga

SEQ ID NO: 480083 - RNA, 19 nt, Artificial Sequence
  Description of Artificial Sequence: Synthetic oligonucleotide
ccguucguguucucgucgc

SEQ ID NO: 480084 - RNA, 19 nt, Artificial Sequence
  Description of Artificial Sequence: Synthetic oligonucleotide
gauccgaggcucacaaaau

SEQ ID NO: 480085 - RNA, 19 nt, Artificial Sequence
  Description of Artificial Sequence: Synthetic oligonucleotide
gggacgagaacagaaacuu

SEQ ID NO: 480086 - RNA, 19 nt, Artificial Sequence
  Description of Artificial Sequence: Synthetic oligonucleotide
cuuggauccgaggcucaca

SEQ ID NO: 480087 - RNA, 19 nt, Artificial Sequence
  Description of Artificial Sequence: Synthetic oligonucleotide
ucucccggucggcccguga

SEQ ID NO: 480088 - RNA, 19 nt, Artificial Sequence
  Description of Artificial Sequence: Synthetic oligonucleotide
accgcagggagcggcagaa

SEQ ID NO: 480089 - RNA, 19 nt, Artificial Sequence
  Description of Artificial Sequence: Synthetic oligonucleotide
cgggauuccgggcugcacc

SEQ ID NO: 480090 - RNA, 19 nt, Artificial Sequence
  Description of Artificial Sequence: Synthetic oligonucleotide
ugucaggaccagggaacua

SEQ ID NO: 480091 - RNA, 19 nt, Artificial Sequence
  Description of Artificial Sequence: Synthetic oligonucleotide
cccgugagaucgcucuggg

SEQ ID NO: 480092 - RNA, 19 nt, Artificial Sequence
  Description of Artificial Sequence: Synthetic oligonucleotide
gggcguugacaucuucuuc

SEQ ID NO: 480093 - RNA, 19 nt, Artificial Sequence
  Description of Artificial Sequence: Synthetic oligonucleotide
ggucaucucgacggcuuug

SEQ ID NO: 480094 - RNA, 19 nt, Artificial Sequence
  Description of Artificial Sequence: Synthetic oligonucleotide
aucgaaccgcagggagcgg

SEQ ID NO: 480095 - RNA, 19 nt, Artificial Sequence
  Description of Artificial Sequence: Synthetic oligonucleotide
gaccucgaugggcguugac

SEQ ID NO: 480096 - RNA, 19 nt, Artificial Sequence
  Description of Artificial Sequence: Synthetic oligonucleotide
gaucgcucugggagaagua

SEQ ID NO: 480097 - RNA, 19 nt, Artificial Sequence
  Description of Artificial Sequence: Synthetic oligonucleotide
gggagcggcagaaguugag

SEQ ID NO: 480098 - RNA, 19 nt, Artificial Sequence
  Description of Artificial Sequence: Synthetic oligonucleotide
cuuaacccugacccagggu

SEQ ID NO: 480099 - RNA, 19 nt, Artificial Sequence
  Description of Artificial Sequence: Synthetic oligonucleotide
gugcaccucuguggaggcg

SEQ ID NO: 480100 - RNA, 19 nt, Artificial Sequence
  Description of Artificial Sequence: Synthetic oligonucleotide
ggcaaggacucuaugcccu

SEQ ID NO: 480101 - RNA, 19 nt, Artificial Sequence
  Description of Artificial Sequence: Synthetic oligonucleotide
ccgcaccacuugauggacg

SEQ ID NO: 480102 - RNA, 19 nt, Artificial Sequence
  Description of Artificial Sequence: Synthetic oligonucleotide
ggcuugucaucgaaccgca

SEQ ID NO: 480103 - RNA, 19 nt, Artificial Sequence
  Description of Artificial Sequence: Synthetic oligonucleotide
ccgggcugcaccgaauuug

SEQ ID NO: 480104 - RNA, 19 nt, Artificial Sequence
  Description of Artificial Sequence: Synthetic oligonucleotide
ucuucccguucguguucuc

SEQ ID NO: 480105 - RNA, 19 nt, Artificial Sequence
  Description of Artificial Sequence: Synthetic oligonucleotide
cgaggcucacaaaaucuca

SEQ ID NO: 480106 - RNA, 19 nt, Artificial Sequence
  Description of Artificial Sequence: Synthetic oligonucleotide
cuuaggggaggggaccucu

SEQ ID NO: 480107 - RNA, 19 nt, Artificial Sequence
  Description of Artificial Sequence: Synthetic oligonucleotide
cuuugcagaggaccucgau

SEQ ID NO: 480108 - RNA, 19 nt, Artificial Sequence
  Description of Artificial Sequence: Synthetic oligonucleotide
ggggacgagaacagaaacu

SEQ ID NO: 480109 - RNA, 19 nt, Artificial Sequence
  Description of Artificial Sequence: Synthetic oligonucleotide
cgacggcuuugcucgaugc

SEQ ID NO: 480110 - RNA, 19 nt, Artificial Sequence
  Description of Artificial Sequence: Synthetic oligonucleotide
ggagaccucuugccgucca

SEQ ID NO: 480111 - RNA, 19 nt, Artificial Sequence
  Description of Artificial Sequence: Synthetic oligonucleotide
aggcucggcugcacuucgg

SEQ ID NO: 480112 - RNA, 19 nt, Artificial Sequence
  Description of Artificial Sequence: Synthetic oligonucleotide
gacuggcaaaccacucccu

SEQ ID NO: 480113 - RNA, 19 nt, Artificial Sequence
  Description of Artificial Sequence: Synthetic oligonucleotide
auuccgggcugcaccgaau

SEQ ID NO: 480114 - RNA, 19 nt, Artificial Sequence
  Description of Artificial Sequence: Synthetic oligonucleotide
cucgucgcucccggucuac

SEQ ID NO: 480115 - RNA, 19 nt, Artificial Sequence
  Description of Artificial Sequence: Synthetic oligonucleotide
cguguucucgucgcucccg

SEQ ID NO: 480116 - RNA, 19 nt, Artificial Sequence
  Description of Artificial Sequence: Synthetic oligonucleotide
auuggccggugcaccucug

SEQ ID NO: 480117 - RNA, 19 nt, Artificial Sequence
  Description of Artificial Sequence: Synthetic oligonucleotide
gcuugucaucgaaccgcag

SEQ ID NO: 480118 - RNA, 19 nt, Artificial Sequence
  Description of Artificial Sequence: Synthetic oligonucleotide
guuuucccgguaggggaua

SEQ ID NO: 480119 - RNA, 19 nt, Artificial Sequence
  Description of Artificial Sequence: Synthetic oligonucleotide
ccaaggggcugcaguugug

SEQ ID NO: 480120 - RNA, 19 nt, Artificial Sequence
  Description of Artificial Sequence: Synthetic oligonucleotide
ccucgaugggcguugacau

SEQ ID NO: 480121 - RNA, 19 nt, Artificial Sequence
  Description of Artificial Sequence: Synthetic oligonucleotide
ggcccgugagaucgcucug

SEQ ID NO: 480122 - RNA, 19 nt, Artificial Sequence
  Description of Artificial Sequence: Synthetic oligonucleotide
aggugacgggaggggagaa

SEQ ID NO: 480123 - RNA, 19 nt, Artificial Sequence
  Description of Artificial Sequence: Synthetic oligonucleotide
gacgcuugguggcggcuuu

SEQ ID NO: 480124 - RNA, 19 nt, Artificial Sequence
  Description of Artificial Sequence: Synthetic oligonucleotide
gcaguugugcgugucuccu

SEQ ID NO: 480125 - RNA, 19 nt, Artificial Sequence
  Description of Artificial Sequence: Synthetic oligonucleotide
gccaaggggcugcaguugu

SEQ ID NO: 480126 - RNA, 19 nt, Artificial Sequence
  Description of Artificial Sequence: Synthetic oligonucleotide
cccggucuacguccucggg

SEQ ID NO: 480127 - RNA, 19 nt, Artificial Sequence
  Description of Artificial Sequence: Synthetic oligonucleotide
caccgucuugaggcugaac

SEQ ID NO: 480128 - RNA, 19 nt, Artificial Sequence
  Description of Artificial Sequence: Synthetic oligonucleotide
ggcagggcucuggucgcag

SEQ ID NO: 480129 - RNA, 19 nt, Artificial Sequence
  Description of Artificial Sequence: Synthetic oligonucleotide
gcgugucuccuuggauccg

SEQ ID NO: 480130 - RNA, 19 nt, Artificial Sequence
  Description of Artificial Sequence: Synthetic oligonucleotide
ggagaaguauugccagcuu

SEQ ID NO: 480131 - RNA, 19 nt, Artificial Sequence
  Description of Artificial Sequence: Synthetic oligonucleotide
ccccgcaccacuugaugga

SEQ ID NO: 480132 - RNA, 19 nt, Artificial Sequence
  Description of Artificial Sequence: Synthetic oligonucleotide
cgaagacguagucguagga

SEQ ID NO: 480133 - RNA, 19 nt, Artificial Sequence
  Description of Artificial Sequence: Synthetic oligonucleotide
cccguaggugggccagggg

SEQ ID NO: 480134 - RNA, 19 nt, Artificial Sequence
  Description of Artificial Sequence: Synthetic oligonucleotide
ccguccagugaggucugag

SEQ ID NO: 480135 - RNA, 19 nt, Artificial Sequence
  Description of Artificial Sequence: Synthetic oligonucleotide
gccuaagaucagguaugga

SEQ ID NO: 480136 - RNA, 19 nt, Artificial Sequence
  Description of Artificial Sequence: Synthetic oligonucleotide
ccccguaggugggccaggg

SEQ ID NO: 480137 - RNA, 19 nt, Artificial Sequence
  Description of Artificial Sequence: Synthetic oligonucleotide
cugcacuucggagucgauu

SEQ ID NO: 480138 - RNA, 19 nt, Artificial Sequence
  Description of Artificial Sequence: Synthetic oligonucleotide
ccuuugcagaggaccucga

SEQ ID NO: 480139 - RNA, 19 nt, Artificial Sequence
  Description of Artificial Sequence: Synthetic oligonucleotide
cugcaccgaauuugagcau

SEQ ID NO: 480140 - RNA, 19 nt, Artificial Sequence
  Description of Artificial Sequence: Synthetic oligonucleotide
ggugacgggaggggagaaa

SEQ ID NO: 480141 - RNA, 19 nt, Artificial Sequence
  Description of Artificial Sequence: Synthetic oligonucleotide
gaggaccucgaugggcguu

SEQ ID NO: 480142 - RNA, 19 nt, Artificial Sequence
  Description of Artificial Sequence: Synthetic oligonucleotide
gaaauccgggagaccucuu

SEQ ID NO: 480143 - RNA, 19 nt, Artificial Sequence
  Description of Artificial Sequence: Synthetic oligonucleotide
ccucauuucccgagauggu

SEQ ID NO: 480144 - RNA, 19 nt, Artificial Sequence
  Description of Artificial Sequence: Synthetic oligonucleotide
gcuuaggggaggggaccuc

SEQ ID NO: 480145 - RNA, 19 nt, Artificial Sequence
  Description of Artificial Sequence: Synthetic oligonucleotide
ccgugagaucgcucuggga

SEQ ID NO: 480146 - RNA, 19 nt, Artificial Sequence
  Description of Artificial Sequence: Synthetic oligonucleotide
ggauuccgggcugcaccga

SEQ ID NO: 480147 - RNA, 19 nt, Artificial Sequence
  Description of Artificial Sequence: Synthetic oligonucleotide
caguugugcgugucuccuu

SEQ ID NO: 480148 - RNA, 19 nt, Artificial Sequence
  Description of Artificial Sequence: Synthetic oligonucleotide
ccgaugccaucugggaaca

SEQ ID NO: 480149 - RNA, 19 nt, Artificial Sequence
  Description of Artificial Sequence: Synthetic oligonucleotide
cggucuacguccucgggau

SEQ ID NO: 480150 - RNA, 19 nt, Artificial Sequence
  Description of Artificial Sequence: Synthetic oligonucleotide
gugcuuuguuucacacauu

SEQ ID NO: 480151 - RNA, 19 nt, Artificial Sequence
  Description of Artificial Sequence: Synthetic oligonucleotide
cugacgcuugguggcggcu

SEQ ID NO: 480152 - RNA, 19 nt, Artificial Sequence
  Description of Artificial Sequence: Synthetic oligonucleotide
ggaccucgaugggcguuga

SEQ ID NO: 480153 - RNA, 19 nt, Artificial Sequence
  Description of Artificial Sequence: Synthetic oligonucleotide
cgggcaucacgguacuucu

SEQ ID NO: 480154 - RNA, 19 nt, Artificial Sequence
  Description of Artificial Sequence: Synthetic oligonucleotide
ccggucggcccgugagauc

SEQ ID NO: 480155 - RNA, 19 nt, Artificial Sequence
  Description of Artificial Sequence: Synthetic oligonucleotide
ggcuggaguaugacccaau

SEQ ID NO: 480156 - RNA, 19 nt, Artificial Sequence
  Description of Artificial Sequence: Synthetic oligonucleotide
cucgacggcuuugcucgau

SEQ ID NO: 480157 - RNA, 19 nt, Artificial Sequence
  Description of Artificial Sequence: Synthetic oligonucleotide
cggcccgugagaucgcucu

SEQ ID NO: 480158 - RNA, 19 nt, Artificial Sequence
  Description of Artificial Sequence: Synthetic oligonucleotide
caccuccaucggcugcccu

SEQ ID NO: 480159 - RNA, 19 nt, Artificial Sequence
  Description of Artificial Sequence: Synthetic oligonucleotide
ggucuacguccucgggauu

SEQ ID NO: 480160 - RNA, 19 nt, Artificial Sequence
  Description of Artificial Sequence: Synthetic oligonucleotide
ccaccccaccuugacuuua

SEQ ID NO: 480161 - RNA, 19 nt, Artificial Sequence
  Description of Artificial Sequence: Synthetic oligonucleotide
ccacucccugaugcaagcu

SEQ ID NO: 480162 - RNA, 19 nt, Artificial Sequence
  Description of Artificial Sequence: Synthetic oligonucleotide
caccucuguggaggcgcau

SEQ ID NO: 480163 - RNA, 19 nt, Artificial Sequence
  Description of Artificial Sequence: Synthetic oligonucleotide
cccggucggcccgugagau

SEQ ID NO: 480164 - RNA, 19 nt, Artificial Sequence
  Description of Artificial Sequence: Synthetic oligonucleotide
gcugcacuucggagucgau

SEQ ID NO: 480165 - RNA, 19 nt, Artificial Sequence
  Description of Artificial Sequence: Synthetic oligonucleotide
cgaugggcguugacaucuu

SEQ ID NO: 480166 - RNA, 19 nt, Artificial Sequence
  Description of Artificial Sequence: Synthetic oligonucleotide
ccucucccggucggcccgu

SEQ ID NO: 480167 - RNA, 19 nt, Artificial Sequence
  Description of Artificial Sequence: Synthetic oligonucleotide
aaauuaaccauuuucuggc

SEQ ID NO: 480168 - RNA, 19 nt, Artificial Sequence
  Description of Artificial Sequence: Synthetic oligonucleotide
uuaaugaauaccauuuagg

SEQ ID NO: 480169 - RNA, 19 nt, Artificial Sequence
  Description of Artificial Sequence: Synthetic oligonucleotide
aaagaaguaacacccuacc

SEQ ID NO: 480170 - RNA, 19 nt, Artificial Sequence
  Description of Artificial Sequence: Synthetic oligonucleotide
agacacauaaaacugaagg

SEQ ID NO: 480171 - RNA, 19 nt, Artificial Sequence
  Description of Artificial Sequence: Synthetic oligonucleotide
augaauaccauuuaggucu

SEQ ID NO: 480172 - RNA, 19 nt, Artificial Sequence
  Description of Artificial Sequence: Synthetic oligonucleotide
aaugaauaccauuuagguc

SEQ ID NO: 480173 - RNA, 19 nt, Artificial Sequence
  Description of Artificial Sequence: Synthetic oligonucleotide
uguacugaacugaugaugg

SEQ ID NO: 480174 - RNA, 19 nt, Artificial Sequence
  Description of Artificial Sequence: Synthetic oligonucleotide
aauauaacuagcuuuucgu

SEQ ID NO: 480175 - RNA, 19 nt, Artificial Sequence
  Description of Artificial Sequence: Synthetic oligonucleotide
auauaguuaagcuuuugac

SEQ ID NO: 480176 - RNA, 19 nt, Artificial Sequence
  Description of Artificial Sequence: Synthetic oligonucleotide
uaacacuuucauuugaugg

SEQ ID NO: 480177 - RNA, 19 nt, Artificial Sequence
  Description of Artificial Sequence: Synthetic oligonucleotide
aguuguuucagcuuuauca

SEQ ID NO: 480178 - RNA, 19 nt, Artificial Sequence
  Description of Artificial Sequence: Synthetic oligonucleotide
uuuaauaccgcaaucuugu

SEQ ID NO: 480179 - RNA, 19 nt, Artificial Sequence
  Description of Artificial Sequence: Synthetic oligonucleotide
uauaacuagcuuuucgugg

SEQ ID NO: 480180 - RNA, 19 nt, Artificial Sequence
  Description of Artificial Sequence: Synthetic oligonucleotide
cacauuaccacauuuagug

SEQ ID NO: 480181 - RNA, 19 nt, Artificial Sequence
  Description of Artificial Sequence: Synthetic oligonucleotide
uauaguuaagcuuuugaca

SEQ ID NO: 480182 - RNA, 19 nt, Artificial Sequence
  Description of Artificial Sequence: Synthetic oligonucleotide
auuuuaguguugucgaucg

SEQ ID NO: 480183 - RNA, 19 nt, Artificial Sequence
  Description of Artificial Sequence: Synthetic oligonucleotide
aagcuauccacccuugugg

SEQ ID NO: 480184 - RNA, 19 nt, Artificial Sequence
  Description of Artificial Sequence: Synthetic oligonucleotide
uauaaauuuuaauaccgca

SEQ ID NO: 480185 - RNA, 19 nt, Artificial Sequence
  Description of Artificial Sequence: Synthetic oligonucleotide
aguuaugauggcuuagggc

SEQ ID NO: 480186 - RNA, 19 nt, Artificial Sequence
  Description of Artificial Sequence: Synthetic oligonucleotide
ugcaauuuuaguguugucg

SEQ ID NO: 480187 - RNA, 19 nt, Artificial Sequence
  Description of Artificial Sequence: Synthetic oligonucleotide
ugcaauauaguuaagcuuu

SEQ ID NO: 480188 - RNA, 19 nt, Artificial Sequence
  Description of Artificial Sequence: Synthetic oligonucleotide
aaauuguugcggcaguagg

SEQ ID NO: 480189 - RNA, 19 nt, Artificial Sequence
  Description of Artificial Sequence: Synthetic oligonucleotide
cucacaacuacagagaccg

SEQ ID NO: 480190 - RNA, 19 nt, Artificial Sequence
  Description of Artificial Sequence: Synthetic oligonucleotide
ugcaagaaauggcugaagg

SEQ ID NO: 480191 - RNA, 19 nt, Artificial Sequence
  Description of Artificial Sequence: Synthetic oligonucleotide
aagucauuauuugaaauag

SEQ ID NO: 480192 - RNA, 19 nt, Artificial Sequence
  Description of Artificial Sequence: Synthetic oligonucleotide
guuaugauggcuuagggca

SEQ ID NO: 480193 - RNA, 19 nt, Artificial Sequence
  Description of Artificial Sequence: Synthetic oligonucleotide
ucucauuugauacauucca

SEQ ID NO: 480194 - RNA, 19 nt, Artificial Sequence
  Description of Artificial Sequence: Synthetic oligonucleotide
aauagggccagguucagca

SEQ ID NO: 480195 - RNA, 19 nt, Artificial Sequence
  Description of Artificial Sequence: Synthetic oligonucleotide
agauuugagacccugcguc

SEQ ID NO: 480196 - RNA, 19 nt, Artificial Sequence
  Description of Artificial Sequence: Synthetic oligonucleotide
ucuuguaugcuacagugca

SEQ ID NO: 480197 - RNA, 19 nt, Artificial Sequence
  Description of Artificial Sequence: Synthetic oligonucleotide
augucgaaaucuuuuaagg

SEQ ID NO: 480198 - RNA, 19 nt, Artificial Sequence
  Description of Artificial Sequence: Synthetic oligonucleotide
ugcaauaaaacguggccgg

SEQ ID NO: 480199 - RNA, 19 nt, Artificial Sequence
  Description of Artificial Sequence: Synthetic oligonucleotide
aaucggcaaggacaggucc

SEQ ID NO: 480200 - RNA, 19 nt, Artificial Sequence
  Description of Artificial Sequence: Synthetic oligonucleotide
gaugcaauaaaacguggcc

SEQ ID NO: 480201 - RNA, 19 nt, Artificial Sequence
  Description of Artificial Sequence: Synthetic oligonucleotide
uguacuugcaauauaguua

SEQ ID NO: 480202 - RNA, 19 nt, Artificial Sequence
  Description of Artificial Sequence: Synthetic oligonucleotide
aauuuuaguguugucgauc

SEQ ID NO: 480203 - RNA, 19 nt, Artificial Sequence
  Description of Artificial Sequence: Synthetic oligonucleotide
acuugcaauauaguuaagc

SEQ ID NO: 480204 - RNA, 19 nt, Artificial Sequence
  Description of Artificial Sequence: Synthetic oligonucleotide
aaaagaaguaacacccuac

SEQ ID NO: 480205 - RNA, 19 nt, Artificial Sequence
  Description of Artificial Sequence: Synthetic oligonucleotide
uuagugacugcaauuuuag

SEQ ID NO: 480206 - RNA, 19 nt, Artificial Sequence
  Description of Artificial Sequence: Synthetic oligonucleotide
uuccacucaaacuaaauac

SEQ ID NO: 480207 - RNA, 19 nt, Artificial Sequence
  Description of Artificial Sequence: Synthetic oligonucleotide
aauaaguuacugauaaucu

SEQ ID NO: 480208 - RNA, 19 nt, Artificial Sequence
  Description of Artificial Sequence: Synthetic oligonucleotide
uaggucuauagaauuaaag

SEQ ID NO: 480209 - RNA, 19 nt, Artificial Sequence
  Description of Artificial Sequence: Synthetic oligonucleotide
ugucgagacacauaaaacu

SEQ ID NO: 480210 - RNA, 19 nt, Artificial Sequence
  Description of Artificial Sequence: Synthetic oligonucleotide
ugagauuugaccagagucu

SEQ ID NO: 480211 - RNA, 19 nt, Artificial Sequence
  Description of Artificial Sequence: Synthetic oligonucleotide
uccugaaaggucucgaggg

SEQ ID NO: 480212 - RNA, 19 nt, Artificial Sequence
  Description of Artificial Sequence: Synthetic oligonucleotide
uuugacuaugguugggugg

SEQ ID NO: 480213 - RNA, 19 nt, Artificial Sequence
  Description of Artificial Sequence: Synthetic oligonucleotide
aaccuagucaccaaguguc

SEQ ID NO: 480214 - RNA, 19 nt, Artificial Sequence
  Description of Artificial Sequence: Synthetic oligonucleotide
uacauuauaagaagcaaua

SEQ ID NO: 480215 - RNA, 19 nt, Artificial Sequence
  Description of Artificial Sequence: Synthetic oligonucleotide
ucgaaaucuuuuaagguga

SEQ ID NO: 480216 - RNA, 19 nt, Artificial Sequence
  Description of Artificial Sequence: Synthetic oligonucleotide
aguggccuaaaacuaagac

SEQ ID NO: 480217 - RNA, 19 nt, Artificial Sequence
  Description of Artificial Sequence: Synthetic oligonucleotide
agcaauaaguuacugauaa

SEQ ID NO: 480218 - RNA, 19 nt, Artificial Sequence
  Description of Artificial Sequence: Synthetic oligonucleotide
aaaauaggcuccuugcuau

SEQ ID NO: 480219 - RNA, 19 nt, Artificial Sequence
  Description of Artificial Sequence: Synthetic oligonucleotide
aauuguugcggcaguaggc

SEQ ID NO: 480220 - RNA, 19 nt, Artificial Sequence
  Description of Artificial Sequence: Synthetic oligonucleotide
uuuucguggaggaauaccu

SEQ ID NO: 480221 - RNA, 19 nt, Artificial Sequence
  Description of Artificial Sequence: Synthetic oligonucleotide
ucaagcagaaguauuuaca

SEQ ID NO: 480222 - RNA, 19 nt, Artificial Sequence
  Description of Artificial Sequence: Synthetic oligonucleotide
uugacaucacauaaucaag

SEQ ID NO: 480223 - RNA, 19 nt, Artificial Sequence
  Description of Artificial Sequence: Synthetic oligonucleotide
guuacugauaaucugguga

SEQ ID NO: 480224 - RNA, 19 nt, Artificial Sequence
  Description of Artificial Sequence: Synthetic oligonucleotide
ugggcuaacacuuucauuu

SEQ ID NO: 480225 - RNA, 19 nt, Artificial Sequence
  Description of Artificial Sequence: Synthetic oligonucleotide
ugcacaaaaucucaggaaa

SEQ ID NO: 480226 - RNA, 19 nt, Artificial Sequence
  Description of Artificial Sequence: Synthetic oligonucleotide
caauauaacuagcuuuucg

SEQ ID NO: 480227 - RNA, 19 nt, Artificial Sequence
  Description of Artificial Sequence: Synthetic oligonucleotide
ugaagaaagcuauccaccc

SEQ ID NO: 480228 - RNA, 19 nt, Artificial Sequence
  Description of Artificial Sequence: Synthetic oligonucleotide
aaagcuauccacccuugug

SEQ ID NO: 480229 - RNA, 19 nt, Artificial Sequence
  Description of Artificial Sequence: Synthetic oligonucleotide
ucuauagaauuaaaguuua

SEQ ID NO: 480230 - RNA, 19 nt, Artificial Sequence
  Description of Artificial Sequence: Synthetic oligonucleotide
aauaaaacguggccggaga

SEQ ID NO: 480231 - RNA, 19 nt, Artificial Sequence
  Description of Artificial Sequence: Synthetic oligonucleotide
ugucgaucggaccuggagg

SEQ ID NO: 480232 - RNA, 19 nt, Artificial Sequence
  Description of Artificial Sequence: Synthetic oligonucleotide
uuacauuauaagaagcaau

SEQ ID NO: 480233 - RNA, 19 nt, Artificial Sequence
  Description of Artificial Sequence: Synthetic oligonucleotide
ucuuaaauuuguguaacca

SEQ ID NO: 480234 - RNA, 19 nt, Artificial Sequence
  Description of Artificial Sequence: Synthetic oligonucleotide
uacauuccauacuucaugc

SEQ ID NO: 480235 - RNA, 19 nt, Artificial Sequence
  Description of Artificial Sequence: Synthetic oligonucleotide
aagguuacuacuggacccc

SEQ ID NO: 480236 - RNA, 19 nt, Artificial Sequence
  Description of Artificial Sequence: Synthetic oligonucleotide
auaaacgugggcuaacacu

SEQ ID NO: 480237 - RNA, 19 nt, Artificial Sequence
  Description of Artificial Sequence: Synthetic oligonucleotide
uccacucaaacuaaauaca

SEQ ID NO: 480238 - RNA, 19 nt, Artificial Sequence
  Description of Artificial Sequence: Synthetic oligonucleotide
acccuuguggugcauacgc

SEQ ID NO: 480239 - RNA, 19 nt, Artificial Sequence
  Description of Artificial Sequence: Synthetic oligonucleotide
ucguaggucacaaucugag

SEQ ID NO: 480240 - RNA, 19 nt, Artificial Sequence
  Description of Artificial Sequence: Synthetic oligonucleotide
gacacauaaaacugaagga

SEQ ID NO: 480241 - RNA, 19 nt, Artificial Sequence
  Description of Artificial Sequence: Synthetic oligonucleotide
uccuuugcaagaaauggcu

SEQ ID NO: 480242 - RNA, 19 nt, Artificial Sequence
  Description of Artificial Sequence: Synthetic oligonucleotide
uguguaaccacugucgaga

SEQ ID NO: 480243 - RNA, 19 nt, Artificial Sequence
  Description of Artificial Sequence: Synthetic oligonucleotide
cauuaccacauuuagugac

SEQ ID NO: 480244 - RNA, 19 nt, Artificial Sequence
  Description of Artificial Sequence: Synthetic oligonucleotide
auauaacuagcuuuucgug

SEQ ID NO: 480245 - RNA, 19 nt, Artificial Sequence
  Description of Artificial Sequence: Synthetic oligonucleotide
uaaacgugggcuaacacuu

SEQ ID NO: 480246 - RNA, 19 nt, Artificial Sequence
  Description of Artificial Sequence: Synthetic oligonucleotide
uuuaguuacugacauuaau

SEQ ID NO: 480247 - RNA, 19 nt, Artificial Sequence
  Description of Artificial Sequence: Synthetic oligonucleotide
auuuaaauuguugcggcag

SEQ ID NO: 480248 - RNA, 19 nt, Artificial Sequence
  Description of Artificial Sequence: Synthetic oligonucleotide
aguguugucgaucggaccu

SEQ ID NO: 480249 - RNA, 19 nt, Artificial Sequence
  Description of Artificial Sequence: Synthetic oligonucleotide
uuacugacauuaaugaaua

SEQ ID NO: 480250 - RNA, 19 nt, Artificial Sequence
  Description of Artificial Sequence: Synthetic oligonucleotide
ugugcccucacaacuacag

SEQ ID NO: 480251 - RNA, 19 nt, Artificial Sequence
  Description of Artificial Sequence: Synthetic oligonucleotide
caagguuacuacuggaccc

SEQ ID NO: 480252 - RNA, 19 nt, Artificial Sequence
  Description of Artificial Sequence: Synthetic oligonucleotide
auaacuagcuuuucgugga

SEQ ID NO: 480253 - RNA, 19 nt, Artificial Sequence
  Description of Artificial Sequence: Synthetic oligonucleotide
uuccuauagaaaaggacgu

SEQ ID NO: 480254 - RNA, 19 nt, Artificial Sequence
  Description of Artificial Sequence: Synthetic oligonucleotide
ucaccuagcauguuuguac

SEQ ID NO: 480255 - RNA, 19 nt, Artificial Sequence
  Description of Artificial Sequence: Synthetic oligonucleotide
ugucgaaaucuuuuaaggu

SEQ ID NO: 480256 - RNA, 19 nt, Artificial Sequence
  Description of Artificial Sequence: Synthetic oligonucleotide
ugaaacuucagugacgcuc

SEQ ID NO: 480257 - RNA, 19 nt, Artificial Sequence
  Description of Artificial Sequence: Synthetic oligonucleotide
acaaaacucucccacucuc

SEQ ID NO: 480258 - RNA, 19 nt, Artificial Sequence
  Description of Artificial Sequence: Synthetic oligonucleotide
aagaaguaacacccuaccu

SEQ ID NO: 480259 - RNA, 19 nt, Artificial Sequence
  Description of Artificial Sequence: Synthetic oligonucleotide
aguaacacccuaccuaaug

SEQ ID NO: 480260 - RNA, 19 nt, Artificial Sequence
  Description of Artificial Sequence: Synthetic oligonucleotide
agaaguaacacccuaccua

SEQ ID NO: 480261 - RNA, 19 nt, Artificial Sequence
  Description of Artificial Sequence: Synthetic oligonucleotide
uuuaaauuguugcggcagu

SEQ ID NO: 480262 - RNA, 19 nt, Artificial Sequence
  Description of Artificial Sequence: Synthetic oligonucleotide
uaccauuuaggucuauaga

SEQ ID NO: 480263 - RNA, 19 nt, Artificial Sequence
  Description of Artificial Sequence: Synthetic oligonucleotide
aagaaagcuauccacccuu

SEQ ID NO: 480264 - RNA, 19 nt, Artificial Sequence
  Description of Artificial Sequence: Synthetic oligonucleotide
uuuaguguugucgaucgga

SEQ ID NO: 480265 - RNA, 19 nt, Artificial Sequence
  Description of Artificial Sequence: Synthetic oligonucleotide
aacuaaauacauccuguua

SEQ ID NO: 480266 - RNA, 19 nt, Artificial Sequence
  Description of Artificial Sequence: Synthetic oligonucleotide
aacgugggcuaacacuuuc

SEQ ID NO: 480267 - RNA, 19 nt, Artificial Sequence
  Description of Artificial Sequence: Synthetic oligonucleotide
gacaacaggucguagguca

SEQ ID NO: 480268 - RNA, 19 nt, Artificial Sequence
  Description of Artificial Sequence: Synthetic oligonucleotide
uugagcgucacauuaccac

SEQ ID NO: 480269 - RNA, 19 nt, Artificial Sequence
  Description of Artificial Sequence: Synthetic oligonucleotide
aaucuggcaagugugacaa

SEQ ID NO: 480270 - RNA, 19 nt, Artificial Sequence
  Description of Artificial Sequence: Synthetic oligonucleotide
ucgagacacauaaaacuga

SEQ ID NO: 480271 - RNA, 19 nt, Artificial Sequence
  Description of Artificial Sequence: Synthetic oligonucleotide
uuaguguugucgaucggac

SEQ ID NO: 480272 - RNA, 19 nt, Artificial Sequence
  Description of Artificial Sequence: Synthetic oligonucleotide
ucauuugauacauuccaua

SEQ ID NO: 480273 - RNA, 19 nt, Artificial Sequence
  Description of Artificial Sequence: Synthetic oligonucleotide
uacuacuggaccccaaaac

SEQ ID NO: 480274 - RNA, 19 nt, Artificial Sequence
  Description of Artificial Sequence: Synthetic oligonucleotide
acugaugcaauaaaacgug

SEQ ID NO: 480275 - RNA, 19 nt, Artificial Sequence
  Description of Artificial Sequence: Synthetic oligonucleotide
ucgaggguuacagacaccc

SEQ ID NO: 480276 - RNA, 19 nt, Artificial Sequence
  Description of Artificial Sequence: Synthetic oligonucleotide
uguguggaggugucaaucc

SEQ ID NO: 480277 - RNA, 19 nt, Artificial Sequence
  Description of Artificial Sequence: Synthetic oligonucleotide
uuuaggucuauagaauuaa

SEQ ID NO: 480278 - RNA, 19 nt, Artificial Sequence
  Description of Artificial Sequence: Synthetic oligonucleotide
uacgcuucgccacacgagc

SEQ ID NO: 480279 - RNA, 19 nt, Artificial Sequence
  Description of Artificial Sequence: Synthetic oligonucleotide
auaccgcaaucuuguaugc

SEQ ID NO: 480280 - RNA, 19 nt, Artificial Sequence
  Description of Artificial Sequence: Synthetic oligonucleotide
acauuaaugaauaccauuu

SEQ ID NO: 480281 - RNA, 19 nt, Artificial Sequence
  Description of Artificial Sequence: Synthetic oligonucleotide
caaaacagaacaagcucug

SEQ ID NO: 480282 - RNA, 19 nt, Artificial Sequence
  Description of Artificial Sequence: Synthetic oligonucleotide
aaggucucgaggguuacag

SEQ ID NO: 480283 - RNA, 19 nt, Artificial Sequence
  Description of Artificial Sequence: Synthetic oligonucleotide
ugggcuauccuuugcaaga

SEQ ID NO: 480284 - RNA, 19 nt, Artificial Sequence
  Description of Artificial Sequence: Synthetic oligonucleotide
cauuccauacuucaugcuc

SEQ ID NO: 480285 - RNA, 19 nt, Artificial Sequence
  Description of Artificial Sequence: Synthetic oligonucleotide
uaaauuguugcggcaguag

SEQ ID NO: 480286 - RNA, 19 nt, Artificial Sequence
  Description of Artificial Sequence: Synthetic oligonucleotide
auggacugcaggaaauucc

SEQ ID NO: 480287 - RNA, 19 nt, Artificial Sequence
  Description of Artificial Sequence: Synthetic oligonucleotide
uugcugauaaacgugggcu

SEQ ID NO: 480288 - RNA, 19 nt, Artificial Sequence
  Description of Artificial Sequence: Synthetic oligonucleotide
ugugauguagacaggucau

SEQ ID NO: 480289 - RNA, 19 nt, Artificial Sequence
  Description of Artificial Sequence: Synthetic oligonucleotide
aaaguggccuaaaacuaag

SEQ ID NO: 480290 - RNA, 19 nt, Artificial Sequence
  Description of Artificial Sequence: Synthetic oligonucleotide
ucuggugacgaauuccacu

SEQ ID NO: 480291 - RNA, 19 nt, Artificial Sequence
  Description of Artificial Sequence: Synthetic oligonucleotide
agcuuuugacaucacauaa

SEQ ID NO: 480292 - RNA, 19 nt, Artificial Sequence
  Description of Artificial Sequence: Synthetic oligonucleotide
uugucgaucggaccuggag

SEQ ID NO: 480293 - RNA, 19 nt, Artificial Sequence
  Description of Artificial Sequence: Synthetic oligonucleotide
aguuaagcuuuugacauca

SEQ ID NO: 480294 - RNA, 19 nt, Artificial Sequence
  Description of Artificial Sequence: Synthetic oligonucleotide
acuaugguuggguggcugg

SEQ ID NO: 480295 - RNA, 19 nt, Artificial Sequence
  Description of Artificial Sequence: Synthetic oligonucleotide
gaggaauaccuccaugaac

SEQ ID NO: 480296 - RNA, 19 nt, Artificial Sequence
  Description of Artificial Sequence: Synthetic oligonucleotide
cauaccacagguuauuuaa

SEQ ID NO: 480297 - RNA, 19 nt, Artificial Sequence
  Description of Artificial Sequence: Synthetic oligonucleotide
uaauaccgcaaucuuguau

SEQ ID NO: 480298 - RNA, 19 nt, Artificial Sequence
  Description of Artificial Sequence: Synthetic oligonucleotide
cuagcauguuuguacuugc

SEQ ID NO: 480299 - RNA, 19 nt, Artificial Sequence
  Description of Artificial Sequence: Synthetic oligonucleotide
cacaacuacagagaccggg

SEQ ID NO: 480300 - RNA, 19 nt, Artificial Sequence
  Description of Artificial Sequence: Synthetic oligonucleotide
uuuuaguguugucgaucgg

SEQ ID NO: 480301 - RNA, 19 nt, Artificial Sequence
  Description of Artificial Sequence: Synthetic oligonucleotide
uugcaauauaguuaagcuu

SEQ ID NO: 480302 - RNA, 19 nt, Artificial Sequence
  Description of Artificial Sequence: Synthetic oligonucleotide
auuccacucaaacuaaaua

SEQ ID NO: 480303 - RNA, 19 nt, Artificial Sequence
  Description of Artificial Sequence: Synthetic oligonucleotide
gucgagacacauaaaacug

SEQ ID NO: 480304 - RNA, 19 nt, Artificial Sequence
  Description of Artificial Sequence: Synthetic oligonucleotide
cuggugacgaauuccacuc

SEQ ID NO: 480305 - RNA, 19 nt, Artificial Sequence
  Description of Artificial Sequence: Synthetic oligonucleotide
gauaaacgugggcuaacac

SEQ ID NO: 480306 - RNA, 19 nt, Artificial Sequence
  Description of Artificial Sequence: Synthetic oligonucleotide
agguuagggaaccuaguca

SEQ ID NO: 480307 - RNA, 19 nt, Artificial Sequence
  Description of Artificial Sequence: Synthetic oligonucleotide
aaaggacguaggccuccgc

SEQ ID NO: 480308 - RNA, 19 nt, Artificial Sequence
  Description of Artificial Sequence: Synthetic oligonucleotide
ucuaccuguggagcaaagg

SEQ ID NO: 480309 - RNA, 19 nt, Artificial Sequence
  Description of Artificial Sequence: Synthetic oligonucleotide
uuguguaaccacugucgag

SEQ ID NO: 480310 - RNA, 19 nt, Artificial Sequence
  Description of Artificial Sequence: Synthetic oligonucleotide
aaaaguggccuaaaacuaa

SEQ ID NO: 480311 - RNA, 19 nt, Artificial Sequence
  Description of Artificial Sequence: Synthetic oligonucleotide
cugucgagacacauaaaac

SEQ ID NO: 480312 - RNA, 19 nt, Artificial Sequence
  Description of Artificial Sequence: Synthetic oligonucleotide
uuuuaguuacugacauuaa

SEQ ID NO: 480313 - RNA, 19 nt, Artificial Sequence
  Description of Artificial Sequence: Synthetic oligonucleotide
gagggcuugcugauaaacg

SEQ ID NO: 480314 - RNA, 19 nt, Artificial Sequence
  Description of Artificial Sequence: Synthetic oligonucleotide
gagauuugaccagagucug

SEQ ID NO: 480315 - RNA, 19 nt, Artificial Sequence
  Description of Artificial Sequence: Synthetic oligonucleotide
aguuacugacauuaaugaa

SEQ ID NO: 480316 - RNA, 19 nt, Artificial Sequence
  Description of Artificial Sequence: Synthetic oligonucleotide
aggucuuaaauuuguguaa

SEQ ID NO: 480317 - RNA, 19 nt, Artificial Sequence
  Description of Artificial Sequence: Synthetic oligonucleotide
aauccuggccacagauugc

SEQ ID NO: 480318 - RNA, 19 nt, Artificial Sequence
  Description of Artificial Sequence: Synthetic oligonucleotide
caaauguagagaugguuga

SEQ ID NO: 480319 - RNA, 19 nt, Artificial Sequence
  Description of Artificial Sequence: Synthetic oligonucleotide
acugcaauuuuaguguugu

SEQ ID NO: 480320 - RNA, 19 nt, Artificial Sequence
  Description of Artificial Sequence: Synthetic oligonucleotide
uucaugucgaaaucuuuua

SEQ ID NO: 480321 - RNA, 19 nt, Artificial Sequence
  Description of Artificial Sequence: Synthetic oligonucleotide
accacauuuagugacugca

SEQ ID NO: 480322 - RNA, 19 nt, Artificial Sequence
  Description of Artificial Sequence: Synthetic oligonucleotide
agucauuauuugaaauagg

SEQ ID NO: 480323 - RNA, 19 nt, Artificial Sequence
  Description of Artificial Sequence: Synthetic oligonucleotide
aacacccuaccuaaugucu

SEQ ID NO: 480324 - RNA, 19 nt, Artificial Sequence
  Description of Artificial Sequence: Synthetic oligonucleotide
aaguuacugauaaucuggu

SEQ ID NO: 480325 - RNA, 19 nt, Artificial Sequence
  Description of Artificial Sequence: Synthetic oligonucleotide
uuaggucuauagaauuaaa

SEQ ID NO: 480326 - RNA, 19 nt, Artificial Sequence
  Description of Artificial Sequence: Synthetic oligonucleotide
ccggcuuugacuaugguug

SEQ ID NO: 480327 - RNA, 19 nt, Artificial Sequence
  Description of Artificial Sequence: Synthetic oligonucleotide
agaacaagcucugugcccu

SEQ ID NO: 480328 - RNA, 19 nt, Artificial Sequence
  Description of Artificial Sequence: Synthetic oligonucleotide
aagagauuggccaguuaug

SEQ ID NO: 480329 - RNA, 19 nt, Artificial Sequence
  Description of Artificial Sequence: Synthetic oligonucleotide
uuguaugcuacagugcaaa

SEQ ID NO: 480330 - RNA, 19 nt, Artificial Sequence
  Description of Artificial Sequence: Synthetic oligonucleotide
acagugcuaaggaggauac

SEQ ID NO: 480331 - RNA, 19 nt, Artificial Sequence
  Description of Artificial Sequence: Synthetic oligonucleotide
uggaucuaccuguggagca

SEQ ID NO: 480332 - RNA, 19 nt, Artificial Sequence
  Description of Artificial Sequence: Synthetic oligonucleotide
cauacucuaugauucaaaa

SEQ ID NO: 480333 - RNA, 19 nt, Artificial Sequence
  Description of Artificial Sequence: Synthetic oligonucleotide
acauuuagugacugcaauu

SEQ ID NO: 480334 - RNA, 19 nt, Artificial Sequence
  Description of Artificial Sequence: Synthetic oligonucleotide
cuugcagucccauggugac

SEQ ID NO: 480335 - RNA, 19 nt, Artificial Sequence
  Description of Artificial Sequence: Synthetic oligonucleotide
gaggagugcagccuggcca

SEQ ID NO: 480336 - RNA, 19 nt, Artificial Sequence
  Description of Artificial Sequence: Synthetic oligonucleotide
cuaugcaaagccaugucaa

SEQ ID NO: 480337 - RNA, 19 nt, Artificial Sequence
  Description of Artificial Sequence: Synthetic oligonucleotide
uuacuacuggaccccaaaa

SEQ ID NO: 480338 - RNA, 19 nt, Artificial Sequence
  Description of Artificial Sequence: Synthetic oligonucleotide
ucuggcaagugugacaaau

SEQ ID NO: 480339 - RNA, 19 nt, Artificial Sequence
  Description of Artificial Sequence: Synthetic oligonucleotide
cuguacugaacugaugaug

SEQ ID NO: 480340 - RNA, 19 nt, Artificial Sequence
  Description of Artificial Sequence: Synthetic oligonucleotide
acuguacauauugucaccu

SEQ ID NO: 480341 - RNA, 19 nt, Artificial Sequence
  Description of Artificial Sequence: Synthetic oligonucleotide
ugauaaacgugggcuaaca

SEQ ID NO: 480342 - RNA, 19 nt, Artificial Sequence
  Description of Artificial Sequence: Synthetic oligonucleotide
agggaaccuagucaccaag

SEQ ID NO: 480343 - RNA, 19 nt, Artificial Sequence
  Description of Artificial Sequence: Synthetic oligonucleotide
cugugauguagacagguca

SEQ ID NO: 480344 - RNA, 19 nt, Artificial Sequence
  Description of Artificial Sequence: Synthetic oligonucleotide
aggagugcagccuggccag

SEQ ID NO: 480345 - RNA, 19 nt, Artificial Sequence
  Description of Artificial Sequence: Synthetic oligonucleotide
uccgcguucuggacagugg

SEQ ID NO: 480346 - RNA, 19 nt, Artificial Sequence
  Description of Artificial Sequence: Synthetic oligonucleotide
uauuugaaauagggccagg

SEQ ID NO: 480347 - RNA, 19 nt, Artificial Sequence
  Description of Artificial Sequence: Synthetic oligonucleotide
uuucguggaggaauaccuc

SEQ ID NO: 480348 - RNA, 19 nt, Artificial Sequence
  Description of Artificial Sequence: Synthetic oligonucleotide
uuaccacauuuagugacug

SEQ ID NO: 480349 - RNA, 19 nt, Artificial Sequence
  Description of Artificial Sequence: Synthetic oligonucleotide
aaacucucccacucucuaa

SEQ ID NO: 480350 - RNA, 19 nt, Artificial Sequence
  Description of Artificial Sequence: Synthetic oligonucleotide
uacagugcuaaggaggaua

SEQ ID NO: 480351 - RNA, 19 nt, Artificial Sequence
  Description of Artificial Sequence: Synthetic oligonucleotide
uccuugcuaugcaaagcca

SEQ ID NO: 480352 - RNA, 19 nt, Artificial Sequence
  Description of Artificial Sequence: Synthetic oligonucleotide
auuaugcucaucagauuug

SEQ ID NO: 480353 - RNA, 19 nt, Artificial Sequence
  Description of Artificial Sequence: Synthetic oligonucleotide
cugggcuauccuuugcaag

SEQ ID NO: 480354 - RNA, 19 nt, Artificial Sequence
  Description of Artificial Sequence: Synthetic oligonucleotide
cacacgucagacacuguac

SEQ ID NO: 480355 - RNA, 19 nt, Artificial Sequence
  Description of Artificial Sequence: Synthetic oligonucleotide
gauggcuuagggcaaugaa

SEQ ID NO: 480356 - RNA, 19 nt, Artificial Sequence
  Description of Artificial Sequence: Synthetic oligonucleotide
gagacacauaaaacugaag

SEQ ID NO: 480357 - RNA, 19 nt, Artificial Sequence
  Description of Artificial Sequence: Synthetic oligonucleotide
uugcuaugcaaagccaugu

SEQ ID NO: 480358 - RNA, 19 nt, Artificial Sequence
  Description of Artificial Sequence: Synthetic oligonucleotide
cuugccgggaaucggcaag

SEQ ID NO: 480359 - RNA, 19 nt, Artificial Sequence
  Description of Artificial Sequence: Synthetic oligonucleotide
gaucggaccuggaggaucc

SEQ ID NO: 480360 - RNA, 19 nt, Artificial Sequence
  Description of Artificial Sequence: Synthetic oligonucleotide
accgcaaucuuguaugcua

SEQ ID NO: 480361 - RNA, 19 nt, Artificial Sequence
  Description of Artificial Sequence: Synthetic oligonucleotide
aacguggccggagaguccu

SEQ ID NO: 480362 - RNA, 19 nt, Artificial Sequence
  Description of Artificial Sequence: Synthetic oligonucleotide
ccuauagaaaaggacguag

SEQ ID NO: 480363 - RNA, 19 nt, Artificial Sequence
  Description of Artificial Sequence: Synthetic oligonucleotide
uaccuguggagcaaagguu

SEQ ID NO: 480364 - RNA, 19 nt, Artificial Sequence
  Description of Artificial Sequence: Synthetic oligonucleotide
gugaaugcacaaaaucuca

SEQ ID NO: 480365 - RNA, 19 nt, Artificial Sequence
  Description of Artificial Sequence: Synthetic oligonucleotide
gacuuaggagggcuugcug

SEQ ID NO: 480366 - RNA, 19 nt, Artificial Sequence
  Description of Artificial Sequence: Synthetic oligonucleotide
aaacguggccggagagucc

SEQ ID NO: 480367 - RNA, 19 nt, Artificial Sequence
  Description of Artificial Sequence: Synthetic oligonucleotide
ggugaaugcacaaaaucuc

SEQ ID NO: 480368 - RNA, 19 nt, Artificial Sequence
  Description of Artificial Sequence: Synthetic oligonucleotide
agacacuguacugaacuga

SEQ ID NO: 480369 - RNA, 19 nt, Artificial Sequence
  Description of Artificial Sequence: Synthetic oligonucleotide
aucauuuugcaaguuguuu

SEQ ID NO: 480370 - RNA, 19 nt, Artificial Sequence
  Description of Artificial Sequence: Synthetic oligonucleotide
ugcugauaaacgugggcua

SEQ ID NO: 480371 - RNA, 19 nt, Artificial Sequence
  Description of Artificial Sequence: Synthetic oligonucleotide
agaccgggucuccacuugg

SEQ ID NO: 480372 - RNA, 19 nt, Artificial Sequence
  Description of Artificial Sequence: Synthetic oligonucleotide
acuguacugaacugaugau

SEQ ID NO: 480373 - RNA, 19 nt, Artificial Sequence
  Description of Artificial Sequence: Synthetic oligonucleotide
uguugucgaucggaccugg

SEQ ID NO: 480374 - RNA, 19 nt, Artificial Sequence
  Description of Artificial Sequence: Synthetic oligonucleotide
uuaaauuguugcggcagua

SEQ ID NO: 480375 - RNA, 19 nt, Artificial Sequence
  Description of Artificial Sequence: Synthetic oligonucleotide
cagauugccugacuuagga

SEQ ID NO: 480376 - RNA, 19 nt, Artificial Sequence
  Description of Artificial Sequence: Synthetic oligonucleotide
cacccuaccuaaugucucc

SEQ ID NO: 480377 - RNA, 19 nt, Artificial Sequence
  Description of Artificial Sequence: Synthetic oligonucleotide
uggccaguuaugauggcuu

SEQ ID NO: 480378 - RNA, 19 nt, Artificial Sequence
  Description of Artificial Sequence: Synthetic oligonucleotide
cacucucuaaaccacugca

SEQ ID NO: 480379 - RNA, 19 nt, Artificial Sequence
  Description of Artificial Sequence: Synthetic oligonucleotide
ggaaccuagucaccaagug

SEQ ID NO: 480380 - RNA, 19 nt, Artificial Sequence
  Description of Artificial Sequence: Synthetic oligonucleotide
gaaccuagucaccaagugu

SEQ ID NO: 480381 - RNA, 19 nt, Artificial Sequence
  Description of Artificial Sequence: Synthetic oligonucleotide
gcaagacaaucuugcaagg

SEQ ID NO: 480382 - RNA, 19 nt, Artificial Sequence
  Description of Artificial Sequence: Synthetic oligonucleotide
cauuaugcucaucagauuu

SEQ ID NO: 480383 - RNA, 19 nt, Artificial Sequence
  Description of Artificial Sequence: Synthetic oligonucleotide
gucuauagaauuaaaguuu

SEQ ID NO: 480384 - RNA, 19 nt, Artificial Sequence
  Description of Artificial Sequence: Synthetic oligonucleotide
gucgaucggaccuggagga

SEQ ID NO: 480385 - RNA, 19 nt, Artificial Sequence
  Description of Artificial Sequence: Synthetic oligonucleotide
accuagucaccaagugucc

SEQ ID NO: 480386 - RNA, 19 nt, Artificial Sequence
  Description of Artificial Sequence: Synthetic oligonucleotide
ucacaacuacagagaccgg

SEQ ID NO: 480387 - RNA, 19 nt, Artificial Sequence
  Description of Artificial Sequence: Synthetic oligonucleotide
cagacacuguacugaacug

SEQ ID NO: 480388 - RNA, 19 nt, Artificial Sequence
  Description of Artificial Sequence: Synthetic oligonucleotide
acaacuacagagaccgggu

SEQ ID NO: 480389 - RNA, 19 nt, Artificial Sequence
  Description of Artificial Sequence: Synthetic oligonucleotide
auuuaggucuauagaauua

SEQ ID NO: 480390 - RNA, 19 nt, Artificial Sequence
  Description of Artificial Sequence: Synthetic oligonucleotide
uacugacauuaaugaauac

SEQ ID NO: 480391 - RNA, 19 nt, Artificial Sequence
  Description of Artificial Sequence: Synthetic oligonucleotide
aggugucaauccuggccac

SEQ ID NO: 480392 - RNA, 19 nt, Artificial Sequence
  Description of Artificial Sequence: Synthetic oligonucleotide
gaaacuucagugacgcucu

SEQ ID NO: 480393 - RNA, 19 nt, Artificial Sequence
  Description of Artificial Sequence: Synthetic oligonucleotide
guuacuacuggaccccaaa

SEQ ID NO: 480394 - RNA, 19 nt, Artificial Sequence
  Description of Artificial Sequence: Synthetic oligonucleotide
ucagugacgcucuggucau

SEQ ID NO: 480395 - RNA, 19 nt, Artificial Sequence
  Description of Artificial Sequence: Synthetic oligonucleotide
acacccuaccuaaugucuc

SEQ ID NO: 480396 - RNA, 19 nt, Artificial Sequence
  Description of Artificial Sequence: Synthetic oligonucleotide
gcuaugcaaagccauguca

SEQ ID NO: 480397 - RNA, 19 nt, Artificial Sequence
  Description of Artificial Sequence: Synthetic oligonucleotide
cucaaucuggcaaguguga

SEQ ID NO: 480398 - RNA, 19 nt, Artificial Sequence
  Description of Artificial Sequence: Synthetic oligonucleotide
uuaauaccgcaaucuugua

SEQ ID NO: 480399 - RNA, 19 nt, Artificial Sequence
  Description of Artificial Sequence: Synthetic oligonucleotide
ucuggcgaagaaggcagca

SEQ ID NO: 480400 - RNA, 19 nt, Artificial Sequence
  Description of Artificial Sequence: Synthetic oligonucleotide
ugucaauccuggccacaga

SEQ ID NO: 480401 - RNA, 19 nt, Artificial Sequence
  Description of Artificial Sequence: Synthetic oligonucleotide
gacugcaauuuuaguguug

SEQ ID NO: 480402 - RNA, 19 nt, Artificial Sequence
  Description of Artificial Sequence: Synthetic oligonucleotide
gaagaaagcuauccacccu

SEQ ID NO: 480403 - RNA, 19 nt, Artificial Sequence
  Description of Artificial Sequence: Synthetic oligonucleotide
gauuugagacccugcgucu

SEQ ID NO: 480404 - RNA, 19 nt, Artificial Sequence
  Description of Artificial Sequence: Synthetic oligonucleotide
auucauaccacagguuauu

SEQ ID NO: 480405 - RNA, 19 nt, Artificial Sequence
  Description of Artificial Sequence: Synthetic oligonucleotide
ggucguaggucacaaucug

SEQ ID NO: 480406 - RNA, 19 nt, Artificial Sequence
  Description of Artificial Sequence: Synthetic oligonucleotide
agacaaucuugcaagguua

SEQ ID NO: 480407 - RNA, 19 nt, Artificial Sequence
  Description of Artificial Sequence: Synthetic oligonucleotide
acaacaggucguaggucac

SEQ ID NO: 480408 - RNA, 19 nt, Artificial Sequence
  Description of Artificial Sequence: Synthetic oligonucleotide
cauacgcuucgccacacga

SEQ ID NO: 480409 - RNA, 19 nt, Artificial Sequence
  Description of Artificial Sequence: Synthetic oligonucleotide
gcuugagcgucacauuacc

SEQ ID NO: 480410 - RNA, 19 nt, Artificial Sequence
  Description of Artificial Sequence: Synthetic oligonucleotide
cucuauuaagccgaauaaa

SEQ ID NO: 480411 - RNA, 19 nt, Artificial Sequence
  Description of Artificial Sequence: Synthetic oligonucleotide
aaguggccuaaaacuaaga

SEQ ID NO: 480412 - RNA, 19 nt, Artificial Sequence
  Description of Artificial Sequence: Synthetic oligonucleotide
uccuauagaaaaggacgua

SEQ ID NO: 480413 - RNA, 19 nt, Artificial Sequence
  Description of Artificial Sequence: Synthetic oligonucleotide
ugacuuaggagggcuugcu

SEQ ID NO: 480414 - RNA, 19 nt, Artificial Sequence
  Description of Artificial Sequence: Synthetic oligonucleotide
auacgcuucgccacacgag

SEQ ID NO: 480415 - RNA, 19 nt, Artificial Sequence
  Description of Artificial Sequence: Synthetic oligonucleotide
agugacgcucuggucauca

SEQ ID NO: 480416 - RNA, 19 nt, Artificial Sequence
  Description of Artificial Sequence: Synthetic oligonucleotide
cuugagcgucacauuacca

SEQ ID NO: 480417 - RNA, 19 nt, Artificial Sequence
  Description of Artificial Sequence: Synthetic oligonucleotide
guuagggaaccuagucacc

SEQ ID NO: 480418 - RNA, 19 nt, Artificial Sequence
  Description of Artificial Sequence: Synthetic oligonucleotide
uucgugccucuucacugcu

SEQ ID NO: 480419 - RNA, 19 nt, Artificial Sequence
  Description of Artificial Sequence: Synthetic oligonucleotide
gagaccgggucuccacuug

SEQ ID NO: 480420 - RNA, 19 nt, Artificial Sequence
  Description of Artificial Sequence: Synthetic oligonucleotide
ggauaccuggaucuaccug

SEQ ID NO: 480421 - RNA, 19 nt, Artificial Sequence
  Description of Artificial Sequence: Synthetic oligonucleotide
cagcuuuaucaacaaucuc

SEQ ID NO: 480422 - RNA, 19 nt, Artificial Sequence
  Description of Artificial Sequence: Synthetic oligonucleotide
gacuaugguuggguggcug

SEQ ID NO: 480423 - RNA, 19 nt, Artificial Sequence
  Description of Artificial Sequence: Synthetic oligonucleotide
aaccacugucgagacacau

SEQ ID NO: 480424 - RNA, 19 nt, Artificial Sequence
  Description of Artificial Sequence: Synthetic oligonucleotide
aucuggugacgaauuccac

SEQ ID NO: 480425 - RNA, 19 nt, Artificial Sequence
  Description of Artificial Sequence: Synthetic oligonucleotide
aaacagccgugcauacucu

SEQ ID NO: 480426 - RNA, 19 nt, Artificial Sequence
  Description of Artificial Sequence: Synthetic oligonucleotide
agaaagcuauccacccuug

SEQ ID NO: 480427 - RNA, 19 nt, Artificial Sequence
  Description of Artificial Sequence: Synthetic oligonucleotide
cugacuuaggagggcuugc

SEQ ID NO: 480428 - RNA, 19 nt, Artificial Sequence
  Description of Artificial Sequence: Synthetic oligonucleotide
ucggcaaggacagguccug

SEQ ID NO: 480429 - RNA, 19 nt, Artificial Sequence
  Description of Artificial Sequence: Synthetic oligonucleotide
gugcuaaggaggauaccug

SEQ ID NO: 480430 - RNA, 19 nt, Artificial Sequence
  Description of Artificial Sequence: Synthetic oligonucleotide
gaaucggcaaggacagguc

SEQ ID NO: 480431 - RNA, 19 nt, Artificial Sequence
  Description of Artificial Sequence: Synthetic oligonucleotide
accuguggagcaaagguua

SEQ ID NO: 480432 - RNA, 19 nt, Artificial Sequence
  Description of Artificial Sequence: Synthetic oligonucleotide
acgcuucgccacacgagcc

SEQ ID NO: 480433 - RNA, 19 nt, Artificial Sequence
  Description of Artificial Sequence: Synthetic oligonucleotide
agagguuaucccaaauguu

SEQ ID NO: 480434 - RNA, 19 nt, Artificial Sequence
  Description of Artificial Sequence: Synthetic oligonucleotide
uaaccacugucgagacaca

SEQ ID NO: 480435 - RNA, 19 nt, Artificial Sequence
  Description of Artificial Sequence: Synthetic oligonucleotide
cugauaaacgugggcuaac

SEQ ID NO: 480436 - RNA, 19 nt, Artificial Sequence
  Description of Artificial Sequence: Synthetic oligonucleotide
ugacaacaggucguagguc

SEQ ID NO: 480437 - RNA, 19 nt, Artificial Sequence
  Description of Artificial Sequence: Synthetic oligonucleotide
ccgggaaucggcaaggaca

SEQ ID NO: 480438 - RNA, 19 nt, Artificial Sequence
  Description of Artificial Sequence: Synthetic oligonucleotide
gugcauacucuaugauuca

SEQ ID NO: 480439 - RNA, 19 nt, Artificial Sequence
  Description of Artificial Sequence: Synthetic oligonucleotide
cuuguaugcuacagugcaa

SEQ ID NO: 480440 - RNA, 19 nt, Artificial Sequence
  Description of Artificial Sequence: Synthetic oligonucleotide
aggaugacuucaggcccac

SEQ ID NO: 480441 - RNA, 19 nt, Artificial Sequence
  Description of Artificial Sequence: Synthetic oligonucleotide
gagccggcuuugacuaugg

SEQ ID NO: 480442 - RNA, 19 nt, Artificial Sequence
  Description of Artificial Sequence: Synthetic oligonucleotide
gguuacagacacccuguca

SEQ ID NO: 480443 - RNA, 19 nt, Artificial Sequence
  Description of Artificial Sequence: Synthetic oligonucleotide
gcaguaggcgauguagugc

SEQ ID NO: 480444 - RNA, 19 nt, Artificial Sequence
  Description of Artificial Sequence: Synthetic oligonucleotide
cugauaaucuggugacgaa

SEQ ID NO: 480445 - RNA, 19 nt, Artificial Sequence
  Description of Artificial Sequence: Synthetic oligonucleotide
ugacugacaacaggucgua

SEQ ID NO: 480446 - RNA, 19 nt, Artificial Sequence
  Description of Artificial Sequence: Synthetic oligonucleotide
cucuggcgaagaaggcagc

SEQ ID NO: 480447 - RNA, 19 nt, Artificial Sequence
  Description of Artificial Sequence: Synthetic oligonucleotide
cacgagccggcuuugacua

SEQ ID NO: 480448 - RNA, 19 nt, Artificial Sequence
  Description of Artificial Sequence: Synthetic oligonucleotide
gaaagcuauccacccuugu

SEQ ID NO: 480449 - RNA, 19 nt, Artificial Sequence
  Description of Artificial Sequence: Synthetic oligonucleotide
gcuuuaggaaauuaaccau

SEQ ID NO: 480450 - RNA, 19 nt, Artificial Sequence
  Description of Artificial Sequence: Synthetic oligonucleotide
uggccggagaguccucuuc

SEQ ID NO: 480451 - RNA, 19 nt, Artificial Sequence
  Description of Artificial Sequence: Synthetic oligonucleotide
uaccgcaaucuuguaugcu

SEQ ID NO: 480452 - RNA, 19 nt, Artificial Sequence
  Description of Artificial Sequence: Synthetic oligonucleotide
caggaugacuucaggccca

SEQ ID NO: 480453 - RNA, 19 nt, Artificial Sequence
  Description of Artificial Sequence: Synthetic oligonucleotide
ccagguucagcaaaggucu

SEQ ID NO: 480454 - RNA, 19 nt, Artificial Sequence
  Description of Artificial Sequence: Synthetic oligonucleotide
ugguuccaucaaauauguc

SEQ ID NO: 480455 - RNA, 19 nt, Artificial Sequence
  Description of Artificial Sequence: Synthetic oligonucleotide
aucggcaaggacagguccu

SEQ ID NO: 480456 - RNA, 19 nt, Artificial Sequence
  Description of Artificial Sequence: Synthetic oligonucleotide
cucgaggguuacagacacc

SEQ ID NO: 480457 - RNA, 19 nt, Artificial Sequence
  Description of Artificial Sequence: Synthetic oligonucleotide
agagaccgggucuccacuu

SEQ ID NO: 480458 - RNA, 19 nt, Artificial Sequence
  Description of Artificial Sequence: Synthetic oligonucleotide
accugcuauagagguuauc

SEQ ID NO: 480459 - RNA, 19 nt, Artificial Sequence
  Description of Artificial Sequence: Synthetic oligonucleotide
gacgcucuggucaucaaau

SEQ ID NO: 480460 - RNA, 19 nt, Artificial Sequence
  Description of Artificial Sequence: Synthetic oligonucleotide
cucauuugauacauuccau

SEQ ID NO: 480461 - RNA, 19 nt, Artificial Sequence
  Description of Artificial Sequence: Synthetic oligonucleotide
ggaggaauaccuccaugaa

SEQ ID NO: 480462 - RNA, 19 nt, Artificial Sequence
  Description of Artificial Sequence: Synthetic oligonucleotide
aggucucgaggguuacaga

SEQ ID NO: 480463 - RNA, 19 nt, Artificial Sequence
  Description of Artificial Sequence: Synthetic oligonucleotide
auaccacagguuauuuaaa

SEQ ID NO: 480464 - RNA, 19 nt, Artificial Sequence
  Description of Artificial Sequence: Synthetic oligonucleotide
gagauuggccaguuaugau

SEQ ID NO: 480465 - RNA, 19 nt, Artificial Sequence
  Description of Artificial Sequence: Synthetic oligonucleotide
cgggaaucggcaaggacag

SEQ ID NO: 480466 - RNA, 19 nt, Artificial Sequence
  Description of Artificial Sequence: Synthetic oligonucleotide
ugcauacgcuucgccacac

SEQ ID NO: 480467 - RNA, 19 nt, Artificial Sequence
  Description of Artificial Sequence: Synthetic oligonucleotide
aaguaacacccuaccuaau

SEQ ID NO: 480468 - RNA, 19 nt, Artificial Sequence
  Description of Artificial Sequence: Synthetic oligonucleotide
cuucgccacacgagccggc

SEQ ID NO: 480469 - RNA, 19 nt, Artificial Sequence
  Description of Artificial Sequence: Synthetic oligonucleotide
aggcagcaagacaaucuug

SEQ ID NO: 480470 - RNA, 19 nt, Artificial Sequence
  Description of Artificial Sequence: Synthetic oligonucleotide
cacugcuugcagucccaug

SEQ ID NO: 480471 - RNA, 19 nt, Artificial Sequence
  Description of Artificial Sequence: Synthetic oligonucleotide
guuuucaagcagaaguauu

SEQ ID NO: 480472 - RNA, 19 nt, Artificial Sequence
  Description of Artificial Sequence: Synthetic oligonucleotide
ccaugaagaaagcuaucca

SEQ ID NO: 480473 - RNA, 19 nt, Artificial Sequence
  Description of Artificial Sequence: Synthetic oligonucleotide
cacccugucacacgucaga

SEQ ID NO: 480474 - RNA, 19 nt, Artificial Sequence
  Description of Artificial Sequence: Synthetic oligonucleotide
guguugucgaucggaccug

SEQ ID NO: 480475 - RNA, 19 nt, Artificial Sequence
  Description of Artificial Sequence: Synthetic oligonucleotide
uucgccacacgagccggcu

SEQ ID NO: 480476 - RNA, 19 nt, Artificial Sequence
  Description of Artificial Sequence: Synthetic oligonucleotide
agcgucacauuaccacauu

SEQ ID NO: 480477 - RNA, 19 nt, Artificial Sequence
  Description of Artificial Sequence: Synthetic oligonucleotide
ccgcaaucuuguaugcuac

SEQ ID NO: 480478 - RNA, 19 nt, Artificial Sequence
  Description of Artificial Sequence: Synthetic oligonucleotide
cacccuuguggugcauacg

SEQ ID NO: 480479 - RNA, 19 nt, Artificial Sequence
  Description of Artificial Sequence: Synthetic oligonucleotide
guugcggcaguaggcgaug

SEQ ID NO: 480480 - RNA, 19 nt, Artificial Sequence
  Description of Artificial Sequence: Synthetic oligonucleotide
ggaaucggcaaggacaggu

SEQ ID NO: 480481 - RNA, 19 nt, Artificial Sequence
  Description of Artificial Sequence: Synthetic oligonucleotide
agcaaagguuagggaaccu

SEQ ID NO: 480482 - RNA, 19 nt, Artificial Sequence
  Description of Artificial Sequence: Synthetic oligonucleotide
ccacucucuaaaccacugc

SEQ ID NO: 480483 - RNA, 19 nt, Artificial Sequence
  Description of Artificial Sequence: Synthetic oligonucleotide
uuaggagggcuugcugaua

SEQ ID NO: 480484 - RNA, 19 nt, Artificial Sequence
  Description of Artificial Sequence: Synthetic oligonucleotide
cucugugcccucacaacua

SEQ ID NO: 480485 - RNA, 19 nt, Artificial Sequence
  Description of Artificial Sequence: Synthetic oligonucleotide
gaucuaccuguggagcaaa

SEQ ID NO: 480486 - RNA, 19 nt, Artificial Sequence
  Description of Artificial Sequence: Synthetic oligonucleotide
aaacgugggcuaacacuuu

SEQ ID NO: 480487 - RNA, 19 nt, Artificial Sequence
  Description of Artificial Sequence: Synthetic oligonucleotide
agcuuuucguggaggaaua

SEQ ID NO: 480488 - RNA, 19 nt, Artificial Sequence
  Description of Artificial Sequence: Synthetic oligonucleotide
caccuagcauguuuguacu

SEQ ID NO: 480489 - RNA, 19 nt, Artificial Sequence
  Description of Artificial Sequence: Synthetic oligonucleotide
uaccugcuauagagguuau

SEQ ID NO: 480490 - RNA, 19 nt, Artificial Sequence
  Description of Artificial Sequence: Synthetic oligonucleotide
acgcucuggucaucaaauu

SEQ ID NO: 480491 - RNA, 19 nt, Artificial Sequence
  Description of Artificial Sequence: Synthetic oligonucleotide
gcuugcagucccaugguga

SEQ ID NO: 480492 - RNA, 19 nt, Artificial Sequence
  Description of Artificial Sequence: Synthetic oligonucleotide
cagugcuaaggaggauacc

SEQ ID NO: 480493 - RNA, 19 nt, Artificial Sequence
  Description of Artificial Sequence: Synthetic oligonucleotide
ccuaccuaaugucuccuga

SEQ ID NO: 480494 - RNA, 19 nt, Artificial Sequence
  Description of Artificial Sequence: Synthetic oligonucleotide
gcuauccacccuuguggug

SEQ ID NO: 480495 - RNA, 19 nt, Artificial Sequence
  Description of Artificial Sequence: Synthetic oligonucleotide
cuccgcguucuggacagug

SEQ ID NO: 480496 - RNA, 19 nt, Artificial Sequence
  Description of Artificial Sequence: Synthetic oligonucleotide
cuaaugucuccugagcuuu

SEQ ID NO: 480497 - RNA, 19 nt, Artificial Sequence
  Description of Artificial Sequence: Synthetic oligonucleotide
gccaguuaugauggcuuag

SEQ ID NO: 480498 - RNA, 19 nt, Artificial Sequence
  Description of Artificial Sequence: Synthetic oligonucleotide
ugcggcaguaggcgaugua

SEQ ID NO: 480499 - RNA, 19 nt, Artificial Sequence
  Description of Artificial Sequence: Synthetic oligonucleotide
gcgggaaggacacaugagu

SEQ ID NO: 480500 - RNA, 19 nt, Artificial Sequence
  Description of Artificial Sequence: Synthetic oligonucleotide
cagauuugagacccugcgu

SEQ ID NO: 480501 - RNA, 19 nt, Artificial Sequence
  Description of Artificial Sequence: Synthetic oligonucleotide
cccaccgccauagauggac

SEQ ID NO: 480502 - RNA, 19 nt, Artificial Sequence
  Description of Artificial Sequence: Synthetic oligonucleotide
guguggaggugucaauccu

SEQ ID NO: 480503 - RNA, 19 nt, Artificial Sequence
  Description of Artificial Sequence: Synthetic oligonucleotide
uugagacccugcgucucuc

SEQ ID NO: 480504 - RNA, 19 nt, Artificial Sequence
  Description of Artificial Sequence: Synthetic oligonucleotide
acccuaccuaaugucuccu

SEQ ID NO: 480505 - RNA, 19 nt, Artificial Sequence
  Description of Artificial Sequence: Synthetic oligonucleotide
agguuacuacuggacccca

SEQ ID NO: 480506 - RNA, 19 nt, Artificial Sequence
  Description of Artificial Sequence: Synthetic oligonucleotide
acacccugucacacgucag

SEQ ID NO: 480507 - RNA, 19 nt, Artificial Sequence
  Description of Artificial Sequence: Synthetic oligonucleotide
guacugaacugaugauggu

SEQ ID NO: 480508 - RNA, 19 nt, Artificial Sequence
  Description of Artificial Sequence: Synthetic oligonucleotide
gcuucgccacacgagccgg

SEQ ID NO: 480509 - RNA, 19 nt, Artificial Sequence
  Description of Artificial Sequence: Synthetic oligonucleotide
gccucaaucuggcaagugu

SEQ ID NO: 480510 - RNA, 19 nt, Artificial Sequence
  Description of Artificial Sequence: Synthetic oligonucleotide
guacuccaugaagaaagcu

SEQ ID NO: 480511 - RNA, 19 nt, Artificial Sequence
  Description of Artificial Sequence: Synthetic oligonucleotide
gucaccuagcauguuugua

SEQ ID NO: 480512 - RNA, 19 nt, Artificial Sequence
  Description of Artificial Sequence: Synthetic oligonucleotide
gcugauaaacgugggcuaa

SEQ ID NO: 480513 - RNA, 19 nt, Artificial Sequence
  Description of Artificial Sequence: Synthetic oligonucleotide
cgcucuggucaucaaauuc

SEQ ID NO: 480514 - RNA, 19 nt, Artificial Sequence
  Description of Artificial Sequence: Synthetic oligonucleotide
aggacacaugagugcugau

SEQ ID NO: 480515 - RNA, 19 nt, Artificial Sequence
  Description of Artificial Sequence: Synthetic oligonucleotide
gcauacucuaugauucaaa

SEQ ID NO: 480516 - RNA, 19 nt, Artificial Sequence
  Description of Artificial Sequence: Synthetic oligonucleotide
ccacccuuguggugcauac

SEQ ID NO: 480517 - RNA, 19 nt, Artificial Sequence
  Description of Artificial Sequence: Synthetic oligonucleotide
cgagacacauaaaacugaa

SEQ ID NO: 480518 - RNA, 19 nt, Artificial Sequence
  Description of Artificial Sequence: Synthetic oligonucleotide
ggguuacagacacccuguc

SEQ ID NO: 480519 - RNA, 19 nt, Artificial Sequence
  Description of Artificial Sequence: Synthetic oligonucleotide
ccggagaguccucuucuug

SEQ ID NO: 480520 - RNA, 19 nt, Artificial Sequence
  Description of Artificial Sequence: Synthetic oligonucleotide
acccugcgucucuccuuuc

SEQ ID NO: 480521 - RNA, 19 nt, Artificial Sequence
  Description of Artificial Sequence: Synthetic oligonucleotide
gcaaagguuagggaaccua

SEQ ID NO: 480522 - RNA, 19 nt, Artificial Sequence
  Description of Artificial Sequence: Synthetic oligonucleotide
ucgaucggaccuggaggau

SEQ ID NO: 480523 - RNA, 19 nt, Artificial Sequence
  Description of Artificial Sequence: Synthetic oligonucleotide
uugcggcaguaggcgaugu

SEQ ID NO: 480524 - RNA, 19 nt, Artificial Sequence
  Description of Artificial Sequence: Synthetic oligonucleotide
gaccgggucuccacuugga

SEQ ID NO: 480525 - RNA, 19 nt, Artificial Sequence
  Description of Artificial Sequence: Synthetic oligonucleotide
gcugggcuauccuuugcaa

SEQ ID NO: 480526 - RNA, 19 nt, Artificial Sequence
  Description of Artificial Sequence: Synthetic oligonucleotide
ccacauuuagugacugcaa

SEQ ID NO: 480527 - RNA, 19 nt, Artificial Sequence
  Description of Artificial Sequence: Synthetic oligonucleotide
gccgggaaucggcaaggac

SEQ ID NO: 480528 - RNA, 19 nt, Artificial Sequence
  Description of Artificial Sequence: Synthetic oligonucleotide
gcuuuugacaucacauaau

SEQ ID NO: 480529 - RNA, 19 nt, Artificial Sequence
  Description of Artificial Sequence: Synthetic oligonucleotide
ucgccacacgagccggcuu

SEQ ID NO: 480530 - RNA, 19 nt, Artificial Sequence
  Description of Artificial Sequence: Synthetic oligonucleotide
cgcuucgccacacgagccg

SEQ ID NO: 480531 - RNA, 19 nt, Artificial Sequence
  Description of Artificial Sequence: Synthetic oligonucleotide
gugggcuaacacuuucauu

SEQ ID NO: 480532 - RNA, 19 nt, Artificial Sequence
  Description of Artificial Sequence: Synthetic oligonucleotide
cccuaccuaaugucuccug

SEQ ID NO: 480533 - RNA, 19 nt, Artificial Sequence
  Description of Artificial Sequence: Synthetic oligonucleotide
ggcuauccuuugcaagaaa

SEQ ID NO: 480534 - RNA, 19 nt, Artificial Sequence
  Description of Artificial Sequence: Synthetic oligonucleotide
gccacagauugccugacuu

SEQ ID NO: 480535 - RNA, 19 nt, Artificial Sequence
  Description of Artificial Sequence: Synthetic oligonucleotide
guugucgaucggaccugga

SEQ ID NO: 480536 - RNA, 19 nt, Artificial Sequence
  Description of Artificial Sequence: Synthetic oligonucleotide
ggccaguuaugauggcuua

SEQ ID NO: 480537 - RNA, 19 nt, Artificial Sequence
  Description of Artificial Sequence: Synthetic oligonucleotide
ggggucgcaggaugacuuc

SEQ ID NO: 480538 - RNA, 19 nt, Artificial Sequence
  Description of Artificial Sequence: Synthetic oligonucleotide
acgagccggcuuugacuau

SEQ ID NO: 480539 - RNA, 19 nt, Artificial Sequence
  Description of Artificial Sequence: Synthetic oligonucleotide
ccccaaaaccagcucuuca

SEQ ID NO: 480540 - RNA, 19 nt, Artificial Sequence
  Description of Artificial Sequence: Synthetic oligonucleotide
gggaaucggcaaggacagg

SEQ ID NO: 480541 - RNA, 19 nt, Artificial Sequence
  Description of Artificial Sequence: Synthetic oligonucleotide
gugacgcucuggucaucaa

SEQ ID NO: 480542 - RNA, 19 nt, Artificial Sequence
  Description of Artificial Sequence: Synthetic oligonucleotide
cugaaacuucagugacgcu

SEQ ID NO: 480543 - RNA, 19 nt, Artificial Sequence
  Description of Artificial Sequence: Synthetic oligonucleotide
ccuaaugucuccugagcuu

SEQ ID NO: 480544 - RNA, 19 nt, Artificial Sequence
  Description of Artificial Sequence: Synthetic oligonucleotide
gugauguagacaggucauu

SEQ ID NO: 480545 - RNA, 19 nt, Artificial Sequence
  Description of Artificial Sequence: Synthetic oligonucleotide
ccgcguucuggacagugga

SEQ ID NO: 480546 - RNA, 19 nt, Artificial Sequence
  Description of Artificial Sequence: Synthetic oligonucleotide
ggccggagaguccucuucu

SEQ ID NO: 480547 - RNA, 19 nt, Artificial Sequence
  Description of Artificial Sequence: Synthetic oligonucleotide
gguuacuacuggaccccaa

SEQ ID NO: 480548 - RNA, 19 nt, Artificial Sequence
  Description of Artificial Sequence: Synthetic oligonucleotide
ccugaaaggucucgagggu

SEQ ID NO: 480549 - RNA, 19 nt, Artificial Sequence
  Description of Artificial Sequence: Synthetic oligonucleotide
ccuuguggugcauacgcuu

SEQ ID NO: 480550 - RNA, 19 nt, Artificial Sequence
  Description of Artificial Sequence: Synthetic oligonucleotide
gcaauauaguuaagcuuuu

SEQ ID NO: 480551 - RNA, 19 nt, Artificial Sequence
  Description of Artificial Sequence: Synthetic oligonucleotide
cgaucggaccuggaggauc

SEQ ID NO: 480552 - RNA, 19 nt, Artificial Sequence
  Description of Artificial Sequence: Synthetic oligonucleotide
cgagccggcuuugacuaug

SEQ ID NO: 480553 - RNA, 19 nt, Artificial Sequence
  Description of Artificial Sequence: Synthetic oligonucleotide
acguggccggagaguccuc

SEQ ID NO: 480554 - RNA, 19 nt, Artificial Sequence
  Description of Artificial Sequence: Synthetic oligonucleotide
ggacguaggccuccgcguu

SEQ ID NO: 480555 - RNA, 19 nt, Artificial Sequence
  Description of Artificial Sequence: Synthetic oligonucleotide
cagugacgcucuggucauc

SEQ ID NO: 480556 - RNA, 19 nt, Artificial Sequence
  Description of Artificial Sequence: Synthetic oligonucleotide
gccacacgagccggcuuug

SEQ ID NO: 480557 - RNA, 19 nt, Artificial Sequence
  Description of Artificial Sequence: Synthetic oligonucleotide
cccuuguggugcauacgcu

SEQ ID NO: 480558 - RNA, 19 nt, Artificial Sequence
  Description of Artificial Sequence: Synthetic oligonucleotide
guggccggagaguccucuu

SEQ ID NO: 480559 - RNA, 19 nt, Artificial Sequence
  Description of Artificial Sequence: Synthetic oligonucleotide
gccggagaguccucuucuu

SEQ ID NO: 480560 - RNA, 19 nt, Artificial Sequence
  Description of Artificial Sequence: Synthetic oligonucleotide
cgaggguuacagacacccu

SEQ ID NO: 480561 - RNA, 19 nt, Artificial Sequence
  Description of Artificial Sequence: Synthetic oligonucleotide
ccccuccauaccugcuaua

SEQ ID NO: 480562 - RNA, 19 nt, Artificial Sequence
  Description of Artificial Sequence: Synthetic oligonucleotide
cgccacacgagccggcuuu

SEQ ID NO: 480563 - RNA, 19 nt, Artificial Sequence
  Description of Artificial Sequence: Synthetic oligonucleotide
gcccaccgccauagaugga

SEQ ID NO: 480564 - RNA, 19 nt, Artificial Sequence
  Description of Artificial Sequence: Synthetic oligonucleotide
gcgcugcaucaggguccac

SEQ ID NO: 480565 - RNA, 19 nt, Artificial Sequence
  Description of Artificial Sequence: Synthetic oligonucleotide
ccuccgcguucuggacagu

SEQ ID NO: 480566 - RNA, 19 nt, Artificial Sequence
  Description of Artificial Sequence: Synthetic oligonucleotide
aauauauauauauauauau

SEQ ID NO: 480567 - RNA, 19 nt, Artificial Sequence
  Description of Artificial Sequence: Synthetic oligonucleotide
uauauauauauauauauaa

SEQ ID NO: 480568 - RNA, 19 nt, Artificial Sequence
  Description of Artificial Sequence: Synthetic oligonucleotide
uauauauauauauauauau

SEQ ID NO: 480569 - RNA, 19 nt, Artificial Sequence
  Description of Artificial Sequence: Synthetic oligonucleotide
uauauauauauauauaaaa

SEQ ID NO: 480570 - RNA, 19 nt, Artificial Sequence
  Description of Artificial Sequence: Synthetic oligonucleotide
aaggcuaacauacaucuag

SEQ ID NO: 480571 - RNA, 19 nt, Artificial Sequence
  Description of Artificial Sequence: Synthetic oligonucleotide
aaaacacuuucauauagag

SEQ ID NO: 480572 - RNA, 19 nt, Artificial Sequence
  Description of Artificial Sequence: Synthetic oligonucleotide
ugaauauauauauauauau

SEQ ID NO: 480573 - RNA, 19 nt, Artificial Sequence
  Description of Artificial Sequence: Synthetic oligonucleotide
ugcauuauuccccaggcgg

SEQ ID NO: 480574 - RNA, 19 nt, Artificial Sequence
  Description of Artificial Sequence: Synthetic oligonucleotide
uuauaguguguuuagaagc

SEQ ID NO: 480575 - RNA, 19 nt, Artificial Sequence
  Description of Artificial Sequence: Synthetic oligonucleotide
uuuauugucuaaauauggc

SEQ ID NO: 480576 - RNA, 19 nt, Artificial Sequence
  Description of Artificial Sequence: Synthetic oligonucleotide
agagcaacaguugaggugc

SEQ ID NO: 480577 - RNA, 19 nt, Artificial Sequence
  Description of Artificial Sequence: Synthetic oligonucleotide
aguuggagcagucaggccg

SEQ ID NO: 480578 - RNA, 19 nt, Artificial Sequence
  Description of Artificial Sequence: Synthetic oligonucleotide
ucaaaagaggucuaaggca

SEQ ID NO: 480579 - RNA, 19 nt, Artificial Sequence
  Description of Artificial Sequence: Synthetic oligonucleotide
uuauugucuaaauauggcu

SEQ ID NO: 480580 - RNA, 19 nt, Artificial Sequence
  Description of Artificial Sequence: Synthetic oligonucleotide
acacuucagagcuaaaagg

SEQ ID NO: 480581 - RNA, 19 nt, Artificial Sequence
  Description of Artificial Sequence: Synthetic oligonucleotide
acauacaucuagguuaucc

SEQ ID NO: 480582 - RNA, 19 nt, Artificial Sequence
  Description of Artificial Sequence: Synthetic oligonucleotide
acuaaaugcaaaggaaggc

SEQ ID NO: 480583 - RNA, 19 nt, Artificial Sequence
  Description of Artificial Sequence: Synthetic oligonucleotide
ugucguaauaguaucucag

SEQ ID NO: 480584 - RNA, 19 nt, Artificial Sequence
  Description of Artificial Sequence: Synthetic oligonucleotide
cuaaauauggcuucguuca

SEQ ID NO: 480585 - RNA, 19 nt, Artificial Sequence
  Description of Artificial Sequence: Synthetic oligonucleotide
gugcaaaccaaauuaacag

SEQ ID NO: 480586 - RNA, 19 nt, Artificial Sequence
  Description of Artificial Sequence: Synthetic oligonucleotide
guuauaguguguuuagaag

SEQ ID NO: 480587 - RNA, 19 nt, Artificial Sequence
  Description of Artificial Sequence: Synthetic oligonucleotide
aaacacuuucauauagagc

SEQ ID NO: 480588 - RNA, 19 nt, Artificial Sequence
  Description of Artificial Sequence: Synthetic oligonucleotide
cauacaucuagguuauccg

SEQ ID NO: 480589 - RNA, 19 nt, Artificial Sequence
  Description of Artificial Sequence: Synthetic oligonucleotide
gucaaaagaggucuaaggc

SEQ ID NO: 480590 - RNA, 19 nt, Artificial Sequence
  Description of Artificial Sequence: Synthetic oligonucleotide
uggauuuggagcccgauga

SEQ ID NO: 480591 - RNA, 19 nt, Artificial Sequence
  Description of Artificial Sequence: Synthetic oligonucleotide
cuaacauacaucuagguua

SEQ ID NO: 480592 - RNA, 19 nt, Artificial Sequence
  Description of Artificial Sequence: Synthetic oligonucleotide
uuuaggauauccgggaaag

SEQ ID NO: 480593 - RNA, 19 nt, Artificial Sequence
  Description of Artificial Sequence: Synthetic oligonucleotide
gauugcacucuccauaccc

SEQ ID NO: 480594 - RNA, 19 nt, Artificial Sequence
  Description of Artificial Sequence: Synthetic oligonucleotide
ucuaaauauggcuucguuc

SEQ ID NO: 480595 - RNA, 19 nt, Artificial Sequence
  Description of Artificial Sequence: Synthetic oligonucleotide
uagagcugaauauauauau

SEQ ID NO: 480596 - RNA, 19 nt, Artificial Sequence
  Description of Artificial Sequence: Synthetic oligonucleotide
cuucacauauccuuauuag

SEQ ID NO: 480597 - RNA, 19 nt, Artificial Sequence
  Description of Artificial Sequence: Synthetic oligonucleotide
aguuuugaguccuuaguug

SEQ ID NO: 480598 - RNA, 19 nt, Artificial Sequence
  Description of Artificial Sequence: Synthetic oligonucleotide
aauccacuuaaugcaaaac

SEQ ID NO: 480599 - RNA, 19 nt, Artificial Sequence
  Description of Artificial Sequence: Synthetic oligonucleotide
uuugggagucuucuugggg

SEQ ID NO: 480600 - RNA, 19 nt, Artificial Sequence
  Description of Artificial Sequence: Synthetic oligonucleotide
ugcuugucgguuuuauugg

SEQ ID NO: 480601 - RNA, 19 nt, Artificial Sequence
  Description of Artificial Sequence: Synthetic oligonucleotide
acacagguaaacuagccca

SEQ ID NO: 480602 - RNA, 19 nt, Artificial Sequence
  Description of Artificial Sequence: Synthetic oligonucleotide
agagaauccgagucauggc

SEQ ID NO: 480603 - RNA, 19 nt, Artificial Sequence
  Description of Artificial Sequence: Synthetic oligonucleotide
ucccuuaauauagaaauac

SEQ ID NO: 480604 - RNA, 19 nt, Artificial Sequence
  Description of Artificial Sequence: Synthetic oligonucleotide
uacaucuagguuauccgug

SEQ ID NO: 480605 - RNA, 19 nt, Artificial Sequence
  Description of Artificial Sequence: Synthetic oligonucleotide
uagguuauccguguuauga

SEQ ID NO: 480606 - RNA, 19 nt, Artificial Sequence
  Description of Artificial Sequence: Synthetic oligonucleotide
uccguguuaugaaaagugc

SEQ ID NO: 480607 - RNA, 19 nt, Artificial Sequence
  Description of Artificial Sequence: Synthetic oligonucleotide
agcauaugcagaauuaaag

SEQ ID NO: 480608 - RNA, 19 nt, Artificial Sequence
  Description of Artificial Sequence: Synthetic oligonucleotide
uaaacuagcccauggggac

SEQ ID NO: 480609 - RNA, 19 nt, Artificial Sequence
  Description of Artificial Sequence: Synthetic oligonucleotide
gguaaacuagcccaugggg

SEQ ID NO: 480610 - RNA, 19 nt, Artificial Sequence
  Description of Artificial Sequence: Synthetic oligonucleotide
gucguaauaguaucucagg

SEQ ID NO: 480611 - RNA, 19 nt, Artificial Sequence
  Description of Artificial Sequence: Synthetic oligonucleotide
gacacagguaaacuagccc

SEQ ID NO: 480612 - RNA, 19 nt, Artificial Sequence
  Description of Artificial Sequence: Synthetic oligonucleotide
ggucaaaagaggucuaagg

SEQ ID NO: 480613 - RNA, 19 nt, Artificial Sequence
  Description of Artificial Sequence: Synthetic oligonucleotide
auauuuuguccuucaaaca

SEQ ID NO: 480614 - RNA, 19 nt, Artificial Sequence
  Description of Artificial Sequence: Synthetic oligonucleotide
uauucguugcggcuugugc

SEQ ID NO: 480615 - RNA, 19 nt, Artificial Sequence
  Description of Artificial Sequence: Synthetic oligonucleotide
uccauuuggugucugugca

SEQ ID NO: 480616 - RNA, 19 nt, Artificial Sequence
  Description of Artificial Sequence: Synthetic oligonucleotide
aaguuggagcagucaggcc

SEQ ID NO: 480617 - RNA, 19 nt, Artificial Sequence
  Description of Artificial Sequence: Synthetic oligonucleotide
agguaaacuagcccauggg

SEQ ID NO: 480618 - RNA, 19 nt, Artificial Sequence
  Description of Artificial Sequence: Synthetic oligonucleotide
acgaguacaggcccgagug

SEQ ID NO: 480619 - RNA, 19 nt, Artificial Sequence
  Description of Artificial Sequence: Synthetic oligonucleotide
uuuuaggauauccgggaaa

SEQ ID NO: 480620 - RNA, 19 nt, Artificial Sequence
  Description of Artificial Sequence: Synthetic oligonucleotide
ugacacagguaaacuagcc

SEQ ID NO: 480621 - RNA, 19 nt, Artificial Sequence
  Description of Artificial Sequence: Synthetic oligonucleotide
agaggucuaaggcaguucu

SEQ ID NO: 480622 - RNA, 19 nt, Artificial Sequence
  Description of Artificial Sequence: Synthetic oligonucleotide
aagaauguuuauugucuaa

SEQ ID NO: 480623 - RNA, 19 nt, Artificial Sequence
  Description of Artificial Sequence: Synthetic oligonucleotide
uuaaggguuccagagaauc

SEQ ID NO: 480624 - RNA, 19 nt, Artificial Sequence
  Description of Artificial Sequence: Synthetic oligonucleotide
uugucgguuuuauugguca

SEQ ID NO: 480625 - RNA, 19 nt, Artificial Sequence
  Description of Artificial Sequence: Synthetic oligonucleotide
auauauauauauauauaaa

SEQ ID NO: 480626 - RNA, 19 nt, Artificial Sequence
  Description of Artificial Sequence: Synthetic oligonucleotide
uugaacucgccgucguugg

SEQ ID NO: 480627 - RNA, 19 nt, Artificial Sequence
  Description of Artificial Sequence: Synthetic oligonucleotide
uaaacaggcuuuuccgccc

SEQ ID NO: 480628 - RNA, 19 nt, Artificial Sequence
  Description of Artificial Sequence: Synthetic oligonucleotide
auauccgggaaagagacga

SEQ ID NO: 480629 - RNA, 19 nt, Artificial Sequence
  Description of Artificial Sequence: Synthetic oligonucleotide
acagauuuaaggguuccag

SEQ ID NO: 480630 - RNA, 19 nt, Artificial Sequence
  Description of Artificial Sequence: Synthetic oligonucleotide
gagaauccgagucauggca

SEQ ID NO: 480631 - RNA, 19 nt, Artificial Sequence
  Description of Artificial Sequence: Synthetic oligonucleotide
gaauauauauauauauaua

SEQ ID NO: 480632 - RNA, 19 nt, Artificial Sequence
  Description of Artificial Sequence: Synthetic oligonucleotide
gagagcagcggacucgggg

SEQ ID NO: 480633 - RNA, 19 nt, Artificial Sequence
  Description of Artificial Sequence: Synthetic oligonucleotide
auacaucuagguuauccgu

SEQ ID NO: 480634 - RNA, 19 nt, Artificial Sequence
  Description of Artificial Sequence: Synthetic oligonucleotide
gaaggacgaguacaggccc

SEQ ID NO: 480635 - RNA, 19 nt, Artificial Sequence
  Description of Artificial Sequence: Synthetic oligonucleotide
guguguuuggcccuugcag

SEQ ID NO: 480636 - RNA, 19 nt, Artificial Sequence
  Description of Artificial Sequence: Synthetic oligonucleotide
ggugcagagauuuccaagc

SEQ ID NO: 480637 - RNA, 19 nt, Artificial Sequence
  Description of Artificial Sequence: Synthetic oligonucleotide
auucguugcggcuugugcu

SEQ ID NO: 480638 - RNA, 19 nt, Artificial Sequence
  Description of Artificial Sequence: Synthetic oligonucleotide
ccgaugacagauuuaaggg

SEQ ID NO: 480639 - RNA, 19 nt, Artificial Sequence
  Description of Artificial Sequence: Synthetic oligonucleotide
gauuucuaggaggacccgg

SEQ ID NO: 480640 - RNA, 19 nt, Artificial Sequence
  Description of Artificial Sequence: Synthetic oligonucleotide
gugaccauugagcagugug

SEQ ID NO: 480641 - RNA, 19 nt, Artificial Sequence
  Description of Artificial Sequence: Synthetic oligonucleotide
cccgaugacagauuuaagg

SEQ ID NO: 480642 - RNA, 19 nt, Artificial Sequence
  Description of Artificial Sequence: Synthetic oligonucleotide
cuuauuaguuauauugaaa

SEQ ID NO: 480643 - RNA, 19 nt, Artificial Sequence
  Description of Artificial Sequence: Synthetic oligonucleotide
caacaguugaggugcagag

SEQ ID NO: 480644 - RNA, 19 nt, Artificial Sequence
  Description of Artificial Sequence: Synthetic oligonucleotide
gauggagacuuggauuugg

SEQ ID NO: 480645 - RNA, 19 nt, Artificial Sequence
  Description of Artificial Sequence: Synthetic oligonucleotide
uuuugaguccuuaguugcu

SEQ ID NO: 480646 - RNA, 19 nt, Artificial Sequence
  Description of Artificial Sequence: Synthetic oligonucleotide
auauauauauauauauaua

SEQ ID NO: 480647 - RNA, 19 nt, Artificial Sequence
  Description of Artificial Sequence: Synthetic oligonucleotide
aguguguuuagaagcagag

SEQ ID NO: 480648 - RNA, 19 nt, Artificial Sequence
  Description of Artificial Sequence: Synthetic oligonucleotide
uugucguaauaguaucuca

SEQ ID NO: 480649 - RNA, 19 nt, Artificial Sequence
  Description of Artificial Sequence: Synthetic oligonucleotide
ugcugugugugagagcagg

SEQ ID NO: 480650 - RNA, 19 nt, Artificial Sequence
  Description of Artificial Sequence: Synthetic oligonucleotide
cagguaaacuagcccaugg

SEQ ID NO: 480651 - RNA, 19 nt, Artificial Sequence
  Description of Artificial Sequence: Synthetic oligonucleotide
acaccuuacagucgcuguc

SEQ ID NO: 480652 - RNA, 19 nt, Artificial Sequence
  Description of Artificial Sequence: Synthetic oligonucleotide
uggcugagacagaugaggc

SEQ ID NO: 480653 - RNA, 19 nt, Artificial Sequence
  Description of Artificial Sequence: Synthetic oligonucleotide
agucuguauaaacaggcuu

SEQ ID NO: 480654 - RNA, 19 nt, Artificial Sequence
  Description of Artificial Sequence: Synthetic oligonucleotide
uuucagugaagggaguaca

SEQ ID NO: 480655 - RNA, 19 nt, Artificial Sequence
  Description of Artificial Sequence: Synthetic oligonucleotide
uucaacacuucagagcuaa

SEQ ID NO: 480656 - RNA, 19 nt, Artificial Sequence
  Description of Artificial Sequence: Synthetic oligonucleotide
cuugaggagcuugaacucg

SEQ ID NO: 480657 - RNA, 19 nt, Artificial Sequence
  Description of Artificial Sequence: Synthetic oligonucleotide
acaaacuggcuucaucagu

SEQ ID NO: 480658 - RNA, 19 nt, Artificial Sequence
  Description of Artificial Sequence: Synthetic oligonucleotide
cugaauauauauauauaua

SEQ ID NO: 480659 - RNA, 19 nt, Artificial Sequence
  Description of Artificial Sequence: Synthetic oligonucleotide
gagcugaauauauauauau

SEQ ID NO: 480660 - RNA, 19 nt, Artificial Sequence
  Description of Artificial Sequence: Synthetic oligonucleotide
ucuagguuauccguguuau

SEQ ID NO: 480661 - RNA, 19 nt, Artificial Sequence
  Description of Artificial Sequence: Synthetic oligonucleotide
auuucuaggaggacccggg

SEQ ID NO: 480662 - RNA, 19 nt, Artificial Sequence
  Description of Artificial Sequence: Synthetic oligonucleotide
gaugaggugcucauguuuc

SEQ ID NO: 480663 - RNA, 19 nt, Artificial Sequence
  Description of Artificial Sequence: Synthetic oligonucleotide
gugauugcacucuccauac

SEQ ID NO: 480664 - RNA, 19 nt, Artificial Sequence
  Description of Artificial Sequence: Synthetic oligonucleotide
aggagcuugaacucgccgu

SEQ ID NO: 480665 - RNA, 19 nt, Artificial Sequence
  Description of Artificial Sequence: Synthetic oligonucleotide
ucguuggauguccagcaga

SEQ ID NO: 480666 - RNA, 19 nt, Artificial Sequence
  Description of Artificial Sequence: Synthetic oligonucleotide
auccguguuaugaaaagug

SEQ ID NO: 480667 - RNA, 19 nt, Artificial Sequence
  Description of Artificial Sequence: Synthetic oligonucleotide
ggugaugcagacgaaacgc

SEQ ID NO: 480668 - RNA, 19 nt, Artificial Sequence
  Description of Artificial Sequence: Synthetic oligonucleotide
aaagcuucacauauccuua

SEQ ID NO: 480669 - RNA, 19 nt, Artificial Sequence
  Description of Artificial Sequence: Synthetic oligonucleotide
agaugaggccaggaaagcg

SEQ ID NO: 480670 - RNA, 19 nt, Artificial Sequence
  Description of Artificial Sequence: Synthetic oligonucleotide
ugcggcuugugcuuuugag

SEQ ID NO: 480671 - RNA, 19 nt, Artificial Sequence
  Description of Artificial Sequence: Synthetic oligonucleotide
gaggagcuugaacucgccg

SEQ ID NO: 480672 - RNA, 19 nt, Artificial Sequence
  Description of Artificial Sequence: Synthetic oligonucleotide
uugcggagaccccacagcu

SEQ ID NO: 480673 - RNA, 19 nt, Artificial Sequence
  Description of Artificial Sequence: Synthetic oligonucleotide
gguuucaggucaaaagagg

SEQ ID NO: 480674 - RNA, 19 nt, Artificial Sequence
  Description of Artificial Sequence: Synthetic oligonucleotide
agggcgauggagccgaugu

SEQ ID NO: 480675 - RNA, 19 nt, Artificial Sequence
  Description of Artificial Sequence: Synthetic oligonucleotide
cugcucacuuccuuuacug

SEQ ID NO: 480676 - RNA, 19 nt, Artificial Sequence
  Description of Artificial Sequence: Synthetic oligonucleotide
gcugaauauauauauauau

SEQ ID NO: 480677 - RNA, 19 nt, Artificial Sequence
  Description of Artificial Sequence: Synthetic oligonucleotide
agagcagcggacucggggu

SEQ ID NO: 480678 - RNA, 19 nt, Artificial Sequence
  Description of Artificial Sequence: Synthetic oligonucleotide
gguuauaguguguuuagaa

SEQ ID NO: 480679 - RNA, 19 nt, Artificial Sequence
  Description of Artificial Sequence: Synthetic oligonucleotide
cuugucguaauaguaucuc

SEQ ID NO: 480680 - RNA, 19 nt, Artificial Sequence
  Description of Artificial Sequence: Synthetic oligonucleotide
ucuuccgccuugaggagcu

SEQ ID NO: 480681 - RNA, 19 nt, Artificial Sequence
  Description of Artificial Sequence: Synthetic oligonucleotide
gaaagcggaugcugccgcg

SEQ ID NO: 480682 - RNA, 19 nt, Artificial Sequence
  Description of Artificial Sequence: Synthetic oligonucleotide
agcagcaguccauuuggug

SEQ ID NO: 480683 - RNA, 19 nt, Artificial Sequence
  Description of Artificial Sequence: Synthetic oligonucleotide
aacucgccgucguuggaug

SEQ ID NO: 480684 - RNA, 19 nt, Artificial Sequence
  Description of Artificial Sequence: Synthetic oligonucleotide
gcuucguucauucuuacaa

SEQ ID NO: 480685 - RNA, 19 nt, Artificial Sequence
  Description of Artificial Sequence: Synthetic oligonucleotide
ugggagucuucuuggggag

SEQ ID NO: 480686 - RNA, 19 nt, Artificial Sequence
  Description of Artificial Sequence: Synthetic oligonucleotide
cuugcggagaccccacagc

SEQ ID NO: 480687 - RNA, 19 nt, Artificial Sequence
  Description of Artificial Sequence: Synthetic oligonucleotide
agcauuuggcaacauuaaa

SEQ ID NO: 480688 - RNA, 19 nt, Artificial Sequence
  Description of Artificial Sequence: Synthetic oligonucleotide
gauauccgggaaagagacg

SEQ ID NO: 480689 - RNA, 19 nt, Artificial Sequence
  Description of Artificial Sequence: Synthetic oligonucleotide
agagauuuccaagccuuug

SEQ ID NO: 480690 - RNA, 19 nt, Artificial Sequence
  Description of Artificial Sequence: Synthetic oligonucleotide
ggauauccgggaaagagac

SEQ ID NO: 480691 - RNA, 19 nt, Artificial Sequence
  Description of Artificial Sequence: Synthetic oligonucleotide
gcugccucgaggaagaggc

SEQ ID NO: 480692 - RNA, 19 nt, Artificial Sequence
  Description of Artificial Sequence: Synthetic oligonucleotide
aaggacgaguacaggcccg

SEQ ID NO: 480693 - RNA, 19 nt, Artificial Sequence
  Description of Artificial Sequence: Synthetic oligonucleotide
cagacgaaacgcuggcagc

SEQ ID NO: 480694 - RNA, 19 nt, Artificial Sequence
  Description of Artificial Sequence: Synthetic oligonucleotide
agaauccgagucauggcag

SEQ ID NO: 480695 - RNA, 19 nt, Artificial Sequence
  Description of Artificial Sequence: Synthetic oligonucleotide
aggcuaacauacaucuagg

SEQ ID NO: 480696 - RNA, 19 nt, Artificial Sequence
  Description of Artificial Sequence: Synthetic oligonucleotide
gucuaaggcaguucuuuca

SEQ ID NO: 480697 - RNA, 19 nt, Artificial Sequence
  Description of Artificial Sequence: Synthetic oligonucleotide
aggaaagcggaugcugccg

SEQ ID NO: 480698 - RNA, 19 nt, Artificial Sequence
  Description of Artificial Sequence: Synthetic oligonucleotide
cuugucgguuuuauugguc

SEQ ID NO: 480699 - RNA, 19 nt, Artificial Sequence
  Description of Artificial Sequence: Synthetic oligonucleotide
cauauagagcugaauauau

SEQ ID NO: 480700 - RNA, 19 nt, Artificial Sequence
  Description of Artificial Sequence: Synthetic oligonucleotide
caugcuugugggccucucg

SEQ ID NO: 480701 - RNA, 19 nt, Artificial Sequence
  Description of Artificial Sequence: Synthetic oligonucleotide
gauuuggagcccgaugaca

SEQ ID NO: 480702 - RNA, 19 nt, Artificial Sequence
  Description of Artificial Sequence: Synthetic oligonucleotide
uuuuccgccccgcgccgcg

SEQ ID NO: 480703 - RNA, 19 nt, Artificial Sequence
  Description of Artificial Sequence: Synthetic oligonucleotide
agguuauccguguuaugaa

SEQ ID NO: 480704 - RNA, 19 nt, Artificial Sequence
  Description of Artificial Sequence: Synthetic oligonucleotide
uccgccuugaggagcuuga

SEQ ID NO: 480705 - RNA, 19 nt, Artificial Sequence
  Description of Artificial Sequence: Synthetic oligonucleotide
gcggcuugugcuuuugagg

SEQ ID NO: 480706 - RNA, 19 nt, Artificial Sequence
  Description of Artificial Sequence: Synthetic oligonucleotide
gaaaaguguguuuggcccu

SEQ ID NO: 480707 - RNA, 19 nt, Artificial Sequence
  Description of Artificial Sequence: Synthetic oligonucleotide
cacauauccuuauuaguua

SEQ ID NO: 480708 - RNA, 19 nt, Artificial Sequence
  Description of Artificial Sequence: Synthetic oligonucleotide
ugguuauaguguguuuaga

SEQ ID NO: 480709 - RNA, 19 nt, Artificial Sequence
  Description of Artificial Sequence: Synthetic oligonucleotide
ccuuuacugcauuauuccc

SEQ ID NO: 480710 - RNA, 19 nt, Artificial Sequence
  Description of Artificial Sequence: Synthetic oligonucleotide
agacgaaacgcuggcagca

SEQ ID NO: 480711 - RNA, 19 nt, Artificial Sequence
  Description of Artificial Sequence: Synthetic oligonucleotide
uuuggagcccgaugacaga

SEQ ID NO: 480712 - RNA, 19 nt, Artificial Sequence
  Description of Artificial Sequence: Synthetic oligonucleotide
cgacuuuccaugcugacag

SEQ ID NO: 480713 - RNA, 19 nt, Artificial Sequence
  Description of Artificial Sequence: Synthetic oligonucleotide
guuauccguguuaugaaaa

SEQ ID NO: 480714 - RNA, 19 nt, Artificial Sequence
  Description of Artificial Sequence: Synthetic oligonucleotide
agcccgaugacagauuuaa

SEQ ID NO: 480715 - RNA, 19 nt, Artificial Sequence
  Description of Artificial Sequence: Synthetic oligonucleotide
ugccacagugugauugcac

SEQ ID NO: 480716 - RNA, 19 nt, Artificial Sequence
  Description of Artificial Sequence: Synthetic oligonucleotide
ugaggugcucauguuucug

SEQ ID NO: 480717 - RNA, 19 nt, Artificial Sequence
  Description of Artificial Sequence: Synthetic oligonucleotide
caccuuacagucgcugucc

SEQ ID NO: 480718 - RNA, 19 nt, Artificial Sequence
  Description of Artificial Sequence: Synthetic oligonucleotide
caugugaccauugagcagu

SEQ ID NO: 480719 - RNA, 19 nt, Artificial Sequence
  Description of Artificial Sequence: Synthetic oligonucleotide
ugcucauguuucuggucca

SEQ ID NO: 480720 - RNA, 19 nt, Artificial Sequence
  Description of Artificial Sequence: Synthetic oligonucleotide
guaugcuggagagcagcgg

SEQ ID NO: 480721 - RNA, 19 nt, Artificial Sequence
  Description of Artificial Sequence: Synthetic oligonucleotide
ggcccuugcagccuggcag

SEQ ID NO: 480722 - RNA, 19 nt, Artificial Sequence
  Description of Artificial Sequence: Synthetic oligonucleotide
uuaggauauccgggaaaga

SEQ ID NO: 480723 - RNA, 19 nt, Artificial Sequence
  Description of Artificial Sequence: Synthetic oligonucleotide
gaggacccgggcgaaagcc

SEQ ID NO: 480724 - RNA, 19 nt, Artificial Sequence
  Description of Artificial Sequence: Synthetic oligonucleotide
uuccaugcugacaggcguc

SEQ ID NO: 480725 - RNA, 19 nt, Artificial Sequence
  Description of Artificial Sequence: Synthetic oligonucleotide
gacuaaggcugcuccagaa

SEQ ID NO: 480726 - RNA, 19 nt, Artificial Sequence
  Description of Artificial Sequence: Synthetic oligonucleotide
auagagcugaauauauaua

SEQ ID NO: 480727 - RNA, 19 nt, Artificial Sequence
  Description of Artificial Sequence: Synthetic oligonucleotide
cuagguuauccguguuaug

SEQ ID NO: 480728 - RNA, 19 nt, Artificial Sequence
  Description of Artificial Sequence: Synthetic oligonucleotide
cagugugauugcacucucc

SEQ ID NO: 480729 - RNA, 19 nt, Artificial Sequence
  Description of Artificial Sequence: Synthetic oligonucleotide
gggaccgagaugaggaggg

SEQ ID NO: 480730 - RNA, 19 nt, Artificial Sequence
  Description of Artificial Sequence: Synthetic oligonucleotide
cagagcuaaaaggauaaaa

SEQ ID NO: 480731 - RNA, 19 nt, Artificial Sequence
  Description of Artificial Sequence: Synthetic oligonucleotide
uucguugcggcuugugcuu

SEQ ID NO: 480732 - RNA, 19 nt, Artificial Sequence
  Description of Artificial Sequence: Synthetic oligonucleotide
uggggaccgagaugaggag

SEQ ID NO: 480733 - RNA, 19 nt, Artificial Sequence
  Description of Artificial Sequence: Synthetic oligonucleotide
gaagggaguacacuuucau

SEQ ID NO: 480734 - RNA, 19 nt, Artificial Sequence
  Description of Artificial Sequence: Synthetic oligonucleotide
cagcauaugcagaauuaaa

SEQ ID NO: 480735 - RNA, 19 nt, Artificial Sequence
  Description of Artificial Sequence: Synthetic oligonucleotide
agcugaauauauauauaua

SEQ ID NO: 480736 - RNA, 19 nt, Artificial Sequence
  Description of Artificial Sequence: Synthetic oligonucleotide
ugugcuugucgguuuuauu

SEQ ID NO: 480737 - RNA, 19 nt, Artificial Sequence
  Description of Artificial Sequence: Synthetic oligonucleotide
aggaggguucugcagggaa

SEQ ID NO: 480738 - RNA, 19 nt, Artificial Sequence
  Description of Artificial Sequence: Synthetic oligonucleotide
ggaaagcggaugcugccgc

SEQ ID NO: 480739 - RNA, 19 nt, Artificial Sequence
  Description of Artificial Sequence: Synthetic oligonucleotide
gacggagcucuguccaaac

SEQ ID NO: 480740 - RNA, 19 nt, Artificial Sequence
  Description of Artificial Sequence: Synthetic oligonucleotide
ggcuuuuccgccccgcgcc

SEQ ID NO: 480741 - RNA, 19 nt, Artificial Sequence
  Description of Artificial Sequence: Synthetic oligonucleotide
uucugcugugugugagagc

SEQ ID NO: 480742 - RNA, 19 nt, Artificial Sequence
  Description of Artificial Sequence: Synthetic oligonucleotide
gucaggccgagccugcuca

SEQ ID NO: 480743 - RNA, 19 nt, Artificial Sequence
  Description of Artificial Sequence: Synthetic oligonucleotide
gcggagaccccacagcuug

SEQ ID NO: 480744 - RNA, 19 nt, Artificial Sequence
  Description of Artificial Sequence: Synthetic oligonucleotide
gaugucgcugccggagagc

SEQ ID NO: 480745 - RNA, 19 nt, Artificial Sequence
  Description of Artificial Sequence: Synthetic oligonucleotide
ccuuauuaguuauauugaa

SEQ ID NO: 480746 - RNA, 19 nt, Artificial Sequence
  Description of Artificial Sequence: Synthetic oligonucleotide
gguuauccguguuaugaaa

SEQ ID NO: 480747 - RNA, 19 nt, Artificial Sequence
  Description of Artificial Sequence: Synthetic oligonucleotide
accggcaugugaccauuga

SEQ ID NO: 480748 - RNA, 19 nt, Artificial Sequence
  Description of Artificial Sequence: Synthetic oligonucleotide
aaaggcuaacauacaucua

SEQ ID NO: 480749 - RNA, 19 nt, Artificial Sequence
  Description of Artificial Sequence: Synthetic oligonucleotide
ucaacacuucagagcuaaa

SEQ ID NO: 480750 - RNA, 19 nt, Artificial Sequence
  Description of Artificial Sequence: Synthetic oligonucleotide
uggacuguugagggcgaug

SEQ ID NO: 480751 - RNA, 19 nt, Artificial Sequence
  Description of Artificial Sequence: Synthetic oligonucleotide
acggagcucuguccaaacu

SEQ ID NO: 480752 - RNA, 19 nt, Artificial Sequence
  Description of Artificial Sequence: Synthetic oligonucleotide
accgcgugaggauccauuu

SEQ ID NO: 480753 - RNA, 19 nt, Artificial Sequence
  Description of Artificial Sequence: Synthetic oligonucleotide
gagacagaugaggccagga

SEQ ID NO: 480754 - RNA, 19 nt, Artificial Sequence
  Description of Artificial Sequence: Synthetic oligonucleotide
cauauccuuauuaguuaua

SEQ ID NO: 480755 - RNA, 19 nt, Artificial Sequence
  Description of Artificial Sequence: Synthetic oligonucleotide
acuggguuucaggucaaaa

SEQ ID NO: 480756 - RNA, 19 nt, Artificial Sequence
  Description of Artificial Sequence: Synthetic oligonucleotide
uggcuucguucauucuuac

SEQ ID NO: 480757 - RNA, 19 nt, Artificial Sequence
  Description of Artificial Sequence: Synthetic oligonucleotide
ggucuaaggcaguucuuuc

SEQ ID NO: 480758 - RNA, 19 nt, Artificial Sequence
  Description of Artificial Sequence: Synthetic oligonucleotide
guacaggcccgaguggaug

SEQ ID NO: 480759 - RNA, 19 nt, Artificial Sequence
  Description of Artificial Sequence: Synthetic oligonucleotide
cucuuccgccuugaggagc

SEQ ID NO: 480760 - RNA, 19 nt, Artificial Sequence
  Description of Artificial Sequence: Synthetic oligonucleotide
uugcggcuugugcuuuuga

SEQ ID NO: 480761 - RNA, 19 nt, Artificial Sequence
  Description of Artificial Sequence: Synthetic oligonucleotide
gucuguauaaacaggcuuu

SEQ ID NO: 480762 - RNA, 19 nt, Artificial Sequence
  Description of Artificial Sequence: Synthetic oligonucleotide
cccuuaauauagaaauaca

SEQ ID NO: 480763 - RNA, 19 nt, Artificial Sequence
  Description of Artificial Sequence: Synthetic oligonucleotide
ucgccgucguuggaugucc

SEQ ID NO: 480764 - RNA, 19 nt, Artificial Sequence
  Description of Artificial Sequence: Synthetic oligonucleotide
uggggacaaacuggcuuca

SEQ ID NO: 480765 - RNA, 19 nt, Artificial Sequence
  Description of Artificial Sequence: Synthetic oligonucleotide
guggcaccggcaugugacc

SEQ ID NO: 480766 - RNA, 19 nt, Artificial Sequence
  Description of Artificial Sequence: Synthetic oligonucleotide
ucuccaccgcgugaggauc

SEQ ID NO: 480767 - RNA, 19 nt, Artificial Sequence
  Description of Artificial Sequence: Synthetic oligonucleotide
ucggccuucaggggacacc

SEQ ID NO: 480768 - RNA, 19 nt, Artificial Sequence
  Description of Artificial Sequence: Synthetic oligonucleotide
ggauuuggagcccgaugac

SEQ ID NO: 480769 - RNA, 19 nt, Artificial Sequence
  Description of Artificial Sequence: Synthetic oligonucleotide
gaagcagaguucagcauau

SEQ ID NO: 480770 - RNA, 19 nt, Artificial Sequence
  Description of Artificial Sequence: Synthetic oligonucleotide
ccguguuaugaaaagugca

SEQ ID NO: 480771 - RNA, 19 nt, Artificial Sequence
  Description of Artificial Sequence: Synthetic oligonucleotide
gugagggauccugagggga

SEQ ID NO: 480772 - RNA, 19 nt, Artificial Sequence
  Description of Artificial Sequence: Synthetic oligonucleotide
gcuaacauacaucuagguu

SEQ ID NO: 480773 - RNA, 19 nt, Artificial Sequence
  Description of Artificial Sequence: Synthetic oligonucleotide
guauucguugcggcuugug

SEQ ID NO: 480774 - RNA, 19 nt, Artificial Sequence
  Description of Artificial Sequence: Synthetic oligonucleotide
auggagacuuggauuugga

SEQ ID NO: 480775 - RNA, 19 nt, Artificial Sequence
  Description of Artificial Sequence: Synthetic oligonucleotide
cguguuaugaaaagugcaa

SEQ ID NO: 480776 - RNA, 19 nt, Artificial Sequence
  Description of Artificial Sequence: Synthetic oligonucleotide
gacgaguacaggcccgagu

SEQ ID NO: 480777 - RNA, 19 nt, Artificial Sequence
  Description of Artificial Sequence: Synthetic oligonucleotide
ccaccgacacucaucauga

SEQ ID NO: 480778 - RNA, 19 nt, Artificial Sequence
  Description of Artificial Sequence: Synthetic oligonucleotide
ugcggagaccccacagcuu

SEQ ID NO: 480779 - RNA, 19 nt, Artificial Sequence
  Description of Artificial Sequence: Synthetic oligonucleotide
ccggagagcaacaguugag

SEQ ID NO: 480780 - RNA, 19 nt, Artificial Sequence
  Description of Artificial Sequence: Synthetic oligonucleotide
acucgccgucguuggaugu

SEQ ID NO: 480781 - RNA, 19 nt, Artificial Sequence
  Description of Artificial Sequence: Synthetic oligonucleotide
gucuaaauauggcuucguu

SEQ ID NO: 480782 - RNA, 19 nt, Artificial Sequence
  Description of Artificial Sequence: Synthetic oligonucleotide
agcggacucggggucagca

SEQ ID NO: 480783 - RNA, 19 nt, Artificial Sequence
  Description of Artificial Sequence: Synthetic oligonucleotide
augugcuugucgguuuuau

SEQ ID NO: 480784 - RNA, 19 nt, Artificial Sequence
  Description of Artificial Sequence: Synthetic oligonucleotide
caggcgucugcagacgguc

SEQ ID NO: 480785 - RNA, 19 nt, Artificial Sequence
  Description of Artificial Sequence: Synthetic oligonucleotide
gugcuuuugagggcagaca

SEQ ID NO: 480786 - RNA, 19 nt, Artificial Sequence
  Description of Artificial Sequence: Synthetic oligonucleotide
gagcagcggacucgggguc

SEQ ID NO: 480787 - RNA, 19 nt, Artificial Sequence
  Description of Artificial Sequence: Synthetic oligonucleotide
gagcguuugggagucuucu

SEQ ID NO: 480788 - RNA, 19 nt, Artificial Sequence
  Description of Artificial Sequence: Synthetic oligonucleotide
ccggcaugugaccauugag

SEQ ID NO: 480789 - RNA, 19 nt, Artificial Sequence
  Description of Artificial Sequence: Synthetic oligonucleotide
ugugaccauugagcagugu

SEQ ID NO: 480790 - RNA, 19 nt, Artificial Sequence
  Description of Artificial Sequence: Synthetic oligonucleotide
ggcgucugcagacggucug

SEQ ID NO: 480791 - RNA, 19 nt, Artificial Sequence
  Description of Artificial Sequence: Synthetic oligonucleotide
ggcuaacauacaucuaggu

SEQ ID NO: 480792 - RNA, 19 nt, Artificial Sequence
  Description of Artificial Sequence: Synthetic oligonucleotide
gccggagagcaacaguuga

SEQ ID NO: 480793 - RNA, 19 nt, Artificial Sequence
  Description of Artificial Sequence: Synthetic oligonucleotide
ggacaccuuacagucgcug

SEQ ID NO: 480794 - RNA, 19 nt, Artificial Sequence
  Description of Artificial Sequence: Synthetic oligonucleotide
guugcggcuugugcuuuug

SEQ ID NO: 480795 - RNA, 19 nt, Artificial Sequence
  Description of Artificial Sequence: Synthetic oligonucleotide
cugccggagagcaacaguu

SEQ ID NO: 480796 - RNA, 19 nt, Artificial Sequence
  Description of Artificial Sequence: Synthetic oligonucleotide
ggguuccagagaauccgag

SEQ ID NO: 480797 - RNA, 19 nt, Artificial Sequence
  Description of Artificial Sequence: Synthetic oligonucleotide
gccgcggccucagaugugg

SEQ ID NO: 480798 - RNA, 19 nt, Artificial Sequence
  Description of Artificial Sequence: Synthetic oligonucleotide
gugaugcagacgaaacgcu

SEQ ID NO: 480799 - RNA, 19 nt, Artificial Sequence
  Description of Artificial Sequence: Synthetic oligonucleotide
cacagguaaacuagcccau

SEQ ID NO: 480800 - RNA, 19 nt, Artificial Sequence
  Description of Artificial Sequence: Synthetic oligonucleotide
cuuuuccgccccgcgccgc

SEQ ID NO: 480801 - RNA, 19 nt, Artificial Sequence
  Description of Artificial Sequence: Synthetic oligonucleotide
ggcuucguucauucuuaca

SEQ ID NO: 480802 - RNA, 19 nt, Artificial Sequence
  Description of Artificial Sequence: Synthetic oligonucleotide
ugucgcugccggagagcaa

SEQ ID NO: 480803 - RNA, 19 nt, Artificial Sequence
  Description of Artificial Sequence: Synthetic oligonucleotide
augugaccauugagcagug

SEQ ID NO: 480804 - RNA, 19 nt, Artificial Sequence
  Description of Artificial Sequence: Synthetic oligonucleotide
gagggcgauggagccgaug

SEQ ID NO: 480805 - RNA, 19 nt, Artificial Sequence
  Description of Artificial Sequence: Synthetic oligonucleotide
agcagcggacucgggguca

SEQ ID NO: 480806 - RNA, 19 nt, Artificial Sequence
  Description of Artificial Sequence: Synthetic oligonucleotide
cucgccgucguuggauguc

SEQ ID NO: 480807 - RNA, 19 nt, Artificial Sequence
  Description of Artificial Sequence: Synthetic oligonucleotide
gccucucggccuucagggg

SEQ ID NO: 480808 - RNA, 19 nt, Artificial Sequence
  Description of Artificial Sequence: Synthetic oligonucleotide
cugcccgcccagacccgcg

SEQ ID NO: 480809 - RNA, 19 nt, Artificial Sequence
  Description of Artificial Sequence: Synthetic oligonucleotide
ccgucguuggauguccagc

SEQ ID NO: 480810 - RNA, 19 nt, Artificial Sequence
  Description of Artificial Sequence: Synthetic oligonucleotide
gcaacaagugcaagaggaa

SEQ ID NO: 480811 - RNA, 19 nt, Artificial Sequence
  Description of Artificial Sequence: Synthetic oligonucleotide
uccaccgcgugaggaucca

SEQ ID NO: 480812 - RNA, 19 nt, Artificial Sequence
  Description of Artificial Sequence: Synthetic oligonucleotide
gcggugugcagucuguaua

SEQ ID NO: 480813 - RNA, 19 nt, Artificial Sequence
  Description of Artificial Sequence: Synthetic oligonucleotide
gaacucgccgucguuggau

SEQ ID NO: 480814 - RNA, 19 nt, Artificial Sequence
  Description of Artificial Sequence: Synthetic oligonucleotide
gccgucguuggauguccag

SEQ ID NO: 480815 - RNA, 19 nt, Artificial Sequence
  Description of Artificial Sequence: Synthetic oligonucleotide
acaggcgucugcagacggu

SEQ ID NO: 480816 - RNA, 19 nt, Artificial Sequence
  Description of Artificial Sequence: Synthetic oligonucleotide
gcggacucggggucagcag

SEQ ID NO: 480817 - RNA, 19 nt, Artificial Sequence
  Description of Artificial Sequence: Synthetic oligonucleotide
cggacucggggucagcagc

SEQ ID NO: 480818 - RNA, 19 nt, Artificial Sequence
  Description of Artificial Sequence: Synthetic oligonucleotide
acggucuguugcucuugua

SEQ ID NO: 480819 - RNA, 19 nt, Artificial Sequence
  Description of Artificial Sequence: Synthetic oligonucleotide
gcuugucgguuuuauuggu

SEQ ID NO: 480820 - RNA, 19 nt, Artificial Sequence
  Description of Artificial Sequence: Synthetic oligonucleotide
ggucuggugaugugcuugu

SEQ ID NO: 480821 - RNA, 19 nt, Artificial Sequence
  Description of Artificial Sequence: Synthetic oligonucleotide
agccgaugucgcugccgga

SEQ ID NO: 480822 - RNA, 19 nt, Artificial Sequence
  Description of Artificial Sequence: Synthetic oligonucleotide
ucguugcggcuugugcuuu

SEQ ID NO: 480823 - RNA, 19 nt, Artificial Sequence
  Description of Artificial Sequence: Synthetic oligonucleotide
cccgacuuuccaugcugac

SEQ ID NO: 480824 - RNA, 19 nt, Artificial Sequence
  Description of Artificial Sequence: Synthetic oligonucleotide
ggagcccgaugacagauuu

SEQ ID NO: 480825 - RNA, 19 nt, Artificial Sequence
  Description of Artificial Sequence: Synthetic oligonucleotide
cucggccuucaggggacac

SEQ ID NO: 480826 - RNA, 19 nt, Artificial Sequence
  Description of Artificial Sequence: Synthetic oligonucleotide
gucuggugaugugcuuguc

SEQ ID NO: 480827 - RNA, 19 nt, Artificial Sequence
  Description of Artificial Sequence: Synthetic oligonucleotide
gcccgaugacagauuuaag

SEQ ID NO: 480828 - RNA, 19 nt, Artificial Sequence
  Description of Artificial Sequence: Synthetic oligonucleotide
ggacgaguacaggcccgag

SEQ ID NO: 480829 - RNA, 19 nt, Artificial Sequence
  Description of Artificial Sequence: Synthetic oligonucleotide
ugagggcgauggagccgau

SEQ ID NO: 480830 - RNA, 19 nt, Artificial Sequence
  Description of Artificial Sequence: Synthetic oligonucleotide
cuaggaggacccgggcgaa

SEQ ID NO: 480831 - RNA, 19 nt, Artificial Sequence
  Description of Artificial Sequence: Synthetic oligonucleotide
cagaugaggugcucauguu

SEQ ID NO: 480832 - RNA, 19 nt, Artificial Sequence
  Description of Artificial Sequence: Synthetic oligonucleotide
gagcccgaugacagauuua

SEQ ID NO: 480833 - RNA, 19 nt, Artificial Sequence
  Description of Artificial Sequence: Synthetic oligonucleotide
ggugugcagucuguauaaa

SEQ ID NO: 480834 - RNA, 19 nt, Artificial Sequence
  Description of Artificial Sequence: Synthetic oligonucleotide
cccgaguggauguauucgu

SEQ ID NO: 480835 - RNA, 19 nt, Artificial Sequence
  Description of Artificial Sequence: Synthetic oligonucleotide
ggccgagccugcucacuuc

SEQ ID NO: 480836 - RNA, 19 nt, Artificial Sequence
  Description of Artificial Sequence: Synthetic oligonucleotide
ggacggagcucuguccaaa

SEQ ID NO: 480837 - RNA, 19 nt, Artificial Sequence
  Description of Artificial Sequence: Synthetic oligonucleotide
acaggcccgaguggaugua

SEQ ID NO: 480838 - RNA, 19 nt, Artificial Sequence
  Description of Artificial Sequence: Synthetic oligonucleotide
gcagcggacucggggucag

SEQ ID NO: 480839 - RNA, 19 nt, Artificial Sequence
  Description of Artificial Sequence: Synthetic oligonucleotide
ccccgacuuuccaugcuga

SEQ ID NO: 480840 - RNA, 19 nt, Artificial Sequence
  Description of Artificial Sequence: Synthetic oligonucleotide
ggcggugugcagucuguau

SEQ ID NO: 480841 - RNA, 19 nt, Artificial Sequence
  Description of Artificial Sequence: Synthetic oligonucleotide
cagcggacucggggucagc

SEQ ID NO: 480842 - RNA, 19 nt, Artificial Sequence
  Description of Artificial Sequence: Synthetic oligonucleotide
caccgacacucaucaugau

SEQ ID NO: 480843 - RNA, 19 nt, Artificial Sequence
  Description of Artificial Sequence: Synthetic oligonucleotide
ccgaguggauguauucguu

SEQ ID NO: 480844 - RNA, 19 nt, Artificial Sequence
  Description of Artificial Sequence: Synthetic oligonucleotide
gggagcguuugggagucuu

SEQ ID NO: 480845 - RNA, 19 nt, Artificial Sequence
  Description of Artificial Sequence: Synthetic oligonucleotide
caccaccgacacucaucau

SEQ ID NO: 480846 - RNA, 19 nt, Artificial Sequence
  Description of Artificial Sequence: Synthetic oligonucleotide
ccucgaggaagaggcuucu

SEQ ID NO: 480847 - RNA, 19 nt, Artificial Sequence
  Description of Artificial Sequence: Synthetic oligonucleotide
gcugugcgccggggcugcc

SEQ ID NO: 480848 - RNA, 19 nt, Artificial Sequence
  Description of Artificial Sequence: Synthetic oligonucleotide
cgccgucguuggaugucca

SEQ ID NO: 480849 - RNA, 19 nt, Artificial Sequence
  Description of Artificial Sequence: Synthetic oligonucleotide
ccgcgugaggauccauuuu

SEQ ID NO: 480850 - RNA, 19 nt, Artificial Sequence
  Description of Artificial Sequence: Synthetic oligonucleotide
cuuccgccuugaggagcuu

SEQ ID NO: 480851 - RNA, 19 nt, Artificial Sequence
  Description of Artificial Sequence: Synthetic oligonucleotide
ggggagcguuugggagucu

SEQ ID NO: 480852 - RNA, 19 nt, Artificial Sequence
  Description of Artificial Sequence: Synthetic oligonucleotide
cguugcggcuugugcuuuu

SEQ ID NO: 480853 - RNA, 19 nt, Artificial Sequence
  Description of Artificial Sequence: Synthetic oligonucleotide
aaagcaucuauguagaugu

SEQ ID NO: 480854 - RNA, 19 nt, Artificial Sequence
  Description of Artificial Sequence: Synthetic oligonucleotide
uucauaacgaguccaaugg

SEQ ID NO: 480855 - RNA, 19 nt, Artificial Sequence
  Description of Artificial Sequence: Synthetic oligonucleotide
auuguaguaauccaugcgg

SEQ ID NO: 480856 - RNA, 19 nt, Artificial Sequence
  Description of Artificial Sequence: Synthetic oligonucleotide
agaauagucacacacuguc

SEQ ID NO: 480857 - RNA, 19 nt, Artificial Sequence
  Description of Artificial Sequence: Synthetic oligonucleotide
aagagugugagacagaaua

SEQ ID NO: 480858 - RNA, 19 nt, Artificial Sequence
  Description of Artificial Sequence: Synthetic oligonucleotide
agguauagcagagacaugc

SEQ ID NO: 480859 - RNA, 19 nt, Artificial Sequence
  Description of Artificial Sequence: Synthetic oligonucleotide
uuugacaggcuccaguggg

SEQ ID NO: 480860 - RNA, 19 nt, Artificial Sequence
  Description of Artificial Sequence: Synthetic oligonucleotide
uucaagauaggacucauaa

SEQ ID NO: 480861 - RNA, 19 nt, Artificial Sequence
  Description of Artificial Sequence: Synthetic oligonucleotide
ugauuuauuagaguacagg

SEQ ID NO: 480862 - RNA, 19 nt, Artificial Sequence
  Description of Artificial Sequence: Synthetic oligonucleotide
ugcauguagagguucaagg

SEQ ID NO: 480863 - RNA, 19 nt, Artificial Sequence
  Description of Artificial Sequence: Synthetic oligonucleotide
uuauuagaguacaggaucc

SEQ ID NO: 480864 - RNA, 19 nt, Artificial Sequence
  Description of Artificial Sequence: Synthetic oligonucleotide
ucuauguagauguagucga

SEQ ID NO: 480865 - RNA, 19 nt, Artificial Sequence
  Description of Artificial Sequence: Synthetic oligonucleotide
uacuggucgauguaaacgg

SEQ ID NO: 480866 - RNA, 19 nt, Artificial Sequence
  Description of Artificial Sequence: Synthetic oligonucleotide
uucggauccacucauggcc

SEQ ID NO: 480867 - RNA, 19 nt, Artificial Sequence
  Description of Artificial Sequence: Synthetic oligonucleotide
auaucuacaggagccaucc

SEQ ID NO: 480868 - RNA, 19 nt, Artificial Sequence
  Description of Artificial Sequence: Synthetic oligonucleotide
agucuagguacauauuuac

SEQ ID NO: 480869 - RNA, 19 nt, Artificial Sequence
  Description of Artificial Sequence: Synthetic oligonucleotide
aaugggacgaaagagugug

SEQ ID NO: 480870 - RNA, 19 nt, Artificial Sequence
  Description of Artificial Sequence: Synthetic oligonucleotide
aacggcaccuucaagauag

SEQ ID NO: 480871 - RNA, 19 nt, Artificial Sequence
  Description of Artificial Sequence: Synthetic oligonucleotide
gaaaagaaccguuuggaga

SEQ ID NO: 480872 - RNA, 19 nt, Artificial Sequence
  Description of Artificial Sequence: Synthetic oligonucleotide
gaggguuuugcacacaagc

SEQ ID NO: 480873 - RNA, 19 nt, Artificial Sequence
  Description of Artificial Sequence: Synthetic oligonucleotide
uuuaggaugcacaccagcu

SEQ ID NO: 480874 - RNA, 19 nt, Artificial Sequence
  Description of Artificial Sequence: Synthetic oligonucleotide
caaucaaguacucacacuc

SEQ ID NO: 480875 - RNA, 19 nt, Artificial Sequence
  Description of Artificial Sequence: Synthetic oligonucleotide
ugauguuucucuacgaaaa

SEQ ID NO: 480876 - RNA, 19 nt, Artificial Sequence
  Description of Artificial Sequence: Synthetic oligonucleotide
acguguucugaaaagaacc

SEQ ID NO: 480877 - RNA, 19 nt, Artificial Sequence
  Description of Artificial Sequence: Synthetic oligonucleotide
uccucuaaccaauugacgu

SEQ ID NO: 480878 - RNA, 19 nt, Artificial Sequence
  Description of Artificial Sequence: Synthetic oligonucleotide
auguuuaggaugcacacca

SEQ ID NO: 480879 - RNA, 19 nt, Artificial Sequence
  Description of Artificial Sequence: Synthetic oligonucleotide
aacuuaugauuuauuagag

SEQ ID NO: 480880 - RNA, 19 nt, Artificial Sequence
  Description of Artificial Sequence: Synthetic oligonucleotide
gaggauaucaagcaccuuc

SEQ ID NO: 480881 - RNA, 19 nt, Artificial Sequence
  Description of Artificial Sequence: Synthetic oligonucleotide
aacgcugucucuguggccg

SEQ ID NO: 480882 - RNA, 19 nt, Artificial Sequence
  Description of Artificial Sequence: Synthetic oligonucleotide
cucaaugugcucuagugug

SEQ ID NO: 480883 - RNA, 19 nt, Artificial Sequence
  Description of Artificial Sequence: Synthetic oligonucleotide
ugauucacuaguguagcgg

SEQ ID NO: 480884 - RNA, 19 nt, Artificial Sequence
  Description of Artificial Sequence: Synthetic oligonucleotide
uguucugcgggucaacacc

SEQ ID NO: 480885 - RNA, 19 nt, Artificial Sequence
  Description of Artificial Sequence: Synthetic oligonucleotide
cauaacgaguccaauggag

SEQ ID NO: 480886 - RNA, 19 nt, Artificial Sequence
  Description of Artificial Sequence: Synthetic oligonucleotide
aacugauucacuaguguag

SEQ ID NO: 480887 - RNA, 19 nt, Artificial Sequence
  Description of Artificial Sequence: Synthetic oligonucleotide
agacugugaacauucaugu

SEQ ID NO: 480888 - RNA, 19 nt, Artificial Sequence
  Description of Artificial Sequence: Synthetic oligonucleotide
guaaacggcaccuucaaga

SEQ ID NO: 480889 - RNA, 19 nt, Artificial Sequence
  Description of Artificial Sequence: Synthetic oligonucleotide
uaguaaugggacgaaagag

SEQ ID NO: 480890 - RNA, 19 nt, Artificial Sequence
  Description of Artificial Sequence: Synthetic oligonucleotide
ucauggcccaucaugcagg

SEQ ID NO: 480891 - RNA, 19 nt, Artificial Sequence
  Description of Artificial Sequence: Synthetic oligonucleotide
ucaacugauucacuagugu

SEQ ID NO: 480892 - RNA, 19 nt, Artificial Sequence
  Description of Artificial Sequence: Synthetic oligonucleotide
uaucauggaggacucaccu

SEQ ID NO: 480893 - RNA, 19 nt, Artificial Sequence
  Description of Artificial Sequence: Synthetic oligonucleotide
aauugacguagucgguggg

SEQ ID NO: 480894 - RNA, 19 nt, Artificial Sequence
  Description of Artificial Sequence: Synthetic oligonucleotide
uacuccucuaaccaauuga

SEQ ID NO: 480895 - RNA, 19 nt, Artificial Sequence
  Description of Artificial Sequence: Synthetic oligonucleotide
acuuacacgggugacacag

SEQ ID NO: 480896 - RNA, 19 nt, Artificial Sequence
  Description of Artificial Sequence: Synthetic oligonucleotide
guuucggauccacucaugg

SEQ ID NO: 480897 - RNA, 19 nt, Artificial Sequence
  Description of Artificial Sequence: Synthetic oligonucleotide
cuucauaacgaguccaaug

SEQ ID NO: 480898 - RNA, 19 nt, Artificial Sequence
  Description of Artificial Sequence: Synthetic oligonucleotide
gacucaccugcccugaagg

SEQ ID NO: 480899 - RNA, 19 nt, Artificial Sequence
  Description of Artificial Sequence: Synthetic oligonucleotide
uucaacugauucacuagug

SEQ ID NO: 480900 - RNA, 19 nt, Artificial Sequence
  Description of Artificial Sequence: Synthetic oligonucleotide
uuauacuccucuaaccaau

SEQ ID NO: 480901 - RNA, 19 nt, Artificial Sequence
  Description of Artificial Sequence: Synthetic oligonucleotide
ucuaacccagcuuucugcc

SEQ ID NO: 480902 - RNA, 19 nt, Artificial Sequence
  Description of Artificial Sequence: Synthetic oligonucleotide
uucuaacccagcuuucugc

SEQ ID NO: 480903 - RNA, 19 nt, Artificial Sequence
  Description of Artificial Sequence: Synthetic oligonucleotide
uuuauacuccucuaaccaa

SEQ ID NO: 480904 - RNA, 19 nt, Artificial Sequence
  Description of Artificial Sequence: Synthetic oligonucleotide
uauccauaccucuugugcu

SEQ ID NO: 480905 - RNA, 19 nt, Artificial Sequence
  Description of Artificial Sequence: Synthetic oligonucleotide
uaguauuuccaggucaaag

SEQ ID NO: 480906 - RNA, 19 nt, Artificial Sequence
  Description of Artificial Sequence: Synthetic oligonucleotide
uccccuagaaggcaguagc

SEQ ID NO: 480907 - RNA, 19 nt, Artificial Sequence
  Description of Artificial Sequence: Synthetic oligonucleotide
uagaguacaggauccaaaa

SEQ ID NO: 480908 - RNA, 19 nt, Artificial Sequence
  Description of Artificial Sequence: Synthetic oligonucleotide
caaagaagaucuccggccc

SEQ ID NO: 480909 - RNA, 19 nt, Artificial Sequence
  Description of Artificial Sequence: Synthetic oligonucleotide
cuguugauaccacggaggg

SEQ ID NO: 480910 - RNA, 19 nt, Artificial Sequence
  Description of Artificial Sequence: Synthetic oligonucleotide
uuaucauggaggacucacc

SEQ ID NO: 480911 - RNA, 19 nt, Artificial Sequence
  Description of Artificial Sequence: Synthetic oligonucleotide
uuacacgggugacacaggc

SEQ ID NO: 480912 - RNA, 19 nt, Artificial Sequence
  Description of Artificial Sequence: Synthetic oligonucleotide
caauugacguagucggugg

SEQ ID NO: 480913 - RNA, 19 nt, Artificial Sequence
  Description of Artificial Sequence: Synthetic oligonucleotide
acuuaugauuuauuagagu

SEQ ID NO: 480914 - RNA, 19 nt, Artificial Sequence
  Description of Artificial Sequence: Synthetic oligonucleotide
acgaaagagugugagacag

SEQ ID NO: 480915 - RNA, 19 nt, Artificial Sequence
  Description of Artificial Sequence: Synthetic oligonucleotide
guacuggucgauguaaacg

SEQ ID NO: 480916 - RNA, 19 nt, Artificial Sequence
  Description of Artificial Sequence: Synthetic oligonucleotide
guuguauccauaccucuug

SEQ ID NO: 480917 - RNA, 19 nt, Artificial Sequence
  Description of Artificial Sequence: Synthetic oligonucleotide
uauagugccgcugucacau

SEQ ID NO: 480918 - RNA, 19 nt, Artificial Sequence
  Description of Artificial Sequence: Synthetic oligonucleotide
acuccucuaaccaauugac

SEQ ID NO: 480919 - RNA, 19 nt, Artificial Sequence
  Description of Artificial Sequence: Synthetic oligonucleotide
auaaagugcccaaauacca

SEQ ID NO: 480920 - RNA, 19 nt, Artificial Sequence
  Description of Artificial Sequence: Synthetic oligonucleotide
acagucuagguacauauuu

SEQ ID NO: 480921 - RNA, 19 nt, Artificial Sequence
  Description of Artificial Sequence: Synthetic oligonucleotide
augucgagcgccgugaggg

SEQ ID NO: 480922 - RNA, 19 nt, Artificial Sequence
  Description of Artificial Sequence: Synthetic oligonucleotide
cacucauggcccaucaugc

SEQ ID NO: 480923 - RNA, 19 nt, Artificial Sequence
  Description of Artificial Sequence: Synthetic oligonucleotide
ucacuaguguagcggagag

SEQ ID NO: 480924 - RNA, 19 nt, Artificial Sequence
  Description of Artificial Sequence: Synthetic oligonucleotide
gauucacuaguguagcgga

SEQ ID NO: 480925 - RNA, 19 nt, Artificial Sequence
  Description of Artificial Sequence: Synthetic oligonucleotide
uucaccuccacgccuaccu

SEQ ID NO: 480926 - RNA, 19 nt, Artificial Sequence
  Description of Artificial Sequence: Synthetic oligonucleotide
aguaaugggacgaaagagu

SEQ ID NO: 480927 - RNA, 19 nt, Artificial Sequence
  Description of Artificial Sequence: Synthetic oligonucleotide
uaccacgccguauagugcc

SEQ ID NO: 480928 - RNA, 19 nt, Artificial Sequence
  Description of Artificial Sequence: Synthetic oligonucleotide
uugcguaguauuuccaggu

SEQ ID NO: 480929 - RNA, 19 nt, Artificial Sequence
  Description of Artificial Sequence: Synthetic oligonucleotide
guaaugggacgaaagagug

SEQ ID NO: 480930 - RNA, 19 nt, Artificial Sequence
  Description of Artificial Sequence: Synthetic oligonucleotide
aacgaguccaauggaguag

SEQ ID NO: 480931 - RNA, 19 nt, Artificial Sequence
  Description of Artificial Sequence: Synthetic oligonucleotide
cacacaccaucuaaacugg

SEQ ID NO: 480932 - RNA, 19 nt, Artificial Sequence
  Description of Artificial Sequence: Synthetic oligonucleotide
aggaacguguucugaaaag

SEQ ID NO: 480933 - RNA, 19 nt, Artificial Sequence
  Description of Artificial Sequence: Synthetic oligonucleotide
ucauaacgaguccaaugga

SEQ ID NO: 480934 - RNA, 19 nt, Artificial Sequence
  Description of Artificial Sequence: Synthetic oligonucleotide
aucaaguacucacacuccu

SEQ ID NO: 480935 - RNA, 19 nt, Artificial Sequence
  Description of Artificial Sequence: Synthetic oligonucleotide
auaccgaaucuccagcucu

SEQ ID NO: 480936 - RNA, 19 nt, Artificial Sequence
  Description of Artificial Sequence: Synthetic oligonucleotide
aaguaaacuuaugauuuau

SEQ ID NO: 480937 - RNA, 19 nt, Artificial Sequence
  Description of Artificial Sequence: Synthetic oligonucleotide
uuaggaugcacaccagcuc

SEQ ID NO: 480938 - RNA, 19 nt, Artificial Sequence
  Description of Artificial Sequence: Synthetic oligonucleotide
accaucuaaacuggggagg

SEQ ID NO: 480939 - RNA, 19 nt, Artificial Sequence
  Description of Artificial Sequence: Synthetic oligonucleotide
cacuagguagcccacugcc

SEQ ID NO: 480940 - RNA, 19 nt, Artificial Sequence
  Description of Artificial Sequence: Synthetic oligonucleotide
aaguacucacacuccuuca

SEQ ID NO: 480941 - RNA, 19 nt, Artificial Sequence
  Description of Artificial Sequence: Synthetic oligonucleotide
uaaacggcaccuucaagau

SEQ ID NO: 480942 - RNA, 19 nt, Artificial Sequence
  Description of Artificial Sequence: Synthetic oligonucleotide
aggguugccccuucugcgc

SEQ ID NO: 480943 - RNA, 19 nt, Artificial Sequence
  Description of Artificial Sequence: Synthetic oligonucleotide
ugcacuagguagcccacug

SEQ ID NO: 480944 - RNA, 19 nt, Artificial Sequence
  Description of Artificial Sequence: Synthetic oligonucleotide
acaguuguauccauaccuc

SEQ ID NO: 480945 - RNA, 19 nt, Artificial Sequence
  Description of Artificial Sequence: Synthetic oligonucleotide
acgaguccaauggaguagc

SEQ ID NO: 480946 - RNA, 19 nt, Artificial Sequence
  Description of Artificial Sequence: Synthetic oligonucleotide
agccuuggugaagaaacgc

SEQ ID NO: 480947 - RNA, 19 nt, Artificial Sequence
  Description of Artificial Sequence: Synthetic oligonucleotide
ucaaugugcucuagugugu

SEQ ID NO: 480948 - RNA, 19 nt, Artificial Sequence
  Description of Artificial Sequence: Synthetic oligonucleotide
uguagucgaagauguccag

SEQ ID NO: 480949 - RNA, 19 nt, Artificial Sequence
  Description of Artificial Sequence: Synthetic oligonucleotide
gugaacauucauguuucgg

SEQ ID NO: 480950 - RNA, 19 nt, Artificial Sequence
  Description of Artificial Sequence: Synthetic oligonucleotide
agcaucuauguagauguag

SEQ ID NO: 480951 - RNA, 19 nt, Artificial Sequence
  Description of Artificial Sequence: Synthetic oligonucleotide
ucaagauaggacucauaau

SEQ ID NO: 480952 - RNA, 19 nt, Artificial Sequence
  Description of Artificial Sequence: Synthetic oligonucleotide
cuccucuaaccaauugacg

SEQ ID NO: 480953 - RNA, 19 nt, Artificial Sequence
  Description of Artificial Sequence: Synthetic oligonucleotide
cugcauuugggauguagug

SEQ ID NO: 480954 - RNA, 19 nt, Artificial Sequence
  Description of Artificial Sequence: Synthetic oligonucleotide
agucuacucagcagugucc

SEQ ID NO: 480955 - RNA, 19 nt, Artificial Sequence
  Description of Artificial Sequence: Synthetic oligonucleotide
cucuaaccaauugacguag

SEQ ID NO: 480956 - RNA, 19 nt, Artificial Sequence
  Description of Artificial Sequence: Synthetic oligonucleotide
uguuuaggaugcacaccag

SEQ ID NO: 480957 - RNA, 19 nt, Artificial Sequence
  Description of Artificial Sequence: Synthetic oligonucleotide
uuccgugcuucuaacccag

SEQ ID NO: 480958 - RNA, 19 nt, Artificial Sequence
  Description of Artificial Sequence: Synthetic oligonucleotide
gauguagugucugggugag

SEQ ID NO: 480959 - RNA, 19 nt, Artificial Sequence
  Description of Artificial Sequence: Synthetic oligonucleotide
uguuugcccuucccaaaag

SEQ ID NO: 480960 - RNA, 19 nt, Artificial Sequence
  Description of Artificial Sequence: Synthetic oligonucleotide
ugggacgaaagagugugag

SEQ ID NO: 480961 - RNA, 19 nt, Artificial Sequence
  Description of Artificial Sequence: Synthetic oligonucleotide
uccuucaggaauccuguuc

SEQ ID NO: 480962 - RNA, 19 nt, Artificial Sequence
  Description of Artificial Sequence: Synthetic oligonucleotide
ucggauccacucauggccc

SEQ ID NO: 480963 - RNA, 19 nt, Artificial Sequence
  Description of Artificial Sequence: Synthetic oligonucleotide
uguagcggagagcaacgcu

SEQ ID NO: 480964 - RNA, 19 nt, Artificial Sequence
  Description of Artificial Sequence: Synthetic oligonucleotide
uagucggugggacuguagu

SEQ ID NO: 480965 - RNA, 19 nt, Artificial Sequence
  Description of Artificial Sequence: Synthetic oligonucleotide
cugauucacuaguguagcg

SEQ ID NO: 480966 - RNA, 19 nt, Artificial Sequence
  Description of Artificial Sequence: Synthetic oligonucleotide
caucuauguagauguaguc

SEQ ID NO: 480967 - RNA, 19 nt, Artificial Sequence
  Description of Artificial Sequence: Synthetic oligonucleotide
gaaccguuuggagaaggag

SEQ ID NO: 480968 - RNA, 19 nt, Artificial Sequence
  Description of Artificial Sequence: Synthetic oligonucleotide
acgggacaagcagacaagc

SEQ ID NO: 480969 - RNA, 19 nt, Artificial Sequence
  Description of Artificial Sequence: Synthetic oligonucleotide
caccaucuaaacuggggag

SEQ ID NO: 480970 - RNA, 19 nt, Artificial Sequence
  Description of Artificial Sequence: Synthetic oligonucleotide
uaaugggacgaaagagugu

SEQ ID NO: 480971 - RNA, 19 nt, Artificial Sequence
  Description of Artificial Sequence: Synthetic oligonucleotide
gguuuugcacacaagcucc

SEQ ID NO: 480972 - RNA, 19 nt, Artificial Sequence
  Description of Artificial Sequence: Synthetic oligonucleotide
cauuacaaggaacguguuc

SEQ ID NO: 480973 - RNA, 19 nt, Artificial Sequence
  Description of Artificial Sequence: Synthetic oligonucleotide
agccauagaucacacaguu

SEQ ID NO: 480974 - RNA, 19 nt, Artificial Sequence
  Description of Artificial Sequence: Synthetic oligonucleotide
uucacuaguguagcggaga

SEQ ID NO: 480975 - RNA, 19 nt, Artificial Sequence
  Description of Artificial Sequence: Synthetic oligonucleotide
uaguguagcggagagcaac

SEQ ID NO: 480976 - RNA, 19 nt, Artificial Sequence
  Description of Artificial Sequence: Synthetic oligonucleotide
uuguauccauaccucuugu

SEQ ID NO: 480977 - RNA, 19 nt, Artificial Sequence
  Description of Artificial Sequence: Synthetic oligonucleotide
gaucuccggccccucaagg

SEQ ID NO: 480978 - RNA, 19 nt, Artificial Sequence
  Description of Artificial Sequence: Synthetic oligonucleotide
auagaucacacaguuguau

SEQ ID NO: 480979 - RNA, 19 nt, Artificial Sequence
  Description of Artificial Sequence: Synthetic oligonucleotide
guagucgaagauguccagg

SEQ ID NO: 480980 - RNA, 19 nt, Artificial Sequence
  Description of Artificial Sequence: Synthetic oligonucleotide
uuaccacgccguauagugc

SEQ ID NO: 480981 - RNA, 19 nt, Artificial Sequence
  Description of Artificial Sequence: Synthetic oligonucleotide
gacauaguugauggcgucc

SEQ ID NO: 480982 - RNA, 19 nt, Artificial Sequence
  Description of Artificial Sequence: Synthetic oligonucleotide
aaauaccaacuuacacggg

SEQ ID NO: 480983 - RNA, 19 nt, Artificial Sequence
  Description of Artificial Sequence: Synthetic oligonucleotide
uaacgaguccaauggagua

SEQ ID NO: 480984 - RNA, 19 nt, Artificial Sequence
  Description of Artificial Sequence: Synthetic oligonucleotide
caagcagacaagccaugcc

SEQ ID NO: 480985 - RNA, 19 nt, Artificial Sequence
  Description of Artificial Sequence: Synthetic oligonucleotide
gcugcuuaguaaugggacg

SEQ ID NO: 480986 - RNA, 19 nt, Artificial Sequence
  Description of Artificial Sequence: Synthetic oligonucleotide
cauguuuaggaugcacacc

SEQ ID NO: 480987 - RNA, 19 nt, Artificial Sequence
  Description of Artificial Sequence: Synthetic oligonucleotide
auaacgaguccaauggagu

SEQ ID NO: 480988 - RNA, 19 nt, Artificial Sequence
  Description of Artificial Sequence: Synthetic oligonucleotide
gacacggugccuuucaacu

SEQ ID NO: 480989 - RNA, 19 nt, Artificial Sequence
  Description of Artificial Sequence: Synthetic oligonucleotide
uagugccgcugucacaugc

SEQ ID NO: 480990 - RNA, 19 nt, Artificial Sequence
  Description of Artificial Sequence: Synthetic oligonucleotide
agcgccgugagggagccgc

SEQ ID NO: 480991 - RNA, 19 nt, Artificial Sequence
  Description of Artificial Sequence: Synthetic oligonucleotide
guagcggagagcaacgcug

SEQ ID NO: 480992 - RNA, 19 nt, Artificial Sequence
  Description of Artificial Sequence: Synthetic oligonucleotide
guacucacacuccuucacc

SEQ ID NO: 480993 - RNA, 19 nt, Artificial Sequence
  Description of Artificial Sequence: Synthetic oligonucleotide
aggcagacugugaacauuc

SEQ ID NO: 480994 - RNA, 19 nt, Artificial Sequence
  Description of Artificial Sequence: Synthetic oligonucleotide
uguaguaauccaugcgguu

SEQ ID NO: 480995 - RNA, 19 nt, Artificial Sequence
  Description of Artificial Sequence: Synthetic oligonucleotide
uggcugcuuaguaauggga

SEQ ID NO: 480996 - RNA, 19 nt, Artificial Sequence
  Description of Artificial Sequence: Synthetic oligonucleotide
ugcgggucaacaccuggug

SEQ ID NO: 480997 - RNA, 19 nt, Artificial Sequence
  Description of Artificial Sequence: Synthetic oligonucleotide
aucaagcaccuucaagaca

SEQ ID NO: 480998 - RNA, 19 nt, Artificial Sequence
  Description of Artificial Sequence: Synthetic oligonucleotide
uggaggacucaccugcccu

SEQ ID NO: 480999 - RNA, 19 nt, Artificial Sequence
  Description of Artificial Sequence: Synthetic oligonucleotide
aguguagcggagagcaacg

SEQ ID NO: 481000 - RNA, 19 nt, Artificial Sequence
  Description of Artificial Sequence: Synthetic oligonucleotide
aggcuacaaucuuccgugc

SEQ ID NO: 481001 - RNA, 19 nt, Artificial Sequence
  Description of Artificial Sequence: Synthetic oligonucleotide
caacuuacacgggugacac

SEQ ID NO: 481002 - RNA, 19 nt, Artificial Sequence
  Description of Artificial Sequence: Synthetic oligonucleotide
gauaccgaaucuccagcuc

SEQ ID NO: 481003 - RNA, 19 nt, Artificial Sequence
  Description of Artificial Sequence: Synthetic oligonucleotide
ugccgcugucacaugcugg

SEQ ID NO: 481004 - RNA, 19 nt, Artificial Sequence
  Description of Artificial Sequence: Synthetic oligonucleotide
ugccgcagguaauaaagaa

SEQ ID NO: 481005 - RNA, 19 nt, Artificial Sequence
  Description of Artificial Sequence: Synthetic oligonucleotide
gaugucgagcgccgugagg

SEQ ID NO: 481006 - RNA, 19 nt, Artificial Sequence
  Description of Artificial Sequence: Synthetic oligonucleotide
augucggagagaggguugc

SEQ ID NO: 481007 - RNA, 19 nt, Artificial Sequence
  Description of Artificial Sequence: Synthetic oligonucleotide
cugaaaagaaccguuugga

SEQ ID NO: 481008 - RNA, 19 nt, Artificial Sequence
  Description of Artificial Sequence: Synthetic oligonucleotide
gcuguugauaccacggagg

SEQ ID NO: 481009 - RNA, 19 nt, Artificial Sequence
  Description of Artificial Sequence: Synthetic oligonucleotide
agagacaugcugaugggga

SEQ ID NO: 481010 - RNA, 19 nt, Artificial Sequence
  Description of Artificial Sequence: Synthetic oligonucleotide
agaaagccaacaaugggaa

SEQ ID NO: 481011 - RNA, 19 nt, Artificial Sequence
  Description of Artificial Sequence: Synthetic oligonucleotide
ggucagguauagcagagac

SEQ ID NO: 481012 - RNA, 19 nt, Artificial Sequence
  Description of Artificial Sequence: Synthetic oligonucleotide
uccguggcugcuuaguaau

SEQ ID NO: 481013 - RNA, 19 nt, Artificial Sequence
  Description of Artificial Sequence: Synthetic oligonucleotide
uguuucggauccacucaug

SEQ ID NO: 481014 - RNA, 19 nt, Artificial Sequence
  Description of Artificial Sequence: Synthetic oligonucleotide
cauaucuacaggagccauc

SEQ ID NO: 481015 - RNA, 19 nt, Artificial Sequence
  Description of Artificial Sequence: Synthetic oligonucleotide
aacaccuggugcauguaga

SEQ ID NO: 481016 - RNA, 19 nt, Artificial Sequence
  Description of Artificial Sequence: Synthetic oligonucleotide
acuggucgauguaaacggc

SEQ ID NO: 481017 - RNA, 19 nt, Artificial Sequence
  Description of Artificial Sequence: Synthetic oligonucleotide
aaacgaagccuuggugaag

SEQ ID NO: 481018 - RNA, 19 nt, Artificial Sequence
  Description of Artificial Sequence: Synthetic oligonucleotide
cuggucguauaggacauag

SEQ ID NO: 481019 - RNA, 19 nt, Artificial Sequence
  Description of Artificial Sequence: Synthetic oligonucleotide
aggagaaaguggcuuggga

SEQ ID NO: 481020 - RNA, 19 nt, Artificial Sequence
  Description of Artificial Sequence: Synthetic oligonucleotide
ugccgaacuuuauacuccu

SEQ ID NO: 481021 - RNA, 19 nt, Artificial Sequence
  Description of Artificial Sequence: Synthetic oligonucleotide
ugugcucuagugugugcug

SEQ ID NO: 481022 - RNA, 19 nt, Artificial Sequence
  Description of Artificial Sequence: Synthetic oligonucleotide
cuucuaacccagcuuucug

SEQ ID NO: 481023 - RNA, 19 nt, Artificial Sequence
  Description of Artificial Sequence: Synthetic oligonucleotide
cacaguuguauccauaccu

SEQ ID NO: 481024 - RNA, 19 nt, Artificial Sequence
  Description of Artificial Sequence: Synthetic oligonucleotide
aguaauccaugcgguuccc

SEQ ID NO: 481025 - RNA, 19 nt, Artificial Sequence
  Description of Artificial Sequence: Synthetic oligonucleotide
aaagaaccguuuggagaag

SEQ ID NO: 481026 - RNA, 19 nt, Artificial Sequence
  Description of Artificial Sequence: Synthetic oligonucleotide
agccauuacaaggaacgug

SEQ ID NO: 481027 - RNA, 19 nt, Artificial Sequence
  Description of Artificial Sequence: Synthetic oligonucleotide
ucuaaccaauugacguagu

SEQ ID NO: 481028 - RNA, 19 nt, Artificial Sequence
  Description of Artificial Sequence: Synthetic oligonucleotide
cauuuaccacgccguauag

SEQ ID NO: 481029 - RNA, 19 nt, Artificial Sequence
  Description of Artificial Sequence: Synthetic oligonucleotide
gacgaaagagugugagaca

SEQ ID NO: 481030 - RNA, 19 nt, Artificial Sequence
  Description of Artificial Sequence: Synthetic oligonucleotide
ucgggcgauggucagguau

SEQ ID NO: 481031 - RNA, 19 nt, Artificial Sequence
  Description of Artificial Sequence: Synthetic oligonucleotide
auguagucgaagaugucca

SEQ ID NO: 481032 - RNA, 19 nt, Artificial Sequence
  Description of Artificial Sequence: Synthetic oligonucleotide
gcauuugggauguaguguc

SEQ ID NO: 481033 - RNA, 19 nt, Artificial Sequence
  Description of Artificial Sequence: Synthetic oligonucleotide
auaccacggaggguuuugc

SEQ ID NO: 481034 - RNA, 19 nt, Artificial Sequence
  Description of Artificial Sequence: Synthetic oligonucleotide
uagaagggcugaugguggc

SEQ ID NO: 481035 - RNA, 19 nt, Artificial Sequence
  Description of Artificial Sequence: Synthetic oligonucleotide
gauaccacggaggguuuug

SEQ ID NO: 481036 - RNA, 19 nt, Artificial Sequence
  Description of Artificial Sequence: Synthetic oligonucleotide
gaauagucacacacuguca

SEQ ID NO: 481037 - RNA, 19 nt, Artificial Sequence
  Description of Artificial Sequence: Synthetic oligonucleotide
agcacguuguagaagggcu

SEQ ID NO: 481038 - RNA, 19 nt, Artificial Sequence
  Description of Artificial Sequence: Synthetic oligonucleotide
cuuugauguuucucuacga

SEQ ID NO: 481039 - RNA, 19 nt, Artificial Sequence
  Description of Artificial Sequence: Synthetic oligonucleotide
cuuacacgggugacacagg

SEQ ID NO: 481040 - RNA, 19 nt, Artificial Sequence
  Description of Artificial Sequence: Synthetic oligonucleotide
aggauaucaagcaccuuca

SEQ ID NO: 481041 - RNA, 19 nt, Artificial Sequence
  Description of Artificial Sequence: Synthetic oligonucleotide
gacggcaggugcuggacac

SEQ ID NO: 481042 - RNA, 19 nt, Artificial Sequence
  Description of Artificial Sequence: Synthetic oligonucleotide
gaacauucauguuucggau

SEQ ID NO: 481043 - RNA, 19 nt, Artificial Sequence
  Description of Artificial Sequence: Synthetic oligonucleotide
acauccccggagucuacuc

SEQ ID NO: 481044 - RNA, 19 nt, Artificial Sequence
  Description of Artificial Sequence: Synthetic oligonucleotide
ggguuuugcacacaagcuc

SEQ ID NO: 481045 - RNA, 19 nt, Artificial Sequence
  Description of Artificial Sequence: Synthetic oligonucleotide
ggagaaaguggcuugggaa

SEQ ID NO: 481046 - RNA, 19 nt, Artificial Sequence
  Description of Artificial Sequence: Synthetic oligonucleotide
cacgggacaagcagacaag

SEQ ID NO: 481047 - RNA, 19 nt, Artificial Sequence
  Description of Artificial Sequence: Synthetic oligonucleotide
cguguucugaaaagaaccg

SEQ ID NO: 481048 - RNA, 19 nt, Artificial Sequence
  Description of Artificial Sequence: Synthetic oligonucleotide
aagccauuacaaggaacgu

SEQ ID NO: 481049 - RNA, 19 nt, Artificial Sequence
  Description of Artificial Sequence: Synthetic oligonucleotide
caacugauucacuagugua

SEQ ID NO: 481050 - RNA, 19 nt, Artificial Sequence
  Description of Artificial Sequence: Synthetic oligonucleotide
ucacauuuaccacgccgua

SEQ ID NO: 481051 - RNA, 19 nt, Artificial Sequence
  Description of Artificial Sequence: Synthetic oligonucleotide
uagcggagagcaacgcugu

SEQ ID NO: 481052 - RNA, 19 nt, Artificial Sequence
  Description of Artificial Sequence: Synthetic oligonucleotide
cuacaaucuuccgugcuuc

SEQ ID NO: 481053 - RNA, 19 nt, Artificial Sequence
  Description of Artificial Sequence: Synthetic oligonucleotide
gaugucggagagaggguug

SEQ ID NO: 481054 - RNA, 19 nt, Artificial Sequence
  Description of Artificial Sequence: Synthetic oligonucleotide
ccaaacgaagccuugguga

SEQ ID NO: 481055 - RNA, 19 nt, Artificial Sequence
  Description of Artificial Sequence: Synthetic oligonucleotide
augugcucuagugugugcu

SEQ ID NO: 481056 - RNA, 19 nt, Artificial Sequence
  Description of Artificial Sequence: Synthetic oligonucleotide
caaacgaagccuuggugaa

SEQ ID NO: 481057 - RNA, 19 nt, Artificial Sequence
  Description of Artificial Sequence: Synthetic oligonucleotide
aaacggcaccuucaagaua

SEQ ID NO: 481058 - RNA, 19 nt, Artificial Sequence
  Description of Artificial Sequence: Synthetic oligonucleotide
aacuuacacgggugacaca

SEQ ID NO: 481059 - RNA, 19 nt, Artificial Sequence
  Description of Artificial Sequence: Synthetic oligonucleotide
gaauccuguuccccuagaa

SEQ ID NO: 481060 - RNA, 19 nt, Artificial Sequence
  Description of Artificial Sequence: Synthetic oligonucleotide
caauggaguagcagacauc

SEQ ID NO: 481061 - RNA, 19 nt, Artificial Sequence
  Description of Artificial Sequence: Synthetic oligonucleotide
gagaaggaggcuacaaucu

SEQ ID NO: 481062 - RNA, 19 nt, Artificial Sequence
  Description of Artificial Sequence: Synthetic oligonucleotide
caccuucaagauaggacuc

SEQ ID NO: 481063 - RNA, 19 nt, Artificial Sequence
  Description of Artificial Sequence: Synthetic oligonucleotide
ugucgggcgauggucaggu

SEQ ID NO: 481064 - RNA, 19 nt, Artificial Sequence
  Description of Artificial Sequence: Synthetic oligonucleotide
gccaaucaaguacucacac

SEQ ID NO: 481065 - RNA, 19 nt, Artificial Sequence
  Description of Artificial Sequence: Synthetic oligonucleotide
ucgagcgccgugagggagc

SEQ ID NO: 481066 - RNA, 19 nt, Artificial Sequence
  Description of Artificial Sequence: Synthetic oligonucleotide
gggugagagauuuccugag

SEQ ID NO: 481067 - RNA, 19 nt, Artificial Sequence
  Description of Artificial Sequence: Synthetic oligonucleotide
uggucguauaggacauagu

SEQ ID NO: 481068 - RNA, 19 nt, Artificial Sequence
  Description of Artificial Sequence: Synthetic oligonucleotide
uagcccacugccccgugcu

SEQ ID NO: 481069 - RNA, 19 nt, Artificial Sequence
  Description of Artificial Sequence: Synthetic oligonucleotide
agcagcagcagcagcagca

SEQ ID NO: 481070 - RNA, 19 nt, Artificial Sequence
  Description of Artificial Sequence: Synthetic oligonucleotide
acgcggccgaugucgagcg

SEQ ID NO: 481071 - RNA, 19 nt, Artificial Sequence
  Description of Artificial Sequence: Synthetic oligonucleotide
caccacgggacaagcagac

SEQ ID NO: 481072 - RNA, 19 nt, Artificial Sequence
  Description of Artificial Sequence: Synthetic oligonucleotide
auugacguagucgguggga

SEQ ID NO: 481073 - RNA, 19 nt, Artificial Sequence
  Description of Artificial Sequence: Synthetic oligonucleotide
cuggucgauguaaacggca

SEQ ID NO: 481074 - RNA, 19 nt, Artificial Sequence
  Description of Artificial Sequence: Synthetic oligonucleotide
caaugugcucuagugugug

SEQ ID NO: 481075 - RNA, 19 nt, Artificial Sequence
  Description of Artificial Sequence: Synthetic oligonucleotide
auccauaccucuugugcuu

SEQ ID NO: 481076 - RNA, 19 nt, Artificial Sequence
  Description of Artificial Sequence: Synthetic oligonucleotide
acgccuaccuccuccuucu

SEQ ID NO: 481077 - RNA, 19 nt, Artificial Sequence
  Description of Artificial Sequence: Synthetic oligonucleotide
gacucccagcugucgggcg

SEQ ID NO: 481078 - RNA, 19 nt, Artificial Sequence
  Description of Artificial Sequence: Synthetic oligonucleotide
ugcgguucccuuugaacuu

SEQ ID NO: 481079 - RNA, 19 nt, Artificial Sequence
  Description of Artificial Sequence: Synthetic oligonucleotide
cacacacugucaccacggg

SEQ ID NO: 481080 - RNA, 19 nt, Artificial Sequence
  Description of Artificial Sequence: Synthetic oligonucleotide
gacucauaaucaucaggcu

SEQ ID NO: 481081 - RNA, 19 nt, Artificial Sequence
  Description of Artificial Sequence: Synthetic oligonucleotide
ugcuucuaacccagcuuuc

SEQ ID NO: 481082 - RNA, 19 nt, Artificial Sequence
  Description of Artificial Sequence: Synthetic oligonucleotide
gaaguuugacaggcuccag

SEQ ID NO: 481083 - RNA, 19 nt, Artificial Sequence
  Description of Artificial Sequence: Synthetic oligonucleotide
guagcagcagcagcagcag

SEQ ID NO: 481084 - RNA, 19 nt, Artificial Sequence
  Description of Artificial Sequence: Synthetic oligonucleotide
uaccacggaggguuuugca

SEQ ID NO: 481085 - RNA, 19 nt, Artificial Sequence
  Description of Artificial Sequence: Synthetic oligonucleotide
ugucacaugcuggccaauc

SEQ ID NO: 481086 - RNA, 19 nt, Artificial Sequence
  Description of Artificial Sequence: Synthetic oligonucleotide
auucacuaguguagcggag

SEQ ID NO: 481087 - RNA, 19 nt, Artificial Sequence
  Description of Artificial Sequence: Synthetic oligonucleotide
uguugauaccacggagggu

SEQ ID NO: 481088 - RNA, 19 nt, Artificial Sequence
  Description of Artificial Sequence: Synthetic oligonucleotide
uagcagcagcagcagcagc

SEQ ID NO: 481089 - RNA, 19 nt, Artificial Sequence
  Description of Artificial Sequence: Synthetic oligonucleotide
cagcacguuguagaagggc

SEQ ID NO: 481090 - RNA, 19 nt, Artificial Sequence
  Description of Artificial Sequence: Synthetic oligonucleotide
acucaccugcccugaaggu

SEQ ID NO: 481091 - RNA, 19 nt, Artificial Sequence
  Description of Artificial Sequence: Synthetic oligonucleotide
uaucuacaggagccauccu

SEQ ID NO: 481092 - RNA, 19 nt, Artificial Sequence
  Description of Artificial Sequence: Synthetic oligonucleotide
uggugaagaaacgcauuua

SEQ ID NO: 481093 - RNA, 19 nt, Artificial Sequence
  Description of Artificial Sequence: Synthetic oligonucleotide
gucggagagaggguugcag

SEQ ID NO: 481094 - RNA, 19 nt, Artificial Sequence
  Description of Artificial Sequence: Synthetic oligonucleotide
ggucguauaggacauaguu

SEQ ID NO: 481095 - RNA, 19 nt, Artificial Sequence
  Description of Artificial Sequence: Synthetic oligonucleotide
cugcuuaguaaugggacga

SEQ ID NO: 481096 - RNA, 19 nt, Artificial Sequence
  Description of Artificial Sequence: Synthetic oligonucleotide
gcuugggaaguuugacagg

SEQ ID NO: 481097 - RNA, 19 nt, Artificial Sequence
  Description of Artificial Sequence: Synthetic oligonucleotide
caaggaacguguucugaaa

SEQ ID NO: 481098 - RNA, 19 nt, Artificial Sequence
  Description of Artificial Sequence: Synthetic oligonucleotide
cacggaggguuuugcacac

SEQ ID NO: 481099 - RNA, 19 nt, Artificial Sequence
  Description of Artificial Sequence: Synthetic oligonucleotide
ggugacacaggcucccuca

SEQ ID NO: 481100 - RNA, 19 nt, Artificial Sequence
  Description of Artificial Sequence: Synthetic oligonucleotide
ucugcgccuuggcaccacc

SEQ ID NO: 481101 - RNA, 19 nt, Artificial Sequence
  Description of Artificial Sequence: Synthetic oligonucleotide
gggcccgucgccucggucg

SEQ ID NO: 481102 - RNA, 19 nt, Artificial Sequence
  Description of Artificial Sequence: Synthetic oligonucleotide
ggucgauguaaacggcacc

SEQ ID NO: 481103 - RNA, 19 nt, Artificial Sequence
  Description of Artificial Sequence: Synthetic oligonucleotide
ggaacguguucugaaaaga

SEQ ID NO: 481104 - RNA, 19 nt, Artificial Sequence
  Description of Artificial Sequence: Synthetic oligonucleotide
cagucuagguacauauuua

SEQ ID NO: 481105 - RNA, 19 nt, Artificial Sequence
  Description of Artificial Sequence: Synthetic oligonucleotide
aacagucuagguacauauu

SEQ ID NO: 481106 - RNA, 19 nt, Artificial Sequence
  Description of Artificial Sequence: Synthetic oligonucleotide
cuauguagauguagucgaa

SEQ ID NO: 481107 - RNA, 19 nt, Artificial Sequence
  Description of Artificial Sequence: Synthetic oligonucleotide
caggagaaaguggcuuggg

SEQ ID NO: 481108 - RNA, 19 nt, Artificial Sequence
  Description of Artificial Sequence: Synthetic oligonucleotide
uucugcgggucaacaccug

SEQ ID NO: 481109 - RNA, 19 nt, Artificial Sequence
  Description of Artificial Sequence: Synthetic oligonucleotide
gccaaacgaagccuuggug

SEQ ID NO: 481110 - RNA, 19 nt, Artificial Sequence
  Description of Artificial Sequence: Synthetic oligonucleotide
gggacucccagcugucggg

SEQ ID NO: 481111 - RNA, 19 nt, Artificial Sequence
  Description of Artificial Sequence: Synthetic oligonucleotide
gucgauguaaacggcaccu

SEQ ID NO: 481112 - RNA, 19 nt, Artificial Sequence
  Description of Artificial Sequence: Synthetic oligonucleotide
agcggagagcaacgcuguc

SEQ ID NO: 481113 - RNA, 19 nt, Artificial Sequence
  Description of Artificial Sequence: Synthetic oligonucleotide
ugcuuaguaaugggacgaa

SEQ ID NO: 481114 - RNA, 19 nt, Artificial Sequence
  Description of Artificial Sequence: Synthetic oligonucleotide
gagagaggguugcaguacu

SEQ ID NO: 481115 - RNA, 19 nt, Artificial Sequence
  Description of Artificial Sequence: Synthetic oligonucleotide
ccaauugacguagucggug

SEQ ID NO: 481116 - RNA, 19 nt, Artificial Sequence
  Description of Artificial Sequence: Synthetic oligonucleotide
uccccggagucuacucagc

SEQ ID NO: 481117 - RNA, 19 nt, Artificial Sequence
  Description of Artificial Sequence: Synthetic oligonucleotide
cacgccuaccuccuccuuc

SEQ ID NO: 481118 - RNA, 19 nt, Artificial Sequence
  Description of Artificial Sequence: Synthetic oligonucleotide
gucaacaccuggugcaugu

SEQ ID NO: 481119 - RNA, 19 nt, Artificial Sequence
  Description of Artificial Sequence: Synthetic oligonucleotide
ugcugccgcagguaauaaa

SEQ ID NO: 481120 - RNA, 19 nt, Artificial Sequence
  Description of Artificial Sequence: Synthetic oligonucleotide
cacgcggccgaugucgagc

SEQ ID NO: 481121 - RNA, 19 nt, Artificial Sequence
  Description of Artificial Sequence: Synthetic oligonucleotide
cgucucguacacaaacucc

SEQ ID NO: 481122 - RNA, 19 nt, Artificial Sequence
  Description of Artificial Sequence: Synthetic oligonucleotide
ggaggacucaccugcccug

SEQ ID NO: 481123 - RNA, 19 nt, Artificial Sequence
  Description of Artificial Sequence: Synthetic oligonucleotide
cauagaucacacaguugua

SEQ ID NO: 481124 - RNA, 19 nt, Artificial Sequence
  Description of Artificial Sequence: Synthetic oligonucleotide
cugucaccacgggacaagc

SEQ ID NO: 481125 - RNA, 19 nt, Artificial Sequence
  Description of Artificial Sequence: Synthetic oligonucleotide
cacuaguguagcggagagc

SEQ ID NO: 481126 - RNA, 19 nt, Artificial Sequence
  Description of Artificial Sequence: Synthetic oligonucleotide
uugauaccacggaggguuu

SEQ ID NO: 481127 - RNA, 19 nt, Artificial Sequence
  Description of Artificial Sequence: Synthetic oligonucleotide
gugcuucuaacccagcuuu

SEQ ID NO: 481128 - RNA, 19 nt, Artificial Sequence
  Description of Artificial Sequence: Synthetic oligonucleotide
ugucgagcgccgugaggga

SEQ ID NO: 481129 - RNA, 19 nt, Artificial Sequence
  Description of Artificial Sequence: Synthetic oligonucleotide
cuguuugcccuucccaaaa

SEQ ID NO: 481130 - RNA, 19 nt, Artificial Sequence
  Description of Artificial Sequence: Synthetic oligonucleotide
caccucgcgcagccgacgg

SEQ ID NO: 481131 - RNA, 19 nt, Artificial Sequence
  Description of Artificial Sequence: Synthetic oligonucleotide
gugcccaaauaccaacuua

SEQ ID NO: 481132 - RNA, 19 nt, Artificial Sequence
  Description of Artificial Sequence: Synthetic oligonucleotide
caccucgcccggcagcugc

SEQ ID NO: 481133 - RNA, 19 nt, Artificial Sequence
  Description of Artificial Sequence: Synthetic oligonucleotide
uccgugcuucuaacccagc

SEQ ID NO: 481134 - RNA, 19 nt, Artificial Sequence
  Description of Artificial Sequence: Synthetic oligonucleotide
uccacucauggcccaucau

SEQ ID NO: 481135 - RNA, 19 nt, Artificial Sequence
  Description of Artificial Sequence: Synthetic oligonucleotide
ggugcuggacacgcggccg

SEQ ID NO: 481136 - RNA, 19 nt, Artificial Sequence
  Description of Artificial Sequence: Synthetic oligonucleotide
guagucggugggacuguag

SEQ ID NO: 481137 - RNA, 19 nt, Artificial Sequence
  Description of Artificial Sequence: Synthetic oligonucleotide
guagcccacugccccgugc

SEQ ID NO: 481138 - RNA, 19 nt, Artificial Sequence
  Description of Artificial Sequence: Synthetic oligonucleotide
cguauagugccgcugucac

SEQ ID NO: 481139 - RNA, 19 nt, Artificial Sequence
  Description of Artificial Sequence: Synthetic oligonucleotide
auagugccgcugucacaug

SEQ ID NO: 481140 - RNA, 19 nt, Artificial Sequence
  Description of Artificial Sequence: Synthetic oligonucleotide
ggacacggugccuuucaac

SEQ ID NO: 481141 - RNA, 19 nt, Artificial Sequence
  Description of Artificial Sequence: Synthetic oligonucleotide
ggggaucccuguucugcgg

SEQ ID NO: 481142 - RNA, 19 nt, Artificial Sequence
  Description of Artificial Sequence: Synthetic oligonucleotide
accaauugacguagucggu

SEQ ID NO: 481143 - RNA, 19 nt, Artificial Sequence
  Description of Artificial Sequence: Synthetic oligonucleotide
ggacauaguugauggcguc

SEQ ID NO: 481144 - RNA, 19 nt, Artificial Sequence
  Description of Artificial Sequence: Synthetic oligonucleotide
cagaauagucacacacugu

SEQ ID NO: 481145 - RNA, 19 nt, Artificial Sequence
  Description of Artificial Sequence: Synthetic oligonucleotide
gccggaggagcacacacca

SEQ ID NO: 481146 - RNA, 19 nt, Artificial Sequence
  Description of Artificial Sequence: Synthetic oligonucleotide
ccaucaugcaggugggguc

SEQ ID NO: 481147 - RNA, 19 nt, Artificial Sequence
  Description of Artificial Sequence: Synthetic oligonucleotide
cuggacacggugccuuuca

SEQ ID NO: 481148 - RNA, 19 nt, Artificial Sequence
  Description of Artificial Sequence: Synthetic oligonucleotide
gucgagcgccgugagggag

SEQ ID NO: 481149 - RNA, 19 nt, Artificial Sequence
  Description of Artificial Sequence: Synthetic oligonucleotide
guguagcggagagcaacgc

SEQ ID NO: 481150 - RNA, 19 nt, Artificial Sequence
  Description of Artificial Sequence: Synthetic oligonucleotide
cauccccggagucuacuca

SEQ ID NO: 481151 - RNA, 19 nt, Artificial Sequence
  Description of Artificial Sequence: Synthetic oligonucleotide
cugcacgaggcagcugggg

SEQ ID NO: 481152 - RNA, 19 nt, Artificial Sequence
  Description of Artificial Sequence: Synthetic oligonucleotide
agcuggucguauaggacau

SEQ ID NO: 481153 - RNA, 19 nt, Artificial Sequence
  Description of Artificial Sequence: Synthetic oligonucleotide
cuuggugaagaaacgcauu

SEQ ID NO: 481154 - RNA, 19 nt, Artificial Sequence
  Description of Artificial Sequence: Synthetic oligonucleotide
gucuacucagcaguguccu

SEQ ID NO: 481155 - RNA, 19 nt, Artificial Sequence
  Description of Artificial Sequence: Synthetic oligonucleotide
cagcagcagcagcagcagc

SEQ ID NO: 481156 - RNA, 19 nt, Artificial Sequence
  Description of Artificial Sequence: Synthetic oligonucleotide
gcgggucaacaccuggugc

SEQ ID NO: 481157 - RNA, 19 nt, Artificial Sequence
  Description of Artificial Sequence: Synthetic oligonucleotide
ccgucucguacacaaacuc

SEQ ID NO: 481158 - RNA, 19 nt, Artificial Sequence
  Description of Artificial Sequence: Synthetic oligonucleotide
ggccaugaggcagacugug

SEQ ID NO: 481159 - RNA, 19 nt, Artificial Sequence
  Description of Artificial Sequence: Synthetic oligonucleotide
gcacuagguagcccacugc

SEQ ID NO: 481160 - RNA, 19 nt, Artificial Sequence
  Description of Artificial Sequence: Synthetic oligonucleotide
cucgcccggcagcugcacg

SEQ ID NO: 481161 - RNA, 19 nt, Artificial Sequence
  Description of Artificial Sequence: Synthetic oligonucleotide
ugucggagagaggguugca

SEQ ID NO: 481162 - RNA, 19 nt, Artificial Sequence
  Description of Artificial Sequence: Synthetic oligonucleotide
acggcaggugcuggacacg

SEQ ID NO: 481163 - RNA, 19 nt, Artificial Sequence
  Description of Artificial Sequence: Synthetic oligonucleotide
cagggagggccaccucacc

SEQ ID NO: 481164 - RNA, 19 nt, Artificial Sequence
  Description of Artificial Sequence: Synthetic oligonucleotide
guaguauuuccaggucaaa

SEQ ID NO: 481165 - RNA, 19 nt, Artificial Sequence
  Description of Artificial Sequence: Synthetic oligonucleotide
accacgccguauagugccg

SEQ ID NO: 481166 - RNA, 19 nt, Artificial Sequence
  Description of Artificial Sequence: Synthetic oligonucleotide
acacgcggccgaugucgag

SEQ ID NO: 481167 - RNA, 19 nt, Artificial Sequence
  Description of Artificial Sequence: Synthetic oligonucleotide
cagcugucgggcgaugguc

SEQ ID NO: 481168 - RNA, 19 nt, Artificial Sequence
  Description of Artificial Sequence: Synthetic oligonucleotide
ggaggguuuugcacacaag

SEQ ID NO: 481169 - RNA, 19 nt, Artificial Sequence
  Description of Artificial Sequence: Synthetic oligonucleotide
cugucgggcgauggucagg

SEQ ID NO: 481170 - RNA, 19 nt, Artificial Sequence
  Description of Artificial Sequence: Synthetic oligonucleotide
ggauaucaagcaccuucaa

SEQ ID NO: 481171 - RNA, 19 nt, Artificial Sequence
  Description of Artificial Sequence: Synthetic oligonucleotide
aagcaucuauguagaugua

SEQ ID NO: 481172 - RNA, 19 nt, Artificial Sequence
  Description of Artificial Sequence: Synthetic oligonucleotide
gcacguuguagaagggcug

SEQ ID NO: 481173 - RNA, 19 nt, Artificial Sequence
  Description of Artificial Sequence: Synthetic oligonucleotide
gcagguaauaaagaauuuu

SEQ ID NO: 481174 - RNA, 19 nt, Artificial Sequence
  Description of Artificial Sequence: Synthetic oligonucleotide
guucugcgggucaacaccu

SEQ ID NO: 481175 - RNA, 19 nt, Artificial Sequence
  Description of Artificial Sequence: Synthetic oligonucleotide
gcagcagcagcagcagcag

SEQ ID NO: 481176 - RNA, 19 nt, Artificial Sequence
  Description of Artificial Sequence: Synthetic oligonucleotide
acgccguauagugccgcug

SEQ ID NO: 481177 - RNA, 19 nt, Artificial Sequence
  Description of Artificial Sequence: Synthetic oligonucleotide
acgaagccuuggugaagaa

SEQ ID NO: 481178 - RNA, 19 nt, Artificial Sequence
  Description of Artificial Sequence: Synthetic oligonucleotide
gcugucgggcgauggucag

SEQ ID NO: 481179 - RNA, 19 nt, Artificial Sequence
  Description of Artificial Sequence: Synthetic oligonucleotide
ccucuaaccaauugacgua

SEQ ID NO: 481180 - RNA, 19 nt, Artificial Sequence
  Description of Artificial Sequence: Synthetic oligonucleotide
augggacgaaagaguguga

SEQ ID NO: 481181 - RNA, 19 nt, Artificial Sequence
  Description of Artificial Sequence: Synthetic oligonucleotide
ccaacuuacacgggugaca

SEQ ID NO: 481182 - RNA, 19 nt, Artificial Sequence
  Description of Artificial Sequence: Synthetic oligonucleotide
gacacgcggccgaugucga

SEQ ID NO: 481183 - RNA, 19 nt, Artificial Sequence
  Description of Artificial Sequence: Synthetic oligonucleotide
gccgaugucgagcgccgug

SEQ ID NO: 481184 - RNA, 19 nt, Artificial Sequence
  Description of Artificial Sequence: Synthetic oligonucleotide
gcuacaaucuuccgugcuu

SEQ ID NO: 481185 - RNA, 19 nt, Artificial Sequence
  Description of Artificial Sequence: Synthetic oligonucleotide
accacgggacaagcagaca

SEQ ID NO: 481186 - RNA, 19 nt, Artificial Sequence
  Description of Artificial Sequence: Synthetic oligonucleotide
ggucaacaccuggugcaug

SEQ ID NO: 481187 - RNA, 19 nt, Artificial Sequence
  Description of Artificial Sequence: Synthetic oligonucleotide
gcccaaauaccaacuuaca

SEQ ID NO: 481188 - RNA, 19 nt, Artificial Sequence
  Description of Artificial Sequence: Synthetic oligonucleotide
gggcgauggucagguauag

SEQ ID NO: 481189 - RNA, 19 nt, Artificial Sequence
  Description of Artificial Sequence: Synthetic oligonucleotide
ggcuacaaucuuccgugcu

SEQ ID NO: 481190 - RNA, 19 nt, Artificial Sequence
  Description of Artificial Sequence: Synthetic oligonucleotide
cgggucaacaccuggugca

SEQ ID NO: 481191 - RNA, 19 nt, Artificial Sequence
  Description of Artificial Sequence: Synthetic oligonucleotide
gguauagcagagacaugcu

SEQ ID NO: 481192 - RNA, 19 nt, Artificial Sequence
  Description of Artificial Sequence: Synthetic oligonucleotide
ccaaucaaguacucacacu

SEQ ID NO: 481193 - RNA, 19 nt, Artificial Sequence
  Description of Artificial Sequence: Synthetic oligonucleotide
cugcgggucaacaccuggu

SEQ ID NO: 481194 - RNA, 19 nt, Artificial Sequence
  Description of Artificial Sequence: Synthetic oligonucleotide
uucugcgccuuggcaccac

SEQ ID NO: 481195 - RNA, 19 nt, Artificial Sequence
  Description of Artificial Sequence: Synthetic oligonucleotide
gccaccucacccggaacug

SEQ ID NO: 481196 - RNA, 19 nt, Artificial Sequence
  Description of Artificial Sequence: Synthetic oligonucleotide
ggccggaggagcacacacc

SEQ ID NO: 481197 - RNA, 19 nt, Artificial Sequence
  Description of Artificial Sequence: Synthetic oligonucleotide
ggaguucuauuuccauuau

SEQ ID NO: 481198 - RNA, 19 nt, Artificial Sequence
  Description of Artificial Sequence: Synthetic oligonucleotide
cacauuuaccacgccguau

SEQ ID NO: 481199 - RNA, 19 nt, Artificial Sequence
  Description of Artificial Sequence: Synthetic oligonucleotide
ccccuagaaggcaguagca

SEQ ID NO: 481200 - RNA, 19 nt, Artificial Sequence
  Description of Artificial Sequence: Synthetic oligonucleotide
ggugcauguagagguucaa

SEQ ID NO: 481201 - RNA, 19 nt, Artificial Sequence
  Description of Artificial Sequence: Synthetic oligonucleotide
acggaggguuuugcacaca

SEQ ID NO: 481202 - RNA, 19 nt, Artificial Sequence
  Description of Artificial Sequence: Synthetic oligonucleotide
ggcccgucgccucggucgc

SEQ ID NO: 481203 - RNA, 19 nt, Artificial Sequence
  Description of Artificial Sequence: Synthetic oligonucleotide
ccguggcugcuuaguaaug

SEQ ID NO: 481204 - RNA, 19 nt, Artificial Sequence
  Description of Artificial Sequence: Synthetic oligonucleotide
gcgguucccuuugaacuuc

SEQ ID NO: 481205 - RNA, 19 nt, Artificial Sequence
  Description of Artificial Sequence: Synthetic oligonucleotide
ccguauagugccgcuguca

SEQ ID NO: 481206 - RNA, 19 nt, Artificial Sequence
  Description of Artificial Sequence: Synthetic oligonucleotide
ggagucuacucagcagugu

SEQ ID NO: 481207 - RNA, 19 nt, Artificial Sequence
  Description of Artificial Sequence: Synthetic oligonucleotide
cagcagcagcagcagcaaa

SEQ ID NO: 481208 - RNA, 19 nt, Artificial Sequence
  Description of Artificial Sequence: Synthetic oligonucleotide
cuucugcgccuuggcacca

SEQ ID NO: 481209 - RNA, 19 nt, Artificial Sequence
  Description of Artificial Sequence: Synthetic oligonucleotide
gggaccagcacucguccuu

SEQ ID NO: 481210 - RNA, 19 nt, Artificial Sequence
  Description of Artificial Sequence: Synthetic oligonucleotide
gcagcagcagcagcagcaa

SEQ ID NO: 481211 - RNA, 19 nt, Artificial Sequence
  Description of Artificial Sequence: Synthetic oligonucleotide
cgaugucgagcgccgugag

SEQ ID NO: 481212 - RNA, 19 nt, Artificial Sequence
  Description of Artificial Sequence: Synthetic oligonucleotide
gcauaucuacaggagccau

SEQ ID NO: 481213 - RNA, 19 nt, Artificial Sequence
  Description of Artificial Sequence: Synthetic oligonucleotide
cacgccguauagugccgcu

SEQ ID NO: 481214 - RNA, 19 nt, Artificial Sequence
  Description of Artificial Sequence: Synthetic oligonucleotide
ggaucccuguucugcgggu

SEQ ID NO: 481215 - RNA, 19 nt, Artificial Sequence
  Description of Artificial Sequence: Synthetic oligonucleotide
gcuucauaacgaguccaau

SEQ ID NO: 481216 - RNA, 19 nt, Artificial Sequence
  Description of Artificial Sequence: Synthetic oligonucleotide
gccgacggcaggugcugga

SEQ ID NO: 481217 - RNA, 19 nt, Artificial Sequence
  Description of Artificial Sequence: Synthetic oligonucleotide
cugcgccuuggcaccaccu

SEQ ID NO: 481218 - RNA, 19 nt, Artificial Sequence
  Description of Artificial Sequence: Synthetic oligonucleotide
cuccggccccucaagguuu

SEQ ID NO: 481219 - RNA, 19 nt, Artificial Sequence
  Description of Artificial Sequence: Synthetic oligonucleotide
gccgaacuuuauacuccuc

SEQ ID NO: 481220 - RNA, 19 nt, Artificial Sequence
  Description of Artificial Sequence: Synthetic oligonucleotide
cagcugcacgaggcagcug

SEQ ID NO: 481221 - RNA, 19 nt, Artificial Sequence
  Description of Artificial Sequence: Synthetic oligonucleotide
ccgcugucacaugcuggcc

SEQ ID NO: 481222 - RNA, 19 nt, Artificial Sequence
  Description of Artificial Sequence: Synthetic oligonucleotide
ggacauccccggagucuac

SEQ ID NO: 481223 - RNA, 19 nt, Artificial Sequence
  Description of Artificial Sequence: Synthetic oligonucleotide
gcgcucaaugugcucuagu

SEQ ID NO: 481224 - RNA, 19 nt, Artificial Sequence
  Description of Artificial Sequence: Synthetic oligonucleotide
ccgugcuucuaacccagcu

SEQ ID NO: 481225 - RNA, 19 nt, Artificial Sequence
  Description of Artificial Sequence: Synthetic oligonucleotide
gccccucaagguuuucaau

SEQ ID NO: 481226 - RNA, 19 nt, Artificial Sequence
  Description of Artificial Sequence: Synthetic oligonucleotide
gguugccccuucugcgccu

SEQ ID NO: 481227 - RNA, 19 nt, Artificial Sequence
  Description of Artificial Sequence: Synthetic oligonucleotide
cgggcgauggucagguaua

SEQ ID NO: 481228 - RNA, 19 nt, Artificial Sequence
  Description of Artificial Sequence: Synthetic oligonucleotide
cgucgccucggucgcggcc

SEQ ID NO: 481229 - RNA, 19 nt, Artificial Sequence
  Description of Artificial Sequence: Synthetic oligonucleotide
cugcaccgucucguacaca

SEQ ID NO: 481230 - RNA, 19 nt, Artificial Sequence
  Description of Artificial Sequence: Synthetic oligonucleotide
ccgugagggagccgcugca

SEQ ID NO: 481231 - RNA, 19 nt, Artificial Sequence
  Description of Artificial Sequence: Synthetic oligonucleotide
cgaguccaauggaguagca

SEQ ID NO: 481232 - RNA, 19 nt, Artificial Sequence
  Description of Artificial Sequence: Synthetic oligonucleotide
cgugcuucuaacccagcuu

SEQ ID NO: 481233 - RNA, 19 nt, Artificial Sequence
  Description of Artificial Sequence: Synthetic oligonucleotide
gucgggcgauggucaggua

SEQ ID NO: 481234 - RNA, 19 nt, Artificial Sequence
  Description of Artificial Sequence: Synthetic oligonucleotide
ggggcccgucgccucgguc

SEQ ID NO: 481235 - RNA, 19 nt, Artificial Sequence
  Description of Artificial Sequence: Synthetic oligonucleotide
gcuggucguauaggacaua

SEQ ID NO: 481236 - RNA, 19 nt, Artificial Sequence
  Description of Artificial Sequence: Synthetic oligonucleotide
ccgucgccucggucgcggc

SEQ ID NO: 481237 - RNA, 19 nt, Artificial Sequence
  Description of Artificial Sequence: Synthetic oligonucleotide
ggauccacucauggcccau

SEQ ID NO: 481238 - RNA, 19 nt, Artificial Sequence
  Description of Artificial Sequence: Synthetic oligonucleotide
ggaggauaucaagcaccuu

SEQ ID NO: 481239 - RNA, 19 nt, Artificial Sequence
  Description of Artificial Sequence: Synthetic oligonucleotide
gcccgucgccucggucgcg

SEQ ID NO: 481240 - RNA, 19 nt, Artificial Sequence
  Description of Artificial Sequence: Synthetic oligonucleotide
ccggaggagcacacaccau

SEQ ID NO: 481241 - RNA, 19 nt, Artificial Sequence
  Description of Artificial Sequence: Synthetic oligonucleotide
gcgccgugagggagccgcu

SEQ ID NO: 481242 - RNA, 19 nt, Artificial Sequence
  Description of Artificial Sequence: Synthetic oligonucleotide
ccacgccuaccuccuccuu

SEQ ID NO: 481243 - RNA, 19 nt, Artificial Sequence
  Description of Artificial Sequence: Synthetic oligonucleotide
cggugccuuucaacugauu

SEQ ID NO: 481244 - RNA, 19 nt, Artificial Sequence
  Description of Artificial Sequence: Synthetic oligonucleotide
ugaugcaucaauuuuauag

SEQ ID NO: 481245 - RNA, 19 nt, Artificial Sequence
  Description of Artificial Sequence: Synthetic oligonucleotide
aaugaguacauuugguagg

SEQ ID NO: 481246 - RNA, 19 nt, Artificial Sequence
  Description of Artificial Sequence: Synthetic oligonucleotide
aacaaccuucaauaggccc

SEQ ID NO: 481247 - RNA, 19 nt, Artificial Sequence
  Description of Artificial Sequence: Synthetic oligonucleotide
aauacguugagcacaaggg

SEQ ID NO: 481248 - RNA, 19 nt, Artificial Sequence
  Description of Artificial Sequence: Synthetic oligonucleotide
aacacgauggaaacgauuc

SEQ ID NO: 481249 - RNA, 19 nt, Artificial Sequence
  Description of Artificial Sequence: Synthetic oligonucleotide
aaacuacgaaaggagaagc

SEQ ID NO: 481250 - RNA, 19 nt, Artificial Sequence
  Description of Artificial Sequence: Synthetic oligonucleotide
cauacauacacugaggccc

SEQ ID NO: 481251 - RNA, 19 nt, Artificial Sequence
  Description of Artificial Sequence: Synthetic oligonucleotide
gaauacguugagcacaagg

SEQ ID NO: 481252 - RNA, 19 nt, Artificial Sequence
  Description of Artificial Sequence: Synthetic oligonucleotide
aaacgauucuuaaauuacc

SEQ ID NO: 481253 - RNA, 19 nt, Artificial Sequence
  Description of Artificial Sequence: Synthetic oligonucleotide
uucuuaaauuaccucagcc

SEQ ID NO: 481254 - RNA, 19 nt, Artificial Sequence
  Description of Artificial Sequence: Synthetic oligonucleotide
aucacauacauacacugag

SEQ ID NO: 481255 - RNA, 19 nt, Artificial Sequence
  Description of Artificial Sequence: Synthetic oligonucleotide
aguaagugaggcgugaggc

SEQ ID NO: 481256 - RNA, 19 nt, Artificial Sequence
  Description of Artificial Sequence: Synthetic oligonucleotide
aauuaccucagccagucgu

SEQ ID NO: 481257 - RNA, 19 nt, Artificial Sequence
  Description of Artificial Sequence: Synthetic oligonucleotide
uuugguaggcgccauagca

SEQ ID NO: 481258 - RNA, 19 nt, Artificial Sequence
  Description of Artificial Sequence: Synthetic oligonucleotide
auacguugagcacaagggc

SEQ ID NO: 481259 - RNA, 19 nt, Artificial Sequence
  Description of Artificial Sequence: Synthetic oligonucleotide
ugcacaaugaguacauuug

SEQ ID NO: 481260 - RNA, 19 nt, Artificial Sequence
  Description of Artificial Sequence: Synthetic oligonucleotide
acauacauacacugaggcc

SEQ ID NO: 481261 - RNA, 19 nt, Artificial Sequence
  Description of Artificial Sequence: Synthetic oligonucleotide
aaaacuucacuugcgcugg

SEQ ID NO: 481262 - RNA, 19 nt, Artificial Sequence
  Description of Artificial Sequence: Synthetic oligonucleotide
uagcaagcaacgaacaacc

SEQ ID NO: 481263 - RNA, 19 nt, Artificial Sequence
  Description of Artificial Sequence: Synthetic oligonucleotide
ugaauacucacuuuauuaa

SEQ ID NO: 481264 - RNA, 19 nt, Artificial Sequence
  Description of Artificial Sequence: Synthetic oligonucleotide
ucaaacaagcgccagccca

SEQ ID NO: 481265 - RNA, 19 nt, Artificial Sequence
  Description of Artificial Sequence: Synthetic oligonucleotide
acuacgaaaggagaagcgc

SEQ ID NO: 481266 - RNA, 19 nt, Artificial Sequence
  Description of Artificial Sequence: Synthetic oligonucleotide
cauagcaacagcuguuugg

SEQ ID NO: 481267 - RNA, 19 nt, Artificial Sequence
  Description of Artificial Sequence: Synthetic oligonucleotide
ugaaacuacgaaaggagaa

SEQ ID NO: 481268 - RNA, 19 nt, Artificial Sequence
  Description of Artificial Sequence: Synthetic oligonucleotide
cuggaauacacucacggag

SEQ ID NO: 481269 - RNA, 19 nt, Artificial Sequence
  Description of Artificial Sequence: Synthetic oligonucleotide
uguugcgccacacaagagc

SEQ ID NO: 481270 - RNA, 19 nt, Artificial Sequence
  Description of Artificial Sequence: Synthetic oligonucleotide
aacgaacaaccuucaauag

SEQ ID NO: 481271 - RNA, 19 nt, Artificial Sequence
  Description of Artificial Sequence: Synthetic oligonucleotide
gguagcaacggguacaacg

SEQ ID NO: 481272 - RNA, 19 nt, Artificial Sequence
  Description of Artificial Sequence: Synthetic oligonucleotide
auaagcauaccgugucacc

SEQ ID NO: 481273 - RNA, 19 nt, Artificial Sequence
  Description of Artificial Sequence: Synthetic oligonucleotide
acgaacaaccuucaauagg

SEQ ID NO: 481274 - RNA, 19 nt, Artificial Sequence
  Description of Artificial Sequence: Synthetic oligonucleotide
gaaacuacgaaaggagaag

SEQ ID NO: 481275 - RNA, 19 nt, Artificial Sequence
  Description of Artificial Sequence: Synthetic oligonucleotide
caagacgggaguaagugag

SEQ ID NO: 481276 - RNA, 19 nt, Artificial Sequence
  Description of Artificial Sequence: Synthetic oligonucleotide
auuguugcgccacacaaga

SEQ ID NO: 481277 - RNA, 19 nt, Artificial Sequence
  Description of Artificial Sequence: Synthetic oligonucleotide
gaaacgauucuuaaauuac

SEQ ID NO: 481278 - RNA, 19 nt, Artificial Sequence
  Description of Artificial Sequence: Synthetic oligonucleotide
aauccgggaagccuggcug

SEQ ID NO: 481279 - RNA, 19 nt, Artificial Sequence
  Description of Artificial Sequence: Synthetic oligonucleotide
ugugguagagccacguggc

SEQ ID NO: 481280 - RNA, 19 nt, Artificial Sequence
  Description of Artificial Sequence: Synthetic oligonucleotide
ucgagcuccugccaaaucc

SEQ ID NO: 481281 - RNA, 19 nt, Artificial Sequence
  Description of Artificial Sequence: Synthetic oligonucleotide
aagagguugaggcacuggu

SEQ ID NO: 481282 - RNA, 19 nt, Artificial Sequence
  Description of Artificial Sequence: Synthetic oligonucleotide
aaguaucgcagacagcccu

SEQ ID NO: 481283 - RNA, 19 nt, Artificial Sequence
  Description of Artificial Sequence: Synthetic oligonucleotide
cuucaauaggcccacuggc

SEQ ID NO: 481284 - RNA, 19 nt, Artificial Sequence
  Description of Artificial Sequence: Synthetic oligonucleotide
guauucauggcuucacuug

SEQ ID NO: 481285 - RNA, 19 nt, Artificial Sequence
  Description of Artificial Sequence: Synthetic oligonucleotide
ggauagaauacguugagca

SEQ ID NO: 481286 - RNA, 19 nt, Artificial Sequence
  Description of Artificial Sequence: Synthetic oligonucleotide
acucugagauaccagagga

SEQ ID NO: 481287 - RNA, 19 nt, Artificial Sequence
  Description of Artificial Sequence: Synthetic oligonucleotide
gguguguggguauucaugg

SEQ ID NO: 481288 - RNA, 19 nt, Artificial Sequence
  Description of Artificial Sequence: Synthetic oligonucleotide
uggaauacacucacggagu

SEQ ID NO: 481289 - RNA, 19 nt, Artificial Sequence
  Description of Artificial Sequence: Synthetic oligonucleotide
aaugguugaugacagcaua

SEQ ID NO: 481290 - RNA, 19 nt, Artificial Sequence
  Description of Artificial Sequence: Synthetic oligonucleotide
acggagagccccuguaucc

SEQ ID NO: 481291 - RNA, 19 nt, Artificial Sequence
  Description of Artificial Sequence: Synthetic oligonucleotide
ugaggcgugaggcaggaac

SEQ ID NO: 481292 - RNA, 19 nt, Artificial Sequence
  Description of Artificial Sequence: Synthetic oligonucleotide
aacuacgaaaggagaagcg

SEQ ID NO: 481293 - RNA, 19 nt, Artificial Sequence
  Description of Artificial Sequence: Synthetic oligonucleotide
gugugguagagccacgugg

SEQ ID NO: 481294 - RNA, 19 nt, Artificial Sequence
  Description of Artificial Sequence: Synthetic oligonucleotide
cuaacacaaacuccuguag

SEQ ID NO: 481295 - RNA, 19 nt, Artificial Sequence
  Description of Artificial Sequence: Synthetic oligonucleotide
ugugauuccaaggccauac

SEQ ID NO: 481296 - RNA, 19 nt, Artificial Sequence
  Description of Artificial Sequence: Synthetic oligonucleotide
acacucacggaguaucggg

SEQ ID NO: 481297 - RNA, 19 nt, Artificial Sequence
  Description of Artificial Sequence: Synthetic oligonucleotide
gucauagcuaggcagcugc

SEQ ID NO: 481298 - RNA, 19 nt, Artificial Sequence
  Description of Artificial Sequence: Synthetic oligonucleotide
ugcccauauacggagagcc

SEQ ID NO: 481299 - RNA, 19 nt, Artificial Sequence
  Description of Artificial Sequence: Synthetic oligonucleotide
ucgucuaccguugucacug

SEQ ID NO: 481300 - RNA, 19 nt, Artificial Sequence
  Description of Artificial Sequence: Synthetic oligonucleotide
cagaucucccaucacauac

SEQ ID NO: 481301 - RNA, 19 nt, Artificial Sequence
  Description of Artificial Sequence: Synthetic oligonucleotide
gaguaagugaggcgugagg

SEQ ID NO: 481302 - RNA, 19 nt, Artificial Sequence
  Description of Artificial Sequence: Synthetic oligonucleotide
uuccgaacaggaaacucca

SEQ ID NO: 481303 - RNA, 19 nt, Artificial Sequence
  Description of Artificial Sequence: Synthetic oligonucleotide
aaauuaccucagccagucg

SEQ ID NO: 481304 - RNA, 19 nt, Artificial Sequence
  Description of Artificial Sequence: Synthetic oligonucleotide
auacagaacuugcucaagu

SEQ ID NO: 481305 - RNA, 19 nt, Artificial Sequence
  Description of Artificial Sequence: Synthetic oligonucleotide
agauagggaugcuggguac

SEQ ID NO: 481306 - RNA, 19 nt, Artificial Sequence
  Description of Artificial Sequence: Synthetic oligonucleotide
ggcuggaauacacucacgg

SEQ ID NO: 481307 - RNA, 19 nt, Artificial Sequence
  Description of Artificial Sequence: Synthetic oligonucleotide
ucaggccgaguaaagaggu

SEQ ID NO: 481308 - RNA, 19 nt, Artificial Sequence
  Description of Artificial Sequence: Synthetic oligonucleotide
aauuccacuggugcuaggu

SEQ ID NO: 481309 - RNA, 19 nt, Artificial Sequence
  Description of Artificial Sequence: Synthetic oligonucleotide
uagaauacguugagcacaa

SEQ ID NO: 481310 - RNA, 19 nt, Artificial Sequence
  Description of Artificial Sequence: Synthetic oligonucleotide
ucugagauaccagaggaua

SEQ ID NO: 481311 - RNA, 19 nt, Artificial Sequence
  Description of Artificial Sequence: Synthetic oligonucleotide
ugauugcugcuuccgcugg

SEQ ID NO: 481312 - RNA, 19 nt, Artificial Sequence
  Description of Artificial Sequence: Synthetic oligonucleotide
cgaacaaccuucaauaggc

SEQ ID NO: 481313 - RNA, 19 nt, Artificial Sequence
  Description of Artificial Sequence: Synthetic oligonucleotide
cauacccuaggauauucug

SEQ ID NO: 481314 - RNA, 19 nt, Artificial Sequence
  Description of Artificial Sequence: Synthetic oligonucleotide
agacgggaguaagugaggc

SEQ ID NO: 481315 - RNA, 19 nt, Artificial Sequence
  Description of Artificial Sequence: Synthetic oligonucleotide
cucucacuagcaagcaacg

SEQ ID NO: 481316 - RNA, 19 nt, Artificial Sequence
  Description of Artificial Sequence: Synthetic oligonucleotide
caacgaacaaccuucaaua

SEQ ID NO: 481317 - RNA, 19 nt, Artificial Sequence
  Description of Artificial Sequence: Synthetic oligonucleotide
accaacuggagcucagaag

SEQ ID NO: 481318 - RNA, 19 nt, Artificial Sequence
  Description of Artificial Sequence: Synthetic oligonucleotide
cacaagaggugccugcagg

SEQ ID NO: 481319 - RNA, 19 nt, Artificial Sequence
  Description of Artificial Sequence: Synthetic oligonucleotide
guagcaacggguacaacgc

SEQ ID NO: 481320 - RNA, 19 nt, Artificial Sequence
  Description of Artificial Sequence: Synthetic oligonucleotide
uguaggcgcucauuguugc

SEQ ID NO: 481321 - RNA, 19 nt, Artificial Sequence
  Description of Artificial Sequence: Synthetic oligonucleotide
guuccgaacaggaaacucc

SEQ ID NO: 481322 - RNA, 19 nt, Artificial Sequence
  Description of Artificial Sequence: Synthetic oligonucleotide
gaagggguagccaauguuc

SEQ ID NO: 481323 - RNA, 19 nt, Artificial Sequence
  Description of Artificial Sequence: Synthetic oligonucleotide
gugcuagcacuucaggccg

SEQ ID NO: 481324 - RNA, 19 nt, Artificial Sequence
  Description of Artificial Sequence: Synthetic oligonucleotide
uaccgugucaccaccuggc

SEQ ID NO: 481325 - RNA, 19 nt, Artificial Sequence
  Description of Artificial Sequence: Synthetic oligonucleotide
uugucacgccaaaugaaac

SEQ ID NO: 481326 - RNA, 19 nt, Artificial Sequence
  Description of Artificial Sequence: Synthetic oligonucleotide
auaguggccaccaaucaug

SEQ ID NO: 481327 - RNA, 19 nt, Artificial Sequence
  Description of Artificial Sequence: Synthetic oligonucleotide
uauucugccccugcagagg

SEQ ID NO: 481328 - RNA, 19 nt, Artificial Sequence
  Description of Artificial Sequence: Synthetic oligonucleotide
aaauccgggaagccuggcu

SEQ ID NO: 481329 - RNA, 19 nt, Artificial Sequence
  Description of Artificial Sequence: Synthetic oligonucleotide
uucugauugcugcuuccgc

SEQ ID NO: 481330 - RNA, 19 nt, Artificial Sequence
  Description of Artificial Sequence: Synthetic oligonucleotide
cacacaagagccaggcuac

SEQ ID NO: 481331 - RNA, 19 nt, Artificial Sequence
  Description of Artificial Sequence: Synthetic oligonucleotide
accacuacccgcuccuuag

SEQ ID NO: 481332 - RNA, 19 nt, Artificial Sequence
  Description of Artificial Sequence: Synthetic oligonucleotide
ucgggcauagccuucuagu

SEQ ID NO: 481333 - RNA, 19 nt, Artificial Sequence
  Description of Artificial Sequence: Synthetic oligonucleotide
auaccgugucaccaccugg

SEQ ID NO: 481334 - RNA, 19 nt, Artificial Sequence
  Description of Artificial Sequence: Synthetic oligonucleotide
cauuguugcgccacacaag

SEQ ID NO: 481335 - RNA, 19 nt, Artificial Sequence
  Description of Artificial Sequence: Synthetic oligonucleotide
agaggauagaauacguuga

SEQ ID NO: 481336 - RNA, 19 nt, Artificial Sequence
  Description of Artificial Sequence: Synthetic oligonucleotide
ugggcucccgagcaaaaug

SEQ ID NO: 481337 - RNA, 19 nt, Artificial Sequence
  Description of Artificial Sequence: Synthetic oligonucleotide
ucgcagacagcccucgucu

SEQ ID NO: 481338 - RNA, 19 nt, Artificial Sequence
  Description of Artificial Sequence: Synthetic oligonucleotide
gacgggaguaagugaggcg

SEQ ID NO: 481339 - RNA, 19 nt, Artificial Sequence
  Description of Artificial Sequence: Synthetic oligonucleotide
ugguagagccacguggcgg

SEQ ID NO: 481340 - RNA, 19 nt, Artificial Sequence
  Description of Artificial Sequence: Synthetic oligonucleotide
aucgcagacagcccucguc

SEQ ID NO: 481341 - RNA, 19 nt, Artificial Sequence
  Description of Artificial Sequence: Synthetic oligonucleotide
acgguagaagagcacauaa

SEQ ID NO: 481342 - RNA, 19 nt, Artificial Sequence
  Description of Artificial Sequence: Synthetic oligonucleotide
caaacaagcgccagcccac

SEQ ID NO: 481343 - RNA, 19 nt, Artificial Sequence
  Description of Artificial Sequence: Synthetic oligonucleotide
auggacacauacccuagga

SEQ ID NO: 481344 - RNA, 19 nt, Artificial Sequence
  Description of Artificial Sequence: Synthetic oligonucleotide
aagcgcuuuagcugcacaa

SEQ ID NO: 481345 - RNA, 19 nt, Artificial Sequence
  Description of Artificial Sequence: Synthetic oligonucleotide
uccgccgacgguagaagag

SEQ ID NO: 481346 - RNA, 19 nt, Artificial Sequence
  Description of Artificial Sequence: Synthetic oligonucleotide
aggccuuuguggucaggcc

SEQ ID NO: 481347 - RNA, 19 nt, Artificial Sequence
  Description of Artificial Sequence: Synthetic oligonucleotide
gucauugaucuugucacgc

SEQ ID NO: 481348 - RNA, 19 nt, Artificial Sequence
  Description of Artificial Sequence: Synthetic oligonucleotide
aaauuccacuggugcuagg

SEQ ID NO: 481349 - RNA, 19 nt, Artificial Sequence
  Description of Artificial Sequence: Synthetic oligonucleotide
cauaaugguugaugacagc

SEQ ID NO: 481350 - RNA, 19 nt, Artificial Sequence
  Description of Artificial Sequence: Synthetic oligonucleotide
cagguuccgaacaggaaac

SEQ ID NO: 481351 - RNA, 19 nt, Artificial Sequence
  Description of Artificial Sequence: Synthetic oligonucleotide
gguagagccacguggcggg

SEQ ID NO: 481352 - RNA, 19 nt, Artificial Sequence
  Description of Artificial Sequence: Synthetic oligonucleotide
guugcgccacacaagagcc

SEQ ID NO: 481353 - RNA, 19 nt, Artificial Sequence
  Description of Artificial Sequence: Synthetic oligonucleotide
uauacggagagccccugua

SEQ ID NO: 481354 - RNA, 19 nt, Artificial Sequence
  Description of Artificial Sequence: Synthetic oligonucleotide
uacacucacggaguaucgg

SEQ ID NO: 481355 - RNA, 19 nt, Artificial Sequence
  Description of Artificial Sequence: Synthetic oligonucleotide
gaguucuccuugcuaacac

SEQ ID NO: 481356 - RNA, 19 nt, Artificial Sequence
  Description of Artificial Sequence: Synthetic oligonucleotide
ucgguuugaugcaucaauu

SEQ ID NO: 481357 - RNA, 19 nt, Artificial Sequence
  Description of Artificial Sequence: Synthetic oligonucleotide
cuugaguguugguauccag

SEQ ID NO: 481358 - RNA, 19 nt, Artificial Sequence
  Description of Artificial Sequence: Synthetic oligonucleotide
uuucgggccugaauacuca

SEQ ID NO: 481359 - RNA, 19 nt, Artificial Sequence
  Description of Artificial Sequence: Synthetic oligonucleotide
uggacacauacccuaggau

SEQ ID NO: 481360 - RNA, 19 nt, Artificial Sequence
  Description of Artificial Sequence: Synthetic oligonucleotide
guacccaggacaaaguauc

SEQ ID NO: 481361 - RNA, 19 nt, Artificial Sequence
  Description of Artificial Sequence: Synthetic oligonucleotide
auacggccaggcuggaagg

SEQ ID NO: 481362 - RNA, 19 nt, Artificial Sequence
  Description of Artificial Sequence: Synthetic oligonucleotide
augucaguuggggacacag

SEQ ID NO: 481363 - RNA, 19 nt, Artificial Sequence
  Description of Artificial Sequence: Synthetic oligonucleotide
ggaaacgauucuuaaauua

SEQ ID NO: 481364 - RNA, 19 nt, Artificial Sequence
  Description of Artificial Sequence: Synthetic oligonucleotide
cauaagcauaccgugucac

SEQ ID NO: 481365 - RNA, 19 nt, Artificial Sequence
  Description of Artificial Sequence: Synthetic oligonucleotide
acuucacuugcgcuggagu

SEQ ID NO: 481366 - RNA, 19 nt, Artificial Sequence
  Description of Artificial Sequence: Synthetic oligonucleotide
cuugucacgccaaaugaaa

SEQ ID NO: 481367 - RNA, 19 nt, Artificial Sequence
  Description of Artificial Sequence: Synthetic oligonucleotide
aaacaagcgccagcccacg

SEQ ID NO: 481368 - RNA, 19 nt, Artificial Sequence
  Description of Artificial Sequence: Synthetic oligonucleotide
acgggaguaagugaggcgu

SEQ ID NO: 481369 - RNA, 19 nt, Artificial Sequence
  Description of Artificial Sequence: Synthetic oligonucleotide
ucacgccaaaugaaacuac

SEQ ID NO: 481370 - RNA, 19 nt, Artificial Sequence
  Description of Artificial Sequence: Synthetic oligonucleotide
aagacgggaguaagugagg

SEQ ID NO: 481371 - RNA, 19 nt, Artificial Sequence
  Description of Artificial Sequence: Synthetic oligonucleotide
acacgguagcaacggguac

SEQ ID NO: 481372 - RNA, 19 nt, Artificial Sequence
  Description of Artificial Sequence: Synthetic oligonucleotide
ugcgccacacaagagccag

SEQ ID NO: 481373 - RNA, 19 nt, Artificial Sequence
  Description of Artificial Sequence: Synthetic oligonucleotide
cacucacggaguaucgggc

SEQ ID NO: 481374 - RNA, 19 nt, Artificial Sequence
  Description of Artificial Sequence: Synthetic oligonucleotide
augaaacuacgaaaggaga

SEQ ID NO: 481375 - RNA, 19 nt, Artificial Sequence
  Description of Artificial Sequence: Synthetic oligonucleotide
gagauagggaugcugggua

SEQ ID NO: 481376 - RNA, 19 nt, Artificial Sequence
  Description of Artificial Sequence: Synthetic oligonucleotide
uacgaaaggagaagcgcuu

SEQ ID NO: 481377 - RNA, 19 nt, Artificial Sequence
  Description of Artificial Sequence: Synthetic oligonucleotide
ugagugggaggguaagaaa

SEQ ID NO: 481378 - RNA, 19 nt, Artificial Sequence
  Description of Artificial Sequence: Synthetic oligonucleotide
cacugcgcuggcuacugcg

SEQ ID NO: 481379 - RNA, 19 nt, Artificial Sequence
  Description of Artificial Sequence: Synthetic oligonucleotide
uacggagagccccuguauc

SEQ ID NO: 481380 - RNA, 19 nt, Artificial Sequence
  Description of Artificial Sequence: Synthetic oligonucleotide
acaaaguaucgcagacagc

SEQ ID NO: 481381 - RNA, 19 nt, Artificial Sequence
  Description of Artificial Sequence: Synthetic oligonucleotide
gugauuccaaggccauacg

SEQ ID NO: 481382 - RNA, 19 nt, Artificial Sequence
  Description of Artificial Sequence: Synthetic oligonucleotide
guauaguggccaccaauca

SEQ ID NO: 481383 - RNA, 19 nt, Artificial Sequence
  Description of Artificial Sequence: Synthetic oligonucleotide
cuguaggcgcucauuguug

SEQ ID NO: 481384 - RNA, 19 nt, Artificial Sequence
  Description of Artificial Sequence: Synthetic oligonucleotide
ugaguacauuugguaggcg

SEQ ID NO: 481385 - RNA, 19 nt, Artificial Sequence
  Description of Artificial Sequence: Synthetic oligonucleotide
aggccgaguaaagagguug

SEQ ID NO: 481386 - RNA, 19 nt, Artificial Sequence
  Description of Artificial Sequence: Synthetic oligonucleotide
acagacaacuggauggaca

SEQ ID NO: 481387 - RNA, 19 nt, Artificial Sequence
  Description of Artificial Sequence: Synthetic oligonucleotide
aacuucacuugcgcuggag

SEQ ID NO: 481388 - RNA, 19 nt, Artificial Sequence
  Description of Artificial Sequence: Synthetic oligonucleotide
uuguugcgccacacaagag

SEQ ID NO: 481389 - RNA, 19 nt, Artificial Sequence
  Description of Artificial Sequence: Synthetic oligonucleotide
caacuggagcucagaaggc

SEQ ID NO: 481390 - RNA, 19 nt, Artificial Sequence
  Description of Artificial Sequence: Synthetic oligonucleotide
uagccaauucuggggagag

SEQ ID NO: 481391 - RNA, 19 nt, Artificial Sequence
  Description of Artificial Sequence: Synthetic oligonucleotide
ugggcaagacgggaguaag

SEQ ID NO: 481392 - RNA, 19 nt, Artificial Sequence
  Description of Artificial Sequence: Synthetic oligonucleotide
cauugaucuugucacgcca

SEQ ID NO: 481393 - RNA, 19 nt, Artificial Sequence
  Description of Artificial Sequence: Synthetic oligonucleotide
uagcugcacaaugaguaca

SEQ ID NO: 481394 - RNA, 19 nt, Artificial Sequence
  Description of Artificial Sequence: Synthetic oligonucleotide
cggaguaucgggcauagcc

SEQ ID NO: 481395 - RNA, 19 nt, Artificial Sequence
  Description of Artificial Sequence: Synthetic oligonucleotide
guaagugaggcgugaggca

SEQ ID NO: 481396 - RNA, 19 nt, Artificial Sequence
  Description of Artificial Sequence: Synthetic oligonucleotide
uguugguauccaggcacag

SEQ ID NO: 481397 - RNA, 19 nt, Artificial Sequence
  Description of Artificial Sequence: Synthetic oligonucleotide
ucauagcuaggcagcugcu

SEQ ID NO: 481398 - RNA, 19 nt, Artificial Sequence
  Description of Artificial Sequence: Synthetic oligonucleotide
cgauucuuaaauuaccuca

SEQ ID NO: 481399 - RNA, 19 nt, Artificial Sequence
  Description of Artificial Sequence: Synthetic oligonucleotide
uucacuugcgcuggaguuc

SEQ ID NO: 481400 - RNA, 19 nt, Artificial Sequence
  Description of Artificial Sequence: Synthetic oligonucleotide
ggacacauacccuaggaua

SEQ ID NO: 481401 - RNA, 19 nt, Artificial Sequence
  Description of Artificial Sequence: Synthetic oligonucleotide
acgucacugcgcuggcuac

SEQ ID NO: 481402 - RNA, 19 nt, Artificial Sequence
  Description of Artificial Sequence: Synthetic oligonucleotide
cauaccgugucaccaccug

SEQ ID NO: 481403 - RNA, 19 nt, Artificial Sequence
  Description of Artificial Sequence: Synthetic oligonucleotide
guaggcgcucauuguugcg

SEQ ID NO: 481404 - RNA, 19 nt, Artificial Sequence
  Description of Artificial Sequence: Synthetic oligonucleotide
ggcaagacgggaguaagug

SEQ ID NO: 481405 - RNA, 19 nt, Artificial Sequence
  Description of Artificial Sequence: Synthetic oligonucleotide
ggugcccauauacggagag

SEQ ID NO: 481406 - RNA, 19 nt, Artificial Sequence
  Description of Artificial Sequence: Synthetic oligonucleotide
uccuguaggcgcucauugu

SEQ ID NO: 481407 - RNA, 19 nt, Artificial Sequence
  Description of Artificial Sequence: Synthetic oligonucleotide
aguaucgcagacagcccuc

SEQ ID NO: 481408 - RNA, 19 nt, Artificial Sequence
  Description of Artificial Sequence: Synthetic oligonucleotide
gugguagagccacguggcg

SEQ ID NO: 481409 - RNA, 19 nt, Artificial Sequence
  Description of Artificial Sequence: Synthetic oligonucleotide
ucucacuagcaagcaacga

SEQ ID NO: 481410 - RNA, 19 nt, Artificial Sequence
  Description of Artificial Sequence: Synthetic oligonucleotide
uggcucucgucuaccguug

SEQ ID NO: 481411 - RNA, 19 nt, Artificial Sequence
  Description of Artificial Sequence: Synthetic oligonucleotide
cuacgaaaggagaagcgcu

SEQ ID NO: 481412 - RNA, 19 nt, Artificial Sequence
  Description of Artificial Sequence: Synthetic oligonucleotide
uagcaacggguacaacgcu

SEQ ID NO: 481413 - RNA, 19 nt, Artificial Sequence
  Description of Artificial Sequence: Synthetic oligonucleotide
guaaaguggccagcacggg

SEQ ID NO: 481414 - RNA, 19 nt, Artificial Sequence
  Description of Artificial Sequence: Synthetic oligonucleotide
auauacggagagccccugu

SEQ ID NO: 481415 - RNA, 19 nt, Artificial Sequence
  Description of Artificial Sequence: Synthetic oligonucleotide
agaaaccaacuggagcuca

SEQ ID NO: 481416 - RNA, 19 nt, Artificial Sequence
  Description of Artificial Sequence: Synthetic oligonucleotide
gacacauacccuaggauau

SEQ ID NO: 481417 - RNA, 19 nt, Artificial Sequence
  Description of Artificial Sequence: Synthetic oligonucleotide
guaucgcagacagcccucg

SEQ ID NO: 481418 - RNA, 19 nt, Artificial Sequence
  Description of Artificial Sequence: Synthetic oligonucleotide
auacggagagccccuguau

SEQ ID NO: 481419 - RNA, 19 nt, Artificial Sequence
  Description of Artificial Sequence: Synthetic oligonucleotide
aacaagcgccagcccacgu

SEQ ID NO: 481420 - RNA, 19 nt, Artificial Sequence
  Description of Artificial Sequence: Synthetic oligonucleotide
cacuagcaagcaacgaaca

SEQ ID NO: 481421 - RNA, 19 nt, Artificial Sequence
  Description of Artificial Sequence: Synthetic oligonucleotide
agccuucuaguagcugggc

SEQ ID NO: 481422 - RNA, 19 nt, Artificial Sequence
  Description of Artificial Sequence: Synthetic oligonucleotide
ucguagguucucaggcuuc

SEQ ID NO: 481423 - RNA, 19 nt, Artificial Sequence
  Description of Artificial Sequence: Synthetic oligonucleotide
agggagcuguuugaaagca

SEQ ID NO: 481424 - RNA, 19 nt, Artificial Sequence
  Description of Artificial Sequence: Synthetic oligonucleotide
uaccaggccuccucaggug

SEQ ID NO: 481425 - RNA, 19 nt, Artificial Sequence
  Description of Artificial Sequence: Synthetic oligonucleotide
ggacaagggucagagaaac

SEQ ID NO: 481426 - RNA, 19 nt, Artificial Sequence
  Description of Artificial Sequence: Synthetic oligonucleotide
cacauacccuaggauauuc

SEQ ID NO: 481427 - RNA, 19 nt, Artificial Sequence
  Description of Artificial Sequence: Synthetic oligonucleotide
aaacuucacuugcgcugga

SEQ ID NO: 481428 - RNA, 19 nt, Artificial Sequence
  Description of Artificial Sequence: Synthetic oligonucleotide
gguacaacgcuucaguuuu

SEQ ID NO: 481429 - RNA, 19 nt, Artificial Sequence
  Description of Artificial Sequence: Synthetic oligonucleotide
uccgaacaggaaacuccac

SEQ ID NO: 481430 - RNA, 19 nt, Artificial Sequence
  Description of Artificial Sequence: Synthetic oligonucleotide
uucgggccugaauacucac

SEQ ID NO: 481431 - RNA, 19 nt, Artificial Sequence
  Description of Artificial Sequence: Synthetic oligonucleotide
agccaauucuggggagagc

SEQ ID NO: 481432 - RNA, 19 nt, Artificial Sequence
  Description of Artificial Sequence: Synthetic oligonucleotide
gcuacugcggucguugggc

SEQ ID NO: 481433 - RNA, 19 nt, Artificial Sequence
  Description of Artificial Sequence: Synthetic oligonucleotide
uuccgccgacgguagaaga

SEQ ID NO: 481434 - RNA, 19 nt, Artificial Sequence
  Description of Artificial Sequence: Synthetic oligonucleotide
cccauauacggagagcccc

SEQ ID NO: 481435 - RNA, 19 nt, Artificial Sequence
  Description of Artificial Sequence: Synthetic oligonucleotide
uugaugcaucaauuuuaua

SEQ ID NO: 481436 - RNA, 19 nt, Artificial Sequence
  Description of Artificial Sequence: Synthetic oligonucleotide
auuccacuggugcuaggua

SEQ ID NO: 481437 - RNA, 19 nt, Artificial Sequence
  Description of Artificial Sequence: Synthetic oligonucleotide
caaccuucaauaggcccac

SEQ ID NO: 481438 - RNA, 19 nt, Artificial Sequence
  Description of Artificial Sequence: Synthetic oligonucleotide
gccaauucuggggagagca

SEQ ID NO: 481439 - RNA, 19 nt, Artificial Sequence
  Description of Artificial Sequence: Synthetic oligonucleotide
uagguacaggaccccgauc

SEQ ID NO: 481440 - RNA, 19 nt, Artificial Sequence
  Description of Artificial Sequence: Synthetic oligonucleotide
cucucgguuugaugcauca

SEQ ID NO: 481441 - RNA, 19 nt, Artificial Sequence
  Description of Artificial Sequence: Synthetic oligonucleotide
ccgaguaaagagguugagg

SEQ ID NO: 481442 - RNA, 19 nt, Artificial Sequence
  Description of Artificial Sequence: Synthetic oligonucleotide
uugcgccacacaagagcca

SEQ ID NO: 481443 - RNA, 19 nt, Artificial Sequence
  Description of Artificial Sequence: Synthetic oligonucleotide
gccaaauccgggaagccug

SEQ ID NO: 481444 - RNA, 19 nt, Artificial Sequence
  Description of Artificial Sequence: Synthetic oligonucleotide
caagcgccagcccacguca

SEQ ID NO: 481445 - RNA, 19 nt, Artificial Sequence
  Description of Artificial Sequence: Synthetic oligonucleotide
gucacgccaaaugaaacua

SEQ ID NO: 481446 - RNA, 19 nt, Artificial Sequence
  Description of Artificial Sequence: Synthetic oligonucleotide
aacuccuguaggcgcucau

SEQ ID NO: 481447 - RNA, 19 nt, Artificial Sequence
  Description of Artificial Sequence: Synthetic oligonucleotide
cuacaaucaucaccuagcu

SEQ ID NO: 481448 - RNA, 19 nt, Artificial Sequence
  Description of Artificial Sequence: Synthetic oligonucleotide
acgccaaaugaaacuacga

SEQ ID NO: 481449 - RNA, 19 nt, Artificial Sequence
  Description of Artificial Sequence: Synthetic oligonucleotide
ugcuagcacuucaggccga

SEQ ID NO: 481450 - RNA, 19 nt, Artificial Sequence
  Description of Artificial Sequence: Synthetic oligonucleotide
cucauuguugcgccacaca

SEQ ID NO: 481451 - RNA, 19 nt, Artificial Sequence
  Description of Artificial Sequence: Synthetic oligonucleotide
acauacccuaggauauucu

SEQ ID NO: 481452 - RNA, 19 nt, Artificial Sequence
  Description of Artificial Sequence: Synthetic oligonucleotide
agaguuccgccgacgguag

SEQ ID NO: 481453 - RNA, 19 nt, Artificial Sequence
  Description of Artificial Sequence: Synthetic oligonucleotide
gcgcuuuagcugcacaaug

SEQ ID NO: 481454 - RNA, 19 nt, Artificial Sequence
  Description of Artificial Sequence: Synthetic oligonucleotide
cacggaguaucgggcauag

SEQ ID NO: 481455 - RNA, 19 nt, Artificial Sequence
  Description of Artificial Sequence: Synthetic oligonucleotide
uaucgcagacagcccucgu

SEQ ID NO: 481456 - RNA, 19 nt, Artificial Sequence
  Description of Artificial Sequence: Synthetic oligonucleotide
guagcugggcaagacggga

SEQ ID NO: 481457 - RNA, 19 nt, Artificial Sequence
  Description of Artificial Sequence: Synthetic oligonucleotide
acgauggaaacgauucuua

SEQ ID NO: 481458 - RNA, 19 nt, Artificial Sequence
  Description of Artificial Sequence: Synthetic oligonucleotide
ccaaauccgggaagccugg

SEQ ID NO: 481459 - RNA, 19 nt, Artificial Sequence
  Description of Artificial Sequence: Synthetic oligonucleotide
agcugcacaaugaguacau

SEQ ID NO: 481460 - RNA, 19 nt, Artificial Sequence
  Description of Artificial Sequence: Synthetic oligonucleotide
auuaccucagccagucgua

SEQ ID NO: 481461 - RNA, 19 nt, Artificial Sequence
  Description of Artificial Sequence: Synthetic oligonucleotide
gcaacgaacaaccuucaau

SEQ ID NO: 481462 - RNA, 19 nt, Artificial Sequence
  Description of Artificial Sequence: Synthetic oligonucleotide
uggucaggccaauggguuu

SEQ ID NO: 481463 - RNA, 19 nt, Artificial Sequence
  Description of Artificial Sequence: Synthetic oligonucleotide
cucgguuugaugcaucaau

SEQ ID NO: 481464 - RNA, 19 nt, Artificial Sequence
  Description of Artificial Sequence: Synthetic oligonucleotide
cauauacggagagccccug

SEQ ID NO: 481465 - RNA, 19 nt, Artificial Sequence
  Description of Artificial Sequence: Synthetic oligonucleotide
ucacugcgcuggcuacugc

SEQ ID NO: 481466 - RNA, 19 nt, Artificial Sequence
  Description of Artificial Sequence: Synthetic oligonucleotide
agcccacacgguagcaacg

SEQ ID NO: 481467 - RNA, 19 nt, Artificial Sequence
  Description of Artificial Sequence: Synthetic oligonucleotide
uccagugguguuuccccuu

SEQ ID NO: 481468 - RNA, 19 nt, Artificial Sequence
  Description of Artificial Sequence: Synthetic oligonucleotide
uacauuugguaggcgccau

SEQ ID NO: 481469 - RNA, 19 nt, Artificial Sequence
  Description of Artificial Sequence: Synthetic oligonucleotide
gaggguaagaaaacacgau

SEQ ID NO: 481470 - RNA, 19 nt, Artificial Sequence
  Description of Artificial Sequence: Synthetic oligonucleotide
aguuccgccgacgguagaa

SEQ ID NO: 481471 - RNA, 19 nt, Artificial Sequence
  Description of Artificial Sequence: Synthetic oligonucleotide
gaguaucgggcauagccuu

SEQ ID NO: 481472 - RNA, 19 nt, Artificial Sequence
  Description of Artificial Sequence: Synthetic oligonucleotide
ucguugggcaggcgugcac

SEQ ID NO: 481473 - RNA, 19 nt, Artificial Sequence
  Description of Artificial Sequence: Synthetic oligonucleotide
cacagaucucccaucacau

SEQ ID NO: 481474 - RNA, 19 nt, Artificial Sequence
  Description of Artificial Sequence: Synthetic oligonucleotide
guuccgccgacgguagaag

SEQ ID NO: 481475 - RNA, 19 nt, Artificial Sequence
  Description of Artificial Sequence: Synthetic oligonucleotide
caggagaguuccgccgacg

SEQ ID NO: 481476 - RNA, 19 nt, Artificial Sequence
  Description of Artificial Sequence: Synthetic oligonucleotide
ccagcucacaagaggugcc

SEQ ID NO: 481477 - RNA, 19 nt, Artificial Sequence
  Description of Artificial Sequence: Synthetic oligonucleotide
ccaagcccuaggacaaggg

SEQ ID NO: 481478 - RNA, 19 nt, Artificial Sequence
  Description of Artificial Sequence: Synthetic oligonucleotide
acacagcguccagugagug

SEQ ID NO: 481479 - RNA, 19 nt, Artificial Sequence
  Description of Artificial Sequence: Synthetic oligonucleotide
ggcuacugcggucguuggg

SEQ ID NO: 481480 - RNA, 19 nt, Artificial Sequence
  Description of Artificial Sequence: Synthetic oligonucleotide
ucucgguuugaugcaucaa

SEQ ID NO: 481481 - RNA, 19 nt, Artificial Sequence
  Description of Artificial Sequence: Synthetic oligonucleotide
guaccaggccuccucaggu

SEQ ID NO: 481482 - RNA, 19 nt, Artificial Sequence
  Description of Artificial Sequence: Synthetic oligonucleotide
agugaggcgugaggcagga

SEQ ID NO: 481483 - RNA, 19 nt, Artificial Sequence
  Description of Artificial Sequence: Synthetic oligonucleotide
gcuccugccaaauccggga

SEQ ID NO: 481484 - RNA, 19 nt, Artificial Sequence
  Description of Artificial Sequence: Synthetic oligonucleotide
gggucucuccacaggagag

SEQ ID NO: 481485 - RNA, 19 nt, Artificial Sequence
  Description of Artificial Sequence: Synthetic oligonucleotide
cucacaagaggugccugca

SEQ ID NO: 481486 - RNA, 19 nt, Artificial Sequence
  Description of Artificial Sequence: Synthetic oligonucleotide
ggaauacacucacggagua

SEQ ID NO: 481487 - RNA, 19 nt, Artificial Sequence
  Description of Artificial Sequence: Synthetic oligonucleotide
gguauucauggcuucacuu

SEQ ID NO: 481488 - RNA, 19 nt, Artificial Sequence
  Description of Artificial Sequence: Synthetic oligonucleotide
agcauacaggucauagcua

SEQ ID NO: 481489 - RNA, 19 nt, Artificial Sequence
  Description of Artificial Sequence: Synthetic oligonucleotide
ggacaaaguaucgcagaca

SEQ ID NO: 481490 - RNA, 19 nt, Artificial Sequence
  Description of Artificial Sequence: Synthetic oligonucleotide
agcaagcaacgaacaaccu

SEQ ID NO: 481491 - RNA, 19 nt, Artificial Sequence
  Description of Artificial Sequence: Synthetic oligonucleotide
ugcucucgguuugaugcau

SEQ ID NO: 481492 - RNA, 19 nt, Artificial Sequence
  Description of Artificial Sequence: Synthetic oligonucleotide
acggaguaucgggcauagc

SEQ ID NO: 481493 - RNA, 19 nt, Artificial Sequence
  Description of Artificial Sequence: Synthetic oligonucleotide
auaguuccagcagggccaa

SEQ ID NO: 481494 - RNA, 19 nt, Artificial Sequence
  Description of Artificial Sequence: Synthetic oligonucleotide
ucacggaguaucgggcaua

SEQ ID NO: 481495 - RNA, 19 nt, Artificial Sequence
  Description of Artificial Sequence: Synthetic oligonucleotide
agguuccgaacaggaaacu

SEQ ID NO: 481496 - RNA, 19 nt, Artificial Sequence
  Description of Artificial Sequence: Synthetic oligonucleotide
agcaacggguacaacgcuu

SEQ ID NO: 481497 - RNA, 19 nt, Artificial Sequence
  Description of Artificial Sequence: Synthetic oligonucleotide
gcaaugugguacagccagg

SEQ ID NO: 481498 - RNA, 19 nt, Artificial Sequence
  Description of Artificial Sequence: Synthetic oligonucleotide
aagccucacgaugcuguuu

SEQ ID NO: 481499 - RNA, 19 nt, Artificial Sequence
  Description of Artificial Sequence: Synthetic oligonucleotide
cuacugcggucguugggca

SEQ ID NO: 481500 - RNA, 19 nt, Artificial Sequence
  Description of Artificial Sequence: Synthetic oligonucleotide
gcccacacgguagcaacgg

SEQ ID NO: 481501 - RNA, 19 nt, Artificial Sequence
  Description of Artificial Sequence: Synthetic oligonucleotide
cacgucacugcgcuggcua

SEQ ID NO: 481502 - RNA, 19 nt, Artificial Sequence
  Description of Artificial Sequence: Synthetic oligonucleotide
acgguacccaggacaaagu

SEQ ID NO: 481503 - RNA, 19 nt, Artificial Sequence
  Description of Artificial Sequence: Synthetic oligonucleotide
cuggauggacacauacccu

SEQ ID NO: 481504 - RNA, 19 nt, Artificial Sequence
  Description of Artificial Sequence: Synthetic oligonucleotide
uaucgggcauagccuucua

SEQ ID NO: 481505 - RNA, 19 nt, Artificial Sequence
  Description of Artificial Sequence: Synthetic oligonucleotide
gcaacggguacaacgcuuc

SEQ ID NO: 481506 - RNA, 19 nt, Artificial Sequence
  Description of Artificial Sequence: Synthetic oligonucleotide
gccuucuaguagcugggca

SEQ ID NO: 481507 - RNA, 19 nt, Artificial Sequence
  Description of Artificial Sequence: Synthetic oligonucleotide
ccucaagccgcugcucucg

SEQ ID NO: 481508 - RNA, 19 nt, Artificial Sequence
  Description of Artificial Sequence: Synthetic oligonucleotide
acccucucacuagcaagca

SEQ ID NO: 481509 - RNA, 19 nt, Artificial Sequence
  Description of Artificial Sequence: Synthetic oligonucleotide
gucguagguucucaggcuu

SEQ ID NO: 481510 - RNA, 19 nt, Artificial Sequence
  Description of Artificial Sequence: Synthetic oligonucleotide
ggaguaucgggcauagccu

SEQ ID NO: 481511 - RNA, 19 nt, Artificial Sequence
  Description of Artificial Sequence: Synthetic oligonucleotide
gaauacacucacggaguau

SEQ ID NO: 481512 - RNA, 19 nt, Artificial Sequence
  Description of Artificial Sequence: Synthetic oligonucleotide
acacauacccuaggauauu

SEQ ID NO: 481513 - RNA, 19 nt, Artificial Sequence
  Description of Artificial Sequence: Synthetic oligonucleotide
agccagucguagguucuca

SEQ ID NO: 481514 - RNA, 19 nt, Artificial Sequence
  Description of Artificial Sequence: Synthetic oligonucleotide
aaccuucaauaggcccacu

SEQ ID NO: 481515 - RNA, 19 nt, Artificial Sequence
  Description of Artificial Sequence: Synthetic oligonucleotide
cuagguacaggaccccgau

SEQ ID NO: 481516 - RNA, 19 nt, Artificial Sequence
  Description of Artificial Sequence: Synthetic oligonucleotide
gcaagcaacgaacaaccuu

SEQ ID NO: 481517 - RNA, 19 nt, Artificial Sequence
  Description of Artificial Sequence: Synthetic oligonucleotide
gugcuagguacaggacccc

SEQ ID NO: 481518 - RNA, 19 nt, Artificial Sequence
  Description of Artificial Sequence: Synthetic oligonucleotide
cucugagauaccagaggau

SEQ ID NO: 481519 - RNA, 19 nt, Artificial Sequence
  Description of Artificial Sequence: Synthetic oligonucleotide
gccgaguaaagagguugag

SEQ ID NO: 481520 - RNA, 19 nt, Artificial Sequence
  Description of Artificial Sequence: Synthetic oligonucleotide
caacggguacaacgcuuca

SEQ ID NO: 481521 - RNA, 19 nt, Artificial Sequence
  Description of Artificial Sequence: Synthetic oligonucleotide
cagcgacucugagauacca

SEQ ID NO: 481522 - RNA, 19 nt, Artificial Sequence
  Description of Artificial Sequence: Synthetic oligonucleotide
ggucguugggcaggcgugc

SEQ ID NO: 481523 - RNA, 19 nt, Artificial Sequence
  Description of Artificial Sequence: Synthetic oligonucleotide
ggguacaacgcuucaguuu

SEQ ID NO: 481524 - RNA, 19 nt, Artificial Sequence
  Description of Artificial Sequence: Synthetic oligonucleotide
ggagauagggaugcugggu

SEQ ID NO: 481525 - RNA, 19 nt, Artificial Sequence
  Description of Artificial Sequence: Synthetic oligonucleotide
gcuagcacuucaggccgag

SEQ ID NO: 481526 - RNA, 19 nt, Artificial Sequence
  Description of Artificial Sequence: Synthetic oligonucleotide
ggccgaguaaagagguuga

SEQ ID NO: 481527 - RNA, 19 nt, Artificial Sequence
  Description of Artificial Sequence: Synthetic oligonucleotide
gcccauauacggagagccc

SEQ ID NO: 481528 - RNA, 19 nt, Artificial Sequence
  Description of Artificial Sequence: Synthetic oligonucleotide
gggaguaagugaggcguga

SEQ ID NO: 481529 - RNA, 19 nt, Artificial Sequence
  Description of Artificial Sequence: Synthetic oligonucleotide
ccgacgguagaagagcaca

SEQ ID NO: 481530 - RNA, 19 nt, Artificial Sequence
  Description of Artificial Sequence: Synthetic oligonucleotide
cccacacgguagcaacggg

SEQ ID NO: 481531 - RNA, 19 nt, Artificial Sequence
  Description of Artificial Sequence: Synthetic oligonucleotide
gaguuccgccgacgguaga

SEQ ID NO: 481532 - RNA, 19 nt, Artificial Sequence
  Description of Artificial Sequence: Synthetic oligonucleotide
caauguucucagggcggca

SEQ ID NO: 481533 - RNA, 19 nt, Artificial Sequence
  Description of Artificial Sequence: Synthetic oligonucleotide
ccacuacccgcuccuuagc

SEQ ID NO: 481534 - RNA, 19 nt, Artificial Sequence
  Description of Artificial Sequence: Synthetic oligonucleotide
cucgucuaccguugucacu

SEQ ID NO: 481535 - RNA, 19 nt, Artificial Sequence
  Description of Artificial Sequence: Synthetic oligonucleotide
ggcgugcacaggcaguaua

SEQ ID NO: 481536 - RNA, 19 nt, Artificial Sequence
  Description of Artificial Sequence: Synthetic oligonucleotide
cgauggaaacgauucuuaa

SEQ ID NO: 481537 - RNA, 19 nt, Artificial Sequence
  Description of Artificial Sequence: Synthetic oligonucleotide
caagccgcugcucucgguu

SEQ ID NO: 481538 - RNA, 19 nt, Artificial Sequence
  Description of Artificial Sequence: Synthetic oligonucleotide
gccacgguacccaggacaa

SEQ ID NO: 481539 - RNA, 19 nt, Artificial Sequence
  Description of Artificial Sequence: Synthetic oligonucleotide
agcccacgucacugcgcug

SEQ ID NO: 481540 - RNA, 19 nt, Artificial Sequence
  Description of Artificial Sequence: Synthetic oligonucleotide
caggcgugcacaggcagua

SEQ ID NO: 481541 - RNA, 19 nt, Artificial Sequence
  Description of Artificial Sequence: Synthetic oligonucleotide
gcucucgucuaccguuguc

SEQ ID NO: 481542 - RNA, 19 nt, Artificial Sequence
  Description of Artificial Sequence: Synthetic oligonucleotide
gucguugggcaggcgugca

SEQ ID NO: 481543 - RNA, 19 nt, Artificial Sequence
  Description of Artificial Sequence: Synthetic oligonucleotide
agccgccacgguacccagg

SEQ ID NO: 481544 - RNA, 19 nt, Artificial Sequence
  Description of Artificial Sequence: Synthetic oligonucleotide
ccuaggauauucugccccu

SEQ ID NO: 481545 - RNA, 19 nt, Artificial Sequence
  Description of Artificial Sequence: Synthetic oligonucleotide
cucacggaguaucgggcau

SEQ ID NO: 481546 - RNA, 19 nt, Artificial Sequence
  Description of Artificial Sequence: Synthetic oligonucleotide
gcgccagcccacgucacug

SEQ ID NO: 481547 - RNA, 19 nt, Artificial Sequence
  Description of Artificial Sequence: Synthetic oligonucleotide
gccucacgaugcuguuugc

SEQ ID NO: 481548 - RNA, 19 nt, Artificial Sequence
  Description of Artificial Sequence: Synthetic oligonucleotide
ggagaguuccgccgacggu

SEQ ID NO: 481549 - RNA, 19 nt, Artificial Sequence
  Description of Artificial Sequence: Synthetic oligonucleotide
ccauauacggagagccccu

SEQ ID NO: 481550 - RNA, 19 nt, Artificial Sequence
  Description of Artificial Sequence: Synthetic oligonucleotide
ggguucucucucacuaucu

SEQ ID NO: 481551 - RNA, 19 nt, Artificial Sequence
  Description of Artificial Sequence: Synthetic oligonucleotide
cgggaguaagugaggcgug

SEQ ID NO: 481552 - RNA, 19 nt, Artificial Sequence
  Description of Artificial Sequence: Synthetic oligonucleotide
gggagcuguuugaaagcaa

SEQ ID NO: 481553 - RNA, 19 nt, Artificial Sequence
  Description of Artificial Sequence: Synthetic oligonucleotide
cugugauuccaaggccaua

SEQ ID NO: 481554 - RNA, 19 nt, Artificial Sequence
  Description of Artificial Sequence: Synthetic oligonucleotide
ggacacccucucacuagca

SEQ ID NO: 481555 - RNA, 19 nt, Artificial Sequence
  Description of Artificial Sequence: Synthetic oligonucleotide
agcccucgucugguguggu

SEQ ID NO: 481556 - RNA, 19 nt, Artificial Sequence
  Description of Artificial Sequence: Synthetic oligonucleotide
gccgacgguagaagagcac

SEQ ID NO: 481557 - RNA, 19 nt, Artificial Sequence
  Description of Artificial Sequence: Synthetic oligonucleotide
aggcgugcacaggcaguau

SEQ ID NO: 481558 - RNA, 19 nt, Artificial Sequence
  Description of Artificial Sequence: Synthetic oligonucleotide
ccuguaggcgcucauuguu

SEQ ID NO: 481559 - RNA, 19 nt, Artificial Sequence
  Description of Artificial Sequence: Synthetic oligonucleotide
gcgccacacaagagccagg

SEQ ID NO: 481560 - RNA, 19 nt, Artificial Sequence
  Description of Artificial Sequence: Synthetic oligonucleotide
gcucucgguuugaugcauc

SEQ ID NO: 481561 - RNA, 19 nt, Artificial Sequence
  Description of Artificial Sequence: Synthetic oligonucleotide
ccucgucuggugugguaga

SEQ ID NO: 481562 - RNA, 19 nt, Artificial Sequence
  Description of Artificial Sequence: Synthetic oligonucleotide
cccucucacuagcaagcaa

SEQ ID NO: 481563 - RNA, 19 nt, Artificial Sequence
  Description of Artificial Sequence: Synthetic oligonucleotide
gggcaagacgggaguaagu

SEQ ID NO: 481564 - RNA, 19 nt, Artificial Sequence
  Description of Artificial Sequence: Synthetic oligonucleotide
cgccgacgguagaagagca

SEQ ID NO: 481565 - RNA, 19 nt, Artificial Sequence
  Description of Artificial Sequence: Synthetic oligonucleotide
gcauaccgugucaccaccu

SEQ ID NO: 481566 - RNA, 19 nt, Artificial Sequence
  Description of Artificial Sequence: Synthetic oligonucleotide
ggcgugaggcaggaacacu

SEQ ID NO: 481567 - RNA, 19 nt, Artificial Sequence
  Description of Artificial Sequence: Synthetic oligonucleotide
cgguacccaggacaaagua

SEQ ID NO: 481568 - RNA, 19 nt, Artificial Sequence
  Description of Artificial Sequence: Synthetic oligonucleotide
ggcucucgucuaccguugu

SEQ ID NO: 481569 - RNA, 19 nt, Artificial Sequence
  Description of Artificial Sequence: Synthetic oligonucleotide
ggggccccacccagucuug

SEQ ID NO: 481570 - RNA, 19 nt, Artificial Sequence
  Description of Artificial Sequence: Synthetic oligonucleotide
gugaggcgugaggcaggaa

SEQ ID NO: 481571 - RNA, 19 nt, Artificial Sequence
  Description of Artificial Sequence: Synthetic oligonucleotide
ccgccacgguacccaggac

SEQ ID NO: 481572 - RNA, 19 nt, Artificial Sequence
  Description of Artificial Sequence: Synthetic oligonucleotide
cggguacaacgcuucaguu

SEQ ID NO: 481573 - RNA, 19 nt, Artificial Sequence
  Description of Artificial Sequence: Synthetic oligonucleotide
ccgggaagccuggcuggca

SEQ ID NO: 481574 - RNA, 19 nt, Artificial Sequence
  Description of Artificial Sequence: Synthetic oligonucleotide
gggcggcagaggccuuugu

SEQ ID NO: 481575 - RNA, 19 nt, Artificial Sequence
  Description of Artificial Sequence: Synthetic oligonucleotide
ccucgagcuccugccaaau

SEQ ID NO: 481576 - RNA, 19 nt, Artificial Sequence
  Description of Artificial Sequence: Synthetic oligonucleotide
ccacgguacccaggacaaa

SEQ ID NO: 481577 - RNA, 19 nt, Artificial Sequence
  Description of Artificial Sequence: Synthetic oligonucleotide
gcuggcuacugcggucguu

SEQ ID NO: 481578 - RNA, 19 nt, Artificial Sequence
  Description of Artificial Sequence: Synthetic oligonucleotide
cgucuaccguugucacugu

SEQ ID NO: 481579 - RNA, 19 nt, Artificial Sequence
  Description of Artificial Sequence: Synthetic oligonucleotide
ccacgucacugcgcuggcu

SEQ ID NO: 481580 - RNA, 19 nt, Artificial Sequence
  Description of Artificial Sequence: Synthetic oligonucleotide
cgcuggcuacugcggucgu

SEQ ID NO: 481581 - RNA, 19 nt, Artificial Sequence
  Description of Artificial Sequence: Synthetic oligonucleotide
agaacagacacguagaguc

SEQ ID NO: 481582 - RNA, 19 nt, Artificial Sequence
  Description of Artificial Sequence: Synthetic oligonucleotide
aggguuugaaagcagaugc

SEQ ID NO: 481583 - RNA, 19 nt, Artificial Sequence
  Description of Artificial Sequence: Synthetic oligonucleotide
aaggagacguaacaggccg

SEQ ID NO: 481584 - RNA, 19 nt, Artificial Sequence
  Description of Artificial Sequence: Synthetic oligonucleotide
auaucauguaucucuaaac

SEQ ID NO: 481585 - RNA, 19 nt, Artificial Sequence
  Description of Artificial Sequence: Synthetic oligonucleotide
uguaucucuaaacugcuca

SEQ ID NO: 481586 - RNA, 19 nt, Artificial Sequence
  Description of Artificial Sequence: Synthetic oligonucleotide
guaucuguagaccacauug

SEQ ID NO: 481587 - RNA, 19 nt, Artificial Sequence
  Description of Artificial Sequence: Synthetic oligonucleotide
uuggggaucacucuuagcu

SEQ ID NO: 481588 - RNA, 19 nt, Artificial Sequence
  Description of Artificial Sequence: Synthetic oligonucleotide
ucuguuaaagcccagccuc

SEQ ID NO: 481589 - RNA, 19 nt, Artificial Sequence
  Description of Artificial Sequence: Synthetic oligonucleotide
aauaguucuuuuaauauaa

SEQ ID NO: 481590 - RNA, 19 nt, Artificial Sequence
  Description of Artificial Sequence: Synthetic oligonucleotide
guuacggcagauaaggucg

SEQ ID NO: 481591 - RNA, 19 nt, Artificial Sequence
  Description of Artificial Sequence: Synthetic oligonucleotide
agcgagaagagagacaggc

SEQ ID NO: 481592 - RNA, 19 nt, Artificial Sequence
  Description of Artificial Sequence: Synthetic oligonucleotide
aaguggugagguuaaacug

SEQ ID NO: 481593 - RNA, 19 nt, Artificial Sequence
  Description of Artificial Sequence: Synthetic oligonucleotide
gaacuguuaagaguguucg

SEQ ID NO: 481594 - RNA, 19 nt, Artificial Sequence
  Description of Artificial Sequence: Synthetic oligonucleotide
aaauaguucuuuuaauaua

SEQ ID NO: 481595 - RNA, 19 nt, Artificial Sequence
  Description of Artificial Sequence: Synthetic oligonucleotide
ucagcuucgcacaaaggag

SEQ ID NO: 481596 - RNA, 19 nt, Artificial Sequence
  Description of Artificial Sequence: Synthetic oligonucleotide
gguccaaauaccaacaucg

SEQ ID NO: 481597 - RNA, 19 nt, Artificial Sequence
  Description of Artificial Sequence: Synthetic oligonucleotide
ugauguagcguuuauaguu

SEQ ID NO: 481598 - RNA, 19 nt, Artificial Sequence
  Description of Artificial Sequence: Synthetic oligonucleotide
agagaaugaaggcaaagga

SEQ ID NO: 481599 - RNA, 19 nt, Artificial Sequence
  Description of Artificial Sequence: Synthetic oligonucleotide
agacacguagagucgauac

SEQ ID NO: 481600 - RNA, 19 nt, Artificial Sequence
  Description of Artificial Sequence: Synthetic oligonucleotide
agcaaguacaucauguugg

SEQ ID NO: 481601 - RNA, 19 nt, Artificial Sequence
  Description of Artificial Sequence: Synthetic oligonucleotide
agaguguucggucagagaa

SEQ ID NO: 481602 - RNA, 19 nt, Artificial Sequence
  Description of Artificial Sequence: Synthetic oligonucleotide
gaaauuugcacaucagguc

SEQ ID NO: 481603 - RNA, 19 nt, Artificial Sequence
  Description of Artificial Sequence: Synthetic oligonucleotide
agcaccgaugcccaggagc

SEQ ID NO: 481604 - RNA, 19 nt, Artificial Sequence
  Description of Artificial Sequence: Synthetic oligonucleotide
aagaacucccagcgcauac

SEQ ID NO: 481605 - RNA, 19 nt, Artificial Sequence
  Description of Artificial Sequence: Synthetic oligonucleotide
acggcauccacauagauuu

SEQ ID NO: 481606 - RNA, 19 nt, Artificial Sequence
  Description of Artificial Sequence: Synthetic oligonucleotide
ucuguagaccacauuguca

SEQ ID NO: 481607 - RNA, 19 nt, Artificial Sequence
  Description of Artificial Sequence: Synthetic oligonucleotide
uuggauaauccacacggga

SEQ ID NO: 481608 - RNA, 19 nt, Artificial Sequence
  Description of Artificial Sequence: Synthetic oligonucleotide
ugauacucugugcuggugc

SEQ ID NO: 481609 - RNA, 19 nt, Artificial Sequence
  Description of Artificial Sequence: Synthetic oligonucleotide
uguugcacggagaguaggg

SEQ ID NO: 481610 - RNA, 19 nt, Artificial Sequence
  Description of Artificial Sequence: Synthetic oligonucleotide
uccaaauaccaacaucgug

SEQ ID NO: 481611 - RNA, 19 nt, Artificial Sequence
  Description of Artificial Sequence: Synthetic oligonucleotide
uuccauagggaacagugac

SEQ ID NO: 481612 - RNA, 19 nt, Artificial Sequence
  Description of Artificial Sequence: Synthetic oligonucleotide
aacccuuggguuccugggc

SEQ ID NO: 481613 - RNA, 19 nt, Artificial Sequence
  Description of Artificial Sequence: Synthetic oligonucleotide
gucgauaccagccccaaag

SEQ ID NO: 481614 - RNA, 19 nt, Artificial Sequence
  Description of Artificial Sequence: Synthetic oligonucleotide
auugugggaaaccaaacau

SEQ ID NO: 481615 - RNA, 19 nt, Artificial Sequence
  Description of Artificial Sequence: Synthetic oligonucleotide
cugaguuguuuccauaggg

SEQ ID NO: 481616 - RNA, 19 nt, Artificial Sequence
  Description of Artificial Sequence: Synthetic oligonucleotide
uguuaagaguguucgguca

SEQ ID NO: 481617 - RNA, 19 nt, Artificial Sequence
  Description of Artificial Sequence: Synthetic oligonucleotide
guuacuugugucaaugaag

SEQ ID NO: 481618 - RNA, 19 nt, Artificial Sequence
  Description of Artificial Sequence: Synthetic oligonucleotide
uuaauauaauuuucagcaa

SEQ ID NO: 481619 - RNA, 19 nt, Artificial Sequence
  Description of Artificial Sequence: Synthetic oligonucleotide
agguucgugcuauugcagc

SEQ ID NO: 481620 - RNA, 19 nt, Artificial Sequence
  Description of Artificial Sequence: Synthetic oligonucleotide
ucgucaauguaggagaccc

SEQ ID NO: 481621 - RNA, 19 nt, Artificial Sequence
  Description of Artificial Sequence: Synthetic oligonucleotide
uacgacuugaguucagggc

SEQ ID NO: 481622 - RNA, 19 nt, Artificial Sequence
  Description of Artificial Sequence: Synthetic oligonucleotide
aucucuaaacugcucaucu

SEQ ID NO: 481623 - RNA, 19 nt, Artificial Sequence
  Description of Artificial Sequence: Synthetic oligonucleotide
cauacagguaucuguagac

SEQ ID NO: 481624 - RNA, 19 nt, Artificial Sequence
  Description of Artificial Sequence: Synthetic oligonucleotide
acgacuugaguucagggcu

SEQ ID NO: 481625 - RNA, 19 nt, Artificial Sequence
  Description of Artificial Sequence: Synthetic oligonucleotide
auaaggucggggucaggcc

SEQ ID NO: 481626 - RNA, 19 nt, Artificial Sequence
  Description of Artificial Sequence: Synthetic oligonucleotide
auuaaguaugugcuuuucu

SEQ ID NO: 481627 - RNA, 19 nt, Artificial Sequence
  Description of Artificial Sequence: Synthetic oligonucleotide
cuuagcugcuggaaaacag

SEQ ID NO: 481628 - RNA, 19 nt, Artificial Sequence
  Description of Artificial Sequence: Synthetic oligonucleotide
gauaaggucggggucaggc

SEQ ID NO: 481629 - RNA, 19 nt, Artificial Sequence
  Description of Artificial Sequence: Synthetic oligonucleotide
uggucgucaauguaggaga

SEQ ID NO: 481630 - RNA, 19 nt, Artificial Sequence
  Description of Artificial Sequence: Synthetic oligonucleotide
auacgacuugaguucaggg

SEQ ID NO: 481631 - RNA, 19 nt, Artificial Sequence
  Description of Artificial Sequence: Synthetic oligonucleotide
ucuauuaaguaugugcuuu

SEQ ID NO: 481632 - RNA, 19 nt, Artificial Sequence
  Description of Artificial Sequence: Synthetic oligonucleotide
uggauaauccacacgggaa

SEQ ID NO: 481633 - RNA, 19 nt, Artificial Sequence
  Description of Artificial Sequence: Synthetic oligonucleotide
gauugugggaaaccaaaca

SEQ ID NO: 481634 - RNA, 19 nt, Artificial Sequence
  Description of Artificial Sequence: Synthetic oligonucleotide
gacgcaggcgccuuguucc

SEQ ID NO: 481635 - RNA, 19 nt, Artificial Sequence
  Description of Artificial Sequence: Synthetic oligonucleotide
cuauguagagcgacgaguc

SEQ ID NO: 481636 - RNA, 19 nt, Artificial Sequence
  Description of Artificial Sequence: Synthetic oligonucleotide
uacagacuaccacauucag

SEQ ID NO: 481637 - RNA, 19 nt, Artificial Sequence
  Description of Artificial Sequence: Synthetic oligonucleotide
cacguggucgucaauguag

SEQ ID NO: 481638 - RNA, 19 nt, Artificial Sequence
  Description of Artificial Sequence: Synthetic oligonucleotide
caucccaagaagcugguug

SEQ ID NO: 481639 - RNA, 19 nt, Artificial Sequence
  Description of Artificial Sequence: Synthetic oligonucleotide
uucuguuaaagcccagccu

SEQ ID NO: 481640 - RNA, 19 nt, Artificial Sequence
  Description of Artificial Sequence: Synthetic oligonucleotide
auugccgucaucccaagaa

SEQ ID NO: 481641 - RNA, 19 nt, Artificial Sequence
  Description of Artificial Sequence: Synthetic oligonucleotide
acguagagucgauaccagc

SEQ ID NO: 481642 - RNA, 19 nt, Artificial Sequence
  Description of Artificial Sequence: Synthetic oligonucleotide
agcgcauacgacuugaguu

SEQ ID NO: 481643 - RNA, 19 nt, Artificial Sequence
  Description of Artificial Sequence: Synthetic oligonucleotide
guuaagaguguucggucag

SEQ ID NO: 481644 - RNA, 19 nt, Artificial Sequence
  Description of Artificial Sequence: Synthetic oligonucleotide
acuguuaagaguguucggu

SEQ ID NO: 481645 - RNA, 19 nt, Artificial Sequence
  Description of Artificial Sequence: Synthetic oligonucleotide
ugugucaaugaagacggca

SEQ ID NO: 481646 - RNA, 19 nt, Artificial Sequence
  Description of Artificial Sequence: Synthetic oligonucleotide
auaauccacacgggaaccc

SEQ ID NO: 481647 - RNA, 19 nt, Artificial Sequence
  Description of Artificial Sequence: Synthetic oligonucleotide
ucuucugaaggugacugug

SEQ ID NO: 481648 - RNA, 19 nt, Artificial Sequence
  Description of Artificial Sequence: Synthetic oligonucleotide
gagaagcauccccaaacag

SEQ ID NO: 481649 - RNA, 19 nt, Artificial Sequence
  Description of Artificial Sequence: Synthetic oligonucleotide
acgguggugaggcaugcac

SEQ ID NO: 481650 - RNA, 19 nt, Artificial Sequence
  Description of Artificial Sequence: Synthetic oligonucleotide
aaagcccagccucgguugg

SEQ ID NO: 481651 - RNA, 19 nt, Artificial Sequence
  Description of Artificial Sequence: Synthetic oligonucleotide
caaagaugagagguggagg

SEQ ID NO: 481652 - RNA, 19 nt, Artificial Sequence
  Description of Artificial Sequence: Synthetic oligonucleotide
ugugacucagggcagguuu

SEQ ID NO: 481653 - RNA, 19 nt, Artificial Sequence
  Description of Artificial Sequence: Synthetic oligonucleotide
auagggaacagugacgcca

SEQ ID NO: 481654 - RNA, 19 nt, Artificial Sequence
  Description of Artificial Sequence: Synthetic oligonucleotide
ccaaauaccaacaucguga

SEQ ID NO: 481655 - RNA, 19 nt, Artificial Sequence
  Description of Artificial Sequence: Synthetic oligonucleotide
guagagucgauaccagccc

SEQ ID NO: 481656 - RNA, 19 nt, Artificial Sequence
  Description of Artificial Sequence: Synthetic oligonucleotide
agagaagcauccccaaaca

SEQ ID NO: 481657 - RNA, 19 nt, Artificial Sequence
  Description of Artificial Sequence: Synthetic oligonucleotide
gacacguagagucgauacc

SEQ ID NO: 481658 - RNA, 19 nt, Artificial Sequence
  Description of Artificial Sequence: Synthetic oligonucleotide
uugauguagcguuuauagu

SEQ ID NO: 481659 - RNA, 19 nt, Artificial Sequence
  Description of Artificial Sequence: Synthetic oligonucleotide
ugagguuaaacugcuguuc

SEQ ID NO: 481660 - RNA, 19 nt, Artificial Sequence
  Description of Artificial Sequence: Synthetic oligonucleotide
uggacacuaaguugaccag

SEQ ID NO: 481661 - RNA, 19 nt, Artificial Sequence
  Description of Artificial Sequence: Synthetic oligonucleotide
auggccccgaucaagcugc

SEQ ID NO: 481662 - RNA, 19 nt, Artificial Sequence
  Description of Artificial Sequence: Synthetic oligonucleotide
uuacggcagauaaggucgg

SEQ ID NO: 481663 - RNA, 19 nt, Artificial Sequence
  Description of Artificial Sequence: Synthetic oligonucleotide
gaacagacacguagagucg

SEQ ID NO: 481664 - RNA, 19 nt, Artificial Sequence
  Description of Artificial Sequence: Synthetic oligonucleotide
gaguuguuuccauagggaa

SEQ ID NO: 481665 - RNA, 19 nt, Artificial Sequence
  Description of Artificial Sequence: Synthetic oligonucleotide
uugagcgcaauggcgaugc

SEQ ID NO: 481666 - RNA, 19 nt, Artificial Sequence
  Description of Artificial Sequence: Synthetic oligonucleotide
agcgaagccagccaccaca

SEQ ID NO: 481667 - RNA, 19 nt, Artificial Sequence
  Description of Artificial Sequence: Synthetic oligonucleotide
guagcacagacaucgcggc

SEQ ID NO: 481668 - RNA, 19 nt, Artificial Sequence
  Description of Artificial Sequence: Synthetic oligonucleotide
aaggaauccgucuggcauu

SEQ ID NO: 481669 - RNA, 19 nt, Artificial Sequence
  Description of Artificial Sequence: Synthetic oligonucleotide
uucgugcuauugcagccag

SEQ ID NO: 481670 - RNA, 19 nt, Artificial Sequence
  Description of Artificial Sequence: Synthetic oligonucleotide
acaugccaccuccuuaguc

SEQ ID NO: 481671 - RNA, 19 nt, Artificial Sequence
  Description of Artificial Sequence: Synthetic oligonucleotide
caugucagaaagccauccc

SEQ ID NO: 481672 - RNA, 19 nt, Artificial Sequence
  Description of Artificial Sequence: Synthetic oligonucleotide
uguuccccacagaagguac

SEQ ID NO: 481673 - RNA, 19 nt, Artificial Sequence
  Description of Artificial Sequence: Synthetic oligonucleotide
uguucggucagagaagcau

SEQ ID NO: 481674 - RNA, 19 nt, Artificial Sequence
  Description of Artificial Sequence: Synthetic oligonucleotide
cagcaaguacaucauguug

SEQ ID NO: 481675 - RNA, 19 nt, Artificial Sequence
  Description of Artificial Sequence: Synthetic oligonucleotide
gguuuucuaaagcauguca

SEQ ID NO: 481676 - RNA, 19 nt, Artificial Sequence
  Description of Artificial Sequence: Synthetic oligonucleotide
auuggauaauccacacggg

SEQ ID NO: 481677 - RNA, 19 nt, Artificial Sequence
  Description of Artificial Sequence: Synthetic oligonucleotide
agguacuugcccaggaagg

SEQ ID NO: 481678 - RNA, 19 nt, Artificial Sequence
  Description of Artificial Sequence: Synthetic oligonucleotide
cuguuaagaguguucgguc

SEQ ID NO: 481679 - RNA, 19 nt, Artificial Sequence
  Description of Artificial Sequence: Synthetic oligonucleotide
ggauaauccacacgggaac

SEQ ID NO: 481680 - RNA, 19 nt, Artificial Sequence
  Description of Artificial Sequence: Synthetic oligonucleotide
gaaggagacguaacaggcc

SEQ ID NO: 481681 - RNA, 19 nt, Artificial Sequence
  Description of Artificial Sequence: Synthetic oligonucleotide
cauacgacuugaguucagg

SEQ ID NO: 481682 - RNA, 19 nt, Artificial Sequence
  Description of Artificial Sequence: Synthetic oligonucleotide
agacguaacaggccgugga

SEQ ID NO: 481683 - RNA, 19 nt, Artificial Sequence
  Description of Artificial Sequence: Synthetic oligonucleotide
gcacacacacaucacacag

SEQ ID NO: 481684 - RNA, 19 nt, Artificial Sequence
  Description of Artificial Sequence: Synthetic oligonucleotide
uccgguuacggcagauaag

SEQ ID NO: 481685 - RNA, 19 nt, Artificial Sequence
  Description of Artificial Sequence: Synthetic oligonucleotide
ugcacacacacaucacaca

SEQ ID NO: 481686 - RNA, 19 nt, Artificial Sequence
  Description of Artificial Sequence: Synthetic oligonucleotide
ugagccacgugcugaguug

SEQ ID NO: 481687 - RNA, 19 nt, Artificial Sequence
  Description of Artificial Sequence: Synthetic oligonucleotide
acagguaucuguagaccac

SEQ ID NO: 481688 - RNA, 19 nt, Artificial Sequence
  Description of Artificial Sequence: Synthetic oligonucleotide
cacaucaggucaacauugc

SEQ ID NO: 481689 - RNA, 19 nt, Artificial Sequence
  Description of Artificial Sequence: Synthetic oligonucleotide
caaacgaaggaggagaaaa

SEQ ID NO: 481690 - RNA, 19 nt, Artificial Sequence
  Description of Artificial Sequence: Synthetic oligonucleotide
ugcacggagaguagggguc

SEQ ID NO: 481691 - RNA, 19 nt, Artificial Sequence
  Description of Artificial Sequence: Synthetic oligonucleotide
uuuaggaaugaugcccacu

SEQ ID NO: 481692 - RNA, 19 nt, Artificial Sequence
  Description of Artificial Sequence: Synthetic oligonucleotide
ugaggcaugcacagccugu

SEQ ID NO: 481693 - RNA, 19 nt, Artificial Sequence
  Description of Artificial Sequence: Synthetic oligonucleotide
cauagaggacgcaggcgcc

SEQ ID NO: 481694 - RNA, 19 nt, Artificial Sequence
  Description of Artificial Sequence: Synthetic oligonucleotide
gacacuuuccuggaaccac

SEQ ID NO: 481695 - RNA, 19 nt, Artificial Sequence
  Description of Artificial Sequence: Synthetic oligonucleotide
gacguaacaggccguggac

SEQ ID NO: 481696 - RNA, 19 nt, Artificial Sequence
  Description of Artificial Sequence: Synthetic oligonucleotide
cuccugaccacaugccacc

SEQ ID NO: 481697 - RNA, 19 nt, Artificial Sequence
  Description of Artificial Sequence: Synthetic oligonucleotide
gguuacggcagauaagguc

SEQ ID NO: 481698 - RNA, 19 nt, Artificial Sequence
  Description of Artificial Sequence: Synthetic oligonucleotide
uugcacggagaguaggggu

SEQ ID NO: 481699 - RNA, 19 nt, Artificial Sequence
  Description of Artificial Sequence: Synthetic oligonucleotide
uuuuaggaaugaugcccac

SEQ ID NO: 481700 - RNA, 19 nt, Artificial Sequence
  Description of Artificial Sequence: Synthetic oligonucleotide
aucuauuaaguaugugcuu

SEQ ID NO: 481701 - RNA, 19 nt, Artificial Sequence
  Description of Artificial Sequence: Synthetic oligonucleotide
agcgcaauggcgaugcuga

SEQ ID NO: 481702 - RNA, 19 nt, Artificial Sequence
  Description of Artificial Sequence: Synthetic oligonucleotide
aacaaacgaaggaggagaa

SEQ ID NO: 481703 - RNA, 19 nt, Artificial Sequence
  Description of Artificial Sequence: Synthetic oligonucleotide
guugcacggagaguagggg

SEQ ID NO: 481704 - RNA, 19 nt, Artificial Sequence
  Description of Artificial Sequence: Synthetic oligonucleotide
auacagacuaccacauuca

SEQ ID NO: 481705 - RNA, 19 nt, Artificial Sequence
  Description of Artificial Sequence: Synthetic oligonucleotide
ggccaaaggaaauuugcac

SEQ ID NO: 481706 - RNA, 19 nt, Artificial Sequence
  Description of Artificial Sequence: Synthetic oligonucleotide
uagagcgacgaguccuucc

SEQ ID NO: 481707 - RNA, 19 nt, Artificial Sequence
  Description of Artificial Sequence: Synthetic oligonucleotide
cguagagucgauaccagcc

SEQ ID NO: 481708 - RNA, 19 nt, Artificial Sequence
  Description of Artificial Sequence: Synthetic oligonucleotide
acgggaacccuuggguucc

SEQ ID NO: 481709 - RNA, 19 nt, Artificial Sequence
  Description of Artificial Sequence: Synthetic oligonucleotide
uacuuguacugguggguga

SEQ ID NO: 481710 - RNA, 19 nt, Artificial Sequence
  Description of Artificial Sequence: Synthetic oligonucleotide
agcaauuuccaugcaggca

SEQ ID NO: 481711 - RNA, 19 nt, Artificial Sequence
  Description of Artificial Sequence: Synthetic oligonucleotide
cugacauacagguaucugu

SEQ ID NO: 481712 - RNA, 19 nt, Artificial Sequence
  Description of Artificial Sequence: Synthetic oligonucleotide
uggggugaaggaauccguc

SEQ ID NO: 481713 - RNA, 19 nt, Artificial Sequence
  Description of Artificial Sequence: Synthetic oligonucleotide
caauuuccaugcaggcagc

SEQ ID NO: 481714 - RNA, 19 nt, Artificial Sequence
  Description of Artificial Sequence: Synthetic oligonucleotide
cacgugcugaguuguuucc

SEQ ID NO: 481715 - RNA, 19 nt, Artificial Sequence
  Description of Artificial Sequence: Synthetic oligonucleotide
ccgguuacggcagauaagg

SEQ ID NO: 481716 - RNA, 19 nt, Artificial Sequence
  Description of Artificial Sequence: Synthetic oligonucleotide
uugaaagcagaugcuuggu

SEQ ID NO: 481717 - RNA, 19 nt, Artificial Sequence
  Description of Artificial Sequence: Synthetic oligonucleotide
gacgaugcaggugaacaca

SEQ ID NO: 481718 - RNA, 19 nt, Artificial Sequence
  Description of Artificial Sequence: Synthetic oligonucleotide
ggaaauuugcacaucaggu

SEQ ID NO: 481719 - RNA, 19 nt, Artificial Sequence
  Description of Artificial Sequence: Synthetic oligonucleotide
uguagagcgacgaguccuu

SEQ ID NO: 481720 - RNA, 19 nt, Artificial Sequence
  Description of Artificial Sequence: Synthetic oligonucleotide
cacguagagucgauaccag

SEQ ID NO: 481721 - RNA, 19 nt, Artificial Sequence
  Description of Artificial Sequence: Synthetic oligonucleotide
gacuccugaccacaugcca

SEQ ID NO: 481722 - RNA, 19 nt, Artificial Sequence
  Description of Artificial Sequence: Synthetic oligonucleotide
accacauucagaaucuauu

SEQ ID NO: 481723 - RNA, 19 nt, Artificial Sequence
  Description of Artificial Sequence: Synthetic oligonucleotide
agacaucgcggcccuccgc

SEQ ID NO: 481724 - RNA, 19 nt, Artificial Sequence
  Description of Artificial Sequence: Synthetic oligonucleotide
gcugaguuguuuccauagg

SEQ ID NO: 481725 - RNA, 19 nt, Artificial Sequence
  Description of Artificial Sequence: Synthetic oligonucleotide
uaauccacacgggaacccu

SEQ ID NO: 481726 - RNA, 19 nt, Artificial Sequence
  Description of Artificial Sequence: Synthetic oligonucleotide
gagguucgugcuauugcag

SEQ ID NO: 481727 - RNA, 19 nt, Artificial Sequence
  Description of Artificial Sequence: Synthetic oligonucleotide
acgguggcauucucagggg

SEQ ID NO: 481728 - RNA, 19 nt, Artificial Sequence
  Description of Artificial Sequence: Synthetic oligonucleotide
acggcagauaaggucgggg

SEQ ID NO: 481729 - RNA, 19 nt, Artificial Sequence
  Description of Artificial Sequence: Synthetic oligonucleotide
gaccagacauuggauaauc

SEQ ID NO: 481730 - RNA, 19 nt, Artificial Sequence
  Description of Artificial Sequence: Synthetic oligonucleotide
aggaauccgucuggcauuc

SEQ ID NO: 481731 - RNA, 19 nt, Artificial Sequence
  Description of Artificial Sequence: Synthetic oligonucleotide
cauagggaacagugacgcc

SEQ ID NO: 481732 - RNA, 19 nt, Artificial Sequence
  Description of Artificial Sequence: Synthetic oligonucleotide
acguggucgucaauguagg

SEQ ID NO: 481733 - RNA, 19 nt, Artificial Sequence
  Description of Artificial Sequence: Synthetic oligonucleotide
cauggccccgaucaagcug

SEQ ID NO: 481734 - RNA, 19 nt, Artificial Sequence
  Description of Artificial Sequence: Synthetic oligonucleotide
ggagccauugguagcacag

SEQ ID NO: 481735 - RNA, 19 nt, Artificial Sequence
  Description of Artificial Sequence: Synthetic oligonucleotide
gugaccuuggggaucacuc

SEQ ID NO: 481736 - RNA, 19 nt, Artificial Sequence
  Description of Artificial Sequence: Synthetic oligonucleotide
agaugagagguggagggau

SEQ ID NO: 481737 - RNA, 19 nt, Artificial Sequence
  Description of Artificial Sequence: Synthetic oligonucleotide
cauggccauccgaauggcc

SEQ ID NO: 481738 - RNA, 19 nt, Artificial Sequence
  Description of Artificial Sequence: Synthetic oligonucleotide
gagacguaacaggccgugg

SEQ ID NO: 481739 - RNA, 19 nt, Artificial Sequence
  Description of Artificial Sequence: Synthetic oligonucleotide
cacgggaacccuuggguuc

SEQ ID NO: 481740 - RNA, 19 nt, Artificial Sequence
  Description of Artificial Sequence: Synthetic oligonucleotide
agguuaggaaggccucuug

SEQ ID NO: 481741 - RNA, 19 nt, Artificial Sequence
  Description of Artificial Sequence: Synthetic oligonucleotide
gagcaaggcagagugaugu

SEQ ID NO: 481742 - RNA, 19 nt, Artificial Sequence
  Description of Artificial Sequence: Synthetic oligonucleotide
gguuacuugugucaaugaa

SEQ ID NO: 481743 - RNA, 19 nt, Artificial Sequence
  Description of Artificial Sequence: Synthetic oligonucleotide
ucgcacaaaggagucuucu

SEQ ID NO: 481744 - RNA, 19 nt, Artificial Sequence
  Description of Artificial Sequence: Synthetic oligonucleotide
acagacuaccacauucaga

SEQ ID NO: 481745 - RNA, 19 nt, Artificial Sequence
  Description of Artificial Sequence: Synthetic oligonucleotide
ugggcuuaggccucucaua

SEQ ID NO: 481746 - RNA, 19 nt, Artificial Sequence
  Description of Artificial Sequence: Synthetic oligonucleotide
ggaacagugacgccagcca

SEQ ID NO: 481747 - RNA, 19 nt, Artificial Sequence
  Description of Artificial Sequence: Synthetic oligonucleotide
agggcugacuguccugaug

SEQ ID NO: 481748 - RNA, 19 nt, Artificial Sequence
  Description of Artificial Sequence: Synthetic oligonucleotide
agcaagcugacagguaggu

SEQ ID NO: 481749 - RNA, 19 nt, Artificial Sequence
  Description of Artificial Sequence: Synthetic oligonucleotide
ccuccuuaguccuugucac

SEQ ID NO: 481750 - RNA, 19 nt, Artificial Sequence
  Description of Artificial Sequence: Synthetic oligonucleotide
uccgcuccccaguggaucu

SEQ ID NO: 481751 - RNA, 19 nt, Artificial Sequence
  Description of Artificial Sequence: Synthetic oligonucleotide
guccgguuacggcagauaa

SEQ ID NO: 481752 - RNA, 19 nt, Artificial Sequence
  Description of Artificial Sequence: Synthetic oligonucleotide
gguagcaccgaugcccagg

SEQ ID NO: 481753 - RNA, 19 nt, Artificial Sequence
  Description of Artificial Sequence: Synthetic oligonucleotide
agcgcagggcuaugucagg

SEQ ID NO: 481754 - RNA, 19 nt, Artificial Sequence
  Description of Artificial Sequence: Synthetic oligonucleotide
acaggccaaaggaaauuug

SEQ ID NO: 481755 - RNA, 19 nt, Artificial Sequence
  Description of Artificial Sequence: Synthetic oligonucleotide
guagcaccgaugcccagga

SEQ ID NO: 481756 - RNA, 19 nt, Artificial Sequence
  Description of Artificial Sequence: Synthetic oligonucleotide
aagacggcauccacauaga

SEQ ID NO: 481757 - RNA, 19 nt, Artificial Sequence
  Description of Artificial Sequence: Synthetic oligonucleotide
aagguuaggaaggccucuu

SEQ ID NO: 481758 - RNA, 19 nt, Artificial Sequence
  Description of Artificial Sequence: Synthetic oligonucleotide
gguacuugcccaggaaggc

SEQ ID NO: 481759 - RNA, 19 nt, Artificial Sequence
  Description of Artificial Sequence: Synthetic oligonucleotide
gagcgcaauggcgaugcug

SEQ ID NO: 481760 - RNA, 19 nt, Artificial Sequence
  Description of Artificial Sequence: Synthetic oligonucleotide
aggccucucauauucucuu

SEQ ID NO: 481761 - RNA, 19 nt, Artificial Sequence
  Description of Artificial Sequence: Synthetic oligonucleotide
ggaacuguuaagaguguuc

SEQ ID NO: 481762 - RNA, 19 nt, Artificial Sequence
  Description of Artificial Sequence: Synthetic oligonucleotide
ccagaacagacacguagag

SEQ ID NO: 481763 - RNA, 19 nt, Artificial Sequence
  Description of Artificial Sequence: Synthetic oligonucleotide
augguagggcucugccgag

SEQ ID NO: 481764 - RNA, 19 nt, Artificial Sequence
  Description of Artificial Sequence: Synthetic oligonucleotide
acacgggaacccuuggguu

SEQ ID NO: 481765 - RNA, 19 nt, Artificial Sequence
  Description of Artificial Sequence: Synthetic oligonucleotide
cagccucguacuuguacug

SEQ ID NO: 481766 - RNA, 19 nt, Artificial Sequence
  Description of Artificial Sequence: Synthetic oligonucleotide
guucggucagagaagcauc

SEQ ID NO: 481767 - RNA, 19 nt, Artificial Sequence
  Description of Artificial Sequence: Synthetic oligonucleotide
uacggcagauaaggucggg

SEQ ID NO: 481768 - RNA, 19 nt, Artificial Sequence
  Description of Artificial Sequence: Synthetic oligonucleotide
acguaacaggccguggaca

SEQ ID NO: 481769 - RNA, 19 nt, Artificial Sequence
  Description of Artificial Sequence: Synthetic oligonucleotide
gcgcauacgacuugaguuc

SEQ ID NO: 481770 - RNA, 19 nt, Artificial Sequence
  Description of Artificial Sequence: Synthetic oligonucleotide
cacacacacaucacacaga

SEQ ID NO: 481771 - RNA, 19 nt, Artificial Sequence
  Description of Artificial Sequence: Synthetic oligonucleotide
gauguagcguuuauaguuu

SEQ ID NO: 481772 - RNA, 19 nt, Artificial Sequence
  Description of Artificial Sequence: Synthetic oligonucleotide
ggaaguggugagguuaaac

SEQ ID NO: 481773 - RNA, 19 nt, Artificial Sequence
  Description of Artificial Sequence: Synthetic oligonucleotide
guagggcucugccgagagg

SEQ ID NO: 481774 - RNA, 19 nt, Artificial Sequence
  Description of Artificial Sequence: Synthetic oligonucleotide
ucgugcuauugcagccagc

SEQ ID NO: 481775 - RNA, 19 nt, Artificial Sequence
  Description of Artificial Sequence: Synthetic oligonucleotide
gggagcauagccugcucac

SEQ ID NO: 481776 - RNA, 19 nt, Artificial Sequence
  Description of Artificial Sequence: Synthetic oligonucleotide
gacaucgcggcccuccgcu

SEQ ID NO: 481777 - RNA, 19 nt, Artificial Sequence
  Description of Artificial Sequence: Synthetic oligonucleotide
gcgaugcugacauacaggu

SEQ ID NO: 481778 - RNA, 19 nt, Artificial Sequence
  Description of Artificial Sequence: Synthetic oligonucleotide
ccaacaaacgaaggaggag

SEQ ID NO: 481779 - RNA, 19 nt, Artificial Sequence
  Description of Artificial Sequence: Synthetic oligonucleotide
gggucaagggcugagccac

SEQ ID NO: 481780 - RNA, 19 nt, Artificial Sequence
  Description of Artificial Sequence: Synthetic oligonucleotide
gauugccgucaucccaaga

SEQ ID NO: 481781 - RNA, 19 nt, Artificial Sequence
  Description of Artificial Sequence: Synthetic oligonucleotide
gggaacagugacgccagcc

SEQ ID NO: 481782 - RNA, 19 nt, Artificial Sequence
  Description of Artificial Sequence: Synthetic oligonucleotide
acaucgcggcccuccgcuc

SEQ ID NO: 481783 - RNA, 19 nt, Artificial Sequence
  Description of Artificial Sequence: Synthetic oligonucleotide
aguccuuccuccgcacgug

SEQ ID NO: 481784 - RNA, 19 nt, Artificial Sequence
  Description of Artificial Sequence: Synthetic oligonucleotide
ucccagcgcauacgacuug

SEQ ID NO: 481785 - RNA, 19 nt, Artificial Sequence
  Description of Artificial Sequence: Synthetic oligonucleotide
guucgugcuauugcagcca

SEQ ID NO: 481786 - RNA, 19 nt, Artificial Sequence
  Description of Artificial Sequence: Synthetic oligonucleotide
uggaaccacgguggcauuc

SEQ ID NO: 481787 - RNA, 19 nt, Artificial Sequence
  Description of Artificial Sequence: Synthetic oligonucleotide
acaaacgaaggaggagaaa

SEQ ID NO: 481788 - RNA, 19 nt, Artificial Sequence
  Description of Artificial Sequence: Synthetic oligonucleotide
ccaucggccccacacacug

SEQ ID NO: 481789 - RNA, 19 nt, Artificial Sequence
  Description of Artificial Sequence: Synthetic oligonucleotide
agccagcgaagcaagcuga

SEQ ID NO: 481790 - RNA, 19 nt, Artificial Sequence
  Description of Artificial Sequence: Synthetic oligonucleotide
caucggccccacacacugg

SEQ ID NO: 481791 - RNA, 19 nt, Artificial Sequence
  Description of Artificial Sequence: Synthetic oligonucleotide
cguaacaggccguggacac

SEQ ID NO: 481792 - RNA, 19 nt, Artificial Sequence
  Description of Artificial Sequence: Synthetic oligonucleotide
ggagacguaacaggccgug

SEQ ID NO: 481793 - RNA, 19 nt, Artificial Sequence
  Description of Artificial Sequence: Synthetic oligonucleotide
cagguaucuguagaccaca

SEQ ID NO: 481794 - RNA, 19 nt, Artificial Sequence
  Description of Artificial Sequence: Synthetic oligonucleotide
gcgaugguagggcucugcc

SEQ ID NO: 481795 - RNA, 19 nt, Artificial Sequence
  Description of Artificial Sequence: Synthetic oligonucleotide
gccccgaucaagcugcaca

SEQ ID NO: 481796 - RNA, 19 nt, Artificial Sequence
  Description of Artificial Sequence: Synthetic oligonucleotide
gguggagggaugaaaccca

SEQ ID NO: 481797 - RNA, 19 nt, Artificial Sequence
  Description of Artificial Sequence: Synthetic oligonucleotide
ggggauugccgucauccca

SEQ ID NO: 481798 - RNA, 19 nt, Artificial Sequence
  Description of Artificial Sequence: Synthetic oligonucleotide
acgugcugaguuguuucca

SEQ ID NO: 481799 - RNA, 19 nt, Artificial Sequence
  Description of Artificial Sequence: Synthetic oligonucleotide
uagcaccgaugcccaggag

SEQ ID NO: 481800 - RNA, 19 nt, Artificial Sequence
  Description of Artificial Sequence: Synthetic oligonucleotide
cuccuuaguccuugucaca

SEQ ID NO: 481801 - RNA, 19 nt, Artificial Sequence
  Description of Artificial Sequence: Synthetic oligonucleotide
cacacgggaacccuugggu

SEQ ID NO: 481802 - RNA, 19 nt, Artificial Sequence
  Description of Artificial Sequence: Synthetic oligonucleotide
agauaaggucggggucagg

SEQ ID NO: 481803 - RNA, 19 nt, Artificial Sequence
  Description of Artificial Sequence: Synthetic oligonucleotide
cuugauacucugugcuggu

SEQ ID NO: 481804 - RNA, 19 nt, Artificial Sequence
  Description of Artificial Sequence: Synthetic oligonucleotide
agucgauaccagccccaaa

SEQ ID NO: 481805 - RNA, 19 nt, Artificial Sequence
  Description of Artificial Sequence: Synthetic oligonucleotide
uguccgguuacggcagaua

SEQ ID NO: 481806 - RNA, 19 nt, Artificial Sequence
  Description of Artificial Sequence: Synthetic oligonucleotide
ccacauagauuuugguaca

SEQ ID NO: 481807 - RNA, 19 nt, Artificial Sequence
  Description of Artificial Sequence: Synthetic oligonucleotide
ccacgugcugaguuguuuc

SEQ ID NO: 481808 - RNA, 19 nt, Artificial Sequence
  Description of Artificial Sequence: Synthetic oligonucleotide
ugguagggcucugccgaga

SEQ ID NO: 481809 - RNA, 19 nt, Artificial Sequence
  Description of Artificial Sequence: Synthetic oligonucleotide
ggauugccgucaucccaag

SEQ ID NO: 481810 - RNA, 19 nt, Artificial Sequence
  Description of Artificial Sequence: Synthetic oligonucleotide
gacggcauccacauagauu

SEQ ID NO: 481811 - RNA, 19 nt, Artificial Sequence
  Description of Artificial Sequence: Synthetic oligonucleotide
ugagcgcaauggcgaugcu

SEQ ID NO: 481812 - RNA, 19 nt, Artificial Sequence
  Description of Artificial Sequence: Synthetic oligonucleotide
cugugcuugaagccucaaa

SEQ ID NO: 481813 - RNA, 19 nt, Artificial Sequence
  Description of Artificial Sequence: Synthetic oligonucleotide
gagcgacgaguccuuccuc

SEQ ID NO: 481814 - RNA, 19 nt, Artificial Sequence
  Description of Artificial Sequence: Synthetic oligonucleotide
cggagaguaggggucaagg

SEQ ID NO: 481815 - RNA, 19 nt, Artificial Sequence
  Description of Artificial Sequence: Synthetic oligonucleotide
gcaccgaugcccaggagca

SEQ ID NO: 481816 - RNA, 19 nt, Artificial Sequence
  Description of Artificial Sequence: Synthetic oligonucleotide
gcgagaagagagacaggcc

SEQ ID NO: 481817 - RNA, 19 nt, Artificial Sequence
  Description of Artificial Sequence: Synthetic oligonucleotide
ggccccacacacuggggug

SEQ ID NO: 481818 - RNA, 19 nt, Artificial Sequence
  Description of Artificial Sequence: Synthetic oligonucleotide
cuccgcuccccaguggauc

SEQ ID NO: 481819 - RNA, 19 nt, Artificial Sequence
  Description of Artificial Sequence: Synthetic oligonucleotide
gggcuuaggccucucauau

SEQ ID NO: 481820 - RNA, 19 nt, Artificial Sequence
  Description of Artificial Sequence: Synthetic oligonucleotide
gggauugccgucaucccaa

SEQ ID NO: 481821 - RNA, 19 nt, Artificial Sequence
  Description of Artificial Sequence: Synthetic oligonucleotide
gugacgccagccacaggac

SEQ ID NO: 481822 - RNA, 19 nt, Artificial Sequence
  Description of Artificial Sequence: Synthetic oligonucleotide
ggggugaaggaauccgucu

SEQ ID NO: 481823 - RNA, 19 nt, Artificial Sequence
  Description of Artificial Sequence: Synthetic oligonucleotide
cagaacagacacguagagu

SEQ ID NO: 481824 - RNA, 19 nt, Artificial Sequence
  Description of Artificial Sequence: Synthetic oligonucleotide
ccuauguagagcgacgagu

SEQ ID NO: 481825 - RNA, 19 nt, Artificial Sequence
  Description of Artificial Sequence: Synthetic oligonucleotide
guagagcgacgaguccuuc

SEQ ID NO: 481826 - RNA, 19 nt, Artificial Sequence
  Description of Artificial Sequence: Synthetic oligonucleotide
uccgcacguggucgucaau

SEQ ID NO: 481827 - RNA, 19 nt, Artificial Sequence
  Description of Artificial Sequence: Synthetic oligonucleotide
ccgcacguggucgucaaug

SEQ ID NO: 481828 - RNA, 19 nt, Artificial Sequence
  Description of Artificial Sequence: Synthetic oligonucleotide
ccagcgcauacgacuugag

SEQ ID NO: 481829 - RNA, 19 nt, Artificial Sequence
  Description of Artificial Sequence: Synthetic oligonucleotide
gcauacgacuugaguucag

SEQ ID NO: 481830 - RNA, 19 nt, Artificial Sequence
  Description of Artificial Sequence: Synthetic oligonucleotide
cagcgcauacgacuugagu

SEQ ID NO: 481831 - RNA, 19 nt, Artificial Sequence
  Description of Artificial Sequence: Synthetic oligonucleotide
ggcgaugguagggcucugc

SEQ ID NO: 481832 - RNA, 19 nt, Artificial Sequence
  Description of Artificial Sequence: Synthetic oligonucleotide
gacucagggcagguuuucu

SEQ ID NO: 481833 - RNA, 19 nt, Artificial Sequence
  Description of Artificial Sequence: Synthetic oligonucleotide
gacgguggugaggcaugca

SEQ ID NO: 481834 - RNA, 19 nt, Artificial Sequence
  Description of Artificial Sequence: Synthetic oligonucleotide
uggccccgaucaagcugca

SEQ ID NO: 481835 - RNA, 19 nt, Artificial Sequence
  Description of Artificial Sequence: Synthetic oligonucleotide
gcgcagggcuaugucaggc

SEQ ID NO: 481836 - RNA, 19 nt, Artificial Sequence
  Description of Artificial Sequence: Synthetic oligonucleotide
cugagccacgugcugaguu

SEQ ID NO: 481837 - RNA, 19 nt, Artificial Sequence
  Description of Artificial Sequence: Synthetic oligonucleotide
ccagccucguacuuguacu

SEQ ID NO: 481838 - RNA, 19 nt, Artificial Sequence
  Description of Artificial Sequence: Synthetic oligonucleotide
cucccagcgcauacgacuu

SEQ ID NO: 481839 - RNA, 19 nt, Artificial Sequence
  Description of Artificial Sequence: Synthetic oligonucleotide
gcgaagcaagcugacaggu

SEQ ID NO: 481840 - RNA, 19 nt, Artificial Sequence
  Description of Artificial Sequence: Synthetic oligonucleotide
ggguuugaaagcagaugcu

SEQ ID NO: 481841 - RNA, 19 nt, Artificial Sequence
  Description of Artificial Sequence: Synthetic oligonucleotide
caucgugaacaggauuccu

SEQ ID NO: 481842 - RNA, 19 nt, Artificial Sequence
  Description of Artificial Sequence: Synthetic oligonucleotide
cagacacguagagucgaua

SEQ ID NO: 481843 - RNA, 19 nt, Artificial Sequence
  Description of Artificial Sequence: Synthetic oligonucleotide
ggcccuccgcuccccagug

SEQ ID NO: 481844 - RNA, 19 nt, Artificial Sequence
  Description of Artificial Sequence: Synthetic oligonucleotide
cuccgcacguggucgucaa

SEQ ID NO: 481845 - RNA, 19 nt, Artificial Sequence
  Description of Artificial Sequence: Synthetic oligonucleotide
guaacaggccguggacacu

SEQ ID NO: 481846 - RNA, 19 nt, Artificial Sequence
  Description of Artificial Sequence: Synthetic oligonucleotide
gcgagggauugugggaaac

SEQ ID NO: 481847 - RNA, 19 nt, Artificial Sequence
  Description of Artificial Sequence: Synthetic oligonucleotide
gaggacgcaggcgccuugu

SEQ ID NO: 481848 - RNA, 19 nt, Artificial Sequence
  Description of Artificial Sequence: Synthetic oligonucleotide
ggguagcaccgaugcccag

SEQ ID NO: 481849 - RNA, 19 nt, Artificial Sequence
  Description of Artificial Sequence: Synthetic oligonucleotide
uccuccgcacguggucguc

SEQ ID NO: 481850 - RNA, 19 nt, Artificial Sequence
  Description of Artificial Sequence: Synthetic oligonucleotide
ggaaccacgguggcauucu

SEQ ID NO: 481851 - RNA, 19 nt, Artificial Sequence
  Description of Artificial Sequence: Synthetic oligonucleotide
cugccacguggugguguag

SEQ ID NO: 481852 - RNA, 19 nt, Artificial Sequence
  Description of Artificial Sequence: Synthetic oligonucleotide
gccagcgaagcaagcugac

SEQ ID NO: 481853 - RNA, 19 nt, Artificial Sequence
  Description of Artificial Sequence: Synthetic oligonucleotide
gcacguggucgucaaugua

SEQ ID NO: 481854 - RNA, 19 nt, Artificial Sequence
  Description of Artificial Sequence: Synthetic oligonucleotide
ggcgagggauugugggaaa

SEQ ID NO: 481855 - RNA, 19 nt, Artificial Sequence
  Description of Artificial Sequence: Synthetic oligonucleotide
gcgcaauggcgaugcugac

SEQ ID NO: 481856 - RNA, 19 nt, Artificial Sequence
  Description of Artificial Sequence: Synthetic oligonucleotide
gcaaaggacuugagcgcaa

SEQ ID NO: 481857 - RNA, 19 nt, Artificial Sequence
  Description of Artificial Sequence: Synthetic oligonucleotide
agcccgcccucgugguuuu

SEQ ID NO: 481858 - RNA, 19 nt, Artificial Sequence
  Description of Artificial Sequence: Synthetic oligonucleotide
cacaugccaccuccuuagu

SEQ ID NO: 481859 - RNA, 19 nt, Artificial Sequence
  Description of Artificial Sequence: Synthetic oligonucleotide
cccagcgcauacgacuuga

SEQ ID NO: 481860 - RNA, 19 nt, Artificial Sequence
  Description of Artificial Sequence: Synthetic oligonucleotide
ggaccagacauuggauaau

SEQ ID NO: 481861 - RNA, 19 nt, Artificial Sequence
  Description of Artificial Sequence: Synthetic oligonucleotide
gcggcccuccgcuccccag

SEQ ID NO: 481862 - RNA, 19 nt, Artificial Sequence
  Description of Artificial Sequence: Synthetic oligonucleotide
cgcauacgacuugaguuca

SEQ ID NO: 481863 - RNA, 19 nt, Artificial Sequence
  Description of Artificial Sequence: Synthetic oligonucleotide
cgcuccccaguggaucucg

SEQ ID NO: 481864 - RNA, 19 nt, Artificial Sequence
  Description of Artificial Sequence: Synthetic oligonucleotide
cguggucgucaauguagga

SEQ ID NO: 481865 - RNA, 19 nt, Artificial Sequence
  Description of Artificial Sequence: Synthetic oligonucleotide
ggcuuaggccucucauauu

SEQ ID NO: 481866 - RNA, 19 nt, Artificial Sequence
  Description of Artificial Sequence: Synthetic oligonucleotide
ccauggccccgaucaagcu

SEQ ID NO: 481867 - RNA, 19 nt, Artificial Sequence
  Description of Artificial Sequence: Synthetic oligonucleotide
cuguccgguuacggcagau

SEQ ID NO: 481868 - RNA, 19 nt, Artificial Sequence
  Description of Artificial Sequence: Synthetic oligonucleotide
gggcuaugucaggccuuga

SEQ ID NO: 481869 - RNA, 19 nt, Artificial Sequence
  Description of Artificial Sequence: Synthetic oligonucleotide
ccuccgcacguggucguca

SEQ ID NO: 481870 - RNA, 19 nt, Artificial Sequence
  Description of Artificial Sequence: Synthetic oligonucleotide
cgguuacggcagauaaggu

SEQ ID NO: 481871 - RNA, 19 nt, Artificial Sequence
  Description of Artificial Sequence: Synthetic oligonucleotide
cgcggcccuccgcucccca

SEQ ID NO: 481872 - RNA, 19 nt, Artificial Sequence
  Description of Artificial Sequence: Synthetic oligonucleotide
cgggaacccuuggguuccu

SEQ ID NO: 481873 - RNA, 19 nt, Artificial Sequence
  Description of Artificial Sequence: Synthetic oligonucleotide
aauguauucuccuugugcc

SEQ ID NO: 481874 - RNA, 19 nt, Artificial Sequence
  Description of Artificial Sequence: Synthetic oligonucleotide
uugaauuuacucaugaugg

SEQ ID NO: 481875 - RNA, 19 nt, Artificial Sequence
  Description of Artificial Sequence: Synthetic oligonucleotide
uugauaacguauaugaugg

SEQ ID NO: 481876 - RNA, 19 nt, Artificial Sequence
  Description of Artificial Sequence: Synthetic oligonucleotide
uguaccuuaucauagaccc

SEQ ID NO: 481877 - RNA, 19 nt, Artificial Sequence
  Description of Artificial Sequence: Synthetic oligonucleotide
gaugccaacaaauuggucc

SEQ ID NO: 481878 - RNA, 19 nt, Artificial Sequence
  Description of Artificial Sequence: Synthetic oligonucleotide
aacccucucaaacauaugg

SEQ ID NO: 481879 - RNA, 19 nt, Artificial Sequence
  Description of Artificial Sequence: Synthetic oligonucleotide
aaacuuauccuacuccugg

SEQ ID NO: 481880 - RNA, 19 nt, Artificial Sequence
  Description of Artificial Sequence: Synthetic oligonucleotide
uuuugauggguuaucauag

SEQ ID NO: 481881 - RNA, 19 nt, Artificial Sequence
  Description of Artificial Sequence: Synthetic oligonucleotide
aaaauugcaagccacugga

SEQ ID NO: 481882 - RNA, 19 nt, Artificial Sequence
  Description of Artificial Sequence: Synthetic oligonucleotide
aaacuugcaauacuggucu

SEQ ID NO: 481883 - RNA, 19 nt, Artificial Sequence
  Description of Artificial Sequence: Synthetic oligonucleotide
gaagauauucuucuuccgg

SEQ ID NO: 481884 - RNA, 19 nt, Artificial Sequence
  Description of Artificial Sequence: Synthetic oligonucleotide
guugauaacguauaugaug

SEQ ID NO: 481885 - RNA, 19 nt, Artificial Sequence
  Description of Artificial Sequence: Synthetic oligonucleotide
uuaucauagacccuguuaa

SEQ ID NO: 481886 - RNA, 19 nt, Artificial Sequence
  Description of Artificial Sequence: Synthetic oligonucleotide
ugaguaguaguucauguca

SEQ ID NO: 481887 - RNA, 19 nt, Artificial Sequence
  Description of Artificial Sequence: Synthetic oligonucleotide
uuguccaagucaaugagag

SEQ ID NO: 481888 - RNA, 19 nt, Artificial Sequence
  Description of Artificial Sequence: Synthetic oligonucleotide
gauggguuaucauagcucc

SEQ ID NO: 481889 - RNA, 19 nt, Artificial Sequence
  Description of Artificial Sequence: Synthetic oligonucleotide
auaugauggcuucugcucc

SEQ ID NO: 481890 - RNA, 19 nt, Artificial Sequence
  Description of Artificial Sequence: Synthetic oligonucleotide
aauaucucaaucccacucu

SEQ ID NO: 481891 - RNA, 19 nt, Artificial Sequence
  Description of Artificial Sequence: Synthetic oligonucleotide
guuaucauagcuccuuugg

SEQ ID NO: 481892 - RNA, 19 nt, Artificial Sequence
  Description of Artificial Sequence: Synthetic oligonucleotide
uuggccauaagcuucaaac

SEQ ID NO: 481893 - RNA, 19 nt, Artificial Sequence
  Description of Artificial Sequence: Synthetic oligonucleotide
uuaucauagcuccuuuggg

SEQ ID NO: 481894 - RNA, 19 nt, Artificial Sequence
  Description of Artificial Sequence: Synthetic oligonucleotide
aauauuuugauggguuauc

SEQ ID NO: 481895 - RNA, 19 nt, Artificial Sequence
  Description of Artificial Sequence: Synthetic oligonucleotide
uuuaauaucugcaguaguu

SEQ ID NO: 481896 - RNA, 19 nt, Artificial Sequence
  Description of Artificial Sequence: Synthetic oligonucleotide
uucgcuuucaguguuggcg

SEQ ID NO: 481897 - RNA, 19 nt, Artificial Sequence
  Description of Artificial Sequence: Synthetic oligonucleotide
guagcaaccgaauaucucc

SEQ ID NO: 481898 - RNA, 19 nt, Artificial Sequence
  Description of Artificial Sequence: Synthetic oligonucleotide
aaggauuagcucguuauuc

SEQ ID NO: 481899 - RNA, 19 nt, Artificial Sequence
  Description of Artificial Sequence: Synthetic oligonucleotide
acucguuucgcuuucagug

SEQ ID NO: 481900 - RNA, 19 nt, Artificial Sequence
  Description of Artificial Sequence: Synthetic oligonucleotide
auugcaagccacuggaguc

SEQ ID NO: 481901 - RNA, 19 nt, Artificial Sequence
  Description of Artificial Sequence: Synthetic oligonucleotide
gaauauguguaacaggcca

SEQ ID NO: 481902 - RNA, 19 nt, Artificial Sequence
  Description of Artificial Sequence: Synthetic oligonucleotide
caaauugguccugagaugg

SEQ ID NO: 481903 - RNA, 19 nt, Artificial Sequence
  Description of Artificial Sequence: Synthetic oligonucleotide
aggaaaauaugacagccug

SEQ ID NO: 481904 - RNA, 19 nt, Artificial Sequence
  Description of Artificial Sequence: Synthetic oligonucleotide
aacaccguggguuucaaaa

SEQ ID NO: 481905 - RNA, 19 nt, Artificial Sequence
  Description of Artificial Sequence: Synthetic oligonucleotide
ucaaaggaucccuucaccc

SEQ ID NO: 481906 - RNA, 19 nt, Artificial Sequence
  Description of Artificial Sequence: Synthetic oligonucleotide
uggaagauagguuccaaca

SEQ ID NO: 481907 - RNA, 19 nt, Artificial Sequence
  Description of Artificial Sequence: Synthetic oligonucleotide
uaauaucucaaucccacuc

SEQ ID NO: 481908 - RNA, 19 nt, Artificial Sequence
  Description of Artificial Sequence: Synthetic oligonucleotide
ucauacaccgucuuggcgu

SEQ ID NO: 481909 - RNA, 19 nt, Artificial Sequence
  Description of Artificial Sequence: Synthetic oligonucleotide
uacacguugguuuuggcac

SEQ ID NO: 481910 - RNA, 19 nt, Artificial Sequence
  Description of Artificial Sequence: Synthetic oligonucleotide
ucguuauucuucuggaaag

SEQ ID NO: 481911 - RNA, 19 nt, Artificial Sequence
  Description of Artificial Sequence: Synthetic oligonucleotide
uuuuaauaucugcaguagu

SEQ ID NO: 481912 - RNA, 19 nt, Artificial Sequence
  Description of Artificial Sequence: Synthetic oligonucleotide
ugggguguaucacaaauga

SEQ ID NO: 481913 - RNA, 19 nt, Artificial Sequence
  Description of Artificial Sequence: Synthetic oligonucleotide
aaguucaccgggcaaaagu

SEQ ID NO: 481914 - RNA, 19 nt, Artificial Sequence
  Description of Artificial Sequence: Synthetic oligonucleotide
acaccggacaccccaaugc

SEQ ID NO: 481915 - RNA, 19 nt, Artificial Sequence
  Description of Artificial Sequence: Synthetic oligonucleotide
aacaaucugaggaaagcag

SEQ ID NO: 481916 - RNA, 19 nt, Artificial Sequence
  Description of Artificial Sequence: Synthetic oligonucleotide
uuauccuacuccuggauac

SEQ ID NO: 481917 - RNA, 19 nt, Artificial Sequence
  Description of Artificial Sequence: Synthetic oligonucleotide
aaaugagggaagcgaauca

SEQ ID NO: 481918 - RNA, 19 nt, Artificial Sequence
  Description of Artificial Sequence: Synthetic oligonucleotide
aauuuacucaugauggcca

SEQ ID NO: 481919 - RNA, 19 nt, Artificial Sequence
  Description of Artificial Sequence: Synthetic oligonucleotide
uuuguaccuuaucauagac

SEQ ID NO: 481920 - RNA, 19 nt, Artificial Sequence
  Description of Artificial Sequence: Synthetic oligonucleotide
ugcucgaucagacaccugu

SEQ ID NO: 481921 - RNA, 19 nt, Artificial Sequence
  Description of Artificial Sequence: Synthetic oligonucleotide
aaaggaucccuucacccca

SEQ ID NO: 481922 - RNA, 19 nt, Artificial Sequence
  Description of Artificial Sequence: Synthetic oligonucleotide
caaaauugcaagccacugg

SEQ ID NO: 481923 - RNA, 19 nt, Artificial Sequence
  Description of Artificial Sequence: Synthetic oligonucleotide
aaugagggaagcgaaucag

SEQ ID NO: 481924 - RNA, 19 nt, Artificial Sequence
  Description of Artificial Sequence: Synthetic oligonucleotide
gauacucucauagaggcuc

SEQ ID NO: 481925 - RNA, 19 nt, Artificial Sequence
  Description of Artificial Sequence: Synthetic oligonucleotide
ugaauuuacucaugauggc

SEQ ID NO: 481926 - RNA, 19 nt, Artificial Sequence
  Description of Artificial Sequence: Synthetic oligonucleotide
gacgugauuguacauccag

SEQ ID NO: 481927 - RNA, 19 nt, Artificial Sequence
  Description of Artificial Sequence: Synthetic oligonucleotide
uuguaccuuaucauagacc

SEQ ID NO: 481928 - RNA, 19 nt, Artificial Sequence
  Description of Artificial Sequence: Synthetic oligonucleotide
ucuagaauggcuuccuuua

SEQ ID NO: 481929 - RNA, 19 nt, Artificial Sequence
  Description of Artificial Sequence: Synthetic oligonucleotide
acucuggccuauuuugagc

SEQ ID NO: 481930 - RNA, 19 nt, Artificial Sequence
  Description of Artificial Sequence: Synthetic oligonucleotide
acuauuccuaccaggaacg

SEQ ID NO: 481931 - RNA, 19 nt, Artificial Sequence
  Description of Artificial Sequence: Synthetic oligonucleotide
auggaagauagguuccaac

SEQ ID NO: 481932 - RNA, 19 nt, Artificial Sequence
  Description of Artificial Sequence: Synthetic oligonucleotide
uaccuuaucauagacccug

SEQ ID NO: 481933 - RNA, 19 nt, Artificial Sequence
  Description of Artificial Sequence: Synthetic oligonucleotide
acgaccguaagcucucccc

SEQ ID NO: 481934 - RNA, 19 nt, Artificial Sequence
  Description of Artificial Sequence: Synthetic oligonucleotide
ucccaaagugucauacagg

SEQ ID NO: 481935 - RNA, 19 nt, Artificial Sequence
  Description of Artificial Sequence: Synthetic oligonucleotide
uguaggauauccaucugua

SEQ ID NO: 481936 - RNA, 19 nt, Artificial Sequence
  Description of Artificial Sequence: Synthetic oligonucleotide
uugaaacaauauuuugaug

SEQ ID NO: 481937 - RNA, 19 nt, Artificial Sequence
  Description of Artificial Sequence: Synthetic oligonucleotide
ucuauuagcauuguugcuu

SEQ ID NO: 481938 - RNA, 19 nt, Artificial Sequence
  Description of Artificial Sequence: Synthetic oligonucleotide
ucgaucagacaccuguuug

SEQ ID NO: 481939 - RNA, 19 nt, Artificial Sequence
  Description of Artificial Sequence: Synthetic oligonucleotide
auagguuccaacaaucuga

SEQ ID NO: 481940 - RNA, 19 nt, Artificial Sequence
  Description of Artificial Sequence: Synthetic oligonucleotide
aaggagucgaggcaccgug

SEQ ID NO: 481941 - RNA, 19 nt, Artificial Sequence
  Description of Artificial Sequence: Synthetic oligonucleotide
caaacauaugggccaaggg

SEQ ID NO: 481942 - RNA, 19 nt, Artificial Sequence
  Description of Artificial Sequence: Synthetic oligonucleotide
uauuuugagcaaagaugcc

SEQ ID NO: 481943 - RNA, 19 nt, Artificial Sequence
  Description of Artificial Sequence: Synthetic oligonucleotide
aacgaccguaagcucuccc

SEQ ID NO: 481944 - RNA, 19 nt, Artificial Sequence
  Description of Artificial Sequence: Synthetic oligonucleotide
ugauggguuaucauagcuc

SEQ ID NO: 481945 - RNA, 19 nt, Artificial Sequence
  Description of Artificial Sequence: Synthetic oligonucleotide
uuauuucagagaucugcca

SEQ ID NO: 481946 - RNA, 19 nt, Artificial Sequence
  Description of Artificial Sequence: Synthetic oligonucleotide
uguaaggcccuucucuaca

SEQ ID NO: 481947 - RNA, 19 nt, Artificial Sequence
  Description of Artificial Sequence: Synthetic oligonucleotide
gaaaauaugacagccugaa

SEQ ID NO: 481948 - RNA, 19 nt, Artificial Sequence
  Description of Artificial Sequence: Synthetic oligonucleotide
ucuucgagaagacaagcuu

SEQ ID NO: 481949 - RNA, 19 nt, Artificial Sequence
  Description of Artificial Sequence: Synthetic oligonucleotide
aacaauauuuugauggguu

SEQ ID NO: 481950 - RNA, 19 nt, Artificial Sequence
  Description of Artificial Sequence: Synthetic oligonucleotide
aaagaugcuuuugaccugu

SEQ ID NO: 481951 - RNA, 19 nt, Artificial Sequence
  Description of Artificial Sequence: Synthetic oligonucleotide
agaaguaauaaaggauuag

SEQ ID NO: 481952 - RNA, 19 nt, Artificial Sequence
  Description of Artificial Sequence: Synthetic oligonucleotide
cacuauuccuaccaggaac

SEQ ID NO: 481953 - RNA, 19 nt, Artificial Sequence
  Description of Artificial Sequence: Synthetic oligonucleotide
uucgagaagacaagcuugu

SEQ ID NO: 481954 - RNA, 19 nt, Artificial Sequence
  Description of Artificial Sequence: Synthetic oligonucleotide
aauacuggucugcuccugu

SEQ ID NO: 481955 - RNA, 19 nt, Artificial Sequence
  Description of Artificial Sequence: Synthetic oligonucleotide
gggauaauaucucaauccc

SEQ ID NO: 481956 - RNA, 19 nt, Artificial Sequence
  Description of Artificial Sequence: Synthetic oligonucleotide
gacaccccaaugcagcccg

SEQ ID NO: 481957 - RNA, 19 nt, Artificial Sequence
  Description of Artificial Sequence: Synthetic oligonucleotide
gugacgugauuguacaucc

SEQ ID NO: 481958 - RNA, 19 nt, Artificial Sequence
  Description of Artificial Sequence: Synthetic oligonucleotide
uuuggcaagcuccacucgu

SEQ ID NO: 481959 - RNA, 19 nt, Artificial Sequence
  Description of Artificial Sequence: Synthetic oligonucleotide
ucguuguucacugaguagu

SEQ ID NO: 481960 - RNA, 19 nt, Artificial Sequence
  Description of Artificial Sequence: Synthetic oligonucleotide
uuaguugcuugccucauuu

SEQ ID NO: 481961 - RNA, 19 nt, Artificial Sequence
  Description of Artificial Sequence: Synthetic oligonucleotide
ugaaguucucuuugccuag

SEQ ID NO: 481962 - RNA, 19 nt, Artificial Sequence
  Description of Artificial Sequence: Synthetic oligonucleotide
ugcaaaugagggaagcgaa

SEQ ID NO: 481963 - RNA, 19 nt, Artificial Sequence
  Description of Artificial Sequence: Synthetic oligonucleotide
acuugcaauacuggucugc

SEQ ID NO: 481964 - RNA, 19 nt, Artificial Sequence
  Description of Artificial Sequence: Synthetic oligonucleotide
uuccuaccaggaacgaccg

SEQ ID NO: 481965 - RNA, 19 nt, Artificial Sequence
  Description of Artificial Sequence: Synthetic oligonucleotide
acaccguggguuucaaaac

SEQ ID NO: 481966 - RNA, 19 nt, Artificial Sequence
  Description of Artificial Sequence: Synthetic oligonucleotide
ccgaauaucuccuuggaag

SEQ ID NO: 481967 - RNA, 19 nt, Artificial Sequence
  Description of Artificial Sequence: Synthetic oligonucleotide
cuucaaacaccggacaccc

SEQ ID NO: 481968 - RNA, 19 nt, Artificial Sequence
  Description of Artificial Sequence: Synthetic oligonucleotide
ggguguaucacaaaugacc

SEQ ID NO: 481969 - RNA, 19 nt, Artificial Sequence
  Description of Artificial Sequence: Synthetic oligonucleotide
aaucuuggcugcaaaugag

SEQ ID NO: 481970 - RNA, 19 nt, Artificial Sequence
  Description of Artificial Sequence: Synthetic oligonucleotide
cugccauuuacaaguacag

SEQ ID NO: 481971 - RNA, 19 nt, Artificial Sequence
  Description of Artificial Sequence: Synthetic oligonucleotide
uaguaguucaugucagcca

SEQ ID NO: 481972 - RNA, 19 nt, Artificial Sequence
  Description of Artificial Sequence: Synthetic oligonucleotide
aaaggauuagcucguuauu

SEQ ID NO: 481973 - RNA, 19 nt, Artificial Sequence
  Description of Artificial Sequence: Synthetic oligonucleotide
aggauuagcucguuauucu

SEQ ID NO: 481974 - RNA, 19 nt, Artificial Sequence
  Description of Artificial Sequence: Synthetic oligonucleotide
uucguuguucacugaguag

SEQ ID NO: 481975 - RNA, 19 nt, Artificial Sequence
  Description of Artificial Sequence: Synthetic oligonucleotide
aacuuauccuacuccugga

SEQ ID NO: 481976 - RNA, 19 nt, Artificial Sequence
  Description of Artificial Sequence: Synthetic oligonucleotide
uugggguguaucacaaaug

SEQ ID NO: 481977 - RNA, 19 nt, Artificial Sequence
  Description of Artificial Sequence: Synthetic oligonucleotide
augacgcgaaccuucccac

SEQ ID NO: 481978 - RNA, 19 nt, Artificial Sequence
  Description of Artificial Sequence: Synthetic oligonucleotide
uguaacaggccaacucaga

SEQ ID NO: 481979 - RNA, 19 nt, Artificial Sequence
  Description of Artificial Sequence: Synthetic oligonucleotide
uggccauaagcuucaaaca

SEQ ID NO: 481980 - RNA, 19 nt, Artificial Sequence
  Description of Artificial Sequence: Synthetic oligonucleotide
uaacguauaugauggcuuc

SEQ ID NO: 481981 - RNA, 19 nt, Artificial Sequence
  Description of Artificial Sequence: Synthetic oligonucleotide
aaccgaauaucuccuugga

SEQ ID NO: 481982 - RNA, 19 nt, Artificial Sequence
  Description of Artificial Sequence: Synthetic oligonucleotide
uuuacaaguacaggcccca

SEQ ID NO: 481983 - RNA, 19 nt, Artificial Sequence
  Description of Artificial Sequence: Synthetic oligonucleotide
gaguaguaguucaugucag

SEQ ID NO: 481984 - RNA, 19 nt, Artificial Sequence
  Description of Artificial Sequence: Synthetic oligonucleotide
ugaugacuaucuucaggcc

SEQ ID NO: 481985 - RNA, 19 nt, Artificial Sequence
  Description of Artificial Sequence: Synthetic oligonucleotide
ugccauuuacaaguacagg

SEQ ID NO: 481986 - RNA, 19 nt, Artificial Sequence
  Description of Artificial Sequence: Synthetic oligonucleotide
uucaccgggcaaaaguuuc

SEQ ID NO: 481987 - RNA, 19 nt, Artificial Sequence
  Description of Artificial Sequence: Synthetic oligonucleotide
auauuuugauggguuauca

SEQ ID NO: 481988 - RNA, 19 nt, Artificial Sequence
  Description of Artificial Sequence: Synthetic oligonucleotide
cuuuacacguugguuuugg

SEQ ID NO: 481989 - RNA, 19 nt, Artificial Sequence
  Description of Artificial Sequence: Synthetic oligonucleotide
gaucuucgagaagacaagc

SEQ ID NO: 481990 - RNA, 19 nt, Artificial Sequence
  Description of Artificial Sequence: Synthetic oligonucleotide
uggccuauuuugagcaaag

SEQ ID NO: 481991 - RNA, 19 nt, Artificial Sequence
  Description of Artificial Sequence: Synthetic oligonucleotide
uucuauuagcauuguugcu

SEQ ID NO: 481992 - RNA, 19 nt, Artificial Sequence
  Description of Artificial Sequence: Synthetic oligonucleotide
caaacuuauccuacuccug

SEQ ID NO: 481993 - RNA, 19 nt, Artificial Sequence
  Description of Artificial Sequence: Synthetic oligonucleotide
gacgcgaaccuucccaccc

SEQ ID NO: 481994 - RNA, 19 nt, Artificial Sequence
  Description of Artificial Sequence: Synthetic oligonucleotide
aauauguguaacaggccaa

SEQ ID NO: 481995 - RNA, 19 nt, Artificial Sequence
  Description of Artificial Sequence: Synthetic oligonucleotide
uuaaggagucgaggcaccg

SEQ ID NO: 481996 - RNA, 19 nt, Artificial Sequence
  Description of Artificial Sequence: Synthetic oligonucleotide
acgugauuguacauccagc

SEQ ID NO: 481997 - RNA, 19 nt, Artificial Sequence
  Description of Artificial Sequence: Synthetic oligonucleotide
accauggaauauguguaac

SEQ ID NO: 481998 - RNA, 19 nt, Artificial Sequence
  Description of Artificial Sequence: Synthetic oligonucleotide
gggaagauaggauaugguc

SEQ ID NO: 481999 - RNA, 19 nt, Artificial Sequence
  Description of Artificial Sequence: Synthetic oligonucleotide
uucuccggguccuuaaggu

SEQ ID NO: 482000 - RNA, 19 nt, Artificial Sequence
  Description of Artificial Sequence: Synthetic oligonucleotide
uccauucggaagccagcgg

SEQ ID NO: 482001 - RNA, 19 nt, Artificial Sequence
  Description of Artificial Sequence: Synthetic oligonucleotide
cugaguaguaguucauguc

SEQ ID NO: 482002 - RNA, 19 nt, Artificial Sequence
  Description of Artificial Sequence: Synthetic oligonucleotide
aacccaacuuugccuccac

SEQ ID NO: 482003 - RNA, 19 nt, Artificial Sequence
  Description of Artificial Sequence: Synthetic oligonucleotide
gaaaaguucaccgggcaaa

SEQ ID NO: 482004 - RNA, 19 nt, Artificial Sequence
  Description of Artificial Sequence: Synthetic oligonucleotide
ugauaacguauaugauggc

SEQ ID NO: 482005 - RNA, 19 nt, Artificial Sequence
  Description of Artificial Sequence: Synthetic oligonucleotide
gauuguacauccagcugug

SEQ ID NO: 482006 - RNA, 19 nt, Artificial Sequence
  Description of Artificial Sequence: Synthetic oligonucleotide
ggaagauaggauaugguca

SEQ ID NO: 482007 - RNA, 19 nt, Artificial Sequence
  Description of Artificial Sequence: Synthetic oligonucleotide
uuuacucaugauggccagg

SEQ ID NO: 482008 - RNA, 19 nt, Artificial Sequence
  Description of Artificial Sequence: Synthetic oligonucleotide
ccuggauacucucauagag

SEQ ID NO: 482009 - RNA, 19 nt, Artificial Sequence
  Description of Artificial Sequence: Synthetic oligonucleotide
cuggagucccaacaugacc

SEQ ID NO: 482010 - RNA, 19 nt, Artificial Sequence
  Description of Artificial Sequence: Synthetic oligonucleotide
ucaagggugucuuggcuuc

SEQ ID NO: 482011 - RNA, 19 nt, Artificial Sequence
  Description of Artificial Sequence: Synthetic oligonucleotide
ucgcuuucaguguuggcgu

SEQ ID NO: 482012 - RNA, 19 nt, Artificial Sequence
  Description of Artificial Sequence: Synthetic oligonucleotide
gauaacguauaugauggcu

SEQ ID NO: 482013 - RNA, 19 nt, Artificial Sequence
  Description of Artificial Sequence: Synthetic oligonucleotide
uagcaaccgaauaucuccu

SEQ ID NO: 482014 - RNA, 19 nt, Artificial Sequence
  Description of Artificial Sequence: Synthetic oligonucleotide
aucuuggcugcaaaugagg

SEQ ID NO: 482015 - RNA, 19 nt, Artificial Sequence
  Description of Artificial Sequence: Synthetic oligonucleotide
uuuacacguugguuuuggc

SEQ ID NO: 482016 - RNA, 19 nt, Artificial Sequence
  Description of Artificial Sequence: Synthetic oligonucleotide
aaauugcaagccacuggag

SEQ ID NO: 482017 - RNA, 19 nt, Artificial Sequence
  Description of Artificial Sequence: Synthetic oligonucleotide
caccguggguuucaaaacc

SEQ ID NO: 482018 - RNA, 19 nt, Artificial Sequence
  Description of Artificial Sequence: Synthetic oligonucleotide
cucggcaaacuuauccuac

SEQ ID NO: 482019 - RNA, 19 nt, Artificial Sequence
  Description of Artificial Sequence: Synthetic oligonucleotide
ggcaaacuuauccuacucc

SEQ ID NO: 482020 - RNA, 19 nt, Artificial Sequence
  Description of Artificial Sequence: Synthetic oligonucleotide
ucgccuucguuguucacug

SEQ ID NO: 482021 - RNA, 19 nt, Artificial Sequence
  Description of Artificial Sequence: Synthetic oligonucleotide
auaugacagccugaacaac

SEQ ID NO: 482022 - RNA, 19 nt, Artificial Sequence
  Description of Artificial Sequence: Synthetic oligonucleotide
cuucuccggguccuuaagg

SEQ ID NO: 482023 - RNA, 19 nt, Artificial Sequence
  Description of Artificial Sequence: Synthetic oligonucleotide
uggguuucaaaaccuucau

SEQ ID NO: 482024 - RNA, 19 nt, Artificial Sequence
  Description of Artificial Sequence: Synthetic oligonucleotide
ggaagaaugucaagacugg

SEQ ID NO: 482025 - RNA, 19 nt, Artificial Sequence
  Description of Artificial Sequence: Synthetic oligonucleotide
agcucguuauucuucugga

SEQ ID NO: 482026 - RNA, 19 nt, Artificial Sequence
  Description of Artificial Sequence: Synthetic oligonucleotide
ggccauaagcuucaaacac

SEQ ID NO: 482027 - RNA, 19 nt, Artificial Sequence
  Description of Artificial Sequence: Synthetic oligonucleotide
gaccuuugcucccagugca

SEQ ID NO: 482028 - RNA, 19 nt, Artificial Sequence
  Description of Artificial Sequence: Synthetic oligonucleotide
cuuaucauagacccuguua

SEQ ID NO: 482029 - RNA, 19 nt, Artificial Sequence
  Description of Artificial Sequence: Synthetic oligonucleotide
cauagaggcucuugauuug

SEQ ID NO: 482030 - RNA, 19 nt, Artificial Sequence
  Description of Artificial Sequence: Synthetic oligonucleotide
aaaaguucaccgggcaaaa

SEQ ID NO: 482031 - RNA, 19 nt, Artificial Sequence
  Description of Artificial Sequence: Synthetic oligonucleotide
ucgucagguagcaaccgaa

SEQ ID NO: 482032 - RNA, 19 nt, Artificial Sequence
  Description of Artificial Sequence: Synthetic oligonucleotide
cucguuauucuucuggaaa

SEQ ID NO: 482033 - RNA, 19 nt, Artificial Sequence
  Description of Artificial Sequence: Synthetic oligonucleotide
aaaguucaccgggcaaaag

SEQ ID NO: 482034 - RNA, 19 nt, Artificial Sequence
  Description of Artificial Sequence: Synthetic oligonucleotide
augauggccaggcucaaua

SEQ ID NO: 482035 - RNA, 19 nt, Artificial Sequence
  Description of Artificial Sequence: Synthetic oligonucleotide
ugucccgucgaaugaugcc

SEQ ID NO: 482036 - RNA, 19 nt, Artificial Sequence
  Description of Artificial Sequence: Synthetic oligonucleotide
auaacguauaugauggcuu

SEQ ID NO: 482037 - RNA, 19 nt, Artificial Sequence
  Description of Artificial Sequence: Synthetic oligonucleotide
gaagauagguuccaacaau

SEQ ID NO: 482038 - RNA, 19 nt, Artificial Sequence
  Description of Artificial Sequence: Synthetic oligonucleotide
uuggcgucugagaaguaau

SEQ ID NO: 482039 - RNA, 19 nt, Artificial Sequence
  Description of Artificial Sequence: Synthetic oligonucleotide
guuucgcuuucaguguugg

SEQ ID NO: 482040 - RNA, 19 nt, Artificial Sequence
  Description of Artificial Sequence: Synthetic oligonucleotide
cuaccauggaauaugugua

SEQ ID NO: 482041 - RNA, 19 nt, Artificial Sequence
  Description of Artificial Sequence: Synthetic oligonucleotide
gguguaucacaaaugacca

SEQ ID NO: 482042 - RNA, 19 nt, Artificial Sequence
  Description of Artificial Sequence: Synthetic oligonucleotide
cggaagaaugucaagacug

SEQ ID NO: 482043 - RNA, 19 nt, Artificial Sequence
  Description of Artificial Sequence: Synthetic oligonucleotide
augagggaagcgaaucagg

SEQ ID NO: 482044 - RNA, 19 nt, Artificial Sequence
  Description of Artificial Sequence: Synthetic oligonucleotide
aacguauaugauggcuucu

SEQ ID NO: 482045 - RNA, 19 nt, Artificial Sequence
  Description of Artificial Sequence: Synthetic oligonucleotide
ucggcaaacuuauccuacu

SEQ ID NO: 482046 - RNA, 19 nt, Artificial Sequence
  Description of Artificial Sequence: Synthetic oligonucleotide
gagcuuaguugcuugccuc

SEQ ID NO: 482047 - RNA, 19 nt, Artificial Sequence
  Description of Artificial Sequence: Synthetic oligonucleotide
uucaugucgucagguagca

SEQ ID NO: 482048 - RNA, 19 nt, Artificial Sequence
  Description of Artificial Sequence: Synthetic oligonucleotide
acguauaugauggcuucug

SEQ ID NO: 482049 - RNA, 19 nt, Artificial Sequence
  Description of Artificial Sequence: Synthetic oligonucleotide
ugcuaucaggcagugagua

SEQ ID NO: 482050 - RNA, 19 nt, Artificial Sequence
  Description of Artificial Sequence: Synthetic oligonucleotide
agauagguuccaacaaucu

SEQ ID NO: 482051 - RNA, 19 nt, Artificial Sequence
  Description of Artificial Sequence: Synthetic oligonucleotide
gcagacaacacuuagguuu

SEQ ID NO: 482052 - RNA, 19 nt, Artificial Sequence
  Description of Artificial Sequence: Synthetic oligonucleotide
agggucaggaaccacuauu

SEQ ID NO: 482053 - RNA, 19 nt, Artificial Sequence
  Description of Artificial Sequence: Synthetic oligonucleotide
uuauauccuuugugcaaaa

SEQ ID NO: 482054 - RNA, 19 nt, Artificial Sequence
  Description of Artificial Sequence: Synthetic oligonucleotide
uauuccuaccaggaacgac

SEQ ID NO: 482055 - RNA, 19 nt, Artificial Sequence
  Description of Artificial Sequence: Synthetic oligonucleotide
caugacgcgaaccuuccca

SEQ ID NO: 482056 - RNA, 19 nt, Artificial Sequence
  Description of Artificial Sequence: Synthetic oligonucleotide
uguuggcgucaaaagccca

SEQ ID NO: 482057 - RNA, 19 nt, Artificial Sequence
  Description of Artificial Sequence: Synthetic oligonucleotide
uuuggccauaagcuucaaa

SEQ ID NO: 482058 - RNA, 19 nt, Artificial Sequence
  Description of Artificial Sequence: Synthetic oligonucleotide
auagacccuguuaaggagu

SEQ ID NO: 482059 - RNA, 19 nt, Artificial Sequence
  Description of Artificial Sequence: Synthetic oligonucleotide
guauaugauggcuucugcu

SEQ ID NO: 482060 - RNA, 19 nt, Artificial Sequence
  Description of Artificial Sequence: Synthetic oligonucleotide
ucaccgggcaaaaguuucu

SEQ ID NO: 482061 - RNA, 19 nt, Artificial Sequence
  Description of Artificial Sequence: Synthetic oligonucleotide
auaucucaaucccacucuu

SEQ ID NO: 482062 - RNA, 19 nt, Artificial Sequence
  Description of Artificial Sequence: Synthetic oligonucleotide
ugccaacuugaagauauuc

SEQ ID NO: 482063 - RNA, 19 nt, Artificial Sequence
  Description of Artificial Sequence: Synthetic oligonucleotide
cagagaucugccauuuaca

SEQ ID NO: 482064 - RNA, 19 nt, Artificial Sequence
  Description of Artificial Sequence: Synthetic oligonucleotide
aaagccccacgccgugcuc

SEQ ID NO: 482065 - RNA, 19 nt, Artificial Sequence
  Description of Artificial Sequence: Synthetic oligonucleotide
augggccaagggaagauag

SEQ ID NO: 482066 - RNA, 19 nt, Artificial Sequence
  Description of Artificial Sequence: Synthetic oligonucleotide
aauaaaggauuagcucguu

SEQ ID NO: 482067 - RNA, 19 nt, Artificial Sequence
  Description of Artificial Sequence: Synthetic oligonucleotide
guguaacaggccaacucag

SEQ ID NO: 482068 - RNA, 19 nt, Artificial Sequence
  Description of Artificial Sequence: Synthetic oligonucleotide
agccuuggaacacauuguu

SEQ ID NO: 482069 - RNA, 19 nt, Artificial Sequence
  Description of Artificial Sequence: Synthetic oligonucleotide
aagguagccuuggaacaca

SEQ ID NO: 482070 - RNA, 19 nt, Artificial Sequence
  Description of Artificial Sequence: Synthetic oligonucleotide
cucaauccccacagacugc

SEQ ID NO: 482071 - RNA, 19 nt, Artificial Sequence
  Description of Artificial Sequence: Synthetic oligonucleotide
ugacgugauuguacaucca

SEQ ID NO: 482072 - RNA, 19 nt, Artificial Sequence
  Description of Artificial Sequence: Synthetic oligonucleotide
accgaauaucuccuuggaa

SEQ ID NO: 482073 - RNA, 19 nt, Artificial Sequence
  Description of Artificial Sequence: Synthetic oligonucleotide
gacccuguuaaggagucga

SEQ ID NO: 482074 - RNA, 19 nt, Artificial Sequence
  Description of Artificial Sequence: Synthetic oligonucleotide
ucaugacgcgaaccuuccc

SEQ ID NO: 482075 - RNA, 19 nt, Artificial Sequence
  Description of Artificial Sequence: Synthetic oligonucleotide
ugacuaucuucaggccugg

SEQ ID NO: 482076 - RNA, 19 nt, Artificial Sequence
  Description of Artificial Sequence: Synthetic oligonucleotide
ggaagauagguuccaacaa

SEQ ID NO: 482077 - RNA, 19 nt, Artificial Sequence
  Description of Artificial Sequence: Synthetic oligonucleotide
uuucgcuuucaguguuggc

SEQ ID NO: 482078 - RNA, 19 nt, Artificial Sequence
  Description of Artificial Sequence: Synthetic oligonucleotide
caaaggauuucaggccacc

SEQ ID NO: 482079 - RNA, 19 nt, Artificial Sequence
  Description of Artificial Sequence: Synthetic oligonucleotide
ggagucgaggcaccguggg

SEQ ID NO: 482080 - RNA, 19 nt, Artificial Sequence
  Description of Artificial Sequence: Synthetic oligonucleotide
accguaagcucuccccaug

SEQ ID NO: 482081 - RNA, 19 nt, Artificial Sequence
  Description of Artificial Sequence: Synthetic oligonucleotide
gcgucaaaagcccauuuuc

SEQ ID NO: 482082 - RNA, 19 nt, Artificial Sequence
  Description of Artificial Sequence: Synthetic oligonucleotide
auccuacuccuggauacuc

SEQ ID NO: 482083 - RNA, 19 nt, Artificial Sequence
  Description of Artificial Sequence: Synthetic oligonucleotide
ccauucggaagccagcggc

SEQ ID NO: 482084 - RNA, 19 nt, Artificial Sequence
  Description of Artificial Sequence: Synthetic oligonucleotide
gacagggauaauaucucaa

SEQ ID NO: 482085 - RNA, 19 nt, Artificial Sequence
  Description of Artificial Sequence: Synthetic oligonucleotide
agccuuguugauaacguau

SEQ ID NO: 482086 - RNA, 19 nt, Artificial Sequence
  Description of Artificial Sequence: Synthetic oligonucleotide
ucguuucgcuuucaguguu

SEQ ID NO: 482087 - RNA, 19 nt, Artificial Sequence
  Description of Artificial Sequence: Synthetic oligonucleotide
cagguacucugcucgauca

SEQ ID NO: 482088 - RNA, 19 nt, Artificial Sequence
  Description of Artificial Sequence: Synthetic oligonucleotide
ggaauauguguaacaggcc

SEQ ID NO: 482089 - RNA, 19 nt, Artificial Sequence
  Description of Artificial Sequence: Synthetic oligonucleotide
gauggcuuauauccuuugu

SEQ ID NO: 482090 - RNA, 19 nt, Artificial Sequence
  Description of Artificial Sequence: Synthetic oligonucleotide
guguuggcgucaaaagccc

SEQ ID NO: 482091 - RNA, 19 nt, Artificial Sequence
  Description of Artificial Sequence: Synthetic oligonucleotide
gcaaccgaauaucuccuug

SEQ ID NO: 482092 - RNA, 19 nt, Artificial Sequence
  Description of Artificial Sequence: Synthetic oligonucleotide
cugcaaaugagggaagcga

SEQ ID NO: 482093 - RNA, 19 nt, Artificial Sequence
  Description of Artificial Sequence: Synthetic oligonucleotide
ugacgcgaaccuucccacc

SEQ ID NO: 482094 - RNA, 19 nt, Artificial Sequence
  Description of Artificial Sequence: Synthetic oligonucleotide
uccccgggugacgugauug

SEQ ID NO: 482095 - RNA, 19 nt, Artificial Sequence
  Description of Artificial Sequence: Synthetic oligonucleotide
caggcaugguccauuguca

SEQ ID NO: 482096 - RNA, 19 nt, Artificial Sequence
  Description of Artificial Sequence: Synthetic oligonucleotide
aaacaccggacaccccaau

SEQ ID NO: 482097 - RNA, 19 nt, Artificial Sequence
  Description of Artificial Sequence: Synthetic oligonucleotide
cucaaucccacucuucucu

SEQ ID NO: 482098 - RNA, 19 nt, Artificial Sequence
  Description of Artificial Sequence: Synthetic oligonucleotide
uacucaugauggccaggcu

SEQ ID NO: 482099 - RNA, 19 nt, Artificial Sequence
  Description of Artificial Sequence: Synthetic oligonucleotide
agucgaggcaccgugggaa

SEQ ID NO: 482100 - RNA, 19 nt, Artificial Sequence
  Description of Artificial Sequence: Synthetic oligonucleotide
gcuuauauccuuugugcaa

SEQ ID NO: 482101 - RNA, 19 nt, Artificial Sequence
  Description of Artificial Sequence: Synthetic oligonucleotide
uauccuacuccuggauacu

SEQ ID NO: 482102 - RNA, 19 nt, Artificial Sequence
  Description of Artificial Sequence: Synthetic oligonucleotide
aguucaccgggcaaaaguu

SEQ ID NO: 482103 - RNA, 19 nt, Artificial Sequence
  Description of Artificial Sequence: Synthetic oligonucleotide
gcaaacuuauccuacuccu

SEQ ID NO: 482104 - RNA, 19 nt, Artificial Sequence
  Description of Artificial Sequence: Synthetic oligonucleotide
guguaaggcccuucucuac

SEQ ID NO: 482105 - RNA, 19 nt, Artificial Sequence
  Description of Artificial Sequence: Synthetic oligonucleotide
cuuauccuacuccuggaua

SEQ ID NO: 482106 - RNA, 19 nt, Artificial Sequence
  Description of Artificial Sequence: Synthetic oligonucleotide
uccggugaucaugacgcga

SEQ ID NO: 482107 - RNA, 19 nt, Artificial Sequence
  Description of Artificial Sequence: Synthetic oligonucleotide
gaagcgaaucagggucagg

SEQ ID NO: 482108 - RNA, 19 nt, Artificial Sequence
  Description of Artificial Sequence: Synthetic oligonucleotide
uggcgucugagaaguaaua

SEQ ID NO: 482109 - RNA, 19 nt, Artificial Sequence
  Description of Artificial Sequence: Synthetic oligonucleotide
ugcagaucucgccuucguu

SEQ ID NO: 482110 - RNA, 19 nt, Artificial Sequence
  Description of Artificial Sequence: Synthetic oligonucleotide
ggugacgugauuguacauc

SEQ ID NO: 482111 - RNA, 19 nt, Artificial Sequence
  Description of Artificial Sequence: Synthetic oligonucleotide
cuaucaggcagugaguacu

SEQ ID NO: 482112 - RNA, 19 nt, Artificial Sequence
  Description of Artificial Sequence: Synthetic oligonucleotide
aaacaccguggguuucaaa

SEQ ID NO: 482113 - RNA, 19 nt, Artificial Sequence
  Description of Artificial Sequence: Synthetic oligonucleotide
ccaaucuuggcugcaaaug

SEQ ID NO: 482114 - RNA, 19 nt, Artificial Sequence
  Description of Artificial Sequence: Synthetic oligonucleotide
agggaagauaggauauggu

SEQ ID NO: 482115 - RNA, 19 nt, Artificial Sequence
  Description of Artificial Sequence: Synthetic oligonucleotide
uacauccagcugugcauuc

SEQ ID NO: 482116 - RNA, 19 nt, Artificial Sequence
  Description of Artificial Sequence: Synthetic oligonucleotide
caaguacaggccccacaug

SEQ ID NO: 482117 - RNA, 19 nt, Artificial Sequence
  Description of Artificial Sequence: Synthetic oligonucleotide
ucuggccuauuuugagcaa

SEQ ID NO: 482118 - RNA, 19 nt, Artificial Sequence
  Description of Artificial Sequence: Synthetic oligonucleotide
gauuggaguccagggagaa

SEQ ID NO: 482119 - RNA, 19 nt, Artificial Sequence
  Description of Artificial Sequence: Synthetic oligonucleotide
cccggaagaaugucaagac

SEQ ID NO: 482120 - RNA, 19 nt, Artificial Sequence
  Description of Artificial Sequence: Synthetic oligonucleotide
aggcuguuuuggaucuucg

SEQ ID NO: 482121 - RNA, 19 nt, Artificial Sequence
  Description of Artificial Sequence: Synthetic oligonucleotide
cuggaagucccuucccaga

SEQ ID NO: 482122 - RNA, 19 nt, Artificial Sequence
  Description of Artificial Sequence: Synthetic oligonucleotide
gucccgucgaaugaugcca

SEQ ID NO: 482123 - RNA, 19 nt, Artificial Sequence
  Description of Artificial Sequence: Synthetic oligonucleotide
ucccgucgaaugaugccau

SEQ ID NO: 482124 - RNA, 19 nt, Artificial Sequence
  Description of Artificial Sequence: Synthetic oligonucleotide
acaaacugucccgucgaau

SEQ ID NO: 482125 - RNA, 19 nt, Artificial Sequence
  Description of Artificial Sequence: Synthetic oligonucleotide
accguggguuucaaaaccu

SEQ ID NO: 482126 - RNA, 19 nt, Artificial Sequence
  Description of Artificial Sequence: Synthetic oligonucleotide
ggaaaauaugacagccuga

SEQ ID NO: 482127 - RNA, 19 nt, Artificial Sequence
  Description of Artificial Sequence: Synthetic oligonucleotide
uggcgucaaaagcccauuu

SEQ ID NO: 482128 - RNA, 19 nt, Artificial Sequence
  Description of Artificial Sequence: Synthetic oligonucleotide
gaaguucucuuugccuaga

SEQ ID NO: 482129 - RNA, 19 nt, Artificial Sequence
  Description of Artificial Sequence: Synthetic oligonucleotide
cauagcuccuuugggguca

SEQ ID NO: 482130 - RNA, 19 nt, Artificial Sequence
  Description of Artificial Sequence: Synthetic oligonucleotide
uuacaaguacaggccccac

SEQ ID NO: 482131 - RNA, 19 nt, Artificial Sequence
  Description of Artificial Sequence: Synthetic oligonucleotide
caagcuugucccacaaacu

SEQ ID NO: 482132 - RNA, 19 nt, Artificial Sequence
  Description of Artificial Sequence: Synthetic oligonucleotide
caacccucucaaacauaug

SEQ ID NO: 482133 - RNA, 19 nt, Artificial Sequence
  Description of Artificial Sequence: Synthetic oligonucleotide
cuccggugaucaugacgcg

SEQ ID NO: 482134 - RNA, 19 nt, Artificial Sequence
  Description of Artificial Sequence: Synthetic oligonucleotide
ggccaacucagagaugacc

SEQ ID NO: 482135 - RNA, 19 nt, Artificial Sequence
  Description of Artificial Sequence: Synthetic oligonucleotide
gguagcaaccgaauaucuc

SEQ ID NO: 482136 - RNA, 19 nt, Artificial Sequence
  Description of Artificial Sequence: Synthetic oligonucleotide
aggagucgaggcaccgugg

SEQ ID NO: 482137 - RNA, 19 nt, Artificial Sequence
  Description of Artificial Sequence: Synthetic oligonucleotide
gucgucagguagcaaccga

SEQ ID NO: 482138 - RNA, 19 nt, Artificial Sequence
  Description of Artificial Sequence: Synthetic oligonucleotide
gaaccuucccacccaggcu

SEQ ID NO: 482139 - RNA, 19 nt, Artificial Sequence
  Description of Artificial Sequence: Synthetic oligonucleotide
cgaaccuucccacccaggc

SEQ ID NO: 482140 - RNA, 19 nt, Artificial Sequence
  Description of Artificial Sequence: Synthetic oligonucleotide
cuuggcgucugagaaguaa

SEQ ID NO: 482141 - RNA, 19 nt, Artificial Sequence
  Description of Artificial Sequence: Synthetic oligonucleotide
cacguugguuuuggcacag

SEQ ID NO: 482142 - RNA, 19 nt, Artificial Sequence
  Description of Artificial Sequence: Synthetic oligonucleotide
ugccaacaaauugguccug

SEQ ID NO: 482143 - RNA, 19 nt, Artificial Sequence
  Description of Artificial Sequence: Synthetic oligonucleotide
agcaaccgaauaucuccuu

SEQ ID NO: 482144 - RNA, 19 nt, Artificial Sequence
  Description of Artificial Sequence: Synthetic oligonucleotide
gcuaucaggcagugaguac

SEQ ID NO: 482145 - RNA, 19 nt, Artificial Sequence
  Description of Artificial Sequence: Synthetic oligonucleotide
caauacuggucugcuccug

SEQ ID NO: 482146 - RNA, 19 nt, Artificial Sequence
  Description of Artificial Sequence: Synthetic oligonucleotide
ccauggaauauguguaaca

SEQ ID NO: 482147 - RNA, 19 nt, Artificial Sequence
  Description of Artificial Sequence: Synthetic oligonucleotide
gguccuuaagguagccuug

SEQ ID NO: 482148 - RNA, 19 nt, Artificial Sequence
  Description of Artificial Sequence: Synthetic oligonucleotide
gacaagcuugucccacaaa

SEQ ID NO: 482149 - RNA, 19 nt, Artificial Sequence
  Description of Artificial Sequence: Synthetic oligonucleotide
gaaagccccacgccgugcu

SEQ ID NO: 482150 - RNA, 19 nt, Artificial Sequence
  Description of Artificial Sequence: Synthetic oligonucleotide
acugucccgucgaaugaug

SEQ ID NO: 482151 - RNA, 19 nt, Artificial Sequence
  Description of Artificial Sequence: Synthetic oligonucleotide
gugggaaacaccguggguu

SEQ ID NO: 482152 - RNA, 19 nt, Artificial Sequence
  Description of Artificial Sequence: Synthetic oligonucleotide
cucguuucgcuuucagugu

SEQ ID NO: 482153 - RNA, 19 nt, Artificial Sequence
  Description of Artificial Sequence: Synthetic oligonucleotide
ccguaagcucuccccaugg

SEQ ID NO: 482154 - RNA, 19 nt, Artificial Sequence
  Description of Artificial Sequence: Synthetic oligonucleotide
agugaguacugcagggauu

SEQ ID NO: 482155 - RNA, 19 nt, Artificial Sequence
  Description of Artificial Sequence: Synthetic oligonucleotide
ucccacaaacugucccguc

SEQ ID NO: 482156 - RNA, 19 nt, Artificial Sequence
  Description of Artificial Sequence: Synthetic oligonucleotide
uuucaguguuggcgucaaa

SEQ ID NO: 482157 - RNA, 19 nt, Artificial Sequence
  Description of Artificial Sequence: Synthetic oligonucleotide
uccuaccaggaacgaccgu

SEQ ID NO: 482158 - RNA, 19 nt, Artificial Sequence
  Description of Artificial Sequence: Synthetic oligonucleotide
acgcgaaccuucccaccca

SEQ ID NO: 482159 - RNA, 19 nt, Artificial Sequence
  Description of Artificial Sequence: Synthetic oligonucleotide
gguacucugcucgaucaga

SEQ ID NO: 482160 - RNA, 19 nt, Artificial Sequence
  Description of Artificial Sequence: Synthetic oligonucleotide
ccuagauucucagcaucag

SEQ ID NO: 482161 - RNA, 19 nt, Artificial Sequence
  Description of Artificial Sequence: Synthetic oligonucleotide
guacugcagggauuggagu

SEQ ID NO: 482162 - RNA, 19 nt, Artificial Sequence
  Description of Artificial Sequence: Synthetic oligonucleotide
uuggcgucaaaagcccauu

SEQ ID NO: 482163 - RNA, 19 nt, Artificial Sequence
  Description of Artificial Sequence: Synthetic oligonucleotide
caccggacaccccaaugca

SEQ ID NO: 482164 - RNA, 19 nt, Artificial Sequence
  Description of Artificial Sequence: Synthetic oligonucleotide
cccaaugcagcccggaaga

SEQ ID NO: 482165 - RNA, 19 nt, Artificial Sequence
  Description of Artificial Sequence: Synthetic oligonucleotide
agcuaccauggaauaugug

SEQ ID NO: 482166 - RNA, 19 nt, Artificial Sequence
  Description of Artificial Sequence: Synthetic oligonucleotide
gcccauuuucaauggagaa

SEQ ID NO: 482167 - RNA, 19 nt, Artificial Sequence
  Description of Artificial Sequence: Synthetic oligonucleotide
ggccgaugucuccagugug

SEQ ID NO: 482168 - RNA, 19 nt, Artificial Sequence
  Description of Artificial Sequence: Synthetic oligonucleotide
ccgggugacgugauuguac

SEQ ID NO: 482169 - RNA, 19 nt, Artificial Sequence
  Description of Artificial Sequence: Synthetic oligonucleotide
cagcccggaagaaugucaa

SEQ ID NO: 482170 - RNA, 19 nt, Artificial Sequence
  Description of Artificial Sequence: Synthetic oligonucleotide
caaacaccggacaccccaa

SEQ ID NO: 482171 - RNA, 19 nt, Artificial Sequence
  Description of Artificial Sequence: Synthetic oligonucleotide
ggaagcgaaucagggucag

SEQ ID NO: 482172 - RNA, 19 nt, Artificial Sequence
  Description of Artificial Sequence: Synthetic oligonucleotide
gcccggaagaaugucaaga

SEQ ID NO: 482173 - RNA, 19 nt, Artificial Sequence
  Description of Artificial Sequence: Synthetic oligonucleotide
accuuaucauagacccugu

SEQ ID NO: 482174 - RNA, 19 nt, Artificial Sequence
  Description of Artificial Sequence: Synthetic oligonucleotide
cgugcuccucccucaaucc

SEQ ID NO: 482175 - RNA, 19 nt, Artificial Sequence
  Description of Artificial Sequence: Synthetic oligonucleotide
cguggguuucaaaaccuuc

SEQ ID NO: 482176 - RNA, 19 nt, Artificial Sequence
  Description of Artificial Sequence: Synthetic oligonucleotide
ggaacgaccguaagcucuc

SEQ ID NO: 482177 - RNA, 19 nt, Artificial Sequence
  Description of Artificial Sequence: Synthetic oligonucleotide
ggaaacaccguggguuuca

SEQ ID NO: 482178 - RNA, 19 nt, Artificial Sequence
  Description of Artificial Sequence: Synthetic oligonucleotide
ucggaagccagcggccgau

SEQ ID NO: 482179 - RNA, 19 nt, Artificial Sequence
  Description of Artificial Sequence: Synthetic oligonucleotide
cuggccuauuuugagcaaa

SEQ ID NO: 482180 - RNA, 19 nt, Artificial Sequence
  Description of Artificial Sequence: Synthetic oligonucleotide
ggcgucugagaaguaauaa

SEQ ID NO: 482181 - RNA, 19 nt, Artificial Sequence
  Description of Artificial Sequence: Synthetic oligonucleotide
gggguguaucacaaaugac

SEQ ID NO: 482182 - RNA, 19 nt, Artificial Sequence
  Description of Artificial Sequence: Synthetic oligonucleotide
cuauuccuaccaggaacga

SEQ ID NO: 482183 - RNA, 19 nt, Artificial Sequence
  Description of Artificial Sequence: Synthetic oligonucleotide
gaaacaccguggguuucaa

SEQ ID NO: 482184 - RNA, 19 nt, Artificial Sequence
  Description of Artificial Sequence: Synthetic oligonucleotide
acaugcuaucaggcaguga

SEQ ID NO: 482185 - RNA, 19 nt, Artificial Sequence
  Description of Artificial Sequence: Synthetic oligonucleotide
ucuuggcgucugagaagua

SEQ ID NO: 482186 - RNA, 19 nt, Artificial Sequence
  Description of Artificial Sequence: Synthetic oligonucleotide
gcucccaaagugucauaca

SEQ ID NO: 482187 - RNA, 19 nt, Artificial Sequence
  Description of Artificial Sequence: Synthetic oligonucleotide
cgugauuguacauccagcu

SEQ ID NO: 482188 - RNA, 19 nt, Artificial Sequence
  Description of Artificial Sequence: Synthetic oligonucleotide
cacucguuucgcuuucagu

SEQ ID NO: 482189 - RNA, 19 nt, Artificial Sequence
  Description of Artificial Sequence: Synthetic oligonucleotide
ccagguacucugcucgauc

SEQ ID NO: 482190 - RNA, 19 nt, Artificial Sequence
  Description of Artificial Sequence: Synthetic oligonucleotide
ucaugucgucagguagcaa

SEQ ID NO: 482191 - RNA, 19 nt, Artificial Sequence
  Description of Artificial Sequence: Synthetic oligonucleotide
cagccuuguugauaacgua

SEQ ID NO: 482192 - RNA, 19 nt, Artificial Sequence
  Description of Artificial Sequence: Synthetic oligonucleotide
gcucguuauucuucuggaa

SEQ ID NO: 482193 - RNA, 19 nt, Artificial Sequence
  Description of Artificial Sequence: Synthetic oligonucleotide
ggaucccuucaccccaauc

SEQ ID NO: 482194 - RNA, 19 nt, Artificial Sequence
  Description of Artificial Sequence: Synthetic oligonucleotide
gaccguaagcucuccccau

SEQ ID NO: 482195 - RNA, 19 nt, Artificial Sequence
  Description of Artificial Sequence: Synthetic oligonucleotide
gucgaggcaccgugggaaa

SEQ ID NO: 482196 - RNA, 19 nt, Artificial Sequence
  Description of Artificial Sequence: Synthetic oligonucleotide
cagcuaccauggaauaugu

SEQ ID NO: 482197 - RNA, 19 nt, Artificial Sequence
  Description of Artificial Sequence: Synthetic oligonucleotide
gggaagcgaaucaggguca

SEQ ID NO: 482198 - RNA, 19 nt, Artificial Sequence
  Description of Artificial Sequence: Synthetic oligonucleotide
cuaucuucucuggagcaau

SEQ ID NO: 482199 - RNA, 19 nt, Artificial Sequence
  Description of Artificial Sequence: Synthetic oligonucleotide
guccaguccccgggugacg

SEQ ID NO: 482200 - RNA, 19 nt, Artificial Sequence
  Description of Artificial Sequence: Synthetic oligonucleotide
cacaaacugucccgucgaa

SEQ ID NO: 482201 - RNA, 19 nt, Artificial Sequence
  Description of Artificial Sequence: Synthetic oligonucleotide
agcggccgaugucuccagu

SEQ ID NO: 482202 - RNA, 19 nt, Artificial Sequence
  Description of Artificial Sequence: Synthetic oligonucleotide
gcucggcaaacuuauccua

SEQ ID NO: 482203 - RNA, 19 nt, Artificial Sequence
  Description of Artificial Sequence: Synthetic oligonucleotide
agccccacgccgugcuccu

SEQ ID NO: 482204 - RNA, 19 nt, Artificial Sequence
  Description of Artificial Sequence: Synthetic oligonucleotide
ggauuagcucguuauucuu

SEQ ID NO: 482205 - RNA, 19 nt, Artificial Sequence
  Description of Artificial Sequence: Synthetic oligonucleotide
ccacucguuucgcuuucag

SEQ ID NO: 482206 - RNA, 19 nt, Artificial Sequence
  Description of Artificial Sequence: Synthetic oligonucleotide
guuggcgucaaaagcccau

SEQ ID NO: 482207 - RNA, 19 nt, Artificial Sequence
  Description of Artificial Sequence: Synthetic oligonucleotide
gcagcccggaagaauguca

SEQ ID NO: 482208 - RNA, 19 nt, Artificial Sequence
  Description of Artificial Sequence: Synthetic oligonucleotide
cagcggccgaugucuccag

SEQ ID NO: 482209 - RNA, 19 nt, Artificial Sequence
  Description of Artificial Sequence: Synthetic oligonucleotide
ggaaagccccacgccgugc

SEQ ID NO: 482210 - RNA, 19 nt, Artificial Sequence
  Description of Artificial Sequence: Synthetic oligonucleotide
cacuuagguuuucuggguu

SEQ ID NO: 482211 - RNA, 19 nt, Artificial Sequence
  Description of Artificial Sequence: Synthetic oligonucleotide
aggaucccuucaccccaau

SEQ ID NO: 482212 - RNA, 19 nt, Artificial Sequence
  Description of Artificial Sequence: Synthetic oligonucleotide
gcaauacuggucugcuccu

SEQ ID NO: 482213 - RNA, 19 nt, Artificial Sequence
  Description of Artificial Sequence: Synthetic oligonucleotide
guaccuuaucauagacccu

SEQ ID NO: 482214 - RNA, 19 nt, Artificial Sequence
  Description of Artificial Sequence: Synthetic oligonucleotide
ggccuauuuugagcaaaga

SEQ ID NO: 482215 - RNA, 19 nt, Artificial Sequence
  Description of Artificial Sequence: Synthetic oligonucleotide
ccgggcaaaaguuucugcu

SEQ ID NO: 482216 - RNA, 19 nt, Artificial Sequence
  Description of Artificial Sequence: Synthetic oligonucleotide
agcaucagacagggauaau

SEQ ID NO: 482217 - RNA, 19 nt, Artificial Sequence
  Description of Artificial Sequence: Synthetic oligonucleotide
gggugggauggaagauagg

SEQ ID NO: 482218 - RNA, 19 nt, Artificial Sequence
  Description of Artificial Sequence: Synthetic oligonucleotide
caguccccgggugacguga

SEQ ID NO: 482219 - RNA, 19 nt, Artificial Sequence
  Description of Artificial Sequence: Synthetic oligonucleotide
cugcuccuguuguaaacau

SEQ ID NO: 482220 - RNA, 19 nt, Artificial Sequence
  Description of Artificial Sequence: Synthetic oligonucleotide
ggcgucaaaagcccauuuu

SEQ ID NO: 482221 - RNA, 19 nt, Artificial Sequence
  Description of Artificial Sequence: Synthetic oligonucleotide
auacaccgucuuggcgucu

SEQ ID NO: 482222 - RNA, 19 nt, Artificial Sequence
  Description of Artificial Sequence: Synthetic oligonucleotide
cgggugacgugauuguaca

SEQ ID NO: 482223 - RNA, 19 nt, Artificial Sequence
  Description of Artificial Sequence: Synthetic oligonucleotide
gcgaaccuucccacccagg

SEQ ID NO: 482224 - RNA, 19 nt, Artificial Sequence
  Description of Artificial Sequence: Synthetic oligonucleotide
guucaccgggcaaaaguuu

SEQ ID NO: 482225 - RNA, 19 nt, Artificial Sequence
  Description of Artificial Sequence: Synthetic oligonucleotide
ccccacaugcuaucaggca

SEQ ID NO: 482226 - RNA, 19 nt, Artificial Sequence
  Description of Artificial Sequence: Synthetic oligonucleotide
acguugguuuuggcacagu

SEQ ID NO: 482227 - RNA, 19 nt, Artificial Sequence
  Description of Artificial Sequence: Synthetic oligonucleotide
cacccaggcuguuuuggau

SEQ ID NO: 482228 - RNA, 19 nt, Artificial Sequence
  Description of Artificial Sequence: Synthetic oligonucleotide
caagggugucuuggcuuca

SEQ ID NO: 482229 - RNA, 19 nt, Artificial Sequence
  Description of Artificial Sequence: Synthetic oligonucleotide
gcaaaugagggaagcgaau

SEQ ID NO: 482230 - RNA, 19 nt, Artificial Sequence
  Description of Artificial Sequence: Synthetic oligonucleotide
ccggaagaaugucaagacu

SEQ ID NO: 482231 - RNA, 19 nt, Artificial Sequence
  Description of Artificial Sequence: Synthetic oligonucleotide
gccuuggaacacauuguua

SEQ ID NO: 482232 - RNA, 19 nt, Artificial Sequence
  Description of Artificial Sequence: Synthetic oligonucleotide
caccccaaugcagcccgga

SEQ ID NO: 482233 - RNA, 19 nt, Artificial Sequence
  Description of Artificial Sequence: Synthetic oligonucleotide
cgaccguaagcucucccca

SEQ ID NO: 482234 - RNA, 19 nt, Artificial Sequence
  Description of Artificial Sequence: Synthetic oligonucleotide
cgcgaaccuucccacccag

SEQ ID NO: 482235 - RNA, 19 nt, Artificial Sequence
  Description of Artificial Sequence: Synthetic oligonucleotide
gcauucuguuuggccauaa

SEQ ID NO: 482236 - RNA, 19 nt, Artificial Sequence
  Description of Artificial Sequence: Synthetic oligonucleotide
cguuguucacugaguagua

SEQ ID NO: 482237 - RNA, 19 nt, Artificial Sequence
  Description of Artificial Sequence: Synthetic oligonucleotide
caccccaaucuuggcugca

SEQ ID NO: 482238 - RNA, 19 nt, Artificial Sequence
  Description of Artificial Sequence: Synthetic oligonucleotide
cguaagcucuccccaugga

SEQ ID NO: 482239 - RNA, 19 nt, Artificial Sequence
  Description of Artificial Sequence: Synthetic oligonucleotide
cgcuuucaguguuggcguc

SEQ ID NO: 482240 - RNA, 19 nt, Artificial Sequence
  Description of Artificial Sequence: Synthetic oligonucleotide
cggugaucaugacgcgaac

SEQ ID NO: 482241 - RNA, 19 nt, Artificial Sequence
  Description of Artificial Sequence: Synthetic oligonucleotide
ccccaaucuuggcugcaaa

SEQ ID NO: 482242 - RNA, 19 nt, Artificial Sequence
  Description of Artificial Sequence: Synthetic oligonucleotide
ccaaugcagcccggaagaa

SEQ ID NO: 482243 - RNA, 19 nt, Artificial Sequence
  Description of Artificial Sequence: Synthetic oligonucleotide
cgucgaaugaugccauuuu

SEQ ID NO: 482244 - RNA, 19 nt, Artificial Sequence
  Description of Artificial Sequence: Synthetic oligonucleotide
ccuuaucauagacccuguu

SEQ ID NO: 482245 - RNA, 19 nt, Artificial Sequence
  Description of Artificial Sequence: Synthetic oligonucleotide
cagugcaggagaggagcuu

SEQ ID NO: 482246 - RNA, 19 nt, Artificial Sequence
  Description of Artificial Sequence: Synthetic oligonucleotide
cgggcaaaaguuucugcuu

SEQ ID NO: 482247 - RNA, 19 nt, Artificial Sequence
  Description of Artificial Sequence: Synthetic oligonucleotide
ccguggguuucaaaaccuu

SEQ ID NO: 482248 - RNA, 19 nt, Artificial Sequence
  Description of Artificial Sequence: Synthetic oligonucleotide
ccgucgaaugaugccauuu

SEQ ID NO: 482249 - RNA, 19 nt, Artificial Sequence
  Description of Artificial Sequence: Synthetic oligonucleotide
ccccgggugacgugauugu

SEQ ID NO: 482250 - RNA, 19 nt, Artificial Sequence
  Description of Artificial Sequence: Synthetic oligonucleotide
cccgggugacgugauugua

SEQ ID NO: 482251 - RNA, 19 nt, Artificial Sequence
  Description of Artificial Sequence: Synthetic oligonucleotide
cgccuucguuguucacuga

SEQ ID NO: 482252 - RNA, 19 nt, Artificial Sequence
  Description of Artificial Sequence: Synthetic oligonucleotide
cccagguacucugcucgau

SEQ ID NO: 482253 - RNA, 19 nt, Artificial Sequence
  Description of Artificial Sequence: Synthetic oligonucleotide
cccgucgaaugaugccauu

SEQ ID NO: 482254 - RNA, 19 nt, Artificial Sequence
  Description of Artificial Sequence: Synthetic oligonucleotide
gccccacgccgugcuccuc

SEQ ID NO: 482255 - RNA, 19 nt, Artificial Sequence
  Description of Artificial Sequence: Synthetic oligonucleotide
aaaaccggaauguacaaca

SEQ ID NO: 482256 - RNA, 19 nt, Artificial Sequence
  Description of Artificial Sequence: Synthetic oligonucleotide
acaaagaugagcaagcugg

SEQ ID NO: 482257 - RNA, 19 nt, Artificial Sequence
  Description of Artificial Sequence: Synthetic oligonucleotide
uuuacuggaccacaggucc

SEQ ID NO: 482258 - RNA, 19 nt, Artificial Sequence
  Description of Artificial Sequence: Synthetic oligonucleotide
aguaauuaaauagcaacac

SEQ ID NO: 482259 - RNA, 19 nt, Artificial Sequence
  Description of Artificial Sequence: Synthetic oligonucleotide
acgaacaguaagcagaguc

SEQ ID NO: 482260 - RNA, 19 nt, Artificial Sequence
  Description of Artificial Sequence: Synthetic oligonucleotide
uucaucgagguuccgaagg

SEQ ID NO: 482261 - RNA, 19 nt, Artificial Sequence
  Description of Artificial Sequence: Synthetic oligonucleotide
guagguuaaggccacaaag

SEQ ID NO: 482262 - RNA, 19 nt, Artificial Sequence
  Description of Artificial Sequence: Synthetic oligonucleotide
cauucaauaauauuaguaa

SEQ ID NO: 482263 - RNA, 19 nt, Artificial Sequence
  Description of Artificial Sequence: Synthetic oligonucleotide
gaugcgugaggguuuacgg

SEQ ID NO: 482264 - RNA, 19 nt, Artificial Sequence
  Description of Artificial Sequence: Synthetic oligonucleotide
uagguuaaggccacaaaga

SEQ ID NO: 482265 - RNA, 19 nt, Artificial Sequence
  Description of Artificial Sequence: Synthetic oligonucleotide
ucuaaggcauucaauaaua

SEQ ID NO: 482266 - RNA, 19 nt, Artificial Sequence
  Description of Artificial Sequence: Synthetic oligonucleotide
agcguuggcauguuggcac

SEQ ID NO: 482267 - RNA, 19 nt, Artificial Sequence
  Description of Artificial Sequence: Synthetic oligonucleotide
aaccggaauguacaacagg

SEQ ID NO: 482268 - RNA, 19 nt, Artificial Sequence
  Description of Artificial Sequence: Synthetic oligonucleotide
ugaggagucacuguccccg

SEQ ID NO: 482269 - RNA, 19 nt, Artificial Sequence
  Description of Artificial Sequence: Synthetic oligonucleotide
ucugcggggagaaaguccc

SEQ ID NO: 482270 - RNA, 19 nt, Artificial Sequence
  Description of Artificial Sequence: Synthetic oligonucleotide
auaccugagggguaucucg

SEQ ID NO: 482271 - RNA, 19 nt, Artificial Sequence
  Description of Artificial Sequence: Synthetic oligonucleotide
uuuacggucugguugugug

SEQ ID NO: 482272 - RNA, 19 nt, Artificial Sequence
  Description of Artificial Sequence: Synthetic oligonucleotide
gagcacuucaggcacaccc

SEQ ID NO: 482273 - RNA, 19 nt, Artificial Sequence
  Description of Artificial Sequence: Synthetic oligonucleotide
acacucauccccaaaaccg

SEQ ID NO: 482274 - RNA, 19 nt, Artificial Sequence
  Description of Artificial Sequence: Synthetic oligonucleotide
uacaaagaugagcaagcug

SEQ ID NO: 482275 - RNA, 19 nt, Artificial Sequence
  Description of Artificial Sequence: Synthetic oligonucleotide
uuggcauguuggcacagcg

SEQ ID NO: 482276 - RNA, 19 nt, Artificial Sequence
  Description of Artificial Sequence: Synthetic oligonucleotide
caauaccacacucuucucg

SEQ ID NO: 482277 - RNA, 19 nt, Artificial Sequence
  Description of Artificial Sequence: Synthetic oligonucleotide
cuuaucuagguagugcucc

SEQ ID NO: 482278 - RNA, 19 nt, Artificial Sequence
  Description of Artificial Sequence: Synthetic oligonucleotide
aggguuuacggucugguug

SEQ ID NO: 482279 - RNA, 19 nt, Artificial Sequence
  Description of Artificial Sequence: Synthetic oligonucleotide
cacugagugaugaagauga

SEQ ID NO: 482280 - RNA, 19 nt, Artificial Sequence
  Description of Artificial Sequence: Synthetic oligonucleotide
ugaucucggggccugaggc

SEQ ID NO: 482281 - RNA, 19 nt, Artificial Sequence
  Description of Artificial Sequence: Synthetic oligonucleotide
cuaagcuugggcuggggcc

SEQ ID NO: 482282 - RNA, 19 nt, Artificial Sequence
  Description of Artificial Sequence: Synthetic oligonucleotide
ucucgggccaugaaggagc

SEQ ID NO: 482283 - RNA, 19 nt, Artificial Sequence
  Description of Artificial Sequence: Synthetic oligonucleotide
ucugguuguguguccaucc

SEQ ID NO: 482284 - RNA, 19 nt, Artificial Sequence
  Description of Artificial Sequence: Synthetic oligonucleotide
ucuaccccgagcuacacau

SEQ ID NO: 482285 - RNA, 19 nt, Artificial Sequence
  Description of Artificial Sequence: Synthetic oligonucleotide
gagaccggaggucagccgg

SEQ ID NO: 482286 - RNA, 19 nt, Artificial Sequence
  Description of Artificial Sequence: Synthetic oligonucleotide
ucuagguagugcuccagug

SEQ ID NO: 482287 - RNA, 19 nt, Artificial Sequence
  Description of Artificial Sequence: Synthetic oligonucleotide
guugucucgggccaugaag

SEQ ID NO: 482288 - RNA, 19 nt, Artificial Sequence
  Description of Artificial Sequence: Synthetic oligonucleotide
ucccgauacaguaacaauu

SEQ ID NO: 482289 - RNA, 19 nt, Artificial Sequence
  Description of Artificial Sequence: Synthetic oligonucleotide
ucuaagcuugggcuggggc

SEQ ID NO: 482290 - RNA, 19 nt, Artificial Sequence
  Description of Artificial Sequence: Synthetic oligonucleotide
gacccagucuaucacauuc

SEQ ID NO: 482291 - RNA, 19 nt, Artificial Sequence
  Description of Artificial Sequence: Synthetic oligonucleotide
ugagcgggaccucaggccc

SEQ ID NO: 482292 - RNA, 19 nt, Artificial Sequence
  Description of Artificial Sequence: Synthetic oligonucleotide
agcuggacgaacaguaagc

SEQ ID NO: 482293 - RNA, 19 nt, Artificial Sequence
  Description of Artificial Sequence: Synthetic oligonucleotide
uuagcacccuuacaaagau

SEQ ID NO: 482294 - RNA, 19 nt, Artificial Sequence
  Description of Artificial Sequence: Synthetic oligonucleotide
gugcucaagagguggaggg

SEQ ID NO: 482295 - RNA, 19 nt, Artificial Sequence
  Description of Artificial Sequence: Synthetic oligonucleotide
ugagggguaucucggagcu

SEQ ID NO: 482296 - RNA, 19 nt, Artificial Sequence
  Description of Artificial Sequence: Synthetic oligonucleotide
aguggcgugcggaaaaggc

SEQ ID NO: 482297 - RNA, 19 nt, Artificial Sequence
  Description of Artificial Sequence: Synthetic oligonucleotide
guuacuucuggccgggagc

SEQ ID NO: 482298 - RNA, 19 nt, Artificial Sequence
  Description of Artificial Sequence: Synthetic oligonucleotide
ucgggcauuagccaagaau

SEQ ID NO: 482299 - RNA, 19 nt, Artificial Sequence
  Description of Artificial Sequence: Synthetic oligonucleotide
auuagccaagaauuccucu

SEQ ID NO: 482300 - RNA, 19 nt, Artificial Sequence
  Description of Artificial Sequence: Synthetic oligonucleotide
aaacuguaccagccuuggg

SEQ ID NO: 482301 - RNA, 19 nt, Artificial Sequence
  Description of Artificial Sequence: Synthetic oligonucleotide
agguuaaggccacaaagaa

SEQ ID NO: 482302 - RNA, 19 nt, Artificial Sequence
  Description of Artificial Sequence: Synthetic oligonucleotide
ucaugcuuaucuagguagu

SEQ ID NO: 482303 - RNA, 19 nt, Artificial Sequence
  Description of Artificial Sequence: Synthetic oligonucleotide
gagcuggacgaacaguaag

SEQ ID NO: 482304 - RNA, 19 nt, Artificial Sequence
  Description of Artificial Sequence: Synthetic oligonucleotide
aguuagagagcucuugguu

SEQ ID NO: 482305 - RNA, 19 nt, Artificial Sequence
  Description of Artificial Sequence: Synthetic oligonucleotide
uggcgugcggaaaaggcug

SEQ ID NO: 482306 - RNA, 19 nt, Artificial Sequence
  Description of Artificial Sequence: Synthetic oligonucleotide
gugcuucgcaggcugaugg

SEQ ID NO: 482307 - RNA, 19 nt, Artificial Sequence
  Description of Artificial Sequence: Synthetic oligonucleotide
ucgagacuggcugcgaggg

SEQ ID NO: 482308 - RNA, 19 nt, Artificial Sequence
  Description of Artificial Sequence: Synthetic oligonucleotide
aguucaucgagguuccgaa

SEQ ID NO: 482309 - RNA, 19 nt, Artificial Sequence
  Description of Artificial Sequence: Synthetic oligonucleotide
aggccgacagcugagcgcc

SEQ ID NO: 482310 - RNA, 19 nt, Artificial Sequence
  Description of Artificial Sequence: Synthetic oligonucleotide
cuuagcacccuuacaaaga

SEQ ID NO: 482311 - RNA, 19 nt, Artificial Sequence
  Description of Artificial Sequence: Synthetic oligonucleotide
uguaucccaaccgccaccc

SEQ ID NO: 482312 - RNA, 19 nt, Artificial Sequence
  Description of Artificial Sequence: Synthetic oligonucleotide
ugcgugaggguuuacgguc

SEQ ID NO: 482313 - RNA, 19 nt, Artificial Sequence
  Description of Artificial Sequence: Synthetic oligonucleotide
gugcggaaaaggcuggcgg

SEQ ID NO: 482314 - RNA, 19 nt, Artificial Sequence
  Description of Artificial Sequence: Synthetic oligonucleotide
ccuauagcaaggcaggggc

SEQ ID NO: 482315 - RNA, 19 nt, Artificial Sequence
  Description of Artificial Sequence: Synthetic oligonucleotide
aaugggugugggugcagcu

SEQ ID NO: 482316 - RNA, 19 nt, Artificial Sequence
  Description of Artificial Sequence: Synthetic oligonucleotide
accggaauguacaacaggu

SEQ ID NO: 482317 - RNA, 19 nt, Artificial Sequence
  Description of Artificial Sequence: Synthetic oligonucleotide
uugguugcauccaguggcc

SEQ ID NO: 482318 - RNA, 19 nt, Artificial Sequence
  Description of Artificial Sequence: Synthetic oligonucleotide
caaacuguaccagccuugg

SEQ ID NO: 482319 - RNA, 19 nt, Artificial Sequence
  Description of Artificial Sequence: Synthetic oligonucleotide
aucugguuggguccuuggg

SEQ ID NO: 482320 - RNA, 19 nt, Artificial Sequence
  Description of Artificial Sequence: Synthetic oligonucleotide
aaaccggaauguacaacag

SEQ ID NO: 482321 - RNA, 19 nt, Artificial Sequence
  Description of Artificial Sequence: Synthetic oligonucleotide
ucaucgagguuccgaaggu

SEQ ID NO: 482322 - RNA, 19 nt, Artificial Sequence
  Description of Artificial Sequence: Synthetic oligonucleotide
uuaucuagguagugcucca

SEQ ID NO: 482323 - RNA, 19 nt, Artificial Sequence
  Description of Artificial Sequence: Synthetic oligonucleotide
ggugcaacggcccaggauc

SEQ ID NO: 482324 - RNA, 19 nt, Artificial Sequence
  Description of Artificial Sequence: Synthetic oligonucleotide
cacaauaccacacucuucu

SEQ ID NO: 482325 - RNA, 19 nt, Artificial Sequence
  Description of Artificial Sequence: Synthetic oligonucleotide
ucucgagacuggcugcgag

SEQ ID NO: 482326 - RNA, 19 nt, Artificial Sequence
  Description of Artificial Sequence: Synthetic oligonucleotide
cacguggcuccuuagcacc

SEQ ID NO: 482327 - RNA, 19 nt, Artificial Sequence
  Description of Artificial Sequence: Synthetic oligonucleotide
cauugugccgugugguccc

SEQ ID NO: 482328 - RNA, 19 nt, Artificial Sequence
  Description of Artificial Sequence: Synthetic oligonucleotide
cugagggguaucucggagc

SEQ ID NO: 482329 - RNA, 19 nt, Artificial Sequence
  Description of Artificial Sequence: Synthetic oligonucleotide
uagugcuccaguguauccc

SEQ ID NO: 482330 - RNA, 19 nt, Artificial Sequence
  Description of Artificial Sequence: Synthetic oligonucleotide
cagguguuccauugugccg

SEQ ID NO: 482331 - RNA, 19 nt, Artificial Sequence
  Description of Artificial Sequence: Synthetic oligonucleotide
cauuagccaagaauuccuc

SEQ ID NO: 482332 - RNA, 19 nt, Artificial Sequence
  Description of Artificial Sequence: Synthetic oligonucleotide
guggaggggucccugaaug

SEQ ID NO: 482333 - RNA, 19 nt, Artificial Sequence
  Description of Artificial Sequence: Synthetic oligonucleotide
ucgccaaggucagcgaagg

SEQ ID NO: 482334 - RNA, 19 nt, Artificial Sequence
  Description of Artificial Sequence: Synthetic oligonucleotide
cuggacgaacaguaagcag

SEQ ID NO: 482335 - RNA, 19 nt, Artificial Sequence
  Description of Artificial Sequence: Synthetic oligonucleotide
agcucuaagcuugggcugg

SEQ ID NO: 482336 - RNA, 19 nt, Artificial Sequence
  Description of Artificial Sequence: Synthetic oligonucleotide
uucuguuuacuggaccaca

SEQ ID NO: 482337 - RNA, 19 nt, Artificial Sequence
  Description of Artificial Sequence: Synthetic oligonucleotide
ucaagcugcaguggcgugc

SEQ ID NO: 482338 - RNA, 19 nt, Artificial Sequence
  Description of Artificial Sequence: Synthetic oligonucleotide
cccaacauauaaugaaggc

SEQ ID NO: 482339 - RNA, 19 nt, Artificial Sequence
  Description of Artificial Sequence: Synthetic oligonucleotide
ugugccuggaaagccacac

SEQ ID NO: 482340 - RNA, 19 nt, Artificial Sequence
  Description of Artificial Sequence: Synthetic oligonucleotide
cucugcggggagaaagucc

SEQ ID NO: 482341 - RNA, 19 nt, Artificial Sequence
  Description of Artificial Sequence: Synthetic oligonucleotide
gagcuacacaugcaugcug

SEQ ID NO: 482342 - RNA, 19 nt, Artificial Sequence
  Description of Artificial Sequence: Synthetic oligonucleotide
cucgagacuggcugcgagg

SEQ ID NO: 482343 - RNA, 19 nt, Artificial Sequence
  Description of Artificial Sequence: Synthetic oligonucleotide
aggucagcgaagguucugg

SEQ ID NO: 482344 - RNA, 19 nt, Artificial Sequence
  Description of Artificial Sequence: Synthetic oligonucleotide
augcaugcugcccgucucg

SEQ ID NO: 482345 - RNA, 19 nt, Artificial Sequence
  Description of Artificial Sequence: Synthetic oligonucleotide
caucacguggcuccuuagc

SEQ ID NO: 482346 - RNA, 19 nt, Artificial Sequence
  Description of Artificial Sequence: Synthetic oligonucleotide
ugcuucgcaggcugauggg

SEQ ID NO: 482347 - RNA, 19 nt, Artificial Sequence
  Description of Artificial Sequence: Synthetic oligonucleotide
caacacucauccccaaaac

SEQ ID NO: 482348 - RNA, 19 nt, Artificial Sequence
  Description of Artificial Sequence: Synthetic oligonucleotide
gaagggcaugccaagcccc

SEQ ID NO: 482349 - RNA, 19 nt, Artificial Sequence
  Description of Artificial Sequence: Synthetic oligonucleotide
ugugcggccugauucccca

SEQ ID NO: 482350 - RNA, 19 nt, Artificial Sequence
  Description of Artificial Sequence: Synthetic oligonucleotide
gacgcaccgggcuggaggc

SEQ ID NO: 482351 - RNA, 19 nt, Artificial Sequence
  Description of Artificial Sequence: Synthetic oligonucleotide
uggguguucgggugggagc

SEQ ID NO: 482352 - RNA, 19 nt, Artificial Sequence
  Description of Artificial Sequence: Synthetic oligonucleotide
guagugcuccaguguaucc

SEQ ID NO: 482353 - RNA, 19 nt, Artificial Sequence
  Description of Artificial Sequence: Synthetic oligonucleotide
gguaucucggagcuccugc

SEQ ID NO: 482354 - RNA, 19 nt, Artificial Sequence
  Description of Artificial Sequence: Synthetic oligonucleotide
agcgggaccguucccgguc

SEQ ID NO: 482355 - RNA, 19 nt, Artificial Sequence
  Description of Artificial Sequence: Synthetic oligonucleotide
ccaguuagagagcucuugg

SEQ ID NO: 482356 - RNA, 19 nt, Artificial Sequence
  Description of Artificial Sequence: Synthetic oligonucleotide
cugucucaaacaugagcac

SEQ ID NO: 482357 - RNA, 19 nt, Artificial Sequence
  Description of Artificial Sequence: Synthetic oligonucleotide
gucccugcgcaccaucagg

SEQ ID NO: 482358 - RNA, 19 nt, Artificial Sequence
  Description of Artificial Sequence: Synthetic oligonucleotide
uguccccggaguagcggcg

SEQ ID NO: 482359 - RNA, 19 nt, Artificial Sequence
  Description of Artificial Sequence: Synthetic oligonucleotide
uuacuggaccacagguccu

SEQ ID NO: 482360 - RNA, 19 nt, Artificial Sequence
  Description of Artificial Sequence: Synthetic oligonucleotide
gaccguucccggucuagcc

SEQ ID NO: 482361 - RNA, 19 nt, Artificial Sequence
  Description of Artificial Sequence: Synthetic oligonucleotide
guucaucgagguuccgaag

SEQ ID NO: 482362 - RNA, 19 nt, Artificial Sequence
  Description of Artificial Sequence: Synthetic oligonucleotide
augcgugaggguuuacggu

SEQ ID NO: 482363 - RNA, 19 nt, Artificial Sequence
  Description of Artificial Sequence: Synthetic oligonucleotide
accaguuagagagcucuug

SEQ ID NO: 482364 - RNA, 19 nt, Artificial Sequence
  Description of Artificial Sequence: Synthetic oligonucleotide
acccacgcgcaccaucacg

SEQ ID NO: 482365 - RNA, 19 nt, Artificial Sequence
  Description of Artificial Sequence: Synthetic oligonucleotide
uuacggucugguugugugu

SEQ ID NO: 482366 - RNA, 19 nt, Artificial Sequence
  Description of Artificial Sequence: Synthetic oligonucleotide
ccgagcuacacaugcaugc

SEQ ID NO: 482367 - RNA, 19 nt, Artificial Sequence
  Description of Artificial Sequence: Synthetic oligonucleotide
ccaaccgccacccacgcgc

SEQ ID NO: 482368 - RNA, 19 nt, Artificial Sequence
  Description of Artificial Sequence: Synthetic oligonucleotide
ggaaccaguggccgcgucg

SEQ ID NO: 482369 - RNA, 19 nt, Artificial Sequence
  Description of Artificial Sequence: Synthetic oligonucleotide
ggccugauuccccagguug

SEQ ID NO: 482370 - RNA, 19 nt, Artificial Sequence
  Description of Artificial Sequence: Synthetic oligonucleotide
aucgagguuccgaagguca

SEQ ID NO: 482371 - RNA, 19 nt, Artificial Sequence
  Description of Artificial Sequence: Synthetic oligonucleotide
gguuacuucuggccgggag

SEQ ID NO: 482372 - RNA, 19 nt, Artificial Sequence
  Description of Artificial Sequence: Synthetic oligonucleotide
agcagggacgcuggauacc

SEQ ID NO: 482373 - RNA, 19 nt, Artificial Sequence
  Description of Artificial Sequence: Synthetic oligonucleotide
gucuagccggucucgagac

SEQ ID NO: 482374 - RNA, 19 nt, Artificial Sequence
  Description of Artificial Sequence: Synthetic oligonucleotide
caagcgggaccguucccgg

SEQ ID NO: 482375 - RNA, 19 nt, Artificial Sequence
  Description of Artificial Sequence: Synthetic oligonucleotide
ggggcaagcaggccgaggc

SEQ ID NO: 482376 - RNA, 19 nt, Artificial Sequence
  Description of Artificial Sequence: Synthetic oligonucleotide
acccagccgaugaaggugg

SEQ ID NO: 482377 - RNA, 19 nt, Artificial Sequence
  Description of Artificial Sequence: Synthetic oligonucleotide
uagccggucucgagacugg

SEQ ID NO: 482378 - RNA, 19 nt, Artificial Sequence
  Description of Artificial Sequence: Synthetic oligonucleotide
gucagcgaagguucuggac

SEQ ID NO: 482379 - RNA, 19 nt, Artificial Sequence
  Description of Artificial Sequence: Synthetic oligonucleotide
ugcaugcugcccgucucgg

SEQ ID NO: 482380 - RNA, 19 nt, Artificial Sequence
  Description of Artificial Sequence: Synthetic oligonucleotide
cuguccccggaguagcggc

SEQ ID NO: 482381 - RNA, 19 nt, Artificial Sequence
  Description of Artificial Sequence: Synthetic oligonucleotide
aagccccgagcuccauggg

SEQ ID NO: 482382 - RNA, 19 nt, Artificial Sequence
  Description of Artificial Sequence: Synthetic oligonucleotide
uuccgagaccuugaucaug

SEQ ID NO: 482383 - RNA, 19 nt, Artificial Sequence
  Description of Artificial Sequence: Synthetic oligonucleotide
uacggucugguuguguguc

SEQ ID NO: 482384 - RNA, 19 nt, Artificial Sequence
  Description of Artificial Sequence: Synthetic oligonucleotide
caguguaucccaaccgcca

SEQ ID NO: 482385 - RNA, 19 nt, Artificial Sequence
  Description of Artificial Sequence: Synthetic oligonucleotide
ggaugcgugaggguuuacg

SEQ ID NO: 482386 - RNA, 19 nt, Artificial Sequence
  Description of Artificial Sequence: Synthetic oligonucleotide
gauaccugagggguaucuc

SEQ ID NO: 482387 - RNA, 19 nt, Artificial Sequence
  Description of Artificial Sequence: Synthetic oligonucleotide
ggcacgcggagucuguggg

SEQ ID NO: 482388 - RNA, 19 nt, Artificial Sequence
  Description of Artificial Sequence: Synthetic oligonucleotide
gcaagggucaugcuuaucu

SEQ ID NO: 482389 - RNA, 19 nt, Artificial Sequence
  Description of Artificial Sequence: Synthetic oligonucleotide
ugugccguguggucccgug

SEQ ID NO: 482390 - RNA, 19 nt, Artificial Sequence
  Description of Artificial Sequence: Synthetic oligonucleotide
cugaggagucacugucccc

SEQ ID NO: 482391 - RNA, 19 nt, Artificial Sequence
  Description of Artificial Sequence: Synthetic oligonucleotide
cucaagagguggagggguc

SEQ ID NO: 482392 - RNA, 19 nt, Artificial Sequence
  Description of Artificial Sequence: Synthetic oligonucleotide
aucagaagagcuggacaga

SEQ ID NO: 482393 - RNA, 19 nt, Artificial Sequence
  Description of Artificial Sequence: Synthetic oligonucleotide
guucuggaccaguuagaga

SEQ ID NO: 482394 - RNA, 19 nt, Artificial Sequence
  Description of Artificial Sequence: Synthetic oligonucleotide
gucugggcaggugcaacgg

SEQ ID NO: 482395 - RNA, 19 nt, Artificial Sequence
  Description of Artificial Sequence: Synthetic oligonucleotide
agcaacacucauccccaaa

SEQ ID NO: 482396 - RNA, 19 nt, Artificial Sequence
  Description of Artificial Sequence: Synthetic oligonucleotide
uccgggaaccaguggccgc

SEQ ID NO: 482397 - RNA, 19 nt, Artificial Sequence
  Description of Artificial Sequence: Synthetic oligonucleotide
guucuguuuacuggaccac

SEQ ID NO: 482398 - RNA, 19 nt, Artificial Sequence
  Description of Artificial Sequence: Synthetic oligonucleotide
cuuggggcaagcaggccga

SEQ ID NO: 482399 - RNA, 19 nt, Artificial Sequence
  Description of Artificial Sequence: Synthetic oligonucleotide
gcaacacucauccccaaaa

SEQ ID NO: 482400 - RNA, 19 nt, Artificial Sequence
  Description of Artificial Sequence: Synthetic oligonucleotide
cucgggccaugaaggagcc

SEQ ID NO: 482401 - RNA, 19 nt, Artificial Sequence
  Description of Artificial Sequence: Synthetic oligonucleotide
ggggagaaagucccagccc

SEQ ID NO: 482402 - RNA, 19 nt, Artificial Sequence
  Description of Artificial Sequence: Synthetic oligonucleotide
ucccaaccgccacccacgc

SEQ ID NO: 482403 - RNA, 19 nt, Artificial Sequence
  Description of Artificial Sequence: Synthetic oligonucleotide
aggcacaauaccacacucu

SEQ ID NO: 482404 - RNA, 19 nt, Artificial Sequence
  Description of Artificial Sequence: Synthetic oligonucleotide
cagcagggacgcuggauac

SEQ ID NO: 482405 - RNA, 19 nt, Artificial Sequence
  Description of Artificial Sequence: Synthetic oligonucleotide
uggucccauggagguaugg

SEQ ID NO: 482406 - RNA, 19 nt, Artificial Sequence
  Description of Artificial Sequence: Synthetic oligonucleotide
cucuaaggcauucaauaau

SEQ ID NO: 482407 - RNA, 19 nt, Artificial Sequence
  Description of Artificial Sequence: Synthetic oligonucleotide
aaccgccacccacgcgcac

SEQ ID NO: 482408 - RNA, 19 nt, Artificial Sequence
  Description of Artificial Sequence: Synthetic oligonucleotide
acguggcuccuuagcaccc

SEQ ID NO: 482409 - RNA, 19 nt, Artificial Sequence
  Description of Artificial Sequence: Synthetic oligonucleotide
cagcgaagguucuggacca

SEQ ID NO: 482410 - RNA, 19 nt, Artificial Sequence
  Description of Artificial Sequence: Synthetic oligonucleotide
gucucgggccaugaaggag

SEQ ID NO: 482411 - RNA, 19 nt, Artificial Sequence
  Description of Artificial Sequence: Synthetic oligonucleotide
ccagucuaucacauucaag

SEQ ID NO: 482412 - RNA, 19 nt, Artificial Sequence
  Description of Artificial Sequence: Synthetic oligonucleotide
agcccugucgaggaagcca

SEQ ID NO: 482413 - RNA, 19 nt, Artificial Sequence
  Description of Artificial Sequence: Synthetic oligonucleotide
guuggcauguuggcacagc

SEQ ID NO: 482414 - RNA, 19 nt, Artificial Sequence
  Description of Artificial Sequence: Synthetic oligonucleotide
gcagcggcaagggucaugc

SEQ ID NO: 482415 - RNA, 19 nt, Artificial Sequence
  Description of Artificial Sequence: Synthetic oligonucleotide
uggggaugcgugaggguuu

SEQ ID NO: 482416 - RNA, 19 nt, Artificial Sequence
  Description of Artificial Sequence: Synthetic oligonucleotide
agccccgagcuccaugggu

SEQ ID NO: 482417 - RNA, 19 nt, Artificial Sequence
  Description of Artificial Sequence: Synthetic oligonucleotide
aggugcaacggcccaggau

SEQ ID NO: 482418 - RNA, 19 nt, Artificial Sequence
  Description of Artificial Sequence: Synthetic oligonucleotide
gucccauggagguauggcu

SEQ ID NO: 482419 - RNA, 19 nt, Artificial Sequence
  Description of Artificial Sequence: Synthetic oligonucleotide
aagcgggaccguucccggu

SEQ ID NO: 482420 - RNA, 19 nt, Artificial Sequence
  Description of Artificial Sequence: Synthetic oligonucleotide
ugguugcauccaguggccc

SEQ ID NO: 482421 - RNA, 19 nt, Artificial Sequence
  Description of Artificial Sequence: Synthetic oligonucleotide
gugccguguggucccgugg

SEQ ID NO: 482422 - RNA, 19 nt, Artificial Sequence
  Description of Artificial Sequence: Synthetic oligonucleotide
cgagaccuugaucaugggg

SEQ ID NO: 482423 - RNA, 19 nt, Artificial Sequence
  Description of Artificial Sequence: Synthetic oligonucleotide
agccggucucgagacuggc

SEQ ID NO: 482424 - RNA, 19 nt, Artificial Sequence
  Description of Artificial Sequence: Synthetic oligonucleotide
ggucuagccggucucgaga

SEQ ID NO: 482425 - RNA, 19 nt, Artificial Sequence
  Description of Artificial Sequence: Synthetic oligonucleotide
ggccacguugucucgggcc

SEQ ID NO: 482426 - RNA, 19 nt, Artificial Sequence
  Description of Artificial Sequence: Synthetic oligonucleotide
cugugcggccugauucccc

SEQ ID NO: 482427 - RNA, 19 nt, Artificial Sequence
  Description of Artificial Sequence: Synthetic oligonucleotide
gucaagcugcaguggcgug

SEQ ID NO: 482428 - RNA, 19 nt, Artificial Sequence
  Description of Artificial Sequence: Synthetic oligonucleotide
ggagaccggaggucagccg

SEQ ID NO: 482429 - RNA, 19 nt, Artificial Sequence
  Description of Artificial Sequence: Synthetic oligonucleotide
ggucccauggagguauggc

SEQ ID NO: 482430 - RNA, 19 nt, Artificial Sequence
  Description of Artificial Sequence: Synthetic oligonucleotide
gguuaaggccacaaagaaa

SEQ ID NO: 482431 - RNA, 19 nt, Artificial Sequence
  Description of Artificial Sequence: Synthetic oligonucleotide
gguagguuaaggccacaaa

SEQ ID NO: 482432 - RNA, 19 nt, Artificial Sequence
  Description of Artificial Sequence: Synthetic oligonucleotide
ggucucgagacuggcugcg

SEQ ID NO: 482433 - RNA, 19 nt, Artificial Sequence
  Description of Artificial Sequence: Synthetic oligonucleotide
ggggugcccgacugaaggg

SEQ ID NO: 482434 - RNA, 19 nt, Artificial Sequence
  Description of Artificial Sequence: Synthetic oligonucleotide
gaccuugaucauggggaac

SEQ ID NO: 482435 - RNA, 19 nt, Artificial Sequence
  Description of Artificial Sequence: Synthetic oligonucleotide
ccauugugccguguggucc

SEQ ID NO: 482436 - RNA, 19 nt, Artificial Sequence
  Description of Artificial Sequence: Synthetic oligonucleotide
ggcaagcaggccgaggcgc

SEQ ID NO: 482437 - RNA, 19 nt, Artificial Sequence
  Description of Artificial Sequence: Synthetic oligonucleotide
caguggcgugcggaaaagg

SEQ ID NO: 482438 - RNA, 19 nt, Artificial Sequence
  Description of Artificial Sequence: Synthetic oligonucleotide
guguucgggugggagcucc

SEQ ID NO: 482439 - RNA, 19 nt, Artificial Sequence
  Description of Artificial Sequence: Synthetic oligonucleotide
ccaagcgggaccguucccg

SEQ ID NO: 482440 - RNA, 19 nt, Artificial Sequence
  Description of Artificial Sequence: Synthetic oligonucleotide
cccuauagcaaggcagggg

SEQ ID NO: 482441 - RNA, 19 nt, Artificial Sequence
  Description of Artificial Sequence: Synthetic oligonucleotide
ggcgcgggcagcccauugg

SEQ ID NO: 482442 - RNA, 19 nt, Artificial Sequence
  Description of Artificial Sequence: Synthetic oligonucleotide
augcagaggguagguuaag

SEQ ID NO: 482443 - RNA, 19 nt, Artificial Sequence
  Description of Artificial Sequence: Synthetic oligonucleotide
gguccugaugggcggcggg

SEQ ID NO: 482444 - RNA, 19 nt, Artificial Sequence
  Description of Artificial Sequence: Synthetic oligonucleotide
cucuaagcuugggcugggg

SEQ ID NO: 482445 - RNA, 19 nt, Artificial Sequence
  Description of Artificial Sequence: Synthetic oligonucleotide
caguucaucgagguuccga

SEQ ID NO: 482446 - RNA, 19 nt, Artificial Sequence
  Description of Artificial Sequence: Synthetic oligonucleotide
cuugggcuggggccccggg

SEQ ID NO: 482447 - RNA, 19 nt, Artificial Sequence
  Description of Artificial Sequence: Synthetic oligonucleotide
cuaccccgagcuacacaug

SEQ ID NO: 482448 - RNA, 19 nt, Artificial Sequence
  Description of Artificial Sequence: Synthetic oligonucleotide
ggguuuacggucugguugu

SEQ ID NO: 482449 - RNA, 19 nt, Artificial Sequence
  Description of Artificial Sequence: Synthetic oligonucleotide
gaacuggucugggcaggug

SEQ ID NO: 482450 - RNA, 19 nt, Artificial Sequence
  Description of Artificial Sequence: Synthetic oligonucleotide
gggucaagcugcaguggcg

SEQ ID NO: 482451 - RNA, 19 nt, Artificial Sequence
  Description of Artificial Sequence: Synthetic oligonucleotide
ggccaagcgggaccguucc

SEQ ID NO: 482452 - RNA, 19 nt, Artificial Sequence
  Description of Artificial Sequence: Synthetic oligonucleotide
gcuggacgaacaguaagca

SEQ ID NO: 482453 - RNA, 19 nt, Artificial Sequence
  Description of Artificial Sequence: Synthetic oligonucleotide
caguuagagagcucuuggu

SEQ ID NO: 482454 - RNA, 19 nt, Artificial Sequence
  Description of Artificial Sequence: Synthetic oligonucleotide
uguggucccguggggucug

SEQ ID NO: 482455 - RNA, 19 nt, Artificial Sequence
  Description of Artificial Sequence: Synthetic oligonucleotide
ugcccgacugaagggcaug

SEQ ID NO: 482456 - RNA, 19 nt, Artificial Sequence
  Description of Artificial Sequence: Synthetic oligonucleotide
ugacccagucuaucacauu

SEQ ID NO: 482457 - RNA, 19 nt, Artificial Sequence
  Description of Artificial Sequence: Synthetic oligonucleotide
cuggugcucaagaggugga

SEQ ID NO: 482458 - RNA, 19 nt, Artificial Sequence
  Description of Artificial Sequence: Synthetic oligonucleotide
ugcgggcacgcggagucug

SEQ ID NO: 482459 - RNA, 19 nt, Artificial Sequence
  Description of Artificial Sequence: Synthetic oligonucleotide
ggcugagcgggaccucagg

SEQ ID NO: 482460 - RNA, 19 nt, Artificial Sequence
  Description of Artificial Sequence: Synthetic oligonucleotide
ccagcucuaagcuugggcu

SEQ ID NO: 482461 - RNA, 19 nt, Artificial Sequence
  Description of Artificial Sequence: Synthetic oligonucleotide
gccgucucggggaagccgg

SEQ ID NO: 482462 - RNA, 19 nt, Artificial Sequence
  Description of Artificial Sequence: Synthetic oligonucleotide
ggucaugcuuaucuaggua

SEQ ID NO: 482463 - RNA, 19 nt, Artificial Sequence
  Description of Artificial Sequence: Synthetic oligonucleotide
ggcacaauaccacacucuu

SEQ ID NO: 482464 - RNA, 19 nt, Artificial Sequence
  Description of Artificial Sequence: Synthetic oligonucleotide
ggucccugcgcaccaucag

SEQ ID NO: 482465 - RNA, 19 nt, Artificial Sequence
  Description of Artificial Sequence: Synthetic oligonucleotide
ccucuaaggcauucaauaa

SEQ ID NO: 482466 - RNA, 19 nt, Artificial Sequence
  Description of Artificial Sequence: Synthetic oligonucleotide
gggcacgcggagucugugg

SEQ ID NO: 482467 - RNA, 19 nt, Artificial Sequence
  Description of Artificial Sequence: Synthetic oligonucleotide
cauccggccccucgccaag

SEQ ID NO: 482468 - RNA, 19 nt, Artificial Sequence
  Description of Artificial Sequence: Synthetic oligonucleotide
ggcaugccaagccccgagc

SEQ ID NO: 482469 - RNA, 19 nt, Artificial Sequence
  Description of Artificial Sequence: Synthetic oligonucleotide
gaaccaguggccgcgucgu

SEQ ID NO: 482470 - RNA, 19 nt, Artificial Sequence
  Description of Artificial Sequence: Synthetic oligonucleotide
cuauagcaaggcaggggcu

SEQ ID NO: 482471 - RNA, 19 nt, Artificial Sequence
  Description of Artificial Sequence: Synthetic oligonucleotide
guccccggaguagcggcgg

SEQ ID NO: 482472 - RNA, 19 nt, Artificial Sequence
  Description of Artificial Sequence: Synthetic oligonucleotide
gggcauuagccaagaauuc

SEQ ID NO: 482473 - RNA, 19 nt, Artificial Sequence
  Description of Artificial Sequence: Synthetic oligonucleotide
cugcgggcgcgacgcaccg

SEQ ID NO: 482474 - RNA, 19 nt, Artificial Sequence
  Description of Artificial Sequence: Synthetic oligonucleotide
ccgauacaguaacaauuuc

SEQ ID NO: 482475 - RNA, 19 nt, Artificial Sequence
  Description of Artificial Sequence: Synthetic oligonucleotide
gcacgcggagucugugggg

SEQ ID NO: 482476 - RNA, 19 nt, Artificial Sequence
  Description of Artificial Sequence: Synthetic oligonucleotide
ccaguggccgcgucgucgc

SEQ ID NO: 482477 - RNA, 19 nt, Artificial Sequence
  Description of Artificial Sequence: Synthetic oligonucleotide
gggagaccggaggucagcc

SEQ ID NO: 482478 - RNA, 19 nt, Artificial Sequence
  Description of Artificial Sequence: Synthetic oligonucleotide
gggugcccgacugaagggc

SEQ ID NO: 482479 - RNA, 19 nt, Artificial Sequence
  Description of Artificial Sequence: Synthetic oligonucleotide
ggcgugcggaaaaggcugg

SEQ ID NO: 482480 - RNA, 19 nt, Artificial Sequence
  Description of Artificial Sequence: Synthetic oligonucleotide
gcuuaucuagguagugcuc

SEQ ID NO: 482481 - RNA, 19 nt, Artificial Sequence
  Description of Artificial Sequence: Synthetic oligonucleotide
gcagacggugggcaguaga

SEQ ID NO: 482482 - RNA, 19 nt, Artificial Sequence
  Description of Artificial Sequence: Synthetic oligonucleotide
acgcggagucuguggggug

SEQ ID NO: 482483 - RNA, 19 nt, Artificial Sequence
  Description of Artificial Sequence: Synthetic oligonucleotide
ccaaaaccggaauguacaa

SEQ ID NO: 482484 - RNA, 19 nt, Artificial Sequence
  Description of Artificial Sequence: Synthetic oligonucleotide
gcucccgauacaguaacaa

SEQ ID NO: 482485 - RNA, 19 nt, Artificial Sequence
  Description of Artificial Sequence: Synthetic oligonucleotide
cucccgauacaguaacaau

SEQ ID NO: 482486 - RNA, 19 nt, Artificial Sequence
  Description of Artificial Sequence: Synthetic oligonucleotide
gagcgggaccucaggcccc

SEQ ID NO: 482487 - RNA, 19 nt, Artificial Sequence
  Description of Artificial Sequence: Synthetic oligonucleotide
agcagcggcaagggucaug

SEQ ID NO: 482488 - RNA, 19 nt, Artificial Sequence
  Description of Artificial Sequence: Synthetic oligonucleotide
gaccggaggucagccggug

SEQ ID NO: 482489 - RNA, 19 nt, Artificial Sequence
  Description of Artificial Sequence: Synthetic oligonucleotide
cacguugucucgggccaug

SEQ ID NO: 482490 - RNA, 19 nt, Artificial Sequence
  Description of Artificial Sequence: Synthetic oligonucleotide
ggucagcgaagguucugga

SEQ ID NO: 482491 - RNA, 19 nt, Artificial Sequence
  Description of Artificial Sequence: Synthetic oligonucleotide
gaggguuuacggucugguu

SEQ ID NO: 482492 - RNA, 19 nt, Artificial Sequence
  Description of Artificial Sequence: Synthetic oligonucleotide
guggcgugcggaaaaggcu

SEQ ID NO: 482493 - RNA, 19 nt, Artificial Sequence
  Description of Artificial Sequence: Synthetic oligonucleotide
ggcgcgacgcaccgggcug

SEQ ID NO: 482494 - RNA, 19 nt, Artificial Sequence
  Description of Artificial Sequence: Synthetic oligonucleotide
ggcucgggcauuagccaag

SEQ ID NO: 482495 - RNA, 19 nt, Artificial Sequence
  Description of Artificial Sequence: Synthetic oligonucleotide
acgcaccgggcuggaggcc

SEQ ID NO: 482496 - RNA, 19 nt, Artificial Sequence
  Description of Artificial Sequence: Synthetic oligonucleotide
gcacccuuacaaagaugag

SEQ ID NO: 482497 - RNA, 19 nt, Artificial Sequence
  Description of Artificial Sequence: Synthetic oligonucleotide
ggaccguucccggucuagc

SEQ ID NO: 482498 - RNA, 19 nt, Artificial Sequence
  Description of Artificial Sequence: Synthetic oligonucleotide
uggauaccugagggguauc

SEQ ID NO: 482499 - RNA, 19 nt, Artificial Sequence
  Description of Artificial Sequence: Synthetic oligonucleotide
acguugucucgggccauga

SEQ ID NO: 482500 - RNA, 19 nt, Artificial Sequence
  Description of Artificial Sequence: Synthetic oligonucleotide
cuggucccauggagguaug

SEQ ID NO: 482501 - RNA, 19 nt, Artificial Sequence
  Description of Artificial Sequence: Synthetic oligonucleotide
cggggaagccgggagaccg

SEQ ID NO: 482502 - RNA, 19 nt, Artificial Sequence
  Description of Artificial Sequence: Synthetic oligonucleotide
cugcgggucaagcugcagu

SEQ ID NO: 482503 - RNA, 19 nt, Artificial Sequence
  Description of Artificial Sequence: Synthetic oligonucleotide
gcaguggcgugcggaaaag

SEQ ID NO: 482504 - RNA, 19 nt, Artificial Sequence
  Description of Artificial Sequence: Synthetic oligonucleotide
gggugggcggccgucucgg

SEQ ID NO: 482505 - RNA, 19 nt, Artificial Sequence
  Description of Artificial Sequence: Synthetic oligonucleotide
ccgggaaccaguggccgcg

SEQ ID NO: 482506 - RNA, 19 nt, Artificial Sequence
  Description of Artificial Sequence: Synthetic oligonucleotide
ugcaacggcccaggaucuc

SEQ ID NO: 482507 - RNA, 19 nt, Artificial Sequence
  Description of Artificial Sequence: Synthetic oligonucleotide
ccaucacguggcuccuuag

SEQ ID NO: 482508 - RNA, 19 nt, Artificial Sequence
  Description of Artificial Sequence: Synthetic oligonucleotide
gcgcgggcagcccauuggc

SEQ ID NO: 482509 - RNA, 19 nt, Artificial Sequence
  Description of Artificial Sequence: Synthetic oligonucleotide
gcgggucaagcugcagugg

SEQ ID NO: 482510 - RNA, 19 nt, Artificial Sequence
  Description of Artificial Sequence: Synthetic oligonucleotide
ggugucauucuggguguuc

SEQ ID NO: 482511 - RNA, 19 nt, Artificial Sequence
  Description of Artificial Sequence: Synthetic oligonucleotide
agcucccgauacaguaaca

SEQ ID NO: 482512 - RNA, 19 nt, Artificial Sequence
  Description of Artificial Sequence: Synthetic oligonucleotide
uccccagguuggccacacu

SEQ ID NO: 482513 - RNA, 19 nt, Artificial Sequence
  Description of Artificial Sequence: Synthetic oligonucleotide
gcucuaagcuugggcuggg

SEQ ID NO: 482514 - RNA, 19 nt, Artificial Sequence
  Description of Artificial Sequence: Synthetic oligonucleotide
cccgauacaguaacaauuu

SEQ ID NO: 482515 - RNA, 19 nt, Artificial Sequence
  Description of Artificial Sequence: Synthetic oligonucleotide
gcccgucucggucccugcg

SEQ ID NO: 482516 - RNA, 19 nt, Artificial Sequence
  Description of Artificial Sequence: Synthetic oligonucleotide
guuuacggucugguugugu

SEQ ID NO: 482517 - RNA, 19 nt, Artificial Sequence
  Description of Artificial Sequence: Synthetic oligonucleotide
ccacccacgcgcaccauca

SEQ ID NO: 482518 - RNA, 19 nt, Artificial Sequence
  Description of Artificial Sequence: Synthetic oligonucleotide
ugcgcagcacuagguccuc

SEQ ID NO: 482519 - RNA, 19 nt, Artificial Sequence
  Description of Artificial Sequence: Synthetic oligonucleotide
ggucaagcugcaguggcgu

SEQ ID NO: 482520 - RNA, 19 nt, Artificial Sequence
  Description of Artificial Sequence: Synthetic oligonucleotide
caaccgccacccacgcgca

SEQ ID NO: 482521 - RNA, 19 nt, Artificial Sequence
  Description of Artificial Sequence: Synthetic oligonucleotide
ucgggccaugaaggagccc

SEQ ID NO: 482522 - RNA, 19 nt, Artificial Sequence
  Description of Artificial Sequence: Synthetic oligonucleotide
ggguagguuaaggccacaa

SEQ ID NO: 482523 - RNA, 19 nt, Artificial Sequence
  Description of Artificial Sequence: Synthetic oligonucleotide
ccccgagcuccaugggucc

SEQ ID NO: 482524 - RNA, 19 nt, Artificial Sequence
  Description of Artificial Sequence: Synthetic oligonucleotide
cuaccagggcggggacuag

SEQ ID NO: 482525 - RNA, 19 nt, Artificial Sequence
  Description of Artificial Sequence: Synthetic oligonucleotide
gggaccguucccggucuag

SEQ ID NO: 482526 - RNA, 19 nt, Artificial Sequence
  Description of Artificial Sequence: Synthetic oligonucleotide
agcgggaccucaggccccu

SEQ ID NO: 482527 - RNA, 19 nt, Artificial Sequence
  Description of Artificial Sequence: Synthetic oligonucleotide
agaaucugguuggguccuu

SEQ ID NO: 482528 - RNA, 19 nt, Artificial Sequence
  Description of Artificial Sequence: Synthetic oligonucleotide
uaccagccuuggggcaagc

SEQ ID NO: 482529 - RNA, 19 nt, Artificial Sequence
  Description of Artificial Sequence: Synthetic oligonucleotide
gguuuacggucugguugug

SEQ ID NO: 482530 - RNA, 19 nt, Artificial Sequence
  Description of Artificial Sequence: Synthetic oligonucleotide
gcuaccagggcggggacua

SEQ ID NO: 482531 - RNA, 19 nt, Artificial Sequence
  Description of Artificial Sequence: Synthetic oligonucleotide
cccggggccaagcgggacc

SEQ ID NO: 482532 - RNA, 19 nt, Artificial Sequence
  Description of Artificial Sequence: Synthetic oligonucleotide
gcguuggcauguuggcaca

SEQ ID NO: 482533 - RNA, 19 nt, Artificial Sequence
  Description of Artificial Sequence: Synthetic oligonucleotide
ggauaccugagggguaucu

SEQ ID NO: 482534 - RNA, 19 nt, Artificial Sequence
  Description of Artificial Sequence: Synthetic oligonucleotide
gguagccagcucuaagcuu

SEQ ID NO: 482535 - RNA, 19 nt, Artificial Sequence
  Description of Artificial Sequence: Synthetic oligonucleotide
ggccgcgucgucgcugcgg

SEQ ID NO: 482536 - RNA, 19 nt, Artificial Sequence
  Description of Artificial Sequence: Synthetic oligonucleotide
ggaagccgggagaccggag

SEQ ID NO: 482537 - RNA, 19 nt, Artificial Sequence
  Description of Artificial Sequence: Synthetic oligonucleotide
ggguguucgggugggagcu

SEQ ID NO: 482538 - RNA, 19 nt, Artificial Sequence
  Description of Artificial Sequence: Synthetic oligonucleotide
gccccgagcuccauggguc

SEQ ID NO: 482539 - RNA, 19 nt, Artificial Sequence
  Description of Artificial Sequence: Synthetic oligonucleotide
cacgcggagucuguggggu

SEQ ID NO: 482540 - RNA, 19 nt, Artificial Sequence
  Description of Artificial Sequence: Synthetic oligonucleotide
cggucucgagacuggcugc

SEQ ID NO: 482541 - RNA, 19 nt, Artificial Sequence
  Description of Artificial Sequence: Synthetic oligonucleotide
gcggccgucucggggaagc

SEQ ID NO: 482542 - RNA, 19 nt, Artificial Sequence
  Description of Artificial Sequence: Synthetic oligonucleotide
gccaagcgggaccguuccc

SEQ ID NO: 482543 - RNA, 19 nt, Artificial Sequence
  Description of Artificial Sequence: Synthetic oligonucleotide
cccgggaaggacggggcgc

SEQ ID NO: 482544 - RNA, 19 nt, Artificial Sequence
  Description of Artificial Sequence: Synthetic oligonucleotide
cccuccuuugugcuucgca

SEQ ID NO: 482545 - RNA, 19 nt, Artificial Sequence
  Description of Artificial Sequence: Synthetic oligonucleotide
ccauuggcugugcggccug

SEQ ID NO: 482546 - RNA, 19 nt, Artificial Sequence
  Description of Artificial Sequence: Synthetic oligonucleotide
cugcgaggggugggcggcc

SEQ ID NO: 482547 - RNA, 19 nt, Artificial Sequence
  Description of Artificial Sequence: Synthetic oligonucleotide
cccggucuagccggucucg

SEQ ID NO: 482548 - RNA, 19 nt, Artificial Sequence
  Description of Artificial Sequence: Synthetic oligonucleotide
cccgcgccgggccaccucc

SEQ ID NO: 482549 - RNA, 19 nt, Artificial Sequence
  Description of Artificial Sequence: Synthetic oligonucleotide
ccggggccaagcgggaccg

SEQ ID NO: 482550 - RNA, 19 nt, Artificial Sequence
  Description of Artificial Sequence: Synthetic oligonucleotide
cuggcgggugugguagcca

SEQ ID NO: 482551 - RNA, 19 nt, Artificial Sequence
  Description of Artificial Sequence: Synthetic oligonucleotide
caggugcaacggcccagga

SEQ ID NO: 482552 - RNA, 19 nt, Artificial Sequence
  Description of Artificial Sequence: Synthetic oligonucleotide
cccuuccgagaccuugauc

SEQ ID NO: 482553 - RNA, 19 nt, Artificial Sequence
  Description of Artificial Sequence: Synthetic oligonucleotide
ccucugcggggagaaaguc

SEQ ID NO: 482554 - RNA, 19 nt, Artificial Sequence
  Description of Artificial Sequence: Synthetic oligonucleotide
gggaagccgggagaccgga

SEQ ID NO: 482555 - RNA, 19 nt, Artificial Sequence
  Description of Artificial Sequence: Synthetic oligonucleotide
cccaaccgccacccacgcg

SEQ ID NO: 482556 - RNA, 19 nt, Artificial Sequence
  Description of Artificial Sequence: Synthetic oligonucleotide
ccgucucggggaagccggg

SEQ ID NO: 482557 - RNA, 19 nt, Artificial Sequence
  Description of Artificial Sequence: Synthetic oligonucleotide
cauuggcugugcggccuga

SEQ ID NO: 482558 - RNA, 19 nt, Artificial Sequence
  Description of Artificial Sequence: Synthetic oligonucleotide
cucgggcauuagccaagaa

SEQ ID NO: 482559 - RNA, 19 nt, Artificial Sequence
  Description of Artificial Sequence: Synthetic oligonucleotide
cgcggagucuguggggugc

SEQ ID NO: 482560 - RNA, 19 nt, Artificial Sequence
  Description of Artificial Sequence: Synthetic oligonucleotide
gggccaagcgggaccguuc

SEQ ID NO: 482561 - RNA, 19 nt, Artificial Sequence
  Description of Artificial Sequence: Synthetic oligonucleotide
cgugaggguuuacggucug

SEQ ID NO: 482562 - RNA, 19 nt, Artificial Sequence
  Description of Artificial Sequence: Synthetic oligonucleotide
gccgaggcgcgccccgcgc

SEQ ID NO: 482563 - RNA, 19 nt, Artificial Sequence
  Description of Artificial Sequence: Synthetic oligonucleotide
gcucgggcauuagccaaga

SEQ ID NO: 482564 - RNA, 19 nt, Artificial Sequence
  Description of Artificial Sequence: Synthetic oligonucleotide
uccccucugcggggagaaa

SEQ ID NO: 482565 - RNA, 19 nt, Artificial Sequence
  Description of Artificial Sequence: Synthetic oligonucleotide
ccucuaccccgagcuacac

SEQ ID NO: 482566 - RNA, 19 nt, Artificial Sequence
  Description of Artificial Sequence: Synthetic oligonucleotide
cguuggcauguuggcacag

SEQ ID NO: 482567 - RNA, 19 nt, Artificial Sequence
  Description of Artificial Sequence: Synthetic oligonucleotide
gcggccugauuccccaggu

SEQ ID NO: 482568 - RNA, 19 nt, Artificial Sequence
  Description of Artificial Sequence: Synthetic oligonucleotide
ccgagcuccauggguccug

SEQ ID NO: 482569 - RNA, 19 nt, Artificial Sequence
  Description of Artificial Sequence: Synthetic oligonucleotide
gguguucgggugggagcuc

SEQ ID NO: 482570 - RNA, 19 nt, Artificial Sequence
  Description of Artificial Sequence: Synthetic oligonucleotide
ggggaugcgugaggguuua

SEQ ID NO: 482571 - RNA, 19 nt, Artificial Sequence
  Description of Artificial Sequence: Synthetic oligonucleotide
ggucugguuguguguccau

SEQ ID NO: 482572 - RNA, 19 nt, Artificial Sequence
  Description of Artificial Sequence: Synthetic oligonucleotide
gcccugucgaggaagccau

SEQ ID NO: 482573 - RNA, 19 nt, Artificial Sequence
  Description of Artificial Sequence: Synthetic oligonucleotide
cccucugcggggagaaagu

SEQ ID NO: 482574 - RNA, 19 nt, Artificial Sequence
  Description of Artificial Sequence: Synthetic oligonucleotide
gggcagacggugggcagua

SEQ ID NO: 482575 - RNA, 19 nt, Artificial Sequence
  Description of Artificial Sequence: Synthetic oligonucleotide
gggaugcgugaggguuuac

SEQ ID NO: 482576 - RNA, 19 nt, Artificial Sequence
  Description of Artificial Sequence: Synthetic oligonucleotide
ggguuacuucuggccggga

SEQ ID NO: 482577 - RNA, 19 nt, Artificial Sequence
  Description of Artificial Sequence: Synthetic oligonucleotide
gugcccgacugaagggcau

SEQ ID NO: 482578 - RNA, 19 nt, Artificial Sequence
  Description of Artificial Sequence: Synthetic oligonucleotide
gcgggaccguucccggucu

SEQ ID NO: 482579 - RNA, 19 nt, Artificial Sequence
  Description of Artificial Sequence: Synthetic oligonucleotide
cgagcuacacaugcaugcu

SEQ ID NO: 482580 - RNA, 19 nt, Artificial Sequence
  Description of Artificial Sequence: Synthetic oligonucleotide
ggcggccgucucggggaag

SEQ ID NO: 482581 - RNA, 19 nt, Artificial Sequence
  Description of Artificial Sequence: Synthetic oligonucleotide
gcgacgcaccgggcuggag

SEQ ID NO: 482582 - RNA, 19 nt, Artificial Sequence
  Description of Artificial Sequence: Synthetic oligonucleotide
cguugucucgggccaugaa

SEQ ID NO: 482583 - RNA, 19 nt, Artificial Sequence
  Description of Artificial Sequence: Synthetic oligonucleotide
cccauuggcugugcggccu

SEQ ID NO: 482584 - RNA, 19 nt, Artificial Sequence
  Description of Artificial Sequence: Synthetic oligonucleotide
ccuuugugcuucgcaggcu

SEQ ID NO: 482585 - RNA, 19 nt, Artificial Sequence
  Description of Artificial Sequence: Synthetic oligonucleotide
cggagcuccugcucaauuu

SEQ ID NO: 482586 - RNA, 19 nt, Artificial Sequence
  Description of Artificial Sequence: Synthetic oligonucleotide
ccggucuagccggucucga

SEQ ID NO: 482587 - RNA, 19 nt, Artificial Sequence
  Description of Artificial Sequence: Synthetic oligonucleotide
ccggcacccagccgaugaa

SEQ ID NO: 482588 - RNA, 19 nt, Artificial Sequence
  Description of Artificial Sequence: Synthetic oligonucleotide
gggcggccgucucggggaa

SEQ ID NO: 482589 - RNA, 19 nt, Artificial Sequence
  Description of Artificial Sequence: Synthetic oligonucleotide
gcggagucuguggggugcu

SEQ ID NO: 482590 - RNA, 19 nt, Artificial Sequence
  Description of Artificial Sequence: Synthetic oligonucleotide
ggggccaagcgggaccguu

SEQ ID NO: 482591 - RNA, 19 nt, Artificial Sequence
  Description of Artificial Sequence: Synthetic oligonucleotide
ccguguggucccguggggu

SEQ ID NO: 482592 - RNA, 19 nt, Artificial Sequence
  Description of Artificial Sequence: Synthetic oligonucleotide
cugcgggcacgcggagucu

SEQ ID NO: 482593 - RNA, 19 nt, Artificial Sequence
  Description of Artificial Sequence: Synthetic oligonucleotide
gcccggcacccagccgaug

SEQ ID NO: 482594 - RNA, 19 nt, Artificial Sequence
  Description of Artificial Sequence: Synthetic oligonucleotide
cgucucggggaagccggga

SEQ ID NO: 482595 - RNA, 19 nt, Artificial Sequence
  Description of Artificial Sequence: Synthetic oligonucleotide
gcgaggggugggcggccgu

SEQ ID NO: 482596 - RNA, 19 nt, Artificial Sequence
  Description of Artificial Sequence: Synthetic oligonucleotide
gcgggcacgcggagucugu

SEQ ID NO: 482597 - RNA, 19 nt, Artificial Sequence
  Description of Artificial Sequence: Synthetic oligonucleotide
gcgcagcacuagguccucu

SEQ ID NO: 482598 - RNA, 19 nt, Artificial Sequence
  Description of Artificial Sequence: Synthetic oligonucleotide
cguggcuccuuagcacccu

SEQ ID NO: 482599 - RNA, 19 nt, Artificial Sequence
  Description of Artificial Sequence: Synthetic oligonucleotide
cccgagcuccauggguccu

SEQ ID NO: 482600 - RNA, 19 nt, Artificial Sequence
  Description of Artificial Sequence: Synthetic oligonucleotide
ccacguugucucgggccau

SEQ ID NO: 482601 - RNA, 19 nt, Artificial Sequence
  Description of Artificial Sequence: Synthetic oligonucleotide
ggccgacagcugagcgccu

SEQ ID NO: 482602 - RNA, 19 nt, Artificial Sequence
  Description of Artificial Sequence: Synthetic oligonucleotide
gcgggaccucaggccccuc

SEQ ID NO: 482603 - RNA, 19 nt, Artificial Sequence
  Description of Artificial Sequence: Synthetic oligonucleotide
cgcgacgcaccgggcugga

SEQ ID NO: 482604 - RNA, 19 nt, Artificial Sequence
  Description of Artificial Sequence: Synthetic oligonucleotide
ccgcucccuccgggaacca

SEQ ID NO: 482605 - RNA, 19 nt, Artificial Sequence
  Description of Artificial Sequence: Synthetic oligonucleotide
cgggaccguucccggucua

SEQ ID NO: 482606 - RNA, 19 nt, Artificial Sequence
  Description of Artificial Sequence: Synthetic oligonucleotide
cggggccaagcgggaccgu

SEQ ID NO: 482607 - RNA, 19 nt, Artificial Sequence
  Description of Artificial Sequence: Synthetic oligonucleotide
uuaauaaccacccuguucc

SEQ ID NO: 482608 - RNA, 19 nt, Artificial Sequence
  Description of Artificial Sequence: Synthetic oligonucleotide
cuuucaguaaauuaaaugc

SEQ ID NO: 482609 - RNA, 19 nt, Artificial Sequence
  Description of Artificial Sequence: Synthetic oligonucleotide
aauauaaaggccuaacagu

SEQ ID NO: 482610 - RNA, 19 nt, Artificial Sequence
  Description of Artificial Sequence: Synthetic oligonucleotide
uuuaauagagacaauggca

SEQ ID NO: 482611 - RNA, 19 nt, Artificial Sequence
  Description of Artificial Sequence: Synthetic oligonucleotide
aauuccuaaguucugcuuc

SEQ ID NO: 482612 - RNA, 19 nt, Artificial Sequence
  Description of Artificial Sequence: Synthetic oligonucleotide
uauagcuagauuuaaaagu

SEQ ID NO: 482613 - RNA, 19 nt, Artificial Sequence
  Description of Artificial Sequence: Synthetic oligonucleotide
uacaauauauucaaaucag

SEQ ID NO: 482614 - RNA, 19 nt, Artificial Sequence
  Description of Artificial Sequence: Synthetic oligonucleotide
aaagguacaagcuuguuaa

SEQ ID NO: 482615 - RNA, 19 nt, Artificial Sequence
  Description of Artificial Sequence: Synthetic oligonucleotide
uuaagcuaagcacagaacu

SEQ ID NO: 482616 - RNA, 19 nt, Artificial Sequence
  Description of Artificial Sequence: Synthetic oligonucleotide
ucuauaaauaggaaugucu

SEQ ID NO: 482617 - RNA, 19 nt, Artificial Sequence
  Description of Artificial Sequence: Synthetic oligonucleotide
uuaauagagacaauggcaa

SEQ ID NO: 482618 - RNA, 19 nt, Artificial Sequence
  Description of Artificial Sequence: Synthetic oligonucleotide
guacauauggcucuggagg

SEQ ID NO: 482619 - RNA, 19 nt, Artificial Sequence
  Description of Artificial Sequence: Synthetic oligonucleotide
uguauuugguacuggaggg

SEQ ID NO: 482620 - RNA, 19 nt, Artificial Sequence
  Description of Artificial Sequence: Synthetic oligonucleotide
uucuaauuuagaaauguac

SEQ ID NO: 482621 - RNA, 19 nt, Artificial Sequence
  Description of Artificial Sequence: Synthetic oligonucleotide
uacaacauaaacagcuagg

SEQ ID NO: 482622 - RNA, 19 nt, Artificial Sequence
  Description of Artificial Sequence: Synthetic oligonucleotide
gaagauucgacugaacagg

SEQ ID NO: 482623 - RNA, 19 nt, Artificial Sequence
  Description of Artificial Sequence: Synthetic oligonucleotide
uggguuacuaauuucuagg

SEQ ID NO: 482624 - RNA, 19 nt, Artificial Sequence
  Description of Artificial Sequence: Synthetic oligonucleotide
aagguuaucggguuuugag

SEQ ID NO: 482625 - RNA, 19 nt, Artificial Sequence
  Description of Artificial Sequence: Synthetic oligonucleotide
cuuuaauagagacaauggc

SEQ ID NO: 482626 - RNA, 19 nt, Artificial Sequence
  Description of Artificial Sequence: Synthetic oligonucleotide
ugaagauucgacugaacag

SEQ ID NO: 482627 - RNA, 19 nt, Artificial Sequence
  Description of Artificial Sequence: Synthetic oligonucleotide
gacacagauaccuaaguug

SEQ ID NO: 482628 - RNA, 19 nt, Artificial Sequence
  Description of Artificial Sequence: Synthetic oligonucleotide
uguguauucugccauaggu

SEQ ID NO: 482629 - RNA, 19 nt, Artificial Sequence
  Description of Artificial Sequence: Synthetic oligonucleotide
aaacgcacgaauccccacc

SEQ ID NO: 482630 - RNA, 19 nt, Artificial Sequence
  Description of Artificial Sequence: Synthetic oligonucleotide
uucgaacugaugucgaugg

SEQ ID NO: 482631 - RNA, 19 nt, Artificial Sequence
  Description of Artificial Sequence: Synthetic oligonucleotide
ugagcaauacacuggaccc

SEQ ID NO: 482632 - RNA, 19 nt, Artificial Sequence
  Description of Artificial Sequence: Synthetic oligonucleotide
uuuccaacucuauagcuag

SEQ ID NO: 482633 - RNA, 19 nt, Artificial Sequence
  Description of Artificial Sequence: Synthetic oligonucleotide
agaauaaggcaccauuggg

SEQ ID NO: 482634 - RNA, 19 nt, Artificial Sequence
  Description of Artificial Sequence: Synthetic oligonucleotide
agcggauggaaguagaauc

SEQ ID NO: 482635 - RNA, 19 nt, Artificial Sequence
  Description of Artificial Sequence: Synthetic oligonucleotide
auagcuagauuuaaaaguc

SEQ ID NO: 482636 - RNA, 19 nt, Artificial Sequence
  Description of Artificial Sequence: Synthetic oligonucleotide
uucgguuggauccacuccg

SEQ ID NO: 482637 - RNA, 19 nt, Artificial Sequence
  Description of Artificial Sequence: Synthetic oligonucleotide
aauucugcguuuuauuuau

SEQ ID NO: 482638 - RNA, 19 nt, Artificial Sequence
  Description of Artificial Sequence: Synthetic oligonucleotide
aaugcauagugaaggagac

SEQ ID NO: 482639 - RNA, 19 nt, Artificial Sequence
  Description of Artificial Sequence: Synthetic oligonucleotide
uuucauaccaaagaucuga

SEQ ID NO: 482640 - RNA, 19 nt, Artificial Sequence
  Description of Artificial Sequence: Synthetic oligonucleotide
uccauauaaaaugauuugc

SEQ ID NO: 482641 - RNA, 19 nt, Artificial Sequence
  Description of Artificial Sequence: Synthetic oligonucleotide
uuuugagcccacaucaggc

SEQ ID NO: 482642 - RNA, 19 nt, Artificial Sequence
  Description of Artificial Sequence: Synthetic oligonucleotide
aaaucagucacuucauaau

SEQ ID NO: 482643 - RNA, 19 nt, Artificial Sequence
  Description of Artificial Sequence: Synthetic oligonucleotide
uuuaauaaccacccuguuc

SEQ ID NO: 482644 - RNA, 19 nt, Artificial Sequence
  Description of Artificial Sequence: Synthetic oligonucleotide
agguuaucggguuuugagc

SEQ ID NO: 482645 - RNA, 19 nt, Artificial Sequence
  Description of Artificial Sequence: Synthetic oligonucleotide
uauuagaauuccuaaguuc

SEQ ID NO: 482646 - RNA, 19 nt, Artificial Sequence
  Description of Artificial Sequence: Synthetic oligonucleotide
gacaauggcaauauuaaac

SEQ ID NO: 482647 - RNA, 19 nt, Artificial Sequence
  Description of Artificial Sequence: Synthetic oligonucleotide
uacccuaccauuuaacuac

SEQ ID NO: 482648 - RNA, 19 nt, Artificial Sequence
  Description of Artificial Sequence: Synthetic oligonucleotide
uucagguagauacauacau

SEQ ID NO: 482649 - RNA, 19 nt, Artificial Sequence
  Description of Artificial Sequence: Synthetic oligonucleotide
uaauuuagaaauguaccug

SEQ ID NO: 482650 - RNA, 19 nt, Artificial Sequence
  Description of Artificial Sequence: Synthetic oligonucleotide
gauacgucuugguuguugg

SEQ ID NO: 482651 - RNA, 19 nt, Artificial Sequence
  Description of Artificial Sequence: Synthetic oligonucleotide
uguauugcaucuugaauac

SEQ ID NO: 482652 - RNA, 19 nt, Artificial Sequence
  Description of Artificial Sequence: Synthetic oligonucleotide
aaaugcauagugaaggaga

SEQ ID NO: 482653 - RNA, 19 nt, Artificial Sequence
  Description of Artificial Sequence: Synthetic oligonucleotide
cauaccaaagaucugagga

SEQ ID NO: 482654 - RNA, 19 nt, Artificial Sequence
  Description of Artificial Sequence: Synthetic oligonucleotide
aaauugcuaauacaaguua

SEQ ID NO: 482655 - RNA, 19 nt, Artificial Sequence
  Description of Artificial Sequence: Synthetic oligonucleotide
aaaggaggccuggagaacg

SEQ ID NO: 482656 - RNA, 19 nt, Artificial Sequence
  Description of Artificial Sequence: Synthetic oligonucleotide
caugugagcaauacacugg

SEQ ID NO: 482657 - RNA, 19 nt, Artificial Sequence
  Description of Artificial Sequence: Synthetic oligonucleotide
ccuacuaucucugagaggg

SEQ ID NO: 482658 - RNA, 19 nt, Artificial Sequence
  Description of Artificial Sequence: Synthetic oligonucleotide
cuaccauuuaacuacucug

SEQ ID NO: 482659 - RNA, 19 nt, Artificial Sequence
  Description of Artificial Sequence: Synthetic oligonucleotide
agcuagauuuaaaaguccc

SEQ ID NO: 482660 - RNA, 19 nt, Artificial Sequence
  Description of Artificial Sequence: Synthetic oligonucleotide
ugauuugcaaauguuaaaa

SEQ ID NO: 482661 - RNA, 19 nt, Artificial Sequence
  Description of Artificial Sequence: Synthetic oligonucleotide
uugcaucuugaauacacag

SEQ ID NO: 482662 - RNA, 19 nt, Artificial Sequence
  Description of Artificial Sequence: Synthetic oligonucleotide
acaugugagcaauacacug

SEQ ID NO: 482663 - RNA, 19 nt, Artificial Sequence
  Description of Artificial Sequence: Synthetic oligonucleotide
auguuaaaauacuguauug

SEQ ID NO: 482664 - RNA, 19 nt, Artificial Sequence
  Description of Artificial Sequence: Synthetic oligonucleotide
uuaaaugcauagugaagga

SEQ ID NO: 482665 - RNA, 19 nt, Artificial Sequence
  Description of Artificial Sequence: Synthetic oligonucleotide
gugagcaauacacuggacc

SEQ ID NO: 482666 - RNA, 19 nt, Artificial Sequence
  Description of Artificial Sequence: Synthetic oligonucleotide
cuaggugcaucauuucucg

SEQ ID NO: 482667 - RNA, 19 nt, Artificial Sequence
  Description of Artificial Sequence: Synthetic oligonucleotide
uuguuaagccuuuauuucu

SEQ ID NO: 482668 - RNA, 19 nt, Artificial Sequence
  Description of Artificial Sequence: Synthetic oligonucleotide
acuaauuucuaggcaaggg

SEQ ID NO: 482669 - RNA, 19 nt, Artificial Sequence
  Description of Artificial Sequence: Synthetic oligonucleotide
gauguagguguauuacugc

SEQ ID NO: 482670 - RNA, 19 nt, Artificial Sequence
  Description of Artificial Sequence: Synthetic oligonucleotide
gacauacuaggucuugucc

SEQ ID NO: 482671 - RNA, 19 nt, Artificial Sequence
  Description of Artificial Sequence: Synthetic oligonucleotide
aaacauacuuguaagcccu

SEQ ID NO: 482672 - RNA, 19 nt, Artificial Sequence
  Description of Artificial Sequence: Synthetic oligonucleotide
uccauauaaaugaaacaau

SEQ ID NO: 482673 - RNA, 19 nt, Artificial Sequence
  Description of Artificial Sequence: Synthetic oligonucleotide
ucagguagauacauacaug

SEQ ID NO: 482674 - RNA, 19 nt, Artificial Sequence
  Description of Artificial Sequence: Synthetic oligonucleotide
uucauaccaaagaucugag

SEQ ID NO: 482675 - RNA, 19 nt, Artificial Sequence
  Description of Artificial Sequence: Synthetic oligonucleotide
auuucucgaauccccuccc

SEQ ID NO: 482676 - RNA, 19 nt, Artificial Sequence
  Description of Artificial Sequence: Synthetic oligonucleotide
acauacuaggucuugucca

SEQ ID NO: 482677 - RNA, 19 nt, Artificial Sequence
  Description of Artificial Sequence: Synthetic oligonucleotide
guuuugagcccacaucagg

SEQ ID NO: 482678 - RNA, 19 nt, Artificial Sequence
  Description of Artificial Sequence: Synthetic oligonucleotide
ucuacccuaccauuuaacu

SEQ ID NO: 482679 - RNA, 19 nt, Artificial Sequence
  Description of Artificial Sequence: Synthetic oligonucleotide
uuggguuaaacauuuucuc

SEQ ID NO: 482680 - RNA, 19 nt, Artificial Sequence
  Description of Artificial Sequence: Synthetic oligonucleotide
gacccuauuucuaauuuag

SEQ ID NO: 482681 - RNA, 19 nt, Artificial Sequence
  Description of Artificial Sequence: Synthetic oligonucleotide
ucgguuuccgggaaacggg

SEQ ID NO: 482682 - RNA, 19 nt, Artificial Sequence
  Description of Artificial Sequence: Synthetic oligonucleotide
aacggcguucgucuguggg

SEQ ID NO: 482683 - RNA, 19 nt, Artificial Sequence
  Description of Artificial Sequence: Synthetic oligonucleotide
caacuuugagcugugaccc

SEQ ID NO: 482684 - RNA, 19 nt, Artificial Sequence
  Description of Artificial Sequence: Synthetic oligonucleotide
ucauaccaaagaucugagg

SEQ ID NO: 482685 - RNA, 19 nt, Artificial Sequence
  Description of Artificial Sequence: Synthetic oligonucleotide
gguacaagcuuguuaagcc

SEQ ID NO: 482686 - RNA, 19 nt, Artificial Sequence
  Description of Artificial Sequence: Synthetic oligonucleotide
gauucuggcgcacagagcu

SEQ ID NO: 482687 - RNA, 19 nt, Artificial Sequence
  Description of Artificial Sequence: Synthetic oligonucleotide
uucacaagaugagucuugg

SEQ ID NO: 482688 - RNA, 19 nt, Artificial Sequence
  Description of Artificial Sequence: Synthetic oligonucleotide
acgucuugguuguugguac

SEQ ID NO: 482689 - RNA, 19 nt, Artificial Sequence
  Description of Artificial Sequence: Synthetic oligonucleotide
ucuaggcaagggauguagg

SEQ ID NO: 482690 - RNA, 19 nt, Artificial Sequence
  Description of Artificial Sequence: Synthetic oligonucleotide
ucugcguuuuauuuauugu

SEQ ID NO: 482691 - RNA, 19 nt, Artificial Sequence
  Description of Artificial Sequence: Synthetic oligonucleotide
uaagccuuuauuucuucgu

SEQ ID NO: 482692 - RNA, 19 nt, Artificial Sequence
  Description of Artificial Sequence: Synthetic oligonucleotide
gguuaucggguuuugagcc

SEQ ID NO: 482693 - RNA, 19 nt, Artificial Sequence
  Description of Artificial Sequence: Synthetic oligonucleotide
uguuccugcuauuacaaua

SEQ ID NO: 482694 - RNA, 19 nt, Artificial Sequence
  Description of Artificial Sequence: Synthetic oligonucleotide
uagcuagauuuaaaagucc

SEQ ID NO: 482695 - RNA, 19 nt, Artificial Sequence
  Description of Artificial Sequence: Synthetic oligonucleotide
aagaucugaggauacuuua

SEQ ID NO: 482696 - RNA, 19 nt, Artificial Sequence
  Description of Artificial Sequence: Synthetic oligonucleotide
acaacauaaacagcuaggu

SEQ ID NO: 482697 - RNA, 19 nt, Artificial Sequence
  Description of Artificial Sequence: Synthetic oligonucleotide
aauuucuaggcaagggaug

SEQ ID NO: 482698 - RNA, 19 nt, Artificial Sequence
  Description of Artificial Sequence: Synthetic oligonucleotide
cauuucucgaauccccucc

SEQ ID NO: 482699 - RNA, 19 nt, Artificial Sequence
  Description of Artificial Sequence: Synthetic oligonucleotide
uuugagcccacaucaggcc

SEQ ID NO: 482700 - RNA, 19 nt, Artificial Sequence
  Description of Artificial Sequence: Synthetic oligonucleotide
acauucuacaacuucuuua

SEQ ID NO: 482701 - RNA, 19 nt, Artificial Sequence
  Description of Artificial Sequence: Synthetic oligonucleotide
uacauauggcucuggaggu

SEQ ID NO: 482702 - RNA, 19 nt, Artificial Sequence
  Description of Artificial Sequence: Synthetic oligonucleotide
cuaauuucuaggcaaggga

SEQ ID NO: 482703 - RNA, 19 nt, Artificial Sequence
  Description of Artificial Sequence: Synthetic oligonucleotide
cuaauuuagaaauguaccu

SEQ ID NO: 482704 - RNA, 19 nt, Artificial Sequence
  Description of Artificial Sequence: Synthetic oligonucleotide
gcuuuaauagagacaaugg

SEQ ID NO: 482705 - RNA, 19 nt, Artificial Sequence
  Description of Artificial Sequence: Synthetic oligonucleotide
uauuuccauauaaaaugau

SEQ ID NO: 482706 - RNA, 19 nt, Artificial Sequence
  Description of Artificial Sequence: Synthetic oligonucleotide
agggauguagguguauuac

SEQ ID NO: 482707 - RNA, 19 nt, Artificial Sequence
  Description of Artificial Sequence: Synthetic oligonucleotide
ugcgcaguuuucaaacagc

SEQ ID NO: 482708 - RNA, 19 nt, Artificial Sequence
  Description of Artificial Sequence: Synthetic oligonucleotide
uuguugguacauauggcuc

SEQ ID NO: 482709 - RNA, 19 nt, Artificial Sequence
  Description of Artificial Sequence: Synthetic oligonucleotide
uaagcuaagcacagaacuu

SEQ ID NO: 482710 - RNA, 19 nt, Artificial Sequence
  Description of Artificial Sequence: Synthetic oligonucleotide
aucaccucgggaugggagg

SEQ ID NO: 482711 - RNA, 19 nt, Artificial Sequence
  Description of Artificial Sequence: Synthetic oligonucleotide
uauuaugaauggcaacuuu

SEQ ID NO: 482712 - RNA, 19 nt, Artificial Sequence
  Description of Artificial Sequence: Synthetic oligonucleotide
uguauuacugcagcauucu

SEQ ID NO: 482713 - RNA, 19 nt, Artificial Sequence
  Description of Artificial Sequence: Synthetic oligonucleotide
aggcauucgguuccugggc

SEQ ID NO: 482714 - RNA, 19 nt, Artificial Sequence
  Description of Artificial Sequence: Synthetic oligonucleotide
acuguauugcaucuugaau

SEQ ID NO: 482715 - RNA, 19 nt, Artificial Sequence
  Description of Artificial Sequence: Synthetic oligonucleotide
auauaaaggccuaacaguu

SEQ ID NO: 482716 - RNA, 19 nt, Artificial Sequence
  Description of Artificial Sequence: Synthetic oligonucleotide
aagguacaagcuuguuaag

SEQ ID NO: 482717 - RNA, 19 nt, Artificial Sequence
  Description of Artificial Sequence: Synthetic oligonucleotide
gguggcaaaucagaaagcg

SEQ ID NO: 482718 - RNA, 19 nt, Artificial Sequence
  Description of Artificial Sequence: Synthetic oligonucleotide
cuccugccuauaaacaggg

SEQ ID NO: 482719 - RNA, 19 nt, Artificial Sequence
  Description of Artificial Sequence: Synthetic oligonucleotide
uauugucuggaugacuuac

SEQ ID NO: 482720 - RNA, 19 nt, Artificial Sequence
  Description of Artificial Sequence: Synthetic oligonucleotide
uuucgaacugaugucgaug

SEQ ID NO: 482721 - RNA, 19 nt, Artificial Sequence
  Description of Artificial Sequence: Synthetic oligonucleotide
acacagauaccuaaguugu

SEQ ID NO: 482722 - RNA, 19 nt, Artificial Sequence
  Description of Artificial Sequence: Synthetic oligonucleotide
uaagcccugacuucaggga

SEQ ID NO: 482723 - RNA, 19 nt, Artificial Sequence
  Description of Artificial Sequence: Synthetic oligonucleotide
agcucgagggauucuggcg

SEQ ID NO: 482724 - RNA, 19 nt, Artificial Sequence
  Description of Artificial Sequence: Synthetic oligonucleotide
ugguguauuugguacugga

SEQ ID NO: 482725 - RNA, 19 nt, Artificial Sequence
  Description of Artificial Sequence: Synthetic oligonucleotide
uguuaagccuuuauuucuu

SEQ ID NO: 482726 - RNA, 19 nt, Artificial Sequence
  Description of Artificial Sequence: Synthetic oligonucleotide
ucuugguguauuugguacu

SEQ ID NO: 482727 - RNA, 19 nt, Artificial Sequence
  Description of Artificial Sequence: Synthetic oligonucleotide
aacgcacgaauccccaccu

SEQ ID NO: 482728 - RNA, 19 nt, Artificial Sequence
  Description of Artificial Sequence: Synthetic oligonucleotide
acagauaccuaaguugugu

SEQ ID NO: 482729 - RNA, 19 nt, Artificial Sequence
  Description of Artificial Sequence: Synthetic oligonucleotide
acucaagaauauauacaac

SEQ ID NO: 482730 - RNA, 19 nt, Artificial Sequence
  Description of Artificial Sequence: Synthetic oligonucleotide
cuaaguugugucugcuuac

SEQ ID NO: 482731 - RNA, 19 nt, Artificial Sequence
  Description of Artificial Sequence: Synthetic oligonucleotide
uccccgguugugaagauuc

SEQ ID NO: 482732 - RNA, 19 nt, Artificial Sequence
  Description of Artificial Sequence: Synthetic oligonucleotide
uauaaaggccuaacaguuu

SEQ ID NO: 482733 - RNA, 19 nt, Artificial Sequence
  Description of Artificial Sequence: Synthetic oligonucleotide
accaaacgcacgaaucccc

SEQ ID NO: 482734 - RNA, 19 nt, Artificial Sequence
  Description of Artificial Sequence: Synthetic oligonucleotide
aauaaccacccuguuccug

SEQ ID NO: 482735 - RNA, 19 nt, Artificial Sequence
  Description of Artificial Sequence: Synthetic oligonucleotide
agcuaggugcaucauuucu

SEQ ID NO: 482736 - RNA, 19 nt, Artificial Sequence
  Description of Artificial Sequence: Synthetic oligonucleotide
aagcuaagcacagaacuuu

SEQ ID NO: 482737 - RNA, 19 nt, Artificial Sequence
  Description of Artificial Sequence: Synthetic oligonucleotide
aacucuauagcuagauuua

SEQ ID NO: 482738 - RNA, 19 nt, Artificial Sequence
  Description of Artificial Sequence: Synthetic oligonucleotide
cauggaagacagacaaaug

SEQ ID NO: 482739 - RNA, 19 nt, Artificial Sequence
  Description of Artificial Sequence: Synthetic oligonucleotide
ugucauccaaggcucggcu

SEQ ID NO: 482740 - RNA, 19 nt, Artificial Sequence
  Description of Artificial Sequence: Synthetic oligonucleotide
uucccuccuacuaucucug

SEQ ID NO: 482741 - RNA, 19 nt, Artificial Sequence
  Description of Artificial Sequence: Synthetic oligonucleotide
aacagcuaggugcaucauu

SEQ ID NO: 482742 - RNA, 19 nt, Artificial Sequence
  Description of Artificial Sequence: Synthetic oligonucleotide
cucgguuuccgggaaacgg

SEQ ID NO: 482743 - RNA, 19 nt, Artificial Sequence
  Description of Artificial Sequence: Synthetic oligonucleotide
uccuacuaucucugagagg

SEQ ID NO: 482744 - RNA, 19 nt, Artificial Sequence
  Description of Artificial Sequence: Synthetic oligonucleotide
cuuggguagagaccagcag

SEQ ID NO: 482745 - RNA, 19 nt, Artificial Sequence
  Description of Artificial Sequence: Synthetic oligonucleotide
ggguuacuaauuucuaggc

SEQ ID NO: 482746 - RNA, 19 nt, Artificial Sequence
  Description of Artificial Sequence: Synthetic oligonucleotide
aguucagggcuuuggcaag

SEQ ID NO: 482747 - RNA, 19 nt, Artificial Sequence
  Description of Artificial Sequence: Synthetic oligonucleotide
cauacuuguaagcccugac

SEQ ID NO: 482748 - RNA, 19 nt, Artificial Sequence
  Description of Artificial Sequence: Synthetic oligonucleotide
uaauagagacaauggcaau

SEQ ID NO: 482749 - RNA, 19 nt, Artificial Sequence
  Description of Artificial Sequence: Synthetic oligonucleotide
agaaagcggauggaaguag

SEQ ID NO: 482750 - RNA, 19 nt, Artificial Sequence
  Description of Artificial Sequence: Synthetic oligonucleotide
uugagcccacaucaggccu

SEQ ID NO: 482751 - RNA, 19 nt, Artificial Sequence
  Description of Artificial Sequence: Synthetic oligonucleotide
aagauucgacugaacaggu

SEQ ID NO: 482752 - RNA, 19 nt, Artificial Sequence
  Description of Artificial Sequence: Synthetic oligonucleotide
gaauaaggcaccauugggu

SEQ ID NO: 482753 - RNA, 19 nt, Artificial Sequence
  Description of Artificial Sequence: Synthetic oligonucleotide
acgaauccccaccucagcu

SEQ ID NO: 482754 - RNA, 19 nt, Artificial Sequence
  Description of Artificial Sequence: Synthetic oligonucleotide
aggugcaucauuucucgaa

SEQ ID NO: 482755 - RNA, 19 nt, Artificial Sequence
  Description of Artificial Sequence: Synthetic oligonucleotide
agacaauggcaauauuaaa

SEQ ID NO: 482756 - RNA, 19 nt, Artificial Sequence
  Description of Artificial Sequence: Synthetic oligonucleotide
ucgguuggauccacuccgg

SEQ ID NO: 482757 - RNA, 19 nt, Artificial Sequence
  Description of Artificial Sequence: Synthetic oligonucleotide
gaggaaaaugacucucuaa

SEQ ID NO: 482758 - RNA, 19 nt, Artificial Sequence
  Description of Artificial Sequence: Synthetic oligonucleotide
guuaucggguuuugagccc

SEQ ID NO: 482759 - RNA, 19 nt, Artificial Sequence
  Description of Artificial Sequence: Synthetic oligonucleotide
uuucucgaauccccucccc

SEQ ID NO: 482760 - RNA, 19 nt, Artificial Sequence
  Description of Artificial Sequence: Synthetic oligonucleotide
gugcgcaguuuucaaacag

SEQ ID NO: 482761 - RNA, 19 nt, Artificial Sequence
  Description of Artificial Sequence: Synthetic oligonucleotide
acccuguuccugcuauuac

SEQ ID NO: 482762 - RNA, 19 nt, Artificial Sequence
  Description of Artificial Sequence: Synthetic oligonucleotide
uggacccaaaauacaaauu

SEQ ID NO: 482763 - RNA, 19 nt, Artificial Sequence
  Description of Artificial Sequence: Synthetic oligonucleotide
cagauaccuaaguuguguc

SEQ ID NO: 482764 - RNA, 19 nt, Artificial Sequence
  Description of Artificial Sequence: Synthetic oligonucleotide
cuugguguauuugguacug

SEQ ID NO: 482765 - RNA, 19 nt, Artificial Sequence
  Description of Artificial Sequence: Synthetic oligonucleotide
guuaagcuaagcacagaac

SEQ ID NO: 482766 - RNA, 19 nt, Artificial Sequence
  Description of Artificial Sequence: Synthetic oligonucleotide
uuaucggguuuugagccca

SEQ ID NO: 482767 - RNA, 19 nt, Artificial Sequence
  Description of Artificial Sequence: Synthetic oligonucleotide
gaucaccucgggaugggag

SEQ ID NO: 482768 - RNA, 19 nt, Artificial Sequence
  Description of Artificial Sequence: Synthetic oligonucleotide
caacucuauagcuagauuu

SEQ ID NO: 482769 - RNA, 19 nt, Artificial Sequence
  Description of Artificial Sequence: Synthetic oligonucleotide
uacacaguucggugguaug

SEQ ID NO: 482770 - RNA, 19 nt, Artificial Sequence
  Description of Artificial Sequence: Synthetic oligonucleotide
guguguauucugccauagg

SEQ ID NO: 482771 - RNA, 19 nt, Artificial Sequence
  Description of Artificial Sequence: Synthetic oligonucleotide
agguggcaaaucagaaagc

SEQ ID NO: 482772 - RNA, 19 nt, Artificial Sequence
  Description of Artificial Sequence: Synthetic oligonucleotide
cuaaguucugcuuccauau

SEQ ID NO: 482773 - RNA, 19 nt, Artificial Sequence
  Description of Artificial Sequence: Synthetic oligonucleotide
gguuacuaauuucuaggca

SEQ ID NO: 482774 - RNA, 19 nt, Artificial Sequence
  Description of Artificial Sequence: Synthetic oligonucleotide
uagagucuacccuaccauu

SEQ ID NO: 482775 - RNA, 19 nt, Artificial Sequence
  Description of Artificial Sequence: Synthetic oligonucleotide
ugugagcaauacacuggac

SEQ ID NO: 482776 - RNA, 19 nt, Artificial Sequence
  Description of Artificial Sequence: Synthetic oligonucleotide
aggccuaucaggaggaaga

SEQ ID NO: 482777 - RNA, 19 nt, Artificial Sequence
  Description of Artificial Sequence: Synthetic oligonucleotide
auuucgaacugaugucgau

SEQ ID NO: 482778 - RNA, 19 nt, Artificial Sequence
  Description of Artificial Sequence: Synthetic oligonucleotide
gagcucgagggauucuggc

SEQ ID NO: 482779 - RNA, 19 nt, Artificial Sequence
  Description of Artificial Sequence: Synthetic oligonucleotide
cagaguuugagaugcagcu

SEQ ID NO: 482780 - RNA, 19 nt, Artificial Sequence
  Description of Artificial Sequence: Synthetic oligonucleotide
acagcuaggugcaucauuu

SEQ ID NO: 482781 - RNA, 19 nt, Artificial Sequence
  Description of Artificial Sequence: Synthetic oligonucleotide
ccauuucgaacugaugucg

SEQ ID NO: 482782 - RNA, 19 nt, Artificial Sequence
  Description of Artificial Sequence: Synthetic oligonucleotide
uucgacugaacaggucuug

SEQ ID NO: 482783 - RNA, 19 nt, Artificial Sequence
  Description of Artificial Sequence: Synthetic oligonucleotide
cuacuaucucugagagggg

SEQ ID NO: 482784 - RNA, 19 nt, Artificial Sequence
  Description of Artificial Sequence: Synthetic oligonucleotide
ucacaagaugagucuugga

SEQ ID NO: 482785 - RNA, 19 nt, Artificial Sequence
  Description of Artificial Sequence: Synthetic oligonucleotide
gaugacuuacaaagaugca

SEQ ID NO: 482786 - RNA, 19 nt, Artificial Sequence
  Description of Artificial Sequence: Synthetic oligonucleotide
gguagagucuacccuacca

SEQ ID NO: 482787 - RNA, 19 nt, Artificial Sequence
  Description of Artificial Sequence: Synthetic oligonucleotide
ucggguuuugagcccacau

SEQ ID NO: 482788 - RNA, 19 nt, Artificial Sequence
  Description of Artificial Sequence: Synthetic oligonucleotide
cucgggaugggaggaaggg

SEQ ID NO: 482789 - RNA, 19 nt, Artificial Sequence
  Description of Artificial Sequence: Synthetic oligonucleotide
gccaugugcuuuaauagag

SEQ ID NO: 482790 - RNA, 19 nt, Artificial Sequence
  Description of Artificial Sequence: Synthetic oligonucleotide
uugugaagauucgacugaa

SEQ ID NO: 482791 - RNA, 19 nt, Artificial Sequence
  Description of Artificial Sequence: Synthetic oligonucleotide
ccagaguuugagaugcagc

SEQ ID NO: 482792 - RNA, 19 nt, Artificial Sequence
  Description of Artificial Sequence: Synthetic oligonucleotide
ggcauucgguuccugggcg

SEQ ID NO: 482793 - RNA, 19 nt, Artificial Sequence
  Description of Artificial Sequence: Synthetic oligonucleotide
caccaaacgcacgaauccc

SEQ ID NO: 482794 - RNA, 19 nt, Artificial Sequence
  Description of Artificial Sequence: Synthetic oligonucleotide
cccaguaaaaucuuguaaa

SEQ ID NO: 482795 - RNA, 19 nt, Artificial Sequence
  Description of Artificial Sequence: Synthetic oligonucleotide
aaagcggauggaaguagaa

SEQ ID NO: 482796 - RNA, 19 nt, Artificial Sequence
  Description of Artificial Sequence: Synthetic oligonucleotide
cagagaucaccucgggaug

SEQ ID NO: 482797 - RNA, 19 nt, Artificial Sequence
  Description of Artificial Sequence: Synthetic oligonucleotide
accucgguuuccgggaaac

SEQ ID NO: 482798 - RNA, 19 nt, Artificial Sequence
  Description of Artificial Sequence: Synthetic oligonucleotide
auuucauaccaaagaucug

SEQ ID NO: 482799 - RNA, 19 nt, Artificial Sequence
  Description of Artificial Sequence: Synthetic oligonucleotide
cauacuaggucuuguccaa

SEQ ID NO: 482800 - RNA, 19 nt, Artificial Sequence
  Description of Artificial Sequence: Synthetic oligonucleotide
cacagauaccuaaguugug

SEQ ID NO: 482801 - RNA, 19 nt, Artificial Sequence
  Description of Artificial Sequence: Synthetic oligonucleotide
gcguuuuauuuauugucug

SEQ ID NO: 482802 - RNA, 19 nt, Artificial Sequence
  Description of Artificial Sequence: Synthetic oligonucleotide
gaaagcggauggaaguaga

SEQ ID NO: 482803 - RNA, 19 nt, Artificial Sequence
  Description of Artificial Sequence: Synthetic oligonucleotide
uacuaggucuuguccaauu

SEQ ID NO: 482804 - RNA, 19 nt, Artificial Sequence
  Description of Artificial Sequence: Synthetic oligonucleotide
cauuucgaacugaugucga

SEQ ID NO: 482805 - RNA, 19 nt, Artificial Sequence
  Description of Artificial Sequence: Synthetic oligonucleotide
cuacccuaccauuuaacua

SEQ ID NO: 482806 - RNA, 19 nt, Artificial Sequence
  Description of Artificial Sequence: Synthetic oligonucleotide
uggaacggcguucgucugu

SEQ ID NO: 482807 - RNA, 19 nt, Artificial Sequence
  Description of Artificial Sequence: Synthetic oligonucleotide
guguauuacugcagcauuc

SEQ ID NO: 482808 - RNA, 19 nt, Artificial Sequence
  Description of Artificial Sequence: Synthetic oligonucleotide
gcucgagggauucuggcgc

SEQ ID NO: 482809 - RNA, 19 nt, Artificial Sequence
  Description of Artificial Sequence: Synthetic oligonucleotide
aacaccaaguucagggcuu

SEQ ID NO: 482810 - RNA, 19 nt, Artificial Sequence
  Description of Artificial Sequence: Synthetic oligonucleotide
agucuacccuaccauuuaa

SEQ ID NO: 482811 - RNA, 19 nt, Artificial Sequence
  Description of Artificial Sequence: Synthetic oligonucleotide
agguggaacggcguucguc

SEQ ID NO: 482812 - RNA, 19 nt, Artificial Sequence
  Description of Artificial Sequence: Synthetic oligonucleotide
gaauggcaacuuugagcug

SEQ ID NO: 482813 - RNA, 19 nt, Artificial Sequence
  Description of Artificial Sequence: Synthetic oligonucleotide
agguagauacauacaugug

SEQ ID NO: 482814 - RNA, 19 nt, Artificial Sequence
  Description of Artificial Sequence: Synthetic oligonucleotide
gagaucaccucgggauggg

SEQ ID NO: 482815 - RNA, 19 nt, Artificial Sequence
  Description of Artificial Sequence: Synthetic oligonucleotide
cacgaauccccaccucagc

SEQ ID NO: 482816 - RNA, 19 nt, Artificial Sequence
  Description of Artificial Sequence: Synthetic oligonucleotide
ucgaacugaugucgauggu

SEQ ID NO: 482817 - RNA, 19 nt, Artificial Sequence
  Description of Artificial Sequence: Synthetic oligonucleotide
auaauccaccacguagaca

SEQ ID NO: 482818 - RNA, 19 nt, Artificial Sequence
  Description of Artificial Sequence: Synthetic oligonucleotide
caguucggugguaugaaaa

SEQ ID NO: 482819 - RNA, 19 nt, Artificial Sequence
  Description of Artificial Sequence: Synthetic oligonucleotide
auaaggcaccauuggguua

SEQ ID NO: 482820 - RNA, 19 nt, Artificial Sequence
  Description of Artificial Sequence: Synthetic oligonucleotide
gcuuguuaagccuuuauuu

SEQ ID NO: 482821 - RNA, 19 nt, Artificial Sequence
  Description of Artificial Sequence: Synthetic oligonucleotide
guacaagcuuguuaagccu

SEQ ID NO: 482822 - RNA, 19 nt, Artificial Sequence
  Description of Artificial Sequence: Synthetic oligonucleotide
cccuauuucuaauuuagaa

SEQ ID NO: 482823 - RNA, 19 nt, Artificial Sequence
  Description of Artificial Sequence: Synthetic oligonucleotide
ugcccacgggaggaggugg

SEQ ID NO: 482824 - RNA, 19 nt, Artificial Sequence
  Description of Artificial Sequence: Synthetic oligonucleotide
gaagguuaucggguuuuga

SEQ ID NO: 482825 - RNA, 19 nt, Artificial Sequence
  Description of Artificial Sequence: Synthetic oligonucleotide
auacgucuugguuguuggu

SEQ ID NO: 482826 - RNA, 19 nt, Artificial Sequence
  Description of Artificial Sequence: Synthetic oligonucleotide
acauacuuguaagcccuga

SEQ ID NO: 482827 - RNA, 19 nt, Artificial Sequence
  Description of Artificial Sequence: Synthetic oligonucleotide
cuugguuguugguacauau

SEQ ID NO: 482828 - RNA, 19 nt, Artificial Sequence
  Description of Artificial Sequence: Synthetic oligonucleotide
cuucguucucauggaagac

SEQ ID NO: 482829 - RNA, 19 nt, Artificial Sequence
  Description of Artificial Sequence: Synthetic oligonucleotide
acaguucggugguaugaaa

SEQ ID NO: 482830 - RNA, 19 nt, Artificial Sequence
  Description of Artificial Sequence: Synthetic oligonucleotide
ggcgaaaggaggccuggag

SEQ ID NO: 482831 - RNA, 19 nt, Artificial Sequence
  Description of Artificial Sequence: Synthetic oligonucleotide
agagucuacccuaccauuu

SEQ ID NO: 482832 - RNA, 19 nt, Artificial Sequence
  Description of Artificial Sequence: Synthetic oligonucleotide
auacuguauugcaucuuga

SEQ ID NO: 482833 - RNA, 19 nt, Artificial Sequence
  Description of Artificial Sequence: Synthetic oligonucleotide
gagucuacccuaccauuua

SEQ ID NO: 482834 - RNA, 19 nt, Artificial Sequence
  Description of Artificial Sequence: Synthetic oligonucleotide
uaccuaaguugugucugcu

SEQ ID NO: 482835 - RNA, 19 nt, Artificial Sequence
  Description of Artificial Sequence: Synthetic oligonucleotide
guagagucuacccuaccau

SEQ ID NO: 482836 - RNA, 19 nt, Artificial Sequence
  Description of Artificial Sequence: Synthetic oligonucleotide
ccgguugugaagauucgac

SEQ ID NO: 482837 - RNA, 19 nt, Artificial Sequence
  Description of Artificial Sequence: Synthetic oligonucleotide
uaaccacccuguuccugcu

SEQ ID NO: 482838 - RNA, 19 nt, Artificial Sequence
  Description of Artificial Sequence: Synthetic oligonucleotide
gaauuccuaaguucugcuu

SEQ ID NO: 482839 - RNA, 19 nt, Artificial Sequence
  Description of Artificial Sequence: Synthetic oligonucleotide
gcaccauuggguuaaacau

SEQ ID NO: 482840 - RNA, 19 nt, Artificial Sequence
  Description of Artificial Sequence: Synthetic oligonucleotide
gucuacccuaccauuuaac

SEQ ID NO: 482841 - RNA, 19 nt, Artificial Sequence
  Description of Artificial Sequence: Synthetic oligonucleotide
auauauacccuggcagguu

SEQ ID NO: 482842 - RNA, 19 nt, Artificial Sequence
  Description of Artificial Sequence: Synthetic oligonucleotide
gguggaacggcguucgucu

SEQ ID NO: 482843 - RNA, 19 nt, Artificial Sequence
  Description of Artificial Sequence: Synthetic oligonucleotide
uuugagcugugacccuauu

SEQ ID NO: 482844 - RNA, 19 nt, Artificial Sequence
  Description of Artificial Sequence: Synthetic oligonucleotide
uggggauccccgguuguga

SEQ ID NO: 482845 - RNA, 19 nt, Artificial Sequence
  Description of Artificial Sequence: Synthetic oligonucleotide
ggauacgucuugguuguug

SEQ ID NO: 482846 - RNA, 19 nt, Artificial Sequence
  Description of Artificial Sequence: Synthetic oligonucleotide
cacagaauaaggcaccauu

SEQ ID NO: 482847 - RNA, 19 nt, Artificial Sequence
  Description of Artificial Sequence: Synthetic oligonucleotide
uuggggauccccgguugug

SEQ ID NO: 482848 - RNA, 19 nt, Artificial Sequence
  Description of Artificial Sequence: Synthetic oligonucleotide
ucuugguuguugguacaua

SEQ ID NO: 482849 - RNA, 19 nt, Artificial Sequence
  Description of Artificial Sequence: Synthetic oligonucleotide
gcuagauuuaaaaguccca

SEQ ID NO: 482850 - RNA, 19 nt, Artificial Sequence
  Description of Artificial Sequence: Synthetic oligonucleotide
gaacggcguucgucugugg

SEQ ID NO: 482851 - RNA, 19 nt, Artificial Sequence
  Description of Artificial Sequence: Synthetic oligonucleotide
gcuaggugcaucauuucuc

SEQ ID NO: 482852 - RNA, 19 nt, Artificial Sequence
  Description of Artificial Sequence: Synthetic oligonucleotide
acuuugagcugugacccua

SEQ ID NO: 482853 - RNA, 19 nt, Artificial Sequence
  Description of Artificial Sequence: Synthetic oligonucleotide
gcugugacccuauuucuaa

SEQ ID NO: 482854 - RNA, 19 nt, Artificial Sequence
  Description of Artificial Sequence: Synthetic oligonucleotide
ggagguggcaaaucagaaa

SEQ ID NO: 482855 - RNA, 19 nt, Artificial Sequence
  Description of Artificial Sequence: Synthetic oligonucleotide
gcauucgguuccugggcgg

SEQ ID NO: 482856 - RNA, 19 nt, Artificial Sequence
  Description of Artificial Sequence: Synthetic oligonucleotide
acgcacgaauccccaccuc

SEQ ID NO: 482857 - RNA, 19 nt, Artificial Sequence
  Description of Artificial Sequence: Synthetic oligonucleotide
gcgaaaggaggccuggaga

SEQ ID NO: 482858 - RNA, 19 nt, Artificial Sequence
  Description of Artificial Sequence: Synthetic oligonucleotide
acccuauuucuaauuuaga

SEQ ID NO: 482859 - RNA, 19 nt, Artificial Sequence
  Description of Artificial Sequence: Synthetic oligonucleotide
aaacagcuaggugcaucau

SEQ ID NO: 482860 - RNA, 19 nt, Artificial Sequence
  Description of Artificial Sequence: Synthetic oligonucleotide
gaggggugcgcaguuuuca

SEQ ID NO: 482861 - RNA, 19 nt, Artificial Sequence
  Description of Artificial Sequence: Synthetic oligonucleotide
uaucggguuuugagcccac

SEQ ID NO: 482862 - RNA, 19 nt, Artificial Sequence
  Description of Artificial Sequence: Synthetic oligonucleotide
auacugcaauauauuucca

SEQ ID NO: 482863 - RNA, 19 nt, Artificial Sequence
  Description of Artificial Sequence: Synthetic oligonucleotide
gcguucgucugugggaugg

SEQ ID NO: 482864 - RNA, 19 nt, Artificial Sequence
  Description of Artificial Sequence: Synthetic oligonucleotide
aggggugcgcaguuuucaa

SEQ ID NO: 482865 - RNA, 19 nt, Artificial Sequence
  Description of Artificial Sequence: Synthetic oligonucleotide
agaugcagcuggguuacua

SEQ ID NO: 482866 - RNA, 19 nt, Artificial Sequence
  Description of Artificial Sequence: Synthetic oligonucleotide
cagcuaggugcaucauuuc

SEQ ID NO: 482867 - RNA, 19 nt, Artificial Sequence
  Description of Artificial Sequence: Synthetic oligonucleotide
ccuaaguugugucugcuua

SEQ ID NO: 482868 - RNA, 19 nt, Artificial Sequence
  Description of Artificial Sequence: Synthetic oligonucleotide
ucccuccuacuaucucuga

SEQ ID NO: 482869 - RNA, 19 nt, Artificial Sequence
  Description of Artificial Sequence: Synthetic oligonucleotide
gugacccuauuucuaauuu

SEQ ID NO: 482870 - RNA, 19 nt, Artificial Sequence
  Description of Artificial Sequence: Synthetic oligonucleotide
agcuaagcacagaacuuuu

SEQ ID NO: 482871 - RNA, 19 nt, Artificial Sequence
  Description of Artificial Sequence: Synthetic oligonucleotide
aggcaccauuggguuaaac

SEQ ID NO: 482872 - RNA, 19 nt, Artificial Sequence
  Description of Artificial Sequence: Synthetic oligonucleotide
auucgacugaacaggucuu

SEQ ID NO: 482873 - RNA, 19 nt, Artificial Sequence
  Description of Artificial Sequence: Synthetic oligonucleotide
uugcccacgggaggaggug

SEQ ID NO: 482874 - RNA, 19 nt, Artificial Sequence
  Description of Artificial Sequence: Synthetic oligonucleotide
cgaacugaugucgauggug

SEQ ID NO: 482875 - RNA, 19 nt, Artificial Sequence
  Description of Artificial Sequence: Synthetic oligonucleotide
ggauccccgguugugaaga

SEQ ID NO: 482876 - RNA, 19 nt, Artificial Sequence
  Description of Artificial Sequence: Synthetic oligonucleotide
caauuccuuucagaucaca

SEQ ID NO: 482877 - RNA, 19 nt, Artificial Sequence
  Description of Artificial Sequence: Synthetic oligonucleotide
gguguauuacugcagcauu

SEQ ID NO: 482878 - RNA, 19 nt, Artificial Sequence
  Description of Artificial Sequence: Synthetic oligonucleotide
cagcuuccgucauucccuc

SEQ ID NO: 482879 - RNA, 19 nt, Artificial Sequence
  Description of Artificial Sequence: Synthetic oligonucleotide
ggccguguugcccacggga

SEQ ID NO: 482880 - RNA, 19 nt, Artificial Sequence
  Description of Artificial Sequence: Synthetic oligonucleotide
gcgcaguuuucaaacagca

SEQ ID NO: 482881 - RNA, 19 nt, Artificial Sequence
  Description of Artificial Sequence: Synthetic oligonucleotide
auacuaggucuuguccaau

SEQ ID NO: 482882 - RNA, 19 nt, Artificial Sequence
  Description of Artificial Sequence: Synthetic oligonucleotide
ggaacggcguucgucugug

SEQ ID NO: 482883 - RNA, 19 nt, Artificial Sequence
  Description of Artificial Sequence: Synthetic oligonucleotide
ggugcaucauuucucgaau

SEQ ID NO: 482884 - RNA, 19 nt, Artificial Sequence
  Description of Artificial Sequence: Synthetic oligonucleotide
cucgagggauucuggcgca

SEQ ID NO: 482885 - RNA, 19 nt, Artificial Sequence
  Description of Artificial Sequence: Synthetic oligonucleotide
cagaaagcggauggaagua

SEQ ID NO: 482886 - RNA, 19 nt, Artificial Sequence
  Description of Artificial Sequence: Synthetic oligonucleotide
guguguguauucugccaua

SEQ ID NO: 482887 - RNA, 19 nt, Artificial Sequence
  Description of Artificial Sequence: Synthetic oligonucleotide
ggaagguuaucggguuuug

SEQ ID NO: 482888 - RNA, 19 nt, Artificial Sequence
  Description of Artificial Sequence: Synthetic oligonucleotide
gggauccccgguugugaag

SEQ ID NO: 482889 - RNA, 19 nt, Artificial Sequence
  Description of Artificial Sequence: Synthetic oligonucleotide
ccucgggaugggaggaagg

SEQ ID NO: 482890 - RNA, 19 nt, Artificial Sequence
  Description of Artificial Sequence: Synthetic oligonucleotide
cgguuuccgggaaacgggg

SEQ ID NO: 482891 - RNA, 19 nt, Artificial Sequence
  Description of Artificial Sequence: Synthetic oligonucleotide
agaucaccucgggauggga

SEQ ID NO: 482892 - RNA, 19 nt, Artificial Sequence
  Description of Artificial Sequence: Synthetic oligonucleotide
gaggccuaggcccgcuucu

SEQ ID NO: 482893 - RNA, 19 nt, Artificial Sequence
  Description of Artificial Sequence: Synthetic oligonucleotide
gaacggagaggaggagcuc

SEQ ID NO: 482894 - RNA, 19 nt, Artificial Sequence
  Description of Artificial Sequence: Synthetic oligonucleotide
cacaguucggugguaugaa

SEQ ID NO: 482895 - RNA, 19 nt, Artificial Sequence
  Description of Artificial Sequence: Synthetic oligonucleotide
ggguagagucuacccuacc

SEQ ID NO: 482896 - RNA, 19 nt, Artificial Sequence
  Description of Artificial Sequence: Synthetic oligonucleotide
gccguguugcccacgggag

SEQ ID NO: 482897 - RNA, 19 nt, Artificial Sequence
  Description of Artificial Sequence: Synthetic oligonucleotide
uggcaacuuugagcuguga

SEQ ID NO: 482898 - RNA, 19 nt, Artificial Sequence
  Description of Artificial Sequence: Synthetic oligonucleotide
ggggcgaaaggaggccugg

SEQ ID NO: 482899 - RNA, 19 nt, Artificial Sequence
  Description of Artificial Sequence: Synthetic oligonucleotide
ucgagggauucuggcgcac

SEQ ID NO: 482900 - RNA, 19 nt, Artificial Sequence
  Description of Artificial Sequence: Synthetic oligonucleotide
guauuacugcagcauucuu

SEQ ID NO: 482901 - RNA, 19 nt, Artificial Sequence
  Description of Artificial Sequence: Synthetic oligonucleotide
aucggguuuugagcccaca

SEQ ID NO: 482902 - RNA, 19 nt, Artificial Sequence
  Description of Artificial Sequence: Synthetic oligonucleotide
cagaacuuuuccagaguuu

SEQ ID NO: 482903 - RNA, 19 nt, Artificial Sequence
  Description of Artificial Sequence: Synthetic oligonucleotide
gguggggcgccccuuucuc

SEQ ID NO: 482904 - RNA, 19 nt, Artificial Sequence
  Description of Artificial Sequence: Synthetic oligonucleotide
gcccuguuggggauccccg

SEQ ID NO: 482905 - RNA, 19 nt, Artificial Sequence
  Description of Artificial Sequence: Synthetic oligonucleotide
gaggagguggaacggcguu

SEQ ID NO: 482906 - RNA, 19 nt, Artificial Sequence
  Description of Artificial Sequence: Synthetic oligonucleotide
gcaauagacucaagaauau

SEQ ID NO: 482907 - RNA, 19 nt, Artificial Sequence
  Description of Artificial Sequence: Synthetic oligonucleotide
guuggggauccccgguugu

SEQ ID NO: 482908 - RNA, 19 nt, Artificial Sequence
  Description of Artificial Sequence: Synthetic oligonucleotide
ggaggccuaggcccgcuuc

SEQ ID NO: 482909 - RNA, 19 nt, Artificial Sequence
  Description of Artificial Sequence: Synthetic oligonucleotide
gcggauggaaguagaaucu

SEQ ID NO: 482910 - RNA, 19 nt, Artificial Sequence
  Description of Artificial Sequence: Synthetic oligonucleotide
cauuucuggccaguuugcu

SEQ ID NO: 482911 - RNA, 19 nt, Artificial Sequence
  Description of Artificial Sequence: Synthetic oligonucleotide
cggguuuugagcccacauc

SEQ ID NO: 482912 - RNA, 19 nt, Artificial Sequence
  Description of Artificial Sequence: Synthetic oligonucleotide
ccccgguugugaagauucg

SEQ ID NO: 482913 - RNA, 19 nt, Artificial Sequence
  Description of Artificial Sequence: Synthetic oligonucleotide
cuuugagcugugacccuau

SEQ ID NO: 482914 - RNA, 19 nt, Artificial Sequence
  Description of Artificial Sequence: Synthetic oligonucleotide
ccgcuucugggacugugug

SEQ ID NO: 482915 - RNA, 19 nt, Artificial Sequence
  Description of Artificial Sequence: Synthetic oligonucleotide
auucugcguuuuauuuauu

SEQ ID NO: 482916 - RNA, 19 nt, Artificial Sequence
  Description of Artificial Sequence: Synthetic oligonucleotide
cugugaccuggugagggua

SEQ ID NO: 482917 - RNA, 19 nt, Artificial Sequence
  Description of Artificial Sequence: Synthetic oligonucleotide
gucuugguuguugguacau

SEQ ID NO: 482918 - RNA, 19 nt, Artificial Sequence
  Description of Artificial Sequence: Synthetic oligonucleotide
ccucgguuuccgggaaacg

SEQ ID NO: 482919 - RNA, 19 nt, Artificial Sequence
  Description of Artificial Sequence: Synthetic oligonucleotide
cgcacgaauccccaccuca

SEQ ID NO: 482920 - RNA, 19 nt, Artificial Sequence
  Description of Artificial Sequence: Synthetic oligonucleotide
ggggauccccgguugugaa

SEQ ID NO: 482921 - RNA, 19 nt, Artificial Sequence
  Description of Artificial Sequence: Synthetic oligonucleotide
auccccgguugugaagauu

SEQ ID NO: 482922 - RNA, 19 nt, Artificial Sequence
  Description of Artificial Sequence: Synthetic oligonucleotide
cggcuuucauuucuggcca

SEQ ID NO: 482923 - RNA, 19 nt, Artificial Sequence
  Description of Artificial Sequence: Synthetic oligonucleotide
ggcguucgucugugggaug

SEQ ID NO: 482924 - RNA, 19 nt, Artificial Sequence
  Description of Artificial Sequence: Synthetic oligonucleotide
ccgucauucccuccuacua

SEQ ID NO: 482925 - RNA, 19 nt, Artificial Sequence
  Description of Artificial Sequence: Synthetic oligonucleotide
cagcaacaugugagcaaua

SEQ ID NO: 482926 - RNA, 19 nt, Artificial Sequence
  Description of Artificial Sequence: Synthetic oligonucleotide
gauccccgguugugaagau

SEQ ID NO: 482927 - RNA, 19 nt, Artificial Sequence
  Description of Artificial Sequence: Synthetic oligonucleotide
ggcggugccccagcaccag

SEQ ID NO: 482928 - RNA, 19 nt, Artificial Sequence
  Description of Artificial Sequence: Synthetic oligonucleotide
cgguuggauccacuccggc

SEQ ID NO: 482929 - RNA, 19 nt, Artificial Sequence
  Description of Artificial Sequence: Synthetic oligonucleotide
gggaagguuaucggguuuu

SEQ ID NO: 482930 - RNA, 19 nt, Artificial Sequence
  Description of Artificial Sequence: Synthetic oligonucleotide
cccgguugugaagauucga

SEQ ID NO: 482931 - RNA, 19 nt, Artificial Sequence
  Description of Artificial Sequence: Synthetic oligonucleotide
gcauagugaaggagacacu

SEQ ID NO: 482932 - RNA, 19 nt, Artificial Sequence
  Description of Artificial Sequence: Synthetic oligonucleotide
caccucgguuuccgggaaa

SEQ ID NO: 482933 - RNA, 19 nt, Artificial Sequence
  Description of Artificial Sequence: Synthetic oligonucleotide
ggcaagggauguaggugua

SEQ ID NO: 482934 - RNA, 19 nt, Artificial Sequence
  Description of Artificial Sequence: Synthetic oligonucleotide
cguucgucugugggauggg

SEQ ID NO: 482935 - RNA, 19 nt, Artificial Sequence
  Description of Artificial Sequence: Synthetic oligonucleotide
ccaaagaucugaggauacu

SEQ ID NO: 482936 - RNA, 19 nt, Artificial Sequence
  Description of Artificial Sequence: Synthetic oligonucleotide
ggggaagguuaucggguuu

SEQ ID NO: 482937 - RNA, 19 nt, Artificial Sequence
  Description of Artificial Sequence: Synthetic oligonucleotide
ccugugaccuggugagggu

SEQ ID NO: 482938 - RNA, 19 nt, Artificial Sequence
  Description of Artificial Sequence: Synthetic oligonucleotide
gggauacgucuugguuguu

SEQ ID NO: 482939 - RNA, 19 nt, Artificial Sequence
  Description of Artificial Sequence: Synthetic oligonucleotide
ugcacuaugauuaaaauua

SEQ ID NO: 482940 - RNA, 19 nt, Artificial Sequence
  Description of Artificial Sequence: Synthetic oligonucleotide
aauuauuguggacaagcac

SEQ ID NO: 482941 - RNA, 19 nt, Artificial Sequence
  Description of Artificial Sequence: Synthetic oligonucleotide
ucuacgaccagguucaacg

SEQ ID NO: 482942 - RNA, 19 nt, Artificial Sequence
  Description of Artificial Sequence: Synthetic oligonucleotide
ucauugacuuuuaauaagg

SEQ ID NO: 482943 - RNA, 19 nt, Artificial Sequence
  Description of Artificial Sequence: Synthetic oligonucleotide
agauacuccauuauuaucc

SEQ ID NO: 482944 - RNA, 19 nt, Artificial Sequence
  Description of Artificial Sequence: Synthetic oligonucleotide
aaaacaguaccaucgauga

SEQ ID NO: 482945 - RNA, 19 nt, Artificial Sequence
  Description of Artificial Sequence: Synthetic oligonucleotide
ugcuuaaugaccucgggcg

SEQ ID NO: 482946 - RNA, 19 nt, Artificial Sequence
  Description of Artificial Sequence: Synthetic oligonucleotide
aaaaugacgcuauauacaa

SEQ ID NO: 482947 - RNA, 19 nt, Artificial Sequence
  Description of Artificial Sequence: Synthetic oligonucleotide
aguaccaucgaugagaaag

SEQ ID NO: 482948 - RNA, 19 nt, Artificial Sequence
  Description of Artificial Sequence: Synthetic oligonucleotide
aaugauaugcagauucuac

SEQ ID NO: 482949 - RNA, 19 nt, Artificial Sequence
  Description of Artificial Sequence: Synthetic oligonucleotide
uaugguagcaaucugaauu

SEQ ID NO: 482950 - RNA, 19 nt, Artificial Sequence
  Description of Artificial Sequence: Synthetic oligonucleotide
ucagauaggauccauaaua

SEQ ID NO: 482951 - RNA, 19 nt, Artificial Sequence
  Description of Artificial Sequence: Synthetic oligonucleotide
uuuugagguacaaacagga

SEQ ID NO: 482952 - RNA, 19 nt, Artificial Sequence
  Description of Artificial Sequence: Synthetic oligonucleotide
acagugaucccuuacgcac

SEQ ID NO: 482953 - RNA, 19 nt, Artificial Sequence
  Description of Artificial Sequence: Synthetic oligonucleotide
agaauuucucguaauaugg

SEQ ID NO: 482954 - RNA, 19 nt, Artificial Sequence
  Description of Artificial Sequence: Synthetic oligonucleotide
uaauaugguagcaaucuga

SEQ ID NO: 482955 - RNA, 19 nt, Artificial Sequence
  Description of Artificial Sequence: Synthetic oligonucleotide
aauagauggcuccucggag

SEQ ID NO: 482956 - RNA, 19 nt, Artificial Sequence
  Description of Artificial Sequence: Synthetic oligonucleotide
ucuauugaccccaaguuuc

SEQ ID NO: 482957 - RNA, 19 nt, Artificial Sequence
  Description of Artificial Sequence: Synthetic oligonucleotide
ggagcuaucaacaugaagc

SEQ ID NO: 482958 - RNA, 19 nt, Artificial Sequence
  Description of Artificial Sequence: Synthetic oligonucleotide
cucaguaauuccuuggcgg

SEQ ID NO: 482959 - RNA, 19 nt, Artificial Sequence
  Description of Artificial Sequence: Synthetic oligonucleotide
gaaagguguggacaggacg

SEQ ID NO: 482960 - RNA, 19 nt, Artificial Sequence
  Description of Artificial Sequence: Synthetic oligonucleotide
aacaguaccaucgaugaga

SEQ ID NO: 482961 - RNA, 19 nt, Artificial Sequence
  Description of Artificial Sequence: Synthetic oligonucleotide
gguucuaacagauccaggg

SEQ ID NO: 482962 - RNA, 19 nt, Artificial Sequence
  Description of Artificial Sequence: Synthetic oligonucleotide
auagauggcuccucggagc

SEQ ID NO: 482963 - RNA, 19 nt, Artificial Sequence
  Description of Artificial Sequence: Synthetic oligonucleotide
ugaugggaaaaugauaugc

SEQ ID NO: 482964 - RNA, 19 nt, Artificial Sequence
  Description of Artificial Sequence: Synthetic oligonucleotide
gguguaagcauucagacac

SEQ ID NO: 482965 - RNA, 19 nt, Artificial Sequence
  Description of Artificial Sequence: Synthetic oligonucleotide
uuauucaugacagacccug

SEQ ID NO: 482966 - RNA, 19 nt, Artificial Sequence
  Description of Artificial Sequence: Synthetic oligonucleotide
cauucagacacuuucauga

SEQ ID NO: 482967 - RNA, 19 nt, Artificial Sequence
  Description of Artificial Sequence: Synthetic oligonucleotide
aaaagcuacuucugggucu

SEQ ID NO: 482968 - RNA, 19 nt, Artificial Sequence
  Description of Artificial Sequence: Synthetic oligonucleotide
ugauaugcagauucuacga

SEQ ID NO: 482969 - RNA, 19 nt, Artificial Sequence
  Description of Artificial Sequence: Synthetic oligonucleotide
accagagcgacucagucuc

SEQ ID NO: 482970 - RNA, 19 nt, Artificial Sequence
  Description of Artificial Sequence: Synthetic oligonucleotide
auuauuguggacaagcacu

SEQ ID NO: 482971 - RNA, 19 nt, Artificial Sequence
  Description of Artificial Sequence: Synthetic oligonucleotide
cuuuuaauaaggaggaaga

SEQ ID NO: 482972 - RNA, 19 nt, Artificial Sequence
  Description of Artificial Sequence: Synthetic oligonucleotide
agcucggucagguaggacg

SEQ ID NO: 482973 - RNA, 19 nt, Artificial Sequence
  Description of Artificial Sequence: Synthetic oligonucleotide
uuauuauccacaacuuagu

SEQ ID NO: 482974 - RNA, 19 nt, Artificial Sequence
  Description of Artificial Sequence: Synthetic oligonucleotide
aaaacuuccaagaguacca

SEQ ID NO: 482975 - RNA, 19 nt, Artificial Sequence
  Description of Artificial Sequence: Synthetic oligonucleotide
cuacagaagcacuuggccg

SEQ ID NO: 482976 - RNA, 19 nt, Artificial Sequence
  Description of Artificial Sequence: Synthetic oligonucleotide
aauugcuugaaggaguaga

SEQ ID NO: 482977 - RNA, 19 nt, Artificial Sequence
  Description of Artificial Sequence: Synthetic oligonucleotide
aaucugauggcugaagagu

SEQ ID NO: 482978 - RNA, 19 nt, Artificial Sequence
  Description of Artificial Sequence: Synthetic oligonucleotide
gacgcuauauacaagucug

SEQ ID NO: 482979 - RNA, 19 nt, Artificial Sequence
  Description of Artificial Sequence: Synthetic oligonucleotide
guuacauauggacugucgc

SEQ ID NO: 482980 - RNA, 19 nt, Artificial Sequence
  Description of Artificial Sequence: Synthetic oligonucleotide
uauugguguaagcauucag

SEQ ID NO: 482981 - RNA, 19 nt, Artificial Sequence
  Description of Artificial Sequence: Synthetic oligonucleotide
uguaguuuccuuccagugu

SEQ ID NO: 482982 - RNA, 19 nt, Artificial Sequence
  Description of Artificial Sequence: Synthetic oligonucleotide
uuacauauggacugucgca

SEQ ID NO: 482983 - RNA, 19 nt, Artificial Sequence
  Description of Artificial Sequence: Synthetic oligonucleotide
uugguguaagcauucagac

SEQ ID NO: 482984 - RNA, 19 nt, Artificial Sequence
  Description of Artificial Sequence: Synthetic oligonucleotide
uaggauccauaauauuugg

SEQ ID NO: 482985 - RNA, 19 nt, Artificial Sequence
  Description of Artificial Sequence: Synthetic oligonucleotide
uuucucguaauaugguagc

SEQ ID NO: 482986 - RNA, 19 nt, Artificial Sequence
  Description of Artificial Sequence: Synthetic oligonucleotide
gauaugucccaacugaaaa

SEQ ID NO: 482987 - RNA, 19 nt, Artificial Sequence
  Description of Artificial Sequence: Synthetic oligonucleotide
aaggaguagacccucccca

SEQ ID NO: 482988 - RNA, 19 nt, Artificial Sequence
  Description of Artificial Sequence: Synthetic oligonucleotide
guaguuuccuuccagugug

SEQ ID NO: 482989 - RNA, 19 nt, Artificial Sequence
  Description of Artificial Sequence: Synthetic oligonucleotide
uggccugucaaauauuuac

SEQ ID NO: 482990 - RNA, 19 nt, Artificial Sequence
  Description of Artificial Sequence: Synthetic oligonucleotide
uuggcggugggucuaaagc

SEQ ID NO: 482991 - RNA, 19 nt, Artificial Sequence
  Description of Artificial Sequence: Synthetic oligonucleotide
acacuucaccaaaagagcc

SEQ ID NO: 482992 - RNA, 19 nt, Artificial Sequence
  Description of Artificial Sequence: Synthetic oligonucleotide
ugacgcuauauacaagucu

SEQ ID NO: 482993 - RNA, 19 nt, Artificial Sequence
  Description of Artificial Sequence: Synthetic oligonucleotide
ucacaacccaaauauacau

SEQ ID NO: 482994 - RNA, 19 nt, Artificial Sequence
  Description of Artificial Sequence: Synthetic oligonucleotide
uugggaugaggaauaacac

SEQ ID NO: 482995 - RNA, 19 nt, Artificial Sequence
  Description of Artificial Sequence: Synthetic oligonucleotide
ugcagauucuacgaccagg

SEQ ID NO: 482996 - RNA, 19 nt, Artificial Sequence
  Description of Artificial Sequence: Synthetic oligonucleotide
acuuccaagaguaccaaag

SEQ ID NO: 482997 - RNA, 19 nt, Artificial Sequence
  Description of Artificial Sequence: Synthetic oligonucleotide
cggauuaugaacuugugcc

SEQ ID NO: 482998 - RNA, 19 nt, Artificial Sequence
  Description of Artificial Sequence: Synthetic oligonucleotide
agaguguagauaaucaagu

SEQ ID NO: 482999 - RNA, 19 nt, Artificial Sequence
  Description of Artificial Sequence: Synthetic oligonucleotide
uugaccccaaguuuccucc

SEQ ID NO: 483000 - RNA, 19 nt, Artificial Sequence
  Description of Artificial Sequence: Synthetic oligonucleotide
ugucccaacugaaaacaca

SEQ ID NO: 483001 - RNA, 19 nt, Artificial Sequence
  Description of Artificial Sequence: Synthetic oligonucleotide
gaugagggugcuucauccg

SEQ ID NO: 483002 - RNA, 19 nt, Artificial Sequence
  Description of Artificial Sequence: Synthetic oligonucleotide
augagggugcuucauccgg

SEQ ID NO: 483003 - RNA, 19 nt, Artificial Sequence
  Description of Artificial Sequence: Synthetic oligonucleotide
uugcggauuaugaacuugu

SEQ ID NO: 483004 - RNA, 19 nt, Artificial Sequence
  Description of Artificial Sequence: Synthetic oligonucleotide
uacauauggacugucgcac

SEQ ID NO: 483005 - RNA, 19 nt, Artificial Sequence
  Description of Artificial Sequence: Synthetic oligonucleotide
ucauccgggaggaacucag

SEQ ID NO: 483006 - RNA, 19 nt, Artificial Sequence
  Description of Artificial Sequence: Synthetic oligonucleotide
caaauagauggcuccucgg

SEQ ID NO: 483007 - RNA, 19 nt, Artificial Sequence
  Description of Artificial Sequence: Synthetic oligonucleotide
caucugaaagacuccacug

SEQ ID NO: 483008 - RNA, 19 nt, Artificial Sequence
  Description of Artificial Sequence: Synthetic oligonucleotide
uucuauugaccccaaguuu

SEQ ID NO: 483009 - RNA, 19 nt, Artificial Sequence
  Description of Artificial Sequence: Synthetic oligonucleotide
uuuucuuugcauugcggau

SEQ ID NO: 483010 - RNA, 19 nt, Artificial Sequence
  Description of Artificial Sequence: Synthetic oligonucleotide
uguuuccacauccgagucc

SEQ ID NO: 483011 - RNA, 19 nt, Artificial Sequence
  Description of Artificial Sequence: Synthetic oligonucleotide
aucuacagaagcacuuggc

SEQ ID NO: 483012 - RNA, 19 nt, Artificial Sequence
  Description of Artificial Sequence: Synthetic oligonucleotide
ggaucuuucucccggauug

SEQ ID NO: 483013 - RNA, 19 nt, Artificial Sequence
  Description of Artificial Sequence: Synthetic oligonucleotide
acugcuuaaugaccucggg

SEQ ID NO: 483014 - RNA, 19 nt, Artificial Sequence
  Description of Artificial Sequence: Synthetic oligonucleotide
auugguguaagcauucaga

SEQ ID NO: 483015 - RNA, 19 nt, Artificial Sequence
  Description of Artificial Sequence: Synthetic oligonucleotide
guaucggucagcuggccag

SEQ ID NO: 483016 - RNA, 19 nt, Artificial Sequence
  Description of Artificial Sequence: Synthetic oligonucleotide
cacuucaccaaaagagccc

SEQ ID NO: 483017 - RNA, 19 nt, Artificial Sequence
  Description of Artificial Sequence: Synthetic oligonucleotide
ggagaaauuauuguggaca

SEQ ID NO: 483018 - RNA, 19 nt, Artificial Sequence
  Description of Artificial Sequence: Synthetic oligonucleotide
uuacgcacgccaaaauuuc

SEQ ID NO: 483019 - RNA, 19 nt, Artificial Sequence
  Description of Artificial Sequence: Synthetic oligonucleotide
gauaggauccauaauauuu

SEQ ID NO: 483020 - RNA, 19 nt, Artificial Sequence
  Description of Artificial Sequence: Synthetic oligonucleotide
ugaucccuuacgcacgcca

SEQ ID NO: 483021 - RNA, 19 nt, Artificial Sequence
  Description of Artificial Sequence: Synthetic oligonucleotide
auuaugaacuugugccuca

SEQ ID NO: 483022 - RNA, 19 nt, Artificial Sequence
  Description of Artificial Sequence: Synthetic oligonucleotide
acucaacaaagacuagaug

SEQ ID NO: 483023 - RNA, 19 nt, Artificial Sequence
  Description of Artificial Sequence: Synthetic oligonucleotide
gagauacuccauuauuauc

SEQ ID NO: 483024 - RNA, 19 nt, Artificial Sequence
  Description of Artificial Sequence: Synthetic oligonucleotide
cagagauagauuaucuaca

SEQ ID NO: 483025 - RNA, 19 nt, Artificial Sequence
  Description of Artificial Sequence: Synthetic oligonucleotide
uuuuaauaaggaggaagau

SEQ ID NO: 483026 - RNA, 19 nt, Artificial Sequence
  Description of Artificial Sequence: Synthetic oligonucleotide
aaagacuccacuggcugca

SEQ ID NO: 483027 - RNA, 19 nt, Artificial Sequence
  Description of Artificial Sequence: Synthetic oligonucleotide
cugcuuaaugaccucgggc

SEQ ID NO: 483028 - RNA, 19 nt, Artificial Sequence
  Description of Artificial Sequence: Synthetic oligonucleotide
aggaguagacccuccccac

SEQ ID NO: 483029 - RNA, 19 nt, Artificial Sequence
  Description of Artificial Sequence: Synthetic oligonucleotide
auguaaagcucugugaaaa

SEQ ID NO: 483030 - RNA, 19 nt, Artificial Sequence
  Description of Artificial Sequence: Synthetic oligonucleotide
ucuggccugucaaauauuu

SEQ ID NO: 483031 - RNA, 19 nt, Artificial Sequence
  Description of Artificial Sequence: Synthetic oligonucleotide
ugguguaagcauucagaca

SEQ ID NO: 483032 - RNA, 19 nt, Artificial Sequence
  Description of Artificial Sequence: Synthetic oligonucleotide
ucguaauaugguagcaauc

SEQ ID NO: 483033 - RNA, 19 nt, Artificial Sequence
  Description of Artificial Sequence: Synthetic oligonucleotide
ggaguucaaaauuuacaug

SEQ ID NO: 483034 - RNA, 19 nt, Artificial Sequence
  Description of Artificial Sequence: Synthetic oligonucleotide
auaggcugacugcuuaaug

SEQ ID NO: 483035 - RNA, 19 nt, Artificial Sequence
  Description of Artificial Sequence: Synthetic oligonucleotide
cuucagauaggauccauaa

SEQ ID NO: 483036 - RNA, 19 nt, Artificial Sequence
  Description of Artificial Sequence: Synthetic oligonucleotide
caauagacucaaguucugg

SEQ ID NO: 483037 - RNA, 19 nt, Artificial Sequence
  Description of Artificial Sequence: Synthetic oligonucleotide
caaacccgaugccaaaggc

SEQ ID NO: 483038 - RNA, 19 nt, Artificial Sequence
  Description of Artificial Sequence: Synthetic oligonucleotide
acccuguaaauacaaaaua

SEQ ID NO: 483039 - RNA, 19 nt, Artificial Sequence
  Description of Artificial Sequence: Synthetic oligonucleotide
uucuaucgcugugaugccg

SEQ ID NO: 483040 - RNA, 19 nt, Artificial Sequence
  Description of Artificial Sequence: Synthetic oligonucleotide
uucagauaggauccauaau

SEQ ID NO: 483041 - RNA, 19 nt, Artificial Sequence
  Description of Artificial Sequence: Synthetic oligonucleotide
uucaacggaaaggugugga

SEQ ID NO: 483042 - RNA, 19 nt, Artificial Sequence
  Description of Artificial Sequence: Synthetic oligonucleotide
ucuaaagcugggcuccuua

SEQ ID NO: 483043 - RNA, 19 nt, Artificial Sequence
  Description of Artificial Sequence: Synthetic oligonucleotide
aaacccgaugccaaaggca

SEQ ID NO: 483044 - RNA, 19 nt, Artificial Sequence
  Description of Artificial Sequence: Synthetic oligonucleotide
ucaacggaaagguguggac

SEQ ID NO: 483045 - RNA, 19 nt, Artificial Sequence
  Description of Artificial Sequence: Synthetic oligonucleotide
uacgcacgccaaaauuucc

SEQ ID NO: 483046 - RNA, 19 nt, Artificial Sequence
  Description of Artificial Sequence: Synthetic oligonucleotide
uagauggcuccucggagcu

SEQ ID NO: 483047 - RNA, 19 nt, Artificial Sequence
  Description of Artificial Sequence: Synthetic oligonucleotide
aaaugacgcuauauacaag

SEQ ID NO: 483048 - RNA, 19 nt, Artificial Sequence
  Description of Artificial Sequence: Synthetic oligonucleotide
augaugggaaaaugauaug

SEQ ID NO: 483049 - RNA, 19 nt, Artificial Sequence
  Description of Artificial Sequence: Synthetic oligonucleotide
aaugaccucgggcgccauc

SEQ ID NO: 483050 - RNA, 19 nt, Artificial Sequence
  Description of Artificial Sequence: Synthetic oligonucleotide
gacugcuuaaugaccucgg

SEQ ID NO: 483051 - RNA, 19 nt, Artificial Sequence
  Description of Artificial Sequence: Synthetic oligonucleotide
cuacgaccagguucaacgg

SEQ ID NO: 483052 - RNA, 19 nt, Artificial Sequence
  Description of Artificial Sequence: Synthetic oligonucleotide
auaacaccuucauggggug

SEQ ID NO: 483053 - RNA, 19 nt, Artificial Sequence
  Description of Artificial Sequence: Synthetic oligonucleotide
cagaguaauguaaagcucu

SEQ ID NO: 483054 - RNA, 19 nt, Artificial Sequence
  Description of Artificial Sequence: Synthetic oligonucleotide
uucaucuaaagggccaggu

SEQ ID NO: 483055 - RNA, 19 nt, Artificial Sequence
  Description of Artificial Sequence: Synthetic oligonucleotide
gagauagauuaucuacaga

SEQ ID NO: 483056 - RNA, 19 nt, Artificial Sequence
  Description of Artificial Sequence: Synthetic oligonucleotide
uauccacaacuuagugucc

SEQ ID NO: 483057 - RNA, 19 nt, Artificial Sequence
  Description of Artificial Sequence: Synthetic oligonucleotide
agcgacucagucucccggg

SEQ ID NO: 483058 - RNA, 19 nt, Artificial Sequence
  Description of Artificial Sequence: Synthetic oligonucleotide
ugcggauuaugaacuugug

SEQ ID NO: 483059 - RNA, 19 nt, Artificial Sequence
  Description of Artificial Sequence: Synthetic oligonucleotide
uggcggugggucuaaagcu

SEQ ID NO: 483060 - RNA, 19 nt, Artificial Sequence
  Description of Artificial Sequence: Synthetic oligonucleotide
uauucaugacagacccugu

SEQ ID NO: 483061 - RNA, 19 nt, Artificial Sequence
  Description of Artificial Sequence: Synthetic oligonucleotide
uacgaccagguucaacgga

SEQ ID NO: 483062 - RNA, 19 nt, Artificial Sequence
  Description of Artificial Sequence: Synthetic oligonucleotide
gaguccgauugucaaugcc

SEQ ID NO: 483063 - RNA, 19 nt, Artificial Sequence
  Description of Artificial Sequence: Synthetic oligonucleotide
aguccgauugucaaugccu

SEQ ID NO: 483064 - RNA, 19 nt, Artificial Sequence
  Description of Artificial Sequence: Synthetic oligonucleotide
aagauaugucccaacugaa

SEQ ID NO: 483065 - RNA, 19 nt, Artificial Sequence
  Description of Artificial Sequence: Synthetic oligonucleotide
uaccugucgaugagcucgg

SEQ ID NO: 483066 - RNA, 19 nt, Artificial Sequence
  Description of Artificial Sequence: Synthetic oligonucleotide
acggaguucaaaauuuaca

SEQ ID NO: 483067 - RNA, 19 nt, Artificial Sequence
  Description of Artificial Sequence: Synthetic oligonucleotide
uugcuugaaggaguagacc

SEQ ID NO: 483068 - RNA, 19 nt, Artificial Sequence
  Description of Artificial Sequence: Synthetic oligonucleotide
gguaggacguuuucuuugc

SEQ ID NO: 483069 - RNA, 19 nt, Artificial Sequence
  Description of Artificial Sequence: Synthetic oligonucleotide
acgccuggccaucuguuuc

SEQ ID NO: 483070 - RNA, 19 nt, Artificial Sequence
  Description of Artificial Sequence: Synthetic oligonucleotide
ccaaauagauggcuccucg

SEQ ID NO: 483071 - RNA, 19 nt, Artificial Sequence
  Description of Artificial Sequence: Synthetic oligonucleotide
uggguaucggucagcuggc

SEQ ID NO: 483072 - RNA, 19 nt, Artificial Sequence
  Description of Artificial Sequence: Synthetic oligonucleotide
gguuacauauggacugucg

SEQ ID NO: 483073 - RNA, 19 nt, Artificial Sequence
  Description of Artificial Sequence: Synthetic oligonucleotide
aggaacucagaguaaugua

SEQ ID NO: 483074 - RNA, 19 nt, Artificial Sequence
  Description of Artificial Sequence: Synthetic oligonucleotide
agguugcaugucuucaacu

SEQ ID NO: 483075 - RNA, 19 nt, Artificial Sequence
  Description of Artificial Sequence: Synthetic oligonucleotide
agauaggauccauaauauu

SEQ ID NO: 483076 - RNA, 19 nt, Artificial Sequence
  Description of Artificial Sequence: Synthetic oligonucleotide
aguuuccuuccaguguggg

SEQ ID NO: 483077 - RNA, 19 nt, Artificial Sequence
  Description of Artificial Sequence: Synthetic oligonucleotide
auucagacacuuucaugau

SEQ ID NO: 483078 - RNA, 19 nt, Artificial Sequence
  Description of Artificial Sequence: Synthetic oligonucleotide
gacgguacagcuggugcag

SEQ ID NO: 483079 - RNA, 19 nt, Artificial Sequence
  Description of Artificial Sequence: Synthetic oligonucleotide
accgagauacuccauuauu

SEQ ID NO: 483080 - RNA, 19 nt, Artificial Sequence
  Description of Artificial Sequence: Synthetic oligonucleotide
uucucguaauaugguagca

SEQ ID NO: 483081 - RNA, 19 nt, Artificial Sequence
  Description of Artificial Sequence: Synthetic oligonucleotide
ugaguccgauugucaaugc

SEQ ID NO: 483082 - RNA, 19 nt, Artificial Sequence
  Description of Artificial Sequence: Synthetic oligonucleotide
ucggagcucuucuauugac

SEQ ID NO: 483083 - RNA, 19 nt, Artificial Sequence
  Description of Artificial Sequence: Synthetic oligonucleotide
agaguaauguaaagcucug

SEQ ID NO: 483084 - RNA, 19 nt, Artificial Sequence
  Description of Artificial Sequence: Synthetic oligonucleotide
uauuuacuccacagagaua

SEQ ID NO: 483085 - RNA, 19 nt, Artificial Sequence
  Description of Artificial Sequence: Synthetic oligonucleotide
gcggauuaugaacuugugc

SEQ ID NO: 483086 - RNA, 19 nt, Artificial Sequence
  Description of Artificial Sequence: Synthetic oligonucleotide
uugggagggugcuaauuau

SEQ ID NO: 483087 - RNA, 19 nt, Artificial Sequence
  Description of Artificial Sequence: Synthetic oligonucleotide
cacgccaaaauuuccguaa

SEQ ID NO: 483088 - RNA, 19 nt, Artificial Sequence
  Description of Artificial Sequence: Synthetic oligonucleotide
guacaugauccaccagagc

SEQ ID NO: 483089 - RNA, 19 nt, Artificial Sequence
  Description of Artificial Sequence: Synthetic oligonucleotide
agucgucacggcucugcuc

SEQ ID NO: 483090 - RNA, 19 nt, Artificial Sequence
  Description of Artificial Sequence: Synthetic oligonucleotide
acgcacgccaaaauuuccg

SEQ ID NO: 483091 - RNA, 19 nt, Artificial Sequence
  Description of Artificial Sequence: Synthetic oligonucleotide
auaugguagcaaucugaau

SEQ ID NO: 483092 - RNA, 19 nt, Artificial Sequence
  Description of Artificial Sequence: Synthetic oligonucleotide
gauuaucuacagaagcacu

SEQ ID NO: 483093 - RNA, 19 nt, Artificial Sequence
  Description of Artificial Sequence: Synthetic oligonucleotide
aaggcgcucauugacuuuu

SEQ ID NO: 483094 - RNA, 19 nt, Artificial Sequence
  Description of Artificial Sequence: Synthetic oligonucleotide
uugguuacauauggacugu

SEQ ID NO: 483095 - RNA, 19 nt, Artificial Sequence
  Description of Artificial Sequence: Synthetic oligonucleotide
uuaaugaccucgggcgcca

SEQ ID NO: 483096 - RNA, 19 nt, Artificial Sequence
  Description of Artificial Sequence: Synthetic oligonucleotide
cuuggcggugggucuaaag

SEQ ID NO: 483097 - RNA, 19 nt, Artificial Sequence
  Description of Artificial Sequence: Synthetic oligonucleotide
gaauuucucguaauauggu

SEQ ID NO: 483098 - RNA, 19 nt, Artificial Sequence
  Description of Artificial Sequence: Synthetic oligonucleotide
gguacaaacaggaguguuc

SEQ ID NO: 483099 - RNA, 19 nt, Artificial Sequence
  Description of Artificial Sequence: Synthetic oligonucleotide
agcacgaugaggaccgugu

SEQ ID NO: 483100 - RNA, 19 nt, Artificial Sequence
  Description of Artificial Sequence: Synthetic oligonucleotide
cacuaugauuaaaauuaaa

SEQ ID NO: 483101 - RNA, 19 nt, Artificial Sequence
  Description of Artificial Sequence: Synthetic oligonucleotide
agggagaauuugcauguuu

SEQ ID NO: 483102 - RNA, 19 nt, Artificial Sequence
  Description of Artificial Sequence: Synthetic oligonucleotide
gcauucagacacuuucaug

SEQ ID NO: 483103 - RNA, 19 nt, Artificial Sequence
  Description of Artificial Sequence: Synthetic oligonucleotide
guucaacggaaaggugugg

SEQ ID NO: 483104 - RNA, 19 nt, Artificial Sequence
  Description of Artificial Sequence: Synthetic oligonucleotide
ugccaaauagauggcuccu

SEQ ID NO: 483105 - RNA, 19 nt, Artificial Sequence
  Description of Artificial Sequence: Synthetic oligonucleotide
ugggagggugcuaauuauu

SEQ ID NO: 483106 - RNA, 19 nt, Artificial Sequence
  Description of Artificial Sequence: Synthetic oligonucleotide
cuuacgcacgccaaaauuu

SEQ ID NO: 483107 - RNA, 19 nt, Artificial Sequence
  Description of Artificial Sequence: Synthetic oligonucleotide
gguucaacggaaaggugug

SEQ ID NO: 483108 - RNA, 19 nt, Artificial Sequence
  Description of Artificial Sequence: Synthetic oligonucleotide
auauacauuucaggguuuu

SEQ ID NO: 483109 - RNA, 19 nt, Artificial Sequence
  Description of Artificial Sequence: Synthetic oligonucleotide
guucuaucgcugugaugcc

SEQ ID NO: 483110 - RNA, 19 nt, Artificial Sequence
  Description of Artificial Sequence: Synthetic oligonucleotide
gagggugcuaauuauuauu

SEQ ID NO: 483111 - RNA, 19 nt, Artificial Sequence
  Description of Artificial Sequence: Synthetic oligonucleotide
augcagauucuacgaccag

SEQ ID NO: 483112 - RNA, 19 nt, Artificial Sequence
  Description of Artificial Sequence: Synthetic oligonucleotide
ucgcacugacucagcacug

SEQ ID NO: 483113 - RNA, 19 nt, Artificial Sequence
  Description of Artificial Sequence: Synthetic oligonucleotide
cuccgugacaccucuucuc

SEQ ID NO: 483114 - RNA, 19 nt, Artificial Sequence
  Description of Artificial Sequence: Synthetic oligonucleotide
agauaugucccaacugaaa

SEQ ID NO: 483115 - RNA, 19 nt, Artificial Sequence
  Description of Artificial Sequence: Synthetic oligonucleotide
agaacguuggcagcuuuaa

SEQ ID NO: 483116 - RNA, 19 nt, Artificial Sequence
  Description of Artificial Sequence: Synthetic oligonucleotide
cucagagaguaucucugca

SEQ ID NO: 483117 - RNA, 19 nt, Artificial Sequence
  Description of Artificial Sequence: Synthetic oligonucleotide
cccuguaaauacaaaauaa

SEQ ID NO: 483118 - RNA, 19 nt, Artificial Sequence
  Description of Artificial Sequence: Synthetic oligonucleotide
accucuuguaccugucgau

SEQ ID NO: 483119 - RNA, 19 nt, Artificial Sequence
  Description of Artificial Sequence: Synthetic oligonucleotide
guaccaucgaugagaaaga

SEQ ID NO: 483120 - RNA, 19 nt, Artificial Sequence
  Description of Artificial Sequence: Synthetic oligonucleotide
ucccaacugaaaacacaau

SEQ ID NO: 483121 - RNA, 19 nt, Artificial Sequence
  Description of Artificial Sequence: Synthetic oligonucleotide
agguucuaacagauccagg

SEQ ID NO: 483122 - RNA, 19 nt, Artificial Sequence
  Description of Artificial Sequence: Synthetic oligonucleotide
uguaccugucgaugagcuc

SEQ ID NO: 483123 - RNA, 19 nt, Artificial Sequence
  Description of Artificial Sequence: Synthetic oligonucleotide
guuuccuuccaguguggga

SEQ ID NO: 483124 - RNA, 19 nt, Artificial Sequence
  Description of Artificial Sequence: Synthetic oligonucleotide
cucguaauaugguagcaau

SEQ ID NO: 483125 - RNA, 19 nt, Artificial Sequence
  Description of Artificial Sequence: Synthetic oligonucleotide
cagauaggauccauaauau

SEQ ID NO: 483126 - RNA, 19 nt, Artificial Sequence
  Description of Artificial Sequence: Synthetic oligonucleotide
acgccaaaauuuccguaaa

SEQ ID NO: 483127 - RNA, 19 nt, Artificial Sequence
  Description of Artificial Sequence: Synthetic oligonucleotide
acaguaccaucgaugagaa

SEQ ID NO: 483128 - RNA, 19 nt, Artificial Sequence
  Description of Artificial Sequence: Synthetic oligonucleotide
ggccgauguguacacagug

SEQ ID NO: 483129 - RNA, 19 nt, Artificial Sequence
  Description of Artificial Sequence: Synthetic oligonucleotide
acuuaguguccuucagaua

SEQ ID NO: 483130 - RNA, 19 nt, Artificial Sequence
  Description of Artificial Sequence: Synthetic oligonucleotide
cacgaagguguuccuuuug

SEQ ID NO: 483131 - RNA, 19 nt, Artificial Sequence
  Description of Artificial Sequence: Synthetic oligonucleotide
gggucuaaagcugggcucc

SEQ ID NO: 483132 - RNA, 19 nt, Artificial Sequence
  Description of Artificial Sequence: Synthetic oligonucleotide
acugucgcacugacucagc

SEQ ID NO: 483133 - RNA, 19 nt, Artificial Sequence
  Description of Artificial Sequence: Synthetic oligonucleotide
aucuuucucccggauugug

SEQ ID NO: 483134 - RNA, 19 nt, Artificial Sequence
  Description of Artificial Sequence: Synthetic oligonucleotide
uaccaucgaugagaaagaa

SEQ ID NO: 483135 - RNA, 19 nt, Artificial Sequence
  Description of Artificial Sequence: Synthetic oligonucleotide
cuaucgcugugaugccgag

SEQ ID NO: 483136 - RNA, 19 nt, Artificial Sequence
  Description of Artificial Sequence: Synthetic oligonucleotide
gugcacuaugauuaaaauu

SEQ ID NO: 483137 - RNA, 19 nt, Artificial Sequence
  Description of Artificial Sequence: Synthetic oligonucleotide
ugggaucuuucucccggau

SEQ ID NO: 483138 - RNA, 19 nt, Artificial Sequence
  Description of Artificial Sequence: Synthetic oligonucleotide
ucccuuacgcacgccaaaa

SEQ ID NO: 483139 - RNA, 19 nt, Artificial Sequence
  Description of Artificial Sequence: Synthetic oligonucleotide
aggcacaacucaacaaaga

SEQ ID NO: 483140 - RNA, 19 nt, Artificial Sequence
  Description of Artificial Sequence: Synthetic oligonucleotide
caguaauuccuuggcggug

SEQ ID NO: 483141 - RNA, 19 nt, Artificial Sequence
  Description of Artificial Sequence: Synthetic oligonucleotide
gacucagcacugugauuuc

SEQ ID NO: 483142 - RNA, 19 nt, Artificial Sequence
  Description of Artificial Sequence: Synthetic oligonucleotide
cguuuucuuugcauugcgg

SEQ ID NO: 483143 - RNA, 19 nt, Artificial Sequence
  Description of Artificial Sequence: Synthetic oligonucleotide
uucuacgaccagguucaac

SEQ ID NO: 483144 - RNA, 19 nt, Artificial Sequence
  Description of Artificial Sequence: Synthetic oligonucleotide
acgaccagguucaacggaa

SEQ ID NO: 483145 - RNA, 19 nt, Artificial Sequence
  Description of Artificial Sequence: Synthetic oligonucleotide
caccucuuguaccugucga

SEQ ID NO: 483146 - RNA, 19 nt, Artificial Sequence
  Description of Artificial Sequence: Synthetic oligonucleotide
aucccuuacgcacgccaaa

SEQ ID NO: 483147 - RNA, 19 nt, Artificial Sequence
  Description of Artificial Sequence: Synthetic oligonucleotide
gggugcuaauuauuauuca

SEQ ID NO: 483148 - RNA, 19 nt, Artificial Sequence
  Description of Artificial Sequence: Synthetic oligonucleotide
ucgucacggcucugcuccg

SEQ ID NO: 483149 - RNA, 19 nt, Artificial Sequence
  Description of Artificial Sequence: Synthetic oligonucleotide
gguguggacaggacgguac

SEQ ID NO: 483150 - RNA, 19 nt, Artificial Sequence
  Description of Artificial Sequence: Synthetic oligonucleotide
accaucgaugagaaagaaa

SEQ ID NO: 483151 - RNA, 19 nt, Artificial Sequence
  Description of Artificial Sequence: Synthetic oligonucleotide
guaggacguuuucuuugca

SEQ ID NO: 483152 - RNA, 19 nt, Artificial Sequence
  Description of Artificial Sequence: Synthetic oligonucleotide
uccuucagauaggauccau

SEQ ID NO: 483153 - RNA, 19 nt, Artificial Sequence
  Description of Artificial Sequence: Synthetic oligonucleotide
ccgauugucaaugccuuug

SEQ ID NO: 483154 - RNA, 19 nt, Artificial Sequence
  Description of Artificial Sequence: Synthetic oligonucleotide
cucggagcucuucuauuga

SEQ ID NO: 483155 - RNA, 19 nt, Artificial Sequence
  Description of Artificial Sequence: Synthetic oligonucleotide
gagcuggagucgucacggc

SEQ ID NO: 483156 - RNA, 19 nt, Artificial Sequence
  Description of Artificial Sequence: Synthetic oligonucleotide
cacuuggccgauguguaca

SEQ ID NO: 483157 - RNA, 19 nt, Artificial Sequence
  Description of Artificial Sequence: Synthetic oligonucleotide
gaucccuuacgcacgccaa

SEQ ID NO: 483158 - RNA, 19 nt, Artificial Sequence
  Description of Artificial Sequence: Synthetic oligonucleotide
ucuaaagggccagguucua

SEQ ID NO: 483159 - RNA, 19 nt, Artificial Sequence
  Description of Artificial Sequence: Synthetic oligonucleotide
ggagucgucacggcucugc

SEQ ID NO: 483160 - RNA, 19 nt, Artificial Sequence
  Description of Artificial Sequence: Synthetic oligonucleotide
gguaucggucagcuggcca

SEQ ID NO: 483161 - RNA, 19 nt, Artificial Sequence
  Description of Artificial Sequence: Synthetic oligonucleotide
ccgagauacuccauuauua

SEQ ID NO: 483162 - RNA, 19 nt, Artificial Sequence
  Description of Artificial Sequence: Synthetic oligonucleotide
ugaccucgggcgccaucca

SEQ ID NO: 483163 - RNA, 19 nt, Artificial Sequence
  Description of Artificial Sequence: Synthetic oligonucleotide
cugucgcacugacucagca

SEQ ID NO: 483164 - RNA, 19 nt, Artificial Sequence
  Description of Artificial Sequence: Synthetic oligonucleotide
cuucauccgggaggaacuc

SEQ ID NO: 483165 - RNA, 19 nt, Artificial Sequence
  Description of Artificial Sequence: Synthetic oligonucleotide
uaucaacaugaagcaggua

SEQ ID NO: 483166 - RNA, 19 nt, Artificial Sequence
  Description of Artificial Sequence: Synthetic oligonucleotide
ggcggugggucuaaagcug

SEQ ID NO: 483167 - RNA, 19 nt, Artificial Sequence
  Description of Artificial Sequence: Synthetic oligonucleotide
ucggucagguaggacguuu

SEQ ID NO: 483168 - RNA, 19 nt, Artificial Sequence
  Description of Artificial Sequence: Synthetic oligonucleotide
ccgcugcacaagcugagcc

SEQ ID NO: 483169 - RNA, 19 nt, Artificial Sequence
  Description of Artificial Sequence: Synthetic oligonucleotide
gcgacucagucucccgggg

SEQ ID NO: 483170 - RNA, 19 nt, Artificial Sequence
  Description of Artificial Sequence: Synthetic oligonucleotide
gcggugggucuaaagcugg

SEQ ID NO: 483171 - RNA, 19 nt, Artificial Sequence
  Description of Artificial Sequence: Synthetic oligonucleotide
ccgggaggaacucagagua

SEQ ID NO: 483172 - RNA, 19 nt, Artificial Sequence
  Description of Artificial Sequence: Synthetic oligonucleotide
ccugagguugcaugucuuc

SEQ ID NO: 483173 - RNA, 19 nt, Artificial Sequence
  Description of Artificial Sequence: Synthetic oligonucleotide
gcauugcggauuaugaacu

SEQ ID NO: 483174 - RNA, 19 nt, Artificial Sequence
  Description of Artificial Sequence: Synthetic oligonucleotide
cauccgaguccuccgagcu

SEQ ID NO: 483175 - RNA, 19 nt, Artificial Sequence
  Description of Artificial Sequence: Synthetic oligonucleotide
ggucagguaggacguuuuc

SEQ ID NO: 483176 - RNA, 19 nt, Artificial Sequence
  Description of Artificial Sequence: Synthetic oligonucleotide
cauggggugcagcucggaa

SEQ ID NO: 483177 - RNA, 19 nt, Artificial Sequence
  Description of Artificial Sequence: Synthetic oligonucleotide
cucggaauguggaggcucu

SEQ ID NO: 483178 - RNA, 19 nt, Artificial Sequence
  Description of Artificial Sequence: Synthetic oligonucleotide
gcggcuacaggagggcggg

SEQ ID NO: 483179 - RNA, 19 nt, Artificial Sequence
  Description of Artificial Sequence: Synthetic oligonucleotide
gcagauucuacgaccaggu

SEQ ID NO: 483180 - RNA, 19 nt, Artificial Sequence
  Description of Artificial Sequence: Synthetic oligonucleotide
cuaaagggccagguucuaa

SEQ ID NO: 483181 - RNA, 19 nt, Artificial Sequence
  Description of Artificial Sequence: Synthetic oligonucleotide
acccgaugccaaaggcauc

SEQ ID NO: 483182 - RNA, 19 nt, Artificial Sequence
  Description of Artificial Sequence: Synthetic oligonucleotide
uccagacgccuggccaucu

SEQ ID NO: 483183 - RNA, 19 nt, Artificial Sequence
  Description of Artificial Sequence: Synthetic oligonucleotide
ccggauugugaagauccag

SEQ ID NO: 483184 - RNA, 19 nt, Artificial Sequence
  Description of Artificial Sequence: Synthetic oligonucleotide
gcacuaugauuaaaauuaa

SEQ ID NO: 483185 - RNA, 19 nt, Artificial Sequence
  Description of Artificial Sequence: Synthetic oligonucleotide
cauccgggaggaacucaga

SEQ ID NO: 483186 - RNA, 19 nt, Artificial Sequence
  Description of Artificial Sequence: Synthetic oligonucleotide
gaucuuucucccggauugu

SEQ ID NO: 483187 - RNA, 19 nt, Artificial Sequence
  Description of Artificial Sequence: Synthetic oligonucleotide
gagucgucacggcucugcu

SEQ ID NO: 483188 - RNA, 19 nt, Artificial Sequence
  Description of Artificial Sequence: Synthetic oligonucleotide
cuccccaccccaucugaaa

SEQ ID NO: 483189 - RNA, 19 nt, Artificial Sequence
  Description of Artificial Sequence: Synthetic oligonucleotide
gcacuuggccgauguguac

SEQ ID NO: 483190 - RNA, 19 nt, Artificial Sequence
  Description of Artificial Sequence: Synthetic oligonucleotide
ggacugucgcacugacuca

SEQ ID NO: 483191 - RNA, 19 nt, Artificial Sequence
  Description of Artificial Sequence: Synthetic oligonucleotide
gccaaauagauggcuccuc

SEQ ID NO: 483192 - RNA, 19 nt, Artificial Sequence
  Description of Artificial Sequence: Synthetic oligonucleotide
gcucggaauguggaggcuc

SEQ ID NO: 483193 - RNA, 19 nt, Artificial Sequence
  Description of Artificial Sequence: Synthetic oligonucleotide
ccugucgaugagcucgguc

SEQ ID NO: 483194 - RNA, 19 nt, Artificial Sequence
  Description of Artificial Sequence: Synthetic oligonucleotide
cucgggcgccauccagaag

SEQ ID NO: 483195 - RNA, 19 nt, Artificial Sequence
  Description of Artificial Sequence: Synthetic oligonucleotide
gacucaaguucuggccugu

SEQ ID NO: 483196 - RNA, 19 nt, Artificial Sequence
  Description of Artificial Sequence: Synthetic oligonucleotide
ggagggugcuaauuauuau

SEQ ID NO: 483197 - RNA, 19 nt, Artificial Sequence
  Description of Artificial Sequence: Synthetic oligonucleotide
ggccugucaaauauuuacu

SEQ ID NO: 483198 - RNA, 19 nt, Artificial Sequence
  Description of Artificial Sequence: Synthetic oligonucleotide
ccgugacaccucuucucag

SEQ ID NO: 483199 - RNA, 19 nt, Artificial Sequence
  Description of Artificial Sequence: Synthetic oligonucleotide
gggugcagcucggaaugug

SEQ ID NO: 483200 - RNA, 19 nt, Artificial Sequence
  Description of Artificial Sequence: Synthetic oligonucleotide
agacgccuggccaucuguu

SEQ ID NO: 483201 - RNA, 19 nt, Artificial Sequence
  Description of Artificial Sequence: Synthetic oligonucleotide
cauugcggauuaugaacuu

SEQ ID NO: 483202 - RNA, 19 nt, Artificial Sequence
  Description of Artificial Sequence: Synthetic oligonucleotide
gagcucggucagguaggac

SEQ ID NO: 483203 - RNA, 19 nt, Artificial Sequence
  Description of Artificial Sequence: Synthetic oligonucleotide
gcacgccaaaauuuccgua

SEQ ID NO: 483204 - RNA, 19 nt, Artificial Sequence
  Description of Artificial Sequence: Synthetic oligonucleotide
cuccagacgccuggccauc

SEQ ID NO: 483205 - RNA, 19 nt, Artificial Sequence
  Description of Artificial Sequence: Synthetic oligonucleotide
cuuggccgauguguacaca

SEQ ID NO: 483206 - RNA, 19 nt, Artificial Sequence
  Description of Artificial Sequence: Synthetic oligonucleotide
agacuagaugagggugcuu

SEQ ID NO: 483207 - RNA, 19 nt, Artificial Sequence
  Description of Artificial Sequence: Synthetic oligonucleotide
uaaugaccucgggcgccau

SEQ ID NO: 483208 - RNA, 19 nt, Artificial Sequence
  Description of Artificial Sequence: Synthetic oligonucleotide
cgagauacuccauuauuau

SEQ ID NO: 483209 - RNA, 19 nt, Artificial Sequence
  Description of Artificial Sequence: Synthetic oligonucleotide
cggauugugaagauccagu

SEQ ID NO: 483210 - RNA, 19 nt, Artificial Sequence
  Description of Artificial Sequence: Synthetic oligonucleotide
gcgcucauugacuuuuaau

SEQ ID NO: 483211 - RNA, 19 nt, Artificial Sequence
  Description of Artificial Sequence: Synthetic oligonucleotide
ggcgcucauugacuuuuaa

SEQ ID NO: 483212 - RNA, 19 nt, Artificial Sequence
  Description of Artificial Sequence: Synthetic oligonucleotide
caccgagauacuccauuau

SEQ ID NO: 483213 - RNA, 19 nt, Artificial Sequence
  Description of Artificial Sequence: Synthetic oligonucleotide
ccgauguguacacagugau

SEQ ID NO: 483214 - RNA, 19 nt, Artificial Sequence
  Description of Artificial Sequence: Synthetic oligonucleotide
cacugagagaaaggccucu

SEQ ID NO: 483215 - RNA, 19 nt, Artificial Sequence
  Description of Artificial Sequence: Synthetic oligonucleotide
cuccucggagcucuucuau

SEQ ID NO: 483216 - RNA, 19 nt, Artificial Sequence
  Description of Artificial Sequence: Synthetic oligonucleotide
ggcggggccccuccgugac

SEQ ID NO: 483217 - RNA, 19 nt, Artificial Sequence
  Description of Artificial Sequence: Synthetic oligonucleotide
ggguaucggucagcuggcc

SEQ ID NO: 483218 - RNA, 19 nt, Artificial Sequence
  Description of Artificial Sequence: Synthetic oligonucleotide
ccuuacgcacgccaaaauu

SEQ ID NO: 483219 - RNA, 19 nt, Artificial Sequence
  Description of Artificial Sequence: Synthetic oligonucleotide
caguaccaucgaugagaaa

SEQ ID NO: 483220 - RNA, 19 nt, Artificial Sequence
  Description of Artificial Sequence: Synthetic oligonucleotide
cagcuggugcagacacaaa

SEQ ID NO: 483221 - RNA, 19 nt, Artificial Sequence
  Description of Artificial Sequence: Synthetic oligonucleotide
cccggauugugaagaucca

SEQ ID NO: 483222 - RNA, 19 nt, Artificial Sequence
  Description of Artificial Sequence: Synthetic oligonucleotide
accugucgaugagcucggu

SEQ ID NO: 483223 - RNA, 19 nt, Artificial Sequence
  Description of Artificial Sequence: Synthetic oligonucleotide
ccacauccgaguccuccga

SEQ ID NO: 483224 - RNA, 19 nt, Artificial Sequence
  Description of Artificial Sequence: Synthetic oligonucleotide
cccgaugccaaaggcaucu

SEQ ID NO: 483225 - RNA, 19 nt, Artificial Sequence
  Description of Artificial Sequence: Synthetic oligonucleotide
ccauaauauuugguuacau

SEQ ID NO: 483226 - RNA, 19 nt, Artificial Sequence
  Description of Artificial Sequence: Synthetic oligonucleotide
ccagacgccuggccaucug

SEQ ID NO: 483227 - RNA, 19 nt, Artificial Sequence
  Description of Artificial Sequence: Synthetic oligonucleotide
aggcgcucauugacuuuua

SEQ ID NO: 483228 - RNA, 19 nt, Artificial Sequence
  Description of Artificial Sequence: Synthetic oligonucleotide
ggucuaaagcugggcuccu

SEQ ID NO: 483229 - RNA, 19 nt, Artificial Sequence
  Description of Artificial Sequence: Synthetic oligonucleotide
gucuaaagcugggcuccuu

SEQ ID NO: 483230 - RNA, 19 nt, Artificial Sequence
  Description of Artificial Sequence: Synthetic oligonucleotide
cgcacgccaaaauuuccgu

SEQ ID NO: 483231 - RNA, 19 nt, Artificial Sequence
  Description of Artificial Sequence: Synthetic oligonucleotide
cuccaccgagauacuccau

SEQ ID NO: 483232 - RNA, 19 nt, Artificial Sequence
  Description of Artificial Sequence: Synthetic oligonucleotide
gagccuccaccgagauacu

SEQ ID NO: 483233 - RNA, 19 nt, Artificial Sequence
  Description of Artificial Sequence: Synthetic oligonucleotide
gccccuccgugacaccucu

SEQ ID NO: 483234 - RNA, 19 nt, Artificial Sequence
  Description of Artificial Sequence: Synthetic oligonucleotide
cggggccccuccgugacac

SEQ ID NO: 483235 - RNA, 19 nt, Artificial Sequence
  Description of Artificial Sequence: Synthetic oligonucleotide
ggccucuuugggaugucuu

SEQ ID NO: 483236 - RNA, 19 nt, Artificial Sequence
  Description of Artificial Sequence: Synthetic oligonucleotide
ccacuuucugaguccgauu

SEQ ID NO: 483237 - RNA, 19 nt, Artificial Sequence
  Description of Artificial Sequence: Synthetic oligonucleotide
cccuuacgcacgccaaaau

SEQ ID NO: 483238 - RNA, 19 nt, Artificial Sequence
  Description of Artificial Sequence: Synthetic oligonucleotide
ggguugggagggugcuaau

SEQ ID NO: 483239 - RNA, 19 nt, Artificial Sequence
  Description of Artificial Sequence: Synthetic oligonucleotide
cucggucagguaggacguu

SEQ ID NO: 483240 - RNA, 19 nt, Artificial Sequence
  Description of Artificial Sequence: Synthetic oligonucleotide
ccggggcaggagcuaucaa

SEQ ID NO: 483241 - RNA, 19 nt, Artificial Sequence
  Description of Artificial Sequence: Synthetic oligonucleotide
cggucagguaggacguuuu

SEQ ID NO: 483242 - RNA, 19 nt, Artificial Sequence
  Description of Artificial Sequence: Synthetic oligonucleotide
ccuuggcggugggucuaaa

SEQ ID NO: 483243 - RNA, 19 nt, Artificial Sequence
  Description of Artificial Sequence: Synthetic oligonucleotide
ccccuccgugacaccucuu

SEQ ID NO: 483244 - RNA, 19 nt, Artificial Sequence
  Description of Artificial Sequence: Synthetic oligonucleotide
aaucuaauccaaaagaacc

SEQ ID NO: 483245 - RNA, 19 nt, Artificial Sequence
  Description of Artificial Sequence: Synthetic oligonucleotide
aguauaacagaauacaaag

SEQ ID NO: 483246 - RNA, 19 nt, Artificial Sequence
  Description of Artificial Sequence: Synthetic oligonucleotide
uuuacgaacauauauccag

SEQ ID NO: 483247 - RNA, 19 nt, Artificial Sequence
  Description of Artificial Sequence: Synthetic oligonucleotide
ugauauuucauauaagaga

SEQ ID NO: 483248 - RNA, 19 nt, Artificial Sequence
  Description of Artificial Sequence: Synthetic oligonucleotide
uauuuacgaacauauaucc

SEQ ID NO: 483249 - RNA, 19 nt, Artificial Sequence
  Description of Artificial Sequence: Synthetic oligonucleotide
ucaugcauagaaauaagag

SEQ ID NO: 483250 - RNA, 19 nt, Artificial Sequence
  Description of Artificial Sequence: Synthetic oligonucleotide
aauucuaagugccgguccc

SEQ ID NO: 483251 - RNA, 19 nt, Artificial Sequence
  Description of Artificial Sequence: Synthetic oligonucleotide
aaucuuauggccaaaacug

SEQ ID NO: 483252 - RNA, 19 nt, Artificial Sequence
  Description of Artificial Sequence: Synthetic oligonucleotide
ucuuagaauacaauggucu

SEQ ID NO: 483253 - RNA, 19 nt, Artificial Sequence
  Description of Artificial Sequence: Synthetic oligonucleotide
aaguguuaaucuaugauac

SEQ ID NO: 483254 - RNA, 19 nt, Artificial Sequence
  Description of Artificial Sequence: Synthetic oligonucleotide
uaaucuaugauacaauaau

SEQ ID NO: 483255 - RNA, 19 nt, Artificial Sequence
  Description of Artificial Sequence: Synthetic oligonucleotide
uccacgagcaauacuaugg

SEQ ID NO: 483256 - RNA, 19 nt, Artificial Sequence
  Description of Artificial Sequence: Synthetic oligonucleotide
aauacuauggcacucuguu

SEQ ID NO: 483257 - RNA, 19 nt, Artificial Sequence
  Description of Artificial Sequence: Synthetic oligonucleotide
uuauccacgagcaauacua

SEQ ID NO: 483258 - RNA, 19 nt, Artificial Sequence
  Description of Artificial Sequence: Synthetic oligonucleotide
agaagaagugcacaaauca

SEQ ID NO: 483259 - RNA, 19 nt, Artificial Sequence
  Description of Artificial Sequence: Synthetic oligonucleotide
uuaucuaaauuugacagga

SEQ ID NO: 483260 - RNA, 19 nt, Artificial Sequence
  Description of Artificial Sequence: Synthetic oligonucleotide
aauuucguccaccagcugu

SEQ ID NO: 483261 - RNA, 19 nt, Artificial Sequence
  Description of Artificial Sequence: Synthetic oligonucleotide
uuuggaucgaaucgcuugg

SEQ ID NO: 483262 - RNA, 19 nt, Artificial Sequence
  Description of Artificial Sequence: Synthetic oligonucleotide
augcauaacagauauucag

SEQ ID NO: 483263 - RNA, 19 nt, Artificial Sequence
  Description of Artificial Sequence: Synthetic oligonucleotide
ugccaaaauagccaggagc

SEQ ID NO: 483264 - RNA, 19 nt, Artificial Sequence
  Description of Artificial Sequence: Synthetic oligonucleotide
uuguuauaagaauauaauc

SEQ ID NO: 483265 - RNA, 19 nt, Artificial Sequence
  Description of Artificial Sequence: Synthetic oligonucleotide
uuauuauagcaauuuuaag

SEQ ID NO: 483266 - RNA, 19 nt, Artificial Sequence
  Description of Artificial Sequence: Synthetic oligonucleotide
uaaguguuaaucuaugaua

SEQ ID NO: 483267 - RNA, 19 nt, Artificial Sequence
  Description of Artificial Sequence: Synthetic oligonucleotide
uuuaagguacgucuauccc

SEQ ID NO: 483268 - RNA, 19 nt, Artificial Sequence
  Description of Artificial Sequence: Synthetic oligonucleotide
aguacauaauaauaauugu

SEQ ID NO: 483269 - RNA, 19 nt, Artificial Sequence
  Description of Artificial Sequence: Synthetic oligonucleotide
aauauuccccaaaugaucu

SEQ ID NO: 483270 - RNA, 19 nt, Artificial Sequence
  Description of Artificial Sequence: Synthetic oligonucleotide
ucgagaguuaggcuuaucc

SEQ ID NO: 483271 - RNA, 19 nt, Artificial Sequence
  Description of Artificial Sequence: Synthetic oligonucleotide
agacuauagaucauguagc

SEQ ID NO: 483272 - RNA, 19 nt, Artificial Sequence
  Description of Artificial Sequence: Synthetic oligonucleotide
cuucauaaaacccuuagga

SEQ ID NO: 483273 - RNA, 19 nt, Artificial Sequence
  Description of Artificial Sequence: Synthetic oligonucleotide
cuuuaagguacgucuaucc

SEQ ID NO: 483274 - RNA, 19 nt, Artificial Sequence
  Description of Artificial Sequence: Synthetic oligonucleotide
accauaugccaauauuucg

SEQ ID NO: 483275 - RNA, 19 nt, Artificial Sequence
  Description of Artificial Sequence: Synthetic oligonucleotide
aaucuaugauacaauaaug

SEQ ID NO: 483276 - RNA, 19 nt, Artificial Sequence
  Description of Artificial Sequence: Synthetic oligonucleotide
aauggauuacucagguucg

SEQ ID NO: 483277 - RNA, 19 nt, Artificial Sequence
  Description of Artificial Sequence: Synthetic oligonucleotide
uguuauauugcucucuauu

SEQ ID NO: 483278 - RNA, 19 nt, Artificial Sequence
  Description of Artificial Sequence: Synthetic oligonucleotide
ggaggaauaaguaugugcg

SEQ ID NO: 483279 - RNA, 19 nt, Artificial Sequence
  Description of Artificial Sequence: Synthetic oligonucleotide
uuaagguacgucuaucccu

SEQ ID NO: 483280 - RNA, 19 nt, Artificial Sequence
  Description of Artificial Sequence: Synthetic oligonucleotide
uucaauggauuacucaggu

SEQ ID NO: 483281 - RNA, 19 nt, Artificial Sequence
  Description of Artificial Sequence: Synthetic oligonucleotide
aacuccacuugaguuaucg

SEQ ID NO: 483282 - RNA, 19 nt, Artificial Sequence
  Description of Artificial Sequence: Synthetic oligonucleotide
agcuaauggaaaaugacag

SEQ ID NO: 483283 - RNA, 19 nt, Artificial Sequence
  Description of Artificial Sequence: Synthetic oligonucleotide
gagaguuaggcuuauccac

SEQ ID NO: 483284 - RNA, 19 nt, Artificial Sequence
  Description of Artificial Sequence: Synthetic oligonucleotide
uuacgaacauauauccagc

SEQ ID NO: 483285 - RNA, 19 nt, Artificial Sequence
  Description of Artificial Sequence: Synthetic oligonucleotide
aaaggucgaccaucuuugc

SEQ ID NO: 483286 - RNA, 19 nt, Artificial Sequence
  Description of Artificial Sequence: Synthetic oligonucleotide
aauggucuuaagcaguuua

SEQ ID NO: 483287 - RNA, 19 nt, Artificial Sequence
  Description of Artificial Sequence: Synthetic oligonucleotide
aggaauaaguaugugcggg

SEQ ID NO: 483288 - RNA, 19 nt, Artificial Sequence
  Description of Artificial Sequence: Synthetic oligonucleotide
acacggaguaggcagacgg

SEQ ID NO: 483289 - RNA, 19 nt, Artificial Sequence
  Description of Artificial Sequence: Synthetic oligonucleotide
ucuaugauacaauaauguu

SEQ ID NO: 483290 - RNA, 19 nt, Artificial Sequence
  Description of Artificial Sequence: Synthetic oligonucleotide
uucgguguuuuccaggcgc

SEQ ID NO: 483291 - RNA, 19 nt, Artificial Sequence
  Description of Artificial Sequence: Synthetic oligonucleotide
acauuacguacugaggagc

SEQ ID NO: 483292 - RNA, 19 nt, Artificial Sequence
  Description of Artificial Sequence: Synthetic oligonucleotide
caaaggucgaccaucuuug

SEQ ID NO: 483293 - RNA, 19 nt, Artificial Sequence
  Description of Artificial Sequence: Synthetic oligonucleotide
aaguaugugcggguaacgg

SEQ ID NO: 483294 - RNA, 19 nt, Artificial Sequence
  Description of Artificial Sequence: Synthetic oligonucleotide
acgagcaauacuauggcac

SEQ ID NO: 483295 - RNA, 19 nt, Artificial Sequence
  Description of Artificial Sequence: Synthetic oligonucleotide
uacagcaggauacaacuaa

SEQ ID NO: 483296 - RNA, 19 nt, Artificial Sequence
  Description of Artificial Sequence: Synthetic oligonucleotide
ucagguucguuccaaagau

SEQ ID NO: 483297 - RNA, 19 nt, Artificial Sequence
  Description of Artificial Sequence: Synthetic oligonucleotide
uuggcauuagcccacuccu

SEQ ID NO: 483298 - RNA, 19 nt, Artificial Sequence
  Description of Artificial Sequence: Synthetic oligonucleotide
gaggaauaaguaugugcgg

SEQ ID NO: 483299 - RNA, 19 nt, Artificial Sequence
  Description of Artificial Sequence: Synthetic oligonucleotide
aucuaugauacaauaaugu

SEQ ID NO: 483300 - RNA, 19 nt, Artificial Sequence
  Description of Artificial Sequence: Synthetic oligonucleotide
auaaguaugugcggguaac

SEQ ID NO: 483301 - RNA, 19 nt, Artificial Sequence
  Description of Artificial Sequence: Synthetic oligonucleotide
auccaaucaagaauacccc

SEQ ID NO: 483302 - RNA, 19 nt, Artificial Sequence
  Description of Artificial Sequence: Synthetic oligonucleotide
gaucgaaucgcuuggaugu

SEQ ID NO: 483303 - RNA, 19 nt, Artificial Sequence
  Description of Artificial Sequence: Synthetic oligonucleotide
guauuuacgaacauauauc

SEQ ID NO: 483304 - RNA, 19 nt, Artificial Sequence
  Description of Artificial Sequence: Synthetic oligonucleotide
agugcugacgcuaucagug

SEQ ID NO: 483305 - RNA, 19 nt, Artificial Sequence
  Description of Artificial Sequence: Synthetic oligonucleotide
acaacuaauccaaucaaga

SEQ ID NO: 483306 - RNA, 19 nt, Artificial Sequence
  Description of Artificial Sequence: Synthetic oligonucleotide
acuuauguccgacucuuca

SEQ ID NO: 483307 - RNA, 19 nt, Artificial Sequence
  Description of Artificial Sequence: Synthetic oligonucleotide
guuaaucuaugauacaaua

SEQ ID NO: 483308 - RNA, 19 nt, Artificial Sequence
  Description of Artificial Sequence: Synthetic oligonucleotide
agaucauguagcucguaug

SEQ ID NO: 483309 - RNA, 19 nt, Artificial Sequence
  Description of Artificial Sequence: Synthetic oligonucleotide
acgucuaucccuugcugac

SEQ ID NO: 483310 - RNA, 19 nt, Artificial Sequence
  Description of Artificial Sequence: Synthetic oligonucleotide
ucuuauggccaaaacugaa

SEQ ID NO: 483311 - RNA, 19 nt, Artificial Sequence
  Description of Artificial Sequence: Synthetic oligonucleotide
cagccuaucagagaaacac

SEQ ID NO: 483312 - RNA, 19 nt, Artificial Sequence
  Description of Artificial Sequence: Synthetic oligonucleotide
uuuuccaggcgcucguaag

SEQ ID NO: 483313 - RNA, 19 nt, Artificial Sequence
  Description of Artificial Sequence: Synthetic oligonucleotide
uuauguccgacucuucauc

SEQ ID NO: 483314 - RNA, 19 nt, Artificial Sequence
  Description of Artificial Sequence: Synthetic oligonucleotide
uuacguacugaggagcaag

SEQ ID NO: 483315 - RNA, 19 nt, Artificial Sequence
  Description of Artificial Sequence: Synthetic oligonucleotide
uguauuuacauagcauuau

SEQ ID NO: 483316 - RNA, 19 nt, Artificial Sequence
  Description of Artificial Sequence: Synthetic oligonucleotide
uacgaacauauauccagca

SEQ ID NO: 483317 - RNA, 19 nt, Artificial Sequence
  Description of Artificial Sequence: Synthetic oligonucleotide
uuaauggccaugcucucau

SEQ ID NO: 483318 - RNA, 19 nt, Artificial Sequence
  Description of Artificial Sequence: Synthetic oligonucleotide
agggaacacuguuuguaac

SEQ ID NO: 483319 - RNA, 19 nt, Artificial Sequence
  Description of Artificial Sequence: Synthetic oligonucleotide
guaucaugcauagaaauaa

SEQ ID NO: 483320 - RNA, 19 nt, Artificial Sequence
  Description of Artificial Sequence: Synthetic oligonucleotide
aguauaguagccauacaga

SEQ ID NO: 483321 - RNA, 19 nt, Artificial Sequence
  Description of Artificial Sequence: Synthetic oligonucleotide
ucgaauuccugccaucgaa

SEQ ID NO: 483322 - RNA, 19 nt, Artificial Sequence
  Description of Artificial Sequence: Synthetic oligonucleotide
auuucgaauuccugccauc

SEQ ID NO: 483323 - RNA, 19 nt, Artificial Sequence
  Description of Artificial Sequence: Synthetic oligonucleotide
agguacgucuaucccuugc

SEQ ID NO: 483324 - RNA, 19 nt, Artificial Sequence
  Description of Artificial Sequence: Synthetic oligonucleotide
ugacaaaggucgaccaucu

SEQ ID NO: 483325 - RNA, 19 nt, Artificial Sequence
  Description of Artificial Sequence: Synthetic oligonucleotide
gaagugcugacgcuaucag

SEQ ID NO: 483326 - RNA, 19 nt, Artificial Sequence
  Description of Artificial Sequence: Synthetic oligonucleotide
uugagcgccguuuuaauuu

SEQ ID NO: 483327 - RNA, 19 nt, Artificial Sequence
  Description of Artificial Sequence: Synthetic oligonucleotide
aagcauguucaauggauua

SEQ ID NO: 483328 - RNA, 19 nt, Artificial Sequence
  Description of Artificial Sequence: Synthetic oligonucleotide
uauuucgaauuccugccau

SEQ ID NO: 483329 - RNA, 19 nt, Artificial Sequence
  Description of Artificial Sequence: Synthetic oligonucleotide
auacuauggcacucuguuc

SEQ ID NO: 483330 - RNA, 19 nt, Artificial Sequence
  Description of Artificial Sequence: Synthetic oligonucleotide
uaagguacgucuaucccuu

SEQ ID NO: 483331 - RNA, 19 nt, Artificial Sequence
  Description of Artificial Sequence: Synthetic oligonucleotide
uucuucgaugucuucggug

SEQ ID NO: 483332 - RNA, 19 nt, Artificial Sequence
  Description of Artificial Sequence: Synthetic oligonucleotide
uaaguaugugcggguaacg

SEQ ID NO: 483333 - RNA, 19 nt, Artificial Sequence
  Description of Artificial Sequence: Synthetic oligonucleotide
uuaagaccugaacaaugaa

SEQ ID NO: 483334 - RNA, 19 nt, Artificial Sequence
  Description of Artificial Sequence: Synthetic oligonucleotide
ucauccuaauguuacuuua

SEQ ID NO: 483335 - RNA, 19 nt, Artificial Sequence
  Description of Artificial Sequence: Synthetic oligonucleotide
gaacuuguggaggaauaag

SEQ ID NO: 483336 - RNA, 19 nt, Artificial Sequence
  Description of Artificial Sequence: Synthetic oligonucleotide
ucguaaucuuucuucacau

SEQ ID NO: 483337 - RNA, 19 nt, Artificial Sequence
  Description of Artificial Sequence: Synthetic oligonucleotide
auaacagaauacaaaguau

SEQ ID NO: 483338 - RNA, 19 nt, Artificial Sequence
  Description of Artificial Sequence: Synthetic oligonucleotide
ugaagagccuuaucuaaau

SEQ ID NO: 483339 - RNA, 19 nt, Artificial Sequence
  Description of Artificial Sequence: Synthetic oligonucleotide
ugcggguaacgguacauug

SEQ ID NO: 483340 - RNA, 19 nt, Artificial Sequence
  Description of Artificial Sequence: Synthetic oligonucleotide
cuauucacacggaguaggc

SEQ ID NO: 483341 - RNA, 19 nt, Artificial Sequence
  Description of Artificial Sequence: Synthetic oligonucleotide
cugcaucgcaucuucuugg

SEQ ID NO: 483342 - RNA, 19 nt, Artificial Sequence
  Description of Artificial Sequence: Synthetic oligonucleotide
aaauaguacgcagcacuga

SEQ ID NO: 483343 - RNA, 19 nt, Artificial Sequence
  Description of Artificial Sequence: Synthetic oligonucleotide
uugaguuaucgcuaauaau

SEQ ID NO: 483344 - RNA, 19 nt, Artificial Sequence
  Description of Artificial Sequence: Synthetic oligonucleotide
gcuucauaaaacccuuagg

SEQ ID NO: 483345 - RNA, 19 nt, Artificial Sequence
  Description of Artificial Sequence: Synthetic oligonucleotide
aucaucacuuauguccgac

SEQ ID NO: 483346 - RNA, 19 nt, Artificial Sequence
  Description of Artificial Sequence: Synthetic oligonucleotide
cuaauaaucuuauggccaa

SEQ ID NO: 483347 - RNA, 19 nt, Artificial Sequence
  Description of Artificial Sequence: Synthetic oligonucleotide
aguguuaaucuaugauaca

SEQ ID NO: 483348 - RNA, 19 nt, Artificial Sequence
  Description of Artificial Sequence: Synthetic oligonucleotide
auauuucgaauuccugcca

SEQ ID NO: 483349 - RNA, 19 nt, Artificial Sequence
  Description of Artificial Sequence: Synthetic oligonucleotide
uguagcucguaugaaggac

SEQ ID NO: 483350 - RNA, 19 nt, Artificial Sequence
  Description of Artificial Sequence: Synthetic oligonucleotide
uucccuuuacagcaggaua

SEQ ID NO: 483351 - RNA, 19 nt, Artificial Sequence
  Description of Artificial Sequence: Synthetic oligonucleotide
aagugcugacgcuaucagu

SEQ ID NO: 483352 - RNA, 19 nt, Artificial Sequence
  Description of Artificial Sequence: Synthetic oligonucleotide
gcagaaguaucaugcauag

SEQ ID NO: 483353 - RNA, 19 nt, Artificial Sequence
  Description of Artificial Sequence: Synthetic oligonucleotide
agcgcagcuaaaccaugac

SEQ ID NO: 483354 - RNA, 19 nt, Artificial Sequence
  Description of Artificial Sequence: Synthetic oligonucleotide
cuugaguuaucgcuaauaa

SEQ ID NO: 483355 - RNA, 19 nt, Artificial Sequence
  Description of Artificial Sequence: Synthetic oligonucleotide
uagcagaaguaucaugcau

SEQ ID NO: 483356 - RNA, 19 nt, Artificial Sequence
  Description of Artificial Sequence: Synthetic oligonucleotide
aacgguacauugaucuuca

SEQ ID NO: 483357 - RNA, 19 nt, Artificial Sequence
  Description of Artificial Sequence: Synthetic oligonucleotide
ugagugcauuuacuggugu

SEQ ID NO: 483358 - RNA, 19 nt, Artificial Sequence
  Description of Artificial Sequence: Synthetic oligonucleotide
aaagcauguucaauggauu

SEQ ID NO: 483359 - RNA, 19 nt, Artificial Sequence
  Description of Artificial Sequence: Synthetic oligonucleotide
agguucguuccaaagauga

SEQ ID NO: 483360 - RNA, 19 nt, Artificial Sequence
  Description of Artificial Sequence: Synthetic oligonucleotide
aggucgaccaucuuugcuu

SEQ ID NO: 483361 - RNA, 19 nt, Artificial Sequence
  Description of Artificial Sequence: Synthetic oligonucleotide
aucaugcauagaaauaaga

SEQ ID NO: 483362 - RNA, 19 nt, Artificial Sequence
  Description of Artificial Sequence: Synthetic oligonucleotide
gcuaauggaaaaugacagc

SEQ ID NO: 483363 - RNA, 19 nt, Artificial Sequence
  Description of Artificial Sequence: Synthetic oligonucleotide
ugacaugccguaugcugug

SEQ ID NO: 483364 - RNA, 19 nt, Artificial Sequence
  Description of Artificial Sequence: Synthetic oligonucleotide
ucaucacuuauguccgacu

SEQ ID NO: 483365 - RNA, 19 nt, Artificial Sequence
  Description of Artificial Sequence: Synthetic oligonucleotide
guacugaggagcaagacua

SEQ ID NO: 483366 - RNA, 19 nt, Artificial Sequence
  Description of Artificial Sequence: Synthetic oligonucleotide
caacuaauccaaucaagaa

SEQ ID NO: 483367 - RNA, 19 nt, Artificial Sequence
  Description of Artificial Sequence: Synthetic oligonucleotide
auuacucagguucguucca

SEQ ID NO: 483368 - RNA, 19 nt, Artificial Sequence
  Description of Artificial Sequence: Synthetic oligonucleotide
uauccaccggaagaagugc

SEQ ID NO: 483369 - RNA, 19 nt, Artificial Sequence
  Description of Artificial Sequence: Synthetic oligonucleotide
ugcaucgcaucuucuuggc

SEQ ID NO: 483370 - RNA, 19 nt, Artificial Sequence
  Description of Artificial Sequence: Synthetic oligonucleotide
guuaucgcuaauaaucuua

SEQ ID NO: 483371 - RNA, 19 nt, Artificial Sequence
  Description of Artificial Sequence: Synthetic oligonucleotide
uggucuuaagcaguuuaac

SEQ ID NO: 483372 - RNA, 19 nt, Artificial Sequence
  Description of Artificial Sequence: Synthetic oligonucleotide
ggaucgaaucgcuuggaug

SEQ ID NO: 483373 - RNA, 19 nt, Artificial Sequence
  Description of Artificial Sequence: Synthetic oligonucleotide
acgaacauauauccagcaa

SEQ ID NO: 483374 - RNA, 19 nt, Artificial Sequence
  Description of Artificial Sequence: Synthetic oligonucleotide
auuuacgaacauauaucca

SEQ ID NO: 483375 - RNA, 19 nt, Artificial Sequence
  Description of Artificial Sequence: Synthetic oligonucleotide
acccuuaggacagaaggcu

SEQ ID NO: 483376 - RNA, 19 nt, Artificial Sequence
  Description of Artificial Sequence: Synthetic oligonucleotide
cauuacguacugaggagca

SEQ ID NO: 483377 - RNA, 19 nt, Artificial Sequence
  Description of Artificial Sequence: Synthetic oligonucleotide
auccacgagcaauacuaug

SEQ ID NO: 483378 - RNA, 19 nt, Artificial Sequence
  Description of Artificial Sequence: Synthetic oligonucleotide
agccucgagaguuaggcuu

SEQ ID NO: 483379 - RNA, 19 nt, Artificial Sequence
  Description of Artificial Sequence: Synthetic oligonucleotide
ucacuuauguccgacucuu

SEQ ID NO: 483380 - RNA, 19 nt, Artificial Sequence
  Description of Artificial Sequence: Synthetic oligonucleotide
auguagcucguaugaagga

SEQ ID NO: 483381 - RNA, 19 nt, Artificial Sequence
  Description of Artificial Sequence: Synthetic oligonucleotide
agacggcucaucaucauca

SEQ ID NO: 483382 - RNA, 19 nt, Artificial Sequence
  Description of Artificial Sequence: Synthetic oligonucleotide
uauccacgagcaauacuau

SEQ ID NO: 483383 - RNA, 19 nt, Artificial Sequence
  Description of Artificial Sequence: Synthetic oligonucleotide
uuacagcaggauacaacua

SEQ ID NO: 483384 - RNA, 19 nt, Artificial Sequence
  Description of Artificial Sequence: Synthetic oligonucleotide
aguuaucgcuaauaaucuu

SEQ ID NO: 483385 - RNA, 19 nt, Artificial Sequence
  Description of Artificial Sequence: Synthetic oligonucleotide
gaguuaggcuuauccacga

SEQ ID NO: 483386 - RNA, 19 nt, Artificial Sequence
  Description of Artificial Sequence: Synthetic oligonucleotide
guauguuauggcugccaac

SEQ ID NO: 483387 - RNA, 19 nt, Artificial Sequence
  Description of Artificial Sequence: Synthetic oligonucleotide
guaggcagacggcucauca

SEQ ID NO: 483388 - RNA, 19 nt, Artificial Sequence
  Description of Artificial Sequence: Synthetic oligonucleotide
aguguucguaaucuuucuu

SEQ ID NO: 483389 - RNA, 19 nt, Artificial Sequence
  Description of Artificial Sequence: Synthetic oligonucleotide
caucagauguuauauugcu

SEQ ID NO: 483390 - RNA, 19 nt, Artificial Sequence
  Description of Artificial Sequence: Synthetic oligonucleotide
guacgucuaucccuugcug

SEQ ID NO: 483391 - RNA, 19 nt, Artificial Sequence
  Description of Artificial Sequence: Synthetic oligonucleotide
ggauuacucagguucguuc

SEQ ID NO: 483392 - RNA, 19 nt, Artificial Sequence
  Description of Artificial Sequence: Synthetic oligonucleotide
aucgcuuggaugugcugcu

SEQ ID NO: 483393 - RNA, 19 nt, Artificial Sequence
  Description of Artificial Sequence: Synthetic oligonucleotide
aucuuauggccaaaacuga

SEQ ID NO: 483394 - RNA, 19 nt, Artificial Sequence
  Description of Artificial Sequence: Synthetic oligonucleotide
uggaucgaaucgcuuggau

SEQ ID NO: 483395 - RNA, 19 nt, Artificial Sequence
  Description of Artificial Sequence: Synthetic oligonucleotide
ucgguguuuuccaggcgcu

SEQ ID NO: 483396 - RNA, 19 nt, Artificial Sequence
  Description of Artificial Sequence: Synthetic oligonucleotide
gguguuuuccaggcgcucg

SEQ ID NO: 483397 - RNA, 19 nt, Artificial Sequence
  Description of Artificial Sequence: Synthetic oligonucleotide
cauugcuuuaagguacguc

SEQ ID NO: 483398 - RNA, 19 nt, Artificial Sequence
  Description of Artificial Sequence: Synthetic oligonucleotide
aguagccauacagaacggu

SEQ ID NO: 483399 - RNA, 19 nt, Artificial Sequence
  Description of Artificial Sequence: Synthetic oligonucleotide
ucgaaucgcuuggaugugc

SEQ ID NO: 483400 - RNA, 19 nt, Artificial Sequence
  Description of Artificial Sequence: Synthetic oligonucleotide
agcuaaaccaugacuacuu

SEQ ID NO: 483401 - RNA, 19 nt, Artificial Sequence
  Description of Artificial Sequence: Synthetic oligonucleotide
agugcacaaaucacaacaa

SEQ ID NO: 483402 - RNA, 19 nt, Artificial Sequence
  Description of Artificial Sequence: Synthetic oligonucleotide
acuuguggaggaauaagua

SEQ ID NO: 483403 - RNA, 19 nt, Artificial Sequence
  Description of Artificial Sequence: Synthetic oligonucleotide
auguuauauugcucucuau

SEQ ID NO: 483404 - RNA, 19 nt, Artificial Sequence
  Description of Artificial Sequence: Synthetic oligonucleotide
aagguacgucuaucccuug

SEQ ID NO: 483405 - RNA, 19 nt, Artificial Sequence
  Description of Artificial Sequence: Synthetic oligonucleotide
auauucagccagcuucaua

SEQ ID NO: 483406 - RNA, 19 nt, Artificial Sequence
  Description of Artificial Sequence: Synthetic oligonucleotide
cacggaguaggcagacggc

SEQ ID NO: 483407 - RNA, 19 nt, Artificial Sequence
  Description of Artificial Sequence: Synthetic oligonucleotide
cuucgguguuuuccaggcg

SEQ ID NO: 483408 - RNA, 19 nt, Artificial Sequence
  Description of Artificial Sequence: Synthetic oligonucleotide
cagguucguuccaaagaug

SEQ ID NO: 483409 - RNA, 19 nt, Artificial Sequence
  Description of Artificial Sequence: Synthetic oligonucleotide
uaggcuuauccacgagcaa

SEQ ID NO: 483410 - RNA, 19 nt, Artificial Sequence
  Description of Artificial Sequence: Synthetic oligonucleotide
gugcugacgcuaucagugc

SEQ ID NO: 483411 - RNA, 19 nt, Artificial Sequence
  Description of Artificial Sequence: Synthetic oligonucleotide
gacggcucaucaucaucac

SEQ ID NO: 483412 - RNA, 19 nt, Artificial Sequence
  Description of Artificial Sequence: Synthetic oligonucleotide
acggaguaggcagacggcu

SEQ ID NO: 483413 - RNA, 19 nt, Artificial Sequence
  Description of Artificial Sequence: Synthetic oligonucleotide
augaagagccuuaucuaaa

SEQ ID NO: 483414 - RNA, 19 nt, Artificial Sequence
  Description of Artificial Sequence: Synthetic oligonucleotide
cuaaguguucguaaucuuu

SEQ ID NO: 483415 - RNA, 19 nt, Artificial Sequence
  Description of Artificial Sequence: Synthetic oligonucleotide
guaugugcggguaacggua

SEQ ID NO: 483416 - RNA, 19 nt, Artificial Sequence
  Description of Artificial Sequence: Synthetic oligonucleotide
uaggcagacggcucaucau

SEQ ID NO: 483417 - RNA, 19 nt, Artificial Sequence
  Description of Artificial Sequence: Synthetic oligonucleotide
caagacuauagaucaugua

SEQ ID NO: 483418 - RNA, 19 nt, Artificial Sequence
  Description of Artificial Sequence: Synthetic oligonucleotide
aucccaaaguguacuugag

SEQ ID NO: 483419 - RNA, 19 nt, Artificial Sequence
  Description of Artificial Sequence: Synthetic oligonucleotide
uuggaucgaaucgcuugga

SEQ ID NO: 483420 - RNA, 19 nt, Artificial Sequence
  Description of Artificial Sequence: Synthetic oligonucleotide
cacgagcaauacuauggca

SEQ ID NO: 483421 - RNA, 19 nt, Artificial Sequence
  Description of Artificial Sequence: Synthetic oligonucleotide
agcgccguuuuaauuugag

SEQ ID NO: 483422 - RNA, 19 nt, Artificial Sequence
  Description of Artificial Sequence: Synthetic oligonucleotide
caaugcaacuaagaugaaa

SEQ ID NO: 483423 - RNA, 19 nt, Artificial Sequence
  Description of Artificial Sequence: Synthetic oligonucleotide
ugugcggguaacgguacau

SEQ ID NO: 483424 - RNA, 19 nt, Artificial Sequence
  Description of Artificial Sequence: Synthetic oligonucleotide
gcaccagccgaucaccagc

SEQ ID NO: 483425 - RNA, 19 nt, Artificial Sequence
  Description of Artificial Sequence: Synthetic oligonucleotide
ucuaagugccggucccuuu

SEQ ID NO: 483426 - RNA, 19 nt, Artificial Sequence
  Description of Artificial Sequence: Synthetic oligonucleotide
aggcacaagacaagugacu

SEQ ID NO: 483427 - RNA, 19 nt, Artificial Sequence
  Description of Artificial Sequence: Synthetic oligonucleotide
agccuaucagagaaacacu

SEQ ID NO: 483428 - RNA, 19 nt, Artificial Sequence
  Description of Artificial Sequence: Synthetic oligonucleotide
caaucagggucagagagcu

SEQ ID NO: 483429 - RNA, 19 nt, Artificial Sequence
  Description of Artificial Sequence: Synthetic oligonucleotide
gcaauacuauggcacucug

SEQ ID NO: 483430 - RNA, 19 nt, Artificial Sequence
  Description of Artificial Sequence: Synthetic oligonucleotide
acagcaggauacaacuaau

SEQ ID NO: 483431 - RNA, 19 nt, Artificial Sequence
  Description of Artificial Sequence: Synthetic oligonucleotide
caaaggggauccagaagaa

SEQ ID NO: 483432 - RNA, 19 nt, Artificial Sequence
  Description of Artificial Sequence: Synthetic oligonucleotide
auuucguccaccagcuguu

SEQ ID NO: 483433 - RNA, 19 nt, Artificial Sequence
  Description of Artificial Sequence: Synthetic oligonucleotide
uggauuacucagguucguu

SEQ ID NO: 483434 - RNA, 19 nt, Artificial Sequence
  Description of Artificial Sequence: Synthetic oligonucleotide
gccgaagaugcaccagccg

SEQ ID NO: 483435 - RNA, 19 nt, Artificial Sequence
  Description of Artificial Sequence: Synthetic oligonucleotide
aucgaaucgcuuggaugug

SEQ ID NO: 483436 - RNA, 19 nt, Artificial Sequence
  Description of Artificial Sequence: Synthetic oligonucleotide
gguaaugcugacaugccgu

SEQ ID NO: 483437 - RNA, 19 nt, Artificial Sequence
  Description of Artificial Sequence: Synthetic oligonucleotide
auggauuacucagguucgu

SEQ ID NO: 483438 - RNA, 19 nt, Artificial Sequence
  Description of Artificial Sequence: Synthetic oligonucleotide
auuacguacugaggagcaa

SEQ ID NO: 483439 - RNA, 19 nt, Artificial Sequence
  Description of Artificial Sequence: Synthetic oligonucleotide
cucguaagcagcauuucuu

SEQ ID NO: 483440 - RNA, 19 nt, Artificial Sequence
  Description of Artificial Sequence: Synthetic oligonucleotide
cuuauguccgacucuucau

SEQ ID NO: 483441 - RNA, 19 nt, Artificial Sequence
  Description of Artificial Sequence: Synthetic oligonucleotide
ucuaucccuugcugacaaa

SEQ ID NO: 483442 - RNA, 19 nt, Artificial Sequence
  Description of Artificial Sequence: Synthetic oligonucleotide
cacuuauguccgacucuuc

SEQ ID NO: 483443 - RNA, 19 nt, Artificial Sequence
  Description of Artificial Sequence: Synthetic oligonucleotide
cuuauccacgagcaauacu

SEQ ID NO: 483444 - RNA, 19 nt, Artificial Sequence
  Description of Artificial Sequence: Synthetic oligonucleotide
acaugccguaugcugugua

SEQ ID NO: 483445 - RNA, 19 nt, Artificial Sequence
  Description of Artificial Sequence: Synthetic oligonucleotide
augugcggguaacgguaca

SEQ ID NO: 483446 - RNA, 19 nt, Artificial Sequence
  Description of Artificial Sequence: Synthetic oligonucleotide
gcacaagacaagugacuuc

SEQ ID NO: 483447 - RNA, 19 nt, Artificial Sequence
  Description of Artificial Sequence: Synthetic oligonucleotide
acauugcuuuaagguacgu

SEQ ID NO: 483448 - RNA, 19 nt, Artificial Sequence
  Description of Artificial Sequence: Synthetic oligonucleotide
gguacgucuaucccuugcu

SEQ ID NO: 483449 - RNA, 19 nt, Artificial Sequence
  Description of Artificial Sequence: Synthetic oligonucleotide
auucccucacaaaccugga

SEQ ID NO: 483450 - RNA, 19 nt, Artificial Sequence
  Description of Artificial Sequence: Synthetic oligonucleotide
ugacuacuuccaaguucuu

SEQ ID NO: 483451 - RNA, 19 nt, Artificial Sequence
  Description of Artificial Sequence: Synthetic oligonucleotide
cgagaguuaggcuuaucca

SEQ ID NO: 483452 - RNA, 19 nt, Artificial Sequence
  Description of Artificial Sequence: Synthetic oligonucleotide
cuuugcuuuuggaucgaau

SEQ ID NO: 483453 - RNA, 19 nt, Artificial Sequence
  Description of Artificial Sequence: Synthetic oligonucleotide
cauuggcauuagcccacuc

SEQ ID NO: 483454 - RNA, 19 nt, Artificial Sequence
  Description of Artificial Sequence: Synthetic oligonucleotide
gcucguaugaaggacaauu

SEQ ID NO: 483455 - RNA, 19 nt, Artificial Sequence
  Description of Artificial Sequence: Synthetic oligonucleotide
gcccacuccuuaaauguac

SEQ ID NO: 483456 - RNA, 19 nt, Artificial Sequence
  Description of Artificial Sequence: Synthetic oligonucleotide
gcuuauccacgagcaauac

SEQ ID NO: 483457 - RNA, 19 nt, Artificial Sequence
  Description of Artificial Sequence: Synthetic oligonucleotide
gcucguaagcagcauuucu

SEQ ID NO: 483458 - RNA, 19 nt, Artificial Sequence
  Description of Artificial Sequence: Synthetic oligonucleotide
cuguuacaguggagaccac

SEQ ID NO: 483459 - RNA, 19 nt, Artificial Sequence
  Description of Artificial Sequence: Synthetic oligonucleotide
ccuaucagagaaacacuua

SEQ ID NO: 483460 - RNA, 19 nt, Artificial Sequence
  Description of Artificial Sequence: Synthetic oligonucleotide
cagaaguaucaugcauaga

SEQ ID NO: 483461 - RNA, 19 nt, Artificial Sequence
  Description of Artificial Sequence: Synthetic oligonucleotide
ggcacaagacaagugacuu

SEQ ID NO: 483462 - RNA, 19 nt, Artificial Sequence
  Description of Artificial Sequence: Synthetic oligonucleotide
gcggguaacgguacauuga

SEQ ID NO: 483463 - RNA, 19 nt, Artificial Sequence
  Description of Artificial Sequence: Synthetic oligonucleotide
ggggauccagaagaacaca

SEQ ID NO: 483464 - RNA, 19 nt, Artificial Sequence
  Description of Artificial Sequence: Synthetic oligonucleotide
gagcgccguuuuaauuuga

SEQ ID NO: 483465 - RNA, 19 nt, Artificial Sequence
  Description of Artificial Sequence: Synthetic oligonucleotide
ucgcuuggaugugcugcuc

SEQ ID NO: 483466 - RNA, 19 nt, Artificial Sequence
  Description of Artificial Sequence: Synthetic oligonucleotide
ccguaugcuguguauguua

SEQ ID NO: 483467 - RNA, 19 nt, Artificial Sequence
  Description of Artificial Sequence: Synthetic oligonucleotide
cuucuucgaugucuucggu

SEQ ID NO: 483468 - RNA, 19 nt, Artificial Sequence
  Description of Artificial Sequence: Synthetic oligonucleotide
cucgagaguuaggcuuauc

SEQ ID NO: 483469 - RNA, 19 nt, Artificial Sequence
  Description of Artificial Sequence: Synthetic oligonucleotide
ccacuugaguuaucgcuaa

SEQ ID NO: 483470 - RNA, 19 nt, Artificial Sequence
  Description of Artificial Sequence: Synthetic oligonucleotide
gcgcagcuaaaccaugacu

SEQ ID NO: 483471 - RNA, 19 nt, Artificial Sequence
  Description of Artificial Sequence: Synthetic oligonucleotide
gcuuuuggaucgaaucgcu

SEQ ID NO: 483472 - RNA, 19 nt, Artificial Sequence
  Description of Artificial Sequence: Synthetic oligonucleotide
gccauacagaacgguguuc

SEQ ID NO: 483473 - RNA, 19 nt, Artificial Sequence
  Description of Artificial Sequence: Synthetic oligonucleotide
gcugacgcuaucagugcaa

SEQ ID NO: 483474 - RNA, 19 nt, Artificial Sequence
  Description of Artificial Sequence: Synthetic oligonucleotide
gacaugccguaugcugugu

SEQ ID NO: 483475 - RNA, 19 nt, Artificial Sequence
  Description of Artificial Sequence: Synthetic oligonucleotide
gagcaagacuauagaucau

SEQ ID NO: 483476 - RNA, 19 nt, Artificial Sequence
  Description of Artificial Sequence: Synthetic oligonucleotide
gcgccguuuuaauuugagu

SEQ ID NO: 483477 - RNA, 19 nt, Artificial Sequence
  Description of Artificial Sequence: Synthetic oligonucleotide
ccacaagcauucccucaca

SEQ ID NO: 483478 - RNA, 19 nt, Artificial Sequence
  Description of Artificial Sequence: Synthetic oligonucleotide
gccucgagaguuaggcuua

SEQ ID NO: 483479 - RNA, 19 nt, Artificial Sequence
  Description of Artificial Sequence: Synthetic oligonucleotide
aggcgcucguaagcagcau

SEQ ID NO: 483480 - RNA, 19 nt, Artificial Sequence
  Description of Artificial Sequence: Synthetic oligonucleotide
gugcggguaacgguacauu

SEQ ID NO: 483481 - RNA, 19 nt, Artificial Sequence
  Description of Artificial Sequence: Synthetic oligonucleotide
cggguaacgguacauugau

SEQ ID NO: 483482 - RNA, 19 nt, Artificial Sequence
  Description of Artificial Sequence: Synthetic oligonucleotide
gucgaccaucuuugcuuuu

SEQ ID NO: 483483 - RNA, 19 nt, Artificial Sequence
  Description of Artificial Sequence: Synthetic oligonucleotide
ccucgagaguuaggcuuau

SEQ ID NO: 483484 - RNA, 19 nt, Artificial Sequence
  Description of Artificial Sequence: Synthetic oligonucleotide
aagauucuagaauuaaucc

SEQ ID NO: 483485 - RNA, 19 nt, Artificial Sequence
  Description of Artificial Sequence: Synthetic oligonucleotide
agugaaaaguucuaucucc

SEQ ID NO: 483486 - RNA, 19 nt, Artificial Sequence
  Description of Artificial Sequence: Synthetic oligonucleotide
aaaacgucaucauugcaac

SEQ ID NO: 483487 - RNA, 19 nt, Artificial Sequence
  Description of Artificial Sequence: Synthetic oligonucleotide
aaguauaccaaacuaugag

SEQ ID NO: 483488 - RNA, 19 nt, Artificial Sequence
  Description of Artificial Sequence: Synthetic oligonucleotide
aauggcuucggcuacgccg

SEQ ID NO: 483489 - RNA, 19 nt, Artificial Sequence
  Description of Artificial Sequence: Synthetic oligonucleotide
aguaucaugauuuauacua

SEQ ID NO: 483490 - RNA, 19 nt, Artificial Sequence
  Description of Artificial Sequence: Synthetic oligonucleotide
uauaggaccauaacgacca

SEQ ID NO: 483491 - RNA, 19 nt, Artificial Sequence
  Description of Artificial Sequence: Synthetic oligonucleotide
uuauucugaaaugacaccg

SEQ ID NO: 483492 - RNA, 19 nt, Artificial Sequence
  Description of Artificial Sequence: Synthetic oligonucleotide
uaaaugauugcauagcaga

SEQ ID NO: 483493 - RNA, 19 nt, Artificial Sequence
  Description of Artificial Sequence: Synthetic oligonucleotide
auaguuguaaucaaaagag

SEQ ID NO: 483494 - RNA, 19 nt, Artificial Sequence
  Description of Artificial Sequence: Synthetic oligonucleotide
uggauuuagaucuugaaaa

SEQ ID NO: 483495 - RNA, 19 nt, Artificial Sequence
  Description of Artificial Sequence: Synthetic oligonucleotide
ugauuuauacuaucagugg

SEQ ID NO: 483496 - RNA, 19 nt, Artificial Sequence
  Description of Artificial Sequence: Synthetic oligonucleotide
ucuucuauaguuguaauca

SEQ ID NO: 483497 - RNA, 19 nt, Artificial Sequence
  Description of Artificial Sequence: Synthetic oligonucleotide
ucuuacacuaugaauauaa

SEQ ID NO: 483498 - RNA, 19 nt, Artificial Sequence
  Description of Artificial Sequence: Synthetic oligonucleotide
gauuuauacuaucaguggc

SEQ ID NO: 483499 - RNA, 19 nt, Artificial Sequence
  Description of Artificial Sequence: Synthetic oligonucleotide
aucauucuaucuuauuagc

SEQ ID NO: 483500 - RNA, 19 nt, Artificial Sequence
  Description of Artificial Sequence: Synthetic oligonucleotide
acauuaaacaaacuggacu

SEQ ID NO: 483501 - RNA, 19 nt, Artificial Sequence
  Description of Artificial Sequence: Synthetic oligonucleotide
cuacuauaggaccauaacg

SEQ ID NO: 483502 - RNA, 19 nt, Artificial Sequence
  Description of Artificial Sequence: Synthetic oligonucleotide
aaacuaagguguaaagagc

SEQ ID NO: 483503 - RNA, 19 nt, Artificial Sequence
  Description of Artificial Sequence: Synthetic oligonucleotide
uaaaacgucaucauugcaa

SEQ ID NO: 483504 - RNA, 19 nt, Artificial Sequence
  Description of Artificial Sequence: Synthetic oligonucleotide
auaacgaccaaaauucucg

SEQ ID NO: 483505 - RNA, 19 nt, Artificial Sequence
  Description of Artificial Sequence: Synthetic oligonucleotide
uugaaucuaucauugucgg

SEQ ID NO: 483506 - RNA, 19 nt, Artificial Sequence
  Description of Artificial Sequence: Synthetic oligonucleotide
gucuauaucgaucauaguc

SEQ ID NO: 483507 - RNA, 19 nt, Artificial Sequence
  Description of Artificial Sequence: Synthetic oligonucleotide
aguguagaaaucaaguggg

SEQ ID NO: 483508 - RNA, 19 nt, Artificial Sequence
  Description of Artificial Sequence: Synthetic oligonucleotide
cauacuaagugcucuaagc

SEQ ID NO: 483509 - RNA, 19 nt, Artificial Sequence
  Description of Artificial Sequence: Synthetic oligonucleotide
uucuaggacuguaagaucu

SEQ ID NO: 483510 - RNA, 19 nt, Artificial Sequence
  Description of Artificial Sequence: Synthetic oligonucleotide
agaacgucuauaucgauca

SEQ ID NO: 483511 - RNA, 19 nt, Artificial Sequence
  Description of Artificial Sequence: Synthetic oligonucleotide
aucgugaggaacuguauac

SEQ ID NO: 483512 - RNA, 19 nt, Artificial Sequence
  Description of Artificial Sequence: Synthetic oligonucleotide
uuauguuucaaaucuuaga

SEQ ID NO: 483513 - RNA, 19 nt, Artificial Sequence
  Description of Artificial Sequence: Synthetic oligonucleotide
cuagauuuugaccuagacc

SEQ ID NO: 483514 - RNA, 19 nt, Artificial Sequence
  Description of Artificial Sequence: Synthetic oligonucleotide
uauucugaaaugacaccgg

SEQ ID NO: 483515 - RNA, 19 nt, Artificial Sequence
  Description of Artificial Sequence: Synthetic oligonucleotide
cuugaauuggauuuagauc

SEQ ID NO: 483516 - RNA, 19 nt, Artificial Sequence
  Description of Artificial Sequence: Synthetic oligonucleotide
aacauuaaacaaacuggac

SEQ ID NO: 483517 - RNA, 19 nt, Artificial Sequence
  Description of Artificial Sequence: Synthetic oligonucleotide
aaaauuucacggcaccaca

SEQ ID NO: 483518 - RNA, 19 nt, Artificial Sequence
  Description of Artificial Sequence: Synthetic oligonucleotide
uaaguauaccaaacuauga

SEQ ID NO: 483519 - RNA, 19 nt, Artificial Sequence
  Description of Artificial Sequence: Synthetic oligonucleotide
aguauaccaaacuaugagu

SEQ ID NO: 483520 - RNA, 19 nt, Artificial Sequence
  Description of Artificial Sequence: Synthetic oligonucleotide
uaacaguucuaccaaauau

SEQ ID NO: 483521 - RNA, 19 nt, Artificial Sequence
  Description of Artificial Sequence: Synthetic oligonucleotide
aacaguucuaccaaauaug

SEQ ID NO: 483522 - RNA, 19 nt, Artificial Sequence
  Description of Artificial Sequence: Synthetic oligonucleotide
uaccaaauauggauuauga

SEQ ID NO: 483523 - RNA, 19 nt, Artificial Sequence
  Description of Artificial Sequence: Synthetic oligonucleotide
ucuacuauaggaccauaac

SEQ ID NO: 483524 - RNA, 19 nt, Artificial Sequence
  Description of Artificial Sequence: Synthetic oligonucleotide
ucugccacguuccugacga

SEQ ID NO: 483525 - RNA, 19 nt, Artificial Sequence
  Description of Artificial Sequence: Synthetic oligonucleotide
aaaauacuauuuaacccag

SEQ ID NO: 483526 - RNA, 19 nt, Artificial Sequence
  Description of Artificial Sequence: Synthetic oligonucleotide
acguaaaaucuucagaccu

SEQ ID NO: 483527 - RNA, 19 nt, Artificial Sequence
  Description of Artificial Sequence: Synthetic oligonucleotide
uaugcaaauccucuuggac

SEQ ID NO: 483528 - RNA, 19 nt, Artificial Sequence
  Description of Artificial Sequence: Synthetic oligonucleotide
aauuaauccuccaaacaca

SEQ ID NO: 483529 - RNA, 19 nt, Artificial Sequence
  Description of Artificial Sequence: Synthetic oligonucleotide
auacuaagugcucuaagca

SEQ ID NO: 483530 - RNA, 19 nt, Artificial Sequence
  Description of Artificial Sequence: Synthetic oligonucleotide
aacgaccaaaauucucgac

SEQ ID NO: 483531 - RNA, 19 nt, Artificial Sequence
  Description of Artificial Sequence: Synthetic oligonucleotide
uuguuguuuaaacuauaca

SEQ ID NO: 483532 - RNA, 19 nt, Artificial Sequence
  Description of Artificial Sequence: Synthetic oligonucleotide
aucuucuauaguuguaauc

SEQ ID NO: 483533 - RNA, 19 nt, Artificial Sequence
  Description of Artificial Sequence: Synthetic oligonucleotide
uagaacgugauuuagccuu

SEQ ID NO: 483534 - RNA, 19 nt, Artificial Sequence
  Description of Artificial Sequence: Synthetic oligonucleotide
ugaucaacgauaguuaaau

SEQ ID NO: 483535 - RNA, 19 nt, Artificial Sequence
  Description of Artificial Sequence: Synthetic oligonucleotide
uauggauuaugaaaauuua

SEQ ID NO: 483536 - RNA, 19 nt, Artificial Sequence
  Description of Artificial Sequence: Synthetic oligonucleotide
uauacuaucaguggccacu

SEQ ID NO: 483537 - RNA, 19 nt, Artificial Sequence
  Description of Artificial Sequence: Synthetic oligonucleotide
uaaucaaaagagcgacucc

SEQ ID NO: 483538 - RNA, 19 nt, Artificial Sequence
  Description of Artificial Sequence: Synthetic oligonucleotide
gaaucuaucauugucggaa

SEQ ID NO: 483539 - RNA, 19 nt, Artificial Sequence
  Description of Artificial Sequence: Synthetic oligonucleotide
gacguaaaaucuucagacc

SEQ ID NO: 483540 - RNA, 19 nt, Artificial Sequence
  Description of Artificial Sequence: Synthetic oligonucleotide
uuccugacgaacagagacg

SEQ ID NO: 483541 - RNA, 19 nt, Artificial Sequence
  Description of Artificial Sequence: Synthetic oligonucleotide
cuugacugagauuuggauc

SEQ ID NO: 483542 - RNA, 19 nt, Artificial Sequence
  Description of Artificial Sequence: Synthetic oligonucleotide
auaaaguaauccucuagaa

SEQ ID NO: 483543 - RNA, 19 nt, Artificial Sequence
  Description of Artificial Sequence: Synthetic oligonucleotide
uuaauaagacaauguugca

SEQ ID NO: 483544 - RNA, 19 nt, Artificial Sequence
  Description of Artificial Sequence: Synthetic oligonucleotide
aacgauaguuaaauuuuag

SEQ ID NO: 483545 - RNA, 19 nt, Artificial Sequence
  Description of Artificial Sequence: Synthetic oligonucleotide
uucacggcaccacagaauc

SEQ ID NO: 483546 - RNA, 19 nt, Artificial Sequence
  Description of Artificial Sequence: Synthetic oligonucleotide
acgauaguuaaauuuuaga

SEQ ID NO: 483547 - RNA, 19 nt, Artificial Sequence
  Description of Artificial Sequence: Synthetic oligonucleotide
uaaagagcaagccucccuc

SEQ ID NO: 483548 - RNA, 19 nt, Artificial Sequence
  Description of Artificial Sequence: Synthetic oligonucleotide
aaguaucaugauuuauacu

SEQ ID NO: 483549 - RNA, 19 nt, Artificial Sequence
  Description of Artificial Sequence: Synthetic oligonucleotide
auuucaauuugacgcccac

SEQ ID NO: 483550 - RNA, 19 nt, Artificial Sequence
  Description of Artificial Sequence: Synthetic oligonucleotide
auuuuagucauguccuaca

SEQ ID NO: 483551 - RNA, 19 nt, Artificial Sequence
  Description of Artificial Sequence: Synthetic oligonucleotide
uuuauacuaucaguggcca

SEQ ID NO: 483552 - RNA, 19 nt, Artificial Sequence
  Description of Artificial Sequence: Synthetic oligonucleotide
cgauaguuaaauuuuagag

SEQ ID NO: 483553 - RNA, 19 nt, Artificial Sequence
  Description of Artificial Sequence: Synthetic oligonucleotide
agaaacgugcauauaaaug

SEQ ID NO: 483554 - RNA, 19 nt, Artificial Sequence
  Description of Artificial Sequence: Synthetic oligonucleotide
aacgucaucauugcaacau

SEQ ID NO: 483555 - RNA, 19 nt, Artificial Sequence
  Description of Artificial Sequence: Synthetic oligonucleotide
aaagagcgacuccuugauc

SEQ ID NO: 483556 - RNA, 19 nt, Artificial Sequence
  Description of Artificial Sequence: Synthetic oligonucleotide
aacgaucuugaagagaaau

SEQ ID NO: 483557 - RNA, 19 nt, Artificial Sequence
  Description of Artificial Sequence: Synthetic oligonucleotide
uaaggguauaucacuuucu

SEQ ID NO: 483558 - RNA, 19 nt, Artificial Sequence
  Description of Artificial Sequence: Synthetic oligonucleotide
uguaaucaaaagagcgacu

SEQ ID NO: 483559 - RNA, 19 nt, Artificial Sequence
  Description of Artificial Sequence: Synthetic oligonucleotide
acgucuauaucgaucauag

SEQ ID NO: 483560 - RNA, 19 nt, Artificial Sequence
  Description of Artificial Sequence: Synthetic oligonucleotide
aaauuucacggcaccacag

SEQ ID NO: 483561 - RNA, 19 nt, Artificial Sequence
  Description of Artificial Sequence: Synthetic oligonucleotide
cuagguuaacaguucuacc

SEQ ID NO: 483562 - RNA, 19 nt, Artificial Sequence
  Description of Artificial Sequence: Synthetic oligonucleotide
guaaucaaaagagcgacuc

SEQ ID NO: 483563 - RNA, 19 nt, Artificial Sequence
  Description of Artificial Sequence: Synthetic oligonucleotide
ucgguguuugaaucuauca

SEQ ID NO: 483564 - RNA, 19 nt, Artificial Sequence
  Description of Artificial Sequence: Synthetic oligonucleotide
acauacuaagugcucuaag

SEQ ID NO: 483565 - RNA, 19 nt, Artificial Sequence
  Description of Artificial Sequence: Synthetic oligonucleotide
ccuagaacgugauuuagcc

SEQ ID NO: 483566 - RNA, 19 nt, Artificial Sequence
  Description of Artificial Sequence: Synthetic oligonucleotide
cuagaaaguaucaugauuu

SEQ ID NO: 483567 - RNA, 19 nt, Artificial Sequence
  Description of Artificial Sequence: Synthetic oligonucleotide
uuuugaccuagaccuagac

SEQ ID NO: 483568 - RNA, 19 nt, Artificial Sequence
  Description of Artificial Sequence: Synthetic oligonucleotide
uuagcaagcuacauuucua

SEQ ID NO: 483569 - RNA, 19 nt, Artificial Sequence
  Description of Artificial Sequence: Synthetic oligonucleotide
uucucgacguaaaaucuuc

SEQ ID NO: 483570 - RNA, 19 nt, Artificial Sequence
  Description of Artificial Sequence: Synthetic oligonucleotide
uauuucaauuugacgccca

SEQ ID NO: 483571 - RNA, 19 nt, Artificial Sequence
  Description of Artificial Sequence: Synthetic oligonucleotide
cuggacuugggacuagucc

SEQ ID NO: 483572 - RNA, 19 nt, Artificial Sequence
  Description of Artificial Sequence: Synthetic oligonucleotide
cauaacgaccaaaauucuc

SEQ ID NO: 483573 - RNA, 19 nt, Artificial Sequence
  Description of Artificial Sequence: Synthetic oligonucleotide
uuagaggugccucuaguuu

SEQ ID NO: 483574 - RNA, 19 nt, Artificial Sequence
  Description of Artificial Sequence: Synthetic oligonucleotide
ugacuugccuacauuaauu

SEQ ID NO: 483575 - RNA, 19 nt, Artificial Sequence
  Description of Artificial Sequence: Synthetic oligonucleotide
uaucgugaggaacuguaua

SEQ ID NO: 483576 - RNA, 19 nt, Artificial Sequence
  Description of Artificial Sequence: Synthetic oligonucleotide
uucuaccaaauauggauua

SEQ ID NO: 483577 - RNA, 19 nt, Artificial Sequence
  Description of Artificial Sequence: Synthetic oligonucleotide
uuuagaggugccucuaguu

SEQ ID NO: 483578 - RNA, 19 nt, Artificial Sequence
  Description of Artificial Sequence: Synthetic oligonucleotide
uguugcaaauuauggucac

SEQ ID NO: 483579 - RNA, 19 nt, Artificial Sequence
  Description of Artificial Sequence: Synthetic oligonucleotide
cuaucauugucggaauggc

SEQ ID NO: 483580 - RNA, 19 nt, Artificial Sequence
  Description of Artificial Sequence: Synthetic oligonucleotide
ugcacauacuaagugcucu

SEQ ID NO: 483581 - RNA, 19 nt, Artificial Sequence
  Description of Artificial Sequence: Synthetic oligonucleotide
aagugcucuaagcaucaaa

SEQ ID NO: 483582 - RNA, 19 nt, Artificial Sequence
  Description of Artificial Sequence: Synthetic oligonucleotide
acgaaaguuagaaauacua

SEQ ID NO: 483583 - RNA, 19 nt, Artificial Sequence
  Description of Artificial Sequence: Synthetic oligonucleotide
accaaauauggauuaugaa

SEQ ID NO: 483584 - RNA, 19 nt, Artificial Sequence
  Description of Artificial Sequence: Synthetic oligonucleotide
ugucggaauggcuucggcu

SEQ ID NO: 483585 - RNA, 19 nt, Artificial Sequence
  Description of Artificial Sequence: Synthetic oligonucleotide
aaacgucaucauugcaaca

SEQ ID NO: 483586 - RNA, 19 nt, Artificial Sequence
  Description of Artificial Sequence: Synthetic oligonucleotide
guuggucuacuguuucuag

SEQ ID NO: 483587 - RNA, 19 nt, Artificial Sequence
  Description of Artificial Sequence: Synthetic oligonucleotide
aacgaaaguuagaaauacu

SEQ ID NO: 483588 - RNA, 19 nt, Artificial Sequence
  Description of Artificial Sequence: Synthetic oligonucleotide
gaaacgaaaguuagaaaua

SEQ ID NO: 483589 - RNA, 19 nt, Artificial Sequence
  Description of Artificial Sequence: Synthetic oligonucleotide
ugaaucuaucauugucgga

SEQ ID NO: 483590 - RNA, 19 nt, Artificial Sequence
  Description of Artificial Sequence: Synthetic oligonucleotide
agguuaacaguucuaccaa

SEQ ID NO: 483591 - RNA, 19 nt, Artificial Sequence
  Description of Artificial Sequence: Synthetic oligonucleotide
agucaguguuguaaugugg

SEQ ID NO: 483592 - RNA, 19 nt, Artificial Sequence
  Description of Artificial Sequence: Synthetic oligonucleotide
cuaccaaauauggauuaug

SEQ ID NO: 483593 - RNA, 19 nt, Artificial Sequence
  Description of Artificial Sequence: Synthetic oligonucleotide
uguaucauucuaucuuauu

SEQ ID NO: 483594 - RNA, 19 nt, Artificial Sequence
  Description of Artificial Sequence: Synthetic oligonucleotide
gaccauaacgaccaaaauu

SEQ ID NO: 483595 - RNA, 19 nt, Artificial Sequence
  Description of Artificial Sequence: Synthetic oligonucleotide
cgacguaaaaucuucagac

SEQ ID NO: 483596 - RNA, 19 nt, Artificial Sequence
  Description of Artificial Sequence: Synthetic oligonucleotide
gacucuuaagaguggcuuc

SEQ ID NO: 483597 - RNA, 19 nt, Artificial Sequence
  Description of Artificial Sequence: Synthetic oligonucleotide
uccugacgaacagagacgu

SEQ ID NO: 483598 - RNA, 19 nt, Artificial Sequence
  Description of Artificial Sequence: Synthetic oligonucleotide
uuucacggcaccacagaau

SEQ ID NO: 483599 - RNA, 19 nt, Artificial Sequence
  Description of Artificial Sequence: Synthetic oligonucleotide
auaaccauugccggguaca

SEQ ID NO: 483600 - RNA, 19 nt, Artificial Sequence
  Description of Artificial Sequence: Synthetic oligonucleotide
aaacgugcauauaaaugau

SEQ ID NO: 483601 - RNA, 19 nt, Artificial Sequence
  Description of Artificial Sequence: Synthetic oligonucleotide
agaucgauuucgguguuug

SEQ ID NO: 483602 - RNA, 19 nt, Artificial Sequence
  Description of Artificial Sequence: Synthetic oligonucleotide
ugcgaacuguauuucaauu

SEQ ID NO: 483603 - RNA, 19 nt, Artificial Sequence
  Description of Artificial Sequence: Synthetic oligonucleotide
ucaucguaucgugaggaac

SEQ ID NO: 483604 - RNA, 19 nt, Artificial Sequence
  Description of Artificial Sequence: Synthetic oligonucleotide
ucaauuugacgcccacaaa

SEQ ID NO: 483605 - RNA, 19 nt, Artificial Sequence
  Description of Artificial Sequence: Synthetic oligonucleotide
gagaacgucuauaucgauc

SEQ ID NO: 483606 - RNA, 19 nt, Artificial Sequence
  Description of Artificial Sequence: Synthetic oligonucleotide
agucaucguaucgugagga

SEQ ID NO: 483607 - RNA, 19 nt, Artificial Sequence
  Description of Artificial Sequence: Synthetic oligonucleotide
caaugaucaacgauaguua

SEQ ID NO: 483608 - RNA, 19 nt, Artificial Sequence
  Description of Artificial Sequence: Synthetic oligonucleotide
uucggcuacgccguggucu

SEQ ID NO: 483609 - RNA, 19 nt, Artificial Sequence
  Description of Artificial Sequence: Synthetic oligonucleotide
uccuugauuccuuuucaua

SEQ ID NO: 483610 - RNA, 19 nt, Artificial Sequence
  Description of Artificial Sequence: Synthetic oligonucleotide
uucgguguuugaaucuauc

SEQ ID NO: 483611 - RNA, 19 nt, Artificial Sequence
  Description of Artificial Sequence: Synthetic oligonucleotide
aacgucuauaucgaucaua

SEQ ID NO: 483612 - RNA, 19 nt, Artificial Sequence
  Description of Artificial Sequence: Synthetic oligonucleotide
uuauacuaucaguggccac

SEQ ID NO: 483613 - RNA, 19 nt, Artificial Sequence
  Description of Artificial Sequence: Synthetic oligonucleotide
cucuagaaggaucgucccc

SEQ ID NO: 483614 - RNA, 19 nt, Artificial Sequence
  Description of Artificial Sequence: Synthetic oligonucleotide
uuauugccuccaaacgauc

SEQ ID NO: 483615 - RNA, 19 nt, Artificial Sequence
  Description of Artificial Sequence: Synthetic oligonucleotide
auggauuaugaaaauuuau

SEQ ID NO: 483616 - RNA, 19 nt, Artificial Sequence
  Description of Artificial Sequence: Synthetic oligonucleotide
gaccgugaucuugaauugg

SEQ ID NO: 483617 - RNA, 19 nt, Artificial Sequence
  Description of Artificial Sequence: Synthetic oligonucleotide
aucauugucggaauggcuu

SEQ ID NO: 483618 - RNA, 19 nt, Artificial Sequence
  Description of Artificial Sequence: Synthetic oligonucleotide
uuggacgucgaguguagaa

SEQ ID NO: 483619 - RNA, 19 nt, Artificial Sequence
  Description of Artificial Sequence: Synthetic oligonucleotide
accaaacuaugaguaaaug

SEQ ID NO: 483620 - RNA, 19 nt, Artificial Sequence
  Description of Artificial Sequence: Synthetic oligonucleotide
gacgaacagagacguguug

SEQ ID NO: 483621 - RNA, 19 nt, Artificial Sequence
  Description of Artificial Sequence: Synthetic oligonucleotide
acuugccuacauuaauuaa

SEQ ID NO: 483622 - RNA, 19 nt, Artificial Sequence
  Description of Artificial Sequence: Synthetic oligonucleotide
cuccacucacuucuguaag

SEQ ID NO: 483623 - RNA, 19 nt, Artificial Sequence
  Description of Artificial Sequence: Synthetic oligonucleotide
guagcugcccauaacauua

SEQ ID NO: 483624 - RNA, 19 nt, Artificial Sequence
  Description of Artificial Sequence: Synthetic oligonucleotide
ggaaacuaacaaguguuug

SEQ ID NO: 483625 - RNA, 19 nt, Artificial Sequence
  Description of Artificial Sequence: Synthetic oligonucleotide
aaagaucgauuucgguguu

SEQ ID NO: 483626 - RNA, 19 nt, Artificial Sequence
  Description of Artificial Sequence: Synthetic oligonucleotide
aaccauugccggguacagg

SEQ ID NO: 483627 - RNA, 19 nt, Artificial Sequence
  Description of Artificial Sequence: Synthetic oligonucleotide
aggaccauaacgaccaaaa

SEQ ID NO: 483628 - RNA, 19 nt, Artificial Sequence
  Description of Artificial Sequence: Synthetic oligonucleotide
gaacuguauuucaauuuga

SEQ ID NO: 483629 - RNA, 19 nt, Artificial Sequence
  Description of Artificial Sequence: Synthetic oligonucleotide
caauuugacgcccacaaau

SEQ ID NO: 483630 - RNA, 19 nt, Artificial Sequence
  Description of Artificial Sequence: Synthetic oligonucleotide
uggacgucgaguguagaaa

SEQ ID NO: 483631 - RNA, 19 nt, Artificial Sequence
  Description of Artificial Sequence: Synthetic oligonucleotide
ugggauacaaaugcacaua

SEQ ID NO: 483632 - RNA, 19 nt, Artificial Sequence
  Description of Artificial Sequence: Synthetic oligonucleotide
acgugauuuagccuucauu

SEQ ID NO: 483633 - RNA, 19 nt, Artificial Sequence
  Description of Artificial Sequence: Synthetic oligonucleotide
ucggaauggcuucggcuac

SEQ ID NO: 483634 - RNA, 19 nt, Artificial Sequence
  Description of Artificial Sequence: Synthetic oligonucleotide
agaccuagaacgugauuua

SEQ ID NO: 483635 - RNA, 19 nt, Artificial Sequence
  Description of Artificial Sequence: Synthetic oligonucleotide
ucuaggacuguaagaucuu

SEQ ID NO: 483636 - RNA, 19 nt, Artificial Sequence
  Description of Artificial Sequence: Synthetic oligonucleotide
auugucggaauggcuucgg

SEQ ID NO: 483637 - RNA, 19 nt, Artificial Sequence
  Description of Artificial Sequence: Synthetic oligonucleotide
ugacgaacagagacguguu

SEQ ID NO: 483638 - RNA, 19 nt, Artificial Sequence
  Description of Artificial Sequence: Synthetic oligonucleotide
gucggaauggcuucggcua

SEQ ID NO: 483639 - RNA, 19 nt, Artificial Sequence
  Description of Artificial Sequence: Synthetic oligonucleotide
ugccuccaaacgaucuuga

SEQ ID NO: 483640 - RNA, 19 nt, Artificial Sequence
  Description of Artificial Sequence: Synthetic oligonucleotide
uuucgguguuugaaucuau

SEQ ID NO: 483641 - RNA, 19 nt, Artificial Sequence
  Description of Artificial Sequence: Synthetic oligonucleotide
agaacgugauuuagccuuc

SEQ ID NO: 483642 - RNA, 19 nt, Artificial Sequence
  Description of Artificial Sequence: Synthetic oligonucleotide
caucguaucgugaggaacu

SEQ ID NO: 483643 - RNA, 19 nt, Artificial Sequence
  Description of Artificial Sequence: Synthetic oligonucleotide
cgaacuguauuucaauuug

SEQ ID NO: 483644 - RNA, 19 nt, Artificial Sequence
  Description of Artificial Sequence: Synthetic oligonucleotide
uuauaaccauugccgggua

SEQ ID NO: 483645 - RNA, 19 nt, Artificial Sequence
  Description of Artificial Sequence: Synthetic oligonucleotide
auugccuccaaacgaucuu

SEQ ID NO: 483646 - RNA, 19 nt, Artificial Sequence
  Description of Artificial Sequence: Synthetic oligonucleotide
gugugagaugcagaccuag

SEQ ID NO: 483647 - RNA, 19 nt, Artificial Sequence
  Description of Artificial Sequence: Synthetic oligonucleotide
cauugucggaauggcuucg

SEQ ID NO: 483648 - RNA, 19 nt, Artificial Sequence
  Description of Artificial Sequence: Synthetic oligonucleotide
ugccucuaguuuuggugug

SEQ ID NO: 483649 - RNA, 19 nt, Artificial Sequence
  Description of Artificial Sequence: Synthetic oligonucleotide
uguuuuagaggugccucua

SEQ ID NO: 483650 - RNA, 19 nt, Artificial Sequence
  Description of Artificial Sequence: Synthetic oligonucleotide
aacgugcauauaaaugauu

SEQ ID NO: 483651 - RNA, 19 nt, Artificial Sequence
  Description of Artificial Sequence: Synthetic oligonucleotide
ugcagaccuagaacgugau

SEQ ID NO: 483652 - RNA, 19 nt, Artificial Sequence
  Description of Artificial Sequence: Synthetic oligonucleotide
ggaacuguauacauuccuc

SEQ ID NO: 483653 - RNA, 19 nt, Artificial Sequence
  Description of Artificial Sequence: Synthetic oligonucleotide
ucacggcaccacagaauca

SEQ ID NO: 483654 - RNA, 19 nt, Artificial Sequence
  Description of Artificial Sequence: Synthetic oligonucleotide
aucuacuauaggaccauaa

SEQ ID NO: 483655 - RNA, 19 nt, Artificial Sequence
  Description of Artificial Sequence: Synthetic oligonucleotide
gacaccggacauuucaaau

SEQ ID NO: 483656 - RNA, 19 nt, Artificial Sequence
  Description of Artificial Sequence: Synthetic oligonucleotide
cuuagaaaccagcggggaa

SEQ ID NO: 483657 - RNA, 19 nt, Artificial Sequence
  Description of Artificial Sequence: Synthetic oligonucleotide
agacugugaucuugacuga

SEQ ID NO: 483658 - RNA, 19 nt, Artificial Sequence
  Description of Artificial Sequence: Synthetic oligonucleotide
aaccaucuuuuguucucua

SEQ ID NO: 483659 - RNA, 19 nt, Artificial Sequence
  Description of Artificial Sequence: Synthetic oligonucleotide
cuaucuuauuagcaagcua

SEQ ID NO: 483660 - RNA, 19 nt, Artificial Sequence
  Description of Artificial Sequence: Synthetic oligonucleotide
gaccuagaccuagacugug

SEQ ID NO: 483661 - RNA, 19 nt, Artificial Sequence
  Description of Artificial Sequence: Synthetic oligonucleotide
cuucucaacagcauaucau

SEQ ID NO: 483662 - RNA, 19 nt, Artificial Sequence
  Description of Artificial Sequence: Synthetic oligonucleotide
acauuguauuccugauaau

SEQ ID NO: 483663 - RNA, 19 nt, Artificial Sequence
  Description of Artificial Sequence: Synthetic oligonucleotide
gaauggcuucggcuacgcc

SEQ ID NO: 483664 - RNA, 19 nt, Artificial Sequence
  Description of Artificial Sequence: Synthetic oligonucleotide
cuaugaguaaaugaaugau

SEQ ID NO: 483665 - RNA, 19 nt, Artificial Sequence
  Description of Artificial Sequence: Synthetic oligonucleotide
cuaggacuguaagaucuuc

SEQ ID NO: 483666 - RNA, 19 nt, Artificial Sequence
  Description of Artificial Sequence: Synthetic oligonucleotide
cguaaaaucuucagaccug

SEQ ID NO: 483667 - RNA, 19 nt, Artificial Sequence
  Description of Artificial Sequence: Synthetic oligonucleotide
aucguaucgugaggaacug

SEQ ID NO: 483668 - RNA, 19 nt, Artificial Sequence
  Description of Artificial Sequence: Synthetic oligonucleotide
acaugccuagaaaguauca

SEQ ID NO: 483669 - RNA, 19 nt, Artificial Sequence
  Description of Artificial Sequence: Synthetic oligonucleotide
cugacgaacagagacgugu

SEQ ID NO: 483670 - RNA, 19 nt, Artificial Sequence
  Description of Artificial Sequence: Synthetic oligonucleotide
auggcuucggcuacgccgu

SEQ ID NO: 483671 - RNA, 19 nt, Artificial Sequence
  Description of Artificial Sequence: Synthetic oligonucleotide
auucucgacguaaaaucuu

SEQ ID NO: 483672 - RNA, 19 nt, Artificial Sequence
  Description of Artificial Sequence: Synthetic oligonucleotide
acgucaucauugcaacauu

SEQ ID NO: 483673 - RNA, 19 nt, Artificial Sequence
  Description of Artificial Sequence: Synthetic oligonucleotide
gaggugccucuaguuuugg

SEQ ID NO: 483674 - RNA, 19 nt, Artificial Sequence
  Description of Artificial Sequence: Synthetic oligonucleotide
cuagaacgugauuuagccu

SEQ ID NO: 483675 - RNA, 19 nt, Artificial Sequence
  Description of Artificial Sequence: Synthetic oligonucleotide
aagaucgauuucgguguuu

SEQ ID NO: 483676 - RNA, 19 nt, Artificial Sequence
  Description of Artificial Sequence: Synthetic oligonucleotide
ucguaucgugaggaacugu

SEQ ID NO: 483677 - RNA, 19 nt, Artificial Sequence
  Description of Artificial Sequence: Synthetic oligonucleotide
gaccaaaauucucgacgua

SEQ ID NO: 483678 - RNA, 19 nt, Artificial Sequence
  Description of Artificial Sequence: Synthetic oligonucleotide
ucggcuacgccguggucuu

SEQ ID NO: 483679 - RNA, 19 nt, Artificial Sequence
  Description of Artificial Sequence: Synthetic oligonucleotide
gucaucguaucgugaggaa

SEQ ID NO: 483680 - RNA, 19 nt, Artificial Sequence
  Description of Artificial Sequence: Synthetic oligonucleotide
cauugccggguacagggaa

SEQ ID NO: 483681 - RNA, 19 nt, Artificial Sequence
  Description of Artificial Sequence: Synthetic oligonucleotide
gaccuggugucgucugcca

SEQ ID NO: 483682 - RNA, 19 nt, Artificial Sequence
  Description of Artificial Sequence: Synthetic oligonucleotide
gaacgugauuuagccuuca

SEQ ID NO: 483683 - RNA, 19 nt, Artificial Sequence
  Description of Artificial Sequence: Synthetic oligonucleotide
uuccccgucugagcaguca

SEQ ID NO: 483684 - RNA, 19 nt, Artificial Sequence
  Description of Artificial Sequence: Synthetic oligonucleotide
cucuaguuuuggugugaga

SEQ ID NO: 483685 - RNA, 19 nt, Artificial Sequence
  Description of Artificial Sequence: Synthetic oligonucleotide
cuacgccguggucuuccag

SEQ ID NO: 483686 - RNA, 19 nt, Artificial Sequence
  Description of Artificial Sequence: Synthetic oligonucleotide
ccgagaacgucuauaucga

SEQ ID NO: 483687 - RNA, 19 nt, Artificial Sequence
  Description of Artificial Sequence: Synthetic oligonucleotide
cuguauacauuccucccuu

SEQ ID NO: 483688 - RNA, 19 nt, Artificial Sequence
  Description of Artificial Sequence: Synthetic oligonucleotide
agcaagccucccucaugaa

SEQ ID NO: 483689 - RNA, 19 nt, Artificial Sequence
  Description of Artificial Sequence: Synthetic oligonucleotide
agaaaucaagugggacaua

SEQ ID NO: 483690 - RNA, 19 nt, Artificial Sequence
  Description of Artificial Sequence: Synthetic oligonucleotide
ccucuaguuuuggugugag

SEQ ID NO: 483691 - RNA, 19 nt, Artificial Sequence
  Description of Artificial Sequence: Synthetic oligonucleotide
ggcaccacagaaucaccua

SEQ ID NO: 483692 - RNA, 19 nt, Artificial Sequence
  Description of Artificial Sequence: Synthetic oligonucleotide
ggacgucgaguguagaaau

SEQ ID NO: 483693 - RNA, 19 nt, Artificial Sequence
  Description of Artificial Sequence: Synthetic oligonucleotide
uuaacccaguuggcaucau

SEQ ID NO: 483694 - RNA, 19 nt, Artificial Sequence
  Description of Artificial Sequence: Synthetic oligonucleotide
ugccggguacagggaaacu

SEQ ID NO: 483695 - RNA, 19 nt, Artificial Sequence
  Description of Artificial Sequence: Synthetic oligonucleotide
ggaucuaggugguucuuuu

SEQ ID NO: 483696 - RNA, 19 nt, Artificial Sequence
  Description of Artificial Sequence: Synthetic oligonucleotide
uggcuucggcuacgccgug

SEQ ID NO: 483697 - RNA, 19 nt, Artificial Sequence
  Description of Artificial Sequence: Synthetic oligonucleotide
guaucgugaggaacuguau

SEQ ID NO: 483698 - RNA, 19 nt, Artificial Sequence
  Description of Artificial Sequence: Synthetic oligonucleotide
gaacgucuauaucgaucau

SEQ ID NO: 483699 - RNA, 19 nt, Artificial Sequence
  Description of Artificial Sequence: Synthetic oligonucleotide
ccggguacagggaaacuaa

SEQ ID NO: 483700 - RNA, 19 nt, Artificial Sequence
  Description of Artificial Sequence: Synthetic oligonucleotide
ccugugcgaacuguauuuc

SEQ ID NO: 483701 - RNA, 19 nt, Artificial Sequence
  Description of Artificial Sequence: Synthetic oligonucleotide
accggacauuucaaaucau

SEQ ID NO: 483702 - RNA, 19 nt, Artificial Sequence
  Description of Artificial Sequence: Synthetic oligonucleotide
ggcuucggcuacgccgugg

SEQ ID NO: 483703 - RNA, 19 nt, Artificial Sequence
  Description of Artificial Sequence: Synthetic oligonucleotide
cuuggacgucgaguguaga

SEQ ID NO: 483704 - RNA, 19 nt, Artificial Sequence
  Description of Artificial Sequence: Synthetic oligonucleotide
ggaccauaacgaccaaaau

SEQ ID NO: 483705 - RNA, 19 nt, Artificial Sequence
  Description of Artificial Sequence: Synthetic oligonucleotide
ccugacgaacagagacgug

SEQ ID NO: 483706 - RNA, 19 nt, Artificial Sequence
  Description of Artificial Sequence: Synthetic oligonucleotide
cgaccaaaauucucgacgu

SEQ ID NO: 483707 - RNA, 19 nt, Artificial Sequence
  Description of Artificial Sequence: Synthetic oligonucleotide
cggguacagggaaacuaac

SEQ ID NO: 483708 - RNA, 19 nt, Artificial Sequence
  Description of Artificial Sequence: Synthetic oligonucleotide
cauuccccgucugagcagu

SEQ ID NO: 483709 - RNA, 19 nt, Artificial Sequence
  Description of Artificial Sequence: Synthetic oligonucleotide
ccauaacgaccaaaauucu

SEQ ID NO: 483710 - RNA, 19 nt, Artificial Sequence
  Description of Artificial Sequence: Synthetic oligonucleotide
gccggguacagggaaacua

SEQ ID NO: 483711 - RNA, 19 nt, Artificial Sequence
  Description of Artificial Sequence: Synthetic oligonucleotide
gccucuaguuuugguguga

SEQ ID NO: 483712 - RNA, 19 nt, Artificial Sequence
  Description of Artificial Sequence: Synthetic oligonucleotide
cuggugucgucugccacgu

SEQ ID NO: 483713 - RNA, 19 nt, Artificial Sequence
  Description of Artificial Sequence: Synthetic oligonucleotide
cgugaucuugaauuggauu

SEQ ID NO: 483714 - RNA, 19 nt, Artificial Sequence
  Description of Artificial Sequence: Synthetic oligonucleotide
cccugugcgaacuguauuu

SEQ ID NO: 483715 - RNA, 19 nt, Artificial Sequence
  Description of Artificial Sequence: Synthetic oligonucleotide
uggugucgucugccacguu

SEQ ID NO: 483716 - RNA, 19 nt, Artificial Sequence
  Description of Artificial Sequence: Synthetic oligonucleotide
cggaauggcuucggcuacg

SEQ ID NO: 483717 - RNA, 19 nt, Artificial Sequence
  Description of Artificial Sequence: Synthetic oligonucleotide
gcugggacuuggaccguga

SEQ ID NO: 483718 - RNA, 19 nt, Artificial Sequence
  Description of Artificial Sequence: Synthetic oligonucleotide
gcuacgccguggucuucca

SEQ ID NO: 483719 - RNA, 19 nt, Artificial Sequence
  Description of Artificial Sequence: Synthetic oligonucleotide
gcuaagugauguggcuuuu

SEQ ID NO: 483720 - RNA, 19 nt, Artificial Sequence
  Description of Artificial Sequence: Synthetic oligonucleotide
ccgucugagcagucagugu

SEQ ID NO: 483721 - RNA, 19 nt, Artificial Sequence
  Description of Artificial Sequence: Synthetic oligonucleotide
gggacuaguccaagaccuu

SEQ ID NO: 483722 - RNA, 19 nt, Artificial Sequence
  Description of Artificial Sequence: Synthetic oligonucleotide
cgucuauaucgaucauagu

SEQ ID NO: 483723 - RNA, 19 nt, Artificial Sequence
  Description of Artificial Sequence: Synthetic oligonucleotide
ccccugugcgaacuguauu

SEQ ID NO: 483724 - RNA, 19 nt, Artificial Sequence
  Description of Artificial Sequence: Synthetic oligonucleotide
cggcuacgccguggucuuc

SEQ ID NO: 483725 - RNA, 19 nt, Artificial Sequence
  Description of Artificial Sequence: Synthetic oligonucleotide
aauuuauuagaacagucgc

SEQ ID NO: 483726 - RNA, 19 nt, Artificial Sequence
  Description of Artificial Sequence: Synthetic oligonucleotide
uuuugaauaacauuaguag

SEQ ID NO: 483727 - RNA, 19 nt, Artificial Sequence
  Description of Artificial Sequence: Synthetic oligonucleotide
uugaauaacauuaguagag

SEQ ID NO: 483728 - RNA, 19 nt, Artificial Sequence
  Description of Artificial Sequence: Synthetic oligonucleotide
aacaccuaaacacagaaga

SEQ ID NO: 483729 - RNA, 19 nt, Artificial Sequence
  Description of Artificial Sequence: Synthetic oligonucleotide
uauaggacuauaaauagca

SEQ ID NO: 483730 - RNA, 19 nt, Artificial Sequence
  Description of Artificial Sequence: Synthetic oligonucleotide
ggaacaaucauuaaaaugg

SEQ ID NO: 483731 - RNA, 19 nt, Artificial Sequence
  Description of Artificial Sequence: Synthetic oligonucleotide
aauaauggcaccaaacuuc

SEQ ID NO: 483732 - RNA, 19 nt, Artificial Sequence
  Description of Artificial Sequence: Synthetic oligonucleotide
aauggcagaacacaaaaca

SEQ ID NO: 483733 - RNA, 19 nt, Artificial Sequence
  Description of Artificial Sequence: Synthetic oligonucleotide
agaaauauuacacugugca

SEQ ID NO: 483734 - RNA, 19 nt, Artificial Sequence
  Description of Artificial Sequence: Synthetic oligonucleotide
aaugaaacgucucuuggag

SEQ ID NO: 483735 - RNA, 19 nt, Artificial Sequence
  Description of Artificial Sequence: Synthetic oligonucleotide
auuaguagagaauaugcuc

SEQ ID NO: 483736 - RNA, 19 nt, Artificial Sequence
  Description of Artificial Sequence: Synthetic oligonucleotide
acuaucauuacaccuaggg

SEQ ID NO: 483737 - RNA, 19 nt, Artificial Sequence
  Description of Artificial Sequence: Synthetic oligonucleotide
aaaaugugcagcuuccauc

SEQ ID NO: 483738 - RNA, 19 nt, Artificial Sequence
  Description of Artificial Sequence: Synthetic oligonucleotide
uaaaaguccaacaccaaag

SEQ ID NO: 483739 - RNA, 19 nt, Artificial Sequence
  Description of Artificial Sequence: Synthetic oligonucleotide
acaucuagaaagcagcuac

SEQ ID NO: 483740 - RNA, 19 nt, Artificial Sequence
  Description of Artificial Sequence: Synthetic oligonucleotide
uaaaacaccuguaugaagu

SEQ ID NO: 483741 - RNA, 19 nt, Artificial Sequence
  Description of Artificial Sequence: Synthetic oligonucleotide
uauaauaaugcauacacuu

SEQ ID NO: 483742 - RNA, 19 nt, Artificial Sequence
  Description of Artificial Sequence: Synthetic oligonucleotide
uugguuuugaauaacauua

SEQ ID NO: 483743 - RNA, 19 nt, Artificial Sequence
  Description of Artificial Sequence: Synthetic oligonucleotide
ucuuauaggacuauaaaua

SEQ ID NO: 483744 - RNA, 19 nt, Artificial Sequence
  Description of Artificial Sequence: Synthetic oligonucleotide
ugugcauaaaccaaauuga

SEQ ID NO: 483745 - RNA, 19 nt, Artificial Sequence
  Description of Artificial Sequence: Synthetic oligonucleotide
uuagaacagucgcagaugg

SEQ ID NO: 483746 - RNA, 19 nt, Artificial Sequence
  Description of Artificial Sequence: Synthetic oligonucleotide
caauuuauuagaacagucg

SEQ ID NO: 483747 - RNA, 19 nt, Artificial Sequence
  Description of Artificial Sequence: Synthetic oligonucleotide
uuuauuagaacagucgcag

SEQ ID NO: 483748 - RNA, 19 nt, Artificial Sequence
  Description of Artificial Sequence: Synthetic oligonucleotide
auaucuaacuccuugauau

SEQ ID NO: 483749 - RNA, 19 nt, Artificial Sequence
  Description of Artificial Sequence: Synthetic oligonucleotide
aaugauuacacuaucauua

SEQ ID NO: 483750 - RNA, 19 nt, Artificial Sequence
  Description of Artificial Sequence: Synthetic oligonucleotide
uuugaauaacauuaguaga

SEQ ID NO: 483751 - RNA, 19 nt, Artificial Sequence
  Description of Artificial Sequence: Synthetic oligonucleotide
auuacacuaucauuacacc

SEQ ID NO: 483752 - RNA, 19 nt, Artificial Sequence
  Description of Artificial Sequence: Synthetic oligonucleotide
aaaacaguaacuggaauca

SEQ ID NO: 483753 - RNA, 19 nt, Artificial Sequence
  Description of Artificial Sequence: Synthetic oligonucleotide
augcaagauaucuaacucc

SEQ ID NO: 483754 - RNA, 19 nt, Artificial Sequence
  Description of Artificial Sequence: Synthetic oligonucleotide
cuagaaagcagcuaccacc

SEQ ID NO: 483755 - RNA, 19 nt, Artificial Sequence
  Description of Artificial Sequence: Synthetic oligonucleotide
aaaugugcagcuuccauca

SEQ ID NO: 483756 - RNA, 19 nt, Artificial Sequence
  Description of Artificial Sequence: Synthetic oligonucleotide
gaguacauaagcuuccugc

SEQ ID NO: 483757 - RNA, 19 nt, Artificial Sequence
  Description of Artificial Sequence: Synthetic oligonucleotide
aauauuacacugugcauaa

SEQ ID NO: 483758 - RNA, 19 nt, Artificial Sequence
  Description of Artificial Sequence: Synthetic oligonucleotide
uagagauucauacagucaa

SEQ ID NO: 483759 - RNA, 19 nt, Artificial Sequence
  Description of Artificial Sequence: Synthetic oligonucleotide
aacugauuaaaaguccaac

SEQ ID NO: 483760 - RNA, 19 nt, Artificial Sequence
  Description of Artificial Sequence: Synthetic oligonucleotide
aaucgagucaaacccacug

SEQ ID NO: 483761 - RNA, 19 nt, Artificial Sequence
  Description of Artificial Sequence: Synthetic oligonucleotide
aaacuuuaauugccauugc

SEQ ID NO: 483762 - RNA, 19 nt, Artificial Sequence
  Description of Artificial Sequence: Synthetic oligonucleotide
gauuacacuaucauuacac

SEQ ID NO: 483763 - RNA, 19 nt, Artificial Sequence
  Description of Artificial Sequence: Synthetic oligonucleotide
ugaaucauuuucacaagug

SEQ ID NO: 483764 - RNA, 19 nt, Artificial Sequence
  Description of Artificial Sequence: Synthetic oligonucleotide
acaaucauuaaaauggcag

SEQ ID NO: 483765 - RNA, 19 nt, Artificial Sequence
  Description of Artificial Sequence: Synthetic oligonucleotide
acuucaauuccacagcaag

SEQ ID NO: 483766 - RNA, 19 nt, Artificial Sequence
  Description of Artificial Sequence: Synthetic oligonucleotide
aacaguaacuggaaucagc

SEQ ID NO: 483767 - RNA, 19 nt, Artificial Sequence
  Description of Artificial Sequence: Synthetic oligonucleotide
cagaagagagcauucaugc

SEQ ID NO: 483768 - RNA, 19 nt, Artificial Sequence
  Description of Artificial Sequence: Synthetic oligonucleotide
caaggacucaacuuguugg

SEQ ID NO: 483769 - RNA, 19 nt, Artificial Sequence
  Description of Artificial Sequence: Synthetic oligonucleotide
aaauugaaucauuuucaca

SEQ ID NO: 483770 - RNA, 19 nt, Artificial Sequence
  Description of Artificial Sequence: Synthetic oligonucleotide
gucguagagauucauacag

SEQ ID NO: 483771 - RNA, 19 nt, Artificial Sequence
  Description of Artificial Sequence: Synthetic oligonucleotide
aggaacaaucauuaaaaug

SEQ ID NO: 483772 - RNA, 19 nt, Artificial Sequence
  Description of Artificial Sequence: Synthetic oligonucleotide
ugcacauccuucaaaagga

SEQ ID NO: 483773 - RNA, 19 nt, Artificial Sequence
  Description of Artificial Sequence: Synthetic oligonucleotide
aacuccuugauauaauaau

SEQ ID NO: 483774 - RNA, 19 nt, Artificial Sequence
  Description of Artificial Sequence: Synthetic oligonucleotide
uacauaagcuuccugcuug

SEQ ID NO: 483775 - RNA, 19 nt, Artificial Sequence
  Description of Artificial Sequence: Synthetic oligonucleotide
auuaaaauggcagaacaca

SEQ ID NO: 483776 - RNA, 19 nt, Artificial Sequence
  Description of Artificial Sequence: Synthetic oligonucleotide
aacauuaguagagaauaug

SEQ ID NO: 483777 - RNA, 19 nt, Artificial Sequence
  Description of Artificial Sequence: Synthetic oligonucleotide
acugauuaaaaguccaaca

SEQ ID NO: 483778 - RNA, 19 nt, Artificial Sequence
  Description of Artificial Sequence: Synthetic oligonucleotide
augauuacacuaucauuac

SEQ ID NO: 483779 - RNA, 19 nt, Artificial Sequence
  Description of Artificial Sequence: Synthetic oligonucleotide
aacuuuaauugccauugca

SEQ ID NO: 483780 - RNA, 19 nt, Artificial Sequence
  Description of Artificial Sequence: Synthetic oligonucleotide
uaaugcauacacuucaaaa

SEQ ID NO: 483781 - RNA, 19 nt, Artificial Sequence
  Description of Artificial Sequence: Synthetic oligonucleotide
uauuagaacagucgcagau

SEQ ID NO: 483782 - RNA, 19 nt, Artificial Sequence
  Description of Artificial Sequence: Synthetic oligonucleotide
uuuuaacaaggacucaacu

SEQ ID NO: 483783 - RNA, 19 nt, Artificial Sequence
  Description of Artificial Sequence: Synthetic oligonucleotide
ugcaacuacaagguggugg

SEQ ID NO: 483784 - RNA, 19 nt, Artificial Sequence
  Description of Artificial Sequence: Synthetic oligonucleotide
auaagagaauucuggguuc

SEQ ID NO: 483785 - RNA, 19 nt, Artificial Sequence
  Description of Artificial Sequence: Synthetic oligonucleotide
ucaugcaagauaucuaacu

SEQ ID NO: 483786 - RNA, 19 nt, Artificial Sequence
  Description of Artificial Sequence: Synthetic oligonucleotide
uccaacaccaaagaaauaa

SEQ ID NO: 483787 - RNA, 19 nt, Artificial Sequence
  Description of Artificial Sequence: Synthetic oligonucleotide
aagaucucgggauggugcg

SEQ ID NO: 483788 - RNA, 19 nt, Artificial Sequence
  Description of Artificial Sequence: Synthetic oligonucleotide
acuguaaucccuagcaagc

SEQ ID NO: 483789 - RNA, 19 nt, Artificial Sequence
  Description of Artificial Sequence: Synthetic oligonucleotide
gcauaaaccaaauugaauc

SEQ ID NO: 483790 - RNA, 19 nt, Artificial Sequence
  Description of Artificial Sequence: Synthetic oligonucleotide
gagcgaacaaccaacaacc

SEQ ID NO: 483791 - RNA, 19 nt, Artificial Sequence
  Description of Artificial Sequence: Synthetic oligonucleotide
gauugagcacugcacaucc

SEQ ID NO: 483792 - RNA, 19 nt, Artificial Sequence
  Description of Artificial Sequence: Synthetic oligonucleotide
auaauggcaccaaacuucc

SEQ ID NO: 483793 - RNA, 19 nt, Artificial Sequence
  Description of Artificial Sequence: Synthetic oligonucleotide
uuacacuaucauuacaccu

SEQ ID NO: 483794 - RNA, 19 nt, Artificial Sequence
  Description of Artificial Sequence: Synthetic oligonucleotide
aaaaggacaucccacucaa

SEQ ID NO: 483795 - RNA, 19 nt, Artificial Sequence
  Description of Artificial Sequence: Synthetic oligonucleotide
uccaaauauguuccauccg

SEQ ID NO: 483796 - RNA, 19 nt, Artificial Sequence
  Description of Artificial Sequence: Synthetic oligonucleotide
uugccauugcauaaaacac

SEQ ID NO: 483797 - RNA, 19 nt, Artificial Sequence
  Description of Artificial Sequence: Synthetic oligonucleotide
uacacuaucauuacaccua

SEQ ID NO: 483798 - RNA, 19 nt, Artificial Sequence
  Description of Artificial Sequence: Synthetic oligonucleotide
acuauaaauagcaggaaca

SEQ ID NO: 483799 - RNA, 19 nt, Artificial Sequence
  Description of Artificial Sequence: Synthetic oligonucleotide
gaugauugagcacugcaca

SEQ ID NO: 483800 - RNA, 19 nt, Artificial Sequence
  Description of Artificial Sequence: Synthetic oligonucleotide
auucaugcaagauaucuaa

SEQ ID NO: 483801 - RNA, 19 nt, Artificial Sequence
  Description of Artificial Sequence: Synthetic oligonucleotide
ugguuuugaauaacauuag

SEQ ID NO: 483802 - RNA, 19 nt, Artificial Sequence
  Description of Artificial Sequence: Synthetic oligonucleotide
agucaaacccacuguaauc

SEQ ID NO: 483803 - RNA, 19 nt, Artificial Sequence
  Description of Artificial Sequence: Synthetic oligonucleotide
cuaaacacagaagagagca

SEQ ID NO: 483804 - RNA, 19 nt, Artificial Sequence
  Description of Artificial Sequence: Synthetic oligonucleotide
agaacagucgcagaugguc

SEQ ID NO: 483805 - RNA, 19 nt, Artificial Sequence
  Description of Artificial Sequence: Synthetic oligonucleotide
cuaucauuacaccuagggc

SEQ ID NO: 483806 - RNA, 19 nt, Artificial Sequence
  Description of Artificial Sequence: Synthetic oligonucleotide
uucaaaaggacaucccacu

SEQ ID NO: 483807 - RNA, 19 nt, Artificial Sequence
  Description of Artificial Sequence: Synthetic oligonucleotide
ugcacuucaauuccacagc

SEQ ID NO: 483808 - RNA, 19 nt, Artificial Sequence
  Description of Artificial Sequence: Synthetic oligonucleotide
caucaguccagaaacuacc

SEQ ID NO: 483809 - RNA, 19 nt, Artificial Sequence
  Description of Artificial Sequence: Synthetic oligonucleotide
caaauugaaucauuuucac

SEQ ID NO: 483810 - RNA, 19 nt, Artificial Sequence
  Description of Artificial Sequence: Synthetic oligonucleotide
uacacuucaaaaugauuac

SEQ ID NO: 483811 - RNA, 19 nt, Artificial Sequence
  Description of Artificial Sequence: Synthetic oligonucleotide
auugaaucauuuucacaag

SEQ ID NO: 483812 - RNA, 19 nt, Artificial Sequence
  Description of Artificial Sequence: Synthetic oligonucleotide
uucauacagucaaaguucu

SEQ ID NO: 483813 - RNA, 19 nt, Artificial Sequence
  Description of Artificial Sequence: Synthetic oligonucleotide
ucaaaaugauuacacuauc

SEQ ID NO: 483814 - RNA, 19 nt, Artificial Sequence
  Description of Artificial Sequence: Synthetic oligonucleotide
ugaugauugagcacugcac

SEQ ID NO: 483815 - RNA, 19 nt, Artificial Sequence
  Description of Artificial Sequence: Synthetic oligonucleotide
gaagagagcauucaugcaa

SEQ ID NO: 483816 - RNA, 19 nt, Artificial Sequence
  Description of Artificial Sequence: Synthetic oligonucleotide
ucaaaguucuuuucuacau

SEQ ID NO: 483817 - RNA, 19 nt, Artificial Sequence
  Description of Artificial Sequence: Synthetic oligonucleotide
ugccuggagaaccagaccu

SEQ ID NO: 483818 - RNA, 19 nt, Artificial Sequence
  Description of Artificial Sequence: Synthetic oligonucleotide
auccuucaaaaggacaucc

SEQ ID NO: 483819 - RNA, 19 nt, Artificial Sequence
  Description of Artificial Sequence: Synthetic oligonucleotide
aggacgaaagccuugucug

SEQ ID NO: 483820 - RNA, 19 nt, Artificial Sequence
  Description of Artificial Sequence: Synthetic oligonucleotide
ugcucuagaaaguggaggu

SEQ ID NO: 483821 - RNA, 19 nt, Artificial Sequence
  Description of Artificial Sequence: Synthetic oligonucleotide
ugauauaauaaugcauaca

SEQ ID NO: 483822 - RNA, 19 nt, Artificial Sequence
  Description of Artificial Sequence: Synthetic oligonucleotide
aguacauaagcuuccugcu

SEQ ID NO: 483823 - RNA, 19 nt, Artificial Sequence
  Description of Artificial Sequence: Synthetic oligonucleotide
uggcauagaacaccuaaac

SEQ ID NO: 483824 - RNA, 19 nt, Artificial Sequence
  Description of Artificial Sequence: Synthetic oligonucleotide
caagaucucgggauggugc

SEQ ID NO: 483825 - RNA, 19 nt, Artificial Sequence
  Description of Artificial Sequence: Synthetic oligonucleotide
auacacuucaaaaugauua

SEQ ID NO: 483826 - RNA, 19 nt, Artificial Sequence
  Description of Artificial Sequence: Synthetic oligonucleotide
ugaauaacauuaguagaga

SEQ ID NO: 483827 - RNA, 19 nt, Artificial Sequence
  Description of Artificial Sequence: Synthetic oligonucleotide
cacuguaaucccuagcaag

SEQ ID NO: 483828 - RNA, 19 nt, Artificial Sequence
  Description of Artificial Sequence: Synthetic oligonucleotide
cuuccaucaccguaagacg

SEQ ID NO: 483829 - RNA, 19 nt, Artificial Sequence
  Description of Artificial Sequence: Synthetic oligonucleotide
cugcagaaauauuacacug

SEQ ID NO: 483830 - RNA, 19 nt, Artificial Sequence
  Description of Artificial Sequence: Synthetic oligonucleotide
uacaccuagggcuuucugc

SEQ ID NO: 483831 - RNA, 19 nt, Artificial Sequence
  Description of Artificial Sequence: Synthetic oligonucleotide
gugucguagagauucauac

SEQ ID NO: 483832 - RNA, 19 nt, Artificial Sequence
  Description of Artificial Sequence: Synthetic oligonucleotide
gagauucauacagucaaag

SEQ ID NO: 483833 - RNA, 19 nt, Artificial Sequence
  Description of Artificial Sequence: Synthetic oligonucleotide
gcagcaauuuauuagaaca

SEQ ID NO: 483834 - RNA, 19 nt, Artificial Sequence
  Description of Artificial Sequence: Synthetic oligonucleotide
uacacugugcauaaaccaa

SEQ ID NO: 483835 - RNA, 19 nt, Artificial Sequence
  Description of Artificial Sequence: Synthetic oligonucleotide
agaacaccuaaacacagaa

SEQ ID NO: 483836 - RNA, 19 nt, Artificial Sequence
  Description of Artificial Sequence: Synthetic oligonucleotide
uggcagaacacaaaacagu

SEQ ID NO: 483837 - RNA, 19 nt, Artificial Sequence
  Description of Artificial Sequence: Synthetic oligonucleotide
uaugcucuagaaaguggag

SEQ ID NO: 483838 - RNA, 19 nt, Artificial Sequence
  Description of Artificial Sequence: Synthetic oligonucleotide
aggacuauaaauagcagga

SEQ ID NO: 483839 - RNA, 19 nt, Artificial Sequence
  Description of Artificial Sequence: Synthetic oligonucleotide
uugcauaaaacaccuguau

SEQ ID NO: 483840 - RNA, 19 nt, Artificial Sequence
  Description of Artificial Sequence: Synthetic oligonucleotide
accuaaacacagaagagag

SEQ ID NO: 483841 - RNA, 19 nt, Artificial Sequence
  Description of Artificial Sequence: Synthetic oligonucleotide
gauggugcgaagauccccg

SEQ ID NO: 483842 - RNA, 19 nt, Artificial Sequence
  Description of Artificial Sequence: Synthetic oligonucleotide
caugcaagauaucuaacuc

SEQ ID NO: 483843 - RNA, 19 nt, Artificial Sequence
  Description of Artificial Sequence: Synthetic oligonucleotide
ucccuagcaagcuucaaga

SEQ ID NO: 483844 - RNA, 19 nt, Artificial Sequence
  Description of Artificial Sequence: Synthetic oligonucleotide
gcaagaguggcauagaaca

SEQ ID NO: 483845 - RNA, 19 nt, Artificial Sequence
  Description of Artificial Sequence: Synthetic oligonucleotide
gucaaacccacuguaaucc

SEQ ID NO: 483846 - RNA, 19 nt, Artificial Sequence
  Description of Artificial Sequence: Synthetic oligonucleotide
agcaggaacaaucauuaaa

SEQ ID NO: 483847 - RNA, 19 nt, Artificial Sequence
  Description of Artificial Sequence: Synthetic oligonucleotide
aaguggagguaacuguaug

SEQ ID NO: 483848 - RNA, 19 nt, Artificial Sequence
  Description of Artificial Sequence: Synthetic oligonucleotide
aacagucgcagauggucag

SEQ ID NO: 483849 - RNA, 19 nt, Artificial Sequence
  Description of Artificial Sequence: Synthetic oligonucleotide
aacuacaagguggugguca

SEQ ID NO: 483850 - RNA, 19 nt, Artificial Sequence
  Description of Artificial Sequence: Synthetic oligonucleotide
ugauuacacuaucauuaca

SEQ ID NO: 483851 - RNA, 19 nt, Artificial Sequence
  Description of Artificial Sequence: Synthetic oligonucleotide
acacuaucauuacaccuag

SEQ ID NO: 483852 - RNA, 19 nt, Artificial Sequence
  Description of Artificial Sequence: Synthetic oligonucleotide
aguggcauagaacaccuaa

SEQ ID NO: 483853 - RNA, 19 nt, Artificial Sequence
  Description of Artificial Sequence: Synthetic oligonucleotide
ucuagaaagcagcuaccac

SEQ ID NO: 483854 - RNA, 19 nt, Artificial Sequence
  Description of Artificial Sequence: Synthetic oligonucleotide
agagcauucaugcaagaua

SEQ ID NO: 483855 - RNA, 19 nt, Artificial Sequence
  Description of Artificial Sequence: Synthetic oligonucleotide
aagacgagcgaacaaccaa

SEQ ID NO: 483856 - RNA, 19 nt, Artificial Sequence
  Description of Artificial Sequence: Synthetic oligonucleotide
aagagagcauucaugcaag

SEQ ID NO: 483857 - RNA, 19 nt, Artificial Sequence
  Description of Artificial Sequence: Synthetic oligonucleotide
ugaauaguccaaauauguu

SEQ ID NO: 483858 - RNA, 19 nt, Artificial Sequence
  Description of Artificial Sequence: Synthetic oligonucleotide
acaugcuacucucacugag

SEQ ID NO: 483859 - RNA, 19 nt, Artificial Sequence
  Description of Artificial Sequence: Synthetic oligonucleotide
aucaacaucuagaaagcag

SEQ ID NO: 483860 - RNA, 19 nt, Artificial Sequence
  Description of Artificial Sequence: Synthetic oligonucleotide
caaaaugauuacacuauca

SEQ ID NO: 483861 - RNA, 19 nt, Artificial Sequence
  Description of Artificial Sequence: Synthetic oligonucleotide
ugcgaagauccccggaucc

SEQ ID NO: 483862 - RNA, 19 nt, Artificial Sequence
  Description of Artificial Sequence: Synthetic oligonucleotide
caaucauuaaaauggcaga

SEQ ID NO: 483863 - RNA, 19 nt, Artificial Sequence
  Description of Artificial Sequence: Synthetic oligonucleotide
aguggagguaacuguaugu

SEQ ID NO: 483864 - RNA, 19 nt, Artificial Sequence
  Description of Artificial Sequence: Synthetic oligonucleotide
ucaguaagagggugguacc

SEQ ID NO: 483865 - RNA, 19 nt, Artificial Sequence
  Description of Artificial Sequence: Synthetic oligonucleotide
aaugugcagcuuccaucac

SEQ ID NO: 483866 - RNA, 19 nt, Artificial Sequence
  Description of Artificial Sequence: Synthetic oligonucleotide
auagaacaccuaaacacag

SEQ ID NO: 483867 - RNA, 19 nt, Artificial Sequence
  Description of Artificial Sequence: Synthetic oligonucleotide
aucccuagcaagcuucaag

SEQ ID NO: 483868 - RNA, 19 nt, Artificial Sequence
  Description of Artificial Sequence: Synthetic oligonucleotide
gaugccugcagaaauauua

SEQ ID NO: 483869 - RNA, 19 nt, Artificial Sequence
  Description of Artificial Sequence: Synthetic oligonucleotide
acaccuagggcuuucugca

SEQ ID NO: 483870 - RNA, 19 nt, Artificial Sequence
  Description of Artificial Sequence: Synthetic oligonucleotide
uccaucaccguaagacgag

SEQ ID NO: 483871 - RNA, 19 nt, Artificial Sequence
  Description of Artificial Sequence: Synthetic oligonucleotide
ugucguagagauucauaca

SEQ ID NO: 483872 - RNA, 19 nt, Artificial Sequence
  Description of Artificial Sequence: Synthetic oligonucleotide
agagggugguaccacaugu

SEQ ID NO: 483873 - RNA, 19 nt, Artificial Sequence
  Description of Artificial Sequence: Synthetic oligonucleotide
augcucuagaaaguggagg

SEQ ID NO: 483874 - RNA, 19 nt, Artificial Sequence
  Description of Artificial Sequence: Synthetic oligonucleotide
gaaagccuugucugugggg

SEQ ID NO: 483875 - RNA, 19 nt, Artificial Sequence
  Description of Artificial Sequence: Synthetic oligonucleotide
auuuauuagaacagucgca

SEQ ID NO: 483876 - RNA, 19 nt, Artificial Sequence
  Description of Artificial Sequence: Synthetic oligonucleotide
uccuucaaaaggacauccc

SEQ ID NO: 483877 - RNA, 19 nt, Artificial Sequence
  Description of Artificial Sequence: Synthetic oligonucleotide
acuccuugauauaauaaug

SEQ ID NO: 483878 - RNA, 19 nt, Artificial Sequence
  Description of Artificial Sequence: Synthetic oligonucleotide
caaaguucuuuucuacaug

SEQ ID NO: 483879 - RNA, 19 nt, Artificial Sequence
  Description of Artificial Sequence: Synthetic oligonucleotide
aguaagagggugguaccac

SEQ ID NO: 483880 - RNA, 19 nt, Artificial Sequence
  Description of Artificial Sequence: Synthetic oligonucleotide
uuauuagaacagucgcaga

SEQ ID NO: 483881 - RNA, 19 nt, Artificial Sequence
  Description of Artificial Sequence: Synthetic oligonucleotide
gacucaacuuguuggaaga

SEQ ID NO: 483882 - RNA, 19 nt, Artificial Sequence
  Description of Artificial Sequence: Synthetic oligonucleotide
aacucuggcagcaauuuau

SEQ ID NO: 483883 - RNA, 19 nt, Artificial Sequence
  Description of Artificial Sequence: Synthetic oligonucleotide
agacgagcgaacaaccaac

SEQ ID NO: 483884 - RNA, 19 nt, Artificial Sequence
  Description of Artificial Sequence: Synthetic oligonucleotide
uagaacaccuaaacacaga

SEQ ID NO: 483885 - RNA, 19 nt, Artificial Sequence
  Description of Artificial Sequence: Synthetic oligonucleotide
ucuaacuccuugauauaau

SEQ ID NO: 483886 - RNA, 19 nt, Artificial Sequence
  Description of Artificial Sequence: Synthetic oligonucleotide
uucaugcaagauaucuaac

SEQ ID NO: 483887 - RNA, 19 nt, Artificial Sequence
  Description of Artificial Sequence: Synthetic oligonucleotide
ugaguacauaagcuuccug

SEQ ID NO: 483888 - RNA, 19 nt, Artificial Sequence
  Description of Artificial Sequence: Synthetic oligonucleotide
uuuugcucuuauaggacua

SEQ ID NO: 483889 - RNA, 19 nt, Artificial Sequence
  Description of Artificial Sequence: Synthetic oligonucleotide
gagacaaacaugcuacucu

SEQ ID NO: 483890 - RNA, 19 nt, Artificial Sequence
  Description of Artificial Sequence: Synthetic oligonucleotide
caucuagaaagcagcuacc

SEQ ID NO: 483891 - RNA, 19 nt, Artificial Sequence
  Description of Artificial Sequence: Synthetic oligonucleotide
auggcagaacacaaaacag

SEQ ID NO: 483892 - RNA, 19 nt, Artificial Sequence
  Description of Artificial Sequence: Synthetic oligonucleotide
aaacaguaacuggaaucag

SEQ ID NO: 483893 - RNA, 19 nt, Artificial Sequence
  Description of Artificial Sequence: Synthetic oligonucleotide
auagcaggaacaaucauua

SEQ ID NO: 483894 - RNA, 19 nt, Artificial Sequence
  Description of Artificial Sequence: Synthetic oligonucleotide
aagagggugguaccacaug

SEQ ID NO: 483895 - RNA, 19 nt, Artificial Sequence
  Description of Artificial Sequence: Synthetic oligonucleotide
ucauuuucacaagugucgu

SEQ ID NO: 483896 - RNA, 19 nt, Artificial Sequence
  Description of Artificial Sequence: Synthetic oligonucleotide
agcaagaguggcauagaac

SEQ ID NO: 483897 - RNA, 19 nt, Artificial Sequence
  Description of Artificial Sequence: Synthetic oligonucleotide
acuuuaauugccauugcau

SEQ ID NO: 483898 - RNA, 19 nt, Artificial Sequence
  Description of Artificial Sequence: Synthetic oligonucleotide
ucccacucaagaucucggg

SEQ ID NO: 483899 - RNA, 19 nt, Artificial Sequence
  Description of Artificial Sequence: Synthetic oligonucleotide
aauaaugcauacacuucaa

SEQ ID NO: 483900 - RNA, 19 nt, Artificial Sequence
  Description of Artificial Sequence: Synthetic oligonucleotide
gauuuuggacgaugccugc

SEQ ID NO: 483901 - RNA, 19 nt, Artificial Sequence
  Description of Artificial Sequence: Synthetic oligonucleotide
gauccccuggcuugcgucg

SEQ ID NO: 483902 - RNA, 19 nt, Artificial Sequence
  Description of Artificial Sequence: Synthetic oligonucleotide
gauaucuaacuccuugaua

SEQ ID NO: 483903 - RNA, 19 nt, Artificial Sequence
  Description of Artificial Sequence: Synthetic oligonucleotide
caaggugguggucauggag

SEQ ID NO: 483904 - RNA, 19 nt, Artificial Sequence
  Description of Artificial Sequence: Synthetic oligonucleotide
acaaaacaguaacuggaau

SEQ ID NO: 483905 - RNA, 19 nt, Artificial Sequence
  Description of Artificial Sequence: Synthetic oligonucleotide
aacaccuguaugaaguaaa

SEQ ID NO: 483906 - RNA, 19 nt, Artificial Sequence
  Description of Artificial Sequence: Synthetic oligonucleotide
guagagaauaugcucuaga

SEQ ID NO: 483907 - RNA, 19 nt, Artificial Sequence
  Description of Artificial Sequence: Synthetic oligonucleotide
cuggcagcaauuuauuaga

SEQ ID NO: 483908 - RNA, 19 nt, Artificial Sequence
  Description of Artificial Sequence: Synthetic oligonucleotide
gagaauucuggguucugga

SEQ ID NO: 483909 - RNA, 19 nt, Artificial Sequence
  Description of Artificial Sequence: Synthetic oligonucleotide
uugucagucuucgucacac

SEQ ID NO: 483910 - RNA, 19 nt, Artificial Sequence
  Description of Artificial Sequence: Synthetic oligonucleotide
guaagacgagcgaacaacc

SEQ ID NO: 483911 - RNA, 19 nt, Artificial Sequence
  Description of Artificial Sequence: Synthetic oligonucleotide
uuuucacaagugucguaga

SEQ ID NO: 483912 - RNA, 19 nt, Artificial Sequence
  Description of Artificial Sequence: Synthetic oligonucleotide
cacagcaagaguggcauag

SEQ ID NO: 483913 - RNA, 19 nt, Artificial Sequence
  Description of Artificial Sequence: Synthetic oligonucleotide
gcuuccaucaccguaagac

SEQ ID NO: 483914 - RNA, 19 nt, Artificial Sequence
  Description of Artificial Sequence: Synthetic oligonucleotide
caucaccguaagacgagcg

SEQ ID NO: 483915 - RNA, 19 nt, Artificial Sequence
  Description of Artificial Sequence: Synthetic oligonucleotide
ucgagucaaacccacugua

SEQ ID NO: 483916 - RNA, 19 nt, Artificial Sequence
  Description of Artificial Sequence: Synthetic oligonucleotide
ucguagagauucauacagu

SEQ ID NO: 483917 - RNA, 19 nt, Artificial Sequence
  Description of Artificial Sequence: Synthetic oligonucleotide
cauugcauaaaacaccugu

SEQ ID NO: 483918 - RNA, 19 nt, Artificial Sequence
  Description of Artificial Sequence: Synthetic oligonucleotide
gucagucuucgucacacug

SEQ ID NO: 483919 - RNA, 19 nt, Artificial Sequence
  Description of Artificial Sequence: Synthetic oligonucleotide
aaugaggacgaaagccuug

SEQ ID NO: 483920 - RNA, 19 nt, Artificial Sequence
  Description of Artificial Sequence: Synthetic oligonucleotide
aacaugcuacucucacuga

SEQ ID NO: 483921 - RNA, 19 nt, Artificial Sequence
  Description of Artificial Sequence: Synthetic oligonucleotide
uaucaacaucuagaaagca

SEQ ID NO: 483922 - RNA, 19 nt, Artificial Sequence
  Description of Artificial Sequence: Synthetic oligonucleotide
cuaaugaggacgaaagccu

SEQ ID NO: 483923 - RNA, 19 nt, Artificial Sequence
  Description of Artificial Sequence: Synthetic oligonucleotide
uaaucccuagcaagcuuca

SEQ ID NO: 483924 - RNA, 19 nt, Artificial Sequence
  Description of Artificial Sequence: Synthetic oligonucleotide
aucgagucaaacccacugu

SEQ ID NO: 483925 - RNA, 19 nt, Artificial Sequence
  Description of Artificial Sequence: Synthetic oligonucleotide
gaacaccuaaacacagaag

SEQ ID NO: 483926 - RNA, 19 nt, Artificial Sequence
  Description of Artificial Sequence: Synthetic oligonucleotide
acccacuguaaucccuagc

SEQ ID NO: 483927 - RNA, 19 nt, Artificial Sequence
  Description of Artificial Sequence: Synthetic oligonucleotide
uaaugaggacgaaagccuu

SEQ ID NO: 483928 - RNA, 19 nt, Artificial Sequence
  Description of Artificial Sequence: Synthetic oligonucleotide
acugaugauugagcacugc

SEQ ID NO: 483929 - RNA, 19 nt, Artificial Sequence
  Description of Artificial Sequence: Synthetic oligonucleotide
acucaagaucucgggaugg

SEQ ID NO: 483930 - RNA, 19 nt, Artificial Sequence
  Description of Artificial Sequence: Synthetic oligonucleotide
cuucaauuccacagcaaga

SEQ ID NO: 483931 - RNA, 19 nt, Artificial Sequence
  Description of Artificial Sequence: Synthetic oligonucleotide
ucgcagauggucagcugag

SEQ ID NO: 483932 - RNA, 19 nt, Artificial Sequence
  Description of Artificial Sequence: Synthetic oligonucleotide
uguaaucccuagcaagcuu

SEQ ID NO: 483933 - RNA, 19 nt, Artificial Sequence
  Description of Artificial Sequence: Synthetic oligonucleotide
augccugcagaaauauuac

SEQ ID NO: 483934 - RNA, 19 nt, Artificial Sequence
  Description of Artificial Sequence: Synthetic oligonucleotide
agaauaugcucuagaaagu

SEQ ID NO: 483935 - RNA, 19 nt, Artificial Sequence
  Description of Artificial Sequence: Synthetic oligonucleotide
acaccuaaacacagaagag

SEQ ID NO: 483936 - RNA, 19 nt, Artificial Sequence
  Description of Artificial Sequence: Synthetic oligonucleotide
aacccacuguaaucccuag

SEQ ID NO: 483937 - RNA, 19 nt, Artificial Sequence
  Description of Artificial Sequence: Synthetic oligonucleotide
ugcagcuuccaucaccgua

SEQ ID NO: 483938 - RNA, 19 nt, Artificial Sequence
  Description of Artificial Sequence: Synthetic oligonucleotide
uaagagggugguaccacau

SEQ ID NO: 483939 - RNA, 19 nt, Artificial Sequence
  Description of Artificial Sequence: Synthetic oligonucleotide
aucuagaaagcagcuacca

SEQ ID NO: 483940 - RNA, 19 nt, Artificial Sequence
  Description of Artificial Sequence: Synthetic oligonucleotide
ggacucaacuuguuggaag

SEQ ID NO: 483941 - RNA, 19 nt, Artificial Sequence
  Description of Artificial Sequence: Synthetic oligonucleotide
aucaccguaagacgagcga

SEQ ID NO: 483942 - RNA, 19 nt, Artificial Sequence
  Description of Artificial Sequence: Synthetic oligonucleotide
aggacaucccacucaagau

SEQ ID NO: 483943 - RNA, 19 nt, Artificial Sequence
  Description of Artificial Sequence: Synthetic oligonucleotide
caaaaggacaucccacuca

SEQ ID NO: 483944 - RNA, 19 nt, Artificial Sequence
  Description of Artificial Sequence: Synthetic oligonucleotide
augaaacgucucuuggaga

SEQ ID NO: 483945 - RNA, 19 nt, Artificial Sequence
  Description of Artificial Sequence: Synthetic oligonucleotide
gucacacugaugauugagc

SEQ ID NO: 483946 - RNA, 19 nt, Artificial Sequence
  Description of Artificial Sequence: Synthetic oligonucleotide
ugccugcagaaauauuaca

SEQ ID NO: 483947 - RNA, 19 nt, Artificial Sequence
  Description of Artificial Sequence: Synthetic oligonucleotide
gugaauaguccaaauaugu

SEQ ID NO: 483948 - RNA, 19 nt, Artificial Sequence
  Description of Artificial Sequence: Synthetic oligonucleotide
auaggacuauaaauagcag

SEQ ID NO: 483949 - RNA, 19 nt, Artificial Sequence
  Description of Artificial Sequence: Synthetic oligonucleotide
guaaucccuagcaagcuuc

SEQ ID NO: 483950 - RNA, 19 nt, Artificial Sequence
  Description of Artificial Sequence: Synthetic oligonucleotide
uuacaccuagggcuuucug

SEQ ID NO: 483951 - RNA, 19 nt, Artificial Sequence
  Description of Artificial Sequence: Synthetic oligonucleotide
gucuucaaaaugaaacguc

SEQ ID NO: 483952 - RNA, 19 nt, Artificial Sequence
  Description of Artificial Sequence: Synthetic oligonucleotide
aucuaacuccuugauauaa

SEQ ID NO: 483953 - RNA, 19 nt, Artificial Sequence
  Description of Artificial Sequence: Synthetic oligonucleotide
caucccacucaagaucucg

SEQ ID NO: 483954 - RNA, 19 nt, Artificial Sequence
  Description of Artificial Sequence: Synthetic oligonucleotide
aaacaccuguaugaaguaa

SEQ ID NO: 483955 - RNA, 19 nt, Artificial Sequence
  Description of Artificial Sequence: Synthetic oligonucleotide
auaguccaaauauguucca

SEQ ID NO: 483956 - RNA, 19 nt, Artificial Sequence
  Description of Artificial Sequence: Synthetic oligonucleotide
gcagcuaccaccuccugug

SEQ ID NO: 483957 - RNA, 19 nt, Artificial Sequence
  Description of Artificial Sequence: Synthetic oligonucleotide
ggauuuuggacgaugccug

SEQ ID NO: 483958 - RNA, 19 nt, Artificial Sequence
  Description of Artificial Sequence: Synthetic oligonucleotide
acacuucaaaaugauuaca

SEQ ID NO: 483959 - RNA, 19 nt, Artificial Sequence
  Description of Artificial Sequence: Synthetic oligonucleotide
aaacucuggcagcaauuua

SEQ ID NO: 483960 - RNA, 19 nt, Artificial Sequence
  Description of Artificial Sequence: Synthetic oligonucleotide
cugaugauugagcacugca

SEQ ID NO: 483961 - RNA, 19 nt, Artificial Sequence
  Description of Artificial Sequence: Synthetic oligonucleotide
gaaaguggagguaacugua

SEQ ID NO: 483962 - RNA, 19 nt, Artificial Sequence
  Description of Artificial Sequence: Synthetic oligonucleotide
gucgcagauggucagcuga

SEQ ID NO: 483963 - RNA, 19 nt, Artificial Sequence
  Description of Artificial Sequence: Synthetic oligonucleotide
uuucuacaugcacuucaau

SEQ ID NO: 483964 - RNA, 19 nt, Artificial Sequence
  Description of Artificial Sequence: Synthetic oligonucleotide
cuaacuccuugauauaaua

SEQ ID NO: 483965 - RNA, 19 nt, Artificial Sequence
  Description of Artificial Sequence: Synthetic oligonucleotide
ugauugagcacugcacauc

SEQ ID NO: 483966 - RNA, 19 nt, Artificial Sequence
  Description of Artificial Sequence: Synthetic oligonucleotide
cuugcgucgggcugcugcc

SEQ ID NO: 483967 - RNA, 19 nt, Artificial Sequence
  Description of Artificial Sequence: Synthetic oligonucleotide
ucaccguaagacgagcgaa

SEQ ID NO: 483968 - RNA, 19 nt, Artificial Sequence
  Description of Artificial Sequence: Synthetic oligonucleotide
ggcauagaacaccuaaaca

SEQ ID NO: 483969 - RNA, 19 nt, Artificial Sequence
  Description of Artificial Sequence: Synthetic oligonucleotide
gcuacucucacugaguaca

SEQ ID NO: 483970 - RNA, 19 nt, Artificial Sequence
  Description of Artificial Sequence: Synthetic oligonucleotide
caguccagaaacuaccaaa

SEQ ID NO: 483971 - RNA, 19 nt, Artificial Sequence
  Description of Artificial Sequence: Synthetic oligonucleotide
caccuaaacacagaagaga

SEQ ID NO: 483972 - RNA, 19 nt, Artificial Sequence
  Description of Artificial Sequence: Synthetic oligonucleotide
ugcaucaguccagaaacua

SEQ ID NO: 483973 - RNA, 19 nt, Artificial Sequence
  Description of Artificial Sequence: Synthetic oligonucleotide
cacucaagaucucgggaug

SEQ ID NO: 483974 - RNA, 19 nt, Artificial Sequence
  Description of Artificial Sequence: Synthetic oligonucleotide
agcagcuaccaccuccugu

SEQ ID NO: 483975 - RNA, 19 nt, Artificial Sequence
  Description of Artificial Sequence: Synthetic oligonucleotide
gagcauucaugcaagauau

SEQ ID NO: 483976 - RNA, 19 nt, Artificial Sequence
  Description of Artificial Sequence: Synthetic oligonucleotide
aagauccccggauccccug

SEQ ID NO: 483977 - RNA, 19 nt, Artificial Sequence
  Description of Artificial Sequence: Synthetic oligonucleotide
ccaaauauguuccauccga

SEQ ID NO: 483978 - RNA, 19 nt, Artificial Sequence
  Description of Artificial Sequence: Synthetic oligonucleotide
agaccuccagcaguucucg

SEQ ID NO: 483979 - RNA, 19 nt, Artificial Sequence
  Description of Artificial Sequence: Synthetic oligonucleotide
gcaauuuauuagaacaguc

SEQ ID NO: 483980 - RNA, 19 nt, Artificial Sequence
  Description of Artificial Sequence: Synthetic oligonucleotide
cccaguaucaacaucuaga

SEQ ID NO: 483981 - RNA, 19 nt, Artificial Sequence
  Description of Artificial Sequence: Synthetic oligonucleotide
agauccccggauccccugg

SEQ ID NO: 483982 - RNA, 19 nt, Artificial Sequence
  Description of Artificial Sequence: Synthetic oligonucleotide
augcuacucucacugagua

SEQ ID NO: 483983 - RNA, 19 nt, Artificial Sequence
  Description of Artificial Sequence: Synthetic oligonucleotide
acagucgcagauggucagc

SEQ ID NO: 483984 - RNA, 19 nt, Artificial Sequence
  Description of Artificial Sequence: Synthetic oligonucleotide
cauucaugcaagauaucua

SEQ ID NO: 483985 - RNA, 19 nt, Artificial Sequence
  Description of Artificial Sequence: Synthetic oligonucleotide
acuacaaggugguggucau

SEQ ID NO: 483986 - RNA, 19 nt, Artificial Sequence
  Description of Artificial Sequence: Synthetic oligonucleotide
cgaacaaccaacaaccaca

SEQ ID NO: 483987 - RNA, 19 nt, Artificial Sequence
  Description of Artificial Sequence: Synthetic oligonucleotide
guaagagggugguaccaca

SEQ ID NO: 483988 - RNA, 19 nt, Artificial Sequence
  Description of Artificial Sequence: Synthetic oligonucleotide
caccguaagacgagcgaac

SEQ ID NO: 483989 - RNA, 19 nt, Artificial Sequence
  Description of Artificial Sequence: Synthetic oligonucleotide
aguucucgguccuucgaaa

SEQ ID NO: 483990 - RNA, 19 nt, Artificial Sequence
  Description of Artificial Sequence: Synthetic oligonucleotide
cacuaucauuacaccuagg

SEQ ID NO: 483991 - RNA, 19 nt, Artificial Sequence
  Description of Artificial Sequence: Synthetic oligonucleotide
uagaacagucgcagauggu

SEQ ID NO: 483992 - RNA, 19 nt, Artificial Sequence
  Description of Artificial Sequence: Synthetic oligonucleotide
ggacaucccacucaagauc

SEQ ID NO: 483993 - RNA, 19 nt, Artificial Sequence
  Description of Artificial Sequence: Synthetic oligonucleotide
gacaucccacucaagaucu

SEQ ID NO: 483994 - RNA, 19 nt, Artificial Sequence
  Description of Artificial Sequence: Synthetic oligonucleotide
cugaggccagcaucuaaug

SEQ ID NO: 483995 - RNA, 19 nt, Artificial Sequence
  Description of Artificial Sequence: Synthetic oligonucleotide
ugcuacucucacugaguac

SEQ ID NO: 483996 - RNA, 19 nt, Artificial Sequence
  Description of Artificial Sequence: Synthetic oligonucleotide
gagucaaacccacuguaau

SEQ ID NO: 483997 - RNA, 19 nt, Artificial Sequence
  Description of Artificial Sequence: Synthetic oligonucleotide
ccuaaacacagaagagagc

SEQ ID NO: 483998 - RNA, 19 nt, Artificial Sequence
  Description of Artificial Sequence: Synthetic oligonucleotide
aucccacucaagaucucgg

SEQ ID NO: 483999 - RNA, 19 nt, Artificial Sequence
  Description of Artificial Sequence: Synthetic oligonucleotide
augaggacgaaagccuugu

SEQ ID NO: 484000 - RNA, 19 nt, Artificial Sequence
  Description of Artificial Sequence: Synthetic oligonucleotide
agagagcauucaugcaaga

SEQ ID NO: 484001 - RNA, 19 nt, Artificial Sequence
  Description of Artificial Sequence: Synthetic oligonucleotide
uuugcucuuauaggacuau

SEQ ID NO: 484002 - RNA, 19 nt, Artificial Sequence
  Description of Artificial Sequence: Synthetic oligonucleotide
auuaaaaguccaacaccaa

SEQ ID NO: 484003 - RNA, 19 nt, Artificial Sequence
  Description of Artificial Sequence: Synthetic oligonucleotide
gaaccagaccuccagcagu

SEQ ID NO: 484004 - RNA, 19 nt, Artificial Sequence
  Description of Artificial Sequence: Synthetic oligonucleotide
auggugcgaagauccccgg

SEQ ID NO: 484005 - RNA, 19 nt, Artificial Sequence
  Description of Artificial Sequence: Synthetic oligonucleotide
acugugcauaaaccaaauu

SEQ ID NO: 484006 - RNA, 19 nt, Artificial Sequence
  Description of Artificial Sequence: Synthetic oligonucleotide
agcuaccaccuccugugug

SEQ ID NO: 484007 - RNA, 19 nt, Artificial Sequence
  Description of Artificial Sequence: Synthetic oligonucleotide
cguagagauucauacaguc

SEQ ID NO: 484008 - RNA, 19 nt, Artificial Sequence
  Description of Artificial Sequence: Synthetic oligonucleotide
aaacccacuguaaucccua

SEQ ID NO: 484009 - RNA, 19 nt, Artificial Sequence
  Description of Artificial Sequence: Synthetic oligonucleotide
gccugcagaaauauuacac

SEQ ID NO: 484010 - RNA, 19 nt, Artificial Sequence
  Description of Artificial Sequence: Synthetic oligonucleotide
auuuuggacgaugccugca

SEQ ID NO: 484011 - RNA, 19 nt, Artificial Sequence
  Description of Artificial Sequence: Synthetic oligonucleotide
ucucgggauggugcgaaga

SEQ ID NO: 484012 - RNA, 19 nt, Artificial Sequence
  Description of Artificial Sequence: Synthetic oligonucleotide
accguaagacgagcgaaca

SEQ ID NO: 484013 - RNA, 19 nt, Artificial Sequence
  Description of Artificial Sequence: Synthetic oligonucleotide
caacugauuaaaaguccaa

SEQ ID NO: 484014 - RNA, 19 nt, Artificial Sequence
  Description of Artificial Sequence: Synthetic oligonucleotide
gcucuuauaggacuauaaa

SEQ ID NO: 484015 - RNA, 19 nt, Artificial Sequence
  Description of Artificial Sequence: Synthetic oligonucleotide
uggugcgaagauccccgga

SEQ ID NO: 484016 - RNA, 19 nt, Artificial Sequence
  Description of Artificial Sequence: Synthetic oligonucleotide
cgagcgaacaaccaacaac

SEQ ID NO: 484017 - RNA, 19 nt, Artificial Sequence
  Description of Artificial Sequence: Synthetic oligonucleotide
aagugucguagagauucau

SEQ ID NO: 484018 - RNA, 19 nt, Artificial Sequence
  Description of Artificial Sequence: Synthetic oligonucleotide
ucauacagucaaaguucuu

SEQ ID NO: 484019 - RNA, 19 nt, Artificial Sequence
  Description of Artificial Sequence: Synthetic oligonucleotide
uggacgaugccugcagaaa

SEQ ID NO: 484020 - RNA, 19 nt, Artificial Sequence
  Description of Artificial Sequence: Synthetic oligonucleotide
gcgaacaaccaacaaccac

SEQ ID NO: 484021 - RNA, 19 nt, Artificial Sequence
  Description of Artificial Sequence: Synthetic oligonucleotide
gacgagcgaacaaccaaca

SEQ ID NO: 484022 - RNA, 19 nt, Artificial Sequence
  Description of Artificial Sequence: Synthetic oligonucleotide
ggagguaacuguauguaaa

SEQ ID NO: 484023 - RNA, 19 nt, Artificial Sequence
  Description of Artificial Sequence: Synthetic oligonucleotide
agcacugcacauccuucaa

SEQ ID NO: 484024 - RNA, 19 nt, Artificial Sequence
  Description of Artificial Sequence: Synthetic oligonucleotide
cccacuguaaucccuagca

SEQ ID NO: 484025 - RNA, 19 nt, Artificial Sequence
  Description of Artificial Sequence: Synthetic oligonucleotide
ugaggacgaaagccuuguc

SEQ ID NO: 484026 - RNA, 19 nt, Artificial Sequence
  Description of Artificial Sequence: Synthetic oligonucleotide
gcuugcgucgggcugcugc

SEQ ID NO: 484027 - RNA, 19 nt, Artificial Sequence
  Description of Artificial Sequence: Synthetic oligonucleotide
gguuuugaauaacauuagu

SEQ ID NO: 484028 - RNA, 19 nt, Artificial Sequence
  Description of Artificial Sequence: Synthetic oligonucleotide
aacaaggacucaacuuguu

SEQ ID NO: 484029 - RNA, 19 nt, Artificial Sequence
  Description of Artificial Sequence: Synthetic oligonucleotide
ggucauggagaacccggcc

SEQ ID NO: 484030 - RNA, 19 nt, Artificial Sequence
  Description of Artificial Sequence: Synthetic oligonucleotide
ugcgucgggcugcugccug

SEQ ID NO: 484031 - RNA, 19 nt, Artificial Sequence
  Description of Artificial Sequence: Synthetic oligonucleotide
guucucgguccuucgaaaa

SEQ ID NO: 484032 - RNA, 19 nt, Artificial Sequence
  Description of Artificial Sequence: Synthetic oligonucleotide
gauccccggauccccuggc

SEQ ID NO: 484033 - RNA, 19 nt, Artificial Sequence
  Description of Artificial Sequence: Synthetic oligonucleotide
agcauucaugcaagauauc

SEQ ID NO: 484034 - RNA, 19 nt, Artificial Sequence
  Description of Artificial Sequence: Synthetic oligonucleotide
ggggauuuuggacgaugcc

SEQ ID NO: 484035 - RNA, 19 nt, Artificial Sequence
  Description of Artificial Sequence: Synthetic oligonucleotide
cguaagacgagcgaacaac

SEQ ID NO: 484036 - RNA, 19 nt, Artificial Sequence
  Description of Artificial Sequence: Synthetic oligonucleotide
acgagcgaacaaccaacaa

SEQ ID NO: 484037 - RNA, 19 nt, Artificial Sequence
  Description of Artificial Sequence: Synthetic oligonucleotide
acgaugccugcagaaauau

SEQ ID NO: 484038 - RNA, 19 nt, Artificial Sequence
  Description of Artificial Sequence: Synthetic oligonucleotide
gcacuucaauuccacagca

SEQ ID NO: 484039 - RNA, 19 nt, Artificial Sequence
  Description of Artificial Sequence: Synthetic oligonucleotide
acaaggugguggucaugga

SEQ ID NO: 484040 - RNA, 19 nt, Artificial Sequence
  Description of Artificial Sequence: Synthetic oligonucleotide
gcaacuacaaggugguggu

SEQ ID NO: 484041 - RNA, 19 nt, Artificial Sequence
  Description of Artificial Sequence: Synthetic oligonucleotide
guggagguaacuguaugua

SEQ ID NO: 484042 - RNA, 19 nt, Artificial Sequence
  Description of Artificial Sequence: Synthetic oligonucleotide
acaucaggugcugugcaua

SEQ ID NO: 484043 - RNA, 19 nt, Artificial Sequence
  Description of Artificial Sequence: Synthetic oligonucleotide
aucaggugcugugcauauc

SEQ ID NO: 484044 - RNA, 19 nt, Artificial Sequence
  Description of Artificial Sequence: Synthetic oligonucleotide
agugucguagagauucaua

SEQ ID NO: 484045 - RNA, 19 nt, Artificial Sequence
  Description of Artificial Sequence: Synthetic oligonucleotide
acaccuguaugaaguaaaa

SEQ ID NO: 484046 - RNA, 19 nt, Artificial Sequence
  Description of Artificial Sequence: Synthetic oligonucleotide
gagggugguaccacauguc

SEQ ID NO: 484047 - RNA, 19 nt, Artificial Sequence
  Description of Artificial Sequence: Synthetic oligonucleotide
gcaucaguccagaaacuac

SEQ ID NO: 484048 - RNA, 19 nt, Artificial Sequence
  Description of Artificial Sequence: Synthetic oligonucleotide
aaucccuagcaagcuucaa

SEQ ID NO: 484049 - RNA, 19 nt, Artificial Sequence
  Description of Artificial Sequence: Synthetic oligonucleotide
agcugaggccagcaucuaa

SEQ ID NO: 484050 - RNA, 19 nt, Artificial Sequence
  Description of Artificial Sequence: Synthetic oligonucleotide
caugcuacucucacugagu

SEQ ID NO: 484051 - RNA, 19 nt, Artificial Sequence
  Description of Artificial Sequence: Synthetic oligonucleotide
gaucucgggauggugcgaa

SEQ ID NO: 484052 - RNA, 19 nt, Artificial Sequence
  Description of Artificial Sequence: Synthetic oligonucleotide
acagcaagaguggcauaga

SEQ ID NO: 484053 - RNA, 19 nt, Artificial Sequence
  Description of Artificial Sequence: Synthetic oligonucleotide
aucucgggauggugcgaag

SEQ ID NO: 484054 - RNA, 19 nt, Artificial Sequence
  Description of Artificial Sequence: Synthetic oligonucleotide
ucgggauggugcgaagauc

SEQ ID NO: 484055 - RNA, 19 nt, Artificial Sequence
  Description of Artificial Sequence: Synthetic oligonucleotide
caagugucguagagauuca

SEQ ID NO: 484056 - RNA, 19 nt, Artificial Sequence
  Description of Artificial Sequence: Synthetic oligonucleotide
gugcgaagauccccggauc

SEQ ID NO: 484057 - RNA, 19 nt, Artificial Sequence
  Description of Artificial Sequence: Synthetic oligonucleotide
gacgaugccugcagaaaua

SEQ ID NO: 484058 - RNA, 19 nt, Artificial Sequence
  Description of Artificial Sequence: Synthetic oligonucleotide
uugcucuuauaggacuaua

SEQ ID NO: 484059 - RNA, 19 nt, Artificial Sequence
  Description of Artificial Sequence: Synthetic oligonucleotide
cauuacaccuagggcuuuc

SEQ ID NO: 484060 - RNA, 19 nt, Artificial Sequence
  Description of Artificial Sequence: Synthetic oligonucleotide
agcgaacaaccaacaacca

SEQ ID NO: 484061 - RNA, 19 nt, Artificial Sequence
  Description of Artificial Sequence: Synthetic oligonucleotide
cuugucagucuucgucaca

SEQ ID NO: 484062 - RNA, 19 nt, Artificial Sequence
  Description of Artificial Sequence: Synthetic oligonucleotide
cagcaagaguggcauagaa

SEQ ID NO: 484063 - RNA, 19 nt, Artificial Sequence
  Description of Artificial Sequence: Synthetic oligonucleotide
aggacucaacuuguuggaa

SEQ ID NO: 484064 - RNA, 19 nt, Artificial Sequence
  Description of Artificial Sequence: Synthetic oligonucleotide
cagcuuccaucaccguaag

SEQ ID NO: 484065 - RNA, 19 nt, Artificial Sequence
  Description of Artificial Sequence: Synthetic oligonucleotide
ccuugauauaauaaugcau

SEQ ID NO: 484066 - RNA, 19 nt, Artificial Sequence
  Description of Artificial Sequence: Synthetic oligonucleotide
caguaagagggugguacca

SEQ ID NO: 484067 - RNA, 19 nt, Artificial Sequence
  Description of Artificial Sequence: Synthetic oligonucleotide
caaacccacuguaaucccu

SEQ ID NO: 484068 - RNA, 19 nt, Artificial Sequence
  Description of Artificial Sequence: Synthetic oligonucleotide
agcuuccaucaccguaaga

SEQ ID NO: 484069 - RNA, 19 nt, Artificial Sequence
  Description of Artificial Sequence: Synthetic oligonucleotide
caggaacaaucauuaaaau

SEQ ID NO: 484070 - RNA, 19 nt, Artificial Sequence
  Description of Artificial Sequence: Synthetic oligonucleotide
gcuugucagucuucgucac

SEQ ID NO: 484071 - RNA, 19 nt, Artificial Sequence
  Description of Artificial Sequence: Synthetic oligonucleotide
cuagaaaguggagguaacu

SEQ ID NO: 484072 - RNA, 19 nt, Artificial Sequence
  Description of Artificial Sequence: Synthetic oligonucleotide
caguucucgguccuucgaa

SEQ ID NO: 484073 - RNA, 19 nt, Artificial Sequence
  Description of Artificial Sequence: Synthetic oligonucleotide
cauaagcuuccugcuuguc

SEQ ID NO: 484074 - RNA, 19 nt, Artificial Sequence
  Description of Artificial Sequence: Synthetic oligonucleotide
ggcaccaaacuuccccuuc

SEQ ID NO: 484075 - RNA, 19 nt, Artificial Sequence
  Description of Artificial Sequence: Synthetic oligonucleotide
uccccggauccccuggcuu

SEQ ID NO: 484076 - RNA, 19 nt, Artificial Sequence
  Description of Artificial Sequence: Synthetic oligonucleotide
auccccuggcuugcgucgg

SEQ ID NO: 484077 - RNA, 19 nt, Artificial Sequence
  Description of Artificial Sequence: Synthetic oligonucleotide
cacagaagagagcauucau

SEQ ID NO: 484078 - RNA, 19 nt, Artificial Sequence
  Description of Artificial Sequence: Synthetic oligonucleotide
auauuacacugugcauaaa

SEQ ID NO: 484079 - RNA, 19 nt, Artificial Sequence
  Description of Artificial Sequence: Synthetic oligonucleotide
ggacuauaaauagcaggaa

SEQ ID NO: 484080 - RNA, 19 nt, Artificial Sequence
  Description of Artificial Sequence: Synthetic oligonucleotide
ucauuacaccuagggcuuu

SEQ ID NO: 484081 - RNA, 19 nt, Artificial Sequence
  Description of Artificial Sequence: Synthetic oligonucleotide
cuacaaggugguggucaug

SEQ ID NO: 484082 - RNA, 19 nt, Artificial Sequence
  Description of Artificial Sequence: Synthetic oligonucleotide
agaucucgggauggugcga

SEQ ID NO: 484083 - RNA, 19 nt, Artificial Sequence
  Description of Artificial Sequence: Synthetic oligonucleotide
gcuaccaccuccugugugu

SEQ ID NO: 484084 - RNA, 19 nt, Artificial Sequence
  Description of Artificial Sequence: Synthetic oligonucleotide
ccccaguaucaacaucuag

SEQ ID NO: 484085 - RNA, 19 nt, Artificial Sequence
  Description of Artificial Sequence: Synthetic oligonucleotide
ggugcgaagauccccggau

SEQ ID NO: 484086 - RNA, 19 nt, Artificial Sequence
  Description of Artificial Sequence: Synthetic oligonucleotide
gaaucgagucaaacccacu

SEQ ID NO: 484087 - RNA, 19 nt, Artificial Sequence
  Description of Artificial Sequence: Synthetic oligonucleotide
ccauugcauaaaacaccug

SEQ ID NO: 484088 - RNA, 19 nt, Artificial Sequence
  Description of Artificial Sequence: Synthetic oligonucleotide
cuguaaucccuagcaagcu

SEQ ID NO: 484089 - RNA, 19 nt, Artificial Sequence
  Description of Artificial Sequence: Synthetic oligonucleotide
agucuucgucacacugaug

SEQ ID NO: 484090 - RNA, 19 nt, Artificial Sequence
  Description of Artificial Sequence: Synthetic oligonucleotide
ggacgaugccugcagaaau

SEQ ID NO: 484091 - RNA, 19 nt, Artificial Sequence
  Description of Artificial Sequence: Synthetic oligonucleotide
gcgaagauccccggauccc

SEQ ID NO: 484092 - RNA, 19 nt, Artificial Sequence
  Description of Artificial Sequence: Synthetic oligonucleotide
agcaucuaaugaggacgaa

SEQ ID NO: 484093 - RNA, 19 nt, Artificial Sequence
  Description of Artificial Sequence: Synthetic oligonucleotide
caacuacaagguggugguc

SEQ ID NO: 484094 - RNA, 19 nt, Artificial Sequence
  Description of Artificial Sequence: Synthetic oligonucleotide
ccaucaccguaagacgagc

SEQ ID NO: 484095 - RNA, 19 nt, Artificial Sequence
  Description of Artificial Sequence: Synthetic oligonucleotide
gaagauccccggauccccu

SEQ ID NO: 484096 - RNA, 19 nt, Artificial Sequence
  Description of Artificial Sequence: Synthetic oligonucleotide
caucaggugcugugcauau

SEQ ID NO: 484097 - RNA, 19 nt, Artificial Sequence
  Description of Artificial Sequence: Synthetic oligonucleotide
cuucgucacacugaugauu

SEQ ID NO: 484098 - RNA, 19 nt, Artificial Sequence
  Description of Artificial Sequence: Synthetic oligonucleotide
ccuggcuugcgucgggcug

SEQ ID NO: 484099 - RNA, 19 nt, Artificial Sequence
  Description of Artificial Sequence: Synthetic oligonucleotide
cgaagauccccggaucccc

SEQ ID NO: 484100 - RNA, 19 nt, Artificial Sequence
  Description of Artificial Sequence: Synthetic oligonucleotide
ggacgaaagccuugucugu

SEQ ID NO: 484101 - RNA, 19 nt, Artificial Sequence
  Description of Artificial Sequence: Synthetic oligonucleotide
cugaguacauaagcuuccu

SEQ ID NO: 484102 - RNA, 19 nt, Artificial Sequence
  Description of Artificial Sequence: Synthetic oligonucleotide
cugcaacuacaagguggug

SEQ ID NO: 484103 - RNA, 19 nt, Artificial Sequence
  Description of Artificial Sequence: Synthetic oligonucleotide
cucgggauggugcgaagau

SEQ ID NO: 484104 - RNA, 19 nt, Artificial Sequence
  Description of Artificial Sequence: Synthetic oligonucleotide
uugcgucgggcugcugccu

SEQ ID NO: 484105 - RNA, 19 nt, Artificial Sequence
  Description of Artificial Sequence: Synthetic oligonucleotide
gcauacacuucaaaaugau

SEQ ID NO: 484106 - RNA, 19 nt, Artificial Sequence
  Description of Artificial Sequence: Synthetic oligonucleotide
ccccggauccccuggcuug

SEQ ID NO: 484107 - RNA, 19 nt, Artificial Sequence
  Description of Artificial Sequence: Synthetic oligonucleotide
cuacucucacugaguacau

SEQ ID NO: 484108 - RNA, 19 nt, Artificial Sequence
  Description of Artificial Sequence: Synthetic oligonucleotide
gcaccaaacuuccccuucu

SEQ ID NO: 484109 - RNA, 19 nt, Artificial Sequence
  Description of Artificial Sequence: Synthetic oligonucleotide
ggccagcaucuaaugagga

SEQ ID NO: 484110 - RNA, 19 nt, Artificial Sequence
  Description of Artificial Sequence: Synthetic oligonucleotide
cucaagaucucgggauggu

SEQ ID NO: 484111 - RNA, 19 nt, Artificial Sequence
  Description of Artificial Sequence: Synthetic oligonucleotide
cgagucaaacccacuguaa

SEQ ID NO: 484112 - RNA, 19 nt, Artificial Sequence
  Description of Artificial Sequence: Synthetic oligonucleotide
uggcuugcgucgggcugcu

SEQ ID NO: 484113 - RNA, 19 nt, Artificial Sequence
  Description of Artificial Sequence: Synthetic oligonucleotide
cuagggcuuucugcaacua

SEQ ID NO: 484114 - RNA, 19 nt, Artificial Sequence
  Description of Artificial Sequence: Synthetic oligonucleotide
cagucgcagauggucagcu

SEQ ID NO: 484115 - RNA, 19 nt, Artificial Sequence
  Description of Artificial Sequence: Synthetic oligonucleotide
gaguggcauagaacaccua

SEQ ID NO: 484116 - RNA, 19 nt, Artificial Sequence
  Description of Artificial Sequence: Synthetic oligonucleotide
gcucuagaaaguggaggua

SEQ ID NO: 484117 - RNA, 19 nt, Artificial Sequence
  Description of Artificial Sequence: Synthetic oligonucleotide
ccguaagacgagcgaacaa

SEQ ID NO: 484118 - RNA, 19 nt, Artificial Sequence
  Description of Artificial Sequence: Synthetic oligonucleotide
cacaagugucguagagauu

SEQ ID NO: 484119 - RNA, 19 nt, Artificial Sequence
  Description of Artificial Sequence: Synthetic oligonucleotide
cagcuaccaccuccugugu

SEQ ID NO: 484120 - RNA, 19 nt, Artificial Sequence
  Description of Artificial Sequence: Synthetic oligonucleotide
gcaagauaucuaacuccuu

SEQ ID NO: 484121 - RNA, 19 nt, Artificial Sequence
  Description of Artificial Sequence: Synthetic oligonucleotide
ccggauccccuggcuugcg

SEQ ID NO: 484122 - RNA, 19 nt, Artificial Sequence
  Description of Artificial Sequence: Synthetic oligonucleotide
cccuggcuugcgucgggcu

SEQ ID NO: 484123 - RNA, 19 nt, Artificial Sequence
  Description of Artificial Sequence: Synthetic oligonucleotide
ggcuugcgucgggcugcug

SEQ ID NO: 484124 - RNA, 19 nt, Artificial Sequence
  Description of Artificial Sequence: Synthetic oligonucleotide
cgaugccugcagaaauauu

SEQ ID NO: 484125 - RNA, 19 nt, Artificial Sequence
  Description of Artificial Sequence: Synthetic oligonucleotide
aaaaguucgaauagaagcc

SEQ ID NO: 484126 - RNA, 19 nt, Artificial Sequence
  Description of Artificial Sequence: Synthetic oligonucleotide
uugacuauaggccucacug

SEQ ID NO: 484127 - RNA, 19 nt, Artificial Sequence
  Description of Artificial Sequence: Synthetic oligonucleotide
ugaguuaauaaauggauac

SEQ ID NO: 484128 - RNA, 19 nt, Artificial Sequence
  Description of Artificial Sequence: Synthetic oligonucleotide
cuugacuugacuauaggcc

SEQ ID NO: 484129 - RNA, 19 nt, Artificial Sequence
  Description of Artificial Sequence: Synthetic oligonucleotide
uaaccggugauccucagcg

SEQ ID NO: 484130 - RNA, 19 nt, Artificial Sequence
  Description of Artificial Sequence: Synthetic oligonucleotide
gaccauguaaaguugacgc

SEQ ID NO: 484131 - RNA, 19 nt, Artificial Sequence
  Description of Artificial Sequence: Synthetic oligonucleotide
aaacuucucaauuggcggg

SEQ ID NO: 484132 - RNA, 19 nt, Artificial Sequence
  Description of Artificial Sequence: Synthetic oligonucleotide
ugugguaguauucggaggc

SEQ ID NO: 484133 - RNA, 19 nt, Artificial Sequence
  Description of Artificial Sequence: Synthetic oligonucleotide
uguaguucggguaagcaga

SEQ ID NO: 484134 - RNA, 19 nt, Artificial Sequence
  Description of Artificial Sequence: Synthetic oligonucleotide
uucgacuuaaguuugugug

SEQ ID NO: 484135 - RNA, 19 nt, Artificial Sequence
  Description of Artificial Sequence: Synthetic oligonucleotide
aaugaacacgaauggaucu

SEQ ID NO: 484136 - RNA, 19 nt, Artificial Sequence
  Description of Artificial Sequence: Synthetic oligonucleotide
uaagaucuuaugauggggc

SEQ ID NO: 484137 - RNA, 19 nt, Artificial Sequence
  Description of Artificial Sequence: Synthetic oligonucleotide
ucgaauagaagccuuuccc

SEQ ID NO: 484138 - RNA, 19 nt, Artificial Sequence
  Description of Artificial Sequence: Synthetic oligonucleotide
aguaggucgaauuugugug

SEQ ID NO: 484139 - RNA, 19 nt, Artificial Sequence
  Description of Artificial Sequence: Synthetic oligonucleotide
agcgucaugguucaccacc

SEQ ID NO: 484140 - RNA, 19 nt, Artificial Sequence
  Description of Artificial Sequence: Synthetic oligonucleotide
gaugugguaguauucggag

SEQ ID NO: 484141 - RNA, 19 nt, Artificial Sequence
  Description of Artificial Sequence: Synthetic oligonucleotide
auauauccccuccugugcc

SEQ ID NO: 484142 - RNA, 19 nt, Artificial Sequence
  Description of Artificial Sequence: Synthetic oligonucleotide
ucaauuaacuguguggucu

SEQ ID NO: 484143 - RNA, 19 nt, Artificial Sequence
  Description of Artificial Sequence: Synthetic oligonucleotide
auucgaagaauccgguucg

SEQ ID NO: 484144 - RNA, 19 nt, Artificial Sequence
  Description of Artificial Sequence: Synthetic oligonucleotide
aaauggauacaauguauau

SEQ ID NO: 484145 - RNA, 19 nt, Artificial Sequence
  Description of Artificial Sequence: Synthetic oligonucleotide
ugucuaagaucuuaugaug

SEQ ID NO: 484146 - RNA, 19 nt, Artificial Sequence
  Description of Artificial Sequence: Synthetic oligonucleotide
ucuggauucgaagaauccg

SEQ ID NO: 484147 - RNA, 19 nt, Artificial Sequence
  Description of Artificial Sequence: Synthetic oligonucleotide
uucaaggugguccauuucu

SEQ ID NO: 484148 - RNA, 19 nt, Artificial Sequence
  Description of Artificial Sequence: Synthetic oligonucleotide
uaaauggauacaauguaua

SEQ ID NO: 484149 - RNA, 19 nt, Artificial Sequence
  Description of Artificial Sequence: Synthetic oligonucleotide
gugggaacauaguaggucg

SEQ ID NO: 484150 - RNA, 19 nt, Artificial Sequence
  Description of Artificial Sequence: Synthetic oligonucleotide
uguauauauccccuccugu

SEQ ID NO: 484151 - RNA, 19 nt, Artificial Sequence
  Description of Artificial Sequence: Synthetic oligonucleotide
ucgaguugcaauccggagc

SEQ ID NO: 484152 - RNA, 19 nt, Artificial Sequence
  Description of Artificial Sequence: Synthetic oligonucleotide
gaacaaguagguagcagcg

SEQ ID NO: 484153 - RNA, 19 nt, Artificial Sequence
  Description of Artificial Sequence: Synthetic oligonucleotide
aacaaguagguagcagcgc

SEQ ID NO: 484154 - RNA, 19 nt, Artificial Sequence
  Description of Artificial Sequence: Synthetic oligonucleotide
uuggagaccauguaaaguu

SEQ ID NO: 484155 - RNA, 19 nt, Artificial Sequence
  Description of Artificial Sequence: Synthetic oligonucleotide
augucuaagaucuuaugau

SEQ ID NO: 484156 - RNA, 19 nt, Artificial Sequence
  Description of Artificial Sequence: Synthetic oligonucleotide
uuuugaccaauacugccac

SEQ ID NO: 484157 - RNA, 19 nt, Artificial Sequence
  Description of Artificial Sequence: Synthetic oligonucleotide
uucgaauagaagccuuucc

SEQ ID NO: 484158 - RNA, 19 nt, Artificial Sequence
  Description of Artificial Sequence: Synthetic oligonucleotide
ucgacuuaaguuugugugc

SEQ ID NO: 484159 - RNA, 19 nt, Artificial Sequence
  Description of Artificial Sequence: Synthetic oligonucleotide
agcaccucgaguugcaauc

SEQ ID NO: 484160 - RNA, 19 nt, Artificial Sequence
  Description of Artificial Sequence: Synthetic oligonucleotide
uggaguaucucuuuugcau

SEQ ID NO: 484161 - RNA, 19 nt, Artificial Sequence
  Description of Artificial Sequence: Synthetic oligonucleotide
cucagucucgcuaaccagg

SEQ ID NO: 484162 - RNA, 19 nt, Artificial Sequence
  Description of Artificial Sequence: Synthetic oligonucleotide
agaagcgucaugguucacc

SEQ ID NO: 484163 - RNA, 19 nt, Artificial Sequence
  Description of Artificial Sequence: Synthetic oligonucleotide
uccugagauaaugaagccg

SEQ ID NO: 484164 - RNA, 19 nt, Artificial Sequence
  Description of Artificial Sequence: Synthetic oligonucleotide
ucguucuugggcacaaaag

SEQ ID NO: 484165 - RNA, 19 nt, Artificial Sequence
  Description of Artificial Sequence: Synthetic oligonucleotide
cuaagaucuuaugaugggg

SEQ ID NO: 484166 - RNA, 19 nt, Artificial Sequence
  Description of Artificial Sequence: Synthetic oligonucleotide
auuugcgaugacaaauccc

SEQ ID NO: 484167 - RNA, 19 nt, Artificial Sequence
  Description of Artificial Sequence: Synthetic oligonucleotide
uaguaggucgaauuugugu

SEQ ID NO: 484168 - RNA, 19 nt, Artificial Sequence
  Description of Artificial Sequence: Synthetic oligonucleotide
aaaguucgaauagaagccu

SEQ ID NO: 484169 - RNA, 19 nt, Artificial Sequence
  Description of Artificial Sequence: Synthetic oligonucleotide
ugugccaaacggaacgcgc

SEQ ID NO: 484170 - RNA, 19 nt, Artificial Sequence
  Description of Artificial Sequence: Synthetic oligonucleotide
uccucgaccggguucagag

SEQ ID NO: 484171 - RNA, 19 nt, Artificial Sequence
  Description of Artificial Sequence: Synthetic oligonucleotide
uccgguucguacuucagca

SEQ ID NO: 484172 - RNA, 19 nt, Artificial Sequence
  Description of Artificial Sequence: Synthetic oligonucleotide
uaucccgguguuaaugacc

SEQ ID NO: 484173 - RNA, 19 nt, Artificial Sequence
  Description of Artificial Sequence: Synthetic oligonucleotide
acaaguagguagcagcgcu

SEQ ID NO: 484174 - RNA, 19 nt, Artificial Sequence
  Description of Artificial Sequence: Synthetic oligonucleotide
aaacggaacgcgcagucaa

SEQ ID NO: 484175 - RNA, 19 nt, Artificial Sequence
  Description of Artificial Sequence: Synthetic oligonucleotide
uggccugaugaacaaguag

SEQ ID NO: 484176 - RNA, 19 nt, Artificial Sequence
  Description of Artificial Sequence: Synthetic oligonucleotide
uuuggcugacgcuuauucc

SEQ ID NO: 484177 - RNA, 19 nt, Artificial Sequence
  Description of Artificial Sequence: Synthetic oligonucleotide
uuggcgggaacaaaggguc

SEQ ID NO: 484178 - RNA, 19 nt, Artificial Sequence
  Description of Artificial Sequence: Synthetic oligonucleotide
ugacgcuuauuccauggca

SEQ ID NO: 484179 - RNA, 19 nt, Artificial Sequence
  Description of Artificial Sequence: Synthetic oligonucleotide
uccgguguucugaugaugu

SEQ ID NO: 484180 - RNA, 19 nt, Artificial Sequence
  Description of Artificial Sequence: Synthetic oligonucleotide
caauuggcgggaacaaagg

SEQ ID NO: 484181 - RNA, 19 nt, Artificial Sequence
  Description of Artificial Sequence: Synthetic oligonucleotide
ucugcgugcaacauuucaa

SEQ ID NO: 484182 - RNA, 19 nt, Artificial Sequence
  Description of Artificial Sequence: Synthetic oligonucleotide
cuuccguucacgucuacug

SEQ ID NO: 484183 - RNA, 19 nt, Artificial Sequence
  Description of Artificial Sequence: Synthetic oligonucleotide
uuauuucggcaccagacuu

SEQ ID NO: 484184 - RNA, 19 nt, Artificial Sequence
  Description of Artificial Sequence: Synthetic oligonucleotide
ggcacaaaaguucgaauag

SEQ ID NO: 484185 - RNA, 19 nt, Artificial Sequence
  Description of Artificial Sequence: Synthetic oligonucleotide
aaauucgaucauagaagag

SEQ ID NO: 484186 - RNA, 19 nt, Artificial Sequence
  Description of Artificial Sequence: Synthetic oligonucleotide
augugguaguauucggagg

SEQ ID NO: 484187 - RNA, 19 nt, Artificial Sequence
  Description of Artificial Sequence: Synthetic oligonucleotide
uauucggaggcaucgcucu

SEQ ID NO: 484188 - RNA, 19 nt, Artificial Sequence
  Description of Artificial Sequence: Synthetic oligonucleotide
uagguagcagcgcuuguug

SEQ ID NO: 484189 - RNA, 19 nt, Artificial Sequence
  Description of Artificial Sequence: Synthetic oligonucleotide
agaccauguaaaguugacg

SEQ ID NO: 484190 - RNA, 19 nt, Artificial Sequence
  Description of Artificial Sequence: Synthetic oligonucleotide
acucaugucugcgugcaac

SEQ ID NO: 484191 - RNA, 19 nt, Artificial Sequence
  Description of Artificial Sequence: Synthetic oligonucleotide
uggaguacaccauccugcc

SEQ ID NO: 484192 - RNA, 19 nt, Artificial Sequence
  Description of Artificial Sequence: Synthetic oligonucleotide
cuuuggcugacgcuuauuc

SEQ ID NO: 484193 - RNA, 19 nt, Artificial Sequence
  Description of Artificial Sequence: Synthetic oligonucleotide
aguauucggaggcaucgcu

SEQ ID NO: 484194 - RNA, 19 nt, Artificial Sequence
  Description of Artificial Sequence: Synthetic oligonucleotide
cuugaguuaauaaauggau

SEQ ID NO: 484195 - RNA, 19 nt, Artificial Sequence
  Description of Artificial Sequence: Synthetic oligonucleotide
gaagcgucaugguucacca

SEQ ID NO: 484196 - RNA, 19 nt, Artificial Sequence
  Description of Artificial Sequence: Synthetic oligonucleotide
uuuucgacuuaaguuugug

SEQ ID NO: 484197 - RNA, 19 nt, Artificial Sequence
  Description of Artificial Sequence: Synthetic oligonucleotide
aggucgaauuugugugugc

SEQ ID NO: 484198 - RNA, 19 nt, Artificial Sequence
  Description of Artificial Sequence: Synthetic oligonucleotide
caucuggauucgaagaauc

SEQ ID NO: 484199 - RNA, 19 nt, Artificial Sequence
  Description of Artificial Sequence: Synthetic oligonucleotide
ggaacgaaggguccaaggc

SEQ ID NO: 484200 - RNA, 19 nt, Artificial Sequence
  Description of Artificial Sequence: Synthetic oligonucleotide
accggguucagagaacacg

SEQ ID NO: 484201 - RNA, 19 nt, Artificial Sequence
  Description of Artificial Sequence: Synthetic oligonucleotide
acacgaauggaucuucuuu

SEQ ID NO: 484202 - RNA, 19 nt, Artificial Sequence
  Description of Artificial Sequence: Synthetic oligonucleotide
gugauccucagcguggccg

SEQ ID NO: 484203 - RNA, 19 nt, Artificial Sequence
  Description of Artificial Sequence: Synthetic oligonucleotide
accauguaaaguugacgcu

SEQ ID NO: 484204 - RNA, 19 nt, Artificial Sequence
  Description of Artificial Sequence: Synthetic oligonucleotide
cacaaaaguucgaauagaa

SEQ ID NO: 484205 - RNA, 19 nt, Artificial Sequence
  Description of Artificial Sequence: Synthetic oligonucleotide
ucuucaagcaauggaguau

SEQ ID NO: 484206 - RNA, 19 nt, Artificial Sequence
  Description of Artificial Sequence: Synthetic oligonucleotide
ucgcuaaccaggaacugau

SEQ ID NO: 484207 - RNA, 19 nt, Artificial Sequence
  Description of Artificial Sequence: Synthetic oligonucleotide
ggaggcaucgcucuagaug

SEQ ID NO: 484208 - RNA, 19 nt, Artificial Sequence
  Description of Artificial Sequence: Synthetic oligonucleotide
aauggucaccaugauuccu

SEQ ID NO: 484209 - RNA, 19 nt, Artificial Sequence
  Description of Artificial Sequence: Synthetic oligonucleotide
uucaauuaacugugugguc

SEQ ID NO: 484210 - RNA, 19 nt, Artificial Sequence
  Description of Artificial Sequence: Synthetic oligonucleotide
cucaucguuuucaggcugc

SEQ ID NO: 484211 - RNA, 19 nt, Artificial Sequence
  Description of Artificial Sequence: Synthetic oligonucleotide
cucuagaugcaucgauugc

SEQ ID NO: 484212 - RNA, 19 nt, Artificial Sequence
  Description of Artificial Sequence: Synthetic oligonucleotide
ugccaaacggaacgcgcag

SEQ ID NO: 484213 - RNA, 19 nt, Artificial Sequence
  Description of Artificial Sequence: Synthetic oligonucleotide
acgcuagcaguucagcgug

SEQ ID NO: 484214 - RNA, 19 nt, Artificial Sequence
  Description of Artificial Sequence: Synthetic oligonucleotide
aacacgaauggaucuucuu

SEQ ID NO: 484215 - RNA, 19 nt, Artificial Sequence
  Description of Artificial Sequence: Synthetic oligonucleotide
auucgaucauagaagagaa

SEQ ID NO: 484216 - RNA, 19 nt, Artificial Sequence
  Description of Artificial Sequence: Synthetic oligonucleotide
aauuaacuguguggucuug

SEQ ID NO: 484217 - RNA, 19 nt, Artificial Sequence
  Description of Artificial Sequence: Synthetic oligonucleotide
ugauggggcucuacguuga

SEQ ID NO: 484218 - RNA, 19 nt, Artificial Sequence
  Description of Artificial Sequence: Synthetic oligonucleotide
caucgugccgucaccacug

SEQ ID NO: 484219 - RNA, 19 nt, Artificial Sequence
  Description of Artificial Sequence: Synthetic oligonucleotide
uugguaagaaugaccccau

SEQ ID NO: 484220 - RNA, 19 nt, Artificial Sequence
  Description of Artificial Sequence: Synthetic oligonucleotide
auuggcgggaacaaagggu

SEQ ID NO: 484221 - RNA, 19 nt, Artificial Sequence
  Description of Artificial Sequence: Synthetic oligonucleotide
aagggacgcuagcaguuca

SEQ ID NO: 484222 - RNA, 19 nt, Artificial Sequence
  Description of Artificial Sequence: Synthetic oligonucleotide
gcugacgcuuauuccaugg

SEQ ID NO: 484223 - RNA, 19 nt, Artificial Sequence
  Description of Artificial Sequence: Synthetic oligonucleotide
cucgaguugcaauccggag

SEQ ID NO: 484224 - RNA, 19 nt, Artificial Sequence
  Description of Artificial Sequence: Synthetic oligonucleotide
uaaugauucuugaguuaau

SEQ ID NO: 484225 - RNA, 19 nt, Artificial Sequence
  Description of Artificial Sequence: Synthetic oligonucleotide
uuaucccgguguuaaugac

SEQ ID NO: 484226 - RNA, 19 nt, Artificial Sequence
  Description of Artificial Sequence: Synthetic oligonucleotide
gcaccagacuuuuaucccg

SEQ ID NO: 484227 - RNA, 19 nt, Artificial Sequence
  Description of Artificial Sequence: Synthetic oligonucleotide
agguccuugacuugacuau

SEQ ID NO: 484228 - RNA, 19 nt, Artificial Sequence
  Description of Artificial Sequence: Synthetic oligonucleotide
gcucuagaugcaucgauug

SEQ ID NO: 484229 - RNA, 19 nt, Artificial Sequence
  Description of Artificial Sequence: Synthetic oligonucleotide
gaauccgguucguacuuca

SEQ ID NO: 484230 - RNA, 19 nt, Artificial Sequence
  Description of Artificial Sequence: Synthetic oligonucleotide
ugggaacauaguaggucga

SEQ ID NO: 484231 - RNA, 19 nt, Artificial Sequence
  Description of Artificial Sequence: Synthetic oligonucleotide
ugaacacgaauggaucuuc

SEQ ID NO: 484232 - RNA, 19 nt, Artificial Sequence
  Description of Artificial Sequence: Synthetic oligonucleotide
uaggucgaauuugugugug

SEQ ID NO: 484233 - RNA, 19 nt, Artificial Sequence
  Description of Artificial Sequence: Synthetic oligonucleotide
cuagaagcgucaugguuca

SEQ ID NO: 484234 - RNA, 19 nt, Artificial Sequence
  Description of Artificial Sequence: Synthetic oligonucleotide
ggacgcuagcaguucagcg

SEQ ID NO: 484235 - RNA, 19 nt, Artificial Sequence
  Description of Artificial Sequence: Synthetic oligonucleotide
cuggggaaccucaucccag

SEQ ID NO: 484236 - RNA, 19 nt, Artificial Sequence
  Description of Artificial Sequence: Synthetic oligonucleotide
gcuagaagcgucaugguuc

SEQ ID NO: 484237 - RNA, 19 nt, Artificial Sequence
  Description of Artificial Sequence: Synthetic oligonucleotide
cauaguaggucgaauuugu

SEQ ID NO: 484238 - RNA, 19 nt, Artificial Sequence
  Description of Artificial Sequence: Synthetic oligonucleotide
cuguaccuuuggcugacgc

SEQ ID NO: 484239 - RNA, 19 nt, Artificial Sequence
  Description of Artificial Sequence: Synthetic oligonucleotide
cgaauagaagccuuucccc

SEQ ID NO: 484240 - RNA, 19 nt, Artificial Sequence
  Description of Artificial Sequence: Synthetic oligonucleotide
acggaacgcgcagucaaac

SEQ ID NO: 484241 - RNA, 19 nt, Artificial Sequence
  Description of Artificial Sequence: Synthetic oligonucleotide
cuacguugagcagcagugg

SEQ ID NO: 484242 - RNA, 19 nt, Artificial Sequence
  Description of Artificial Sequence: Synthetic oligonucleotide
uugcaauccggagcuguag

SEQ ID NO: 484243 - RNA, 19 nt, Artificial Sequence
  Description of Artificial Sequence: Synthetic oligonucleotide
acgaauggaucuucuuuaa

SEQ ID NO: 484244 - RNA, 19 nt, Artificial Sequence
  Description of Artificial Sequence: Synthetic oligonucleotide
uucggaggcaucgcucuag

SEQ ID NO: 484245 - RNA, 19 nt, Artificial Sequence
  Description of Artificial Sequence: Synthetic oligonucleotide
gaugaacaaguagguagca

SEQ ID NO: 484246 - RNA, 19 nt, Artificial Sequence
  Description of Artificial Sequence: Synthetic oligonucleotide
ucgcucuagaugcaucgau

SEQ ID NO: 484247 - RNA, 19 nt, Artificial Sequence
  Description of Artificial Sequence: Synthetic oligonucleotide
cacgaauggaucuucuuua

SEQ ID NO: 484248 - RNA, 19 nt, Artificial Sequence
  Description of Artificial Sequence: Synthetic oligonucleotide
ggcaccagacuuuuauccc

SEQ ID NO: 484249 - RNA, 19 nt, Artificial Sequence
  Description of Artificial Sequence: Synthetic oligonucleotide
cugacgcuuauuccauggc

SEQ ID NO: 484250 - RNA, 19 nt, Artificial Sequence
  Description of Artificial Sequence: Synthetic oligonucleotide
ggaacgcgcagucaaacuc

SEQ ID NO: 484251 - RNA, 19 nt, Artificial Sequence
  Description of Artificial Sequence: Synthetic oligonucleotide
gagaccauguaaaguugac

SEQ ID NO: 484252 - RNA, 19 nt, Artificial Sequence
  Description of Artificial Sequence: Synthetic oligonucleotide
cagacuuuuaucccggugu

SEQ ID NO: 484253 - RNA, 19 nt, Artificial Sequence
  Description of Artificial Sequence: Synthetic oligonucleotide
aauccgguucguacuucag

SEQ ID NO: 484254 - RNA, 19 nt, Artificial Sequence
  Description of Artificial Sequence: Synthetic oligonucleotide
auguaaaguugacgcuucu

SEQ ID NO: 484255 - RNA, 19 nt, Artificial Sequence
  Description of Artificial Sequence: Synthetic oligonucleotide
aucgugccgucaccacugc

SEQ ID NO: 484256 - RNA, 19 nt, Artificial Sequence
  Description of Artificial Sequence: Synthetic oligonucleotide
ucaccgggauggcucagcu

SEQ ID NO: 484257 - RNA, 19 nt, Artificial Sequence
  Description of Artificial Sequence: Synthetic oligonucleotide
gcuauuaccgcuucguccu

SEQ ID NO: 484258 - RNA, 19 nt, Artificial Sequence
  Description of Artificial Sequence: Synthetic oligonucleotide
ggucgaauuugugugugcc

SEQ ID NO: 484259 - RNA, 19 nt, Artificial Sequence
  Description of Artificial Sequence: Synthetic oligonucleotide
aaccggugauccucagcgu

SEQ ID NO: 484260 - RNA, 19 nt, Artificial Sequence
  Description of Artificial Sequence: Synthetic oligonucleotide
ucuuaugauggggcucuac

SEQ ID NO: 484261 - RNA, 19 nt, Artificial Sequence
  Description of Artificial Sequence: Synthetic oligonucleotide
uucggguaagcagauucau

SEQ ID NO: 484262 - RNA, 19 nt, Artificial Sequence
  Description of Artificial Sequence: Synthetic oligonucleotide
cuaaggacauucuggauuu

SEQ ID NO: 484263 - RNA, 19 nt, Artificial Sequence
  Description of Artificial Sequence: Synthetic oligonucleotide
agguagcagcgcuuguugu

SEQ ID NO: 484264 - RNA, 19 nt, Artificial Sequence
  Description of Artificial Sequence: Synthetic oligonucleotide
cacgucuacugugagucug

SEQ ID NO: 484265 - RNA, 19 nt, Artificial Sequence
  Description of Artificial Sequence: Synthetic oligonucleotide
auaguaggucgaauuugug

SEQ ID NO: 484266 - RNA, 19 nt, Artificial Sequence
  Description of Artificial Sequence: Synthetic oligonucleotide
ugcgugcaacauuucaauu

SEQ ID NO: 484267 - RNA, 19 nt, Artificial Sequence
  Description of Artificial Sequence: Synthetic oligonucleotide
ucaccggcuccugugguca

SEQ ID NO: 484268 - RNA, 19 nt, Artificial Sequence
  Description of Artificial Sequence: Synthetic oligonucleotide
gacuuaaguuugugugcca

SEQ ID NO: 484269 - RNA, 19 nt, Artificial Sequence
  Description of Artificial Sequence: Synthetic oligonucleotide
accucgaguugcaauccgg

SEQ ID NO: 484270 - RNA, 19 nt, Artificial Sequence
  Description of Artificial Sequence: Synthetic oligonucleotide
ucggcaccagacuuuuauc

SEQ ID NO: 484271 - RNA, 19 nt, Artificial Sequence
  Description of Artificial Sequence: Synthetic oligonucleotide
aaguucgaauagaagccuu

SEQ ID NO: 484272 - RNA, 19 nt, Artificial Sequence
  Description of Artificial Sequence: Synthetic oligonucleotide
uggcugacgcuuauuccau

SEQ ID NO: 484273 - RNA, 19 nt, Artificial Sequence
  Description of Artificial Sequence: Synthetic oligonucleotide
ucggaggcaucgcucuaga

SEQ ID NO: 484274 - RNA, 19 nt, Artificial Sequence
  Description of Artificial Sequence: Synthetic oligonucleotide
gaugaucucgggguaccca

SEQ ID NO: 484275 - RNA, 19 nt, Artificial Sequence
  Description of Artificial Sequence: Synthetic oligonucleotide
gauggggcucuacguugag

SEQ ID NO: 484276 - RNA, 19 nt, Artificial Sequence
  Description of Artificial Sequence: Synthetic oligonucleotide
cgcgcagucaaacucuucg

SEQ ID NO: 484277 - RNA, 19 nt, Artificial Sequence
  Description of Artificial Sequence: Synthetic oligonucleotide
ggugggaacauaguagguc

SEQ ID NO: 484278 - RNA, 19 nt, Artificial Sequence
  Description of Artificial Sequence: Synthetic oligonucleotide
ugaugaucucgggguaccc

SEQ ID NO: 484279 - RNA, 19 nt, Artificial Sequence
  Description of Artificial Sequence: Synthetic oligonucleotide
ucucgcuaaccaggaacug

SEQ ID NO: 484280 - RNA, 19 nt, Artificial Sequence
  Description of Artificial Sequence: Synthetic oligonucleotide
acguggaguacaccauccu

SEQ ID NO: 484281 - RNA, 19 nt, Artificial Sequence
  Description of Artificial Sequence: Synthetic oligonucleotide
aagccuccgguguucugau

SEQ ID NO: 484282 - RNA, 19 nt, Artificial Sequence
  Description of Artificial Sequence: Synthetic oligonucleotide
cugugccaaacggaacgcg

SEQ ID NO: 484283 - RNA, 19 nt, Artificial Sequence
  Description of Artificial Sequence: Synthetic oligonucleotide
ucccuucuguaguucgggu

SEQ ID NO: 484284 - RNA, 19 nt, Artificial Sequence
  Description of Artificial Sequence: Synthetic oligonucleotide
augcuagaagcgucauggu

SEQ ID NO: 484285 - RNA, 19 nt, Artificial Sequence
  Description of Artificial Sequence: Synthetic oligonucleotide
cucaucgugccgucaccac

SEQ ID NO: 484286 - RNA, 19 nt, Artificial Sequence
  Description of Artificial Sequence: Synthetic oligonucleotide
uggcgggaacaaaggguca

SEQ ID NO: 484287 - RNA, 19 nt, Artificial Sequence
  Description of Artificial Sequence: Synthetic oligonucleotide
cucgaccggguucagagaa

SEQ ID NO: 484288 - RNA, 19 nt, Artificial Sequence
  Description of Artificial Sequence: Synthetic oligonucleotide
uccugauaguagugcucga

SEQ ID NO: 484289 - RNA, 19 nt, Artificial Sequence
  Description of Artificial Sequence: Synthetic oligonucleotide
guauucggaggcaucgcuc

SEQ ID NO: 484290 - RNA, 19 nt, Artificial Sequence
  Description of Artificial Sequence: Synthetic oligonucleotide
ugcccguccagcucagaau

SEQ ID NO: 484291 - RNA, 19 nt, Artificial Sequence
  Description of Artificial Sequence: Synthetic oligonucleotide
ucacgucuacugugagucu

SEQ ID NO: 484292 - RNA, 19 nt, Artificial Sequence
  Description of Artificial Sequence: Synthetic oligonucleotide
gcccguccagcucagaaug

SEQ ID NO: 484293 - RNA, 19 nt, Artificial Sequence
  Description of Artificial Sequence: Synthetic oligonucleotide
ucgaccggguucagagaac

SEQ ID NO: 484294 - RNA, 19 nt, Artificial Sequence
  Description of Artificial Sequence: Synthetic oligonucleotide
acgcuuauuccauggcauu

SEQ ID NO: 484295 - RNA, 19 nt, Artificial Sequence
  Description of Artificial Sequence: Synthetic oligonucleotide
auuucggcaccagacuuuu

SEQ ID NO: 484296 - RNA, 19 nt, Artificial Sequence
  Description of Artificial Sequence: Synthetic oligonucleotide
ucaucguuuucaggcugcu

SEQ ID NO: 484297 - RNA, 19 nt, Artificial Sequence
  Description of Artificial Sequence: Synthetic oligonucleotide
gcgugcaacauuucaauua

SEQ ID NO: 484298 - RNA, 19 nt, Artificial Sequence
  Description of Artificial Sequence: Synthetic oligonucleotide
aguucgaauagaagccuuu

SEQ ID NO: 484299 - RNA, 19 nt, Artificial Sequence
  Description of Artificial Sequence: Synthetic oligonucleotide
acgcaggccucuuguguug

SEQ ID NO: 484300 - RNA, 19 nt, Artificial Sequence
  Description of Artificial Sequence: Synthetic oligonucleotide
gacgcuuauuccauggcau

SEQ ID NO: 484301 - RNA, 19 nt, Artificial Sequence
  Description of Artificial Sequence: Synthetic oligonucleotide
guaggucgaauuugugugu

SEQ ID NO: 484302 - RNA, 19 nt, Artificial Sequence
  Description of Artificial Sequence: Synthetic oligonucleotide
accagacuuuuaucccggu

SEQ ID NO: 484303 - RNA, 19 nt, Artificial Sequence
  Description of Artificial Sequence: Synthetic oligonucleotide
aacagcgucuucacaucuu

SEQ ID NO: 484304 - RNA, 19 nt, Artificial Sequence
  Description of Artificial Sequence: Synthetic oligonucleotide
gauaaugaagccgcucguu

SEQ ID NO: 484305 - RNA, 19 nt, Artificial Sequence
  Description of Artificial Sequence: Synthetic oligonucleotide
ucgaagaauccgguucgua

SEQ ID NO: 484306 - RNA, 19 nt, Artificial Sequence
  Description of Artificial Sequence: Synthetic oligonucleotide
augcaucgauugcaguuuu

SEQ ID NO: 484307 - RNA, 19 nt, Artificial Sequence
  Description of Artificial Sequence: Synthetic oligonucleotide
gccuccgguguucugauga

SEQ ID NO: 484308 - RNA, 19 nt, Artificial Sequence
  Description of Artificial Sequence: Synthetic oligonucleotide
aacggaacgcgcagucaaa

SEQ ID NO: 484309 - RNA, 19 nt, Artificial Sequence
  Description of Artificial Sequence: Synthetic oligonucleotide
guucguacuucagcacaac

SEQ ID NO: 484310 - RNA, 19 nt, Artificial Sequence
  Description of Artificial Sequence: Synthetic oligonucleotide
gugccaaacggaacgcgca

SEQ ID NO: 484311 - RNA, 19 nt, Artificial Sequence
  Description of Artificial Sequence: Synthetic oligonucleotide
gcuuauuccauggcauuga

SEQ ID NO: 484312 - RNA, 19 nt, Artificial Sequence
  Description of Artificial Sequence: Synthetic oligonucleotide
gauccucagcguggccggg

SEQ ID NO: 484313 - RNA, 19 nt, Artificial Sequence
  Description of Artificial Sequence: Synthetic oligonucleotide
ucgugccgucaccacugca

SEQ ID NO: 484314 - RNA, 19 nt, Artificial Sequence
  Description of Artificial Sequence: Synthetic oligonucleotide
caagggacgcuagcaguuc

SEQ ID NO: 484315 - RNA, 19 nt, Artificial Sequence
  Description of Artificial Sequence: Synthetic oligonucleotide
ccacuguuauuucggcacc

SEQ ID NO: 484316 - RNA, 19 nt, Artificial Sequence
  Description of Artificial Sequence: Synthetic oligonucleotide
gucucgcuaaccaggaacu

SEQ ID NO: 484317 - RNA, 19 nt, Artificial Sequence
  Description of Artificial Sequence: Synthetic oligonucleotide
guaccuuuggcugacgcuu

SEQ ID NO: 484318 - RNA, 19 nt, Artificial Sequence
  Description of Artificial Sequence: Synthetic oligonucleotide
ccaaacggaacgcgcaguc

SEQ ID NO: 484319 - RNA, 19 nt, Artificial Sequence
  Description of Artificial Sequence: Synthetic oligonucleotide
gucaccggcuccugugguc

SEQ ID NO: 484320 - RNA, 19 nt, Artificial Sequence
  Description of Artificial Sequence: Synthetic oligonucleotide
cccgguguuaaugaccuuc

SEQ ID NO: 484321 - RNA, 19 nt, Artificial Sequence
  Description of Artificial Sequence: Synthetic oligonucleotide
cuugacuauaggccucacu

SEQ ID NO: 484322 - RNA, 19 nt, Artificial Sequence
  Description of Artificial Sequence: Synthetic oligonucleotide
gaacacgaauggaucuucu

SEQ ID NO: 484323 - RNA, 19 nt, Artificial Sequence
  Description of Artificial Sequence: Synthetic oligonucleotide
cugcgugcaacauuucaau

SEQ ID NO: 484324 - RNA, 19 nt, Artificial Sequence
  Description of Artificial Sequence: Synthetic oligonucleotide
cguggaguacaccauccug

SEQ ID NO: 484325 - RNA, 19 nt, Artificial Sequence
  Description of Artificial Sequence: Synthetic oligonucleotide
caaacggaacgcgcaguca

SEQ ID NO: 484326 - RNA, 19 nt, Artificial Sequence
  Description of Artificial Sequence: Synthetic oligonucleotide
cgugcaacauuucaauuaa

SEQ ID NO: 484327 - RNA, 19 nt, Artificial Sequence
  Description of Artificial Sequence: Synthetic oligonucleotide
cacuguuauuucggcacca

SEQ ID NO: 484328 - RNA, 19 nt, Artificial Sequence
  Description of Artificial Sequence: Synthetic oligonucleotide
caauuaacuguguggucuu

SEQ ID NO: 484329 - RNA, 19 nt, Artificial Sequence
  Description of Artificial Sequence: Synthetic oligonucleotide
uuucggcaccagacuuuua

SEQ ID NO: 484330 - RNA, 19 nt, Artificial Sequence
  Description of Artificial Sequence: Synthetic oligonucleotide
guugcaauccggagcugua

SEQ ID NO: 484331 - RNA, 19 nt, Artificial Sequence
  Description of Artificial Sequence: Synthetic oligonucleotide
ggcugacgcuuauuccaug

SEQ ID NO: 484332 - RNA, 19 nt, Artificial Sequence
  Description of Artificial Sequence: Synthetic oligonucleotide
gcaccucgaguugcaaucc

SEQ ID NO: 484333 - RNA, 19 nt, Artificial Sequence
  Description of Artificial Sequence: Synthetic oligonucleotide
ggggaugcuagaagcguca

SEQ ID NO: 484334 - RNA, 19 nt, Artificial Sequence
  Description of Artificial Sequence: Synthetic oligonucleotide
ggccgcuauuaccgcuucg

SEQ ID NO: 484335 - RNA, 19 nt, Artificial Sequence
  Description of Artificial Sequence: Synthetic oligonucleotide
ccugugccaaacggaacgc

SEQ ID NO: 484336 - RNA, 19 nt, Artificial Sequence
  Description of Artificial Sequence: Synthetic oligonucleotide
acucuucgccacuguuauu

SEQ ID NO: 484337 - RNA, 19 nt, Artificial Sequence
  Description of Artificial Sequence: Synthetic oligonucleotide
ccgguguuaaugaccuuca

SEQ ID NO: 484338 - RNA, 19 nt, Artificial Sequence
  Description of Artificial Sequence: Synthetic oligonucleotide
acgcgcagucaaacucuuc

SEQ ID NO: 484339 - RNA, 19 nt, Artificial Sequence
  Description of Artificial Sequence: Synthetic oligonucleotide
guagguagcagcgcuuguu

SEQ ID NO: 484340 - RNA, 19 nt, Artificial Sequence
  Description of Artificial Sequence: Synthetic oligonucleotide
gggaacauaguaggucgaa

SEQ ID NO: 484341 - RNA, 19 nt, Artificial Sequence
  Description of Artificial Sequence: Synthetic oligonucleotide
caugucugcgugcaacauu

SEQ ID NO: 484342 - RNA, 19 nt, Artificial Sequence
  Description of Artificial Sequence: Synthetic oligonucleotide
cgcuuauuccauggcauug

SEQ ID NO: 484343 - RNA, 19 nt, Artificial Sequence
  Description of Artificial Sequence: Synthetic oligonucleotide
ccguucacgucuacuguga

SEQ ID NO: 484344 - RNA, 19 nt, Artificial Sequence
  Description of Artificial Sequence: Synthetic oligonucleotide
uagaagcgucaugguucac

SEQ ID NO: 484345 - RNA, 19 nt, Artificial Sequence
  Description of Artificial Sequence: Synthetic oligonucleotide
guaguucggguaagcagau

SEQ ID NO: 484346 - RNA, 19 nt, Artificial Sequence
  Description of Artificial Sequence: Synthetic oligonucleotide
gguccuugacuugacuaua

SEQ ID NO: 484347 - RNA, 19 nt, Artificial Sequence
  Description of Artificial Sequence: Synthetic oligonucleotide
ccgguguucugaugaugug

SEQ ID NO: 484348 - RNA, 19 nt, Artificial Sequence
  Description of Artificial Sequence: Synthetic oligonucleotide
ggaacauaguaggucgaau

SEQ ID NO: 484349 - RNA, 19 nt, Artificial Sequence
  Description of Artificial Sequence: Synthetic oligonucleotide
gcaucgcucuagaugcauc

SEQ ID NO: 484350 - RNA, 19 nt, Artificial Sequence
  Description of Artificial Sequence: Synthetic oligonucleotide
ccgcuauuaccgcuucguc

SEQ ID NO: 484351 - RNA, 19 nt, Artificial Sequence
  Description of Artificial Sequence: Synthetic oligonucleotide
gccgcuauuaccgcuucgu

SEQ ID NO: 484352 - RNA, 19 nt, Artificial Sequence
  Description of Artificial Sequence: Synthetic oligonucleotide
ucccgguguuaaugaccuu

SEQ ID NO: 484353 - RNA, 19 nt, Artificial Sequence
  Description of Artificial Sequence: Synthetic oligonucleotide
cagucucgcuaaccaggaa

SEQ ID NO: 484354 - RNA, 19 nt, Artificial Sequence
  Description of Artificial Sequence: Synthetic oligonucleotide
cuguucaaggugguccauu

SEQ ID NO: 484355 - RNA, 19 nt, Artificial Sequence
  Description of Artificial Sequence: Synthetic oligonucleotide
gccggauguuguggucucc

SEQ ID NO: 484356 - RNA, 19 nt, Artificial Sequence
  Description of Artificial Sequence: Synthetic oligonucleotide
gggccggauguuguggucu

SEQ ID NO: 484357 - RNA, 19 nt, Artificial Sequence
  Description of Artificial Sequence: Synthetic oligonucleotide
cgaccggguucagagaaca

SEQ ID NO: 484358 - RNA, 19 nt, Artificial Sequence
  Description of Artificial Sequence: Synthetic oligonucleotide
ggcgggaacaaagggucau

SEQ ID NO: 484359 - RNA, 19 nt, Artificial Sequence
  Description of Artificial Sequence: Synthetic oligonucleotide
ccucgaccggguucagaga

SEQ ID NO: 484360 - RNA, 19 nt, Artificial Sequence
  Description of Artificial Sequence: Synthetic oligonucleotide
cagcguguggagacaucuu

SEQ ID NO: 484361 - RNA, 19 nt, Artificial Sequence
  Description of Artificial Sequence: Synthetic oligonucleotide
gccaaacggaacgcgcagu

SEQ ID NO: 484362 - RNA, 19 nt, Artificial Sequence
  Description of Artificial Sequence: Synthetic oligonucleotide
gcuucguccucgaccgggu

SEQ ID NO: 484363 - RNA, 19 nt, Artificial Sequence
  Description of Artificial Sequence: Synthetic oligonucleotide
ccuuccguucacgucuacu

SEQ ID NO: 484364 - RNA, 19 nt, Artificial Sequence
  Description of Artificial Sequence: Synthetic oligonucleotide
cggaacgcgcagucaaacu

SEQ ID NO: 484365 - RNA, 19 nt, Artificial Sequence
  Description of Artificial Sequence: Synthetic oligonucleotide
ccuccgguguucugaugau

SEQ ID NO: 484366 - RNA, 19 nt, Artificial Sequence
  Description of Artificial Sequence: Synthetic oligonucleotide
cggaggcaucgcucuagau

SEQ ID NO: 484367 - RNA, 19 nt, Artificial Sequence
  Description of Artificial Sequence: Synthetic oligonucleotide
gaaaauaccacccacaaag

SEQ ID NO: 484368 - RNA, 19 nt, Artificial Sequence
  Description of Artificial Sequence: Synthetic oligonucleotide
aaaguuacacaucaucucc

SEQ ID NO: 484369 - RNA, 19 nt, Artificial Sequence
  Description of Artificial Sequence: Synthetic oligonucleotide
aguaaaaccacacuuuucc

SEQ ID NO: 484370 - RNA, 19 nt, Artificial Sequence
  Description of Artificial Sequence: Synthetic oligonucleotide
uacauuaugauuaacagac

SEQ ID NO: 484371 - RNA, 19 nt, Artificial Sequence
  Description of Artificial Sequence: Synthetic oligonucleotide
aaagguaucauucaggccu

SEQ ID NO: 484372 - RNA, 19 nt, Artificial Sequence
  Description of Artificial Sequence: Synthetic oligonucleotide
aaugauaaggccaagacag

SEQ ID NO: 484373 - RNA, 19 nt, Artificial Sequence
  Description of Artificial Sequence: Synthetic oligonucleotide
uaaaguguuagucuguugg

SEQ ID NO: 484374 - RNA, 19 nt, Artificial Sequence
  Description of Artificial Sequence: Synthetic oligonucleotide
aaaugcaccaaacuacacc

SEQ ID NO: 484375 - RNA, 19 nt, Artificial Sequence
  Description of Artificial Sequence: Synthetic oligonucleotide
aaugaaaagagacgcaaag

SEQ ID NO: 484376 - RNA, 19 nt, Artificial Sequence
  Description of Artificial Sequence: Synthetic oligonucleotide
aaaguaauaaucaaagucu

SEQ ID NO: 484377 - RNA, 19 nt, Artificial Sequence
  Description of Artificial Sequence: Synthetic oligonucleotide
aaaaguuacacaucaucuc

SEQ ID NO: 484378 - RNA, 19 nt, Artificial Sequence
  Description of Artificial Sequence: Synthetic oligonucleotide
aagacgaacgcccacuacc

SEQ ID NO: 484379 - RNA, 19 nt, Artificial Sequence
  Description of Artificial Sequence: Synthetic oligonucleotide
uuaauaguuaucuggaggc

SEQ ID NO: 484380 - RNA, 19 nt, Artificial Sequence
  Description of Artificial Sequence: Synthetic oligonucleotide
uucucuauaauccuccagg

SEQ ID NO: 484381 - RNA, 19 nt, Artificial Sequence
  Description of Artificial Sequence: Synthetic oligonucleotide
uuaauauuacagcugagug

SEQ ID NO: 484382 - RNA, 19 nt, Artificial Sequence
  Description of Artificial Sequence: Synthetic oligonucleotide
uuuuaaaacaccaugccaa

SEQ ID NO: 484383 - RNA, 19 nt, Artificial Sequence
  Description of Artificial Sequence: Synthetic oligonucleotide
aaugucuaauacauuaagc

SEQ ID NO: 484384 - RNA, 19 nt, Artificial Sequence
  Description of Artificial Sequence: Synthetic oligonucleotide
uuugauugcacaauagaug

SEQ ID NO: 484385 - RNA, 19 nt, Artificial Sequence
  Description of Artificial Sequence: Synthetic oligonucleotide
ugaaaagagacgcaaagac

SEQ ID NO: 484386 - RNA, 19 nt, Artificial Sequence
  Description of Artificial Sequence: Synthetic oligonucleotide
aaaugucuaauacauuaag

SEQ ID NO: 484387 - RNA, 19 nt, Artificial Sequence
  Description of Artificial Sequence: Synthetic oligonucleotide
uuaucaaggacuaacucug

SEQ ID NO: 484388 - RNA, 19 nt, Artificial Sequence
  Description of Artificial Sequence: Synthetic oligonucleotide
uuaaagguaucauucaggc

SEQ ID NO: 484389 - RNA, 19 nt, Artificial Sequence
  Description of Artificial Sequence: Synthetic oligonucleotide
gaugaaugaaaagagacgc

SEQ ID NO: 484390 - RNA, 19 nt, Artificial Sequence
  Description of Artificial Sequence: Synthetic oligonucleotide
cuuaauaguuaucuggagg

SEQ ID NO: 484391 - RNA, 19 nt, Artificial Sequence
  Description of Artificial Sequence: Synthetic oligonucleotide
ucaaauaccaccccagccc

SEQ ID NO: 484392 - RNA, 19 nt, Artificial Sequence
  Description of Artificial Sequence: Synthetic oligonucleotide
uuaaucggaaugauaaggc

SEQ ID NO: 484393 - RNA, 19 nt, Artificial Sequence
  Description of Artificial Sequence: Synthetic oligonucleotide
aauaagucuuaauaguuau

SEQ ID NO: 484394 - RNA, 19 nt, Artificial Sequence
  Description of Artificial Sequence: Synthetic oligonucleotide
aaaagagacgcaaagacga

SEQ ID NO: 484395 - RNA, 19 nt, Artificial Sequence
  Description of Artificial Sequence: Synthetic oligonucleotide
aauuuccccauugacacac

SEQ ID NO: 484396 - RNA, 19 nt, Artificial Sequence
  Description of Artificial Sequence: Synthetic oligonucleotide
cuuaauuccacauuggcca

SEQ ID NO: 484397 - RNA, 19 nt, Artificial Sequence
  Description of Artificial Sequence: Synthetic oligonucleotide
acuagcaaaucuuaaucgg

SEQ ID NO: 484398 - RNA, 19 nt, Artificial Sequence
  Description of Artificial Sequence: Synthetic oligonucleotide
uucauuaaguaugaaaggc

SEQ ID NO: 484399 - RNA, 19 nt, Artificial Sequence
  Description of Artificial Sequence: Synthetic oligonucleotide
cauuaaguaugaaaggccc

SEQ ID NO: 484400 - RNA, 19 nt, Artificial Sequence
  Description of Artificial Sequence: Synthetic oligonucleotide
aauccaucuaaguauguga

SEQ ID NO: 484401 - RNA, 19 nt, Artificial Sequence
  Description of Artificial Sequence: Synthetic oligonucleotide
auugccauuaauauuacag

SEQ ID NO: 484402 - RNA, 19 nt, Artificial Sequence
  Description of Artificial Sequence: Synthetic oligonucleotide
uuauuuaauaauucuucga

SEQ ID NO: 484403 - RNA, 19 nt, Artificial Sequence
  Description of Artificial Sequence: Synthetic oligonucleotide
cuuaaucggaaugauaagg

SEQ ID NO: 484404 - RNA, 19 nt, Artificial Sequence
  Description of Artificial Sequence: Synthetic oligonucleotide
uaagucuuaauaguuaucu

SEQ ID NO: 484405 - RNA, 19 nt, Artificial Sequence
  Description of Artificial Sequence: Synthetic oligonucleotide
ugauuaacagacuagcaaa

SEQ ID NO: 484406 - RNA, 19 nt, Artificial Sequence
  Description of Artificial Sequence: Synthetic oligonucleotide
acaguuaucaaggacuaac

SEQ ID NO: 484407 - RNA, 19 nt, Artificial Sequence
  Description of Artificial Sequence: Synthetic oligonucleotide
agauaugcaaccuuguuau

SEQ ID NO: 484408 - RNA, 19 nt, Artificial Sequence
  Description of Artificial Sequence: Synthetic oligonucleotide
agauucuaaauacagugcu

SEQ ID NO: 484409 - RNA, 19 nt, Artificial Sequence
  Description of Artificial Sequence: Synthetic oligonucleotide
gaaaagagacgcaaagacg

SEQ ID NO: 484410 - RNA, 19 nt, Artificial Sequence
  Description of Artificial Sequence: Synthetic oligonucleotide
acuuaauuccacauuggcc

SEQ ID NO: 484411 - RNA, 19 nt, Artificial Sequence
  Description of Artificial Sequence: Synthetic oligonucleotide
agguagguaagauuuggac

SEQ ID NO: 484412 - RNA, 19 nt, Artificial Sequence
  Description of Artificial Sequence: Synthetic oligonucleotide
aacccaagaacucuaauuu

SEQ ID NO: 484413 - RNA, 19 nt, Artificial Sequence
  Description of Artificial Sequence: Synthetic oligonucleotide
uguacagaauagaaagccc

SEQ ID NO: 484414 - RNA, 19 nt, Artificial Sequence
  Description of Artificial Sequence: Synthetic oligonucleotide
uugcaugaaaauaccaccc

SEQ ID NO: 484415 - RNA, 19 nt, Artificial Sequence
  Description of Artificial Sequence: Synthetic oligonucleotide
auuauauugucacuaaguu

SEQ ID NO: 484416 - RNA, 19 nt, Artificial Sequence
  Description of Artificial Sequence: Synthetic oligonucleotide
uccccauugacacacaaac

SEQ ID NO: 484417 - RNA, 19 nt, Artificial Sequence
  Description of Artificial Sequence: Synthetic oligonucleotide
gagaugaaugaaaagagac

SEQ ID NO: 484418 - RNA, 19 nt, Artificial Sequence
  Description of Artificial Sequence: Synthetic oligonucleotide
aguuaucaaggacuaacuc

SEQ ID NO: 484419 - RNA, 19 nt, Artificial Sequence
  Description of Artificial Sequence: Synthetic oligonucleotide
ugaucucacaguuaaacaa

SEQ ID NO: 484420 - RNA, 19 nt, Artificial Sequence
  Description of Artificial Sequence: Synthetic oligonucleotide
ucuucgauuuauucaaagc

SEQ ID NO: 484421 - RNA, 19 nt, Artificial Sequence
  Description of Artificial Sequence: Synthetic oligonucleotide
uaugauuaacagacuagca

SEQ ID NO: 484422 - RNA, 19 nt, Artificial Sequence
  Description of Artificial Sequence: Synthetic oligonucleotide
uucacacagagagagagag

SEQ ID NO: 484423 - RNA, 19 nt, Artificial Sequence
  Description of Artificial Sequence: Synthetic oligonucleotide
uucgauuuauucaaagcaa

SEQ ID NO: 484424 - RNA, 19 nt, Artificial Sequence
  Description of Artificial Sequence: Synthetic oligonucleotide
agacauuccuauuauugag

SEQ ID NO: 484425 - RNA, 19 nt, Artificial Sequence
  Description of Artificial Sequence: Synthetic oligonucleotide
uucuaguccacacacccgc

SEQ ID NO: 484426 - RNA, 19 nt, Artificial Sequence
  Description of Artificial Sequence: Synthetic oligonucleotide
uuauauugucacuaaguuc

SEQ ID NO: 484427 - RNA, 19 nt, Artificial Sequence
  Description of Artificial Sequence: Synthetic oligonucleotide
caagagaauuccuagggac

SEQ ID NO: 484428 - RNA, 19 nt, Artificial Sequence
  Description of Artificial Sequence: Synthetic oligonucleotide
auuaauauuacagcugagu

SEQ ID NO: 484429 - RNA, 19 nt, Artificial Sequence
  Description of Artificial Sequence: Synthetic oligonucleotide
aaacccaagaacucuaauu

SEQ ID NO: 484430 - RNA, 19 nt, Artificial Sequence
  Description of Artificial Sequence: Synthetic oligonucleotide
acacacgcaguacagagag

SEQ ID NO: 484431 - RNA, 19 nt, Artificial Sequence
  Description of Artificial Sequence: Synthetic oligonucleotide
augauuaacagacuagcaa

SEQ ID NO: 484432 - RNA, 19 nt, Artificial Sequence
  Description of Artificial Sequence: Synthetic oligonucleotide
ucuuaauaguuaucuggag

SEQ ID NO: 484433 - RNA, 19 nt, Artificial Sequence
  Description of Artificial Sequence: Synthetic oligonucleotide
ugucuaauacauuaagcau

SEQ ID NO: 484434 - RNA, 19 nt, Artificial Sequence
  Description of Artificial Sequence: Synthetic oligonucleotide
aaguaugaaaggcccaccu

SEQ ID NO: 484435 - RNA, 19 nt, Artificial Sequence
  Description of Artificial Sequence: Synthetic oligonucleotide
ucagauugagguagguaag

SEQ ID NO: 484436 - RNA, 19 nt, Artificial Sequence
  Description of Artificial Sequence: Synthetic oligonucleotide
uaaucggaaugauaaggcc

SEQ ID NO: 484437 - RNA, 19 nt, Artificial Sequence
  Description of Artificial Sequence: Synthetic oligonucleotide
cacacagagagagagagag

SEQ ID NO: 484438 - RNA, 19 nt, Artificial Sequence
  Description of Artificial Sequence: Synthetic oligonucleotide
cauuaugaaugaaaugcac

SEQ ID NO: 484439 - RNA, 19 nt, Artificial Sequence
  Description of Artificial Sequence: Synthetic oligonucleotide
uuuuaaacccaagaacucu

SEQ ID NO: 484440 - RNA, 19 nt, Artificial Sequence
  Description of Artificial Sequence: Synthetic oligonucleotide
aaagacgaacgcccacuac

SEQ ID NO: 484441 - RNA, 19 nt, Artificial Sequence
  Description of Artificial Sequence: Synthetic oligonucleotide
aaaguguuagucuguugga

SEQ ID NO: 484442 - RNA, 19 nt, Artificial Sequence
  Description of Artificial Sequence: Synthetic oligonucleotide
cagaauagaaagcccaccc

SEQ ID NO: 484443 - RNA, 19 nt, Artificial Sequence
  Description of Artificial Sequence: Synthetic oligonucleotide
cuaaggacuuaacauacug

SEQ ID NO: 484444 - RNA, 19 nt, Artificial Sequence
  Description of Artificial Sequence: Synthetic oligonucleotide
gagagagagagagagagac

SEQ ID NO: 484445 - RNA, 19 nt, Artificial Sequence
  Description of Artificial Sequence: Synthetic oligonucleotide
acuuacauuaugauuaaca

SEQ ID NO: 484446 - RNA, 19 nt, Artificial Sequence
  Description of Artificial Sequence: Synthetic oligonucleotide
uuucgaaguuuguuuaagc

SEQ ID NO: 484447 - RNA, 19 nt, Artificial Sequence
  Description of Artificial Sequence: Synthetic oligonucleotide
gagagagagagacacgcgc

SEQ ID NO: 484448 - RNA, 19 nt, Artificial Sequence
  Description of Artificial Sequence: Synthetic oligonucleotide
ucucuaaggacuuaacaua

SEQ ID NO: 484449 - RNA, 19 nt, Artificial Sequence
  Description of Artificial Sequence: Synthetic oligonucleotide
ugcagcaguucgaagauac

SEQ ID NO: 484450 - RNA, 19 nt, Artificial Sequence
  Description of Artificial Sequence: Synthetic oligonucleotide
gacuuaacauacuguauac

SEQ ID NO: 484451 - RNA, 19 nt, Artificial Sequence
  Description of Artificial Sequence: Synthetic oligonucleotide
uucuucgauuuauucaaag

SEQ ID NO: 484452 - RNA, 19 nt, Artificial Sequence
  Description of Artificial Sequence: Synthetic oligonucleotide
gagaugaguaaaguguuag

SEQ ID NO: 484453 - RNA, 19 nt, Artificial Sequence
  Description of Artificial Sequence: Synthetic oligonucleotide
aucuuaaucggaaugauaa

SEQ ID NO: 484454 - RNA, 19 nt, Artificial Sequence
  Description of Artificial Sequence: Synthetic oligonucleotide
agcaaauggaguccgacga

SEQ ID NO: 484455 - RNA, 19 nt, Artificial Sequence
  Description of Artificial Sequence: Synthetic oligonucleotide
gagagagagagagagacac

SEQ ID NO: 484456 - RNA, 19 nt, Artificial Sequence
  Description of Artificial Sequence: Synthetic oligonucleotide
ugcaaccuuguuaucaucu

SEQ ID NO: 484457 - RNA, 19 nt, Artificial Sequence
  Description of Artificial Sequence: Synthetic oligonucleotide
ucuuaaucggaaugauaag

SEQ ID NO: 484458 - RNA, 19 nt, Artificial Sequence
  Description of Artificial Sequence: Synthetic oligonucleotide
aaucggaaugauaaggcca

SEQ ID NO: 484459 - RNA, 19 nt, Artificial Sequence
  Description of Artificial Sequence: Synthetic oligonucleotide
cacagagagagagagagag

SEQ ID NO: 484460 - RNA, 19 nt, Artificial Sequence
  Description of Artificial Sequence: Synthetic oligonucleotide
gaaugauaaggccaagaca

SEQ ID NO: 484461 - RNA, 19 nt, Artificial Sequence
  Description of Artificial Sequence: Synthetic oligonucleotide
aguguaauuuguuaauuua

SEQ ID NO: 484462 - RNA, 19 nt, Artificial Sequence
  Description of Artificial Sequence: Synthetic oligonucleotide
aagagacgcaaagacgaac

SEQ ID NO: 484463 - RNA, 19 nt, Artificial Sequence
  Description of Artificial Sequence: Synthetic oligonucleotide
ugaucaaauccaucuaagu

SEQ ID NO: 484464 - RNA, 19 nt, Artificial Sequence
  Description of Artificial Sequence: Synthetic oligonucleotide
uuugucauucaagagacua

SEQ ID NO: 484465 - RNA, 19 nt, Artificial Sequence
  Description of Artificial Sequence: Synthetic oligonucleotide
uauuuugaaccuggcauag

SEQ ID NO: 484466 - RNA, 19 nt, Artificial Sequence
  Description of Artificial Sequence: Synthetic oligonucleotide
gagagagagagagacacgc

SEQ ID NO: 484467 - RNA, 19 nt, Artificial Sequence
  Description of Artificial Sequence: Synthetic oligonucleotide
cagagagagagagagagag

SEQ ID NO: 484468 - RNA, 19 nt, Artificial Sequence
  Description of Artificial Sequence: Synthetic oligonucleotide
uagcaaauggaguccgacg

SEQ ID NO: 484469 - RNA, 19 nt, Artificial Sequence
  Description of Artificial Sequence: Synthetic oligonucleotide
gacgcaaagacgaacgccc

SEQ ID NO: 484470 - RNA, 19 nt, Artificial Sequence
  Description of Artificial Sequence: Synthetic oligonucleotide
cacaauagaugauugauaa

SEQ ID NO: 484471 - RNA, 19 nt, Artificial Sequence
  Description of Artificial Sequence: Synthetic oligonucleotide
gaauagcaaauggaguccg

SEQ ID NO: 484472 - RNA, 19 nt, Artificial Sequence
  Description of Artificial Sequence: Synthetic oligonucleotide
aacuuucgaaguuuguuua

SEQ ID NO: 484473 - RNA, 19 nt, Artificial Sequence
  Description of Artificial Sequence: Synthetic oligonucleotide
ucgauuuauucaaagcaau

SEQ ID NO: 484474 - RNA, 19 nt, Artificial Sequence
  Description of Artificial Sequence: Synthetic oligonucleotide
aagauuuugcagggccucc

SEQ ID NO: 484475 - RNA, 19 nt, Artificial Sequence
  Description of Artificial Sequence: Synthetic oligonucleotide
accuuguuaucaucucugc

SEQ ID NO: 484476 - RNA, 19 nt, Artificial Sequence
  Description of Artificial Sequence: Synthetic oligonucleotide
uuaaguaugaaaggcccac

SEQ ID NO: 484477 - RNA, 19 nt, Artificial Sequence
  Description of Artificial Sequence: Synthetic oligonucleotide
caauagaugauugauaaaa

SEQ ID NO: 484478 - RNA, 19 nt, Artificial Sequence
  Description of Artificial Sequence: Synthetic oligonucleotide
uuuaaaacaccaugccaaa

SEQ ID NO: 484479 - RNA, 19 nt, Artificial Sequence
  Description of Artificial Sequence: Synthetic oligonucleotide
caggaaaguccucaaauac

SEQ ID NO: 484480 - RNA, 19 nt, Artificial Sequence
  Description of Artificial Sequence: Synthetic oligonucleotide
uuuaagcugggaagccggg

SEQ ID NO: 484481 - RNA, 19 nt, Artificial Sequence
  Description of Artificial Sequence: Synthetic oligonucleotide
aaguguuagucuguuggag

SEQ ID NO: 484482 - RNA, 19 nt, Artificial Sequence
  Description of Artificial Sequence: Synthetic oligonucleotide
agagacgcaaagacgaacg

SEQ ID NO: 484483 - RNA, 19 nt, Artificial Sequence
  Description of Artificial Sequence: Synthetic oligonucleotide
ugaauauaccacacguuua

SEQ ID NO: 484484 - RNA, 19 nt, Artificial Sequence
  Description of Artificial Sequence: Synthetic oligonucleotide
aacccuaaaacaccccuaa

SEQ ID NO: 484485 - RNA, 19 nt, Artificial Sequence
  Description of Artificial Sequence: Synthetic oligonucleotide
aacacugugguggcuuuac

SEQ ID NO: 484486 - RNA, 19 nt, Artificial Sequence
  Description of Artificial Sequence: Synthetic oligonucleotide
cucagauugagguagguaa

SEQ ID NO: 484487 - RNA, 19 nt, Artificial Sequence
  Description of Artificial Sequence: Synthetic oligonucleotide
uaaagguaucauucaggcc

SEQ ID NO: 484488 - RNA, 19 nt, Artificial Sequence
  Description of Artificial Sequence: Synthetic oligonucleotide
acacgcaguacagagagag

SEQ ID NO: 484489 - RNA, 19 nt, Artificial Sequence
  Description of Artificial Sequence: Synthetic oligonucleotide
guuaucaaggacuaacucu

SEQ ID NO: 484490 - RNA, 19 nt, Artificial Sequence
  Description of Artificial Sequence: Synthetic oligonucleotide
aguugcacaaaaguaauaa

SEQ ID NO: 484491 - RNA, 19 nt, Artificial Sequence
  Description of Artificial Sequence: Synthetic oligonucleotide
uugagaugaguaaaguguu

SEQ ID NO: 484492 - RNA, 19 nt, Artificial Sequence
  Description of Artificial Sequence: Synthetic oligonucleotide
uguuuaacacugugguggc

SEQ ID NO: 484493 - RNA, 19 nt, Artificial Sequence
  Description of Artificial Sequence: Synthetic oligonucleotide
cuugggacuaacucggcug

SEQ ID NO: 484494 - RNA, 19 nt, Artificial Sequence
  Description of Artificial Sequence: Synthetic oligonucleotide
aguguuagucuguuggaga

SEQ ID NO: 484495 - RNA, 19 nt, Artificial Sequence
  Description of Artificial Sequence: Synthetic oligonucleotide
agacauauggucgcucuac

SEQ ID NO: 484496 - RNA, 19 nt, Artificial Sequence
  Description of Artificial Sequence: Synthetic oligonucleotide
uaacagacuagcaaaucuu

SEQ ID NO: 484497 - RNA, 19 nt, Artificial Sequence
  Description of Artificial Sequence: Synthetic oligonucleotide
auaugcaaccuuguuauca

SEQ ID NO: 484498 - RNA, 19 nt, Artificial Sequence
  Description of Artificial Sequence: Synthetic oligonucleotide
uaucaguacugccuguccu

SEQ ID NO: 484499 - RNA, 19 nt, Artificial Sequence
  Description of Artificial Sequence: Synthetic oligonucleotide
uggcuuuacucaaaauaca

SEQ ID NO: 484500 - RNA, 19 nt, Artificial Sequence
  Description of Artificial Sequence: Synthetic oligonucleotide
agauuuggacauuucucug

SEQ ID NO: 484501 - RNA, 19 nt, Artificial Sequence
  Description of Artificial Sequence: Synthetic oligonucleotide
gacuaacucugucaccucc

SEQ ID NO: 484502 - RNA, 19 nt, Artificial Sequence
  Description of Artificial Sequence: Synthetic oligonucleotide
acccagaacauguacagaa

SEQ ID NO: 484503 - RNA, 19 nt, Artificial Sequence
  Description of Artificial Sequence: Synthetic oligonucleotide
uucgaagauacuuucucua

SEQ ID NO: 484504 - RNA, 19 nt, Artificial Sequence
  Description of Artificial Sequence: Synthetic oligonucleotide
uuauugagaugaguaaagu

SEQ ID NO: 484505 - RNA, 19 nt, Artificial Sequence
  Description of Artificial Sequence: Synthetic oligonucleotide
guuuaagcugggaagccgg

SEQ ID NO: 484506 - RNA, 19 nt, Artificial Sequence
  Description of Artificial Sequence: Synthetic oligonucleotide
accggcacugaauauacca

SEQ ID NO: 484507 - RNA, 19 nt, Artificial Sequence
  Description of Artificial Sequence: Synthetic oligonucleotide
ucacuaaguuccaacuuuc

SEQ ID NO: 484508 - RNA, 19 nt, Artificial Sequence
  Description of Artificial Sequence: Synthetic oligonucleotide
accuggaucaccucuaaaa

SEQ ID NO: 484509 - RNA, 19 nt, Artificial Sequence
  Description of Artificial Sequence: Synthetic oligonucleotide
aguccgacgacuugggacu

SEQ ID NO: 484510 - RNA, 19 nt, Artificial Sequence
  Description of Artificial Sequence: Synthetic oligonucleotide
gccaagagaauuccuaggg

SEQ ID NO: 484511 - RNA, 19 nt, Artificial Sequence
  Description of Artificial Sequence: Synthetic oligonucleotide
auaccacacguuuauuuca

SEQ ID NO: 484512 - RNA, 19 nt, Artificial Sequence
  Description of Artificial Sequence: Synthetic oligonucleotide
cugccuucaagcuaucgac

SEQ ID NO: 484513 - RNA, 19 nt, Artificial Sequence
  Description of Artificial Sequence: Synthetic oligonucleotide
gcuagagaauuucacaaug

SEQ ID NO: 484514 - RNA, 19 nt, Artificial Sequence
  Description of Artificial Sequence: Synthetic oligonucleotide
ggaaugauaaggccaagac

SEQ ID NO: 484515 - RNA, 19 nt, Artificial Sequence
  Description of Artificial Sequence: Synthetic oligonucleotide
acugccuucaagcuaucga

SEQ ID NO: 484516 - RNA, 19 nt, Artificial Sequence
  Description of Artificial Sequence: Synthetic oligonucleotide
aaaucuuaaucggaaugau

SEQ ID NO: 484517 - RNA, 19 nt, Artificial Sequence
  Description of Artificial Sequence: Synthetic oligonucleotide
uucccaaacugugacagga

SEQ ID NO: 484518 - RNA, 19 nt, Artificial Sequence
  Description of Artificial Sequence: Synthetic oligonucleotide
gcaaaucuuaaucggaaug

SEQ ID NO: 484519 - RNA, 19 nt, Artificial Sequence
  Description of Artificial Sequence: Synthetic oligonucleotide
ugaaccuggcauagugugc

SEQ ID NO: 484520 - RNA, 19 nt, Artificial Sequence
  Description of Artificial Sequence: Synthetic oligonucleotide
aagucaauauagauuuccu

SEQ ID NO: 484521 - RNA, 19 nt, Artificial Sequence
  Description of Artificial Sequence: Synthetic oligonucleotide
gaguccgacgacuugggac

SEQ ID NO: 484522 - RNA, 19 nt, Artificial Sequence
  Description of Artificial Sequence: Synthetic oligonucleotide
ucuaguccacacacccgcg

SEQ ID NO: 484523 - RNA, 19 nt, Artificial Sequence
  Description of Artificial Sequence: Synthetic oligonucleotide
guagguaagauuuggacau

SEQ ID NO: 484524 - RNA, 19 nt, Artificial Sequence
  Description of Artificial Sequence: Synthetic oligonucleotide
gguagguaagauuuggaca

SEQ ID NO: 484525 - RNA, 19 nt, Artificial Sequence
  Description of Artificial Sequence: Synthetic oligonucleotide
cgucauauccuucaggugg

SEQ ID NO: 484526 - RNA, 19 nt, Artificial Sequence
  Description of Artificial Sequence: Synthetic oligonucleotide
accccuaaaggucuggaga

SEQ ID NO: 484527 - RNA, 19 nt, Artificial Sequence
  Description of Artificial Sequence: Synthetic oligonucleotide
uuacagcaguaucaguacu

SEQ ID NO: 484528 - RNA, 19 nt, Artificial Sequence
  Description of Artificial Sequence: Synthetic oligonucleotide
cuauuauugagaugaguaa

SEQ ID NO: 484529 - RNA, 19 nt, Artificial Sequence
  Description of Artificial Sequence: Synthetic oligonucleotide
auaaggccaagacaguaaa

SEQ ID NO: 484530 - RNA, 19 nt, Artificial Sequence
  Description of Artificial Sequence: Synthetic oligonucleotide
cuuuacucaaaauacaguu

SEQ ID NO: 484531 - RNA, 19 nt, Artificial Sequence
  Description of Artificial Sequence: Synthetic oligonucleotide
gaacucuaauuuugauugc

SEQ ID NO: 484532 - RNA, 19 nt, Artificial Sequence
  Description of Artificial Sequence: Synthetic oligonucleotide
caaaucuuaaucggaauga

SEQ ID NO: 484533 - RNA, 19 nt, Artificial Sequence
  Description of Artificial Sequence: Synthetic oligonucleotide
auugcacaauagaugauug

SEQ ID NO: 484534 - RNA, 19 nt, Artificial Sequence
  Description of Artificial Sequence: Synthetic oligonucleotide
auaagucuuaauaguuauc

SEQ ID NO: 484535 - RNA, 19 nt, Artificial Sequence
  Description of Artificial Sequence: Synthetic oligonucleotide
acgcaguacagagagagug

SEQ ID NO: 484536 - RNA, 19 nt, Artificial Sequence
  Description of Artificial Sequence: Synthetic oligonucleotide
cuucuaguccacacacccg

SEQ ID NO: 484537 - RNA, 19 nt, Artificial Sequence
  Description of Artificial Sequence: Synthetic oligonucleotide
agcaguaucaguacugccu

SEQ ID NO: 484538 - RNA, 19 nt, Artificial Sequence
  Description of Artificial Sequence: Synthetic oligonucleotide
agucaauauagauuuccuu

SEQ ID NO: 484539 - RNA, 19 nt, Artificial Sequence
  Description of Artificial Sequence: Synthetic oligonucleotide
gcuaucgacaccuggauca

SEQ ID NO: 484540 - RNA, 19 nt, Artificial Sequence
  Description of Artificial Sequence: Synthetic oligonucleotide
aagaugaaugaaaauuguu

SEQ ID NO: 484541 - RNA, 19 nt, Artificial Sequence
  Description of Artificial Sequence: Synthetic oligonucleotide
aagcuaucgacaccuggau

SEQ ID NO: 484542 - RNA, 19 nt, Artificial Sequence
  Description of Artificial Sequence: Synthetic oligonucleotide
gucaauauagauuuccuuu

SEQ ID NO: 484543 - RNA, 19 nt, Artificial Sequence
  Description of Artificial Sequence: Synthetic oligonucleotide
agucagauaugcaaccuug

SEQ ID NO: 484544 - RNA, 19 nt, Artificial Sequence
  Description of Artificial Sequence: Synthetic oligonucleotide
ucgaagauacuuucucuau

SEQ ID NO: 484545 - RNA, 19 nt, Artificial Sequence
  Description of Artificial Sequence: Synthetic oligonucleotide
ggccaaggaacuuaauucc

SEQ ID NO: 484546 - RNA, 19 nt, Artificial Sequence
  Description of Artificial Sequence: Synthetic oligonucleotide
aguccacacacccgcgcgc

SEQ ID NO: 484547 - RNA, 19 nt, Artificial Sequence
  Description of Artificial Sequence: Synthetic oligonucleotide
uuggccauacugagaaacu

SEQ ID NO: 484548 - RNA, 19 nt, Artificial Sequence
  Description of Artificial Sequence: Synthetic oligonucleotide
acauauggucgcucuacug

SEQ ID NO: 484549 - RNA, 19 nt, Artificial Sequence
  Description of Artificial Sequence: Synthetic oligonucleotide
ucaagacuuuucaaauuuu

SEQ ID NO: 484550 - RNA, 19 nt, Artificial Sequence
  Description of Artificial Sequence: Synthetic oligonucleotide
cuucagguggcccagcguc

SEQ ID NO: 484551 - RNA, 19 nt, Artificial Sequence
  Description of Artificial Sequence: Synthetic oligonucleotide
uuuaacacugugguggcuu

SEQ ID NO: 484552 - RNA, 19 nt, Artificial Sequence
  Description of Artificial Sequence: Synthetic oligonucleotide
agcuaucgacaccuggauc

SEQ ID NO: 484553 - RNA, 19 nt, Artificial Sequence
  Description of Artificial Sequence: Synthetic oligonucleotide
uacagugcuagagaauuuc

SEQ ID NO: 484554 - RNA, 19 nt, Artificial Sequence
  Description of Artificial Sequence: Synthetic oligonucleotide
agagagagacacgcgcgcc

SEQ ID NO: 484555 - RNA, 19 nt, Artificial Sequence
  Description of Artificial Sequence: Synthetic oligonucleotide
uggaguccgacgacuuggg

SEQ ID NO: 484556 - RNA, 19 nt, Artificial Sequence
  Description of Artificial Sequence: Synthetic oligonucleotide
caagcuaucgacaccugga

SEQ ID NO: 484557 - RNA, 19 nt, Artificial Sequence
  Description of Artificial Sequence: Synthetic oligonucleotide
uacacacgcaguacagaga

SEQ ID NO: 484558 - RNA, 19 nt, Artificial Sequence
  Description of Artificial Sequence: Synthetic oligonucleotide
auggucgcucuacugcacg

SEQ ID NO: 484559 - RNA, 19 nt, Artificial Sequence
  Description of Artificial Sequence: Synthetic oligonucleotide
gaaguuuguuuaagcuggg

SEQ ID NO: 484560 - RNA, 19 nt, Artificial Sequence
  Description of Artificial Sequence: Synthetic oligonucleotide
uaaguaugaaaggcccacc

SEQ ID NO: 484561 - RNA, 19 nt, Artificial Sequence
  Description of Artificial Sequence: Synthetic oligonucleotide
ugagaugaguaaaguguua

SEQ ID NO: 484562 - RNA, 19 nt, Artificial Sequence
  Description of Artificial Sequence: Synthetic oligonucleotide
ugccuucaagcuaucgaca

SEQ ID NO: 484563 - RNA, 19 nt, Artificial Sequence
  Description of Artificial Sequence: Synthetic oligonucleotide
uaaacccaagaacucuaau

SEQ ID NO: 484564 - RNA, 19 nt, Artificial Sequence
  Description of Artificial Sequence: Synthetic oligonucleotide
ucugaaccggcuucguccu

SEQ ID NO: 484565 - RNA, 19 nt, Artificial Sequence
  Description of Artificial Sequence: Synthetic oligonucleotide
ugucauucaagagacuauu

SEQ ID NO: 484566 - RNA, 19 nt, Artificial Sequence
  Description of Artificial Sequence: Synthetic oligonucleotide
uccuagggacugaaagcag

SEQ ID NO: 484567 - RNA, 19 nt, Artificial Sequence
  Description of Artificial Sequence: Synthetic oligonucleotide
caucuaaguaugugauuug

SEQ ID NO: 484568 - RNA, 19 nt, Artificial Sequence
  Description of Artificial Sequence: Synthetic oligonucleotide
agcauuuauuuugaaccug

SEQ ID NO: 484569 - RNA, 19 nt, Artificial Sequence
  Description of Artificial Sequence: Synthetic oligonucleotide
gagacgcaaagacgaacgc

SEQ ID NO: 484570 - RNA, 19 nt, Artificial Sequence
  Description of Artificial Sequence: Synthetic oligonucleotide
agcaucucgcuuccuuuuc

SEQ ID NO: 484571 - RNA, 19 nt, Artificial Sequence
  Description of Artificial Sequence: Synthetic oligonucleotide
cagugcuagagaauuucac

SEQ ID NO: 484572 - RNA, 19 nt, Artificial Sequence
  Description of Artificial Sequence: Synthetic oligonucleotide
guaucaguacugccugucc

SEQ ID NO: 484573 - RNA, 19 nt, Artificial Sequence
  Description of Artificial Sequence: Synthetic oligonucleotide
uaaacaagucaagacuuuu

SEQ ID NO: 484574 - RNA, 19 nt, Artificial Sequence
  Description of Artificial Sequence: Synthetic oligonucleotide
uuugcugcagcaguucgaa

SEQ ID NO: 484575 - RNA, 19 nt, Artificial Sequence
  Description of Artificial Sequence: Synthetic oligonucleotide
uaagauuuugcagggccuc

SEQ ID NO: 484576 - RNA, 19 nt, Artificial Sequence
  Description of Artificial Sequence: Synthetic oligonucleotide
agcaaaucuuaaucggaau

SEQ ID NO: 484577 - RNA, 19 nt, Artificial Sequence
  Description of Artificial Sequence: Synthetic oligonucleotide
gucucuaaggacuuaacau

SEQ ID NO: 484578 - RNA, 19 nt, Artificial Sequence
  Description of Artificial Sequence: Synthetic oligonucleotide
ugagucgguugccucguug

SEQ ID NO: 484579 - RNA, 19 nt, Artificial Sequence
  Description of Artificial Sequence: Synthetic oligonucleotide
uuacagcugaguguaauuu

SEQ ID NO: 484580 - RNA, 19 nt, Artificial Sequence
  Description of Artificial Sequence: Synthetic oligonucleotide
aaucuuaaucggaaugaua

SEQ ID NO: 484581 - RNA, 19 nt, Artificial Sequence
  Description of Artificial Sequence: Synthetic oligonucleotide
ccuauuauugagaugagua

SEQ ID NO: 484582 - RNA, 19 nt, Artificial Sequence
  Description of Artificial Sequence: Synthetic oligonucleotide
acaauagaugauugauaaa

SEQ ID NO: 484583 - RNA, 19 nt, Artificial Sequence
  Description of Artificial Sequence: Synthetic oligonucleotide
aguuccaacuuucgaaguu

SEQ ID NO: 484584 - RNA, 19 nt, Artificial Sequence
  Description of Artificial Sequence: Synthetic oligonucleotide
agagagacacgcgcgccgc

SEQ ID NO: 484585 - RNA, 19 nt, Artificial Sequence
  Description of Artificial Sequence: Synthetic oligonucleotide
ugaguguaauuuguuaauu

SEQ ID NO: 484586 - RNA, 19 nt, Artificial Sequence
  Description of Artificial Sequence: Synthetic oligonucleotide
guaaaguguuagucuguug

SEQ ID NO: 484587 - RNA, 19 nt, Artificial Sequence
  Description of Artificial Sequence: Synthetic oligonucleotide
ggaaaguccucaaauacca

SEQ ID NO: 484588 - RNA, 19 nt, Artificial Sequence
  Description of Artificial Sequence: Synthetic oligonucleotide
agcuaucauacaugaagaa

SEQ ID NO: 484589 - RNA, 19 nt, Artificial Sequence
  Description of Artificial Sequence: Synthetic oligonucleotide
ucgucauauccuucaggug

SEQ ID NO: 484590 - RNA, 19 nt, Artificial Sequence
  Description of Artificial Sequence: Synthetic oligonucleotide
caguaaaaccacacuuuuc

SEQ ID NO: 484591 - RNA, 19 nt, Artificial Sequence
  Description of Artificial Sequence: Synthetic oligonucleotide
aacugccuucaagcuaucg

SEQ ID NO: 484592 - RNA, 19 nt, Artificial Sequence
  Description of Artificial Sequence: Synthetic oligonucleotide
uaucaaggacuaacucugu

SEQ ID NO: 484593 - RNA, 19 nt, Artificial Sequence
  Description of Artificial Sequence: Synthetic oligonucleotide
uccuauuauugagaugagu

SEQ ID NO: 484594 - RNA, 19 nt, Artificial Sequence
  Description of Artificial Sequence: Synthetic oligonucleotide
acuuaacauacuguauaca

SEQ ID NO: 484595 - RNA, 19 nt, Artificial Sequence
  Description of Artificial Sequence: Synthetic oligonucleotide
acccuugcuuauuugcaug

SEQ ID NO: 484596 - RNA, 19 nt, Artificial Sequence
  Description of Artificial Sequence: Synthetic oligonucleotide
acuuaaguuacagcaguau

SEQ ID NO: 484597 - RNA, 19 nt, Artificial Sequence
  Description of Artificial Sequence: Synthetic oligonucleotide
uguuagucuguuggagacc

SEQ ID NO: 484598 - RNA, 19 nt, Artificial Sequence
  Description of Artificial Sequence: Synthetic oligonucleotide
cuuuucucuccccgaagac

SEQ ID NO: 484599 - RNA, 19 nt, Artificial Sequence
  Description of Artificial Sequence: Synthetic oligonucleotide
acuugggacuaacucggcu

SEQ ID NO: 484600 - RNA, 19 nt, Artificial Sequence
  Description of Artificial Sequence: Synthetic oligonucleotide
gauaaggccaagacaguaa

SEQ ID NO: 484601 - RNA, 19 nt, Artificial Sequence
  Description of Artificial Sequence: Synthetic oligonucleotide
ggacuuaacauacuguaua

SEQ ID NO: 484602 - RNA, 19 nt, Artificial Sequence
  Description of Artificial Sequence: Synthetic oligonucleotide
aacaccccuaaaggucugg

SEQ ID NO: 484603 - RNA, 19 nt, Artificial Sequence
  Description of Artificial Sequence: Synthetic oligonucleotide
uccuaaagggacagcuauc

SEQ ID NO: 484604 - RNA, 19 nt, Artificial Sequence
  Description of Artificial Sequence: Synthetic oligonucleotide
cuggaggcccuauuuguug

SEQ ID NO: 484605 - RNA, 19 nt, Artificial Sequence
  Description of Artificial Sequence: Synthetic oligonucleotide
cucgucauauccuucaggu

SEQ ID NO: 484606 - RNA, 19 nt, Artificial Sequence
  Description of Artificial Sequence: Synthetic oligonucleotide
guuaucaucucugcaaaua

SEQ ID NO: 484607 - RNA, 19 nt, Artificial Sequence
  Description of Artificial Sequence: Synthetic oligonucleotide
ucacacagagagagagaga

SEQ ID NO: 484608 - RNA, 19 nt, Artificial Sequence
  Description of Artificial Sequence: Synthetic oligonucleotide
aagacauauggucgcucua

SEQ ID NO: 484609 - RNA, 19 nt, Artificial Sequence
  Description of Artificial Sequence: Synthetic oligonucleotide
cagauaugcaaccuuguua

SEQ ID NO: 484610 - RNA, 19 nt, Artificial Sequence
  Description of Artificial Sequence: Synthetic oligonucleotide
uuaagcugggaagccgggc

SEQ ID NO: 484611 - RNA, 19 nt, Artificial Sequence
  Description of Artificial Sequence: Synthetic oligonucleotide
agagacacgcgcgccgccc

SEQ ID NO: 484612 - RNA, 19 nt, Artificial Sequence
  Description of Artificial Sequence: Synthetic oligonucleotide
aaacuacaccuguguaaaa

SEQ ID NO: 484613 - RNA, 19 nt, Artificial Sequence
  Description of Artificial Sequence: Synthetic oligonucleotide
ugauugcacaauagaugau

SEQ ID NO: 484614 - RNA, 19 nt, Artificial Sequence
  Description of Artificial Sequence: Synthetic oligonucleotide
cacugaauauaccacacgu

SEQ ID NO: 484615 - RNA, 19 nt, Artificial Sequence
  Description of Artificial Sequence: Synthetic oligonucleotide
gaaaugcaccaaacuacac

SEQ ID NO: 484616 - RNA, 19 nt, Artificial Sequence
  Description of Artificial Sequence: Synthetic oligonucleotide
agagagagagagacacgcg

SEQ ID NO: 484617 - RNA, 19 nt, Artificial Sequence
  Description of Artificial Sequence: Synthetic oligonucleotide
aauagcaaauggaguccga

SEQ ID NO: 484618 - RNA, 19 nt, Artificial Sequence
  Description of Artificial Sequence: Synthetic oligonucleotide
aguaaaguguuagucuguu

SEQ ID NO: 484619 - RNA, 19 nt, Artificial Sequence
  Description of Artificial Sequence: Synthetic oligonucleotide
aguaccggcacugaauaua

SEQ ID NO: 484620 - RNA, 19 nt, Artificial Sequence
  Description of Artificial Sequence: Synthetic oligonucleotide
gacauuucucugccaggac

SEQ ID NO: 484621 - RNA, 19 nt, Artificial Sequence
  Description of Artificial Sequence: Synthetic oligonucleotide
gucauauccuucagguggc

SEQ ID NO: 484622 - RNA, 19 nt, Artificial Sequence
  Description of Artificial Sequence: Synthetic oligonucleotide
cugaauauaccacacguuu

SEQ ID NO: 484623 - RNA, 19 nt, Artificial Sequence
  Description of Artificial Sequence: Synthetic oligonucleotide
uuccccauugacacacaaa

SEQ ID NO: 484624 - RNA, 19 nt, Artificial Sequence
  Description of Artificial Sequence: Synthetic oligonucleotide
auccuccuccuccuccucg

SEQ ID NO: 484625 - RNA, 19 nt, Artificial Sequence
  Description of Artificial Sequence: Synthetic oligonucleotide
gcaugaaaauaccacccac

SEQ ID NO: 484626 - RNA, 19 nt, Artificial Sequence
  Description of Artificial Sequence: Synthetic oligonucleotide
cuuccaagccuccagauau

SEQ ID NO: 484627 - RNA, 19 nt, Artificial Sequence
  Description of Artificial Sequence: Synthetic oligonucleotide
uucaagcuaucgacaccug

SEQ ID NO: 484628 - RNA, 19 nt, Artificial Sequence
  Description of Artificial Sequence: Synthetic oligonucleotide
augaaugaaaagagacgca

SEQ ID NO: 484629 - RNA, 19 nt, Artificial Sequence
  Description of Artificial Sequence: Synthetic oligonucleotide
gcacugaauauaccacacg

SEQ ID NO: 484630 - RNA, 19 nt, Artificial Sequence
  Description of Artificial Sequence: Synthetic oligonucleotide
ugaaccggcuucguccuca

SEQ ID NO: 484631 - RNA, 19 nt, Artificial Sequence
  Description of Artificial Sequence: Synthetic oligonucleotide
agagagagagagagacacg

SEQ ID NO: 484632 - RNA, 19 nt, Artificial Sequence
  Description of Artificial Sequence: Synthetic oligonucleotide
aucggaaugauaaggccaa

SEQ ID NO: 484633 - RNA, 19 nt, Artificial Sequence
  Description of Artificial Sequence: Synthetic oligonucleotide
aacuuaaguuacagcagua

SEQ ID NO: 484634 - RNA, 19 nt, Artificial Sequence
  Description of Artificial Sequence: Synthetic oligonucleotide
accuucuaguccacacacc

SEQ ID NO: 484635 - RNA, 19 nt, Artificial Sequence
  Description of Artificial Sequence: Synthetic oligonucleotide
ggacagcuaucauacauga

SEQ ID NO: 484636 - RNA, 19 nt, Artificial Sequence
  Description of Artificial Sequence: Synthetic oligonucleotide
uccaucuaaguaugugauu

SEQ ID NO: 484637 - RNA, 19 nt, Artificial Sequence
  Description of Artificial Sequence: Synthetic oligonucleotide
aagagacuauugccauuaa

SEQ ID NO: 484638 - RNA, 19 nt, Artificial Sequence
  Description of Artificial Sequence: Synthetic oligonucleotide
aucgacaccuggaucaccu

SEQ ID NO: 484639 - RNA, 19 nt, Artificial Sequence
  Description of Artificial Sequence: Synthetic oligonucleotide
aaagagacgcaaagacgaa

SEQ ID NO: 484640 - RNA, 19 nt, Artificial Sequence
  Description of Artificial Sequence: Synthetic oligonucleotide
uuagucuguuggagacccc

SEQ ID NO: 484641 - RNA, 19 nt, Artificial Sequence
  Description of Artificial Sequence: Synthetic oligonucleotide
cgacuugggacuaacucgg

SEQ ID NO: 484642 - RNA, 19 nt, Artificial Sequence
  Description of Artificial Sequence: Synthetic oligonucleotide
acccaagaacucuaauuuu

SEQ ID NO: 484643 - RNA, 19 nt, Artificial Sequence
  Description of Artificial Sequence: Synthetic oligonucleotide
uggccauacugagaaacuc

SEQ ID NO: 484644 - RNA, 19 nt, Artificial Sequence
  Description of Artificial Sequence: Synthetic oligonucleotide
guaccggcacugaauauac

SEQ ID NO: 484645 - RNA, 19 nt, Artificial Sequence
  Description of Artificial Sequence: Synthetic oligonucleotide
uuaacacugugguggcuuu

SEQ ID NO: 484646 - RNA, 19 nt, Artificial Sequence
  Description of Artificial Sequence: Synthetic oligonucleotide
agauugagguagguaagau

SEQ ID NO: 484647 - RNA, 19 nt, Artificial Sequence
  Description of Artificial Sequence: Synthetic oligonucleotide
gauuaacagacuagcaaau

SEQ ID NO: 484648 - RNA, 19 nt, Artificial Sequence
  Description of Artificial Sequence: Synthetic oligonucleotide
aagggacagcuaucauaca

SEQ ID NO: 484649 - RNA, 19 nt, Artificial Sequence
  Description of Artificial Sequence: Synthetic oligonucleotide
uggucgcucuacugcacgc

SEQ ID NO: 484650 - RNA, 19 nt, Artificial Sequence
  Description of Artificial Sequence: Synthetic oligonucleotide
gucgcucuacugcacgccc

SEQ ID NO: 484651 - RNA, 19 nt, Artificial Sequence
  Description of Artificial Sequence: Synthetic oligonucleotide
aaauggaguccgacgacuu

SEQ ID NO: 484652 - RNA, 19 nt, Artificial Sequence
  Description of Artificial Sequence: Synthetic oligonucleotide
gauugagguagguaagauu

SEQ ID NO: 484653 - RNA, 19 nt, Artificial Sequence
  Description of Artificial Sequence: Synthetic oligonucleotide
caagagacuauugccauua

SEQ ID NO: 484654 - RNA, 19 nt, Artificial Sequence
  Description of Artificial Sequence: Synthetic oligonucleotide
uacuuacauuaugauuaac

SEQ ID NO: 484655 - RNA, 19 nt, Artificial Sequence
  Description of Artificial Sequence: Synthetic oligonucleotide
ccaaggaacuuaauuccac

SEQ ID NO: 484656 - RNA, 19 nt, Artificial Sequence
  Description of Artificial Sequence: Synthetic oligonucleotide
acugaauauaccacacguu

SEQ ID NO: 484657 - RNA, 19 nt, Artificial Sequence
  Description of Artificial Sequence: Synthetic oligonucleotide
agcaguucgaagauacuuu

SEQ ID NO: 484658 - RNA, 19 nt, Artificial Sequence
  Description of Artificial Sequence: Synthetic oligonucleotide
acauuaugauuaacagacu

SEQ ID NO: 484659 - RNA, 19 nt, Artificial Sequence
  Description of Artificial Sequence: Synthetic oligonucleotide
acagugcuagagaauuuca

SEQ ID NO: 484660 - RNA, 19 nt, Artificial Sequence
  Description of Artificial Sequence: Synthetic oligonucleotide
agacgaacgcccacuacca

SEQ ID NO: 484661 - RNA, 19 nt, Artificial Sequence
  Description of Artificial Sequence: Synthetic oligonucleotide
guuuuaauuaugggcuaaa

SEQ ID NO: 484662 - RNA, 19 nt, Artificial Sequence
  Description of Artificial Sequence: Synthetic oligonucleotide
agaauuccuagggacugaa

SEQ ID NO: 484663 - RNA, 19 nt, Artificial Sequence
  Description of Artificial Sequence: Synthetic oligonucleotide
gcuaucauacaugaagaaa

SEQ ID NO: 484664 - RNA, 19 nt, Artificial Sequence
  Description of Artificial Sequence: Synthetic oligonucleotide
gggacagcuaucauacaug

SEQ ID NO: 484665 - RNA, 19 nt, Artificial Sequence
  Description of Artificial Sequence: Synthetic oligonucleotide
agauuuugcagggccucca

SEQ ID NO: 484666 - RNA, 19 nt, Artificial Sequence
  Description of Artificial Sequence: Synthetic oligonucleotide
ucgcucuacugcacgccca

SEQ ID NO: 484667 - RNA, 19 nt, Artificial Sequence
  Description of Artificial Sequence: Synthetic oligonucleotide
uaccggcacugaauauacc

SEQ ID NO: 484668 - RNA, 19 nt, Artificial Sequence
  Description of Artificial Sequence: Synthetic oligonucleotide
gacauauggucgcucuacu

SEQ ID NO: 484669 - RNA, 19 nt, Artificial Sequence
  Description of Artificial Sequence: Synthetic oligonucleotide
ggacuaacucggcugcccc

SEQ ID NO: 484670 - RNA, 19 nt, Artificial Sequence
  Description of Artificial Sequence: Synthetic oligonucleotide
uaucgacaccuggaucacc

SEQ ID NO: 484671 - RNA, 19 nt, Artificial Sequence
  Description of Artificial Sequence: Synthetic oligonucleotide
ggcacugaauauaccacac

SEQ ID NO: 484672 - RNA, 19 nt, Artificial Sequence
  Description of Artificial Sequence: Synthetic oligonucleotide
gagucgguugccucguugu

SEQ ID NO: 484673 - RNA, 19 nt, Artificial Sequence
  Description of Artificial Sequence: Synthetic oligonucleotide
aagguaucauucaggccuu

SEQ ID NO: 484674 - RNA, 19 nt, Artificial Sequence
  Description of Artificial Sequence: Synthetic oligonucleotide
uccuccuccuccuccucgu

SEQ ID NO: 484675 - RNA, 19 nt, Artificial Sequence
  Description of Artificial Sequence: Synthetic oligonucleotide
agagagagagagagagaca

SEQ ID NO: 484676 - RNA, 19 nt, Artificial Sequence
  Description of Artificial Sequence: Synthetic oligonucleotide
cuaccacccgggugugggg

SEQ ID NO: 484677 - RNA, 19 nt, Artificial Sequence
  Description of Artificial Sequence: Synthetic oligonucleotide
guccacacacccgcgcgcg

SEQ ID NO: 484678 - RNA, 19 nt, Artificial Sequence
  Description of Artificial Sequence: Synthetic oligonucleotide
augauaaggccaagacagu

SEQ ID NO: 484679 - RNA, 19 nt, Artificial Sequence
  Description of Artificial Sequence: Synthetic oligonucleotide
agagagagagagagagaga

SEQ ID NO: 484680 - RNA, 19 nt, Artificial Sequence
  Description of Artificial Sequence: Synthetic oligonucleotide
cuccuaaagggacagcuau

SEQ ID NO: 484681 - RNA, 19 nt, Artificial Sequence
  Description of Artificial Sequence: Synthetic oligonucleotide
gaacgcccacuaccacccg

SEQ ID NO: 484682 - RNA, 19 nt, Artificial Sequence
  Description of Artificial Sequence: Synthetic oligonucleotide
ccuaaagggacagcuauca

SEQ ID NO: 484683 - RNA, 19 nt, Artificial Sequence
  Description of Artificial Sequence: Synthetic oligonucleotide
acagagagagagagagaga

SEQ ID NO: 484684 - RNA, 19 nt, Artificial Sequence
  Description of Artificial Sequence: Synthetic oligonucleotide
gagagacacgcgcgccgcc

SEQ ID NO: 484685 - RNA, 19 nt, Artificial Sequence
  Description of Artificial Sequence: Synthetic oligonucleotide
cuaaaggucuggagaugaa

SEQ ID NO: 484686 - RNA, 19 nt, Artificial Sequence
  Description of Artificial Sequence: Synthetic oligonucleotide
caauuuccccauugacaca

SEQ ID NO: 484687 - RNA, 19 nt, Artificial Sequence
  Description of Artificial Sequence: Synthetic oligonucleotide
agccuccagauauuauauu

SEQ ID NO: 484688 - RNA, 19 nt, Artificial Sequence
  Description of Artificial Sequence: Synthetic oligonucleotide
cccacaaagcuaaauaagu

SEQ ID NO: 484689 - RNA, 19 nt, Artificial Sequence
  Description of Artificial Sequence: Synthetic oligonucleotide
cacguuuauuucagucaga

SEQ ID NO: 484690 - RNA, 19 nt, Artificial Sequence
  Description of Artificial Sequence: Synthetic oligonucleotide
ugggacuaacucggcugcc

SEQ ID NO: 484691 - RNA, 19 nt, Artificial Sequence
  Description of Artificial Sequence: Synthetic oligonucleotide
gacuugggacuaacucggc

SEQ ID NO: 484692 - RNA, 19 nt, Artificial Sequence
  Description of Artificial Sequence: Synthetic oligonucleotide
ggaagccgggccaaggaac

SEQ ID NO: 484693 - RNA, 19 nt, Artificial Sequence
  Description of Artificial Sequence: Synthetic oligonucleotide
ccuggcauagugugccaag

SEQ ID NO: 484694 - RNA, 19 nt, Artificial Sequence
  Description of Artificial Sequence: Synthetic oligonucleotide
auucuucgauuuauucaaa

SEQ ID NO: 484695 - RNA, 19 nt, Artificial Sequence
  Description of Artificial Sequence: Synthetic oligonucleotide
ccuagggacugaaagcaga

SEQ ID NO: 484696 - RNA, 19 nt, Artificial Sequence
  Description of Artificial Sequence: Synthetic oligonucleotide
caaagacgaacgcccacua

SEQ ID NO: 484697 - RNA, 19 nt, Artificial Sequence
  Description of Artificial Sequence: Synthetic oligonucleotide
acaccccuaaaggucugga

SEQ ID NO: 484698 - RNA, 19 nt, Artificial Sequence
  Description of Artificial Sequence: Synthetic oligonucleotide
agguaucauucaggccuuc

SEQ ID NO: 484699 - RNA, 19 nt, Artificial Sequence
  Description of Artificial Sequence: Synthetic oligonucleotide
gggacuaacucggcugccc

SEQ ID NO: 484700 - RNA, 19 nt, Artificial Sequence
  Description of Artificial Sequence: Synthetic oligonucleotide
gcuuucccaaacugugaca

SEQ ID NO: 484701 - RNA, 19 nt, Artificial Sequence
  Description of Artificial Sequence: Synthetic oligonucleotide
ggucuggagaugaaugaaa

SEQ ID NO: 484702 - RNA, 19 nt, Artificial Sequence
  Description of Artificial Sequence: Synthetic oligonucleotide
acacagagagagagagaga

SEQ ID NO: 484703 - RNA, 19 nt, Artificial Sequence
  Description of Artificial Sequence: Synthetic oligonucleotide
gccaaggaacuuaauucca

SEQ ID NO: 484704 - RNA, 19 nt, Artificial Sequence
  Description of Artificial Sequence: Synthetic oligonucleotide
guuccaacuuucgaaguuu

SEQ ID NO: 484705 - RNA, 19 nt, Artificial Sequence
  Description of Artificial Sequence: Synthetic oligonucleotide
gcacaauagaugauugaua

SEQ ID NO: 484706 - RNA, 19 nt, Artificial Sequence
  Description of Artificial Sequence: Synthetic oligonucleotide
gcuuuacucaaaauacagu

SEQ ID NO: 484707 - RNA, 19 nt, Artificial Sequence
  Description of Artificial Sequence: Synthetic oligonucleotide
acgcaaagacgaacgccca

SEQ ID NO: 484708 - RNA, 19 nt, Artificial Sequence
  Description of Artificial Sequence: Synthetic oligonucleotide
ccaucuaaguaugugauuu

SEQ ID NO: 484709 - RNA, 19 nt, Artificial Sequence
  Description of Artificial Sequence: Synthetic oligonucleotide
cucuauaauccuccagguu

SEQ ID NO: 484710 - RNA, 19 nt, Artificial Sequence
  Description of Artificial Sequence: Synthetic oligonucleotide
ccacccuugcuuauuugca

SEQ ID NO: 484711 - RNA, 19 nt, Artificial Sequence
  Description of Artificial Sequence: Synthetic oligonucleotide
cacacacccgcgcgcgcac

SEQ ID NO: 484712 - RNA, 19 nt, Artificial Sequence
  Description of Artificial Sequence: Synthetic oligonucleotide
cccgcgcgcgcacacacgg

SEQ ID NO: 484713 - RNA, 19 nt, Artificial Sequence
  Description of Artificial Sequence: Synthetic oligonucleotide
ggacuaacucugucaccuc

SEQ ID NO: 484714 - RNA, 19 nt, Artificial Sequence
  Description of Artificial Sequence: Synthetic oligonucleotide
cacacccgcgcgcgcacac

SEQ ID NO: 484715 - RNA, 19 nt, Artificial Sequence
  Description of Artificial Sequence: Synthetic oligonucleotide
cauccuccuccuccuccuc

SEQ ID NO: 484716 - RNA, 19 nt, Artificial Sequence
  Description of Artificial Sequence: Synthetic oligonucleotide
cagcaguucgaagauacuu

SEQ ID NO: 484717 - RNA, 19 nt, Artificial Sequence
  Description of Artificial Sequence: Synthetic oligonucleotide
gcaaagacgaacgcccacu

SEQ ID NO: 484718 - RNA, 19 nt, Artificial Sequence
  Description of Artificial Sequence: Synthetic oligonucleotide
cacccuugcuuauuugcau

SEQ ID NO: 484719 - RNA, 19 nt, Artificial Sequence
  Description of Artificial Sequence: Synthetic oligonucleotide
agccgggccaaggaacuua

SEQ ID NO: 484720 - RNA, 19 nt, Artificial Sequence
  Description of Artificial Sequence: Synthetic oligonucleotide
cuccggggcucuguucuuc

SEQ ID NO: 484721 - RNA, 19 nt, Artificial Sequence
  Description of Artificial Sequence: Synthetic oligonucleotide
guuuaacacugugguggcu

SEQ ID NO: 484722 - RNA, 19 nt, Artificial Sequence
  Description of Artificial Sequence: Synthetic oligonucleotide
cugaaccggcuucguccuc

SEQ ID NO: 484723 - RNA, 19 nt, Artificial Sequence
  Description of Artificial Sequence: Synthetic oligonucleotide
ggaguccgacgacuuggga

SEQ ID NO: 484724 - RNA, 19 nt, Artificial Sequence
  Description of Artificial Sequence: Synthetic oligonucleotide
gcccgcaguuuccuucccc

SEQ ID NO: 484725 - RNA, 19 nt, Artificial Sequence
  Description of Artificial Sequence: Synthetic oligonucleotide
cacgcaguacagagagagu

SEQ ID NO: 484726 - RNA, 19 nt, Artificial Sequence
  Description of Artificial Sequence: Synthetic oligonucleotide
cccuaaaggucuggagaug

SEQ ID NO: 484727 - RNA, 19 nt, Artificial Sequence
  Description of Artificial Sequence: Synthetic oligonucleotide
cgcaaagacgaacgcccac

SEQ ID NO: 484728 - RNA, 19 nt, Artificial Sequence
  Description of Artificial Sequence: Synthetic oligonucleotide
cgcucuacugcacgcccag

SEQ ID NO: 484729 - RNA, 19 nt, Artificial Sequence
  Description of Artificial Sequence: Synthetic oligonucleotide
acccgcgcgcgcacacacg

SEQ ID NO: 484730 - RNA, 19 nt, Artificial Sequence
  Description of Artificial Sequence: Synthetic oligonucleotide
ccccuaaaggucuggagau

SEQ ID NO: 484731 - RNA, 19 nt, Artificial Sequence
  Description of Artificial Sequence: Synthetic oligonucleotide
gacacgcgcgccgcccgca

SEQ ID NO: 484732 - RNA, 19 nt, Artificial Sequence
  Description of Artificial Sequence: Synthetic oligonucleotide
gaaccggcuucguccucau

SEQ ID NO: 484733 - RNA, 19 nt, Artificial Sequence
  Description of Artificial Sequence: Synthetic oligonucleotide
acacacccgcgcgcgcaca

SEQ ID NO: 484734 - RNA, 19 nt, Artificial Sequence
  Description of Artificial Sequence: Synthetic oligonucleotide
cucgccugcccuccccacu

SEQ ID NO: 484735 - RNA, 19 nt, Artificial Sequence
  Description of Artificial Sequence: Synthetic oligonucleotide
gccgggccaaggaacuuaa

SEQ ID NO: 484736 - RNA, 19 nt, Artificial Sequence
  Description of Artificial Sequence: Synthetic oligonucleotide
guccgacgacuugggacua

SEQ ID NO: 484737 - RNA, 19 nt, Artificial Sequence
  Description of Artificial Sequence: Synthetic oligonucleotide
ggaggcccuauuuguuguu

SEQ ID NO: 484738 - RNA, 19 nt, Artificial Sequence
  Description of Artificial Sequence: Synthetic oligonucleotide
cgggccaaggaacuuaauu

SEQ ID NO: 484739 - RNA, 19 nt, Artificial Sequence
  Description of Artificial Sequence: Synthetic oligonucleotide
cacgcgcgccgcccgcagu

SEQ ID NO: 484740 - RNA, 19 nt, Artificial Sequence
  Description of Artificial Sequence: Synthetic oligonucleotide
ccgggccaaggaacuuaau

SEQ ID NO: 484741 - RNA, 19 nt, Artificial Sequence
  Description of Artificial Sequence: Synthetic oligonucleotide
aagaagcugacuuuaagcc

SEQ ID NO: 484742 - RNA, 19 nt, Artificial Sequence
  Description of Artificial Sequence: Synthetic oligonucleotide
agagguaucagucugcugg

SEQ ID NO: 484743 - RNA, 19 nt, Artificial Sequence
  Description of Artificial Sequence: Synthetic oligonucleotide
acuguuaggguccagaauc

SEQ ID NO: 484744 - RNA, 19 nt, Artificial Sequence
  Description of Artificial Sequence: Synthetic oligonucleotide
ugacuuuaagccuagaucu

SEQ ID NO: 484745 - RNA, 19 nt, Artificial Sequence
  Description of Artificial Sequence: Synthetic oligonucleotide
aagguguuggaacugaaag

SEQ ID NO: 484746 - RNA, 19 nt, Artificial Sequence
  Description of Artificial Sequence: Synthetic oligonucleotide
guuucugccagccacaagg

SEQ ID NO: 484747 - RNA, 19 nt, Artificial Sequence
  Description of Artificial Sequence: Synthetic oligonucleotide
acaaggaccuuccagggcc

SEQ ID NO: 484748 - RNA, 19 nt, Artificial Sequence
  Description of Artificial Sequence: Synthetic oligonucleotide
auuugugaagcucccaggc

SEQ ID NO: 484749 - RNA, 19 nt, Artificial Sequence
  Description of Artificial Sequence: Synthetic oligonucleotide
acaggaaguacauaccuac

SEQ ID NO: 484750 - RNA, 19 nt, Artificial Sequence
  Description of Artificial Sequence: Synthetic oligonucleotide
uggauaagcaaccugguga

SEQ ID NO: 484751 - RNA, 19 nt, Artificial Sequence
  Description of Artificial Sequence: Synthetic oligonucleotide
auacguacguacuuaaggg

SEQ ID NO: 484752 - RNA, 19 nt, Artificial Sequence
  Description of Artificial Sequence: Synthetic oligonucleotide
uuauuugugaagcucccag

SEQ ID NO: 484753 - RNA, 19 nt, Artificial Sequence
  Description of Artificial Sequence: Synthetic oligonucleotide
gaagaagcugacuuuaagc

SEQ ID NO: 484754 - RNA, 19 nt, Artificial Sequence
  Description of Artificial Sequence: Synthetic oligonucleotide
acacacgagacaaagaccc

SEQ ID NO: 484755 - RNA, 19 nt, Artificial Sequence
  Description of Artificial Sequence: Synthetic oligonucleotide
cauacguacguacuuaagg

SEQ ID NO: 484756 - RNA, 19 nt, Artificial Sequence
  Description of Artificial Sequence: Synthetic oligonucleotide
uacuuaagggaccaacagg

SEQ ID NO: 484757 - RNA, 19 nt, Artificial Sequence
  Description of Artificial Sequence: Synthetic oligonucleotide
gagccuauggcuaaguugg

SEQ ID NO: 484758 - RNA, 19 nt, Artificial Sequence
  Description of Artificial Sequence: Synthetic oligonucleotide
ucuuguauaguaucugcag

SEQ ID NO: 484759 - RNA, 19 nt, Artificial Sequence
  Description of Artificial Sequence: Synthetic oligonucleotide
agacacacaauacaaagga

SEQ ID NO: 484760 - RNA, 19 nt, Artificial Sequence
  Description of Artificial Sequence: Synthetic oligonucleotide
aggaaguacauaccuacac

SEQ ID NO: 484761 - RNA, 19 nt, Artificial Sequence
  Description of Artificial Sequence: Synthetic oligonucleotide
ucagaaaaccccugaagag

SEQ ID NO: 484762 - RNA, 19 nt, Artificial Sequence
  Description of Artificial Sequence: Synthetic oligonucleotide
uaagggaccaacaggacac

SEQ ID NO: 484763 - RNA, 19 nt, Artificial Sequence
  Description of Artificial Sequence: Synthetic oligonucleotide
cuugaguucaugcagggug

SEQ ID NO: 484764 - RNA, 19 nt, Artificial Sequence
  Description of Artificial Sequence: Synthetic oligonucleotide
aauacaaaggaaagcagga

SEQ ID NO: 484765 - RNA, 19 nt, Artificial Sequence
  Description of Artificial Sequence: Synthetic oligonucleotide
gaaguaauccugcugcacc

SEQ ID NO: 484766 - RNA, 19 nt, Artificial Sequence
  Description of Artificial Sequence: Synthetic oligonucleotide
aagccuagaucuuguauag

SEQ ID NO: 484767 - RNA, 19 nt, Artificial Sequence
  Description of Artificial Sequence: Synthetic oligonucleotide
uacauaccuacacacacca

SEQ ID NO: 484768 - RNA, 19 nt, Artificial Sequence
  Description of Artificial Sequence: Synthetic oligonucleotide
uuguauaguaucugcagca

SEQ ID NO: 484769 - RNA, 19 nt, Artificial Sequence
  Description of Artificial Sequence: Synthetic oligonucleotide
ucuacuugccgcaaagucu

SEQ ID NO: 484770 - RNA, 19 nt, Artificial Sequence
  Description of Artificial Sequence: Synthetic oligonucleotide
cuuagagcguacaaggcag

SEQ ID NO: 484771 - RNA, 19 nt, Artificial Sequence
  Description of Artificial Sequence: Synthetic oligonucleotide
ucauuuagguugaugacuc

SEQ ID NO: 484772 - RNA, 19 nt, Artificial Sequence
  Description of Artificial Sequence: Synthetic oligonucleotide
accuacacacaccacaccg

SEQ ID NO: 484773 - RNA, 19 nt, Artificial Sequence
  Description of Artificial Sequence: Synthetic oligonucleotide
accacaccgacauacguac

SEQ ID NO: 484774 - RNA, 19 nt, Artificial Sequence
  Description of Artificial Sequence: Synthetic oligonucleotide
uuaagcuugaguucaugca

SEQ ID NO: 484775 - RNA, 19 nt, Artificial Sequence
  Description of Artificial Sequence: Synthetic oligonucleotide
ugcuggacuaucagcaugg

SEQ ID NO: 484776 - RNA, 19 nt, Artificial Sequence
  Description of Artificial Sequence: Synthetic oligonucleotide
uuggcgguaaguuuaauaa

SEQ ID NO: 484777 - RNA, 19 nt, Artificial Sequence
  Description of Artificial Sequence: Synthetic oligonucleotide
gaucuuguauaguaucugc

SEQ ID NO: 484778 - RNA, 19 nt, Artificial Sequence
  Description of Artificial Sequence: Synthetic oligonucleotide
auuuagguugaugacucgc

SEQ ID NO: 484779 - RNA, 19 nt, Artificial Sequence
  Description of Artificial Sequence: Synthetic oligonucleotide
uuuuauuugugaagcuccc

SEQ ID NO: 484780 - RNA, 19 nt, Artificial Sequence
  Description of Artificial Sequence: Synthetic oligonucleotide
uauuugugaagcucccagg

SEQ ID NO: 484781 - RNA, 19 nt, Artificial Sequence
  Description of Artificial Sequence: Synthetic oligonucleotide
uuugucacaaaugccaaca

SEQ ID NO: 484782 - RNA, 19 nt, Artificial Sequence
  Description of Artificial Sequence: Synthetic oligonucleotide
cuuguauaguaucugcagc

SEQ ID NO: 484783 - RNA, 19 nt, Artificial Sequence
  Description of Artificial Sequence: Synthetic oligonucleotide
ugaaguugcucacagcccu

SEQ ID NO: 484784 - RNA, 19 nt, Artificial Sequence
  Description of Artificial Sequence: Synthetic oligonucleotide
acuaucagcauggagaccu

SEQ ID NO: 484785 - RNA, 19 nt, Artificial Sequence
  Description of Artificial Sequence: Synthetic oligonucleotide
agaccuugggaccaagacg

SEQ ID NO: 484786 - RNA, 19 nt, Artificial Sequence
  Description of Artificial Sequence: Synthetic oligonucleotide
uaaguuggcgguaaguuua

SEQ ID NO: 484787 - RNA, 19 nt, Artificial Sequence
  Description of Artificial Sequence: Synthetic oligonucleotide
cuuucggugacacucaguc

SEQ ID NO: 484788 - RNA, 19 nt, Artificial Sequence
  Description of Artificial Sequence: Synthetic oligonucleotide
uuuagcuugggcaggcccc

SEQ ID NO: 484789 - RNA, 19 nt, Artificial Sequence
  Description of Artificial Sequence: Synthetic oligonucleotide
gaccuugggaccaagacgc

SEQ ID NO: 484790 - RNA, 19 nt, Artificial Sequence
  Description of Artificial Sequence: Synthetic oligonucleotide
auguggauaagcaaccugg

SEQ ID NO: 484791 - RNA, 19 nt, Artificial Sequence
  Description of Artificial Sequence: Synthetic oligonucleotide
aucgacagcauccagcacu

SEQ ID NO: 484792 - RNA, 19 nt, Artificial Sequence
  Description of Artificial Sequence: Synthetic oligonucleotide
gguaaguuuaauaacagca

SEQ ID NO: 484793 - RNA, 19 nt, Artificial Sequence
  Description of Artificial Sequence: Synthetic oligonucleotide
aaguugaucgccucuacuu

SEQ ID NO: 484794 - RNA, 19 nt, Artificial Sequence
  Description of Artificial Sequence: Synthetic oligonucleotide
gauggagaaugccugggcc

SEQ ID NO: 484795 - RNA, 19 nt, Artificial Sequence
  Description of Artificial Sequence: Synthetic oligonucleotide
ugucacaaaugccaacagc

SEQ ID NO: 484796 - RNA, 19 nt, Artificial Sequence
  Description of Artificial Sequence: Synthetic oligonucleotide
uccagaaucuuccgcgagg

SEQ ID NO: 484797 - RNA, 19 nt, Artificial Sequence
  Description of Artificial Sequence: Synthetic oligonucleotide
gucccaaugaucccaaaag

SEQ ID NO: 484798 - RNA, 19 nt, Artificial Sequence
  Description of Artificial Sequence: Synthetic oligonucleotide
gagaugaccaucugcaauc

SEQ ID NO: 484799 - RNA, 19 nt, Artificial Sequence
  Description of Artificial Sequence: Synthetic oligonucleotide
cuuuggugggacaggaagg

SEQ ID NO: 484800 - RNA, 19 nt, Artificial Sequence
  Description of Artificial Sequence: Synthetic oligonucleotide
agagccuauggcuaaguug

SEQ ID NO: 484801 - RNA, 19 nt, Artificial Sequence
  Description of Artificial Sequence: Synthetic oligonucleotide
aaguaauccugcugcacca

SEQ ID NO: 484802 - RNA, 19 nt, Artificial Sequence
  Description of Artificial Sequence: Synthetic oligonucleotide
guacuuaagggaccaacag

SEQ ID NO: 484803 - RNA, 19 nt, Artificial Sequence
  Description of Artificial Sequence: Synthetic oligonucleotide
guagcucaggcauuagggg

SEQ ID NO: 484804 - RNA, 19 nt, Artificial Sequence
  Description of Artificial Sequence: Synthetic oligonucleotide
accaagacgcagcagcuuc

SEQ ID NO: 484805 - RNA, 19 nt, Artificial Sequence
  Description of Artificial Sequence: Synthetic oligonucleotide
caaugaucccaaaagcuuc

SEQ ID NO: 484806 - RNA, 19 nt, Artificial Sequence
  Description of Artificial Sequence: Synthetic oligonucleotide
uuaagccuagaucuuguau

SEQ ID NO: 484807 - RNA, 19 nt, Artificial Sequence
  Description of Artificial Sequence: Synthetic oligonucleotide
acuccaguggcaucgcuuc

SEQ ID NO: 484808 - RNA, 19 nt, Artificial Sequence
  Description of Artificial Sequence: Synthetic oligonucleotide
uguauaguaucugcagcag

SEQ ID NO: 484809 - RNA, 19 nt, Artificial Sequence
  Description of Artificial Sequence: Synthetic oligonucleotide
guauccaauggagacauug

SEQ ID NO: 484810 - RNA, 19 nt, Artificial Sequence
  Description of Artificial Sequence: Synthetic oligonucleotide
ucuuccgcgaggcuguggc

SEQ ID NO: 484811 - RNA, 19 nt, Artificial Sequence
  Description of Artificial Sequence: Synthetic oligonucleotide
aaaccccugaagagcagcc

SEQ ID NO: 484812 - RNA, 19 nt, Artificial Sequence
  Description of Artificial Sequence: Synthetic oligonucleotide
ucuccagacgguuucugcc

SEQ ID NO: 484813 - RNA, 19 nt, Artificial Sequence
  Description of Artificial Sequence: Synthetic oligonucleotide
uuugugaagcucccaggca

SEQ ID NO: 484814 - RNA, 19 nt, Artificial Sequence
  Description of Artificial Sequence: Synthetic oligonucleotide
ucuggguacaagagccagg

SEQ ID NO: 484815 - RNA, 19 nt, Artificial Sequence
  Description of Artificial Sequence: Synthetic oligonucleotide
aguugaucgccucuacuug

SEQ ID NO: 484816 - RNA, 19 nt, Artificial Sequence
  Description of Artificial Sequence: Synthetic oligonucleotide
uacguacguacuuaaggga

SEQ ID NO: 484817 - RNA, 19 nt, Artificial Sequence
  Description of Artificial Sequence: Synthetic oligonucleotide
auucuguggcauguggacc

SEQ ID NO: 484818 - RNA, 19 nt, Artificial Sequence
  Description of Artificial Sequence: Synthetic oligonucleotide
uugaggagggccucgaauc

SEQ ID NO: 484819 - RNA, 19 nt, Artificial Sequence
  Description of Artificial Sequence: Synthetic oligonucleotide
gacgguuucugccagccac

SEQ ID NO: 484820 - RNA, 19 nt, Artificial Sequence
  Description of Artificial Sequence: Synthetic oligonucleotide
acguacguacuuaagggac

SEQ ID NO: 484821 - RNA, 19 nt, Artificial Sequence
  Description of Artificial Sequence: Synthetic oligonucleotide
agccaacagagccuauggc

SEQ ID NO: 484822 - RNA, 19 nt, Artificial Sequence
  Description of Artificial Sequence: Synthetic oligonucleotide
uucuguggcauguggaccu

SEQ ID NO: 484823 - RNA, 19 nt, Artificial Sequence
  Description of Artificial Sequence: Synthetic oligonucleotide
ggacacacgagacaaagac

SEQ ID NO: 484824 - RNA, 19 nt, Artificial Sequence
  Description of Artificial Sequence: Synthetic oligonucleotide
ggauaagcaaccuggugag

SEQ ID NO: 484825 - RNA, 19 nt, Artificial Sequence
  Description of Artificial Sequence: Synthetic oligonucleotide
aagccgagacaacuuucuc

SEQ ID NO: 484826 - RNA, 19 nt, Artificial Sequence
  Description of Artificial Sequence: Synthetic oligonucleotide
uagcucaggcauuagggga

SEQ ID NO: 484827 - RNA, 19 nt, Artificial Sequence
  Description of Artificial Sequence: Synthetic oligonucleotide
cucgcacuccaucaggucc

SEQ ID NO: 484828 - RNA, 19 nt, Artificial Sequence
  Description of Artificial Sequence: Synthetic oligonucleotide
cuggguuaguccagcaagg

SEQ ID NO: 484829 - RNA, 19 nt, Artificial Sequence
  Description of Artificial Sequence: Synthetic oligonucleotide
cacuacacagguucucucc

SEQ ID NO: 484830 - RNA, 19 nt, Artificial Sequence
  Description of Artificial Sequence: Synthetic oligonucleotide
cuggguacaagagccaggg

SEQ ID NO: 484831 - RNA, 19 nt, Artificial Sequence
  Description of Artificial Sequence: Synthetic oligonucleotide
guugaucgccucuacuugc

SEQ ID NO: 484832 - RNA, 19 nt, Artificial Sequence
  Description of Artificial Sequence: Synthetic oligonucleotide
cacuccuuaggcacagugg

SEQ ID NO: 484833 - RNA, 19 nt, Artificial Sequence
  Description of Artificial Sequence: Synthetic oligonucleotide
agccuagacacacaauaca

SEQ ID NO: 484834 - RNA, 19 nt, Artificial Sequence
  Description of Artificial Sequence: Synthetic oligonucleotide
ucagaccgaagccuuccag

SEQ ID NO: 484835 - RNA, 19 nt, Artificial Sequence
  Description of Artificial Sequence: Synthetic oligonucleotide
aaagccgagacaacuuucu

SEQ ID NO: 484836 - RNA, 19 nt, Artificial Sequence
  Description of Artificial Sequence: Synthetic oligonucleotide
agugaugagucccuccccu

SEQ ID NO: 484837 - RNA, 19 nt, Artificial Sequence
  Description of Artificial Sequence: Synthetic oligonucleotide
gagucccuccccuagugag

SEQ ID NO: 484838 - RNA, 19 nt, Artificial Sequence
  Description of Artificial Sequence: Synthetic oligonucleotide
acguacuuaagggaccaac

SEQ ID NO: 484839 - RNA, 19 nt, Artificial Sequence
  Description of Artificial Sequence: Synthetic oligonucleotide
cuuucagcccuuuucccug

SEQ ID NO: 484840 - RNA, 19 nt, Artificial Sequence
  Description of Artificial Sequence: Synthetic oligonucleotide
caccauugggcuuugucac

SEQ ID NO: 484841 - RNA, 19 nt, Artificial Sequence
  Description of Artificial Sequence: Synthetic oligonucleotide
agaccgaagccuuccagug

SEQ ID NO: 484842 - RNA, 19 nt, Artificial Sequence
  Description of Artificial Sequence: Synthetic oligonucleotide
cacgagacaaagacccucc

SEQ ID NO: 484843 - RNA, 19 nt, Artificial Sequence
  Description of Artificial Sequence: Synthetic oligonucleotide
acuuuaagccuagaucuug

SEQ ID NO: 484844 - RNA, 19 nt, Artificial Sequence
  Description of Artificial Sequence: Synthetic oligonucleotide
uugaucgccucuacuugcc

SEQ ID NO: 484845 - RNA, 19 nt, Artificial Sequence
  Description of Artificial Sequence: Synthetic oligonucleotide
uccuuaggcacaguggaga

SEQ ID NO: 484846 - RNA, 19 nt, Artificial Sequence
  Description of Artificial Sequence: Synthetic oligonucleotide
acgagacaaagacccuccc

SEQ ID NO: 484847 - RNA, 19 nt, Artificial Sequence
  Description of Artificial Sequence: Synthetic oligonucleotide
uuuauuugugaagcuccca

SEQ ID NO: 484848 - RNA, 19 nt, Artificial Sequence
  Description of Artificial Sequence: Synthetic oligonucleotide
agccgagacaacuuucuca

SEQ ID NO: 484849 - RNA, 19 nt, Artificial Sequence
  Description of Artificial Sequence: Synthetic oligonucleotide
ggguccagaaucuuccgcg

SEQ ID NO: 484850 - RNA, 19 nt, Artificial Sequence
  Description of Artificial Sequence: Synthetic oligonucleotide
ucccugggcaucaaucccc

SEQ ID NO: 484851 - RNA, 19 nt, Artificial Sequence
  Description of Artificial Sequence: Synthetic oligonucleotide
ucuccuacccagcucaauu

SEQ ID NO: 484852 - RNA, 19 nt, Artificial Sequence
  Description of Artificial Sequence: Synthetic oligonucleotide
cauccaaguucccuuaguc

SEQ ID NO: 484853 - RNA, 19 nt, Artificial Sequence
  Description of Artificial Sequence: Synthetic oligonucleotide
acuacacagguucucuccu

SEQ ID NO: 484854 - RNA, 19 nt, Artificial Sequence
  Description of Artificial Sequence: Synthetic oligonucleotide
gacgccaccuucaggaaag

SEQ ID NO: 484855 - RNA, 19 nt, Artificial Sequence
  Description of Artificial Sequence: Synthetic oligonucleotide
ugaucgccucuacuugccg

SEQ ID NO: 484856 - RNA, 19 nt, Artificial Sequence
  Description of Artificial Sequence: Synthetic oligonucleotide
agccacaaggaccuuccag

SEQ ID NO: 484857 - RNA, 19 nt, Artificial Sequence
  Description of Artificial Sequence: Synthetic oligonucleotide
cagccaacagagccuaugg

SEQ ID NO: 484858 - RNA, 19 nt, Artificial Sequence
  Description of Artificial Sequence: Synthetic oligonucleotide
ucccugaacacagacgcca

SEQ ID NO: 484859 - RNA, 19 nt, Artificial Sequence
  Description of Artificial Sequence: Synthetic oligonucleotide
auggagaaugccugggcca

SEQ ID NO: 484860 - RNA, 19 nt, Artificial Sequence
  Description of Artificial Sequence: Synthetic oligonucleotide
gacaggaaggcaggguagg

SEQ ID NO: 484861 - RNA, 19 nt, Artificial Sequence
  Description of Artificial Sequence: Synthetic oligonucleotide
cauuuagguugaugacucg

SEQ ID NO: 484862 - RNA, 19 nt, Artificial Sequence
  Description of Artificial Sequence: Synthetic oligonucleotide
caauucccacuccuuaggc

SEQ ID NO: 484863 - RNA, 19 nt, Artificial Sequence
  Description of Artificial Sequence: Synthetic oligonucleotide
acacgagacaaagacccuc

SEQ ID NO: 484864 - RNA, 19 nt, Artificial Sequence
  Description of Artificial Sequence: Synthetic oligonucleotide
gguccaaaugcauugucac

SEQ ID NO: 484865 - RNA, 19 nt, Artificial Sequence
  Description of Artificial Sequence: Synthetic oligonucleotide
ucugccaaugcaguggcuc

SEQ ID NO: 484866 - RNA, 19 nt, Artificial Sequence
  Description of Artificial Sequence: Synthetic oligonucleotide
aagcaaccuggugaggaag

SEQ ID NO: 484867 - RNA, 19 nt, Artificial Sequence
  Description of Artificial Sequence: Synthetic oligonucleotide
gaucgccucuacuugccgc

SEQ ID NO: 484868 - RNA, 19 nt, Artificial Sequence
  Description of Artificial Sequence: Synthetic oligonucleotide
ugcaccauugggcuuuguc

SEQ ID NO: 484869 - RNA, 19 nt, Artificial Sequence
  Description of Artificial Sequence: Synthetic oligonucleotide
cuuugucacaaaugccaac

SEQ ID NO: 484870 - RNA, 19 nt, Artificial Sequence
  Description of Artificial Sequence: Synthetic oligonucleotide
uggcgguaaguuuaauaac

SEQ ID NO: 484871 - RNA, 19 nt, Artificial Sequence
  Description of Artificial Sequence: Synthetic oligonucleotide
agggaacaggauuccagug

SEQ ID NO: 484872 - RNA, 19 nt, Artificial Sequence
  Description of Artificial Sequence: Synthetic oligonucleotide
uccagacgguuucugccag

SEQ ID NO: 484873 - RNA, 19 nt, Artificial Sequence
  Description of Artificial Sequence: Synthetic oligonucleotide
gguuaguccagcaaggaga

SEQ ID NO: 484874 - RNA, 19 nt, Artificial Sequence
  Description of Artificial Sequence: Synthetic oligonucleotide
cacaggugacuuuuauuug

SEQ ID NO: 484875 - RNA, 19 nt, Artificial Sequence
  Description of Artificial Sequence: Synthetic oligonucleotide
acggacagcaucugcgaug

SEQ ID NO: 484876 - RNA, 19 nt, Artificial Sequence
  Description of Artificial Sequence: Synthetic oligonucleotide
caugagggcaucgacagca

SEQ ID NO: 484877 - RNA, 19 nt, Artificial Sequence
  Description of Artificial Sequence: Synthetic oligonucleotide
acagccacuaagggaaguc

SEQ ID NO: 484878 - RNA, 19 nt, Artificial Sequence
  Description of Artificial Sequence: Synthetic oligonucleotide
uaauccugcugcaccacau

SEQ ID NO: 484879 - RNA, 19 nt, Artificial Sequence
  Description of Artificial Sequence: Synthetic oligonucleotide
auccucgcacuccaucagg

SEQ ID NO: 484880 - RNA, 19 nt, Artificial Sequence
  Description of Artificial Sequence: Synthetic oligonucleotide
gaagcugacuuuaagccua

SEQ ID NO: 484881 - RNA, 19 nt, Artificial Sequence
  Description of Artificial Sequence: Synthetic oligonucleotide
agucccaaugaucccaaaa

SEQ ID NO: 484882 - RNA, 19 nt, Artificial Sequence
  Description of Artificial Sequence: Synthetic oligonucleotide
ucgcacuccaucaggucca

SEQ ID NO: 484883 - RNA, 19 nt, Artificial Sequence
  Description of Artificial Sequence: Synthetic oligonucleotide
uuagagcguacaaggcagu

SEQ ID NO: 484884 - RNA, 19 nt, Artificial Sequence
  Description of Artificial Sequence: Synthetic oligonucleotide
uguuaagcuugaguucaug

SEQ ID NO: 484885 - RNA, 19 nt, Artificial Sequence
  Description of Artificial Sequence: Synthetic oligonucleotide
gcaauucccacuccuuagg

SEQ ID NO: 484886 - RNA, 19 nt, Artificial Sequence
  Description of Artificial Sequence: Synthetic oligonucleotide
ccccuuagagcguacaagg

SEQ ID NO: 484887 - RNA, 19 nt, Artificial Sequence
  Description of Artificial Sequence: Synthetic oligonucleotide
gauaagcaaccuggugagg

SEQ ID NO: 484888 - RNA, 19 nt, Artificial Sequence
  Description of Artificial Sequence: Synthetic oligonucleotide
gaaccuuggccauacugaa

SEQ ID NO: 484889 - RNA, 19 nt, Artificial Sequence
  Description of Artificial Sequence: Synthetic oligonucleotide
gacauacguacguacuuaa

SEQ ID NO: 484890 - RNA, 19 nt, Artificial Sequence
  Description of Artificial Sequence: Synthetic oligonucleotide
caucaggggcccauacagg

SEQ ID NO: 484891 - RNA, 19 nt, Artificial Sequence
  Description of Artificial Sequence: Synthetic oligonucleotide
uggaccuggguuaguccag

SEQ ID NO: 484892 - RNA, 19 nt, Artificial Sequence
  Description of Artificial Sequence: Synthetic oligonucleotide
cacaccacaccgacauacg

SEQ ID NO: 484893 - RNA, 19 nt, Artificial Sequence
  Description of Artificial Sequence: Synthetic oligonucleotide
uuucggugacacucaguca

SEQ ID NO: 484894 - RNA, 19 nt, Artificial Sequence
  Description of Artificial Sequence: Synthetic oligonucleotide
uuuaagccuagaucuugua

SEQ ID NO: 484895 - RNA, 19 nt, Artificial Sequence
  Description of Artificial Sequence: Synthetic oligonucleotide
gggagcaagggccuugggg

SEQ ID NO: 484896 - RNA, 19 nt, Artificial Sequence
  Description of Artificial Sequence: Synthetic oligonucleotide
uaagcaaccuggugaggaa

SEQ ID NO: 484897 - RNA, 19 nt, Artificial Sequence
  Description of Artificial Sequence: Synthetic oligonucleotide
aguccauccaaguucccuu

SEQ ID NO: 484898 - RNA, 19 nt, Artificial Sequence
  Description of Artificial Sequence: Synthetic oligonucleotide
agccacuaagggaagucac

SEQ ID NO: 484899 - RNA, 19 nt, Artificial Sequence
  Description of Artificial Sequence: Synthetic oligonucleotide
accgaagccuuccagugaa

SEQ ID NO: 484900 - RNA, 19 nt, Artificial Sequence
  Description of Artificial Sequence: Synthetic oligonucleotide
ggucagagguaucagucug

SEQ ID NO: 484901 - RNA, 19 nt, Artificial Sequence
  Description of Artificial Sequence: Synthetic oligonucleotide
gacuuucggugacacucag

SEQ ID NO: 484902 - RNA, 19 nt, Artificial Sequence
  Description of Artificial Sequence: Synthetic oligonucleotide
ggcuuugucacaaaugcca

SEQ ID NO: 484903 - RNA, 19 nt, Artificial Sequence
  Description of Artificial Sequence: Synthetic oligonucleotide
aaguucccuuagucacugg

SEQ ID NO: 484904 - RNA, 19 nt, Artificial Sequence
  Description of Artificial Sequence: Synthetic oligonucleotide
uccucgcacuccaucaggu

SEQ ID NO: 484905 - RNA, 19 nt, Artificial Sequence
  Description of Artificial Sequence: Synthetic oligonucleotide
gacaacuuucucaggguca

SEQ ID NO: 484906 - RNA, 19 nt, Artificial Sequence
  Description of Artificial Sequence: Synthetic oligonucleotide
agugaagguguugucauuu

SEQ ID NO: 484907 - RNA, 19 nt, Artificial Sequence
  Description of Artificial Sequence: Synthetic oligonucleotide
caaugcaguggcuccauca

SEQ ID NO: 484908 - RNA, 19 nt, Artificial Sequence
  Description of Artificial Sequence: Synthetic oligonucleotide
guguuggaacugaaagacg

SEQ ID NO: 484909 - RNA, 19 nt, Artificial Sequence
  Description of Artificial Sequence: Synthetic oligonucleotide
ugcagcuaccacaggugac

SEQ ID NO: 484910 - RNA, 19 nt, Artificial Sequence
  Description of Artificial Sequence: Synthetic oligonucleotide
uccaguggcaucgcuucag

SEQ ID NO: 484911 - RNA, 19 nt, Artificial Sequence
  Description of Artificial Sequence: Synthetic oligonucleotide
ggcgguaaguuuaauaaca

SEQ ID NO: 484912 - RNA, 19 nt, Artificial Sequence
  Description of Artificial Sequence: Synthetic oligonucleotide
agcagcccgacauguagcu

SEQ ID NO: 484913 - RNA, 19 nt, Artificial Sequence
  Description of Artificial Sequence: Synthetic oligonucleotide
acaccacaccgacauacgu

SEQ ID NO: 484914 - RNA, 19 nt, Artificial Sequence
  Description of Artificial Sequence: Synthetic oligonucleotide
aucgccucuacuugccgca

SEQ ID NO: 484915 - RNA, 19 nt, Artificial Sequence
  Description of Artificial Sequence: Synthetic oligonucleotide
caggcauuaggggaccugc

SEQ ID NO: 484916 - RNA, 19 nt, Artificial Sequence
  Description of Artificial Sequence: Synthetic oligonucleotide
gaaagccgagacaacuuuc

SEQ ID NO: 484917 - RNA, 19 nt, Artificial Sequence
  Description of Artificial Sequence: Synthetic oligonucleotide
ucaugagggcaucgacagc

SEQ ID NO: 484918 - RNA, 19 nt, Artificial Sequence
  Description of Artificial Sequence: Synthetic oligonucleotide
cuccuacccagcucaauuc

SEQ ID NO: 484919 - RNA, 19 nt, Artificial Sequence
  Description of Artificial Sequence: Synthetic oligonucleotide
cacaaggaccuuccagggc

SEQ ID NO: 484920 - RNA, 19 nt, Artificial Sequence
  Description of Artificial Sequence: Synthetic oligonucleotide
gucauuuagguugaugacu

SEQ ID NO: 484921 - RNA, 19 nt, Artificial Sequence
  Description of Artificial Sequence: Synthetic oligonucleotide
uaccacaggugacuuuuau

SEQ ID NO: 484922 - RNA, 19 nt, Artificial Sequence
  Description of Artificial Sequence: Synthetic oligonucleotide
cagcaaggagagaugacca

SEQ ID NO: 484923 - RNA, 19 nt, Artificial Sequence
  Description of Artificial Sequence: Synthetic oligonucleotide
gaagguggagaggucugug

SEQ ID NO: 484924 - RNA, 19 nt, Artificial Sequence
  Description of Artificial Sequence: Synthetic oligonucleotide
caccgacauacguacguac

SEQ ID NO: 484925 - RNA, 19 nt, Artificial Sequence
  Description of Artificial Sequence: Synthetic oligonucleotide
guaggcaggacagccaaca

SEQ ID NO: 484926 - RNA, 19 nt, Artificial Sequence
  Description of Artificial Sequence: Synthetic oligonucleotide
cuacacagguucucuccug

SEQ ID NO: 484927 - RNA, 19 nt, Artificial Sequence
  Description of Artificial Sequence: Synthetic oligonucleotide
agcucaguccauccaaguu

SEQ ID NO: 484928 - RNA, 19 nt, Artificial Sequence
  Description of Artificial Sequence: Synthetic oligonucleotide
acauacguacguacuuaag

SEQ ID NO: 484929 - RNA, 19 nt, Artificial Sequence
  Description of Artificial Sequence: Synthetic oligonucleotide
uccccgaaguugaucgccu

SEQ ID NO: 484930 - RNA, 19 nt, Artificial Sequence
  Description of Artificial Sequence: Synthetic oligonucleotide
cccacggacagcaucugcg

SEQ ID NO: 484931 - RNA, 19 nt, Artificial Sequence
  Description of Artificial Sequence: Synthetic oligonucleotide
gcaccauugggcuuuguca

SEQ ID NO: 484932 - RNA, 19 nt, Artificial Sequence
  Description of Artificial Sequence: Synthetic oligonucleotide
cccauguggauaagcaacc

SEQ ID NO: 484933 - RNA, 19 nt, Artificial Sequence
  Description of Artificial Sequence: Synthetic oligonucleotide
uucccacuacacagguucu

SEQ ID NO: 484934 - RNA, 19 nt, Artificial Sequence
  Description of Artificial Sequence: Synthetic oligonucleotide
augccacaguuguuaagcu

SEQ ID NO: 484935 - RNA, 19 nt, Artificial Sequence
  Description of Artificial Sequence: Synthetic oligonucleotide
cagcccgacauguagcuca

SEQ ID NO: 484936 - RNA, 19 nt, Artificial Sequence
  Description of Artificial Sequence: Synthetic oligonucleotide
ggcauuaggggaccugccc

SEQ ID NO: 484937 - RNA, 19 nt, Artificial Sequence
  Description of Artificial Sequence: Synthetic oligonucleotide
auuaggggaccugcccuuc

SEQ ID NO: 484938 - RNA, 19 nt, Artificial Sequence
  Description of Artificial Sequence: Synthetic oligonucleotide
uuccgcgaggcuguggcug

SEQ ID NO: 484939 - RNA, 19 nt, Artificial Sequence
  Description of Artificial Sequence: Synthetic oligonucleotide
aggcaauucccacuccuua

SEQ ID NO: 484940 - RNA, 19 nt, Artificial Sequence
  Description of Artificial Sequence: Synthetic oligonucleotide
aggcauuaggggaccugcc

SEQ ID NO: 484941 - RNA, 19 nt, Artificial Sequence
  Description of Artificial Sequence: Synthetic oligonucleotide
uuguuaagcuugaguucau

SEQ ID NO: 484942 - RNA, 19 nt, Artificial Sequence
  Description of Artificial Sequence: Synthetic oligonucleotide
agggaccaacaggacacac

SEQ ID NO: 484943 - RNA, 19 nt, Artificial Sequence
  Description of Artificial Sequence: Synthetic oligonucleotide
aucccugaacacagacgcc

SEQ ID NO: 484944 - RNA, 19 nt, Artificial Sequence
  Description of Artificial Sequence: Synthetic oligonucleotide
ucaggcauuaggggaccug

SEQ ID NO: 484945 - RNA, 19 nt, Artificial Sequence
  Description of Artificial Sequence: Synthetic oligonucleotide
uacccagcucaauucccac

SEQ ID NO: 484946 - RNA, 19 nt, Artificial Sequence
  Description of Artificial Sequence: Synthetic oligonucleotide
gcgguaaguuuaauaacag

SEQ ID NO: 484947 - RNA, 19 nt, Artificial Sequence
  Description of Artificial Sequence: Synthetic oligonucleotide
uggcuaaguuggcgguaag

SEQ ID NO: 484948 - RNA, 19 nt, Artificial Sequence
  Description of Artificial Sequence: Synthetic oligonucleotide
cccgacauguagcucaggc

SEQ ID NO: 484949 - RNA, 19 nt, Artificial Sequence
  Description of Artificial Sequence: Synthetic oligonucleotide
acauaccuacacacaccac

SEQ ID NO: 484950 - RNA, 19 nt, Artificial Sequence
  Description of Artificial Sequence: Synthetic oligonucleotide
cuuuaagccuagaucuugu

SEQ ID NO: 484951 - RNA, 19 nt, Artificial Sequence
  Description of Artificial Sequence: Synthetic oligonucleotide
accgacauacguacguacu

SEQ ID NO: 484952 - RNA, 19 nt, Artificial Sequence
  Description of Artificial Sequence: Synthetic oligonucleotide
guacguacuuaagggacca

SEQ ID NO: 484953 - RNA, 19 nt, Artificial Sequence
  Description of Artificial Sequence: Synthetic oligonucleotide
acugaaagacgaggagcug

SEQ ID NO: 484954 - RNA, 19 nt, Artificial Sequence
  Description of Artificial Sequence: Synthetic oligonucleotide
cucgaauccucgcacucca

SEQ ID NO: 484955 - RNA, 19 nt, Artificial Sequence
  Description of Artificial Sequence: Synthetic oligonucleotide
agcacgggagcuggcuccc

SEQ ID NO: 484956 - RNA, 19 nt, Artificial Sequence
  Description of Artificial Sequence: Synthetic oligonucleotide
caggaaguacauaccuaca

SEQ ID NO: 484957 - RNA, 19 nt, Artificial Sequence
  Description of Artificial Sequence: Synthetic oligonucleotide
ggagacauuggcugagcuc

SEQ ID NO: 484958 - RNA, 19 nt, Artificial Sequence
  Description of Artificial Sequence: Synthetic oligonucleotide
gagcagcccgacauguagc

SEQ ID NO: 484959 - RNA, 19 nt, Artificial Sequence
  Description of Artificial Sequence: Synthetic oligonucleotide
agugaacaugucacuccag

SEQ ID NO: 484960 - RNA, 19 nt, Artificial Sequence
  Description of Artificial Sequence: Synthetic oligonucleotide
agucacagggcaucuccua

SEQ ID NO: 484961 - RNA, 19 nt, Artificial Sequence
  Description of Artificial Sequence: Synthetic oligonucleotide
ucuugaggagggccucgaa

SEQ ID NO: 484962 - RNA, 19 nt, Artificial Sequence
  Description of Artificial Sequence: Synthetic oligonucleotide
uguggcauguggaccucuu

SEQ ID NO: 484963 - RNA, 19 nt, Artificial Sequence
  Description of Artificial Sequence: Synthetic oligonucleotide
gaccgaagccuuccaguga

SEQ ID NO: 484964 - RNA, 19 nt, Artificial Sequence
  Description of Artificial Sequence: Synthetic oligonucleotide
agcccuuuucccugggcau

SEQ ID NO: 484965 - RNA, 19 nt, Artificial Sequence
  Description of Artificial Sequence: Synthetic oligonucleotide
agcagauuguggcgggcaa

SEQ ID NO: 484966 - RNA, 19 nt, Artificial Sequence
  Description of Artificial Sequence: Synthetic oligonucleotide
accucuuccagagucccaa

SEQ ID NO: 484967 - RNA, 19 nt, Artificial Sequence
  Description of Artificial Sequence: Synthetic oligonucleotide
agacgccaccuucaggaaa

SEQ ID NO: 484968 - RNA, 19 nt, Artificial Sequence
  Description of Artificial Sequence: Synthetic oligonucleotide
cuccagacgguuucugcca

SEQ ID NO: 484969 - RNA, 19 nt, Artificial Sequence
  Description of Artificial Sequence: Synthetic oligonucleotide
gcucaauucccacuacaca

SEQ ID NO: 484970 - RNA, 19 nt, Artificial Sequence
  Description of Artificial Sequence: Synthetic oligonucleotide
uauggcuaaguuggcggua

SEQ ID NO: 484971 - RNA, 19 nt, Artificial Sequence
  Description of Artificial Sequence: Synthetic oligonucleotide
uagagcguacaaggcaguc

SEQ ID NO: 484972 - RNA, 19 nt, Artificial Sequence
  Description of Artificial Sequence: Synthetic oligonucleotide
gaaucuuccgcgaggcugu

SEQ ID NO: 484973 - RNA, 19 nt, Artificial Sequence
  Description of Artificial Sequence: Synthetic oligonucleotide
gacuaucagcauggagacc

SEQ ID NO: 484974 - RNA, 19 nt, Artificial Sequence
  Description of Artificial Sequence: Synthetic oligonucleotide
cacaguggaccuggguuag

SEQ ID NO: 484975 - RNA, 19 nt, Artificial Sequence
  Description of Artificial Sequence: Synthetic oligonucleotide
cuggcuccccacuguuagg

SEQ ID NO: 484976 - RNA, 19 nt, Artificial Sequence
  Description of Artificial Sequence: Synthetic oligonucleotide
ccuuagagcguacaaggca

SEQ ID NO: 484977 - RNA, 19 nt, Artificial Sequence
  Description of Artificial Sequence: Synthetic oligonucleotide
agcguacaaggcagucccc

SEQ ID NO: 484978 - RNA, 19 nt, Artificial Sequence
  Description of Artificial Sequence: Synthetic oligonucleotide
cguacguacuuaagggacc

SEQ ID NO: 484979 - RNA, 19 nt, Artificial Sequence
  Description of Artificial Sequence: Synthetic oligonucleotide
cuacuugccgcaaagucuu

SEQ ID NO: 484980 - RNA, 19 nt, Artificial Sequence
  Description of Artificial Sequence: Synthetic oligonucleotide
cgguaaguuuaauaacagc

SEQ ID NO: 484981 - RNA, 19 nt, Artificial Sequence
  Description of Artificial Sequence: Synthetic oligonucleotide
aagggaccaacaggacaca

SEQ ID NO: 484982 - RNA, 19 nt, Artificial Sequence
  Description of Artificial Sequence: Synthetic oligonucleotide
ugccaaugcaguggcucca

SEQ ID NO: 484983 - RNA, 19 nt, Artificial Sequence
  Description of Artificial Sequence: Synthetic oligonucleotide
aaguuggcgguaaguuuaa

SEQ ID NO: 484984 - RNA, 19 nt, Artificial Sequence
  Description of Artificial Sequence: Synthetic oligonucleotide
uucccuccccaggaugaag

SEQ ID NO: 484985 - RNA, 19 nt, Artificial Sequence
  Description of Artificial Sequence: Synthetic oligonucleotide
agcaagggccuuggggaag

SEQ ID NO: 484986 - RNA, 19 nt, Artificial Sequence
  Description of Artificial Sequence: Synthetic oligonucleotide
cagcauggagaccuuggga

SEQ ID NO: 484987 - RNA, 19 nt, Artificial Sequence
  Description of Artificial Sequence: Synthetic oligonucleotide
augaucccaaaagcuucug

SEQ ID NO: 484988 - RNA, 19 nt, Artificial Sequence
  Description of Artificial Sequence: Synthetic oligonucleotide
cagagguaucagucugcug

SEQ ID NO: 484989 - RNA, 19 nt, Artificial Sequence
  Description of Artificial Sequence: Synthetic oligonucleotide
gaacaggauuccagugcac

SEQ ID NO: 484990 - RNA, 19 nt, Artificial Sequence
  Description of Artificial Sequence: Synthetic oligonucleotide
cuaaguuggcgguaaguuu

SEQ ID NO: 484991 - RNA, 19 nt, Artificial Sequence
  Description of Artificial Sequence: Synthetic oligonucleotide
uguuaggguccagaaucuu

SEQ ID NO: 484992 - RNA, 19 nt, Artificial Sequence
  Description of Artificial Sequence: Synthetic oligonucleotide
caggcccauguggauaagc

SEQ ID NO: 484993 - RNA, 19 nt, Artificial Sequence
  Description of Artificial Sequence: Synthetic oligonucleotide
uucugccaaugcaguggcu

SEQ ID NO: 484994 - RNA, 19 nt, Artificial Sequence
  Description of Artificial Sequence: Synthetic oligonucleotide
aauucccacuacacagguu

SEQ ID NO: 484995 - RNA, 19 nt, Artificial Sequence
  Description of Artificial Sequence: Synthetic oligonucleotide
accgcacccuucucaguga

SEQ ID NO: 484996 - RNA, 19 nt, Artificial Sequence
  Description of Artificial Sequence: Synthetic oligonucleotide
aggaaagccgagacaacuu

SEQ ID NO: 484997 - RNA, 19 nt, Artificial Sequence
  Description of Artificial Sequence: Synthetic oligonucleotide
caccacaccgacauacgua

SEQ ID NO: 484998 - RNA, 19 nt, Artificial Sequence
  Description of Artificial Sequence: Synthetic oligonucleotide
caccuucaggaaagccgag

SEQ ID NO: 484999 - RNA, 19 nt, Artificial Sequence
  Description of Artificial Sequence: Synthetic oligonucleotide
aaucuuccgcgaggcugug

SEQ ID NO: 485000 - RNA, 19 nt, Artificial Sequence
  Description of Artificial Sequence: Synthetic oligonucleotide
aagggccuuggggaaguaa

SEQ ID NO: 485001 - RNA, 19 nt, Artificial Sequence
  Description of Artificial Sequence: Synthetic oligonucleotide
gccuagacacacaauacaa

SEQ ID NO: 485002 - RNA, 19 nt, Artificial Sequence
  Description of Artificial Sequence: Synthetic oligonucleotide
cacaccgacauacguacgu

SEQ ID NO: 485003 - RNA, 19 nt, Artificial Sequence
  Description of Artificial Sequence: Synthetic oligonucleotide
cguacuuaagggaccaaca

SEQ ID NO: 485004 - RNA, 19 nt, Artificial Sequence
  Description of Artificial Sequence: Synthetic oligonucleotide
ccuuagucacuggugcagg

SEQ ID NO: 485005 - RNA, 19 nt, Artificial Sequence
  Description of Artificial Sequence: Synthetic oligonucleotide
caauucccacuacacaggu

SEQ ID NO: 485006 - RNA, 19 nt, Artificial Sequence
  Description of Artificial Sequence: Synthetic oligonucleotide
gggcaagggaacaggauuc

SEQ ID NO: 485007 - RNA, 19 nt, Artificial Sequence
  Description of Artificial Sequence: Synthetic oligonucleotide
ucgaauccucgcacuccau

SEQ ID NO: 485008 - RNA, 19 nt, Artificial Sequence
  Description of Artificial Sequence: Synthetic oligonucleotide
ucccacuacacagguucuc

SEQ ID NO: 485009 - RNA, 19 nt, Artificial Sequence
  Description of Artificial Sequence: Synthetic oligonucleotide
ggcaagggaacaggauucc

SEQ ID NO: 485010 - RNA, 19 nt, Artificial Sequence
  Description of Artificial Sequence: Synthetic oligonucleotide
gugaagguguugucauuua

SEQ ID NO: 485011 - RNA, 19 nt, Artificial Sequence
  Description of Artificial Sequence: Synthetic oligonucleotide
cagaccgaagccuuccagu

SEQ ID NO: 485012 - RNA, 19 nt, Artificial Sequence
  Description of Artificial Sequence: Synthetic oligonucleotide
cuguuaggguccagaaucu

SEQ ID NO: 485013 - RNA, 19 nt, Artificial Sequence
  Description of Artificial Sequence: Synthetic oligonucleotide
ccuagacacacaauacaaa

SEQ ID NO: 485014 - RNA, 19 nt, Artificial Sequence
  Description of Artificial Sequence: Synthetic oligonucleotide
cagggcugugacaccagga

SEQ ID NO: 485015 - RNA, 19 nt, Artificial Sequence
  Description of Artificial Sequence: Synthetic oligonucleotide
gaccuggguuaguccagca

SEQ ID NO: 485016 - RNA, 19 nt, Artificial Sequence
  Description of Artificial Sequence: Synthetic oligonucleotide
uggugggaucucagaccga

SEQ ID NO: 485017 - RNA, 19 nt, Artificial Sequence
  Description of Artificial Sequence: Synthetic oligonucleotide
cacagcccucuucucccag

SEQ ID NO: 485018 - RNA, 19 nt, Artificial Sequence
  Description of Artificial Sequence: Synthetic oligonucleotide
agccuagaucuuguauagu

SEQ ID NO: 485019 - RNA, 19 nt, Artificial Sequence
  Description of Artificial Sequence: Synthetic oligonucleotide
agagucccaaugaucccaa

SEQ ID NO: 485020 - RNA, 19 nt, Artificial Sequence
  Description of Artificial Sequence: Synthetic oligonucleotide
acuuucggugacacucagu

SEQ ID NO: 485021 - RNA, 19 nt, Artificial Sequence
  Description of Artificial Sequence: Synthetic oligonucleotide
ggugggaucucagaccgaa

SEQ ID NO: 485022 - RNA, 19 nt, Artificial Sequence
  Description of Artificial Sequence: Synthetic oligonucleotide
aucuuccgcgaggcugugg

SEQ ID NO: 485023 - RNA, 19 nt, Artificial Sequence
  Description of Artificial Sequence: Synthetic oligonucleotide
cccuuagucacuggugcag

SEQ ID NO: 485024 - RNA, 19 nt, Artificial Sequence
  Description of Artificial Sequence: Synthetic oligonucleotide
ccgcaaagucuucaggguc

SEQ ID NO: 485025 - RNA, 19 nt, Artificial Sequence
  Description of Artificial Sequence: Synthetic oligonucleotide
gcugacuuuaagccuagau

SEQ ID NO: 485026 - RNA, 19 nt, Artificial Sequence
  Description of Artificial Sequence: Synthetic oligonucleotide
agcagcuuucagcccuuuu

SEQ ID NO: 485027 - RNA, 19 nt, Artificial Sequence
  Description of Artificial Sequence: Synthetic oligonucleotide
acaccgacauacguacgua

SEQ ID NO: 485028 - RNA, 19 nt, Artificial Sequence
  Description of Artificial Sequence: Synthetic oligonucleotide
cccuagugagaucagagcu

SEQ ID NO: 485029 - RNA, 19 nt, Artificial Sequence
  Description of Artificial Sequence: Synthetic oligonucleotide
gggcaccccaggcaauucc

SEQ ID NO: 485030 - RNA, 19 nt, Artificial Sequence
  Description of Artificial Sequence: Synthetic oligonucleotide
gcagauuguggcgggcaag

SEQ ID NO: 485031 - RNA, 19 nt, Artificial Sequence
  Description of Artificial Sequence: Synthetic oligonucleotide
uacguacuuaagggaccaa

SEQ ID NO: 485032 - RNA, 19 nt, Artificial Sequence
  Description of Artificial Sequence: Synthetic oligonucleotide
cugccucuggucaaaguau

SEQ ID NO: 485033 - RNA, 19 nt, Artificial Sequence
  Description of Artificial Sequence: Synthetic oligonucleotide
ggcaccccaggcaauuccc

SEQ ID NO: 485034 - RNA, 19 nt, Artificial Sequence
  Description of Artificial Sequence: Synthetic oligonucleotide
cucagaccgaagccuucca

SEQ ID NO: 485035 - RNA, 19 nt, Artificial Sequence
  Description of Artificial Sequence: Synthetic oligonucleotide
gcauuaggggaccugcccu

SEQ ID NO: 485036 - RNA, 19 nt, Artificial Sequence
  Description of Artificial Sequence: Synthetic oligonucleotide
ccucgaauccucgcacucc

SEQ ID NO: 485037 - RNA, 19 nt, Artificial Sequence
  Description of Artificial Sequence: Synthetic oligonucleotide
ggguugauggagaaugccu

SEQ ID NO: 485038 - RNA, 19 nt, Artificial Sequence
  Description of Artificial Sequence: Synthetic oligonucleotide
agcccgacauguagcucag

SEQ ID NO: 485039 - RNA, 19 nt, Artificial Sequence
  Description of Artificial Sequence: Synthetic oligonucleotide
ccgagacaacuuucucagg

SEQ ID NO: 485040 - RNA, 19 nt, Artificial Sequence
  Description of Artificial Sequence: Synthetic oligonucleotide
ggaaagccgagacaacuuu

SEQ ID NO: 485041 - RNA, 19 nt, Artificial Sequence
  Description of Artificial Sequence: Synthetic oligonucleotide
gacagcacgggagcuggcu

SEQ ID NO: 485042 - RNA, 19 nt, Artificial Sequence
  Description of Artificial Sequence: Synthetic oligonucleotide
ccgacauguagcucaggca

SEQ ID NO: 485043 - RNA, 19 nt, Artificial Sequence
  Description of Artificial Sequence: Synthetic oligonucleotide
ggaccuggguuaguccagc

SEQ ID NO: 485044 - RNA, 19 nt, Artificial Sequence
  Description of Artificial Sequence: Synthetic oligonucleotide
ccacuacacagguucucuc

SEQ ID NO: 485045 - RNA, 19 nt, Artificial Sequence
  Description of Artificial Sequence: Synthetic oligonucleotide
ccuucccuccccaggauga

SEQ ID NO: 485046 - RNA, 19 nt, Artificial Sequence
  Description of Artificial Sequence: Synthetic oligonucleotide
agugcaccauugggcuuug

SEQ ID NO: 485047 - RNA, 19 nt, Artificial Sequence
  Description of Artificial Sequence: Synthetic oligonucleotide
ggaggcggggaggacagca

SEQ ID NO: 485048 - RNA, 19 nt, Artificial Sequence
  Description of Artificial Sequence: Synthetic oligonucleotide
ccacaccgacauacguacg

SEQ ID NO: 485049 - RNA, 19 nt, Artificial Sequence
  Description of Artificial Sequence: Synthetic oligonucleotide
aucuccuacccagcucaau

SEQ ID NO: 485050 - RNA, 19 nt, Artificial Sequence
  Description of Artificial Sequence: Synthetic oligonucleotide
gcggggaggacagcacggg

SEQ ID NO: 485051 - RNA, 19 nt, Artificial Sequence
  Description of Artificial Sequence: Synthetic oligonucleotide
cagagcuggugggaucuca

SEQ ID NO: 485052 - RNA, 19 nt, Artificial Sequence
  Description of Artificial Sequence: Synthetic oligonucleotide
cauuaggggaccugcccuu

SEQ ID NO: 485053 - RNA, 19 nt, Artificial Sequence
  Description of Artificial Sequence: Synthetic oligonucleotide
cacuguuaggguccagaau

SEQ ID NO: 485054 - RNA, 19 nt, Artificial Sequence
  Description of Artificial Sequence: Synthetic oligonucleotide
cacacgagacaaagacccu

SEQ ID NO: 485055 - RNA, 19 nt, Artificial Sequence
  Description of Artificial Sequence: Synthetic oligonucleotide
gaggagggccucgaauccu

SEQ ID NO: 485056 - RNA, 19 nt, Artificial Sequence
  Description of Artificial Sequence: Synthetic oligonucleotide
gccgcaaagucuucagggu

SEQ ID NO: 485057 - RNA, 19 nt, Artificial Sequence
  Description of Artificial Sequence: Synthetic oligonucleotide
gacauguagcucaggcauu

SEQ ID NO: 485058 - RNA, 19 nt, Artificial Sequence
  Description of Artificial Sequence: Synthetic oligonucleotide
caaccagggcagcaucucu

SEQ ID NO: 485059 - RNA, 19 nt, Artificial Sequence
  Description of Artificial Sequence: Synthetic oligonucleotide
cuccaguggcaucgcuuca

SEQ ID NO: 485060 - RNA, 19 nt, Artificial Sequence
  Description of Artificial Sequence: Synthetic oligonucleotide
ccagacgguuucugccagc

SEQ ID NO: 485061 - RNA, 19 nt, Artificial Sequence
  Description of Artificial Sequence: Synthetic oligonucleotide
ucgccucuacuugccgcaa

SEQ ID NO: 485062 - RNA, 19 nt, Artificial Sequence
  Description of Artificial Sequence: Synthetic oligonucleotide
uggccaccgcacccuucuc

SEQ ID NO: 485063 - RNA, 19 nt, Artificial Sequence
  Description of Artificial Sequence: Synthetic oligonucleotide
caguggcaucgcuucagcu

SEQ ID NO: 485064 - RNA, 19 nt, Artificial Sequence
  Description of Artificial Sequence: Synthetic oligonucleotide
caggaugguuaauuccauu

SEQ ID NO: 485065 - RNA, 19 nt, Artificial Sequence
  Description of Artificial Sequence: Synthetic oligonucleotide
gcagcagauuguggcgggc

SEQ ID NO: 485066 - RNA, 19 nt, Artificial Sequence
  Description of Artificial Sequence: Synthetic oligonucleotide
ggcuaaguuggcgguaagu

SEQ ID NO: 485067 - RNA, 19 nt, Artificial Sequence
  Description of Artificial Sequence: Synthetic oligonucleotide
cggggcuugccuugggcac

SEQ ID NO: 485068 - RNA, 19 nt, Artificial Sequence
  Description of Artificial Sequence: Synthetic oligonucleotide
cacagccuagacacacaau

SEQ ID NO: 485069 - RNA, 19 nt, Artificial Sequence
  Description of Artificial Sequence: Synthetic oligonucleotide
cagugcaccauugggcuuu

SEQ ID NO: 485070 - RNA, 19 nt, Artificial Sequence
  Description of Artificial Sequence: Synthetic oligonucleotide
cguacaaggcaguccccga

SEQ ID NO: 485071 - RNA, 19 nt, Artificial Sequence
  Description of Artificial Sequence: Synthetic oligonucleotide
cacggacagcaucugcgau

SEQ ID NO: 485072 - RNA, 19 nt, Artificial Sequence
  Description of Artificial Sequence: Synthetic oligonucleotide
cagagccuauggcuaaguu

SEQ ID NO: 485073 - RNA, 19 nt, Artificial Sequence
  Description of Artificial Sequence: Synthetic oligonucleotide
ccgaagccuuccagugaac

SEQ ID NO: 485074 - RNA, 19 nt, Artificial Sequence
  Description of Artificial Sequence: Synthetic oligonucleotide
cacagccacuaagggaagu

SEQ ID NO: 485075 - RNA, 19 nt, Artificial Sequence
  Description of Artificial Sequence: Synthetic oligonucleotide
cuuccgcgaggcuguggcu

SEQ ID NO: 485076 - RNA, 19 nt, Artificial Sequence
  Description of Artificial Sequence: Synthetic oligonucleotide
gcuugaguucaugcagggu

SEQ ID NO: 485077 - RNA, 19 nt, Artificial Sequence
  Description of Artificial Sequence: Synthetic oligonucleotide
ccaagacgcagcagcuucu

SEQ ID NO: 485078 - RNA, 19 nt, Artificial Sequence
  Description of Artificial Sequence: Synthetic oligonucleotide
cagcaucugcgauggcaau

SEQ ID NO: 485079 - RNA, 19 nt, Artificial Sequence
  Description of Artificial Sequence: Synthetic oligonucleotide
cgacauacguacguacuua

SEQ ID NO: 485080 - RNA, 19 nt, Artificial Sequence
  Description of Artificial Sequence: Synthetic oligonucleotide
cccacuacacagguucucu

SEQ ID NO: 485081 - RNA, 19 nt, Artificial Sequence
  Description of Artificial Sequence: Synthetic oligonucleotide
gcagcccgacauguagcuc

SEQ ID NO: 485082 - RNA, 19 nt, Artificial Sequence
  Description of Artificial Sequence: Synthetic oligonucleotide
ccgacauacguacguacuu

SEQ ID NO: 485083 - RNA, 19 nt, Artificial Sequence
  Description of Artificial Sequence: Synthetic oligonucleotide
gcccggggcuugccuuggg

SEQ ID NO: 485084 - RNA, 19 nt, Artificial Sequence
  Description of Artificial Sequence: Synthetic oligonucleotide
ggcuugccuugggcacugg

SEQ ID NO: 485085 - RNA, 19 nt, Artificial Sequence
  Description of Artificial Sequence: Synthetic oligonucleotide
gcugugacaccaggauggu

SEQ ID NO: 485086 - RNA, 19 nt, Artificial Sequence
  Description of Artificial Sequence: Synthetic oligonucleotide
cucaggcauuaggggaccu

SEQ ID NO: 485087 - RNA, 19 nt, Artificial Sequence
  Description of Artificial Sequence: Synthetic oligonucleotide
cucccagggcauugccauu

SEQ ID NO: 485088 - RNA, 19 nt, Artificial Sequence
  Description of Artificial Sequence: Synthetic oligonucleotide
ccgcacccuucucagugaa

SEQ ID NO: 485089 - RNA, 19 nt, Artificial Sequence
  Description of Artificial Sequence: Synthetic oligonucleotide
ccucuacuugccgcaaagu

SEQ ID NO: 485090 - RNA, 19 nt, Artificial Sequence
  Description of Artificial Sequence: Synthetic oligonucleotide
ccccugccucuggucaaag

SEQ ID NO: 485091 - RNA, 19 nt, Artificial Sequence
  Description of Artificial Sequence: Synthetic oligonucleotide
caagggccuuggggaagua

SEQ ID NO: 485092 - RNA, 19 nt, Artificial Sequence
  Description of Artificial Sequence: Synthetic oligonucleotide
gcgggcaagggaacaggau

SEQ ID NO: 485093 - RNA, 19 nt, Artificial Sequence
  Description of Artificial Sequence: Synthetic oligonucleotide
cgccucuacuugccgcaaa

SEQ ID NO: 485094 - RNA, 19 nt, Artificial Sequence
  Description of Artificial Sequence: Synthetic oligonucleotide
cgcgaggcuguggcugauu

SEQ ID NO: 485095 - RNA, 19 nt, Artificial Sequence
  Description of Artificial Sequence: Synthetic oligonucleotide
ccgcgaggcuguggcugau

SEQ ID NO: 485096 - RNA, 19 nt, Artificial Sequence
  Description of Artificial Sequence: Synthetic oligonucleotide
uacaucaucaucaucauca

SEQ ID NO: 485097 - RNA, 19 nt, Artificial Sequence
  Description of Artificial Sequence: Synthetic oligonucleotide
gauacuuuggcucagagga

SEQ ID NO: 485098 - RNA, 19 nt, Artificial Sequence
  Description of Artificial Sequence: Synthetic oligonucleotide
ucagauagggaaaauaacc

SEQ ID NO: 485099 - RNA, 19 nt, Artificial Sequence
  Description of Artificial Sequence: Synthetic oligonucleotide
uuaauaagcuuuuacacca

SEQ ID NO: 485100 - RNA, 19 nt, Artificial Sequence
  Description of Artificial Sequence: Synthetic oligonucleotide
aacgaauaugacuuguuuc

SEQ ID NO: 485101 - RNA, 19 nt, Artificial Sequence
  Description of Artificial Sequence: Synthetic oligonucleotide
aauaugacuuguuucaacu

SEQ ID NO: 485102 - RNA, 19 nt, Artificial Sequence
  Description of Artificial Sequence: Synthetic oligonucleotide
acauuaacccauaacaugc

SEQ ID NO: 485103 - RNA, 19 nt, Artificial Sequence
  Description of Artificial Sequence: Synthetic oligonucleotide
uauucacugcagcagaugg

SEQ ID NO: 485104 - RNA, 19 nt, Artificial Sequence
  Description of Artificial Sequence: Synthetic oligonucleotide
uuaacacuagagaagcggg

SEQ ID NO: 485105 - RNA, 19 nt, Artificial Sequence
  Description of Artificial Sequence: Synthetic oligonucleotide
acguauuuaacagauaaac

SEQ ID NO: 485106 - RNA, 19 nt, Artificial Sequence
  Description of Artificial Sequence: Synthetic oligonucleotide
uuuccaacguauuuaacag

SEQ ID NO: 485107 - RNA, 19 nt, Artificial Sequence
  Description of Artificial Sequence: Synthetic oligonucleotide
ucaguauaugcccagaagu

SEQ ID NO: 485108 - RNA, 19 nt, Artificial Sequence
  Description of Artificial Sequence: Synthetic oligonucleotide
ucaugcuuaaacuugccag

SEQ ID NO: 485109 - RNA, 19 nt, Artificial Sequence
  Description of Artificial Sequence: Synthetic oligonucleotide
uacagaacgaauaugacuu

SEQ ID NO: 485110 - RNA, 19 nt, Artificial Sequence
  Description of Artificial Sequence: Synthetic oligonucleotide
ucuucgagagccauguagg

SEQ ID NO: 485111 - RNA, 19 nt, Artificial Sequence
  Description of Artificial Sequence: Synthetic oligonucleotide
ugguacuacaucaucauca

SEQ ID NO: 485112 - RNA, 19 nt, Artificial Sequence
  Description of Artificial Sequence: Synthetic oligonucleotide
aucacaaggaaucaacaag

SEQ ID NO: 485113 - RNA, 19 nt, Artificial Sequence
  Description of Artificial Sequence: Synthetic oligonucleotide
uguaauuggacacaaccau

SEQ ID NO: 485114 - RNA, 19 nt, Artificial Sequence
  Description of Artificial Sequence: Synthetic oligonucleotide
uuggacacaaccauuuuca

SEQ ID NO: 485115 - RNA, 19 nt, Artificial Sequence
  Description of Artificial Sequence: Synthetic oligonucleotide
aguuuaauugaccaacuga

SEQ ID NO: 485116 - RNA, 19 nt, Artificial Sequence
  Description of Artificial Sequence: Synthetic oligonucleotide
aaacuugccaguuuucccu

SEQ ID NO: 485117 - RNA, 19 nt, Artificial Sequence
  Description of Artificial Sequence: Synthetic oligonucleotide
ucaacuuucagguuagaaa

SEQ ID NO: 485118 - RNA, 19 nt, Artificial Sequence
  Description of Artificial Sequence: Synthetic oligonucleotide
guuaacacuagagaagcgg

SEQ ID NO: 485119 - RNA, 19 nt, Artificial Sequence
  Description of Artificial Sequence: Synthetic oligonucleotide
acgaauaugacuuguuuca

SEQ ID NO: 485120 - RNA, 19 nt, Artificial Sequence
  Description of Artificial Sequence: Synthetic oligonucleotide
uggaucaugcuuaaacuug

SEQ ID NO: 485121 - RNA, 19 nt, Artificial Sequence
  Description of Artificial Sequence: Synthetic oligonucleotide
cuuucuaccuucuaaaaga

SEQ ID NO: 485122 - RNA, 19 nt, Artificial Sequence
  Description of Artificial Sequence: Synthetic oligonucleotide
uaagcuuuuacaccacuga

SEQ ID NO: 485123 - RNA, 19 nt, Artificial Sequence
  Description of Artificial Sequence: Synthetic oligonucleotide
aggacgugcuaauaaauuc

SEQ ID NO: 485124 - RNA, 19 nt, Artificial Sequence
  Description of Artificial Sequence: Synthetic oligonucleotide
ucaacaaggaaagagcaac

SEQ ID NO: 485125 - RNA, 19 nt, Artificial Sequence
  Description of Artificial Sequence: Synthetic oligonucleotide
aggaacauuaacccauaac

SEQ ID NO: 485126 - RNA, 19 nt, Artificial Sequence
  Description of Artificial Sequence: Synthetic oligonucleotide
ugucaaaccaaaagaagaa

SEQ ID NO: 485127 - RNA, 19 nt, Artificial Sequence
  Description of Artificial Sequence: Synthetic oligonucleotide
accaacugauuucauugcc

SEQ ID NO: 485128 - RNA, 19 nt, Artificial Sequence
  Description of Artificial Sequence: Synthetic oligonucleotide
ugcuaauaaauucugccuc

SEQ ID NO: 485129 - RNA, 19 nt, Artificial Sequence
  Description of Artificial Sequence: Synthetic oligonucleotide
ucaggaagcgcaucaaugc

SEQ ID NO: 485130 - RNA, 19 nt, Artificial Sequence
  Description of Artificial Sequence: Synthetic oligonucleotide
ucugucaucccaacgacgu

SEQ ID NO: 485131 - RNA, 19 nt, Artificial Sequence
  Description of Artificial Sequence: Synthetic oligonucleotide
auaauccccauucucaaca

SEQ ID NO: 485132 - RNA, 19 nt, Artificial Sequence
  Description of Artificial Sequence: Synthetic oligonucleotide
ucgagagccauguagguga

SEQ ID NO: 485133 - RNA, 19 nt, Artificial Sequence
  Description of Artificial Sequence: Synthetic oligonucleotide
uucagauagggaaaauaac

SEQ ID NO: 485134 - RNA, 19 nt, Artificial Sequence
  Description of Artificial Sequence: Synthetic oligonucleotide
aauaaccaggcuaagagua

SEQ ID NO: 485135 - RNA, 19 nt, Artificial Sequence
  Description of Artificial Sequence: Synthetic oligonucleotide
aagcgcaucaaugcucucc

SEQ ID NO: 485136 - RNA, 19 nt, Artificial Sequence
  Description of Artificial Sequence: Synthetic oligonucleotide
cauaagccaauccucuucg

SEQ ID NO: 485137 - RNA, 19 nt, Artificial Sequence
  Description of Artificial Sequence: Synthetic oligonucleotide
aucacgugcccucagagug

SEQ ID NO: 485138 - RNA, 19 nt, Artificial Sequence
  Description of Artificial Sequence: Synthetic oligonucleotide
uguuguuaccccuugcaac

SEQ ID NO: 485139 - RNA, 19 nt, Artificial Sequence
  Description of Artificial Sequence: Synthetic oligonucleotide
ucauuauccgcuucacugc

SEQ ID NO: 485140 - RNA, 19 nt, Artificial Sequence
  Description of Artificial Sequence: Synthetic oligonucleotide
uaaacuugccaguuuuccc

SEQ ID NO: 485141 - RNA, 19 nt, Artificial Sequence
  Description of Artificial Sequence: Synthetic oligonucleotide
aacgacgucgugugcuggc

SEQ ID NO: 485142 - RNA, 19 nt, Artificial Sequence
  Description of Artificial Sequence: Synthetic oligonucleotide
uaauuggacacaaccauuu

SEQ ID NO: 485143 - RNA, 19 nt, Artificial Sequence
  Description of Artificial Sequence: Synthetic oligonucleotide
uuggagucgccacauuccg

SEQ ID NO: 485144 - RNA, 19 nt, Artificial Sequence
  Description of Artificial Sequence: Synthetic oligonucleotide
uuucgauacuuccugcgca

SEQ ID NO: 485145 - RNA, 19 nt, Artificial Sequence
  Description of Artificial Sequence: Synthetic oligonucleotide
uguaccggagccaaggaau

SEQ ID NO: 485146 - RNA, 19 nt, Artificial Sequence
  Description of Artificial Sequence: Synthetic oligonucleotide
uaauuuugaaagagggcuc

SEQ ID NO: 485147 - RNA, 19 nt, Artificial Sequence
  Description of Artificial Sequence: Synthetic oligonucleotide
uaagccaauccucuucggc

SEQ ID NO: 485148 - RNA, 19 nt, Artificial Sequence
  Description of Artificial Sequence: Synthetic oligonucleotide
uaauugaccaacugauuuc

SEQ ID NO: 485149 - RNA, 19 nt, Artificial Sequence
  Description of Artificial Sequence: Synthetic oligonucleotide
aucaguauaugcccagaag

SEQ ID NO: 485150 - RNA, 19 nt, Artificial Sequence
  Description of Artificial Sequence: Synthetic oligonucleotide
ucuacagaacgaauaugac

SEQ ID NO: 485151 - RNA, 19 nt, Artificial Sequence
  Description of Artificial Sequence: Synthetic oligonucleotide
aagcggggagcucuugccc

SEQ ID NO: 485152 - RNA, 19 nt, Artificial Sequence
  Description of Artificial Sequence: Synthetic oligonucleotide
aagagcaacauagucuaca

SEQ ID NO: 485153 - RNA, 19 nt, Artificial Sequence
  Description of Artificial Sequence: Synthetic oligonucleotide
acuucuaggucuucgcuca

SEQ ID NO: 485154 - RNA, 19 nt, Artificial Sequence
  Description of Artificial Sequence: Synthetic oligonucleotide
agaagcggggagcucuugc

SEQ ID NO: 485155 - RNA, 19 nt, Artificial Sequence
  Description of Artificial Sequence: Synthetic oligonucleotide
aagcuuuuacaccacugaa

SEQ ID NO: 485156 - RNA, 19 nt, Artificial Sequence
  Description of Artificial Sequence: Synthetic oligonucleotide
caccucgacaucaacggcg

SEQ ID NO: 485157 - RNA, 19 nt, Artificial Sequence
  Description of Artificial Sequence: Synthetic oligonucleotide
caugcagcggcacacuggg

SEQ ID NO: 485158 - RNA, 19 nt, Artificial Sequence
  Description of Artificial Sequence: Synthetic oligonucleotide
ugcaaucucaaguagcauu

SEQ ID NO: 485159 - RNA, 19 nt, Artificial Sequence
  Description of Artificial Sequence: Synthetic oligonucleotide
caacguauuuaacagauaa

SEQ ID NO: 485160 - RNA, 19 nt, Artificial Sequence
  Description of Artificial Sequence: Synthetic oligonucleotide
cucaguugccaccucaccc

SEQ ID NO: 485161 - RNA, 19 nt, Artificial Sequence
  Description of Artificial Sequence: Synthetic oligonucleotide
ugcgucgccgucuugacac

SEQ ID NO: 485162 - RNA, 19 nt, Artificial Sequence
  Description of Artificial Sequence: Synthetic oligonucleotide
acccauaacaugcaacgca

SEQ ID NO: 485163 - RNA, 19 nt, Artificial Sequence
  Description of Artificial Sequence: Synthetic oligonucleotide
gccaauauguccauaagcc

SEQ ID NO: 485164 - RNA, 19 nt, Artificial Sequence
  Description of Artificial Sequence: Synthetic oligonucleotide
cauuguaccggagccaagg

SEQ ID NO: 485165 - RNA, 19 nt, Artificial Sequence
  Description of Artificial Sequence: Synthetic oligonucleotide
ucuaggucuucgcucacac

SEQ ID NO: 485166 - RNA, 19 nt, Artificial Sequence
  Description of Artificial Sequence: Synthetic oligonucleotide
ugcucuuccugaagagacg

SEQ ID NO: 485167 - RNA, 19 nt, Artificial Sequence
  Description of Artificial Sequence: Synthetic oligonucleotide
caguauaugcccagaaguc

SEQ ID NO: 485168 - RNA, 19 nt, Artificial Sequence
  Description of Artificial Sequence: Synthetic oligonucleotide
agccgauggaccuucgguc

SEQ ID NO: 485169 - RNA, 19 nt, Artificial Sequence
  Description of Artificial Sequence: Synthetic oligonucleotide
gaguaaagagccuuggccu

SEQ ID NO: 485170 - RNA, 19 nt, Artificial Sequence
  Description of Artificial Sequence: Synthetic oligonucleotide
gaccaacugauuucauugc

SEQ ID NO: 485171 - RNA, 19 nt, Artificial Sequence
  Description of Artificial Sequence: Synthetic oligonucleotide
accgccugcaacuucccgg

SEQ ID NO: 485172 - RNA, 19 nt, Artificial Sequence
  Description of Artificial Sequence: Synthetic oligonucleotide
guauaugcccagaagucag

SEQ ID NO: 485173 - RNA, 19 nt, Artificial Sequence
  Description of Artificial Sequence: Synthetic oligonucleotide
acaucaucaucaucaucag

SEQ ID NO: 485174 - RNA, 19 nt, Artificial Sequence
  Description of Artificial Sequence: Synthetic oligonucleotide
gaaauagugguggcacggg

SEQ ID NO: 485175 - RNA, 19 nt, Artificial Sequence
  Description of Artificial Sequence: Synthetic oligonucleotide
gucgugugcuggcaaaugg

SEQ ID NO: 485176 - RNA, 19 nt, Artificial Sequence
  Description of Artificial Sequence: Synthetic oligonucleotide
ugcuaggacgugcuaauaa

SEQ ID NO: 485177 - RNA, 19 nt, Artificial Sequence
  Description of Artificial Sequence: Synthetic oligonucleotide
agcauuuagaaaguuuagu

SEQ ID NO: 485178 - RNA, 19 nt, Artificial Sequence
  Description of Artificial Sequence: Synthetic oligonucleotide
agcacgaacaucccaggcu

SEQ ID NO: 485179 - RNA, 19 nt, Artificial Sequence
  Description of Artificial Sequence: Synthetic oligonucleotide
cuggcagucugucaacagg

SEQ ID NO: 485180 - RNA, 19 nt, Artificial Sequence
  Description of Artificial Sequence: Synthetic oligonucleotide
auggccggacucauuaucc

SEQ ID NO: 485181 - RNA, 19 nt, Artificial Sequence
  Description of Artificial Sequence: Synthetic oligonucleotide
augacuuguuucaacuuuc

SEQ ID NO: 485182 - RNA, 19 nt, Artificial Sequence
  Description of Artificial Sequence: Synthetic oligonucleotide
gauaauccccauucucaac

SEQ ID NO: 485183 - RNA, 19 nt, Artificial Sequence
  Description of Artificial Sequence: Synthetic oligonucleotide
ggccauaccacuuugcuuc

SEQ ID NO: 485184 - RNA, 19 nt, Artificial Sequence
  Description of Artificial Sequence: Synthetic oligonucleotide
aggauaccugggauaaucc

SEQ ID NO: 485185 - RNA, 19 nt, Artificial Sequence
  Description of Artificial Sequence: Synthetic oligonucleotide
uuccuguuauccuucuugu

SEQ ID NO: 485186 - RNA, 19 nt, Artificial Sequence
  Description of Artificial Sequence: Synthetic oligonucleotide
cacauuccggacuuuuggc

SEQ ID NO: 485187 - RNA, 19 nt, Artificial Sequence
  Description of Artificial Sequence: Synthetic oligonucleotide
ucccgauuucgauacuucc

SEQ ID NO: 485188 - RNA, 19 nt, Artificial Sequence
  Description of Artificial Sequence: Synthetic oligonucleotide
auaguaucuguaguaguca

SEQ ID NO: 485189 - RNA, 19 nt, Artificial Sequence
  Description of Artificial Sequence: Synthetic oligonucleotide
uuguggaccgccugcaacu

SEQ ID NO: 485190 - RNA, 19 nt, Artificial Sequence
  Description of Artificial Sequence: Synthetic oligonucleotide
ugcaguuuggagucgccac

SEQ ID NO: 485191 - RNA, 19 nt, Artificial Sequence
  Description of Artificial Sequence: Synthetic oligonucleotide
cuccucacuaucacgugcc

SEQ ID NO: 485192 - RNA, 19 nt, Artificial Sequence
  Description of Artificial Sequence: Synthetic oligonucleotide
gaucucaggaagcgcauca

SEQ ID NO: 485193 - RNA, 19 nt, Artificial Sequence
  Description of Artificial Sequence: Synthetic oligonucleotide
uuuacuggcagaggcuccc

SEQ ID NO: 485194 - RNA, 19 nt, Artificial Sequence
  Description of Artificial Sequence: Synthetic oligonucleotide
aucccaacgacgucgugug

SEQ ID NO: 485195 - RNA, 19 nt, Artificial Sequence
  Description of Artificial Sequence: Synthetic oligonucleotide
ggagggaacaugcagcggc

SEQ ID NO: 485196 - RNA, 19 nt, Artificial Sequence
  Description of Artificial Sequence: Synthetic oligonucleotide
aaagagggcuccuguagua

SEQ ID NO: 485197 - RNA, 19 nt, Artificial Sequence
  Description of Artificial Sequence: Synthetic oligonucleotide
cuaucacgugcccucagag

SEQ ID NO: 485198 - RNA, 19 nt, Artificial Sequence
  Description of Artificial Sequence: Synthetic oligonucleotide
ucaacggcgagagacucca

SEQ ID NO: 485199 - RNA, 19 nt, Artificial Sequence
  Description of Artificial Sequence: Synthetic oligonucleotide
uuccauugcugccaacacu

SEQ ID NO: 485200 - RNA, 19 nt, Artificial Sequence
  Description of Artificial Sequence: Synthetic oligonucleotide
uaggacgugcuaauaaauu

SEQ ID NO: 485201 - RNA, 19 nt, Artificial Sequence
  Description of Artificial Sequence: Synthetic oligonucleotide
guuuggagucgccacauuc

SEQ ID NO: 485202 - RNA, 19 nt, Artificial Sequence
  Description of Artificial Sequence: Synthetic oligonucleotide
gauacuuccugcgcagagc

SEQ ID NO: 485203 - RNA, 19 nt, Artificial Sequence
  Description of Artificial Sequence: Synthetic oligonucleotide
auaagccaauccucuucgg

SEQ ID NO: 485204 - RNA, 19 nt, Artificial Sequence
  Description of Artificial Sequence: Synthetic oligonucleotide
uguuaccccuugcaacugc

SEQ ID NO: 485205 - RNA, 19 nt, Artificial Sequence
  Description of Artificial Sequence: Synthetic oligonucleotide
gaagcggggagcucuugcc

SEQ ID NO: 485206 - RNA, 19 nt, Artificial Sequence
  Description of Artificial Sequence: Synthetic oligonucleotide
guuuaauugaccaacugau

SEQ ID NO: 485207 - RNA, 19 nt, Artificial Sequence
  Description of Artificial Sequence: Synthetic oligonucleotide
uuuggccuuaccaccggcu

SEQ ID NO: 485208 - RNA, 19 nt, Artificial Sequence
  Description of Artificial Sequence: Synthetic oligonucleotide
gacgugcuaauaaauucug

SEQ ID NO: 485209 - RNA, 19 nt, Artificial Sequence
  Description of Artificial Sequence: Synthetic oligonucleotide
auuaacccauaacaugcaa

SEQ ID NO: 485210 - RNA, 19 nt, Artificial Sequence
  Description of Artificial Sequence: Synthetic oligonucleotide
auaagcuuuuacaccacug

SEQ ID NO: 485211 - RNA, 19 nt, Artificial Sequence
  Description of Artificial Sequence: Synthetic oligonucleotide
aaagagcaacauagucuac

SEQ ID NO: 485212 - RNA, 19 nt, Artificial Sequence
  Description of Artificial Sequence: Synthetic oligonucleotide
gccaccucgacaucaacgg

SEQ ID NO: 485213 - RNA, 19 nt, Artificial Sequence
  Description of Artificial Sequence: Synthetic oligonucleotide
ggaaauagugguggcacgg

SEQ ID NO: 485214 - RNA, 19 nt, Artificial Sequence
  Description of Artificial Sequence: Synthetic oligonucleotide
ucuccaagcuguuguuacc

SEQ ID NO: 485215 - RNA, 19 nt, Artificial Sequence
  Description of Artificial Sequence: Synthetic oligonucleotide
guuuaguuuaauugaccaa

SEQ ID NO: 485216 - RNA, 19 nt, Artificial Sequence
  Description of Artificial Sequence: Synthetic oligonucleotide
caucugagaggccauacca

SEQ ID NO: 485217 - RNA, 19 nt, Artificial Sequence
  Description of Artificial Sequence: Synthetic oligonucleotide
uaguaucuguaguagucau

SEQ ID NO: 485218 - RNA, 19 nt, Artificial Sequence
  Description of Artificial Sequence: Synthetic oligonucleotide
acgugcuaauaaauucugc

SEQ ID NO: 485219 - RNA, 19 nt, Artificial Sequence
  Description of Artificial Sequence: Synthetic oligonucleotide
cucagagugccaauauguc

SEQ ID NO: 485220 - RNA, 19 nt, Artificial Sequence
  Description of Artificial Sequence: Synthetic oligonucleotide
aacguauuuaacagauaaa

SEQ ID NO: 485221 - RNA, 19 nt, Artificial Sequence
  Description of Artificial Sequence: Synthetic oligonucleotide
gguucuaccuugccaagcc

SEQ ID NO: 485222 - RNA, 19 nt, Artificial Sequence
  Description of Artificial Sequence: Synthetic oligonucleotide
uuuuggccuuaccaccggc

SEQ ID NO: 485223 - RNA, 19 nt, Artificial Sequence
  Description of Artificial Sequence: Synthetic oligonucleotide
agcgcaucaaugcucuccu

SEQ ID NO: 485224 - RNA, 19 nt, Artificial Sequence
  Description of Artificial Sequence: Synthetic oligonucleotide
guuguuaccccuugcaacu

SEQ ID NO: 485225 - RNA, 19 nt, Artificial Sequence
  Description of Artificial Sequence: Synthetic oligonucleotide
ggaagacugggguuguucc

SEQ ID NO: 485226 - RNA, 19 nt, Artificial Sequence
  Description of Artificial Sequence: Synthetic oligonucleotide
ggacuuuuggccuuaccac

SEQ ID NO: 485227 - RNA, 19 nt, Artificial Sequence
  Description of Artificial Sequence: Synthetic oligonucleotide
uggccggacucauuauccg

SEQ ID NO: 485228 - RNA, 19 nt, Artificial Sequence
  Description of Artificial Sequence: Synthetic oligonucleotide
uaucacgugcccucagagu

SEQ ID NO: 485229 - RNA, 19 nt, Artificial Sequence
  Description of Artificial Sequence: Synthetic oligonucleotide
uuguaccggagccaaggaa

SEQ ID NO: 485230 - RNA, 19 nt, Artificial Sequence
  Description of Artificial Sequence: Synthetic oligonucleotide
cuacagaacgaauaugacu

SEQ ID NO: 485231 - RNA, 19 nt, Artificial Sequence
  Description of Artificial Sequence: Synthetic oligonucleotide
acuggcagucugucaacag

SEQ ID NO: 485232 - RNA, 19 nt, Artificial Sequence
  Description of Artificial Sequence: Synthetic oligonucleotide
uucgccagcaucggcagca

SEQ ID NO: 485233 - RNA, 19 nt, Artificial Sequence
  Description of Artificial Sequence: Synthetic oligonucleotide
uggggaguuuuccccacca

SEQ ID NO: 485234 - RNA, 19 nt, Artificial Sequence
  Description of Artificial Sequence: Synthetic oligonucleotide
aggaagcgcaucaaugcuc

SEQ ID NO: 485235 - RNA, 19 nt, Artificial Sequence
  Description of Artificial Sequence: Synthetic oligonucleotide
ggugccggacuucugaagc

SEQ ID NO: 485236 - RNA, 19 nt, Artificial Sequence
  Description of Artificial Sequence: Synthetic oligonucleotide
cuuguggaccgccugcaac

SEQ ID NO: 485237 - RNA, 19 nt, Artificial Sequence
  Description of Artificial Sequence: Synthetic oligonucleotide
ugagaggccauaccacuuu

SEQ ID NO: 485238 - RNA, 19 nt, Artificial Sequence
  Description of Artificial Sequence: Synthetic oligonucleotide
ccuuucuaccuucuaaaag

SEQ ID NO: 485239 - RNA, 19 nt, Artificial Sequence
  Description of Artificial Sequence: Synthetic oligonucleotide
acuaucacgugcccucaga

SEQ ID NO: 485240 - RNA, 19 nt, Artificial Sequence
  Description of Artificial Sequence: Synthetic oligonucleotide
agacgguucuugcacuucu

SEQ ID NO: 485241 - RNA, 19 nt, Artificial Sequence
  Description of Artificial Sequence: Synthetic oligonucleotide
agaugggacagcacauuuc

SEQ ID NO: 485242 - RNA, 19 nt, Artificial Sequence
  Description of Artificial Sequence: Synthetic oligonucleotide
ucaacaaguuuaguuuaau

SEQ ID NO: 485243 - RNA, 19 nt, Artificial Sequence
  Description of Artificial Sequence: Synthetic oligonucleotide
uucccgauuucgauacuuc

SEQ ID NO: 485244 - RNA, 19 nt, Artificial Sequence
  Description of Artificial Sequence: Synthetic oligonucleotide
acuagagaagcggggagcu

SEQ ID NO: 485245 - RNA, 19 nt, Artificial Sequence
  Description of Artificial Sequence: Synthetic oligonucleotide
auuguaccggagccaagga

SEQ ID NO: 485246 - RNA, 19 nt, Artificial Sequence
  Description of Artificial Sequence: Synthetic oligonucleotide
uuaccccuugcaacugccc

SEQ ID NO: 485247 - RNA, 19 nt, Artificial Sequence
  Description of Artificial Sequence: Synthetic oligonucleotide
cucgggcucuucuugcuag

SEQ ID NO: 485248 - RNA, 19 nt, Artificial Sequence
  Description of Artificial Sequence: Synthetic oligonucleotide
gugcuaauaaauucugccu

SEQ ID NO: 485249 - RNA, 19 nt, Artificial Sequence
  Description of Artificial Sequence: Synthetic oligonucleotide
ucauuguaccggagccaag

SEQ ID NO: 485250 - RNA, 19 nt, Artificial Sequence
  Description of Artificial Sequence: Synthetic oligonucleotide
gugccaauauguccauaag

SEQ ID NO: 485251 - RNA, 19 nt, Artificial Sequence
  Description of Artificial Sequence: Synthetic oligonucleotide
agaggccauaccacuuugc

SEQ ID NO: 485252 - RNA, 19 nt, Artificial Sequence
  Description of Artificial Sequence: Synthetic oligonucleotide
gggaguuuuccccaccacc

SEQ ID NO: 485253 - RNA, 19 nt, Artificial Sequence
  Description of Artificial Sequence: Synthetic oligonucleotide
acggcgagagacuccaggu

SEQ ID NO: 485254 - RNA, 19 nt, Artificial Sequence
  Description of Artificial Sequence: Synthetic oligonucleotide
uaccuugccaagccccucu

SEQ ID NO: 485255 - RNA, 19 nt, Artificial Sequence
  Description of Artificial Sequence: Synthetic oligonucleotide
uggcuuguggaccgccugc

SEQ ID NO: 485256 - RNA, 19 nt, Artificial Sequence
  Description of Artificial Sequence: Synthetic oligonucleotide
cauuaacccauaacaugca

SEQ ID NO: 485257 - RNA, 19 nt, Artificial Sequence
  Description of Artificial Sequence: Synthetic oligonucleotide
ugccacucccaacccaucu

SEQ ID NO: 485258 - RNA, 19 nt, Artificial Sequence
  Description of Artificial Sequence: Synthetic oligonucleotide
ggaucaugcuuaaacuugc

SEQ ID NO: 485259 - RNA, 19 nt, Artificial Sequence
  Description of Artificial Sequence: Synthetic oligonucleotide
caaccauuuucacauugga

SEQ ID NO: 485260 - RNA, 19 nt, Artificial Sequence
  Description of Artificial Sequence: Synthetic oligonucleotide
uucccggccagucgcgugc

SEQ ID NO: 485261 - RNA, 19 nt, Artificial Sequence
  Description of Artificial Sequence: Synthetic oligonucleotide
cacuagagaagcggggagc

SEQ ID NO: 485262 - RNA, 19 nt, Artificial Sequence
  Description of Artificial Sequence: Synthetic oligonucleotide
aucaacggcgagagacucc

SEQ ID NO: 485263 - RNA, 19 nt, Artificial Sequence
  Description of Artificial Sequence: Synthetic oligonucleotide
ugcuuaaacuugccaguuu

SEQ ID NO: 485264 - RNA, 19 nt, Artificial Sequence
  Description of Artificial Sequence: Synthetic oligonucleotide
gaaagagggcuccuguagu

SEQ ID NO: 485265 - RNA, 19 nt, Artificial Sequence
  Description of Artificial Sequence: Synthetic oligonucleotide
agcuuuuacaccacugaau

SEQ ID NO: 485266 - RNA, 19 nt, Artificial Sequence
  Description of Artificial Sequence: Synthetic oligonucleotide
gccgauggaccuucggucg

SEQ ID NO: 485267 - RNA, 19 nt, Artificial Sequence
  Description of Artificial Sequence: Synthetic oligonucleotide
guucuaccuugccaagccc

SEQ ID NO: 485268 - RNA, 19 nt, Artificial Sequence
  Description of Artificial Sequence: Synthetic oligonucleotide
caugcuuaaacuugccagu

SEQ ID NO: 485269 - RNA, 19 nt, Artificial Sequence
  Description of Artificial Sequence: Synthetic oligonucleotide
cucuucggcucccggaggc

SEQ ID NO: 485270 - RNA, 19 nt, Artificial Sequence
  Description of Artificial Sequence: Synthetic oligonucleotide
ccugauggcuuguggaccg

SEQ ID NO: 485271 - RNA, 19 nt, Artificial Sequence
  Description of Artificial Sequence: Synthetic oligonucleotide
cauggccggacucauuauc

SEQ ID NO: 485272 - RNA, 19 nt, Artificial Sequence
  Description of Artificial Sequence: Synthetic oligonucleotide
accuucuaaaagaaaggau

SEQ ID NO: 485273 - RNA, 19 nt, Artificial Sequence
  Description of Artificial Sequence: Synthetic oligonucleotide
uggcacgggagcucaguug

SEQ ID NO: 485274 - RNA, 19 nt, Artificial Sequence
  Description of Artificial Sequence: Synthetic oligonucleotide
gaacgaauaugacuuguuu

SEQ ID NO: 485275 - RNA, 19 nt, Artificial Sequence
  Description of Artificial Sequence: Synthetic oligonucleotide
agcacauuucuuggcccac

SEQ ID NO: 485276 - RNA, 19 nt, Artificial Sequence
  Description of Artificial Sequence: Synthetic oligonucleotide
cuugcuugcagguggguua

SEQ ID NO: 485277 - RNA, 19 nt, Artificial Sequence
  Description of Artificial Sequence: Synthetic oligonucleotide
ucgggcucuucuugcuagg

SEQ ID NO: 485278 - RNA, 19 nt, Artificial Sequence
  Description of Artificial Sequence: Synthetic oligonucleotide
uccuguuauccuucuuguc

SEQ ID NO: 485279 - RNA, 19 nt, Artificial Sequence
  Description of Artificial Sequence: Synthetic oligonucleotide
auggcuuguggaccgccug

SEQ ID NO: 485280 - RNA, 19 nt, Artificial Sequence
  Description of Artificial Sequence: Synthetic oligonucleotide
gagcaacauagucuacaga

SEQ ID NO: 485281 - RNA, 19 nt, Artificial Sequence
  Description of Artificial Sequence: Synthetic oligonucleotide
gagggcuccuguaguauug

SEQ ID NO: 485282 - RNA, 19 nt, Artificial Sequence
  Description of Artificial Sequence: Synthetic oligonucleotide
guuuuccccacuggaagac

SEQ ID NO: 485283 - RNA, 19 nt, Artificial Sequence
  Description of Artificial Sequence: Synthetic oligonucleotide
gcauuuagaaaguuuaguu

SEQ ID NO: 485284 - RNA, 19 nt, Artificial Sequence
  Description of Artificial Sequence: Synthetic oligonucleotide
ccgauuucgauacuuccug

SEQ ID NO: 485285 - RNA, 19 nt, Artificial Sequence
  Description of Artificial Sequence: Synthetic oligonucleotide
ggagucgccacauuccgga

SEQ ID NO: 485286 - RNA, 19 nt, Artificial Sequence
  Description of Artificial Sequence: Synthetic oligonucleotide
aggucuucgcucacacugg

SEQ ID NO: 485287 - RNA, 19 nt, Artificial Sequence
  Description of Artificial Sequence: Synthetic oligonucleotide
caugaucuucagugaccag

SEQ ID NO: 485288 - RNA, 19 nt, Artificial Sequence
  Description of Artificial Sequence: Synthetic oligonucleotide
guuaccccuugcaacugcc

SEQ ID NO: 485289 - RNA, 19 nt, Artificial Sequence
  Description of Artificial Sequence: Synthetic oligonucleotide
gugguacuacaucaucauc

SEQ ID NO: 485290 - RNA, 19 nt, Artificial Sequence
  Description of Artificial Sequence: Synthetic oligonucleotide
aggugccggacuucugaag

SEQ ID NO: 485291 - RNA, 19 nt, Artificial Sequence
  Description of Artificial Sequence: Synthetic oligonucleotide
uggugcgucgccgucuuga

SEQ ID NO: 485292 - RNA, 19 nt, Artificial Sequence
  Description of Artificial Sequence: Synthetic oligonucleotide
cagcacgaacaucccaggc

SEQ ID NO: 485293 - RNA, 19 nt, Artificial Sequence
  Description of Artificial Sequence: Synthetic oligonucleotide
ggaguuuuccccaccacca

SEQ ID NO: 485294 - RNA, 19 nt, Artificial Sequence
  Description of Artificial Sequence: Synthetic oligonucleotide
gucgcgugcucagagcugc

SEQ ID NO: 485295 - RNA, 19 nt, Artificial Sequence
  Description of Artificial Sequence: Synthetic oligonucleotide
agucugucaacaggcccag

SEQ ID NO: 485296 - RNA, 19 nt, Artificial Sequence
  Description of Artificial Sequence: Synthetic oligonucleotide
gcuguuguuaccccuugca

SEQ ID NO: 485297 - RNA, 19 nt, Artificial Sequence
  Description of Artificial Sequence: Synthetic oligonucleotide
uuguuaccccuugcaacug

SEQ ID NO: 485298 - RNA, 19 nt, Artificial Sequence
  Description of Artificial Sequence: Synthetic oligonucleotide
uucuaggucuucgcucaca

SEQ ID NO: 485299 - RNA, 19 nt, Artificial Sequence
  Description of Artificial Sequence: Synthetic oligonucleotide
ggaacaugcagcggcacac

SEQ ID NO: 485300 - RNA, 19 nt, Artificial Sequence
  Description of Artificial Sequence: Synthetic oligonucleotide
cacgaacaucccaggcugc

SEQ ID NO: 485301 - RNA, 19 nt, Artificial Sequence
  Description of Artificial Sequence: Synthetic oligonucleotide
cucccaguuuuccccacug

SEQ ID NO: 485302 - RNA, 19 nt, Artificial Sequence
  Description of Artificial Sequence: Synthetic oligonucleotide
gcugcaaucucaaguagca

SEQ ID NO: 485303 - RNA, 19 nt, Artificial Sequence
  Description of Artificial Sequence: Synthetic oligonucleotide
acaucaacggcgagagacu

SEQ ID NO: 485304 - RNA, 19 nt, Artificial Sequence
  Description of Artificial Sequence: Synthetic oligonucleotide
gugccggacuucugaagcc

SEQ ID NO: 485305 - RNA, 19 nt, Artificial Sequence
  Description of Artificial Sequence: Synthetic oligonucleotide
caucaguauaugcccagaa

SEQ ID NO: 485306 - RNA, 19 nt, Artificial Sequence
  Description of Artificial Sequence: Synthetic oligonucleotide
ggacucauuauccgcuuca

SEQ ID NO: 485307 - RNA, 19 nt, Artificial Sequence
  Description of Artificial Sequence: Synthetic oligonucleotide
caccucgggcucuucuugc

SEQ ID NO: 485308 - RNA, 19 nt, Artificial Sequence
  Description of Artificial Sequence: Synthetic oligonucleotide
aggccauaccacuuugcuu

SEQ ID NO: 485309 - RNA, 19 nt, Artificial Sequence
  Description of Artificial Sequence: Synthetic oligonucleotide
agaacgaauaugacuuguu

SEQ ID NO: 485310 - RNA, 19 nt, Artificial Sequence
  Description of Artificial Sequence: Synthetic oligonucleotide
auaaccaggcuaagaguaa

SEQ ID NO: 485311 - RNA, 19 nt, Artificial Sequence
  Description of Artificial Sequence: Synthetic oligonucleotide
caucaacggcgagagacuc

SEQ ID NO: 485312 - RNA, 19 nt, Artificial Sequence
  Description of Artificial Sequence: Synthetic oligonucleotide
gcuaggacgugcuaauaaa

SEQ ID NO: 485313 - RNA, 19 nt, Artificial Sequence
  Description of Artificial Sequence: Synthetic oligonucleotide
cucgacaucaacggcgaga

SEQ ID NO: 485314 - RNA, 19 nt, Artificial Sequence
  Description of Artificial Sequence: Synthetic oligonucleotide
ucgccgucuugacacuuuc

SEQ ID NO: 485315 - RNA, 19 nt, Artificial Sequence
  Description of Artificial Sequence: Synthetic oligonucleotide
cauuccggacuuuuggccu

SEQ ID NO: 485316 - RNA, 19 nt, Artificial Sequence
  Description of Artificial Sequence: Synthetic oligonucleotide
caugcaacgcaagugauuu

SEQ ID NO: 485317 - RNA, 19 nt, Artificial Sequence
  Description of Artificial Sequence: Synthetic oligonucleotide
caucucuccaccugggagu

SEQ ID NO: 485318 - RNA, 19 nt, Artificial Sequence
  Description of Artificial Sequence: Synthetic oligonucleotide
augcuuaaacuugccaguu

SEQ ID NO: 485319 - RNA, 19 nt, Artificial Sequence
  Description of Artificial Sequence: Synthetic oligonucleotide
augcaguuuggagucgcca

SEQ ID NO: 485320 - RNA, 19 nt, Artificial Sequence
  Description of Artificial Sequence: Synthetic oligonucleotide
guacucucuuggaggauac

SEQ ID NO: 485321 - RNA, 19 nt, Artificial Sequence
  Description of Artificial Sequence: Synthetic oligonucleotide
cagcacauuucuuggccca

SEQ ID NO: 485322 - RNA, 19 nt, Artificial Sequence
  Description of Artificial Sequence: Synthetic oligonucleotide
cuaggacgugcuaauaaau

SEQ ID NO: 485323 - RNA, 19 nt, Artificial Sequence
  Description of Artificial Sequence: Synthetic oligonucleotide
ucgauacuuccugcgcaga

SEQ ID NO: 485324 - RNA, 19 nt, Artificial Sequence
  Description of Artificial Sequence: Synthetic oligonucleotide
auuccggacuuuuggccuu

SEQ ID NO: 485325 - RNA, 19 nt, Artificial Sequence
  Description of Artificial Sequence: Synthetic oligonucleotide
ccaacugauuucauugcca

SEQ ID NO: 485326 - RNA, 19 nt, Artificial Sequence
  Description of Artificial Sequence: Synthetic oligonucleotide
ucaucccaacgacgucgug

SEQ ID NO: 485327 - RNA, 19 nt, Artificial Sequence
  Description of Artificial Sequence: Synthetic oligonucleotide
cuugcaacugcccugccuu

SEQ ID NO: 485328 - RNA, 19 nt, Artificial Sequence
  Description of Artificial Sequence: Synthetic oligonucleotide
cauggcuuauggaaauagu

SEQ ID NO: 485329 - RNA, 19 nt, Artificial Sequence
  Description of Artificial Sequence: Synthetic oligonucleotide
auuauccgcuucacugcug

SEQ ID NO: 485330 - RNA, 19 nt, Artificial Sequence
  Description of Artificial Sequence: Synthetic oligonucleotide
cacuaucacgugcccucag

SEQ ID NO: 485331 - RNA, 19 nt, Artificial Sequence
  Description of Artificial Sequence: Synthetic oligonucleotide
agacugggguuguucccga

SEQ ID NO: 485332 - RNA, 19 nt, Artificial Sequence
  Description of Artificial Sequence: Synthetic oligonucleotide
aggcugguuccagagcucu

SEQ ID NO: 485333 - RNA, 19 nt, Artificial Sequence
  Description of Artificial Sequence: Synthetic oligonucleotide
accucgacaucaacggcga

SEQ ID NO: 485334 - RNA, 19 nt, Artificial Sequence
  Description of Artificial Sequence: Synthetic oligonucleotide
cuucggcucccggaggccc

SEQ ID NO: 485335 - RNA, 19 nt, Artificial Sequence
  Description of Artificial Sequence: Synthetic oligonucleotide
gagggaacaugcagcggca

SEQ ID NO: 485336 - RNA, 19 nt, Artificial Sequence
  Description of Artificial Sequence: Synthetic oligonucleotide
cuuuggcucagaggagcug

SEQ ID NO: 485337 - RNA, 19 nt, Artificial Sequence
  Description of Artificial Sequence: Synthetic oligonucleotide
cauuauccgcuucacugcu

SEQ ID NO: 485338 - RNA, 19 nt, Artificial Sequence
  Description of Artificial Sequence: Synthetic oligonucleotide
gcccuguacucucuuggag

SEQ ID NO: 485339 - RNA, 19 nt, Artificial Sequence
  Description of Artificial Sequence: Synthetic oligonucleotide
ggccggacucauuauccgc

SEQ ID NO: 485340 - RNA, 19 nt, Artificial Sequence
  Description of Artificial Sequence: Synthetic oligonucleotide
ucccaacgacgucgugugc

SEQ ID NO: 485341 - RNA, 19 nt, Artificial Sequence
  Description of Artificial Sequence: Synthetic oligonucleotide
ccacuuugcuucaagaacu

SEQ ID NO: 485342 - RNA, 19 nt, Artificial Sequence
  Description of Artificial Sequence: Synthetic oligonucleotide
agccauggugcgucgccgu

SEQ ID NO: 485343 - RNA, 19 nt, Artificial Sequence
  Description of Artificial Sequence: Synthetic oligonucleotide
caacgacgucgugugcugg

SEQ ID NO: 485344 - RNA, 19 nt, Artificial Sequence
  Description of Artificial Sequence: Synthetic oligonucleotide
acaugcaacgcaagugauu

SEQ ID NO: 485345 - RNA, 19 nt, Artificial Sequence
  Description of Artificial Sequence: Synthetic oligonucleotide
gcuagcagagcaccuugca

SEQ ID NO: 485346 - RNA, 19 nt, Artificial Sequence
  Description of Artificial Sequence: Synthetic oligonucleotide
cccauaacaugcaacgcaa

SEQ ID NO: 485347 - RNA, 19 nt, Artificial Sequence
  Description of Artificial Sequence: Synthetic oligonucleotide
ggacgugcuaauaaauucu

SEQ ID NO: 485348 - RNA, 19 nt, Artificial Sequence
  Description of Artificial Sequence: Synthetic oligonucleotide
gagacgguucuugcacuuc

SEQ ID NO: 485349 - RNA, 19 nt, Artificial Sequence
  Description of Artificial Sequence: Synthetic oligonucleotide
ggcaaauggugaccggcuc

SEQ ID NO: 485350 - RNA, 19 nt, Artificial Sequence
  Description of Artificial Sequence: Synthetic oligonucleotide
ggggcugaucugugcauug

SEQ ID NO: 485351 - RNA, 19 nt, Artificial Sequence
  Description of Artificial Sequence: Synthetic oligonucleotide
cgauuucgauacuuccugc

SEQ ID NO: 485352 - RNA, 19 nt, Artificial Sequence
  Description of Artificial Sequence: Synthetic oligonucleotide
gcucaguugccaccucacc

SEQ ID NO: 485353 - RNA, 19 nt, Artificial Sequence
  Description of Artificial Sequence: Synthetic oligonucleotide
gcaacugcccugccuucag

SEQ ID NO: 485354 - RNA, 19 nt, Artificial Sequence
  Description of Artificial Sequence: Synthetic oligonucleotide
cuguaguauuguggguuuc

SEQ ID NO: 485355 - RNA, 19 nt, Artificial Sequence
  Description of Artificial Sequence: Synthetic oligonucleotide
gcgagagacuccaggugcg

SEQ ID NO: 485356 - RNA, 19 nt, Artificial Sequence
  Description of Artificial Sequence: Synthetic oligonucleotide
cugcaugggcuucgccagc

SEQ ID NO: 485357 - RNA, 19 nt, Artificial Sequence
  Description of Artificial Sequence: Synthetic oligonucleotide
aguuuggagucgccacauu

SEQ ID NO: 485358 - RNA, 19 nt, Artificial Sequence
  Description of Artificial Sequence: Synthetic oligonucleotide
cuucgagagccauguaggu

SEQ ID NO: 485359 - RNA, 19 nt, Artificial Sequence
  Description of Artificial Sequence: Synthetic oligonucleotide
gaagcgcaucaaugcucuc

SEQ ID NO: 485360 - RNA, 19 nt, Artificial Sequence
  Description of Artificial Sequence: Synthetic oligonucleotide
ggguucuaccuugccaagc

SEQ ID NO: 485361 - RNA, 19 nt, Artificial Sequence
  Description of Artificial Sequence: Synthetic oligonucleotide
caggaagcgcaucaaugcu

SEQ ID NO: 485362 - RNA, 19 nt, Artificial Sequence
  Description of Artificial Sequence: Synthetic oligonucleotide
gggaacaugcagcggcaca

SEQ ID NO: 485363 - RNA, 19 nt, Artificial Sequence
  Description of Artificial Sequence: Synthetic oligonucleotide
caucccaacgacgucgugu

SEQ ID NO: 485364 - RNA, 19 nt, Artificial Sequence
  Description of Artificial Sequence: Synthetic oligonucleotide
ccgccugcaacuucccggc

SEQ ID NO: 485365 - RNA, 19 nt, Artificial Sequence
  Description of Artificial Sequence: Synthetic oligonucleotide
gcugaucugugcauuggga

SEQ ID NO: 485366 - RNA, 19 nt, Artificial Sequence
  Description of Artificial Sequence: Synthetic oligonucleotide
cagaacgaauaugacuugu

SEQ ID NO: 485367 - RNA, 19 nt, Artificial Sequence
  Description of Artificial Sequence: Synthetic oligonucleotide
ccaacgacgucgugugcug

SEQ ID NO: 485368 - RNA, 19 nt, Artificial Sequence
  Description of Artificial Sequence: Synthetic oligonucleotide
cuagagaagcggggagcuc

SEQ ID NO: 485369 - RNA, 19 nt, Artificial Sequence
  Description of Artificial Sequence: Synthetic oligonucleotide
uguggaccgccugcaacuu

SEQ ID NO: 485370 - RNA, 19 nt, Artificial Sequence
  Description of Artificial Sequence: Synthetic oligonucleotide
gagaagcggggagcucuug

SEQ ID NO: 485371 - RNA, 19 nt, Artificial Sequence
  Description of Artificial Sequence: Synthetic oligonucleotide
augcaacgcaagugauuuu

SEQ ID NO: 485372 - RNA, 19 nt, Artificial Sequence
  Description of Artificial Sequence: Synthetic oligonucleotide
cgauacuuccugcgcagag

SEQ ID NO: 485373 - RNA, 19 nt, Artificial Sequence
  Description of Artificial Sequence: Synthetic oligonucleotide
caucaucaucaucaucagu

SEQ ID NO: 485374 - RNA, 19 nt, Artificial Sequence
  Description of Artificial Sequence: Synthetic oligonucleotide
cagucgcgugcucagagcu

SEQ ID NO: 485375 - RNA, 19 nt, Artificial Sequence
  Description of Artificial Sequence: Synthetic oligonucleotide
acgacgucgugugcuggca

SEQ ID NO: 485376 - RNA, 19 nt, Artificial Sequence
  Description of Artificial Sequence: Synthetic oligonucleotide
ggaagcgcaucaaugcucu

SEQ ID NO: 485377 - RNA, 19 nt, Artificial Sequence
  Description of Artificial Sequence: Synthetic oligonucleotide
cuguaguagucaucaguau

SEQ ID NO: 485378 - RNA, 19 nt, Artificial Sequence
  Description of Artificial Sequence: Synthetic oligonucleotide
agcccugcuaggacgugcu

SEQ ID NO: 485379 - RNA, 19 nt, Artificial Sequence
  Description of Artificial Sequence: Synthetic oligonucleotide
agucgcgugcucagagcug

SEQ ID NO: 485380 - RNA, 19 nt, Artificial Sequence
  Description of Artificial Sequence: Synthetic oligonucleotide
aggugcgcaagggcagucu

SEQ ID NO: 485381 - RNA, 19 nt, Artificial Sequence
  Description of Artificial Sequence: Synthetic oligonucleotide
cugauggcuuguggaccgc

SEQ ID NO: 485382 - RNA, 19 nt, Artificial Sequence
  Description of Artificial Sequence: Synthetic oligonucleotide
ucgcgugcucagagcugca

SEQ ID NO: 485383 - RNA, 19 nt, Artificial Sequence
  Description of Artificial Sequence: Synthetic oligonucleotide
caagcuguuguuaccccuu

SEQ ID NO: 485384 - RNA, 19 nt, Artificial Sequence
  Description of Artificial Sequence: Synthetic oligonucleotide
ggacuucggauguuguccu

SEQ ID NO: 485385 - RNA, 19 nt, Artificial Sequence
  Description of Artificial Sequence: Synthetic oligonucleotide
gucgccacauuccggacuu

SEQ ID NO: 485386 - RNA, 19 nt, Artificial Sequence
  Description of Artificial Sequence: Synthetic oligonucleotide
gaacaugcagcggcacacu

SEQ ID NO: 485387 - RNA, 19 nt, Artificial Sequence
  Description of Artificial Sequence: Synthetic oligonucleotide
gggcuccuguaguauugug

SEQ ID NO: 485388 - RNA, 19 nt, Artificial Sequence
  Description of Artificial Sequence: Synthetic oligonucleotide
acgucgugugcuggcaaau

SEQ ID NO: 485389 - RNA, 19 nt, Artificial Sequence
  Description of Artificial Sequence: Synthetic oligonucleotide
guggaccgccugcaacuuc

SEQ ID NO: 485390 - RNA, 19 nt, Artificial Sequence
  Description of Artificial Sequence: Synthetic oligonucleotide
ggcccuguacucucuugga

SEQ ID NO: 485391 - RNA, 19 nt, Artificial Sequence
  Description of Artificial Sequence: Synthetic oligonucleotide
cagaugggacagcacauuu

SEQ ID NO: 485392 - RNA, 19 nt, Artificial Sequence
  Description of Artificial Sequence: Synthetic oligonucleotide
ccgauggaccuucggucgc

SEQ ID NO: 485393 - RNA, 19 nt, Artificial Sequence
  Description of Artificial Sequence: Synthetic oligonucleotide
gcgugcucagagcugcaga

SEQ ID NO: 485394 - RNA, 19 nt, Artificial Sequence
  Description of Artificial Sequence: Synthetic oligonucleotide
ggguuguucccgauuucga

SEQ ID NO: 485395 - RNA, 19 nt, Artificial Sequence
  Description of Artificial Sequence: Synthetic oligonucleotide
ccccuugcaacugcccugc

SEQ ID NO: 485396 - RNA, 19 nt, Artificial Sequence
  Description of Artificial Sequence: Synthetic oligonucleotide
guucccgauuucgauacuu

SEQ ID NO: 485397 - RNA, 19 nt, Artificial Sequence
  Description of Artificial Sequence: Synthetic oligonucleotide
cccuuucuaccuucuaaaa

SEQ ID NO: 485398 - RNA, 19 nt, Artificial Sequence
  Description of Artificial Sequence: Synthetic oligonucleotide
agagaagcggggagcucuu

SEQ ID NO: 485399 - RNA, 19 nt, Artificial Sequence
  Description of Artificial Sequence: Synthetic oligonucleotide
cccgauuucgauacuuccu

SEQ ID NO: 485400 - RNA, 19 nt, Artificial Sequence
  Description of Artificial Sequence: Synthetic oligonucleotide
gggaguacucugugguacu

SEQ ID NO: 485401 - RNA, 19 nt, Artificial Sequence
  Description of Artificial Sequence: Synthetic oligonucleotide
uccggacuuuuggccuuac

SEQ ID NO: 485402 - RNA, 19 nt, Artificial Sequence
  Description of Artificial Sequence: Synthetic oligonucleotide
guaaagagccuuggccuuu

SEQ ID NO: 485403 - RNA, 19 nt, Artificial Sequence
  Description of Artificial Sequence: Synthetic oligonucleotide
gucaucccaacgacgucgu

SEQ ID NO: 485404 - RNA, 19 nt, Artificial Sequence
  Description of Artificial Sequence: Synthetic oligonucleotide
caggugcgcaagggcaguc

SEQ ID NO: 485405 - RNA, 19 nt, Artificial Sequence
  Description of Artificial Sequence: Synthetic oligonucleotide
ccaggcgcucuucgagagc

SEQ ID NO: 485406 - RNA, 19 nt, Artificial Sequence
  Description of Artificial Sequence: Synthetic oligonucleotide
ucccggccagucgcgugcu

SEQ ID NO: 485407 - RNA, 19 nt, Artificial Sequence
  Description of Artificial Sequence: Synthetic oligonucleotide
guaccggagccaaggaauu

SEQ ID NO: 485408 - RNA, 19 nt, Artificial Sequence
  Description of Artificial Sequence: Synthetic oligonucleotide
gccggacucauuauccgcu

SEQ ID NO: 485409 - RNA, 19 nt, Artificial Sequence
  Description of Artificial Sequence: Synthetic oligonucleotide
cagguggguuagccaccuc

SEQ ID NO: 485410 - RNA, 19 nt, Artificial Sequence
  Description of Artificial Sequence: Synthetic oligonucleotide
ccauccauucuuugucacu

SEQ ID NO: 485411 - RNA, 19 nt, Artificial Sequence
  Description of Artificial Sequence: Synthetic oligonucleotide
gccauggugcgucgccguc

SEQ ID NO: 485412 - RNA, 19 nt, Artificial Sequence
  Description of Artificial Sequence: Synthetic oligonucleotide
gacugggguuguucccgau

SEQ ID NO: 485413 - RNA, 19 nt, Artificial Sequence
  Description of Artificial Sequence: Synthetic oligonucleotide
ccaagccccucuuucacau

SEQ ID NO: 485414 - RNA, 19 nt, Artificial Sequence
  Description of Artificial Sequence: Synthetic oligonucleotide
gacgguucuugcacuucuu

SEQ ID NO: 485415 - RNA, 19 nt, Artificial Sequence
  Description of Artificial Sequence: Synthetic oligonucleotide
cgaauaugacuuguuucaa

SEQ ID NO: 485416 - RNA, 19 nt, Artificial Sequence
  Description of Artificial Sequence: Synthetic oligonucleotide
cugcuaggacgugcuaaua

SEQ ID NO: 485417 - RNA, 19 nt, Artificial Sequence
  Description of Artificial Sequence: Synthetic oligonucleotide
agccccucuuucacaucau

SEQ ID NO: 485418 - RNA, 19 nt, Artificial Sequence
  Description of Artificial Sequence: Synthetic oligonucleotide
gcaucaucucauggccgga

SEQ ID NO: 485419 - RNA, 19 nt, Artificial Sequence
  Description of Artificial Sequence: Synthetic oligonucleotide
ggaccgccugcaacuuccc

SEQ ID NO: 485420 - RNA, 19 nt, Artificial Sequence
  Description of Artificial Sequence: Synthetic oligonucleotide
cauggugcgucgccgucuu

SEQ ID NO: 485421 - RNA, 19 nt, Artificial Sequence
  Description of Artificial Sequence: Synthetic oligonucleotide
ggccuuaccaccggcuccu

SEQ ID NO: 485422 - RNA, 19 nt, Artificial Sequence
  Description of Artificial Sequence: Synthetic oligonucleotide
cugcaaucucaaguagcau

SEQ ID NO: 485423 - RNA, 19 nt, Artificial Sequence
  Description of Artificial Sequence: Synthetic oligonucleotide
ccucgacaucaacggcgag

SEQ ID NO: 485424 - RNA, 19 nt, Artificial Sequence
  Description of Artificial Sequence: Synthetic oligonucleotide
cgucgugugcuggcaaaug

SEQ ID NO: 485425 - RNA, 19 nt, Artificial Sequence
  Description of Artificial Sequence: Synthetic oligonucleotide
cccugcuaggacgugcuaa

SEQ ID NO: 485426 - RNA, 19 nt, Artificial Sequence
  Description of Artificial Sequence: Synthetic oligonucleotide
gcgcucuucgagagccaug

SEQ ID NO: 485427 - RNA, 19 nt, Artificial Sequence
  Description of Artificial Sequence: Synthetic oligonucleotide
ccuugcaacugcccugccu

SEQ ID NO: 485428 - RNA, 19 nt, Artificial Sequence
  Description of Artificial Sequence: Synthetic oligonucleotide
gcagguggguuagccaccu

SEQ ID NO: 485429 - RNA, 19 nt, Artificial Sequence
  Description of Artificial Sequence: Synthetic oligonucleotide
ucgccacauuccggacuuu

SEQ ID NO: 485430 - RNA, 19 nt, Artificial Sequence
  Description of Artificial Sequence: Synthetic oligonucleotide
cgcgugcucagagcugcag

SEQ ID NO: 485431 - RNA, 19 nt, Artificial Sequence
  Description of Artificial Sequence: Synthetic oligonucleotide
gucgccgucuugacacuuu

SEQ ID NO: 485432 - RNA, 19 nt, Artificial Sequence
  Description of Artificial Sequence: Synthetic oligonucleotide
ccggccagucgcgugcuca

SEQ ID NO: 485433 - RNA, 19 nt, Artificial Sequence
  Description of Artificial Sequence: Synthetic oligonucleotide
ccucacuaucacgugcccu

SEQ ID NO: 485434 - RNA, 19 nt, Artificial Sequence
  Description of Artificial Sequence: Synthetic oligonucleotide
cauugggacuucggauguu

SEQ ID NO: 485435 - RNA, 19 nt, Artificial Sequence
  Description of Artificial Sequence: Synthetic oligonucleotide
ccauaccacuuugcuucaa

SEQ ID NO: 485436 - RNA, 19 nt, Artificial Sequence
  Description of Artificial Sequence: Synthetic oligonucleotide
cuggaagacugggguuguu

SEQ ID NO: 485437 - RNA, 19 nt, Artificial Sequence
  Description of Artificial Sequence: Synthetic oligonucleotide
gcccugcuaggacgugcua

SEQ ID NO: 485438 - RNA, 19 nt, Artificial Sequence
  Description of Artificial Sequence: Synthetic oligonucleotide
cgacgucgugugcuggcaa

SEQ ID NO: 485439 - RNA, 19 nt, Artificial Sequence
  Description of Artificial Sequence: Synthetic oligonucleotide
ccggacucauuauccgcuu

SEQ ID NO: 485440 - RNA, 19 nt, Artificial Sequence
  Description of Artificial Sequence: Synthetic oligonucleotide
gcgucgccgucuugacacu

SEQ ID NO: 485441 - RNA, 19 nt, Artificial Sequence
  Description of Artificial Sequence: Synthetic oligonucleotide
gccuuaccaccggcuccuc

SEQ ID NO: 485442 - RNA, 19 nt, Artificial Sequence
  Description of Artificial Sequence: Synthetic oligonucleotide
ccaggugcgcaagggcagu

SEQ ID NO: 485443 - RNA, 19 nt, Artificial Sequence
  Description of Artificial Sequence: Synthetic oligonucleotide
gcgcaucaaugcucuccuu

SEQ ID NO: 485444 - RNA, 19 nt, Artificial Sequence
  Description of Artificial Sequence: Synthetic oligonucleotide
cgccgucuugacacuuucu

SEQ ID NO: 485445 - RNA, 19 nt, Artificial Sequence
  Description of Artificial Sequence: Synthetic oligonucleotide
ccggcuccucuugguguga

SEQ ID NO: 485446 - RNA, 19 nt, Artificial Sequence
  Description of Artificial Sequence: Synthetic oligonucleotide
cgaacaucccaggcugcau

SEQ ID NO: 485447 - RNA, 19 nt, Artificial Sequence
  Description of Artificial Sequence: Synthetic oligonucleotide
aauacuauuacacaacuuc

SEQ ID NO: 485448 - RNA, 19 nt, Artificial Sequence
  Description of Artificial Sequence: Synthetic oligonucleotide
aguacuacuggcuacaaac

SEQ ID NO: 485449 - RNA, 19 nt, Artificial Sequence
  Description of Artificial Sequence: Synthetic oligonucleotide
aaguuaagaauacuauuac

SEQ ID NO: 485450 - RNA, 19 nt, Artificial Sequence
  Description of Artificial Sequence: Synthetic oligonucleotide
ugaguaaucacucaucucu

SEQ ID NO: 485451 - RNA, 19 nt, Artificial Sequence
  Description of Artificial Sequence: Synthetic oligonucleotide
uuucauacgauuuacagau

SEQ ID NO: 485452 - RNA, 19 nt, Artificial Sequence
  Description of Artificial Sequence: Synthetic oligonucleotide
aaugguuaaccuuuuaaca

SEQ ID NO: 485453 - RNA, 19 nt, Artificial Sequence
  Description of Artificial Sequence: Synthetic oligonucleotide
aaaucuaugucauuuagua

SEQ ID NO: 485454 - RNA, 19 nt, Artificial Sequence
  Description of Artificial Sequence: Synthetic oligonucleotide
aauugugagcuccucuugc

SEQ ID NO: 485455 - RNA, 19 nt, Artificial Sequence
  Description of Artificial Sequence: Synthetic oligonucleotide
uaguuuauuuguucgagcg

SEQ ID NO: 485456 - RNA, 19 nt, Artificial Sequence
  Description of Artificial Sequence: Synthetic oligonucleotide
uuuaccauguccacaagag

SEQ ID NO: 485457 - RNA, 19 nt, Artificial Sequence
  Description of Artificial Sequence: Synthetic oligonucleotide
agaaacugugccuagauug

SEQ ID NO: 485458 - RNA, 19 nt, Artificial Sequence
  Description of Artificial Sequence: Synthetic oligonucleotide
agucguaugaaauuggucu

SEQ ID NO: 485459 - RNA, 19 nt, Artificial Sequence
  Description of Artificial Sequence: Synthetic oligonucleotide
agauuuacugaguuccucc

SEQ ID NO: 485460 - RNA, 19 nt, Artificial Sequence
  Description of Artificial Sequence: Synthetic oligonucleotide
aguuauacggucuaggaga

SEQ ID NO: 485461 - RNA, 19 nt, Artificial Sequence
  Description of Artificial Sequence: Synthetic oligonucleotide
cuaucgaguaugcagaugg

SEQ ID NO: 485462 - RNA, 19 nt, Artificial Sequence
  Description of Artificial Sequence: Synthetic oligonucleotide
agcaauguguaaucuaccc

SEQ ID NO: 485463 - RNA, 19 nt, Artificial Sequence
  Description of Artificial Sequence: Synthetic oligonucleotide
uuuaacagaagcaucguau

SEQ ID NO: 485464 - RNA, 19 nt, Artificial Sequence
  Description of Artificial Sequence: Synthetic oligonucleotide
acgauuuacagauuuacug

SEQ ID NO: 485465 - RNA, 19 nt, Artificial Sequence
  Description of Artificial Sequence: Synthetic oligonucleotide
agcucaacuucuuucauac

SEQ ID NO: 485466 - RNA, 19 nt, Artificial Sequence
  Description of Artificial Sequence: Synthetic oligonucleotide
aaucauucuccgcuccugc

SEQ ID NO: 485467 - RNA, 19 nt, Artificial Sequence
  Description of Artificial Sequence: Synthetic oligonucleotide
aagaauacuauuacacaac

SEQ ID NO: 485468 - RNA, 19 nt, Artificial Sequence
  Description of Artificial Sequence: Synthetic oligonucleotide
augguuaaccuuuuaacag

SEQ ID NO: 485469 - RNA, 19 nt, Artificial Sequence
  Description of Artificial Sequence: Synthetic oligonucleotide
ucuuguauccccauuguga

SEQ ID NO: 485470 - RNA, 19 nt, Artificial Sequence
  Description of Artificial Sequence: Synthetic oligonucleotide
ucgaguaugcagauggagg

SEQ ID NO: 485471 - RNA, 19 nt, Artificial Sequence
  Description of Artificial Sequence: Synthetic oligonucleotide
ucuacgaacuccuaucgag

SEQ ID NO: 485472 - RNA, 19 nt, Artificial Sequence
  Description of Artificial Sequence: Synthetic oligonucleotide
ucaguagugaguaaucacu

SEQ ID NO: 485473 - RNA, 19 nt, Artificial Sequence
  Description of Artificial Sequence: Synthetic oligonucleotide
auuaccagacgucaucugg

SEQ ID NO: 485474 - RNA, 19 nt, Artificial Sequence
  Description of Artificial Sequence: Synthetic oligonucleotide
aaacgcuuuggacacauca

SEQ ID NO: 485475 - RNA, 19 nt, Artificial Sequence
  Description of Artificial Sequence: Synthetic oligonucleotide
gaaugguuaaccuuuuaac

SEQ ID NO: 485476 - RNA, 19 nt, Artificial Sequence
  Description of Artificial Sequence: Synthetic oligonucleotide
uauucuaauaucuggcccu

SEQ ID NO: 485477 - RNA, 19 nt, Artificial Sequence
  Description of Artificial Sequence: Synthetic oligonucleotide
acuccuaucgaguaugcag

SEQ ID NO: 485478 - RNA, 19 nt, Artificial Sequence
  Description of Artificial Sequence: Synthetic oligonucleotide
ucuucgaugguaauuucug

SEQ ID NO: 485479 - RNA, 19 nt, Artificial Sequence
  Description of Artificial Sequence: Synthetic oligonucleotide
aaggauuuucaccaugagu

SEQ ID NO: 485480 - RNA, 19 nt, Artificial Sequence
  Description of Artificial Sequence: Synthetic oligonucleotide
uugaauaggugauggcugg

SEQ ID NO: 485481 - RNA, 19 nt, Artificial Sequence
  Description of Artificial Sequence: Synthetic oligonucleotide
ugugccuagauugaauagg

SEQ ID NO: 485482 - RNA, 19 nt, Artificial Sequence
  Description of Artificial Sequence: Synthetic oligonucleotide
uggauuucggaauacuuca

SEQ ID NO: 485483 - RNA, 19 nt, Artificial Sequence
  Description of Artificial Sequence: Synthetic oligonucleotide
uuaucaaggcuucuucuug

SEQ ID NO: 485484 - RNA, 19 nt, Artificial Sequence
  Description of Artificial Sequence: Synthetic oligonucleotide
ugaaugguuaaccuuuuaa

SEQ ID NO: 485485 - RNA, 19 nt, Artificial Sequence
  Description of Artificial Sequence: Synthetic oligonucleotide
aaccuggagaacuuucauc

SEQ ID NO: 485486 - RNA, 19 nt, Artificial Sequence
  Description of Artificial Sequence: Synthetic oligonucleotide
gaugguaauuucugaacgc

SEQ ID NO: 485487 - RNA, 19 nt, Artificial Sequence
  Description of Artificial Sequence: Synthetic oligonucleotide
agaauacuauuacacaacu

SEQ ID NO: 485488 - RNA, 19 nt, Artificial Sequence
  Description of Artificial Sequence: Synthetic oligonucleotide
augguaauuucugaacgcc

SEQ ID NO: 485489 - RNA, 19 nt, Artificial Sequence
  Description of Artificial Sequence: Synthetic oligonucleotide
agugaguaaucacucaucu

SEQ ID NO: 485490 - RNA, 19 nt, Artificial Sequence
  Description of Artificial Sequence: Synthetic oligonucleotide
cuuguauccccauugugag

SEQ ID NO: 485491 - RNA, 19 nt, Artificial Sequence
  Description of Artificial Sequence: Synthetic oligonucleotide
uguauuucucuaaaggauu

SEQ ID NO: 485492 - RNA, 19 nt, Artificial Sequence
  Description of Artificial Sequence: Synthetic oligonucleotide
aaguaagaagcuaggcagc

SEQ ID NO: 485493 - RNA, 19 nt, Artificial Sequence
  Description of Artificial Sequence: Synthetic oligonucleotide
uuucucuaaaggauuuuca

SEQ ID NO: 485494 - RNA, 19 nt, Artificial Sequence
  Description of Artificial Sequence: Synthetic oligonucleotide
agauugaauaggugauggc

SEQ ID NO: 485495 - RNA, 19 nt, Artificial Sequence
  Description of Artificial Sequence: Synthetic oligonucleotide
ugaguuauacggucuagga

SEQ ID NO: 485496 - RNA, 19 nt, Artificial Sequence
  Description of Artificial Sequence: Synthetic oligonucleotide
uuacuuuggcuuuaguacu

SEQ ID NO: 485497 - RNA, 19 nt, Artificial Sequence
  Description of Artificial Sequence: Synthetic oligonucleotide
aagcuaggcagcuaauaug

SEQ ID NO: 485498 - RNA, 19 nt, Artificial Sequence
  Description of Artificial Sequence: Synthetic oligonucleotide
augauuaccagacgucauc

SEQ ID NO: 485499 - RNA, 19 nt, Artificial Sequence
  Description of Artificial Sequence: Synthetic oligonucleotide
agcaucguauucuaauauc

SEQ ID NO: 485500 - RNA, 19 nt, Artificial Sequence
  Description of Artificial Sequence: Synthetic oligonucleotide
gaguuauacggucuaggag

SEQ ID NO: 485501 - RNA, 19 nt, Artificial Sequence
  Description of Artificial Sequence: Synthetic oligonucleotide
uaauucaaucuucagugau

SEQ ID NO: 485502 - RNA, 19 nt, Artificial Sequence
  Description of Artificial Sequence: Synthetic oligonucleotide
uuagauucuguucccgucu

SEQ ID NO: 485503 - RNA, 19 nt, Artificial Sequence
  Description of Artificial Sequence: Synthetic oligonucleotide
guauucuaauaucuggccc

SEQ ID NO: 485504 - RNA, 19 nt, Artificial Sequence
  Description of Artificial Sequence: Synthetic oligonucleotide
aggauuuucaccaugaguu

SEQ ID NO: 485505 - RNA, 19 nt, Artificial Sequence
  Description of Artificial Sequence: Synthetic oligonucleotide
gagacguaaguucucauuc

SEQ ID NO: 485506 - RNA, 19 nt, Artificial Sequence
  Description of Artificial Sequence: Synthetic oligonucleotide
ucauacgauuuacagauuu

SEQ ID NO: 485507 - RNA, 19 nt, Artificial Sequence
  Description of Artificial Sequence: Synthetic oligonucleotide
uugucacuaggugucaucg

SEQ ID NO: 485508 - RNA, 19 nt, Artificial Sequence
  Description of Artificial Sequence: Synthetic oligonucleotide
aauaggugauggcugggcu

SEQ ID NO: 485509 - RNA, 19 nt, Artificial Sequence
  Description of Artificial Sequence: Synthetic oligonucleotide
cuugauuuuggauggggug

SEQ ID NO: 485510 - RNA, 19 nt, Artificial Sequence
  Description of Artificial Sequence: Synthetic oligonucleotide
auguguaaucuacccagac

SEQ ID NO: 485511 - RNA, 19 nt, Artificial Sequence
  Description of Artificial Sequence: Synthetic oligonucleotide
auuuugugccugaagcucc

SEQ ID NO: 485512 - RNA, 19 nt, Artificial Sequence
  Description of Artificial Sequence: Synthetic oligonucleotide
ugguuaaccuuuuaacaga

SEQ ID NO: 485513 - RNA, 19 nt, Artificial Sequence
  Description of Artificial Sequence: Synthetic oligonucleotide
gcuaauaugauuaccagac

SEQ ID NO: 485514 - RNA, 19 nt, Artificial Sequence
  Description of Artificial Sequence: Synthetic oligonucleotide
aguaguuuauuuguucgag

SEQ ID NO: 485515 - RNA, 19 nt, Artificial Sequence
  Description of Artificial Sequence: Synthetic oligonucleotide
uguauccccauugugaggu

SEQ ID NO: 485516 - RNA, 19 nt, Artificial Sequence
  Description of Artificial Sequence: Synthetic oligonucleotide
uauacggucuaggagacgu

SEQ ID NO: 485517 - RNA, 19 nt, Artificial Sequence
  Description of Artificial Sequence: Synthetic oligonucleotide
uucaagaaauccccucuug

SEQ ID NO: 485518 - RNA, 19 nt, Artificial Sequence
  Description of Artificial Sequence: Synthetic oligonucleotide
cuucuacgaacuccuaucg

SEQ ID NO: 485519 - RNA, 19 nt, Artificial Sequence
  Description of Artificial Sequence: Synthetic oligonucleotide
uuucggaauacuucauucu

SEQ ID NO: 485520 - RNA, 19 nt, Artificial Sequence
  Description of Artificial Sequence: Synthetic oligonucleotide
ucuugauuuuggauggggu

SEQ ID NO: 485521 - RNA, 19 nt, Artificial Sequence
  Description of Artificial Sequence: Synthetic oligonucleotide
gaaauccccucuuguaucc

SEQ ID NO: 485522 - RNA, 19 nt, Artificial Sequence
  Description of Artificial Sequence: Synthetic oligonucleotide
ucuaugucauuuaguagaa

SEQ ID NO: 485523 - RNA, 19 nt, Artificial Sequence
  Description of Artificial Sequence: Synthetic oligonucleotide
uuggguagucguaugaaau

SEQ ID NO: 485524 - RNA, 19 nt, Artificial Sequence
  Description of Artificial Sequence: Synthetic oligonucleotide
auugugaggugccaucuug

SEQ ID NO: 485525 - RNA, 19 nt, Artificial Sequence
  Description of Artificial Sequence: Synthetic oligonucleotide
aaaggugguucacacuccu

SEQ ID NO: 485526 - RNA, 19 nt, Artificial Sequence
  Description of Artificial Sequence: Synthetic oligonucleotide
uucuucuaaguaagaagcu

SEQ ID NO: 485527 - RNA, 19 nt, Artificial Sequence
  Description of Artificial Sequence: Synthetic oligonucleotide
ucgaugguaauuucugaac

SEQ ID NO: 485528 - RNA, 19 nt, Artificial Sequence
  Description of Artificial Sequence: Synthetic oligonucleotide
aagcaaaucuaugucauuu

SEQ ID NO: 485529 - RNA, 19 nt, Artificial Sequence
  Description of Artificial Sequence: Synthetic oligonucleotide
uuuagauucuguucccguc

SEQ ID NO: 485530 - RNA, 19 nt, Artificial Sequence
  Description of Artificial Sequence: Synthetic oligonucleotide
uucgaugguaauuucugaa

SEQ ID NO: 485531 - RNA, 19 nt, Artificial Sequence
  Description of Artificial Sequence: Synthetic oligonucleotide
guaguuuauuuguucgagc

SEQ ID NO: 485532 - RNA, 19 nt, Artificial Sequence
  Description of Artificial Sequence: Synthetic oligonucleotide
ucaacuucuuucauacgau

SEQ ID NO: 485533 - RNA, 19 nt, Artificial Sequence
  Description of Artificial Sequence: Synthetic oligonucleotide
aacucuucgaugguaauuu

SEQ ID NO: 485534 - RNA, 19 nt, Artificial Sequence
  Description of Artificial Sequence: Synthetic oligonucleotide
ucuaauaucuggcccuuua

SEQ ID NO: 485535 - RNA, 19 nt, Artificial Sequence
  Description of Artificial Sequence: Synthetic oligonucleotide
uauuuugugccugaagcuc

SEQ ID NO: 485536 - RNA, 19 nt, Artificial Sequence
  Description of Artificial Sequence: Synthetic oligonucleotide
uuauuuguucgagcgaugu

SEQ ID NO: 485537 - RNA, 19 nt, Artificial Sequence
  Description of Artificial Sequence: Synthetic oligonucleotide
aggacucauguuaggaucc

SEQ ID NO: 485538 - RNA, 19 nt, Artificial Sequence
  Description of Artificial Sequence: Synthetic oligonucleotide
acuaggugucaucgugucc

SEQ ID NO: 485539 - RNA, 19 nt, Artificial Sequence
  Description of Artificial Sequence: Synthetic oligonucleotide
aaggacuagaagaggcaac

SEQ ID NO: 485540 - RNA, 19 nt, Artificial Sequence
  Description of Artificial Sequence: Synthetic oligonucleotide
aucaacauuuggguagucg

SEQ ID NO: 485541 - RNA, 19 nt, Artificial Sequence
  Description of Artificial Sequence: Synthetic oligonucleotide
auaugauuaccagacguca

SEQ ID NO: 485542 - RNA, 19 nt, Artificial Sequence
  Description of Artificial Sequence: Synthetic oligonucleotide
auuuguucgagcgauguau

SEQ ID NO: 485543 - RNA, 19 nt, Artificial Sequence
  Description of Artificial Sequence: Synthetic oligonucleotide
agugcuacaguaugcucug

SEQ ID NO: 485544 - RNA, 19 nt, Artificial Sequence
  Description of Artificial Sequence: Synthetic oligonucleotide
ucauguuaggaucccgagu

SEQ ID NO: 485545 - RNA, 19 nt, Artificial Sequence
  Description of Artificial Sequence: Synthetic oligonucleotide
ccgaguaacucuucgaugg

SEQ ID NO: 485546 - RNA, 19 nt, Artificial Sequence
  Description of Artificial Sequence: Synthetic oligonucleotide
uccaguaguuuauuuguuc

SEQ ID NO: 485547 - RNA, 19 nt, Artificial Sequence
  Description of Artificial Sequence: Synthetic oligonucleotide
acaugucuauccauggaac

SEQ ID NO: 485548 - RNA, 19 nt, Artificial Sequence
  Description of Artificial Sequence: Synthetic oligonucleotide
ucuuucaguagugaguaau

SEQ ID NO: 485549 - RNA, 19 nt, Artificial Sequence
  Description of Artificial Sequence: Synthetic oligonucleotide
ccaguugguauuuuaaaag

SEQ ID NO: 485550 - RNA, 19 nt, Artificial Sequence
  Description of Artificial Sequence: Synthetic oligonucleotide
cuuucaguagugaguaauc

SEQ ID NO: 485551 - RNA, 19 nt, Artificial Sequence
  Description of Artificial Sequence: Synthetic oligonucleotide
ccaguaguuuauuuguucg

SEQ ID NO: 485552 - RNA, 19 nt, Artificial Sequence
  Description of Artificial Sequence: Synthetic oligonucleotide
aguuuauuuguucgagcga

SEQ ID NO: 485553 - RNA, 19 nt, Artificial Sequence
  Description of Artificial Sequence: Synthetic oligonucleotide
caucguauucuaauaucug

SEQ ID NO: 485554 - RNA, 19 nt, Artificial Sequence
  Description of Artificial Sequence: Synthetic oligonucleotide
cugaacgccuuuuccaagc

SEQ ID NO: 485555 - RNA, 19 nt, Artificial Sequence
  Description of Artificial Sequence: Synthetic oligonucleotide
aguagugaguaaucacuca

SEQ ID NO: 485556 - RNA, 19 nt, Artificial Sequence
  Description of Artificial Sequence: Synthetic oligonucleotide
agagucuggggaacuagcc

SEQ ID NO: 485557 - RNA, 19 nt, Artificial Sequence
  Description of Artificial Sequence: Synthetic oligonucleotide
uuuggguagucguaugaaa

SEQ ID NO: 485558 - RNA, 19 nt, Artificial Sequence
  Description of Artificial Sequence: Synthetic oligonucleotide
uguucgagcgauguauuca

SEQ ID NO: 485559 - RNA, 19 nt, Artificial Sequence
  Description of Artificial Sequence: Synthetic oligonucleotide
uugugaggugccaucuugc

SEQ ID NO: 485560 - RNA, 19 nt, Artificial Sequence
  Description of Artificial Sequence: Synthetic oligonucleotide
uaugauuaccagacgucau

SEQ ID NO: 485561 - RNA, 19 nt, Artificial Sequence
  Description of Artificial Sequence: Synthetic oligonucleotide
gucguaugaaauuggucug

SEQ ID NO: 485562 - RNA, 19 nt, Artificial Sequence
  Description of Artificial Sequence: Synthetic oligonucleotide
ugauuaccagacgucaucu

SEQ ID NO: 485563 - RNA, 19 nt, Artificial Sequence
  Description of Artificial Sequence: Synthetic oligonucleotide
cagcuaauaugauuaccag

SEQ ID NO: 485564 - RNA, 19 nt, Artificial Sequence
  Description of Artificial Sequence: Synthetic oligonucleotide
cacuagaccacucagggaa

SEQ ID NO: 485565 - RNA, 19 nt, Artificial Sequence
  Description of Artificial Sequence: Synthetic oligonucleotide
uucccgucucugaauagcc

SEQ ID NO: 485566 - RNA, 19 nt, Artificial Sequence
  Description of Artificial Sequence: Synthetic oligonucleotide
acaugugacccaucugcuc

SEQ ID NO: 485567 - RNA, 19 nt, Artificial Sequence
  Description of Artificial Sequence: Synthetic oligonucleotide
ucugaacgccuuuuccaag

SEQ ID NO: 485568 - RNA, 19 nt, Artificial Sequence
  Description of Artificial Sequence: Synthetic oligonucleotide
ugcccauaaacgcuuugga

SEQ ID NO: 485569 - RNA, 19 nt, Artificial Sequence
  Description of Artificial Sequence: Synthetic oligonucleotide
guaaucacucaucucuuuc

SEQ ID NO: 485570 - RNA, 19 nt, Artificial Sequence
  Description of Artificial Sequence: Synthetic oligonucleotide
aaccaaaagcucaggaggu

SEQ ID NO: 485571 - RNA, 19 nt, Artificial Sequence
  Description of Artificial Sequence: Synthetic oligonucleotide
acgcuuuggacacaucaug

SEQ ID NO: 485572 - RNA, 19 nt, Artificial Sequence
  Description of Artificial Sequence: Synthetic oligonucleotide
gagacugcuuuggauuucg

SEQ ID NO: 485573 - RNA, 19 nt, Artificial Sequence
  Description of Artificial Sequence: Synthetic oligonucleotide
cugaguuauacggucuagg

SEQ ID NO: 485574 - RNA, 19 nt, Artificial Sequence
  Description of Artificial Sequence: Synthetic oligonucleotide
ugcuacaguaugcucugcu

SEQ ID NO: 485575 - RNA, 19 nt, Artificial Sequence
  Description of Artificial Sequence: Synthetic oligonucleotide
ucacuaggugucaucgugu

SEQ ID NO: 485576 - RNA, 19 nt, Artificial Sequence
  Description of Artificial Sequence: Synthetic oligonucleotide
cucauguuaggaucccgag

SEQ ID NO: 485577 - RNA, 19 nt, Artificial Sequence
  Description of Artificial Sequence: Synthetic oligonucleotide
auaggugauggcugggcug

SEQ ID NO: 485578 - RNA, 19 nt, Artificial Sequence
  Description of Artificial Sequence: Synthetic oligonucleotide
agcuaggcagcuaauauga

SEQ ID NO: 485579 - RNA, 19 nt, Artificial Sequence
  Description of Artificial Sequence: Synthetic oligonucleotide
uucgaggccgugaagccac

SEQ ID NO: 485580 - RNA, 19 nt, Artificial Sequence
  Description of Artificial Sequence: Synthetic oligonucleotide
cuuucaaagauugcuuguc

SEQ ID NO: 485581 - RNA, 19 nt, Artificial Sequence
  Description of Artificial Sequence: Synthetic oligonucleotide
uuguauccccauugugagg

SEQ ID NO: 485582 - RNA, 19 nt, Artificial Sequence
  Description of Artificial Sequence: Synthetic oligonucleotide
caguagugaguaaucacuc

SEQ ID NO: 485583 - RNA, 19 nt, Artificial Sequence
  Description of Artificial Sequence: Synthetic oligonucleotide
guagaggagaggcguacag

SEQ ID NO: 485584 - RNA, 19 nt, Artificial Sequence
  Description of Artificial Sequence: Synthetic oligonucleotide
uagucguaugaaauugguc

SEQ ID NO: 485585 - RNA, 19 nt, Artificial Sequence
  Description of Artificial Sequence: Synthetic oligonucleotide
cugaucauaggucuccuca

SEQ ID NO: 485586 - RNA, 19 nt, Artificial Sequence
  Description of Artificial Sequence: Synthetic oligonucleotide
uguggaguucccacugcug

SEQ ID NO: 485587 - RNA, 19 nt, Artificial Sequence
  Description of Artificial Sequence: Synthetic oligonucleotide
uucuacgaacuccuaucga

SEQ ID NO: 485588 - RNA, 19 nt, Artificial Sequence
  Description of Artificial Sequence: Synthetic oligonucleotide
gauuuucaccaugaguuga

SEQ ID NO: 485589 - RNA, 19 nt, Artificial Sequence
  Description of Artificial Sequence: Synthetic oligonucleotide
aggccgugaagccacacug

SEQ ID NO: 485590 - RNA, 19 nt, Artificial Sequence
  Description of Artificial Sequence: Synthetic oligonucleotide
agauugcuuguccacauuu

SEQ ID NO: 485591 - RNA, 19 nt, Artificial Sequence
  Description of Artificial Sequence: Synthetic oligonucleotide
acugugccuagauugaaua

SEQ ID NO: 485592 - RNA, 19 nt, Artificial Sequence
  Description of Artificial Sequence: Synthetic oligonucleotide
ugaucauaggucuccucaa

SEQ ID NO: 485593 - RNA, 19 nt, Artificial Sequence
  Description of Artificial Sequence: Synthetic oligonucleotide
ggaccagagaaacugugcc

SEQ ID NO: 485594 - RNA, 19 nt, Artificial Sequence
  Description of Artificial Sequence: Synthetic oligonucleotide
gauuaccagacgucaucug

SEQ ID NO: 485595 - RNA, 19 nt, Artificial Sequence
  Description of Artificial Sequence: Synthetic oligonucleotide
gaauaggugauggcugggc

SEQ ID NO: 485596 - RNA, 19 nt, Artificial Sequence
  Description of Artificial Sequence: Synthetic oligonucleotide
gauucuguucccgucucug

SEQ ID NO: 485597 - RNA, 19 nt, Artificial Sequence
  Description of Artificial Sequence: Synthetic oligonucleotide
gaugggguguagaggagag

SEQ ID NO: 485598 - RNA, 19 nt, Artificial Sequence
  Description of Artificial Sequence: Synthetic oligonucleotide
aucgaguaugcagauggag

SEQ ID NO: 485599 - RNA, 19 nt, Artificial Sequence
  Description of Artificial Sequence: Synthetic oligonucleotide
ccuauucucuuccaguugc

SEQ ID NO: 485600 - RNA, 19 nt, Artificial Sequence
  Description of Artificial Sequence: Synthetic oligonucleotide
uaggaucccgaguaacucu

SEQ ID NO: 485601 - RNA, 19 nt, Artificial Sequence
  Description of Artificial Sequence: Synthetic oligonucleotide
gauugcuuguccacauuug

SEQ ID NO: 485602 - RNA, 19 nt, Artificial Sequence
  Description of Artificial Sequence: Synthetic oligonucleotide
gccuagauugaauagguga

SEQ ID NO: 485603 - RNA, 19 nt, Artificial Sequence
  Description of Artificial Sequence: Synthetic oligonucleotide
uuaggaucccgaguaacuc

SEQ ID NO: 485604 - RNA, 19 nt, Artificial Sequence
  Description of Artificial Sequence: Synthetic oligonucleotide
uguuaggaucccgaguaac

SEQ ID NO: 485605 - RNA, 19 nt, Artificial Sequence
  Description of Artificial Sequence: Synthetic oligonucleotide
cuagauugaauaggugaug

SEQ ID NO: 485606 - RNA, 19 nt, Artificial Sequence
  Description of Artificial Sequence: Synthetic oligonucleotide
aggcagcuaauaugauuac

SEQ ID NO: 485607 - RNA, 19 nt, Artificial Sequence
  Description of Artificial Sequence: Synthetic oligonucleotide
uuuguucgagcgauguauu

SEQ ID NO: 485608 - RNA, 19 nt, Artificial Sequence
  Description of Artificial Sequence: Synthetic oligonucleotide
gaaacugugccuagauuga

SEQ ID NO: 485609 - RNA, 19 nt, Artificial Sequence
  Description of Artificial Sequence: Synthetic oligonucleotide
cauaagguaggauccuuga

SEQ ID NO: 485610 - RNA, 19 nt, Artificial Sequence
  Description of Artificial Sequence: Synthetic oligonucleotide
acucacuagaccacucagg

SEQ ID NO: 485611 - RNA, 19 nt, Artificial Sequence
  Description of Artificial Sequence: Synthetic oligonucleotide
cuccuaucgaguaugcaga

SEQ ID NO: 485612 - RNA, 19 nt, Artificial Sequence
  Description of Artificial Sequence: Synthetic oligonucleotide
cugugccuagauugaauag

SEQ ID NO: 485613 - RNA, 19 nt, Artificial Sequence
  Description of Artificial Sequence: Synthetic oligonucleotide
acucuucgaugguaauuuc

SEQ ID NO: 485614 - RNA, 19 nt, Artificial Sequence
  Description of Artificial Sequence: Synthetic oligonucleotide
cauucucuagggcugucug

SEQ ID NO: 485615 - RNA, 19 nt, Artificial Sequence
  Description of Artificial Sequence: Synthetic oligonucleotide
auaagguaggauccuugau

SEQ ID NO: 485616 - RNA, 19 nt, Artificial Sequence
  Description of Artificial Sequence: Synthetic oligonucleotide
accagacgucaucugguuc

SEQ ID NO: 485617 - RNA, 19 nt, Artificial Sequence
  Description of Artificial Sequence: Synthetic oligonucleotide
uacgaacuccuaucgagua

SEQ ID NO: 485618 - RNA, 19 nt, Artificial Sequence
  Description of Artificial Sequence: Synthetic oligonucleotide
cuuuaccauguccacaaga

SEQ ID NO: 485619 - RNA, 19 nt, Artificial Sequence
  Description of Artificial Sequence: Synthetic oligonucleotide
gaggcguacagaggaagag

SEQ ID NO: 485620 - RNA, 19 nt, Artificial Sequence
  Description of Artificial Sequence: Synthetic oligonucleotide
ugccuagauugaauaggug

SEQ ID NO: 485621 - RNA, 19 nt, Artificial Sequence
  Description of Artificial Sequence: Synthetic oligonucleotide
cagagucuggggaacuagc

SEQ ID NO: 485622 - RNA, 19 nt, Artificial Sequence
  Description of Artificial Sequence: Synthetic oligonucleotide
uaucgaguaugcagaugga

SEQ ID NO: 485623 - RNA, 19 nt, Artificial Sequence
  Description of Artificial Sequence: Synthetic oligonucleotide
acauuuggguagucguaug

SEQ ID NO: 485624 - RNA, 19 nt, Artificial Sequence
  Description of Artificial Sequence: Synthetic oligonucleotide
gguagucguaugaaauugg

SEQ ID NO: 485625 - RNA, 19 nt, Artificial Sequence
  Description of Artificial Sequence: Synthetic oligonucleotide
uggguagucguaugaaauu

SEQ ID NO: 485626 - RNA, 19 nt, Artificial Sequence
  Description of Artificial Sequence: Synthetic oligonucleotide
uauuuguucgagcgaugua

SEQ ID NO: 485627 - RNA, 19 nt, Artificial Sequence
  Description of Artificial Sequence: Synthetic oligonucleotide
ggcuuugacagacucuagc

SEQ ID NO: 485628 - RNA, 19 nt, Artificial Sequence
  Description of Artificial Sequence: Synthetic oligonucleotide
cgaugguaauuucugaacg

SEQ ID NO: 485629 - RNA, 19 nt, Artificial Sequence
  Description of Artificial Sequence: Synthetic oligonucleotide
ucacuagaccacucaggga

SEQ ID NO: 485630 - RNA, 19 nt, Artificial Sequence
  Description of Artificial Sequence: Synthetic oligonucleotide
agcucuuaucugcacuuga

SEQ ID NO: 485631 - RNA, 19 nt, Artificial Sequence
  Description of Artificial Sequence: Synthetic oligonucleotide
auucaagaaauccccucuu

SEQ ID NO: 485632 - RNA, 19 nt, Artificial Sequence
  Description of Artificial Sequence: Synthetic oligonucleotide
aucuaaaaggugguucaca

SEQ ID NO: 485633 - RNA, 19 nt, Artificial Sequence
  Description of Artificial Sequence: Synthetic oligonucleotide
uagauucuguucccgucuc

SEQ ID NO: 485634 - RNA, 19 nt, Artificial Sequence
  Description of Artificial Sequence: Synthetic oligonucleotide
uguucccgucucugaauag

SEQ ID NO: 485635 - RNA, 19 nt, Artificial Sequence
  Description of Artificial Sequence: Synthetic oligonucleotide
aguaacucuucgaugguaa

SEQ ID NO: 485636 - RNA, 19 nt, Artificial Sequence
  Description of Artificial Sequence: Synthetic oligonucleotide
gauuuacugaguuccuccu

SEQ ID NO: 485637 - RNA, 19 nt, Artificial Sequence
  Description of Artificial Sequence: Synthetic oligonucleotide
gaacuggaagcugugcuuc

SEQ ID NO: 485638 - RNA, 19 nt, Artificial Sequence
  Description of Artificial Sequence: Synthetic oligonucleotide
guuauacggucuaggagac

SEQ ID NO: 485639 - RNA, 19 nt, Artificial Sequence
  Description of Artificial Sequence: Synthetic oligonucleotide
aacgcuuuggacacaucau

SEQ ID NO: 485640 - RNA, 19 nt, Artificial Sequence
  Description of Artificial Sequence: Synthetic oligonucleotide
aguaaucacucaucucuuu

SEQ ID NO: 485641 - RNA, 19 nt, Artificial Sequence
  Description of Artificial Sequence: Synthetic oligonucleotide
ucugugcuggaugauuuuc

SEQ ID NO: 485642 - RNA, 19 nt, Artificial Sequence
  Description of Artificial Sequence: Synthetic oligonucleotide
uguaaucuacccagaccuu

SEQ ID NO: 485643 - RNA, 19 nt, Artificial Sequence
  Description of Artificial Sequence: Synthetic oligonucleotide
gaacgccuuuuccaagcgc

SEQ ID NO: 485644 - RNA, 19 nt, Artificial Sequence
  Description of Artificial Sequence: Synthetic oligonucleotide
uuguucgagcgauguauuc

SEQ ID NO: 485645 - RNA, 19 nt, Artificial Sequence
  Description of Artificial Sequence: Synthetic oligonucleotide
uauccccauugugaggugc

SEQ ID NO: 485646 - RNA, 19 nt, Artificial Sequence
  Description of Artificial Sequence: Synthetic oligonucleotide
accucuaagcaaaucuaug

SEQ ID NO: 485647 - RNA, 19 nt, Artificial Sequence
  Description of Artificial Sequence: Synthetic oligonucleotide
uuauacggucuaggagacg

SEQ ID NO: 485648 - RNA, 19 nt, Artificial Sequence
  Description of Artificial Sequence: Synthetic oligonucleotide
cauuuggguagucguauga

SEQ ID NO: 485649 - RNA, 19 nt, Artificial Sequence
  Description of Artificial Sequence: Synthetic oligonucleotide
guucccgucucugaauagc

SEQ ID NO: 485650 - RNA, 19 nt, Artificial Sequence
  Description of Artificial Sequence: Synthetic oligonucleotide
uuguuuugacauugccaaa

SEQ ID NO: 485651 - RNA, 19 nt, Artificial Sequence
  Description of Artificial Sequence: Synthetic oligonucleotide
uugccacucacuagaccac

SEQ ID NO: 485652 - RNA, 19 nt, Artificial Sequence
  Description of Artificial Sequence: Synthetic oligonucleotide
gacguaaguucucauuccu

SEQ ID NO: 485653 - RNA, 19 nt, Artificial Sequence
  Description of Artificial Sequence: Synthetic oligonucleotide
gguggaguccuucugcuuc

SEQ ID NO: 485654 - RNA, 19 nt, Artificial Sequence
  Description of Artificial Sequence: Synthetic oligonucleotide
gggaacuagccucugccgc

SEQ ID NO: 485655 - RNA, 19 nt, Artificial Sequence
  Description of Artificial Sequence: Synthetic oligonucleotide
cuuccuccguucuuucaug

SEQ ID NO: 485656 - RNA, 19 nt, Artificial Sequence
  Description of Artificial Sequence: Synthetic oligonucleotide
cuucgaugguaauuucuga

SEQ ID NO: 485657 - RNA, 19 nt, Artificial Sequence
  Description of Artificial Sequence: Synthetic oligonucleotide
ugucacuaggugucaucgu

SEQ ID NO: 485658 - RNA, 19 nt, Artificial Sequence
  Description of Artificial Sequence: Synthetic oligonucleotide
uuccuccguucuuucaugu

SEQ ID NO: 485659 - RNA, 19 nt, Artificial Sequence
  Description of Artificial Sequence: Synthetic oligonucleotide
gauuuuggaugggguguag

SEQ ID NO: 485660 - RNA, 19 nt, Artificial Sequence
  Description of Artificial Sequence: Synthetic oligonucleotide
gugucaucguguccacuag

SEQ ID NO: 485661 - RNA, 19 nt, Artificial Sequence
  Description of Artificial Sequence: Synthetic oligonucleotide
cuaggagacguaaguucuc

SEQ ID NO: 485662 - RNA, 19 nt, Artificial Sequence
  Description of Artificial Sequence: Synthetic oligonucleotide
caaagauugcuuguccaca

SEQ ID NO: 485663 - RNA, 19 nt, Artificial Sequence
  Description of Artificial Sequence: Synthetic oligonucleotide
gugaguaaucacucaucuc

SEQ ID NO: 485664 - RNA, 19 nt, Artificial Sequence
  Description of Artificial Sequence: Synthetic oligonucleotide
cauucaagaaauccccucu

SEQ ID NO: 485665 - RNA, 19 nt, Artificial Sequence
  Description of Artificial Sequence: Synthetic oligonucleotide
guagugaguaaucacucau

SEQ ID NO: 485666 - RNA, 19 nt, Artificial Sequence
  Description of Artificial Sequence: Synthetic oligonucleotide
cacuaggugucaucguguc

SEQ ID NO: 485667 - RNA, 19 nt, Artificial Sequence
  Description of Artificial Sequence: Synthetic oligonucleotide
acucauguuaggaucccga

SEQ ID NO: 485668 - RNA, 19 nt, Artificial Sequence
  Description of Artificial Sequence: Synthetic oligonucleotide
auuuggguagucguaugaa

SEQ ID NO: 485669 - RNA, 19 nt, Artificial Sequence
  Description of Artificial Sequence: Synthetic oligonucleotide
ggguagucguaugaaauug

SEQ ID NO: 485670 - RNA, 19 nt, Artificial Sequence
  Description of Artificial Sequence: Synthetic oligonucleotide
aacuccuaucgaguaugca

SEQ ID NO: 485671 - RNA, 19 nt, Artificial Sequence
  Description of Artificial Sequence: Synthetic oligonucleotide
uacggucuaggagacguaa

SEQ ID NO: 485672 - RNA, 19 nt, Artificial Sequence
  Description of Artificial Sequence: Synthetic oligonucleotide
uccuccguucuuucaugug

SEQ ID NO: 485673 - RNA, 19 nt, Artificial Sequence
  Description of Artificial Sequence: Synthetic oligonucleotide
uccuaucgaguaugcagau

SEQ ID NO: 485674 - RNA, 19 nt, Artificial Sequence
  Description of Artificial Sequence: Synthetic oligonucleotide
ucguguccacuagugagcu

SEQ ID NO: 485675 - RNA, 19 nt, Artificial Sequence
  Description of Artificial Sequence: Synthetic oligonucleotide
gcaauguguaaucuaccca

SEQ ID NO: 485676 - RNA, 19 nt, Artificial Sequence
  Description of Artificial Sequence: Synthetic oligonucleotide
gcagauggaggacucuuug

SEQ ID NO: 485677 - RNA, 19 nt, Artificial Sequence
  Description of Artificial Sequence: Synthetic oligonucleotide
cagugcuacaguaugcucu

SEQ ID NO: 485678 - RNA, 19 nt, Artificial Sequence
  Description of Artificial Sequence: Synthetic oligonucleotide
auuuuggaugggguguaga

SEQ ID NO: 485679 - RNA, 19 nt, Artificial Sequence
  Description of Artificial Sequence: Synthetic oligonucleotide
aacugugccuagauugaau

SEQ ID NO: 485680 - RNA, 19 nt, Artificial Sequence
  Description of Artificial Sequence: Synthetic oligonucleotide
gaacuccuaucgaguaugc

SEQ ID NO: 485681 - RNA, 19 nt, Artificial Sequence
  Description of Artificial Sequence: Synthetic oligonucleotide
ggggaacuagccucugccg

SEQ ID NO: 485682 - RNA, 19 nt, Artificial Sequence
  Description of Artificial Sequence: Synthetic oligonucleotide
cauacgauuuacagauuua

SEQ ID NO: 485683 - RNA, 19 nt, Artificial Sequence
  Description of Artificial Sequence: Synthetic oligonucleotide
acugcccauaaacgcuuug

SEQ ID NO: 485684 - RNA, 19 nt, Artificial Sequence
  Description of Artificial Sequence: Synthetic oligonucleotide
caaucauucuccgcuccug

SEQ ID NO: 485685 - RNA, 19 nt, Artificial Sequence
  Description of Artificial Sequence: Synthetic oligonucleotide
cgauuuacagauuuacuga

SEQ ID NO: 485686 - RNA, 19 nt, Artificial Sequence
  Description of Artificial Sequence: Synthetic oligonucleotide
gccguugcauuucaaacuc

SEQ ID NO: 485687 - RNA, 19 nt, Artificial Sequence
  Description of Artificial Sequence: Synthetic oligonucleotide
auccuugauuuaacugcac

SEQ ID NO: 485688 - RNA, 19 nt, Artificial Sequence
  Description of Artificial Sequence: Synthetic oligonucleotide
ucuagagcuucuugccguu

SEQ ID NO: 485689 - RNA, 19 nt, Artificial Sequence
  Description of Artificial Sequence: Synthetic oligonucleotide
ggcccuuuaacuguguaga

SEQ ID NO: 485690 - RNA, 19 nt, Artificial Sequence
  Description of Artificial Sequence: Synthetic oligonucleotide
caccaugaguugauuuguc

SEQ ID NO: 485691 - RNA, 19 nt, Artificial Sequence
  Description of Artificial Sequence: Synthetic oligonucleotide
caugucuauccauggaacu

SEQ ID NO: 485692 - RNA, 19 nt, Artificial Sequence
  Description of Artificial Sequence: Synthetic oligonucleotide
cuccguucuuucaugugga

SEQ ID NO: 485693 - RNA, 19 nt, Artificial Sequence
  Description of Artificial Sequence: Synthetic oligonucleotide
guaugaaauuggucuggaa

SEQ ID NO: 485694 - RNA, 19 nt, Artificial Sequence
  Description of Artificial Sequence: Synthetic oligonucleotide
uucgagcgauguauucauc

SEQ ID NO: 485695 - RNA, 19 nt, Artificial Sequence
  Description of Artificial Sequence: Synthetic oligonucleotide
gaccagagaaacugugccu

SEQ ID NO: 485696 - RNA, 19 nt, Artificial Sequence
  Description of Artificial Sequence: Synthetic oligonucleotide
uucuuucaguagugaguaa

SEQ ID NO: 485697 - RNA, 19 nt, Artificial Sequence
  Description of Artificial Sequence: Synthetic oligonucleotide
gugaggugccaucuugcca

SEQ ID NO: 485698 - RNA, 19 nt, Artificial Sequence
  Description of Artificial Sequence: Synthetic oligonucleotide
agcgauguauucauccuuu

SEQ ID NO: 485699 - RNA, 19 nt, Artificial Sequence
  Description of Artificial Sequence: Synthetic oligonucleotide
caguaugcucugcuuucug

SEQ ID NO: 485700 - RNA, 19 nt, Artificial Sequence
  Description of Artificial Sequence: Synthetic oligonucleotide
gagcucuuaucugcacuug

SEQ ID NO: 485701 - RNA, 19 nt, Artificial Sequence
  Description of Artificial Sequence: Synthetic oligonucleotide
uaccagacgucaucugguu

SEQ ID NO: 485702 - RNA, 19 nt, Artificial Sequence
  Description of Artificial Sequence: Synthetic oligonucleotide
ucucuaccucuaagcaaau

SEQ ID NO: 485703 - RNA, 19 nt, Artificial Sequence
  Description of Artificial Sequence: Synthetic oligonucleotide
cucuucgaugguaauuucu

SEQ ID NO: 485704 - RNA, 19 nt, Artificial Sequence
  Description of Artificial Sequence: Synthetic oligonucleotide
uuuucaccaugaguugauu

SEQ ID NO: 485705 - RNA, 19 nt, Artificial Sequence
  Description of Artificial Sequence: Synthetic oligonucleotide
agccucacuuuuauuuucu

SEQ ID NO: 485706 - RNA, 19 nt, Artificial Sequence
  Description of Artificial Sequence: Synthetic oligonucleotide
cuaaaaggugguucacacu

SEQ ID NO: 485707 - RNA, 19 nt, Artificial Sequence
  Description of Artificial Sequence: Synthetic oligonucleotide
guaugcagauggaggacuc

SEQ ID NO: 485708 - RNA, 19 nt, Artificial Sequence
  Description of Artificial Sequence: Synthetic oligonucleotide
cuuucauguggaguuccca

SEQ ID NO: 485709 - RNA, 19 nt, Artificial Sequence
  Description of Artificial Sequence: Synthetic oligonucleotide
cuacgaacuccuaucgagu

SEQ ID NO: 485710 - RNA, 19 nt, Artificial Sequence
  Description of Artificial Sequence: Synthetic oligonucleotide
guucgagcgauguauucau

SEQ ID NO: 485711 - RNA, 19 nt, Artificial Sequence
  Description of Artificial Sequence: Synthetic oligonucleotide
ugccacucacuagaccacu

SEQ ID NO: 485712 - RNA, 19 nt, Artificial Sequence
  Description of Artificial Sequence: Synthetic oligonucleotide
guagucguaugaaauuggu

SEQ ID NO: 485713 - RNA, 19 nt, Artificial Sequence
  Description of Artificial Sequence: Synthetic oligonucleotide
gcuguuguccugucaggac

SEQ ID NO: 485714 - RNA, 19 nt, Artificial Sequence
  Description of Artificial Sequence: Synthetic oligonucleotide
acggucuaggagacguaag

SEQ ID NO: 485715 - RNA, 19 nt, Artificial Sequence
  Description of Artificial Sequence: Synthetic oligonucleotide
gcaucguauucuaauaucu

SEQ ID NO: 485716 - RNA, 19 nt, Artificial Sequence
  Description of Artificial Sequence: Synthetic oligonucleotide
ccuucgaggccgugaagcc

SEQ ID NO: 485717 - RNA, 19 nt, Artificial Sequence
  Description of Artificial Sequence: Synthetic oligonucleotide
uuccaucuaaaaggugguu

SEQ ID NO: 485718 - RNA, 19 nt, Artificial Sequence
  Description of Artificial Sequence: Synthetic oligonucleotide
gugccuagauugaauaggu

SEQ ID NO: 485719 - RNA, 19 nt, Artificial Sequence
  Description of Artificial Sequence: Synthetic oligonucleotide
ccgcuguauuugcauaagg

SEQ ID NO: 485720 - RNA, 19 nt, Artificial Sequence
  Description of Artificial Sequence: Synthetic oligonucleotide
gcugaguuauacggucuag

SEQ ID NO: 485721 - RNA, 19 nt, Artificial Sequence
  Description of Artificial Sequence: Synthetic oligonucleotide
guauccccauugugaggug

SEQ ID NO: 485722 - RNA, 19 nt, Artificial Sequence
  Description of Artificial Sequence: Synthetic oligonucleotide
cccgucucugaauagccuc

SEQ ID NO: 485723 - RNA, 19 nt, Artificial Sequence
  Description of Artificial Sequence: Synthetic oligonucleotide
gacucuagcuccagcucaa

SEQ ID NO: 485724 - RNA, 19 nt, Artificial Sequence
  Description of Artificial Sequence: Synthetic oligonucleotide
ugccguucauucugccuuu

SEQ ID NO: 485725 - RNA, 19 nt, Artificial Sequence
  Description of Artificial Sequence: Synthetic oligonucleotide
uccccauugugaggugcca

SEQ ID NO: 485726 - RNA, 19 nt, Artificial Sequence
  Description of Artificial Sequence: Synthetic oligonucleotide
ccuagauugaauaggugau

SEQ ID NO: 485727 - RNA, 19 nt, Artificial Sequence
  Description of Artificial Sequence: Synthetic oligonucleotide
aggaucccgaguaacucuu

SEQ ID NO: 485728 - RNA, 19 nt, Artificial Sequence
  Description of Artificial Sequence: Synthetic oligonucleotide
uagggcugucugaguuugu

SEQ ID NO: 485729 - RNA, 19 nt, Artificial Sequence
  Description of Artificial Sequence: Synthetic oligonucleotide
acacugcccauaaacgcuu

SEQ ID NO: 485730 - RNA, 19 nt, Artificial Sequence
  Description of Artificial Sequence: Synthetic oligonucleotide
acguaaguucucauuccua

SEQ ID NO: 485731 - RNA, 19 nt, Artificial Sequence
  Description of Artificial Sequence: Synthetic oligonucleotide
gaggccgugaagccacacu

SEQ ID NO: 485732 - RNA, 19 nt, Artificial Sequence
  Description of Artificial Sequence: Synthetic oligonucleotide
guccuucgaggccgugaag

SEQ ID NO: 485733 - RNA, 19 nt, Artificial Sequence
  Description of Artificial Sequence: Synthetic oligonucleotide
acuagaccacucagggaau

SEQ ID NO: 485734 - RNA, 19 nt, Artificial Sequence
  Description of Artificial Sequence: Synthetic oligonucleotide
uucuaauaucuggcccuuu

SEQ ID NO: 485735 - RNA, 19 nt, Artificial Sequence
  Description of Artificial Sequence: Synthetic oligonucleotide
cuucgaggccgugaagcca

SEQ ID NO: 485736 - RNA, 19 nt, Artificial Sequence
  Description of Artificial Sequence: Synthetic oligonucleotide
uccccucuuguauccccau

SEQ ID NO: 485737 - RNA, 19 nt, Artificial Sequence
  Description of Artificial Sequence: Synthetic oligonucleotide
ccguugcauuucaaacucc

SEQ ID NO: 485738 - RNA, 19 nt, Artificial Sequence
  Description of Artificial Sequence: Synthetic oligonucleotide
ggaacuagccucugccgcu

SEQ ID NO: 485739 - RNA, 19 nt, Artificial Sequence
  Description of Artificial Sequence: Synthetic oligonucleotide
ccuugugcuccagugcuac

SEQ ID NO: 485740 - RNA, 19 nt, Artificial Sequence
  Description of Artificial Sequence: Synthetic oligonucleotide
ggcguacagaggaagaggu

SEQ ID NO: 485741 - RNA, 19 nt, Artificial Sequence
  Description of Artificial Sequence: Synthetic oligonucleotide
ccagacgucaucugguucu

SEQ ID NO: 485742 - RNA, 19 nt, Artificial Sequence
  Description of Artificial Sequence: Synthetic oligonucleotide
ggagacguaaguucucauu

SEQ ID NO: 485743 - RNA, 19 nt, Artificial Sequence
  Description of Artificial Sequence: Synthetic oligonucleotide
gccgcuguauuugcauaag

SEQ ID NO: 485744 - RNA, 19 nt, Artificial Sequence
  Description of Artificial Sequence: Synthetic oligonucleotide
ggcugaguuauacggucua

SEQ ID NO: 485745 - RNA, 19 nt, Artificial Sequence
  Description of Artificial Sequence: Synthetic oligonucleotide
cucugccgcuguauuugca

SEQ ID NO: 485746 - RNA, 19 nt, Artificial Sequence
  Description of Artificial Sequence: Synthetic oligonucleotide
ggccgugaagccacacugc

SEQ ID NO: 485747 - RNA, 19 nt, Artificial Sequence
  Description of Artificial Sequence: Synthetic oligonucleotide
ccuaucgaguaugcagaug

SEQ ID NO: 485748 - RNA, 19 nt, Artificial Sequence
  Description of Artificial Sequence: Synthetic oligonucleotide
cucucuuacuuuggcuuua

SEQ ID NO: 485749 - RNA, 19 nt, Artificial Sequence
  Description of Artificial Sequence: Synthetic oligonucleotide
ccgucucugaauagccuca

SEQ ID NO: 485750 - RNA, 19 nt, Artificial Sequence
  Description of Artificial Sequence: Synthetic oligonucleotide
ccacucacuagaccacuca

SEQ ID NO: 485751 - RNA, 19 nt, Artificial Sequence
  Description of Artificial Sequence: Synthetic oligonucleotide
gcuacaguaugcucugcuu

SEQ ID NO: 485752 - RNA, 19 nt, Artificial Sequence
  Description of Artificial Sequence: Synthetic oligonucleotide
gggcuuugacagacucuag

SEQ ID NO: 485753 - RNA, 19 nt, Artificial Sequence
  Description of Artificial Sequence: Synthetic oligonucleotide
ccucuugcaaaugaauagu

SEQ ID NO: 485754 - RNA, 19 nt, Artificial Sequence
  Description of Artificial Sequence: Synthetic oligonucleotide
auacggucuaggagacgua

SEQ ID NO: 485755 - RNA, 19 nt, Artificial Sequence
  Description of Artificial Sequence: Synthetic oligonucleotide
ccacaagaggcuguucaga

SEQ ID NO: 485756 - RNA, 19 nt, Artificial Sequence
  Description of Artificial Sequence: Synthetic oligonucleotide
ggucuaggagacguaaguu

SEQ ID NO: 485757 - RNA, 19 nt, Artificial Sequence
  Description of Artificial Sequence: Synthetic oligonucleotide
gucugugcuggaugauuuu

SEQ ID NO: 485758 - RNA, 19 nt, Artificial Sequence
  Description of Artificial Sequence: Synthetic oligonucleotide
gcguacagaggaagagguc

SEQ ID NO: 485759 - RNA, 19 nt, Artificial Sequence
  Description of Artificial Sequence: Synthetic oligonucleotide
cguaugaaauuggucugga

SEQ ID NO: 485760 - RNA, 19 nt, Artificial Sequence
  Description of Artificial Sequence: Synthetic oligonucleotide
cauugugaggugccaucuu

SEQ ID NO: 485761 - RNA, 19 nt, Artificial Sequence
  Description of Artificial Sequence: Synthetic oligonucleotide
gcaccugccauaaccuugu

SEQ ID NO: 485762 - RNA, 19 nt, Artificial Sequence
  Description of Artificial Sequence: Synthetic oligonucleotide
ggagaggcguacagaggaa

SEQ ID NO: 485763 - RNA, 19 nt, Artificial Sequence
  Description of Artificial Sequence: Synthetic oligonucleotide
gccacucacuagaccacuc

SEQ ID NO: 485764 - RNA, 19 nt, Artificial Sequence
  Description of Artificial Sequence: Synthetic oligonucleotide
ggaucccgaguaacucuuc

SEQ ID NO: 485765 - RNA, 19 nt, Artificial Sequence
  Description of Artificial Sequence: Synthetic oligonucleotide
gcucuuaucugcacuugau

SEQ ID NO: 485766 - RNA, 19 nt, Artificial Sequence
  Description of Artificial Sequence: Synthetic oligonucleotide
ggauuucggaauacuucau

SEQ ID NO: 485767 - RNA, 19 nt, Artificial Sequence
  Description of Artificial Sequence: Synthetic oligonucleotide
ccucuuguauccccauugu

SEQ ID NO: 485768 - RNA, 19 nt, Artificial Sequence
  Description of Artificial Sequence: Synthetic oligonucleotide
gccguucauucugccuuug

SEQ ID NO: 485769 - RNA, 19 nt, Artificial Sequence
  Description of Artificial Sequence: Synthetic oligonucleotide
ggacuagaagaggcaacau

SEQ ID NO: 485770 - RNA, 19 nt, Artificial Sequence
  Description of Artificial Sequence: Synthetic oligonucleotide
cggucuaggagacguaagu

SEQ ID NO: 485771 - RNA, 19 nt, Artificial Sequence
  Description of Artificial Sequence: Synthetic oligonucleotide
ccugaaugguuaaccuuuu

SEQ ID NO: 485772 - RNA, 19 nt, Artificial Sequence
  Description of Artificial Sequence: Synthetic oligonucleotide
ggcaugucaccagcagggu

SEQ ID NO: 485773 - RNA, 19 nt, Artificial Sequence
  Description of Artificial Sequence: Synthetic oligonucleotide
ccguucuuucauguggagu

SEQ ID NO: 485774 - RNA, 19 nt, Artificial Sequence
  Description of Artificial Sequence: Synthetic oligonucleotide
cacugcccauaaacgcuuu

SEQ ID NO: 485775 - RNA, 19 nt, Artificial Sequence
  Description of Artificial Sequence: Synthetic oligonucleotide
cgaguaacucuucgauggu

SEQ ID NO: 485776 - RNA, 19 nt, Artificial Sequence
  Description of Artificial Sequence: Synthetic oligonucleotide
ccguucauucugccuuugu

SEQ ID NO: 485777 - RNA, 19 nt, Artificial Sequence
  Description of Artificial Sequence: Synthetic oligonucleotide
aaugugauacuucaugagg

SEQ ID NO: 485778 - RNA, 19 nt, Artificial Sequence
  Description of Artificial Sequence: Synthetic oligonucleotide
acugaaacaacucuucgcc

SEQ ID NO: 485779 - RNA, 19 nt, Artificial Sequence
  Description of Artificial Sequence: Synthetic oligonucleotide
agaaauacagcacagcguc

SEQ ID NO: 485780 - RNA, 19 nt, Artificial Sequence
  Description of Artificial Sequence: Synthetic oligonucleotide
uguaguucuucuaucaggg

SEQ ID NO: 485781 - RNA, 19 nt, Artificial Sequence
  Description of Artificial Sequence: Synthetic oligonucleotide
auaugaguuuuccuaaugc

SEQ ID NO: 485782 - RNA, 19 nt, Artificial Sequence
  Description of Artificial Sequence: Synthetic oligonucleotide
guugcauucauucaguacc

SEQ ID NO: 485783 - RNA, 19 nt, Artificial Sequence
  Description of Artificial Sequence: Synthetic oligonucleotide
aaagauaagggcaagagau

SEQ ID NO: 485784 - RNA, 19 nt, Artificial Sequence
  Description of Artificial Sequence: Synthetic oligonucleotide
uucacauuccagcugaacc

SEQ ID NO: 485785 - RNA, 19 nt, Artificial Sequence
  Description of Artificial Sequence: Synthetic oligonucleotide
agaccuuagaccuuccucg

SEQ ID NO: 485786 - RNA, 19 nt, Artificial Sequence
  Description of Artificial Sequence: Synthetic oligonucleotide
uguggguuugauuuaaggc

SEQ ID NO: 485787 - RNA, 19 nt, Artificial Sequence
  Description of Artificial Sequence: Synthetic oligonucleotide
agauacgucagccagcaag

SEQ ID NO: 485788 - RNA, 19 nt, Artificial Sequence
  Description of Artificial Sequence: Synthetic oligonucleotide
uccgucaaaaggcacacag

SEQ ID NO: 485789 - RNA, 19 nt, Artificial Sequence
  Description of Artificial Sequence: Synthetic oligonucleotide
acggauuccauugaguagc

SEQ ID NO: 485790 - RNA, 19 nt, Artificial Sequence
  Description of Artificial Sequence: Synthetic oligonucleotide
ucuaggggaucacauaaag

SEQ ID NO: 485791 - RNA, 19 nt, Artificial Sequence
  Description of Artificial Sequence: Synthetic oligonucleotide
ucaaugugauacuucauga

SEQ ID NO: 485792 - RNA, 19 nt, Artificial Sequence
  Description of Artificial Sequence: Synthetic oligonucleotide
uuauguaguucuucuauca

SEQ ID NO: 485793 - RNA, 19 nt, Artificial Sequence
  Description of Artificial Sequence: Synthetic oligonucleotide
uacuucaugaggaagccga

SEQ ID NO: 485794 - RNA, 19 nt, Artificial Sequence
  Description of Artificial Sequence: Synthetic oligonucleotide
auacuaaaauacuuuugag

SEQ ID NO: 485795 - RNA, 19 nt, Artificial Sequence
  Description of Artificial Sequence: Synthetic oligonucleotide
auguaguucuucuaucagg

SEQ ID NO: 485796 - RNA, 19 nt, Artificial Sequence
  Description of Artificial Sequence: Synthetic oligonucleotide
acaauuggccaucuccagc

SEQ ID NO: 485797 - RNA, 19 nt, Artificial Sequence
  Description of Artificial Sequence: Synthetic oligonucleotide
agauaagggcaagagaugg

SEQ ID NO: 485798 - RNA, 19 nt, Artificial Sequence
  Description of Artificial Sequence: Synthetic oligonucleotide
gguguugucaagaagagcc

SEQ ID NO: 485799 - RNA, 19 nt, Artificial Sequence
  Description of Artificial Sequence: Synthetic oligonucleotide
cugacaauuggccaucucc

SEQ ID NO: 485800 - RNA, 19 nt, Artificial Sequence
  Description of Artificial Sequence: Synthetic oligonucleotide
cauaaagccuuccuugccg

SEQ ID NO: 485801 - RNA, 19 nt, Artificial Sequence
  Description of Artificial Sequence: Synthetic oligonucleotide
acacuuaaugaguaggcug

SEQ ID NO: 485802 - RNA, 19 nt, Artificial Sequence
  Description of Artificial Sequence: Synthetic oligonucleotide
uuuccuaaugcaucagcag

SEQ ID NO: 485803 - RNA, 19 nt, Artificial Sequence
  Description of Artificial Sequence: Synthetic oligonucleotide
gcucuuaacagccauaacc

SEQ ID NO: 485804 - RNA, 19 nt, Artificial Sequence
  Description of Artificial Sequence: Synthetic oligonucleotide
ugacaauuggccaucucca

SEQ ID NO: 485805 - RNA, 19 nt, Artificial Sequence
  Description of Artificial Sequence: Synthetic oligonucleotide
ucagggaggauuuucuccc

SEQ ID NO: 485806 - RNA, 19 nt, Artificial Sequence
  Description of Artificial Sequence: Synthetic oligonucleotide
aaagauguggagcggaguu

SEQ ID NO: 485807 - RNA, 19 nt, Artificial Sequence
  Description of Artificial Sequence: Synthetic oligonucleotide
ugucacgucaggauggugu

SEQ ID NO: 485808 - RNA, 19 nt, Artificial Sequence
  Description of Artificial Sequence: Synthetic oligonucleotide
ugaaacaacucuucgcccu

SEQ ID NO: 485809 - RNA, 19 nt, Artificial Sequence
  Description of Artificial Sequence: Synthetic oligonucleotide
auguccugaaccucacugc

SEQ ID NO: 485810 - RNA, 19 nt, Artificial Sequence
  Description of Artificial Sequence: Synthetic oligonucleotide
ggaagaauauccuccaaag

SEQ ID NO: 485811 - RNA, 19 nt, Artificial Sequence
  Description of Artificial Sequence: Synthetic oligonucleotide
aaaguccuugcugcaaucg

SEQ ID NO: 485812 - RNA, 19 nt, Artificial Sequence
  Description of Artificial Sequence: Synthetic oligonucleotide
auggauaugaguuuuccua

SEQ ID NO: 485813 - RNA, 19 nt, Artificial Sequence
  Description of Artificial Sequence: Synthetic oligonucleotide
ucugccguggcauugcuga

SEQ ID NO: 485814 - RNA, 19 nt, Artificial Sequence
  Description of Artificial Sequence: Synthetic oligonucleotide
cuugccguaggcacaaggg

SEQ ID NO: 485815 - RNA, 19 nt, Artificial Sequence
  Description of Artificial Sequence: Synthetic oligonucleotide
aacaacucuucgcccugcc

SEQ ID NO: 485816 - RNA, 19 nt, Artificial Sequence
  Description of Artificial Sequence: Synthetic oligonucleotide
accggauuuccuuauguag

SEQ ID NO: 485817 - RNA, 19 nt, Artificial Sequence
  Description of Artificial Sequence: Synthetic oligonucleotide
ugguauacuaaaauacuuu

SEQ ID NO: 485818 - RNA, 19 nt, Artificial Sequence
  Description of Artificial Sequence: Synthetic oligonucleotide
gaaggauggagguuacgcc

SEQ ID NO: 485819 - RNA, 19 nt, Artificial Sequence
  Description of Artificial Sequence: Synthetic oligonucleotide
acuacgguauucuuguccu

SEQ ID NO: 485820 - RNA, 19 nt, Artificial Sequence
  Description of Artificial Sequence: Synthetic oligonucleotide
aauuccgacaccugcucgu

SEQ ID NO: 485821 - RNA, 19 nt, Artificial Sequence
  Description of Artificial Sequence: Synthetic oligonucleotide
uccuaaugcaucagcagcu

SEQ ID NO: 485822 - RNA, 19 nt, Artificial Sequence
  Description of Artificial Sequence: Synthetic oligonucleotide
agauccgaguauuauccuc

SEQ ID NO: 485823 - RNA, 19 nt, Artificial Sequence
  Description of Artificial Sequence: Synthetic oligonucleotide
aggagauccgaguauuauc

SEQ ID NO: 485824 - RNA, 19 nt, Artificial Sequence
  Description of Artificial Sequence: Synthetic oligonucleotide
uugguugguauacuaaaau

SEQ ID NO: 485825 - RNA, 19 nt, Artificial Sequence
  Description of Artificial Sequence: Synthetic oligonucleotide
agcggguccaccuugacgu

SEQ ID NO: 485826 - RNA, 19 nt, Artificial Sequence
  Description of Artificial Sequence: Synthetic oligonucleotide
uccugucucaaugugauac

SEQ ID NO: 485827 - RNA, 19 nt, Artificial Sequence
  Description of Artificial Sequence: Synthetic oligonucleotide
caaggauucggaucagggg

SEQ ID NO: 485828 - RNA, 19 nt, Artificial Sequence
  Description of Artificial Sequence: Synthetic oligonucleotide
caaugugauacuucaugag

SEQ ID NO: 485829 - RNA, 19 nt, Artificial Sequence
  Description of Artificial Sequence: Synthetic oligonucleotide
gagguuacgcccuuccuug

SEQ ID NO: 485830 - RNA, 19 nt, Artificial Sequence
  Description of Artificial Sequence: Synthetic oligonucleotide
augaguaggcuggagaguc

SEQ ID NO: 485831 - RNA, 19 nt, Artificial Sequence
  Description of Artificial Sequence: Synthetic oligonucleotide
uugacguggauggauauga

SEQ ID NO: 485832 - RNA, 19 nt, Artificial Sequence
  Description of Artificial Sequence: Synthetic oligonucleotide
gauacgucagccagcaagc

SEQ ID NO: 485833 - RNA, 19 nt, Artificial Sequence
  Description of Artificial Sequence: Synthetic oligonucleotide
uguuugccuguacagaguc

SEQ ID NO: 485834 - RNA, 19 nt, Artificial Sequence
  Description of Artificial Sequence: Synthetic oligonucleotide
uggauaugaguuuuccuaa

SEQ ID NO: 485835 - RNA, 19 nt, Artificial Sequence
  Description of Artificial Sequence: Synthetic oligonucleotide
cagacacuuaaugaguagg

SEQ ID NO: 485836 - RNA, 19 nt, Artificial Sequence
  Description of Artificial Sequence: Synthetic oligonucleotide
cacucaguccgauacacac

SEQ ID NO: 485837 - RNA, 19 nt, Artificial Sequence
  Description of Artificial Sequence: Synthetic oligonucleotide
cuaggggaucacauaaagc

SEQ ID NO: 485838 - RNA, 19 nt, Artificial Sequence
  Description of Artificial Sequence: Synthetic oligonucleotide
ucuuaacagccauaaccug

SEQ ID NO: 485839 - RNA, 19 nt, Artificial Sequence
  Description of Artificial Sequence: Synthetic oligonucleotide
ucuucagcgaccuucgguu

SEQ ID NO: 485840 - RNA, 19 nt, Artificial Sequence
  Description of Artificial Sequence: Synthetic oligonucleotide
gguugguauacuaaaauac

SEQ ID NO: 485841 - RNA, 19 nt, Artificial Sequence
  Description of Artificial Sequence: Synthetic oligonucleotide
guguggguuugauuuaagg

SEQ ID NO: 485842 - RNA, 19 nt, Artificial Sequence
  Description of Artificial Sequence: Synthetic oligonucleotide
aacaaagauguggagcgga

SEQ ID NO: 485843 - RNA, 19 nt, Artificial Sequence
  Description of Artificial Sequence: Synthetic oligonucleotide
ugguugguauacuaaaaua

SEQ ID NO: 485844 - RNA, 19 nt, Artificial Sequence
  Description of Artificial Sequence: Synthetic oligonucleotide
gacaauuggccaucuccag

SEQ ID NO: 485845 - RNA, 19 nt, Artificial Sequence
  Description of Artificial Sequence: Synthetic oligonucleotide
aaacaacucuucgcccugc

SEQ ID NO: 485846 - RNA, 19 nt, Artificial Sequence
  Description of Artificial Sequence: Synthetic oligonucleotide
cacuacgguauucuugucc

SEQ ID NO: 485847 - RNA, 19 nt, Artificial Sequence
  Description of Artificial Sequence: Synthetic oligonucleotide
aagccuuccuugccguagg

SEQ ID NO: 485848 - RNA, 19 nt, Artificial Sequence
  Description of Artificial Sequence: Synthetic oligonucleotide
acaugcucgccuuugcucu

SEQ ID NO: 485849 - RNA, 19 nt, Artificial Sequence
  Description of Artificial Sequence: Synthetic oligonucleotide
ggagauccgaguauuaucc

SEQ ID NO: 485850 - RNA, 19 nt, Artificial Sequence
  Description of Artificial Sequence: Synthetic oligonucleotide
uggguuugauuuaaggcuu

SEQ ID NO: 485851 - RNA, 19 nt, Artificial Sequence
  Description of Artificial Sequence: Synthetic oligonucleotide
ugccguaggcacaagggac

SEQ ID NO: 485852 - RNA, 19 nt, Artificial Sequence
  Description of Artificial Sequence: Synthetic oligonucleotide
cugaaacaacucuucgccc

SEQ ID NO: 485853 - RNA, 19 nt, Artificial Sequence
  Description of Artificial Sequence: Synthetic oligonucleotide
gaaacaacucuucgcccug

SEQ ID NO: 485854 - RNA, 19 nt, Artificial Sequence
  Description of Artificial Sequence: Synthetic oligonucleotide
aacucuucgcccugccuca

SEQ ID NO: 485855 - RNA, 19 nt, Artificial Sequence
  Description of Artificial Sequence: Synthetic oligonucleotide
uacgcccuuccuuggaagg

SEQ ID NO: 485856 - RNA, 19 nt, Artificial Sequence
  Description of Artificial Sequence: Synthetic oligonucleotide
caagaugacgggucagagc

SEQ ID NO: 485857 - RNA, 19 nt, Artificial Sequence
  Description of Artificial Sequence: Synthetic oligonucleotide
acacggauuccauugagua

SEQ ID NO: 485858 - RNA, 19 nt, Artificial Sequence
  Description of Artificial Sequence: Synthetic oligonucleotide
ggaucuuggagagugacug

SEQ ID NO: 485859 - RNA, 19 nt, Artificial Sequence
  Description of Artificial Sequence: Synthetic oligonucleotide
uacgguauucuuguccuug

SEQ ID NO: 485860 - RNA, 19 nt, Artificial Sequence
  Description of Artificial Sequence: Synthetic oligonucleotide
aggcgcacgcccuuguugg

SEQ ID NO: 485861 - RNA, 19 nt, Artificial Sequence
  Description of Artificial Sequence: Synthetic oligonucleotide
acgguauucuuguccuugg

SEQ ID NO: 485862 - RNA, 19 nt, Artificial Sequence
  Description of Artificial Sequence: Synthetic oligonucleotide
gaagccgaugccccgaauc

SEQ ID NO: 485863 - RNA, 19 nt, Artificial Sequence
  Description of Artificial Sequence: Synthetic oligonucleotide
gauccgaguauuauccuca

SEQ ID NO: 485864 - RNA, 19 nt, Artificial Sequence
  Description of Artificial Sequence: Synthetic oligonucleotide
uuccccaaggcacccagcu

SEQ ID NO: 485865 - RNA, 19 nt, Artificial Sequence
  Description of Artificial Sequence: Synthetic oligonucleotide
accacacggcucuuaacag

SEQ ID NO: 485866 - RNA, 19 nt, Artificial Sequence
  Description of Artificial Sequence: Synthetic oligonucleotide
uucagcgaccuucgguugc

SEQ ID NO: 485867 - RNA, 19 nt, Artificial Sequence
  Description of Artificial Sequence: Synthetic oligonucleotide
guccgauacacacacccug

SEQ ID NO: 485868 - RNA, 19 nt, Artificial Sequence
  Description of Artificial Sequence: Synthetic oligonucleotide
uguguggguuugauuuaag

SEQ ID NO: 485869 - RNA, 19 nt, Artificial Sequence
  Description of Artificial Sequence: Synthetic oligonucleotide
agaccuuccucgaggaugg

SEQ ID NO: 485870 - RNA, 19 nt, Artificial Sequence
  Description of Artificial Sequence: Synthetic oligonucleotide
uccagggcgaauuccgaca

SEQ ID NO: 485871 - RNA, 19 nt, Artificial Sequence
  Description of Artificial Sequence: Synthetic oligonucleotide
ggcguugucagcuugggca

SEQ ID NO: 485872 - RNA, 19 nt, Artificial Sequence
  Description of Artificial Sequence: Synthetic oligonucleotide
ucccacucauggcaauggg

SEQ ID NO: 485873 - RNA, 19 nt, Artificial Sequence
  Description of Artificial Sequence: Synthetic oligonucleotide
cauugaguagcucugugaa

SEQ ID NO: 485874 - RNA, 19 nt, Artificial Sequence
  Description of Artificial Sequence: Synthetic oligonucleotide
cacggauuccauugaguag

SEQ ID NO: 485875 - RNA, 19 nt, Artificial Sequence
  Description of Artificial Sequence: Synthetic oligonucleotide
ucgguugcauucauucagu

SEQ ID NO: 485876 - RNA, 19 nt, Artificial Sequence
  Description of Artificial Sequence: Synthetic oligonucleotide
ugguugguugguauacuaa

SEQ ID NO: 485877 - RNA, 19 nt, Artificial Sequence
  Description of Artificial Sequence: Synthetic oligonucleotide
ucaguuguguguggguuug

SEQ ID NO: 485878 - RNA, 19 nt, Artificial Sequence
  Description of Artificial Sequence: Synthetic oligonucleotide
gaacaaagauguggagcgg

SEQ ID NO: 485879 - RNA, 19 nt, Artificial Sequence
  Description of Artificial Sequence: Synthetic oligonucleotide
aaccggauuuccuuaugua

SEQ ID NO: 485880 - RNA, 19 nt, Artificial Sequence
  Description of Artificial Sequence: Synthetic oligonucleotide
uuacgcccuuccuuggaag

SEQ ID NO: 485881 - RNA, 19 nt, Artificial Sequence
  Description of Artificial Sequence: Synthetic oligonucleotide
ugcuuagcaggagugagau

SEQ ID NO: 485882 - RNA, 19 nt, Artificial Sequence
  Description of Artificial Sequence: Synthetic oligonucleotide
ugacguggauggauaugag

SEQ ID NO: 485883 - RNA, 19 nt, Artificial Sequence
  Description of Artificial Sequence: Synthetic oligonucleotide
gagcggguccaccuugacg

SEQ ID NO: 485884 - RNA, 19 nt, Artificial Sequence
  Description of Artificial Sequence: Synthetic oligonucleotide
ccaaggauucggaucaggg

SEQ ID NO: 485885 - RNA, 19 nt, Artificial Sequence
  Description of Artificial Sequence: Synthetic oligonucleotide
cucgucgcucuucugagac

SEQ ID NO: 485886 - RNA, 19 nt, Artificial Sequence
  Description of Artificial Sequence: Synthetic oligonucleotide
ggaaggauggagguuacgc

SEQ ID NO: 485887 - RNA, 19 nt, Artificial Sequence
  Description of Artificial Sequence: Synthetic oligonucleotide
aucaccccaagaugacggg

SEQ ID NO: 485888 - RNA, 19 nt, Artificial Sequence
  Description of Artificial Sequence: Synthetic oligonucleotide
gcauucauucaguaccucc

SEQ ID NO: 485889 - RNA, 19 nt, Artificial Sequence
  Description of Artificial Sequence: Synthetic oligonucleotide
agaugagaggaaagccagc

SEQ ID NO: 485890 - RNA, 19 nt, Artificial Sequence
  Description of Artificial Sequence: Synthetic oligonucleotide
agcgucccggcuuguagac

SEQ ID NO: 485891 - RNA, 19 nt, Artificial Sequence
  Description of Artificial Sequence: Synthetic oligonucleotide
ugaaccgguccccaaggau

SEQ ID NO: 485892 - RNA, 19 nt, Artificial Sequence
  Description of Artificial Sequence: Synthetic oligonucleotide
agaggcggaucccugacaa

SEQ ID NO: 485893 - RNA, 19 nt, Artificial Sequence
  Description of Artificial Sequence: Synthetic oligonucleotide
agcugaaccgguccccaag

SEQ ID NO: 485894 - RNA, 19 nt, Artificial Sequence
  Description of Artificial Sequence: Synthetic oligonucleotide
acagcgucccggcuuguag

SEQ ID NO: 485895 - RNA, 19 nt, Artificial Sequence
  Description of Artificial Sequence: Synthetic oligonucleotide
agcaugaccgcugggagga

SEQ ID NO: 485896 - RNA, 19 nt, Artificial Sequence
  Description of Artificial Sequence: Synthetic oligonucleotide
cucacuacgguauucuugu

SEQ ID NO: 485897 - RNA, 19 nt, Artificial Sequence
  Description of Artificial Sequence: Synthetic oligonucleotide
cucacucaguccgauacac

SEQ ID NO: 485898 - RNA, 19 nt, Artificial Sequence
  Description of Artificial Sequence: Synthetic oligonucleotide
gaagaggcggaucccugac

SEQ ID NO: 485899 - RNA, 19 nt, Artificial Sequence
  Description of Artificial Sequence: Synthetic oligonucleotide
agagcaucgccugccacag

SEQ ID NO: 485900 - RNA, 19 nt, Artificial Sequence
  Description of Artificial Sequence: Synthetic oligonucleotide
uuagcaggagugagaugac

SEQ ID NO: 485901 - RNA, 19 nt, Artificial Sequence
  Description of Artificial Sequence: Synthetic oligonucleotide
caccacacggcucuuaaca

SEQ ID NO: 485902 - RNA, 19 nt, Artificial Sequence
  Description of Artificial Sequence: Synthetic oligonucleotide
cuuagaccuuccucgagga

SEQ ID NO: 485903 - RNA, 19 nt, Artificial Sequence
  Description of Artificial Sequence: Synthetic oligonucleotide
uucccgcagcacuggaagg

SEQ ID NO: 485904 - RNA, 19 nt, Artificial Sequence
  Description of Artificial Sequence: Synthetic oligonucleotide
aagaggcggaucccugaca

SEQ ID NO: 485905 - RNA, 19 nt, Artificial Sequence
  Description of Artificial Sequence: Synthetic oligonucleotide
cacccggguauugacaggg

SEQ ID NO: 485906 - RNA, 19 nt, Artificial Sequence
  Description of Artificial Sequence: Synthetic oligonucleotide
aucacacggauuccauuga

SEQ ID NO: 485907 - RNA, 19 nt, Artificial Sequence
  Description of Artificial Sequence: Synthetic oligonucleotide
ggcgaauuccgacaccugc

SEQ ID NO: 485908 - RNA, 19 nt, Artificial Sequence
  Description of Artificial Sequence: Synthetic oligonucleotide
ucacucaguccgauacaca

SEQ ID NO: 485909 - RNA, 19 nt, Artificial Sequence
  Description of Artificial Sequence: Synthetic oligonucleotide
cuagcuuccggaccagauc

SEQ ID NO: 485910 - RNA, 19 nt, Artificial Sequence
  Description of Artificial Sequence: Synthetic oligonucleotide
ucgcuguaggcccucacua

SEQ ID NO: 485911 - RNA, 19 nt, Artificial Sequence
  Description of Artificial Sequence: Synthetic oligonucleotide
ccuuagaccuuccucgagg

SEQ ID NO: 485912 - RNA, 19 nt, Artificial Sequence
  Description of Artificial Sequence: Synthetic oligonucleotide
uaucagggccaguugguua

SEQ ID NO: 485913 - RNA, 19 nt, Artificial Sequence
  Description of Artificial Sequence: Synthetic oligonucleotide
gagugacugaaacaacucu

SEQ ID NO: 485914 - RNA, 19 nt, Artificial Sequence
  Description of Artificial Sequence: Synthetic oligonucleotide
gcagcuuucaggcgcacgc

SEQ ID NO: 485915 - RNA, 19 nt, Artificial Sequence
  Description of Artificial Sequence: Synthetic oligonucleotide
cagcaugaccgcugggagg

SEQ ID NO: 485916 - RNA, 19 nt, Artificial Sequence
  Description of Artificial Sequence: Synthetic oligonucleotide
uucaguuguguguggguuu

SEQ ID NO: 485917 - RNA, 19 nt, Artificial Sequence
  Description of Artificial Sequence: Synthetic oligonucleotide
gaugacgggucagagcauc

SEQ ID NO: 485918 - RNA, 19 nt, Artificial Sequence
  Description of Artificial Sequence: Synthetic oligonucleotide
accuuagaccuuccucgag

SEQ ID NO: 485919 - RNA, 19 nt, Artificial Sequence
  Description of Artificial Sequence: Synthetic oligonucleotide
gaaccacgggacuggaguc

SEQ ID NO: 485920 - RNA, 19 nt, Artificial Sequence
  Description of Artificial Sequence: Synthetic oligonucleotide
uuaaggcuuuggcucuggu

SEQ ID NO: 485921 - RNA, 19 nt, Artificial Sequence
  Description of Artificial Sequence: Synthetic oligonucleotide
cuuccgucaaaaggcacac

SEQ ID NO: 485922 - RNA, 19 nt, Artificial Sequence
  Description of Artificial Sequence: Synthetic oligonucleotide
agggcgaauuccgacaccu

SEQ ID NO: 485923 - RNA, 19 nt, Artificial Sequence
  Description of Artificial Sequence: Synthetic oligonucleotide
guccuuauuugcccaccag

SEQ ID NO: 485924 - RNA, 19 nt, Artificial Sequence
  Description of Artificial Sequence: Synthetic oligonucleotide
ugaggagauccgaguauua

SEQ ID NO: 485925 - RNA, 19 nt, Artificial Sequence
  Description of Artificial Sequence: Synthetic oligonucleotide
accguccagggcgaauucc

SEQ ID NO: 485926 - RNA, 19 nt, Artificial Sequence
  Description of Artificial Sequence: Synthetic oligonucleotide
ucacuggauggguucugca

SEQ ID NO: 485927 - RNA, 19 nt, Artificial Sequence
  Description of Artificial Sequence: Synthetic oligonucleotide
ucguugccuaugaaccgga

SEQ ID NO: 485928 - RNA, 19 nt, Artificial Sequence
  Description of Artificial Sequence: Synthetic oligonucleotide
cucugguugguugguauac

SEQ ID NO: 485929 - RNA, 19 nt, Artificial Sequence
  Description of Artificial Sequence: Synthetic oligonucleotide
agucaaugccagauacguc

SEQ ID NO: 485930 - RNA, 19 nt, Artificial Sequence
  Description of Artificial Sequence: Synthetic oligonucleotide
ggauggauaugaguuuucc

SEQ ID NO: 485931 - RNA, 19 nt, Artificial Sequence
  Description of Artificial Sequence: Synthetic oligonucleotide
gguugguugguauacuaaa

SEQ ID NO: 485932 - RNA, 19 nt, Artificial Sequence
  Description of Artificial Sequence: Synthetic oligonucleotide
gauccugucugccguggca

SEQ ID NO: 485933 - RNA, 19 nt, Artificial Sequence
  Description of Artificial Sequence: Synthetic oligonucleotide
agguuacgcccuuccuugg

SEQ ID NO: 485934 - RNA, 19 nt, Artificial Sequence
  Description of Artificial Sequence: Synthetic oligonucleotide
agccgaugccccgaauccc

SEQ ID NO: 485935 - RNA, 19 nt, Artificial Sequence
  Description of Artificial Sequence: Synthetic oligonucleotide
gguauacuaaaauacuuuu

SEQ ID NO: 485936 - RNA, 19 nt, Artificial Sequence
  Description of Artificial Sequence: Synthetic oligonucleotide
gaucuuggagagugacuga

SEQ ID NO: 485937 - RNA, 19 nt, Artificial Sequence
  Description of Artificial Sequence: Synthetic oligonucleotide
caucgccugccacagauga

SEQ ID NO: 485938 - RNA, 19 nt, Artificial Sequence
  Description of Artificial Sequence: Synthetic oligonucleotide
gaaccggauuuccuuaugu

SEQ ID NO: 485939 - RNA, 19 nt, Artificial Sequence
  Description of Artificial Sequence: Synthetic oligonucleotide
augaaccggauuuccuuau

SEQ ID NO: 485940 - RNA, 19 nt, Artificial Sequence
  Description of Artificial Sequence: Synthetic oligonucleotide
uccaaagccugguggccga

SEQ ID NO: 485941 - RNA, 19 nt, Artificial Sequence
  Description of Artificial Sequence: Synthetic oligonucleotide
uggccugucacgucaggau

SEQ ID NO: 485942 - RNA, 19 nt, Artificial Sequence
  Description of Artificial Sequence: Synthetic oligonucleotide
gaccuuagaccuuccucga

SEQ ID NO: 485943 - RNA, 19 nt, Artificial Sequence
  Description of Artificial Sequence: Synthetic oligonucleotide
acgcccuuccuuggaaggc

SEQ ID NO: 485944 - RNA, 19 nt, Artificial Sequence
  Description of Artificial Sequence: Synthetic oligonucleotide
caccccaagaugacggguc

SEQ ID NO: 485945 - RNA, 19 nt, Artificial Sequence
  Description of Artificial Sequence: Synthetic oligonucleotide
gucaaaaggcacacaguuc

SEQ ID NO: 485946 - RNA, 19 nt, Artificial Sequence
  Description of Artificial Sequence: Synthetic oligonucleotide
agagcggguccaccuugac

SEQ ID NO: 485947 - RNA, 19 nt, Artificial Sequence
  Description of Artificial Sequence: Synthetic oligonucleotide
augccagauacgucagcca

SEQ ID NO: 485948 - RNA, 19 nt, Artificial Sequence
  Description of Artificial Sequence: Synthetic oligonucleotide
aaccacgggacuggaguca

SEQ ID NO: 485949 - RNA, 19 nt, Artificial Sequence
  Description of Artificial Sequence: Synthetic oligonucleotide
gggacuggagucauugaag

SEQ ID NO: 485950 - RNA, 19 nt, Artificial Sequence
  Description of Artificial Sequence: Synthetic oligonucleotide
ucugguugguugguauacu

SEQ ID NO: 485951 - RNA, 19 nt, Artificial Sequence
  Description of Artificial Sequence: Synthetic oligonucleotide
cuugacguggauggauaug

SEQ ID NO: 485952 - RNA, 19 nt, Artificial Sequence
  Description of Artificial Sequence: Synthetic oligonucleotide
aagauguggagcggaguuu

SEQ ID NO: 485953 - RNA, 19 nt, Artificial Sequence
  Description of Artificial Sequence: Synthetic oligonucleotide
cuucagcgaccuucgguug

SEQ ID NO: 485954 - RNA, 19 nt, Artificial Sequence
  Description of Artificial Sequence: Synthetic oligonucleotide
ucccaaaguccuugcugca

SEQ ID NO: 485955 - RNA, 19 nt, Artificial Sequence
  Description of Artificial Sequence: Synthetic oligonucleotide
guagcucugugaagagcgg

SEQ ID NO: 485956 - RNA, 19 nt, Artificial Sequence
  Description of Artificial Sequence: Synthetic oligonucleotide
gucacgucaggaugguguc

SEQ ID NO: 485957 - RNA, 19 nt, Artificial Sequence
  Description of Artificial Sequence: Synthetic oligonucleotide
uuagaccuuccucgaggau

SEQ ID NO: 485958 - RNA, 19 nt, Artificial Sequence
  Description of Artificial Sequence: Synthetic oligonucleotide
cuucacauuccagcugaac

SEQ ID NO: 485959 - RNA, 19 nt, Artificial Sequence
  Description of Artificial Sequence: Synthetic oligonucleotide
gacacuuaaugaguaggcu

SEQ ID NO: 485960 - RNA, 19 nt, Artificial Sequence
  Description of Artificial Sequence: Synthetic oligonucleotide
ucccgcagcacuggaagga

SEQ ID NO: 485961 - RNA, 19 nt, Artificial Sequence
  Description of Artificial Sequence: Synthetic oligonucleotide
agggaggauuuucuccccu

SEQ ID NO: 485962 - RNA, 19 nt, Artificial Sequence
  Description of Artificial Sequence: Synthetic oligonucleotide
uccgaguauuauccucauc

SEQ ID NO: 485963 - RNA, 19 nt, Artificial Sequence
  Description of Artificial Sequence: Synthetic oligonucleotide
ggcaucagcugaugucagg

SEQ ID NO: 485964 - RNA, 19 nt, Artificial Sequence
  Description of Artificial Sequence: Synthetic oligonucleotide
aguccaaccuuggccagca

SEQ ID NO: 485965 - RNA, 19 nt, Artificial Sequence
  Description of Artificial Sequence: Synthetic oligonucleotide
cuucucggaccuccucuag

SEQ ID NO: 485966 - RNA, 19 nt, Artificial Sequence
  Description of Artificial Sequence: Synthetic oligonucleotide
ggaucaccccaagaugacg

SEQ ID NO: 485967 - RNA, 19 nt, Artificial Sequence
  Description of Artificial Sequence: Synthetic oligonucleotide
ucgucgcucuucugagacc

SEQ ID NO: 485968 - RNA, 19 nt, Artificial Sequence
  Description of Artificial Sequence: Synthetic oligonucleotide
uccggaccagaucucccaa

SEQ ID NO: 485969 - RNA, 19 nt, Artificial Sequence
  Description of Artificial Sequence: Synthetic oligonucleotide
gugaggacaccuucccgca

SEQ ID NO: 485970 - RNA, 19 nt, Artificial Sequence
  Description of Artificial Sequence: Synthetic oligonucleotide
ucagcgaccuucgguugca

SEQ ID NO: 485971 - RNA, 19 nt, Artificial Sequence
  Description of Artificial Sequence: Synthetic oligonucleotide
gcgaccuucgguugcauuc

SEQ ID NO: 485972 - RNA, 19 nt, Artificial Sequence
  Description of Artificial Sequence: Synthetic oligonucleotide
gguggagugcagcugcuca

SEQ ID NO: 485973 - RNA, 19 nt, Artificial Sequence
  Description of Artificial Sequence: Synthetic oligonucleotide
ucaccccaagaugacgggu

SEQ ID NO: 485974 - RNA, 19 nt, Artificial Sequence
  Description of Artificial Sequence: Synthetic oligonucleotide
augacgggucagagcaucg

SEQ ID NO: 485975 - RNA, 19 nt, Artificial Sequence
  Description of Artificial Sequence: Synthetic oligonucleotide
uucaggcgcacgcccuugu

SEQ ID NO: 485976 - RNA, 19 nt, Artificial Sequence
  Description of Artificial Sequence: Synthetic oligonucleotide
cagucaaugccagauacgu

SEQ ID NO: 485977 - RNA, 19 nt, Artificial Sequence
  Description of Artificial Sequence: Synthetic oligonucleotide
auguggagcggaguuucug

SEQ ID NO: 485978 - RNA, 19 nt, Artificial Sequence
  Description of Artificial Sequence: Synthetic oligonucleotide
gcuccggccaugccgaacc

SEQ ID NO: 485979 - RNA, 19 nt, Artificial Sequence
  Description of Artificial Sequence: Synthetic oligonucleotide
ugccccgaaucccacucau

SEQ ID NO: 485980 - RNA, 19 nt, Artificial Sequence
  Description of Artificial Sequence: Synthetic oligonucleotide
gcggaucccugacaauugg

SEQ ID NO: 485981 - RNA, 19 nt, Artificial Sequence
  Description of Artificial Sequence: Synthetic oligonucleotide
guccagggcgaauuccgac

SEQ ID NO: 485982 - RNA, 19 nt, Artificial Sequence
  Description of Artificial Sequence: Synthetic oligonucleotide
guggagcggaguuucugca

SEQ ID NO: 485983 - RNA, 19 nt, Artificial Sequence
  Description of Artificial Sequence: Synthetic oligonucleotide
guuacgcccuuccuuggaa

SEQ ID NO: 485984 - RNA, 19 nt, Artificial Sequence
  Description of Artificial Sequence: Synthetic oligonucleotide
ugaucucacucaguccgau

SEQ ID NO: 485985 - RNA, 19 nt, Artificial Sequence
  Description of Artificial Sequence: Synthetic oligonucleotide
uuccuugccguaggcacaa

SEQ ID NO: 485986 - RNA, 19 nt, Artificial Sequence
  Description of Artificial Sequence: Synthetic oligonucleotide
cuaugaaccggauuuccuu

SEQ ID NO: 485987 - RNA, 19 nt, Artificial Sequence
  Description of Artificial Sequence: Synthetic oligonucleotide
uuucaggcgcacgcccuug

SEQ ID NO: 485988 - RNA, 19 nt, Artificial Sequence
  Description of Artificial Sequence: Synthetic oligonucleotide
uaaagccuuccuugccgua

SEQ ID NO: 485989 - RNA, 19 nt, Artificial Sequence
  Description of Artificial Sequence: Synthetic oligonucleotide
aguccgauacacacacccu

SEQ ID NO: 485990 - RNA, 19 nt, Artificial Sequence
  Description of Artificial Sequence: Synthetic oligonucleotide
auccgaguauuauccucau

SEQ ID NO: 485991 - RNA, 19 nt, Artificial Sequence
  Description of Artificial Sequence: Synthetic oligonucleotide
cugguugguugguauacua

SEQ ID NO: 485992 - RNA, 19 nt, Artificial Sequence
  Description of Artificial Sequence: Synthetic oligonucleotide
ggagcggaguuucugcaga

SEQ ID NO: 485993 - RNA, 19 nt, Artificial Sequence
  Description of Artificial Sequence: Synthetic oligonucleotide
acgucaggauggugucauc

SEQ ID NO: 485994 - RNA, 19 nt, Artificial Sequence
  Description of Artificial Sequence: Synthetic oligonucleotide
ccgaaucccacucauggca

SEQ ID NO: 485995 - RNA, 19 nt, Artificial Sequence
  Description of Artificial Sequence: Synthetic oligonucleotide
gcagggucuuugguaaagg

SEQ ID NO: 485996 - RNA, 19 nt, Artificial Sequence
  Description of Artificial Sequence: Synthetic oligonucleotide
ucacuacgguauucuuguc

SEQ ID NO: 485997 - RNA, 19 nt, Artificial Sequence
  Description of Artificial Sequence: Synthetic oligonucleotide
cucuaggggaucacauaaa

SEQ ID NO: 485998 - RNA, 19 nt, Artificial Sequence
  Description of Artificial Sequence: Synthetic oligonucleotide
caaccuuggccagcaggag

SEQ ID NO: 485999 - RNA, 19 nt, Artificial Sequence
  Description of Artificial Sequence: Synthetic oligonucleotide
ggucagagcaucgccugcc

SEQ ID NO: 486000 - RNA, 19 nt, Artificial Sequence
  Description of Artificial Sequence: Synthetic oligonucleotide
augcucgccuuugcucucg

SEQ ID NO: 486001 - RNA, 19 nt, Artificial Sequence
  Description of Artificial Sequence: Synthetic oligonucleotide
ugcucgucuggagacccaa

SEQ ID NO: 486002 - RNA, 19 nt, Artificial Sequence
  Description of Artificial Sequence: Synthetic oligonucleotide
aguccuugcugcaaucguu

SEQ ID NO: 486003 - RNA, 19 nt, Artificial Sequence
  Description of Artificial Sequence: Synthetic oligonucleotide
gaucucacucaguccgaua

SEQ ID NO: 486004 - RNA, 19 nt, Artificial Sequence
  Description of Artificial Sequence: Synthetic oligonucleotide
ccaguugguuaccagcauc

SEQ ID NO: 486005 - RNA, 19 nt, Artificial Sequence
  Description of Artificial Sequence: Synthetic oligonucleotide
gaccgcugggaggaucacc

SEQ ID NO: 486006 - RNA, 19 nt, Artificial Sequence
  Description of Artificial Sequence: Synthetic oligonucleotide
agaccguccagggcgaauu

SEQ ID NO: 486007 - RNA, 19 nt, Artificial Sequence
  Description of Artificial Sequence: Synthetic oligonucleotide
cagcuuucaggcgcacgcc

SEQ ID NO: 486008 - RNA, 19 nt, Artificial Sequence
  Description of Artificial Sequence: Synthetic oligonucleotide
gaaccgguccccaaggauu

SEQ ID NO: 486009 - RNA, 19 nt, Artificial Sequence
  Description of Artificial Sequence: Synthetic oligonucleotide
caugcucgccuuugcucuc

SEQ ID NO: 486010 - RNA, 19 nt, Artificial Sequence
  Description of Artificial Sequence: Synthetic oligonucleotide
gcguugucagcuugggcac

SEQ ID NO: 486011 - RNA, 19 nt, Artificial Sequence
  Description of Artificial Sequence: Synthetic oligonucleotide
ccucuaggggaucacauaa

SEQ ID NO: 486012 - RNA, 19 nt, Artificial Sequence
  Description of Artificial Sequence: Synthetic oligonucleotide
gguccuuauuugcccacca

SEQ ID NO: 486013 - RNA, 19 nt, Artificial Sequence
  Description of Artificial Sequence: Synthetic oligonucleotide
ggagagugacugaaacaac

SEQ ID NO: 486014 - RNA, 19 nt, Artificial Sequence
  Description of Artificial Sequence: Synthetic oligonucleotide
ugggagccacguugacagc

SEQ ID NO: 486015 - RNA, 19 nt, Artificial Sequence
  Description of Artificial Sequence: Synthetic oligonucleotide
ucccggcuuguagacuuca

SEQ ID NO: 486016 - RNA, 19 nt, Artificial Sequence
  Description of Artificial Sequence: Synthetic oligonucleotide
cagggcgaauuccgacacc

SEQ ID NO: 486017 - RNA, 19 nt, Artificial Sequence
  Description of Artificial Sequence: Synthetic oligonucleotide
augaucucacucaguccga

SEQ ID NO: 486018 - RNA, 19 nt, Artificial Sequence
  Description of Artificial Sequence: Synthetic oligonucleotide
uuccgucaaaaggcacaca

SEQ ID NO: 486019 - RNA, 19 nt, Artificial Sequence
  Description of Artificial Sequence: Synthetic oligonucleotide
augccccgaaucccacuca

SEQ ID NO: 486020 - RNA, 19 nt, Artificial Sequence
  Description of Artificial Sequence: Synthetic oligonucleotide
ccgauacacacacccugcc

SEQ ID NO: 486021 - RNA, 19 nt, Artificial Sequence
  Description of Artificial Sequence: Synthetic oligonucleotide
auaaccugcuugagaccgu

SEQ ID NO: 486022 - RNA, 19 nt, Artificial Sequence
  Description of Artificial Sequence: Synthetic oligonucleotide
cugccguggcauugcugag

SEQ ID NO: 486023 - RNA, 19 nt, Artificial Sequence
  Description of Artificial Sequence: Synthetic oligonucleotide
gaccguccagggcgaauuc

SEQ ID NO: 486024 - RNA, 19 nt, Artificial Sequence
  Description of Artificial Sequence: Synthetic oligonucleotide
cauugagggcaucccagcu

SEQ ID NO: 486025 - RNA, 19 nt, Artificial Sequence
  Description of Artificial Sequence: Synthetic oligonucleotide
ccagggcgaauuccgacac

SEQ ID NO: 486026 - RNA, 19 nt, Artificial Sequence
  Description of Artificial Sequence: Synthetic oligonucleotide
guugccuaugaaccggauu

SEQ ID NO: 486027 - RNA, 19 nt, Artificial Sequence
  Description of Artificial Sequence: Synthetic oligonucleotide
caugaccgcugggaggauc

SEQ ID NO: 486028 - RNA, 19 nt, Artificial Sequence
  Description of Artificial Sequence: Synthetic oligonucleotide
caagggacucagagaaaua

SEQ ID NO: 486029 - RNA, 19 nt, Artificial Sequence
  Description of Artificial Sequence: Synthetic oligonucleotide
cagcgucccggcuuguaga

SEQ ID NO: 486030 - RNA, 19 nt, Artificial Sequence
  Description of Artificial Sequence: Synthetic oligonucleotide
gcugcucgucuggagaccc

SEQ ID NO: 486031 - RNA, 19 nt, Artificial Sequence
  Description of Artificial Sequence: Synthetic oligonucleotide
aucgccugccacagaugag

SEQ ID NO: 486032 - RNA, 19 nt, Artificial Sequence
  Description of Artificial Sequence: Synthetic oligonucleotide
gucgcuguaggcccucacu

SEQ ID NO: 486033 - RNA, 19 nt, Artificial Sequence
  Description of Artificial Sequence: Synthetic oligonucleotide
caguaccuccaagcuggcc

SEQ ID NO: 486034 - RNA, 19 nt, Artificial Sequence
  Description of Artificial Sequence: Synthetic oligonucleotide
aggaagccgaugccccgaa

SEQ ID NO: 486035 - RNA, 19 nt, Artificial Sequence
  Description of Artificial Sequence: Synthetic oligonucleotide
cugaaccgguccccaagga

SEQ ID NO: 486036 - RNA, 19 nt, Artificial Sequence
  Description of Artificial Sequence: Synthetic oligonucleotide
ggcggaucccugacaauug

SEQ ID NO: 486037 - RNA, 19 nt, Artificial Sequence
  Description of Artificial Sequence: Synthetic oligonucleotide
gguuacgcccuuccuugga

SEQ ID NO: 486038 - RNA, 19 nt, Artificial Sequence
  Description of Artificial Sequence: Synthetic oligonucleotide
ggcucuuaacagccauaac

SEQ ID NO: 486039 - RNA, 19 nt, Artificial Sequence
  Description of Artificial Sequence: Synthetic oligonucleotide
ccagauacgucagccagca

SEQ ID NO: 486040 - RNA, 19 nt, Artificial Sequence
  Description of Artificial Sequence: Synthetic oligonucleotide
ggauccugucugccguggc

SEQ ID NO: 486041 - RNA, 19 nt, Artificial Sequence
  Description of Artificial Sequence: Synthetic oligonucleotide
ugguggagugcagcugcuc

SEQ ID NO: 486042 - RNA, 19 nt, Artificial Sequence
  Description of Artificial Sequence: Synthetic oligonucleotide
ccggauuuccuuauguagu

SEQ ID NO: 486043 - RNA, 19 nt, Artificial Sequence
  Description of Artificial Sequence: Synthetic oligonucleotide
gcuuagcaggagugagaug

SEQ ID NO: 486044 - RNA, 19 nt, Artificial Sequence
  Description of Artificial Sequence: Synthetic oligonucleotide
acccggguauugacagggg

SEQ ID NO: 486045 - RNA, 19 nt, Artificial Sequence
  Description of Artificial Sequence: Synthetic oligonucleotide
ggagguuacgcccuuccuu

SEQ ID NO: 486046 - RNA, 19 nt, Artificial Sequence
  Description of Artificial Sequence: Synthetic oligonucleotide
ccggccaugccgaaccauc

SEQ ID NO: 486047 - RNA, 19 nt, Artificial Sequence
  Description of Artificial Sequence: Synthetic oligonucleotide
caaagauguggagcggagu

SEQ ID NO: 486048 - RNA, 19 nt, Artificial Sequence
  Description of Artificial Sequence: Synthetic oligonucleotide
cugucacgucaggauggug

SEQ ID NO: 486049 - RNA, 19 nt, Artificial Sequence
  Description of Artificial Sequence: Synthetic oligonucleotide
ggccaugccgaaccaucca

SEQ ID NO: 486050 - RNA, 19 nt, Artificial Sequence
  Description of Artificial Sequence: Synthetic oligonucleotide
cccaaggcacccagcugag

SEQ ID NO: 486051 - RNA, 19 nt, Artificial Sequence
  Description of Artificial Sequence: Synthetic oligonucleotide
guccaaccuuggccagcag

SEQ ID NO: 486052 - RNA, 19 nt, Artificial Sequence
  Description of Artificial Sequence: Synthetic oligonucleotide
aggcccucacuacgguauu

SEQ ID NO: 486053 - RNA, 19 nt, Artificial Sequence
  Description of Artificial Sequence: Synthetic oligonucleotide
ccuaugaaccggauuuccu

SEQ ID NO: 486054 - RNA, 19 nt, Artificial Sequence
  Description of Artificial Sequence: Synthetic oligonucleotide
gcugaggagauccgaguau

SEQ ID NO: 486055 - RNA, 19 nt, Artificial Sequence
  Description of Artificial Sequence: Synthetic oligonucleotide
ugaccgcugggaggaucac

SEQ ID NO: 486056 - RNA, 19 nt, Artificial Sequence
  Description of Artificial Sequence: Synthetic oligonucleotide
agaugacgggucagagcau

SEQ ID NO: 486057 - RNA, 19 nt, Artificial Sequence
  Description of Artificial Sequence: Synthetic oligonucleotide
cugaggagauccgaguauu

SEQ ID NO: 486058 - RNA, 19 nt, Artificial Sequence
  Description of Artificial Sequence: Synthetic oligonucleotide
uccuugccguaggcacaag

SEQ ID NO: 486059 - RNA, 19 nt, Artificial Sequence
  Description of Artificial Sequence: Synthetic oligonucleotide
cgcuguaggcccucacuac

SEQ ID NO: 486060 - RNA, 19 nt, Artificial Sequence
  Description of Artificial Sequence: Synthetic oligonucleotide
uggucgcuguaggcccuca

SEQ ID NO: 486061 - RNA, 19 nt, Artificial Sequence
  Description of Artificial Sequence: Synthetic oligonucleotide
ggggaucacauaaagccuu

SEQ ID NO: 486062 - RNA, 19 nt, Artificial Sequence
  Description of Artificial Sequence: Synthetic oligonucleotide
acggcucuuaacagccaua

SEQ ID NO: 486063 - RNA, 19 nt, Artificial Sequence
  Description of Artificial Sequence: Synthetic oligonucleotide
ugagaccguccagggcgaa

SEQ ID NO: 486064 - RNA, 19 nt, Artificial Sequence
  Description of Artificial Sequence: Synthetic oligonucleotide
cacggcucuuaacagccau

SEQ ID NO: 486065 - RNA, 19 nt, Artificial Sequence
  Description of Artificial Sequence: Synthetic oligonucleotide
ggucgcuguaggcccucac

SEQ ID NO: 486066 - RNA, 19 nt, Artificial Sequence
  Description of Artificial Sequence: Synthetic oligonucleotide
cuuccucgaggauggggau

SEQ ID NO: 486067 - RNA, 19 nt, Artificial Sequence
  Description of Artificial Sequence: Synthetic oligonucleotide
ggaaagccagcacccgggu

SEQ ID NO: 486068 - RNA, 19 nt, Artificial Sequence
  Description of Artificial Sequence: Synthetic oligonucleotide
cugcucgucuggagaccca

SEQ ID NO: 486069 - RNA, 19 nt, Artificial Sequence
  Description of Artificial Sequence: Synthetic oligonucleotide
gcucgucuggagacccaag

SEQ ID NO: 486070 - RNA, 19 nt, Artificial Sequence
  Description of Artificial Sequence: Synthetic oligonucleotide
gcacaugcucgccuuugcu

SEQ ID NO: 486071 - RNA, 19 nt, Artificial Sequence
  Description of Artificial Sequence: Synthetic oligonucleotide
gggcuaccagugaggacac

SEQ ID NO: 486072 - RNA, 19 nt, Artificial Sequence
  Description of Artificial Sequence: Synthetic oligonucleotide
gggcgaauuccgacaccug

SEQ ID NO: 486073 - RNA, 19 nt, Artificial Sequence
  Description of Artificial Sequence: Synthetic oligonucleotide
acucuucgcccugccucau

SEQ ID NO: 486074 - RNA, 19 nt, Artificial Sequence
  Description of Artificial Sequence: Synthetic oligonucleotide
cagcugaaccgguccccaa

SEQ ID NO: 486075 - RNA, 19 nt, Artificial Sequence
  Description of Artificial Sequence: Synthetic oligonucleotide
cgggacuggagucauugaa

SEQ ID NO: 486076 - RNA, 19 nt, Artificial Sequence
  Description of Artificial Sequence: Synthetic oligonucleotide
gcggguccaccuugacgug

SEQ ID NO: 486077 - RNA, 19 nt, Artificial Sequence
  Description of Artificial Sequence: Synthetic oligonucleotide
gccguaggcacaagggacu

SEQ ID NO: 486078 - RNA, 19 nt, Artificial Sequence
  Description of Artificial Sequence: Synthetic oligonucleotide
ccgcugggaggaucacccc

SEQ ID NO: 486079 - RNA, 19 nt, Artificial Sequence
  Description of Artificial Sequence: Synthetic oligonucleotide
ccgucaaaaggcacacagu

SEQ ID NO: 486080 - RNA, 19 nt, Artificial Sequence
  Description of Artificial Sequence: Synthetic oligonucleotide
ccguaggcacaagggacuc

SEQ ID NO: 486081 - RNA, 19 nt, Artificial Sequence
  Description of Artificial Sequence: Synthetic oligonucleotide
cuacgguauucuuguccuu

SEQ ID NO: 486082 - RNA, 19 nt, Artificial Sequence
  Description of Artificial Sequence: Synthetic oligonucleotide
ggcccucacuacgguauuc

SEQ ID NO: 486083 - RNA, 19 nt, Artificial Sequence
  Description of Artificial Sequence: Synthetic oligonucleotide
gccccgaaucccacucaug

SEQ ID NO: 486084 - RNA, 19 nt, Artificial Sequence
  Description of Artificial Sequence: Synthetic oligonucleotide
cagauacgucagccagcaa

SEQ ID NO: 486085 - RNA, 19 nt, Artificial Sequence
  Description of Artificial Sequence: Synthetic oligonucleotide
ggcgcacgcccuuguugga

SEQ ID NO: 486086 - RNA, 19 nt, Artificial Sequence
  Description of Artificial Sequence: Synthetic oligonucleotide
gagaccguccagggcgaau

SEQ ID NO: 486087 - RNA, 19 nt, Artificial Sequence
  Description of Artificial Sequence: Synthetic oligonucleotide
ccuugacguggauggauau

SEQ ID NO: 486088 - RNA, 19 nt, Artificial Sequence
  Description of Artificial Sequence: Synthetic oligonucleotide
cgaccuucgguugcauuca

SEQ ID NO: 486089 - RNA, 19 nt, Artificial Sequence
  Description of Artificial Sequence: Synthetic oligonucleotide
cacagcgucccggcuugua

SEQ ID NO: 486090 - RNA, 19 nt, Artificial Sequence
  Description of Artificial Sequence: Synthetic oligonucleotide
cgucgcucuucugagaccu

SEQ ID NO: 486091 - RNA, 19 nt, Artificial Sequence
  Description of Artificial Sequence: Synthetic oligonucleotide
ggguuugauuuaaggcuuu

SEQ ID NO: 486092 - RNA, 19 nt, Artificial Sequence
  Description of Artificial Sequence: Synthetic oligonucleotide
cuggcacaugcucgccuuu

SEQ ID NO: 486093 - RNA, 19 nt, Artificial Sequence
  Description of Artificial Sequence: Synthetic oligonucleotide
ccccuagcuuccggaccag

SEQ ID NO: 486094 - RNA, 19 nt, Artificial Sequence
  Description of Artificial Sequence: Synthetic oligonucleotide
cccuuggaauaaacguauu

SEQ ID NO: 486095 - RNA, 19 nt, Artificial Sequence
  Description of Artificial Sequence: Synthetic oligonucleotide
ccugucacgucaggauggu

SEQ ID NO: 486096 - RNA, 19 nt, Artificial Sequence
  Description of Artificial Sequence: Synthetic oligonucleotide
cgcacgcccuuguuggagu

SEQ ID NO: 486097 - RNA, 19 nt, Artificial Sequence
  Description of Artificial Sequence: Synthetic oligonucleotide
gucgcucuucugagaccuu

SEQ ID NO: 486098 - RNA, 19 nt, Artificial Sequence
  Description of Artificial Sequence: Synthetic oligonucleotide
gcgucccggcuuguagacu

SEQ ID NO: 486099 - RNA, 19 nt, Artificial Sequence
  Description of Artificial Sequence: Synthetic oligonucleotide
cgaugccccgaaucccacu

SEQ ID NO: 486100 - RNA, 19 nt, Artificial Sequence
  Description of Artificial Sequence: Synthetic oligonucleotide
cguugccuaugaaccggau

SEQ ID NO: 486101 - RNA, 19 nt, Artificial Sequence
  Description of Artificial Sequence: Synthetic oligonucleotide
gcucgccuuugcucucguu

SEQ ID NO: 486102 - RNA, 19 nt, Artificial Sequence
  Description of Artificial Sequence: Synthetic oligonucleotide
ggaguccugcagggucuuu

SEQ ID NO: 486103 - RNA, 19 nt, Artificial Sequence
  Description of Artificial Sequence: Synthetic oligonucleotide
gcaugaccgcugggaggau

SEQ ID NO: 486104 - RNA, 19 nt, Artificial Sequence
  Description of Artificial Sequence: Synthetic oligonucleotide
aauucauccaucuguggcg

SEQ ID NO: 486105 - RNA, 19 nt, Artificial Sequence
  Description of Artificial Sequence: Synthetic oligonucleotide
aauaccgccccuuugcugg

SEQ ID NO: 486106 - RNA, 19 nt, Artificial Sequence
  Description of Artificial Sequence: Synthetic oligonucleotide
aauaauacauaugcccacc

SEQ ID NO: 486107 - RNA, 19 nt, Artificial Sequence
  Description of Artificial Sequence: Synthetic oligonucleotide
acgacgacaguuuugaccg

SEQ ID NO: 486108 - RNA, 19 nt, Artificial Sequence
  Description of Artificial Sequence: Synthetic oligonucleotide
guggauuguacguagaagg

SEQ ID NO: 486109 - RNA, 19 nt, Artificial Sequence
  Description of Artificial Sequence: Synthetic oligonucleotide
gauaccaggggcaauaccg

SEQ ID NO: 486110 - RNA, 19 nt, Artificial Sequence
  Description of Artificial Sequence: Synthetic oligonucleotide
aauacauaugcccacccca

SEQ ID NO: 486111 - RNA, 19 nt, Artificial Sequence
  Description of Artificial Sequence: Synthetic oligonucleotide
auaauacauaugcccaccc

SEQ ID NO: 486112 - RNA, 19 nt, Artificial Sequence
  Description of Artificial Sequence: Synthetic oligonucleotide
uuuauugaggggaaugggu

SEQ ID NO: 486113 - RNA, 19 nt, Artificial Sequence
  Description of Artificial Sequence: Synthetic oligonucleotide
uucuccgugacauuuaacu

SEQ ID NO: 486114 - RNA, 19 nt, Artificial Sequence
  Description of Artificial Sequence: Synthetic oligonucleotide
ucccucuaagguaacaagg

SEQ ID NO: 486115 - RNA, 19 nt, Artificial Sequence
  Description of Artificial Sequence: Synthetic oligonucleotide
acacaacucacauuaggcg

SEQ ID NO: 486116 - RNA, 19 nt, Artificial Sequence
  Description of Artificial Sequence: Synthetic oligonucleotide
ugaaagauuacuagagguc

SEQ ID NO: 486117 - RNA, 19 nt, Artificial Sequence
  Description of Artificial Sequence: Synthetic oligonucleotide
aacgguaagugccugcgag

SEQ ID NO: 486118 - RNA, 19 nt, Artificial Sequence
  Description of Artificial Sequence: Synthetic oligonucleotide
ugaauacaggacacgaagc

SEQ ID NO: 486119 - RNA, 19 nt, Artificial Sequence
  Description of Artificial Sequence: Synthetic oligonucleotide
cuucccgucaacuucacag

SEQ ID NO: 486120 - RNA, 19 nt, Artificial Sequence
  Description of Artificial Sequence: Synthetic oligonucleotide
cacaacucacauuaggcgg

SEQ ID NO: 486121 - RNA, 19 nt, Artificial Sequence
  Description of Artificial Sequence: Synthetic oligonucleotide
gugaauacaggacacgaag

SEQ ID NO: 486122 - RNA, 19 nt, Artificial Sequence
  Description of Artificial Sequence: Synthetic oligonucleotide
uucugggacaaucugaguc

SEQ ID NO: 486123 - RNA, 19 nt, Artificial Sequence
  Description of Artificial Sequence: Synthetic oligonucleotide
aaaaccucgccaucugcag

SEQ ID NO: 486124 - RNA, 19 nt, Artificial Sequence
  Description of Artificial Sequence: Synthetic oligonucleotide
cuucgcaucgguaaaugcc

SEQ ID NO: 486125 - RNA, 19 nt, Artificial Sequence
  Description of Artificial Sequence: Synthetic oligonucleotide
cuuacgguuaccaccuucc

SEQ ID NO: 486126 - RNA, 19 nt, Artificial Sequence
  Description of Artificial Sequence: Synthetic oligonucleotide
ucuacccacguccaguugc

SEQ ID NO: 486127 - RNA, 19 nt, Artificial Sequence
  Description of Artificial Sequence: Synthetic oligonucleotide
agggucacguccuugacag

SEQ ID NO: 486128 - RNA, 19 nt, Artificial Sequence
  Description of Artificial Sequence: Synthetic oligonucleotide
uucgcaucgguaaaugcca

SEQ ID NO: 486129 - RNA, 19 nt, Artificial Sequence
  Description of Artificial Sequence: Synthetic oligonucleotide
gguaacaagggcucgagcc

SEQ ID NO: 486130 - RNA, 19 nt, Artificial Sequence
  Description of Artificial Sequence: Synthetic oligonucleotide
aaagauuacuagaggucac

SEQ ID NO: 486131 - RNA, 19 nt, Artificial Sequence
  Description of Artificial Sequence: Synthetic oligonucleotide
uaauacauaugcccacccc

SEQ ID NO: 486132 - RNA, 19 nt, Artificial Sequence
  Description of Artificial Sequence: Synthetic oligonucleotide
uggauuguacguagaaggc

SEQ ID NO: 486133 - RNA, 19 nt, Artificial Sequence
  Description of Artificial Sequence: Synthetic oligonucleotide
ugaauccgugccaugcgcg

SEQ ID NO: 486134 - RNA, 19 nt, Artificial Sequence
  Description of Artificial Sequence: Synthetic oligonucleotide
aguagggaaacuguaaaca

SEQ ID NO: 486135 - RNA, 19 nt, Artificial Sequence
  Description of Artificial Sequence: Synthetic oligonucleotide
aaaccucgccaucugcagg

SEQ ID NO: 486136 - RNA, 19 nt, Artificial Sequence
  Description of Artificial Sequence: Synthetic oligonucleotide
uuauugaggggaaugggua

SEQ ID NO: 486137 - RNA, 19 nt, Artificial Sequence
  Description of Artificial Sequence: Synthetic oligonucleotide
gaaucggggaguaaccagg

SEQ ID NO: 486138 - RNA, 19 nt, Artificial Sequence
  Description of Artificial Sequence: Synthetic oligonucleotide
cugcauaacagcugucugg

SEQ ID NO: 486139 - RNA, 19 nt, Artificial Sequence
  Description of Artificial Sequence: Synthetic oligonucleotide
aacgguagguccccgcauc

SEQ ID NO: 486140 - RNA, 19 nt, Artificial Sequence
  Description of Artificial Sequence: Synthetic oligonucleotide
guuugaggauaccaggggc

SEQ ID NO: 486141 - RNA, 19 nt, Artificial Sequence
  Description of Artificial Sequence: Synthetic oligonucleotide
gauuguacguagaaggcca

SEQ ID NO: 486142 - RNA, 19 nt, Artificial Sequence
  Description of Artificial Sequence: Synthetic oligonucleotide
agacacaccgccucgccgg

SEQ ID NO: 486143 - RNA, 19 nt, Artificial Sequence
  Description of Artificial Sequence: Synthetic oligonucleotide
acucacauuaggcgguggg

SEQ ID NO: 486144 - RNA, 19 nt, Artificial Sequence
  Description of Artificial Sequence: Synthetic oligonucleotide
uccgugacauuuaacugga

SEQ ID NO: 486145 - RNA, 19 nt, Artificial Sequence
  Description of Artificial Sequence: Synthetic oligonucleotide
ggaguaaccaggcucgggg

SEQ ID NO: 486146 - RNA, 19 nt, Artificial Sequence
  Description of Artificial Sequence: Synthetic oligonucleotide
uucccucuaagguaacaag

SEQ ID NO: 486147 - RNA, 19 nt, Artificial Sequence
  Description of Artificial Sequence: Synthetic oligonucleotide
agaaucggggaguaaccag

SEQ ID NO: 486148 - RNA, 19 nt, Artificial Sequence
  Description of Artificial Sequence: Synthetic oligonucleotide
ugugcaacgguaagugccu

SEQ ID NO: 486149 - RNA, 19 nt, Artificial Sequence
  Description of Artificial Sequence: Synthetic oligonucleotide
guaacaagggcucgagccc

SEQ ID NO: 486150 - RNA, 19 nt, Artificial Sequence
  Description of Artificial Sequence: Synthetic oligonucleotide
ucaggccuagcacagugca

SEQ ID NO: 486151 - RNA, 19 nt, Artificial Sequence
  Description of Artificial Sequence: Synthetic oligonucleotide
ucgguaaaugccagcgugc

SEQ ID NO: 486152 - RNA, 19 nt, Artificial Sequence
  Description of Artificial Sequence: Synthetic oligonucleotide
gaaccgugccgguuggugg

SEQ ID NO: 486153 - RNA, 19 nt, Artificial Sequence
  Description of Artificial Sequence: Synthetic oligonucleotide
gaaauucccucuaagguaa

SEQ ID NO: 486154 - RNA, 19 nt, Artificial Sequence
  Description of Artificial Sequence: Synthetic oligonucleotide
gaguagggaaacuguaaac

SEQ ID NO: 486155 - RNA, 19 nt, Artificial Sequence
  Description of Artificial Sequence: Synthetic oligonucleotide
gaggcugucgccaucgaag

SEQ ID NO: 486156 - RNA, 19 nt, Artificial Sequence
  Description of Artificial Sequence: Synthetic oligonucleotide
guaagugccugcgagggag

SEQ ID NO: 486157 - RNA, 19 nt, Artificial Sequence
  Description of Artificial Sequence: Synthetic oligonucleotide
aagauuacuagaggucaca

SEQ ID NO: 486158 - RNA, 19 nt, Artificial Sequence
  Description of Artificial Sequence: Synthetic oligonucleotide
ugaccguggaaccgugccg

SEQ ID NO: 486159 - RNA, 19 nt, Artificial Sequence
  Description of Artificial Sequence: Synthetic oligonucleotide
agcagcuuacgguuaccac

SEQ ID NO: 486160 - RNA, 19 nt, Artificial Sequence
  Description of Artificial Sequence: Synthetic oligonucleotide
ucggggaguaaccaggcuc

SEQ ID NO: 486161 - RNA, 19 nt, Artificial Sequence
  Description of Artificial Sequence: Synthetic oligonucleotide
aguuuugaccguggaaccg

SEQ ID NO: 486162 - RNA, 19 nt, Artificial Sequence
  Description of Artificial Sequence: Synthetic oligonucleotide
gugccaugcgcguuggugg

SEQ ID NO: 486163 - RNA, 19 nt, Artificial Sequence
  Description of Artificial Sequence: Synthetic oligonucleotide
gcuacuggcucacuuaaag

SEQ ID NO: 486164 - RNA, 19 nt, Artificial Sequence
  Description of Artificial Sequence: Synthetic oligonucleotide
uccucuagcguugauggcu

SEQ ID NO: 486165 - RNA, 19 nt, Artificial Sequence
  Description of Artificial Sequence: Synthetic oligonucleotide
agauuacuagaggucacag

SEQ ID NO: 486166 - RNA, 19 nt, Artificial Sequence
  Description of Artificial Sequence: Synthetic oligonucleotide
gcagcuuacgguuaccacc

SEQ ID NO: 486167 - RNA, 19 nt, Artificial Sequence
  Description of Artificial Sequence: Synthetic oligonucleotide
aggcugucgccaucgaagg

SEQ ID NO: 486168 - RNA, 19 nt, Artificial Sequence
  Description of Artificial Sequence: Synthetic oligonucleotide
ccaaguaauguguucuggg

SEQ ID NO: 486169 - RNA, 19 nt, Artificial Sequence
  Description of Artificial Sequence: Synthetic oligonucleotide
auaccaggggcaauaccgc

SEQ ID NO: 486170 - RNA, 19 nt, Artificial Sequence
  Description of Artificial Sequence: Synthetic oligonucleotide
cacaccaacagugacgguc

SEQ ID NO: 486171 - RNA, 19 nt, Artificial Sequence
  Description of Artificial Sequence: Synthetic oligonucleotide
gaaguucccgccuggccgc

SEQ ID NO: 486172 - RNA, 19 nt, Artificial Sequence
  Description of Artificial Sequence: Synthetic oligonucleotide
aacaggccgguauuccaca

SEQ ID NO: 486173 - RNA, 19 nt, Artificial Sequence
  Description of Artificial Sequence: Synthetic oligonucleotide
ugcugauccucuagcguug

SEQ ID NO: 486174 - RNA, 19 nt, Artificial Sequence
  Description of Artificial Sequence: Synthetic oligonucleotide
uccggggcaggaaacaguc

SEQ ID NO: 486175 - RNA, 19 nt, Artificial Sequence
  Description of Artificial Sequence: Synthetic oligonucleotide
cuggacguuguacucgccc

SEQ ID NO: 486176 - RNA, 19 nt, Artificial Sequence
  Description of Artificial Sequence: Synthetic oligonucleotide
cuaagguaacaagggcucg

SEQ ID NO: 486177 - RNA, 19 nt, Artificial Sequence
  Description of Artificial Sequence: Synthetic oligonucleotide
ucccgucaacuucacagga

SEQ ID NO: 486178 - RNA, 19 nt, Artificial Sequence
  Description of Artificial Sequence: Synthetic oligonucleotide
acagcuaagcgaugccucu

SEQ ID NO: 486179 - RNA, 19 nt, Artificial Sequence
  Description of Artificial Sequence: Synthetic oligonucleotide
ggcaauaccgccccuuugc

SEQ ID NO: 486180 - RNA, 19 nt, Artificial Sequence
  Description of Artificial Sequence: Synthetic oligonucleotide
guacguagaaggccaggcc

SEQ ID NO: 486181 - RNA, 19 nt, Artificial Sequence
  Description of Artificial Sequence: Synthetic oligonucleotide
uccuggacguuguacucgc

SEQ ID NO: 486182 - RNA, 19 nt, Artificial Sequence
  Description of Artificial Sequence: Synthetic oligonucleotide
gggaccauauuccacggug

SEQ ID NO: 486183 - RNA, 19 nt, Artificial Sequence
  Description of Artificial Sequence: Synthetic oligonucleotide
aauucccucuaagguaaca

SEQ ID NO: 486184 - RNA, 19 nt, Artificial Sequence
  Description of Artificial Sequence: Synthetic oligonucleotide
gugaauccgugccaugcgc

SEQ ID NO: 486185 - RNA, 19 nt, Artificial Sequence
  Description of Artificial Sequence: Synthetic oligonucleotide
gcugaauucauccaucugu

SEQ ID NO: 486186 - RNA, 19 nt, Artificial Sequence
  Description of Artificial Sequence: Synthetic oligonucleotide
aaauucccucuaagguaac

SEQ ID NO: 486187 - RNA, 19 nt, Artificial Sequence
  Description of Artificial Sequence: Synthetic oligonucleotide
uacccggugaaagauuacu

SEQ ID NO: 486188 - RNA, 19 nt, Artificial Sequence
  Description of Artificial Sequence: Synthetic oligonucleotide
uguucugcgcuuggcguag

SEQ ID NO: 486189 - RNA, 19 nt, Artificial Sequence
  Description of Artificial Sequence: Synthetic oligonucleotide
gaacccguggagaggggcg

SEQ ID NO: 486190 - RNA, 19 nt, Artificial Sequence
  Description of Artificial Sequence: Synthetic oligonucleotide
gugacgguccgugaauccg

SEQ ID NO: 486191 - RNA, 19 nt, Artificial Sequence
  Description of Artificial Sequence: Synthetic oligonucleotide
cugggaccauauuccacgg

SEQ ID NO: 486192 - RNA, 19 nt, Artificial Sequence
  Description of Artificial Sequence: Synthetic oligonucleotide
ugacgguccgugaauccgu

SEQ ID NO: 486193 - RNA, 19 nt, Artificial Sequence
  Description of Artificial Sequence: Synthetic oligonucleotide
gaugcgucgcgcguggcgc

SEQ ID NO: 486194 - RNA, 19 nt, Artificial Sequence
  Description of Artificial Sequence: Synthetic oligonucleotide
ucgcaucgguaaaugccag

SEQ ID NO: 486195 - RNA, 19 nt, Artificial Sequence
  Description of Artificial Sequence: Synthetic oligonucleotide
ggauuguacguagaaggcc

SEQ ID NO: 486196 - RNA, 19 nt, Artificial Sequence
  Description of Artificial Sequence: Synthetic oligonucleotide
gauacccggugaaagauua

SEQ ID NO: 486197 - RNA, 19 nt, Artificial Sequence
  Description of Artificial Sequence: Synthetic oligonucleotide
aacccguggagaggggcgg

SEQ ID NO: 486198 - RNA, 19 nt, Artificial Sequence
  Description of Artificial Sequence: Synthetic oligonucleotide
gaacagcgaacccguggag

SEQ ID NO: 486199 - RNA, 19 nt, Artificial Sequence
  Description of Artificial Sequence: Synthetic oligonucleotide
aacucacauuaggcggugg

SEQ ID NO: 486200 - RNA, 19 nt, Artificial Sequence
  Description of Artificial Sequence: Synthetic oligonucleotide
acaacucacauuaggcggu

SEQ ID NO: 486201 - RNA, 19 nt, Artificial Sequence
  Description of Artificial Sequence: Synthetic oligonucleotide
cacuucgagggcagcuucg

SEQ ID NO: 486202 - RNA, 19 nt, Artificial Sequence
  Description of Artificial Sequence: Synthetic oligonucleotide
cucauacucgccgccgugg

SEQ ID NO: 486203 - RNA, 19 nt, Artificial Sequence
  Description of Artificial Sequence: Synthetic oligonucleotide
aucaggccuagcacagugc

SEQ ID NO: 486204 - RNA, 19 nt, Artificial Sequence
  Description of Artificial Sequence: Synthetic oligonucleotide
ggacccucaggccaugucc

SEQ ID NO: 486205 - RNA, 19 nt, Artificial Sequence
  Description of Artificial Sequence: Synthetic oligonucleotide
cacagcgacccacagccac

SEQ ID NO: 486206 - RNA, 19 nt, Artificial Sequence
  Description of Artificial Sequence: Synthetic oligonucleotide
uccuucuacccacguccag

SEQ ID NO: 486207 - RNA, 19 nt, Artificial Sequence
  Description of Artificial Sequence: Synthetic oligonucleotide
gacucggcagugccagggg

SEQ ID NO: 486208 - RNA, 19 nt, Artificial Sequence
  Description of Artificial Sequence: Synthetic oligonucleotide
auaugcccaccccaaugcu

SEQ ID NO: 486209 - RNA, 19 nt, Artificial Sequence
  Description of Artificial Sequence: Synthetic oligonucleotide
cucgccggagcucucggcc

SEQ ID NO: 486210 - RNA, 19 nt, Artificial Sequence
  Description of Artificial Sequence: Synthetic oligonucleotide
cggugaaagauuacuagag

SEQ ID NO: 486211 - RNA, 19 nt, Artificial Sequence
  Description of Artificial Sequence: Synthetic oligonucleotide
uacauaugcccaccccaau

SEQ ID NO: 486212 - RNA, 19 nt, Artificial Sequence
  Description of Artificial Sequence: Synthetic oligonucleotide
auacucgccgccguggcug

SEQ ID NO: 486213 - RNA, 19 nt, Artificial Sequence
  Description of Artificial Sequence: Synthetic oligonucleotide
ggaacagcgaacccgugga

SEQ ID NO: 486214 - RNA, 19 nt, Artificial Sequence
  Description of Artificial Sequence: Synthetic oligonucleotide
gccugacacgcucagagug

SEQ ID NO: 486215 - RNA, 19 nt, Artificial Sequence
  Description of Artificial Sequence: Synthetic oligonucleotide
agccggggugaauacagga

SEQ ID NO: 486216 - RNA, 19 nt, Artificial Sequence
  Description of Artificial Sequence: Synthetic oligonucleotide
caauaccgccccuuugcug

SEQ ID NO: 486217 - RNA, 19 nt, Artificial Sequence
  Description of Artificial Sequence: Synthetic oligonucleotide
cccggugaaagauuacuag

SEQ ID NO: 486218 - RNA, 19 nt, Artificial Sequence
  Description of Artificial Sequence: Synthetic oligonucleotide
cuccuggacguuguacucg

SEQ ID NO: 486219 - RNA, 19 nt, Artificial Sequence
  Description of Artificial Sequence: Synthetic oligonucleotide
auaccgccccuuugcuggc

SEQ ID NO: 486220 - RNA, 19 nt, Artificial Sequence
  Description of Artificial Sequence: Synthetic oligonucleotide
ggaguagggaaacuguaaa

SEQ ID NO: 486221 - RNA, 19 nt, Artificial Sequence
  Description of Artificial Sequence: Synthetic oligonucleotide
ugccaugcgcguugguggc

SEQ ID NO: 486222 - RNA, 19 nt, Artificial Sequence
  Description of Artificial Sequence: Synthetic oligonucleotide
acagugacgguccgugaau

SEQ ID NO: 486223 - RNA, 19 nt, Artificial Sequence
  Description of Artificial Sequence: Synthetic oligonucleotide
gucgccaucgaaggucacg

SEQ ID NO: 486224 - RNA, 19 nt, Artificial Sequence
  Description of Artificial Sequence: Synthetic oligonucleotide
acucauacucgccgccgug

SEQ ID NO: 486225 - RNA, 19 nt, Artificial Sequence
  Description of Artificial Sequence: Synthetic oligonucleotide
cacacaacgguaggucccc

SEQ ID NO: 486226 - RNA, 19 nt, Artificial Sequence
  Description of Artificial Sequence: Synthetic oligonucleotide
gcaacgguaagugccugcg

SEQ ID NO: 486227 - RNA, 19 nt, Artificial Sequence
  Description of Artificial Sequence: Synthetic oligonucleotide
gcgccugacacgcucagag

SEQ ID NO: 486228 - RNA, 19 nt, Artificial Sequence
  Description of Artificial Sequence: Synthetic oligonucleotide
gcugcauaacagcugucug

SEQ ID NO: 486229 - RNA, 19 nt, Artificial Sequence
  Description of Artificial Sequence: Synthetic oligonucleotide
auacauaugcccaccccaa

SEQ ID NO: 486230 - RNA, 19 nt, Artificial Sequence
  Description of Artificial Sequence: Synthetic oligonucleotide
cagcgcuggggcauacucc

SEQ ID NO: 486231 - RNA, 19 nt, Artificial Sequence
  Description of Artificial Sequence: Synthetic oligonucleotide
auggcuucgcaucgguaaa

SEQ ID NO: 486232 - RNA, 19 nt, Artificial Sequence
  Description of Artificial Sequence: Synthetic oligonucleotide
gccaaguaauguguucugg

SEQ ID NO: 486233 - RNA, 19 nt, Artificial Sequence
  Description of Artificial Sequence: Synthetic oligonucleotide
gugccugcgagggagcgag

SEQ ID NO: 486234 - RNA, 19 nt, Artificial Sequence
  Description of Artificial Sequence: Synthetic oligonucleotide
agucacgcgcagcaacccu

SEQ ID NO: 486235 - RNA, 19 nt, Artificial Sequence
  Description of Artificial Sequence: Synthetic oligonucleotide
acagcgacccacagccacg

SEQ ID NO: 486236 - RNA, 19 nt, Artificial Sequence
  Description of Artificial Sequence: Synthetic oligonucleotide
augcgucgcgcguggcgcc

SEQ ID NO: 486237 - RNA, 19 nt, Artificial Sequence
  Description of Artificial Sequence: Synthetic oligonucleotide
acguccaguugcucgggca

SEQ ID NO: 486238 - RNA, 19 nt, Artificial Sequence
  Description of Artificial Sequence: Synthetic oligonucleotide
gugcucccgagucacgcgc

SEQ ID NO: 486239 - RNA, 19 nt, Artificial Sequence
  Description of Artificial Sequence: Synthetic oligonucleotide
cacuuggaggcgaggccgc

SEQ ID NO: 486240 - RNA, 19 nt, Artificial Sequence
  Description of Artificial Sequence: Synthetic oligonucleotide
gcuucgcaucgguaaaugc

SEQ ID NO: 486241 - RNA, 19 nt, Artificial Sequence
  Description of Artificial Sequence: Synthetic oligonucleotide
agaggggcggccccuggca

SEQ ID NO: 486242 - RNA, 19 nt, Artificial Sequence
  Description of Artificial Sequence: Synthetic oligonucleotide
ucacgcgcagcaacccuuc

SEQ ID NO: 486243 - RNA, 19 nt, Artificial Sequence
  Description of Artificial Sequence: Synthetic oligonucleotide
agcgcucugguucuuucuu

SEQ ID NO: 486244 - RNA, 19 nt, Artificial Sequence
  Description of Artificial Sequence: Synthetic oligonucleotide
auacccggugaaagauuac

SEQ ID NO: 486245 - RNA, 19 nt, Artificial Sequence
  Description of Artificial Sequence: Synthetic oligonucleotide
gaggaguagggaaacugua

SEQ ID NO: 486246 - RNA, 19 nt, Artificial Sequence
  Description of Artificial Sequence: Synthetic oligonucleotide
acucggcagugccaggggu

SEQ ID NO: 486247 - RNA, 19 nt, Artificial Sequence
  Description of Artificial Sequence: Synthetic oligonucleotide
uccgugaauccgugccaug

SEQ ID NO: 486248 - RNA, 19 nt, Artificial Sequence
  Description of Artificial Sequence: Synthetic oligonucleotide
ccugacacgcucagagugc

SEQ ID NO: 486249 - RNA, 19 nt, Artificial Sequence
  Description of Artificial Sequence: Synthetic oligonucleotide
accgccccuuugcuggcac

SEQ ID NO: 486250 - RNA, 19 nt, Artificial Sequence
  Description of Artificial Sequence: Synthetic oligonucleotide
gagucacgcgcagcaaccc

SEQ ID NO: 486251 - RNA, 19 nt, Artificial Sequence
  Description of Artificial Sequence: Synthetic oligonucleotide
cucggcagugccagggguc

SEQ ID NO: 486252 - RNA, 19 nt, Artificial Sequence
  Description of Artificial Sequence: Synthetic oligonucleotide
gccgguauuccacaccaac

SEQ ID NO: 486253 - RNA, 19 nt, Artificial Sequence
  Description of Artificial Sequence: Synthetic oligonucleotide
cacgucaggcugcagccuc

SEQ ID NO: 486254 - RNA, 19 nt, Artificial Sequence
  Description of Artificial Sequence: Synthetic oligonucleotide
gcagccuauacuguccagc

SEQ ID NO: 486255 - RNA, 19 nt, Artificial Sequence
  Description of Artificial Sequence: Synthetic oligonucleotide
ggauaccaggggcaauacc

SEQ ID NO: 486256 - RNA, 19 nt, Artificial Sequence
  Description of Artificial Sequence: Synthetic oligonucleotide
cugcgagggagcgagucac

SEQ ID NO: 486257 - RNA, 19 nt, Artificial Sequence
  Description of Artificial Sequence: Synthetic oligonucleotide
accgugaugcgucgcgcgu

SEQ ID NO: 486258 - RNA, 19 nt, Artificial Sequence
  Description of Artificial Sequence: Synthetic oligonucleotide
cugcgcacucauacucgcc

SEQ ID NO: 486259 - RNA, 19 nt, Artificial Sequence
  Description of Artificial Sequence: Synthetic oligonucleotide
cagcuuacgguuaccaccu

SEQ ID NO: 486260 - RNA, 19 nt, Artificial Sequence
  Description of Artificial Sequence: Synthetic oligonucleotide
ugcgcguugguggccacac

SEQ ID NO: 486261 - RNA, 19 nt, Artificial Sequence
  Description of Artificial Sequence: Synthetic oligonucleotide
gacguuguacucgcccuuc

SEQ ID NO: 486262 - RNA, 19 nt, Artificial Sequence
  Description of Artificial Sequence: Synthetic oligonucleotide
augcgcauugguggcugcg

SEQ ID NO: 486263 - RNA, 19 nt, Artificial Sequence
  Description of Artificial Sequence: Synthetic oligonucleotide
ggccguggauuguacguag

SEQ ID NO: 486264 - RNA, 19 nt, Artificial Sequence
  Description of Artificial Sequence: Synthetic oligonucleotide
aucggggaguaaccaggcu

SEQ ID NO: 486265 - RNA, 19 nt, Artificial Sequence
  Description of Artificial Sequence: Synthetic oligonucleotide
agcgagucacuggacccag

SEQ ID NO: 486266 - RNA, 19 nt, Artificial Sequence
  Description of Artificial Sequence: Synthetic oligonucleotide
acguuguacucgcccuucu

SEQ ID NO: 486267 - RNA, 19 nt, Artificial Sequence
  Description of Artificial Sequence: Synthetic oligonucleotide
acuccacgcgugguucugg

SEQ ID NO: 486268 - RNA, 19 nt, Artificial Sequence
  Description of Artificial Sequence: Synthetic oligonucleotide
caugcgcauugguggcugc

SEQ ID NO: 486269 - RNA, 19 nt, Artificial Sequence
  Description of Artificial Sequence: Synthetic oligonucleotide
gaauccgugccaugcgcgu

SEQ ID NO: 486270 - RNA, 19 nt, Artificial Sequence
  Description of Artificial Sequence: Synthetic oligonucleotide
cucacauuaggcgguggga

SEQ ID NO: 486271 - RNA, 19 nt, Artificial Sequence
  Description of Artificial Sequence: Synthetic oligonucleotide
uccacuucgagggcagcuu

SEQ ID NO: 486272 - RNA, 19 nt, Artificial Sequence
  Description of Artificial Sequence: Synthetic oligonucleotide
ccggugaaagauuacuaga

SEQ ID NO: 486273 - RNA, 19 nt, Artificial Sequence
  Description of Artificial Sequence: Synthetic oligonucleotide
gcugcgcacucauacucgc

SEQ ID NO: 486274 - RNA, 19 nt, Artificial Sequence
  Description of Artificial Sequence: Synthetic oligonucleotide
cacgcgugguucuggcuuc

SEQ ID NO: 486275 - RNA, 19 nt, Artificial Sequence
  Description of Artificial Sequence: Synthetic oligonucleotide
uucgcagaagaagccccuc

SEQ ID NO: 486276 - RNA, 19 nt, Artificial Sequence
  Description of Artificial Sequence: Synthetic oligonucleotide
guuuugaccguggaaccgu

SEQ ID NO: 486277 - RNA, 19 nt, Artificial Sequence
  Description of Artificial Sequence: Synthetic oligonucleotide
ggacacgaagcucagcgcu

SEQ ID NO: 486278 - RNA, 19 nt, Artificial Sequence
  Description of Artificial Sequence: Synthetic oligonucleotide
cagcgacccacagccacgg

SEQ ID NO: 486279 - RNA, 19 nt, Artificial Sequence
  Description of Artificial Sequence: Synthetic oligonucleotide
gacgguccgugaauccgug

SEQ ID NO: 486280 - RNA, 19 nt, Artificial Sequence
  Description of Artificial Sequence: Synthetic oligonucleotide
uccacgcgugguucuggcu

SEQ ID NO: 486281 - RNA, 19 nt, Artificial Sequence
  Description of Artificial Sequence: Synthetic oligonucleotide
uacucgccgccguggcugc

SEQ ID NO: 486282 - RNA, 19 nt, Artificial Sequence
  Description of Artificial Sequence: Synthetic oligonucleotide
aggaaacaguccauccaaa

SEQ ID NO: 486283 - RNA, 19 nt, Artificial Sequence
  Description of Artificial Sequence: Synthetic oligonucleotide
uguccgugucagagcgcac

SEQ ID NO: 486284 - RNA, 19 nt, Artificial Sequence
  Description of Artificial Sequence: Synthetic oligonucleotide
agggagcgagucacuggac

SEQ ID NO: 486285 - RNA, 19 nt, Artificial Sequence
  Description of Artificial Sequence: Synthetic oligonucleotide
gggaguaaccaggcucggg

SEQ ID NO: 486286 - RNA, 19 nt, Artificial Sequence
  Description of Artificial Sequence: Synthetic oligonucleotide
cgagucacgcgcagcaacc

SEQ ID NO: 486287 - RNA, 19 nt, Artificial Sequence
  Description of Artificial Sequence: Synthetic oligonucleotide
acgcgugguucuggcuucc

SEQ ID NO: 486288 - RNA, 19 nt, Artificial Sequence
  Description of Artificial Sequence: Synthetic oligonucleotide
cagcuaagcgaugccucug

SEQ ID NO: 486289 - RNA, 19 nt, Artificial Sequence
  Description of Artificial Sequence: Synthetic oligonucleotide
cguggauuguacguagaag

SEQ ID NO: 486290 - RNA, 19 nt, Artificial Sequence
  Description of Artificial Sequence: Synthetic oligonucleotide
agauacccggugaaagauu

SEQ ID NO: 486291 - RNA, 19 nt, Artificial Sequence
  Description of Artificial Sequence: Synthetic oligonucleotide
cagcgugcucccgagucac

SEQ ID NO: 486292 - RNA, 19 nt, Artificial Sequence
  Description of Artificial Sequence: Synthetic oligonucleotide
accaacagugacgguccgu

SEQ ID NO: 486293 - RNA, 19 nt, Artificial Sequence
  Description of Artificial Sequence: Synthetic oligonucleotide
ggaccauauuccacgguga

SEQ ID NO: 486294 - RNA, 19 nt, Artificial Sequence
  Description of Artificial Sequence: Synthetic oligonucleotide
acccguggagaggggcggc

SEQ ID NO: 486295 - RNA, 19 nt, Artificial Sequence
  Description of Artificial Sequence: Synthetic oligonucleotide
uggcuucgcaucgguaaau

SEQ ID NO: 486296 - RNA, 19 nt, Artificial Sequence
  Description of Artificial Sequence: Synthetic oligonucleotide
cgguaagugccugcgaggg

SEQ ID NO: 486297 - RNA, 19 nt, Artificial Sequence
  Description of Artificial Sequence: Synthetic oligonucleotide
ccgguauuccacaccaaca

SEQ ID NO: 486298 - RNA, 19 nt, Artificial Sequence
  Description of Artificial Sequence: Synthetic oligonucleotide
caggccguggauuguacgu

SEQ ID NO: 486299 - RNA, 19 nt, Artificial Sequence
  Description of Artificial Sequence: Synthetic oligonucleotide
acccggugaaagauuacua

SEQ ID NO: 486300 - RNA, 19 nt, Artificial Sequence
  Description of Artificial Sequence: Synthetic oligonucleotide
cuguucugcgcuuggcgua

SEQ ID NO: 486301 - RNA, 19 nt, Artificial Sequence
  Description of Artificial Sequence: Synthetic oligonucleotide
ggcuucgcaucgguaaaug

SEQ ID NO: 486302 - RNA, 19 nt, Artificial Sequence
  Description of Artificial Sequence: Synthetic oligonucleotide
uccgccuucggcgcccggu

SEQ ID NO: 486303 - RNA, 19 nt, Artificial Sequence
  Description of Artificial Sequence: Synthetic oligonucleotide
gacacaccgccucgccgga

SEQ ID NO: 486304 - RNA, 19 nt, Artificial Sequence
  Description of Artificial Sequence: Synthetic oligonucleotide
cgguccgugaauccgugcc

SEQ ID NO: 486305 - RNA, 19 nt, Artificial Sequence
  Description of Artificial Sequence: Synthetic oligonucleotide
ccggggugaauacaggaca

SEQ ID NO: 486306 - RNA, 19 nt, Artificial Sequence
  Description of Artificial Sequence: Synthetic oligonucleotide
caacagugacgguccguga

SEQ ID NO: 486307 - RNA, 19 nt, Artificial Sequence
  Description of Artificial Sequence: Synthetic oligonucleotide
gcacccucggagcccaggc

SEQ ID NO: 486308 - RNA, 19 nt, Artificial Sequence
  Description of Artificial Sequence: Synthetic oligonucleotide
cacgcgcagcaacccuucc

SEQ ID NO: 486309 - RNA, 19 nt, Artificial Sequence
  Description of Artificial Sequence: Synthetic oligonucleotide
ggcagccuauacuguccag

SEQ ID NO: 486310 - RNA, 19 nt, Artificial Sequence
  Description of Artificial Sequence: Synthetic oligonucleotide
cucuagcguugauggcuuc

SEQ ID NO: 486311 - RNA, 19 nt, Artificial Sequence
  Description of Artificial Sequence: Synthetic oligonucleotide
gggcaauaccgccccuuug

SEQ ID NO: 486312 - RNA, 19 nt, Artificial Sequence
  Description of Artificial Sequence: Synthetic oligonucleotide
gcgcguggcgcccaugcgc

SEQ ID NO: 486313 - RNA, 19 nt, Artificial Sequence
  Description of Artificial Sequence: Synthetic oligonucleotide
ccgucaacuucacaggaaa

SEQ ID NO: 486314 - RNA, 19 nt, Artificial Sequence
  Description of Artificial Sequence: Synthetic oligonucleotide
caacgguaagugccugcga

SEQ ID NO: 486315 - RNA, 19 nt, Artificial Sequence
  Description of Artificial Sequence: Synthetic oligonucleotide
gguaagugccugcgaggga

SEQ ID NO: 486316 - RNA, 19 nt, Artificial Sequence
  Description of Artificial Sequence: Synthetic oligonucleotide
gcgcacucauacucgccgc

SEQ ID NO: 486317 - RNA, 19 nt, Artificial Sequence
  Description of Artificial Sequence: Synthetic oligonucleotide
aggccguggauuguacgua

SEQ ID NO: 486318 - RNA, 19 nt, Artificial Sequence
  Description of Artificial Sequence: Synthetic oligonucleotide
aaguucccgccuggccgca

SEQ ID NO: 486319 - RNA, 19 nt, Artificial Sequence
  Description of Artificial Sequence: Synthetic oligonucleotide
caucgguaaaugccagcgu

SEQ ID NO: 486320 - RNA, 19 nt, Artificial Sequence
  Description of Artificial Sequence: Synthetic oligonucleotide
ugcgucgcgcguggcgccc

SEQ ID NO: 486321 - RNA, 19 nt, Artificial Sequence
  Description of Artificial Sequence: Synthetic oligonucleotide
acgcugcauaacagcuguc

SEQ ID NO: 486322 - RNA, 19 nt, Artificial Sequence
  Description of Artificial Sequence: Synthetic oligonucleotide
aguucccgccuggccgcac

SEQ ID NO: 486323 - RNA, 19 nt, Artificial Sequence
  Description of Artificial Sequence: Synthetic oligonucleotide
aggggcaauaccgccccuu

SEQ ID NO: 486324 - RNA, 19 nt, Artificial Sequence
  Description of Artificial Sequence: Synthetic oligonucleotide
cccgccagcgccauugaga

SEQ ID NO: 486325 - RNA, 19 nt, Artificial Sequence
  Description of Artificial Sequence: Synthetic oligonucleotide
gcgcccaugcgcauuggug

SEQ ID NO: 486326 - RNA, 19 nt, Artificial Sequence
  Description of Artificial Sequence: Synthetic oligonucleotide
caugcgcguugguggccac

SEQ ID NO: 486327 - RNA, 19 nt, Artificial Sequence
  Description of Artificial Sequence: Synthetic oligonucleotide
cgacuccgcgcucacgacg

SEQ ID NO: 486328 - RNA, 19 nt, Artificial Sequence
  Description of Artificial Sequence: Synthetic oligonucleotide
ugguggcugcgcacucaua

SEQ ID NO: 486329 - RNA, 19 nt, Artificial Sequence
  Description of Artificial Sequence: Synthetic oligonucleotide
ccagcgagagguaaacccu

SEQ ID NO: 486330 - RNA, 19 nt, Artificial Sequence
  Description of Artificial Sequence: Synthetic oligonucleotide
cagccacggaccggccacg

SEQ ID NO: 486331 - RNA, 19 nt, Artificial Sequence
  Description of Artificial Sequence: Synthetic oligonucleotide
cgcacucauacucgccgcc

SEQ ID NO: 486332 - RNA, 19 nt, Artificial Sequence
  Description of Artificial Sequence: Synthetic oligonucleotide
gcaauaccgccccuuugcu

SEQ ID NO: 486333 - RNA, 19 nt, Artificial Sequence
  Description of Artificial Sequence: Synthetic oligonucleotide
cugacacgcucagagugcu

SEQ ID NO: 486334 - RNA, 19 nt, Artificial Sequence
  Description of Artificial Sequence: Synthetic oligonucleotide
agcuuacgguuaccaccuu

SEQ ID NO: 486335 - RNA, 19 nt, Artificial Sequence
  Description of Artificial Sequence: Synthetic oligonucleotide
ggcacccucggagcccagg

SEQ ID NO: 486336 - RNA, 19 nt, Artificial Sequence
  Description of Artificial Sequence: Synthetic oligonucleotide
cacucauacucgccgccgu

SEQ ID NO: 486337 - RNA, 19 nt, Artificial Sequence
  Description of Artificial Sequence: Synthetic oligonucleotide
gcguugguggccacacaac

SEQ ID NO: 486338 - RNA, 19 nt, Artificial Sequence
  Description of Artificial Sequence: Synthetic oligonucleotide
ccgugacauuuaacuggag

SEQ ID NO: 486339 - RNA, 19 nt, Artificial Sequence
  Description of Artificial Sequence: Synthetic oligonucleotide
augcgcguugguggccaca

SEQ ID NO: 486340 - RNA, 19 nt, Artificial Sequence
  Description of Artificial Sequence: Synthetic oligonucleotide
ccguggauuguacguagaa

SEQ ID NO: 486341 - RNA, 19 nt, Artificial Sequence
  Description of Artificial Sequence: Synthetic oligonucleotide
cauacucgccgccguggcu

SEQ ID NO: 486342 - RNA, 19 nt, Artificial Sequence
  Description of Artificial Sequence: Synthetic oligonucleotide
guccgugaauccgugccau

SEQ ID NO: 486343 - RNA, 19 nt, Artificial Sequence
  Description of Artificial Sequence: Synthetic oligonucleotide
gcuucccgucaacuucaca

SEQ ID NO: 486344 - RNA, 19 nt, Artificial Sequence
  Description of Artificial Sequence: Synthetic oligonucleotide
gcugauccucuagcguuga

SEQ ID NO: 486345 - RNA, 19 nt, Artificial Sequence
  Description of Artificial Sequence: Synthetic oligonucleotide
ccugcgagggagcgaguca

SEQ ID NO: 486346 - RNA, 19 nt, Artificial Sequence
  Description of Artificial Sequence: Synthetic oligonucleotide
gccugcgagggagcgaguc

SEQ ID NO: 486347 - RNA, 19 nt, Artificial Sequence
  Description of Artificial Sequence: Synthetic oligonucleotide
cugggacaaucugagucau

SEQ ID NO: 486348 - RNA, 19 nt, Artificial Sequence
  Description of Artificial Sequence: Synthetic oligonucleotide
cgagagguaaacccuggcu

SEQ ID NO: 486349 - RNA, 19 nt, Artificial Sequence
  Description of Artificial Sequence: Synthetic oligonucleotide
gccuucggcgcccgguguc

SEQ ID NO: 486350 - RNA, 19 nt, Artificial Sequence
  Description of Artificial Sequence: Synthetic oligonucleotide
cuaucaggccuagcacagu

SEQ ID NO: 486351 - RNA, 19 nt, Artificial Sequence
  Description of Artificial Sequence: Synthetic oligonucleotide
cagcgccguagccucagcu

SEQ ID NO: 486352 - RNA, 19 nt, Artificial Sequence
  Description of Artificial Sequence: Synthetic oligonucleotide
ggcucugcucuggacccuc

SEQ ID NO: 486353 - RNA, 19 nt, Artificial Sequence
  Description of Artificial Sequence: Synthetic oligonucleotide
gucuccccguccacuucga

SEQ ID NO: 486354 - RNA, 19 nt, Artificial Sequence
  Description of Artificial Sequence: Synthetic oligonucleotide
ccagcgugcucccgaguca

SEQ ID NO: 486355 - RNA, 19 nt, Artificial Sequence
  Description of Artificial Sequence: Synthetic oligonucleotide
ccgugaugcgucgcgcgug

SEQ ID NO: 486356 - RNA, 19 nt, Artificial Sequence
  Description of Artificial Sequence: Synthetic oligonucleotide
gccuagcacagugcacuga

SEQ ID NO: 486357 - RNA, 19 nt, Artificial Sequence
  Description of Artificial Sequence: Synthetic oligonucleotide
gccgcacacuuggaggcga

SEQ ID NO: 486358 - RNA, 19 nt, Artificial Sequence
  Description of Artificial Sequence: Synthetic oligonucleotide
gccguggauuguacguaga

SEQ ID NO: 486359 - RNA, 19 nt, Artificial Sequence
  Description of Artificial Sequence: Synthetic oligonucleotide
gcgaacccguggagagggg

SEQ ID NO: 486360 - RNA, 19 nt, Artificial Sequence
  Description of Artificial Sequence: Synthetic oligonucleotide
ccguggagaggggcggccc

SEQ ID NO: 486361 - RNA, 19 nt, Artificial Sequence
  Description of Artificial Sequence: Synthetic oligonucleotide
ccgccuucggcgcccggug

SEQ ID NO: 486362 - RNA, 19 nt, Artificial Sequence
  Description of Artificial Sequence: Synthetic oligonucleotide
uggcggcgacuccgcgcuc

SEQ ID NO: 486363 - RNA, 19 nt, Artificial Sequence
  Description of Artificial Sequence: Synthetic oligonucleotide
ggggcaauaccgccccuuu

SEQ ID NO: 486364 - RNA, 19 nt, Artificial Sequence
  Description of Artificial Sequence: Synthetic oligonucleotide
ggcuucccgucaacuucac

SEQ ID NO: 486365 - RNA, 19 nt, Artificial Sequence
  Description of Artificial Sequence: Synthetic oligonucleotide
ccggccuuucugagcccac

SEQ ID NO: 486366 - RNA, 19 nt, Artificial Sequence
  Description of Artificial Sequence: Synthetic oligonucleotide
ccaugcgcguugguggcca

SEQ ID NO: 486367 - RNA, 19 nt, Artificial Sequence
  Description of Artificial Sequence: Synthetic oligonucleotide
cacugcagaccagcgccgu

SEQ ID NO: 486368 - RNA, 19 nt, Artificial Sequence
  Description of Artificial Sequence: Synthetic oligonucleotide
ggcugccggcuuacugggc

SEQ ID NO: 486369 - RNA, 19 nt, Artificial Sequence
  Description of Artificial Sequence: Synthetic oligonucleotide
ccgccccuuugcuggcacc

SEQ ID NO: 486370 - RNA, 19 nt, Artificial Sequence
  Description of Artificial Sequence: Synthetic oligonucleotide
ggcggccccuggcacugca

SEQ ID NO: 486371 - RNA, 19 nt, Artificial Sequence
  Description of Artificial Sequence: Synthetic oligonucleotide
cacgcgcaccgugaugcgu

SEQ ID NO: 486372 - RNA, 19 nt, Artificial Sequence
  Description of Artificial Sequence: Synthetic oligonucleotide
ccacgcgugguucuggcuu

SEQ ID NO: 486373 - RNA, 19 nt, Artificial Sequence
  Description of Artificial Sequence: Synthetic oligonucleotide
ggcgccugacacgcucaga

SEQ ID NO: 486374 - RNA, 19 nt, Artificial Sequence
  Description of Artificial Sequence: Synthetic oligonucleotide
cgccaucgaaggucacguc

SEQ ID NO: 486375 - RNA, 19 nt, Artificial Sequence
  Description of Artificial Sequence: Synthetic oligonucleotide
gcgcguugguggccacaca

SEQ ID NO: 486376 - RNA, 19 nt, Artificial Sequence
  Description of Artificial Sequence: Synthetic oligonucleotide
ccgugucagagcgcacaca

SEQ ID NO: 486377 - RNA, 19 nt, Artificial Sequence
  Description of Artificial Sequence: Synthetic oligonucleotide
gcgcucacgacgacaguuu

SEQ ID NO: 486378 - RNA, 19 nt, Artificial Sequence
  Description of Artificial Sequence: Synthetic oligonucleotide
gcgcuggggcauacuccac

SEQ ID NO: 486379 - RNA, 19 nt, Artificial Sequence
  Description of Artificial Sequence: Synthetic oligonucleotide
ccccgcuaucaggccuagc

SEQ ID NO: 486380 - RNA, 19 nt, Artificial Sequence
  Description of Artificial Sequence: Synthetic oligonucleotide
cgcgcucacgacgacaguu

SEQ ID NO: 486381 - RNA, 19 nt, Artificial Sequence
  Description of Artificial Sequence: Synthetic oligonucleotide
gggccucgcagcggaggcu

SEQ ID NO: 486382 - RNA, 19 nt, Artificial Sequence
  Description of Artificial Sequence: Synthetic oligonucleotide
gaccggccacgcgcaccgu

SEQ ID NO: 486383 - RNA, 19 nt, Artificial Sequence
  Description of Artificial Sequence: Synthetic oligonucleotide
caggggcuacuggcucacu

SEQ ID NO: 486384 - RNA, 19 nt, Artificial Sequence
  Description of Artificial Sequence: Synthetic oligonucleotide
gcgucgcgcguggcgccca

SEQ ID NO: 486385 - RNA, 19 nt, Artificial Sequence
  Description of Artificial Sequence: Synthetic oligonucleotide
cgacgacaguuuugaccgu

SEQ ID NO: 486386 - RNA, 19 nt, Artificial Sequence
  Description of Artificial Sequence: Synthetic oligonucleotide
gugucccgccagcgccauu

SEQ ID NO: 486387 - RNA, 19 nt, Artificial Sequence
  Description of Artificial Sequence: Synthetic oligonucleotide
ccgccucgccggagcucuc

SEQ ID NO: 486388 - RNA, 19 nt, Artificial Sequence
  Description of Artificial Sequence: Synthetic oligonucleotide
gcucagcgcucugguucuu

SEQ ID NO: 486389 - RNA, 19 nt, Artificial Sequence
  Description of Artificial Sequence: Synthetic oligonucleotide
ccgugccgguugguggcau

SEQ ID NO: 486390 - RNA, 19 nt, Artificial Sequence
  Description of Artificial Sequence: Synthetic oligonucleotide
cgucgcgcguggcgcccau

SEQ ID NO: 486391 - RNA, 19 nt, Artificial Sequence
  Description of Artificial Sequence: Synthetic oligonucleotide
aguaauaucugcuuggagc

SEQ ID NO: 486392 - RNA, 19 nt, Artificial Sequence
  Description of Artificial Sequence: Synthetic oligonucleotide
uuaaagaucacagucaugg

SEQ ID NO: 486393 - RNA, 19 nt, Artificial Sequence
  Description of Artificial Sequence: Synthetic oligonucleotide
aaauagauaaucuuccgca

SEQ ID NO: 486394 - RNA, 19 nt, Artificial Sequence
  Description of Artificial Sequence: Synthetic oligonucleotide
ucucuuauaggucacagag

SEQ ID NO: 486395 - RNA, 19 nt, Artificial Sequence
  Description of Artificial Sequence: Synthetic oligonucleotide
auauaauaguaauaucugc

SEQ ID NO: 486396 - RNA, 19 nt, Artificial Sequence
  Description of Artificial Sequence: Synthetic oligonucleotide
uucaaaucagcacauagag

SEQ ID NO: 486397 - RNA, 19 nt, Artificial Sequence
  Description of Artificial Sequence: Synthetic oligonucleotide
ucuuauaggucacagaggc

SEQ ID NO: 486398 - RNA, 19 nt, Artificial Sequence
  Description of Artificial Sequence: Synthetic oligonucleotide
aaaguaugaccucagucac

SEQ ID NO: 486399 - RNA, 19 nt, Artificial Sequence
  Description of Artificial Sequence: Synthetic oligonucleotide
uauaauaguaauaucugcu

SEQ ID NO: 486400 - RNA, 19 nt, Artificial Sequence
  Description of Artificial Sequence: Synthetic oligonucleotide
aauacccaaucccauagcg

SEQ ID NO: 486401 - RNA, 19 nt, Artificial Sequence
  Description of Artificial Sequence: Synthetic oligonucleotide
cuauaagugaucucgaacc

SEQ ID NO: 486402 - RNA, 19 nt, Artificial Sequence
  Description of Artificial Sequence: Synthetic oligonucleotide
cuacaaaacguauucaugg

SEQ ID NO: 486403 - RNA, 19 nt, Artificial Sequence
  Description of Artificial Sequence: Synthetic oligonucleotide
gacaaaguaauuuccagag

SEQ ID NO: 486404 - RNA, 19 nt, Artificial Sequence
  Description of Artificial Sequence: Synthetic oligonucleotide
uaugaguaccacauaaggg

SEQ ID NO: 486405 - RNA, 19 nt, Artificial Sequence
  Description of Artificial Sequence: Synthetic oligonucleotide
ucuuagguuauuuucaccc

SEQ ID NO: 486406 - RNA, 19 nt, Artificial Sequence
  Description of Artificial Sequence: Synthetic oligonucleotide
uaacauaucuguuaggucu

SEQ ID NO: 486407 - RNA, 19 nt, Artificial Sequence
  Description of Artificial Sequence: Synthetic oligonucleotide
uauacuguugggauuaaag

SEQ ID NO: 486408 - RNA, 19 nt, Artificial Sequence
  Description of Artificial Sequence: Synthetic oligonucleotide
aaugccauacuguuuuaac

SEQ ID NO: 486409 - RNA, 19 nt, Artificial Sequence
  Description of Artificial Sequence: Synthetic oligonucleotide
uaaucaucaaacauuguga

SEQ ID NO: 486410 - RNA, 19 nt, Artificial Sequence
  Description of Artificial Sequence: Synthetic oligonucleotide
auguuaguagcauuaaagg

SEQ ID NO: 486411 - RNA, 19 nt, Artificial Sequence
  Description of Artificial Sequence: Synthetic oligonucleotide
aauacugggucuuaccuug

SEQ ID NO: 486412 - RNA, 19 nt, Artificial Sequence
  Description of Artificial Sequence: Synthetic oligonucleotide
uauaaauuguaagauauac

SEQ ID NO: 486413 - RNA, 19 nt, Artificial Sequence
  Description of Artificial Sequence: Synthetic oligonucleotide
uuuaccaaaauuuggagau

SEQ ID NO: 486414 - RNA, 19 nt, Artificial Sequence
  Description of Artificial Sequence: Synthetic oligonucleotide
aaugaacgcacgcagcuuc

SEQ ID NO: 486415 - RNA, 19 nt, Artificial Sequence
  Description of Artificial Sequence: Synthetic oligonucleotide
aauagauaaucuuccgcag

SEQ ID NO: 486416 - RNA, 19 nt, Artificial Sequence
  Description of Artificial Sequence: Synthetic oligonucleotide
aaugcuagcuauuagcaau

SEQ ID NO: 486417 - RNA, 19 nt, Artificial Sequence
  Description of Artificial Sequence: Synthetic oligonucleotide
uuaaguucagaaaucauua

SEQ ID NO: 486418 - RNA, 19 nt, Artificial Sequence
  Description of Artificial Sequence: Synthetic oligonucleotide
acuauaagugaucucgaac

SEQ ID NO: 486419 - RNA, 19 nt, Artificial Sequence
  Description of Artificial Sequence: Synthetic oligonucleotide
aaauugaugaaggacacga

SEQ ID NO: 486420 - RNA, 19 nt, Artificial Sequence
  Description of Artificial Sequence: Synthetic oligonucleotide
acuuaucuaugccauaaac

SEQ ID NO: 486421 - RNA, 19 nt, Artificial Sequence
  Description of Artificial Sequence: Synthetic oligonucleotide
gauaagugaagcccaaugc

SEQ ID NO: 486422 - RNA, 19 nt, Artificial Sequence
  Description of Artificial Sequence: Synthetic oligonucleotide
aauauacuauaagugaucu

SEQ ID NO: 486423 - RNA, 19 nt, Artificial Sequence
  Description of Artificial Sequence: Synthetic oligonucleotide
aauuuugugaaaugcacuu

SEQ ID NO: 486424 - RNA, 19 nt, Artificial Sequence
  Description of Artificial Sequence: Synthetic oligonucleotide
uguuaguagcauuaaagga

SEQ ID NO: 486425 - RNA, 19 nt, Artificial Sequence
  Description of Artificial Sequence: Synthetic oligonucleotide
aagaugaccacaauuagca

SEQ ID NO: 486426 - RNA, 19 nt, Artificial Sequence
  Description of Artificial Sequence: Synthetic oligonucleotide
uauaccagggauuuuaaaa

SEQ ID NO: 486427 - RNA, 19 nt, Artificial Sequence
  Description of Artificial Sequence: Synthetic oligonucleotide
aauguaaugccauacuguu

SEQ ID NO: 486428 - RNA, 19 nt, Artificial Sequence
  Description of Artificial Sequence: Synthetic oligonucleotide
acaaccaucacaugugauc

SEQ ID NO: 486429 - RNA, 19 nt, Artificial Sequence
  Description of Artificial Sequence: Synthetic oligonucleotide
uuuuaccaaaauuuggaga

SEQ ID NO: 486430 - RNA, 19 nt, Artificial Sequence
  Description of Artificial Sequence: Synthetic oligonucleotide
ucuacaaaacguauucaug

SEQ ID NO: 486431 - RNA, 19 nt, Artificial Sequence
  Description of Artificial Sequence: Synthetic oligonucleotide
ucuuguuguagcuugaaaa

SEQ ID NO: 486432 - RNA, 19 nt, Artificial Sequence
  Description of Artificial Sequence: Synthetic oligonucleotide
aaaguaauuuccagagcgc

SEQ ID NO: 486433 - RNA, 19 nt, Artificial Sequence
  Description of Artificial Sequence: Synthetic oligonucleotide
uuagcagaggcaauguagc

SEQ ID NO: 486434 - RNA, 19 nt, Artificial Sequence
  Description of Artificial Sequence: Synthetic oligonucleotide
agagaucugauuaggaagc

SEQ ID NO: 486435 - RNA, 19 nt, Artificial Sequence
  Description of Artificial Sequence: Synthetic oligonucleotide
ugcauaauucuagagagug

SEQ ID NO: 486436 - RNA, 19 nt, Artificial Sequence
  Description of Artificial Sequence: Synthetic oligonucleotide
ugauaagugaagcccaaug

SEQ ID NO: 486437 - RNA, 19 nt, Artificial Sequence
  Description of Artificial Sequence: Synthetic oligonucleotide
aauaguugaaauaugccaa

SEQ ID NO: 486438 - RNA, 19 nt, Artificial Sequence
  Description of Artificial Sequence: Synthetic oligonucleotide
cuauuagcaauguuaguag

SEQ ID NO: 486439 - RNA, 19 nt, Artificial Sequence
  Description of Artificial Sequence: Synthetic oligonucleotide
acauagagucccaauaugc

SEQ ID NO: 486440 - RNA, 19 nt, Artificial Sequence
  Description of Artificial Sequence: Synthetic oligonucleotide
uccaagaugaccacaauua

SEQ ID NO: 486441 - RNA, 19 nt, Artificial Sequence
  Description of Artificial Sequence: Synthetic oligonucleotide
aacguauucauggaaacgu

SEQ ID NO: 486442 - RNA, 19 nt, Artificial Sequence
  Description of Artificial Sequence: Synthetic oligonucleotide
aggaauacucuucuuggac

SEQ ID NO: 486443 - RNA, 19 nt, Artificial Sequence
  Description of Artificial Sequence: Synthetic oligonucleotide
uauaaguacaaccuaucua

SEQ ID NO: 486444 - RNA, 19 nt, Artificial Sequence
  Description of Artificial Sequence: Synthetic oligonucleotide
aacagcaucgaaguggcag

SEQ ID NO: 486445 - RNA, 19 nt, Artificial Sequence
  Description of Artificial Sequence: Synthetic oligonucleotide
agcaauauucuccaagaug

SEQ ID NO: 486446 - RNA, 19 nt, Artificial Sequence
  Description of Artificial Sequence: Synthetic oligonucleotide
uuaaaauguaaugccauac

SEQ ID NO: 486447 - RNA, 19 nt, Artificial Sequence
  Description of Artificial Sequence: Synthetic oligonucleotide
aaggauuuauauuugcaua

SEQ ID NO: 486448 - RNA, 19 nt, Artificial Sequence
  Description of Artificial Sequence: Synthetic oligonucleotide
aauguuucccauuuucaaa

SEQ ID NO: 486449 - RNA, 19 nt, Artificial Sequence
  Description of Artificial Sequence: Synthetic oligonucleotide
uucucuucgauccaugcgu

SEQ ID NO: 486450 - RNA, 19 nt, Artificial Sequence
  Description of Artificial Sequence: Synthetic oligonucleotide
uguuucagcuacaagccug

SEQ ID NO: 486451 - RNA, 19 nt, Artificial Sequence
  Description of Artificial Sequence: Synthetic oligonucleotide
cacaaugcuagcuauuagc

SEQ ID NO: 486452 - RNA, 19 nt, Artificial Sequence
  Description of Artificial Sequence: Synthetic oligonucleotide
cuaucuacaaaacguauuc

SEQ ID NO: 486453 - RNA, 19 nt, Artificial Sequence
  Description of Artificial Sequence: Synthetic oligonucleotide
uugccaauaauauuaaguu

SEQ ID NO: 486454 - RNA, 19 nt, Artificial Sequence
  Description of Artificial Sequence: Synthetic oligonucleotide
caaaguaugaccucaguca

SEQ ID NO: 486455 - RNA, 19 nt, Artificial Sequence
  Description of Artificial Sequence: Synthetic oligonucleotide
aaacguauucauggaaacg

SEQ ID NO: 486456 - RNA, 19 nt, Artificial Sequence
  Description of Artificial Sequence: Synthetic oligonucleotide
ucccauagcguccauuggg

SEQ ID NO: 486457 - RNA, 19 nt, Artificial Sequence
  Description of Artificial Sequence: Synthetic oligonucleotide
uaagugaucucgaaccaca

SEQ ID NO: 486458 - RNA, 19 nt, Artificial Sequence
  Description of Artificial Sequence: Synthetic oligonucleotide
aaauguaaugccauacugu

SEQ ID NO: 486459 - RNA, 19 nt, Artificial Sequence
  Description of Artificial Sequence: Synthetic oligonucleotide
uucaauuaagugccuauaa

SEQ ID NO: 486460 - RNA, 19 nt, Artificial Sequence
  Description of Artificial Sequence: Synthetic oligonucleotide
ucaucuccgaauuuuguga

SEQ ID NO: 486461 - RNA, 19 nt, Artificial Sequence
  Description of Artificial Sequence: Synthetic oligonucleotide
uauaagugaucucgaacca

SEQ ID NO: 486462 - RNA, 19 nt, Artificial Sequence
  Description of Artificial Sequence: Synthetic oligonucleotide
ugguaucuuuccaugaaug

SEQ ID NO: 486463 - RNA, 19 nt, Artificial Sequence
  Description of Artificial Sequence: Synthetic oligonucleotide
uuaggaagcauaugaguac

SEQ ID NO: 486464 - RNA, 19 nt, Artificial Sequence
  Description of Artificial Sequence: Synthetic oligonucleotide
aauuaagugccuauaagua

SEQ ID NO: 486465 - RNA, 19 nt, Artificial Sequence
  Description of Artificial Sequence: Synthetic oligonucleotide
uauuagcaauguuaguagc

SEQ ID NO: 486466 - RNA, 19 nt, Artificial Sequence
  Description of Artificial Sequence: Synthetic oligonucleotide
caagaugaccacaauuagc

SEQ ID NO: 486467 - RNA, 19 nt, Artificial Sequence
  Description of Artificial Sequence: Synthetic oligonucleotide
gaauacucuucuuggacug

SEQ ID NO: 486468 - RNA, 19 nt, Artificial Sequence
  Description of Artificial Sequence: Synthetic oligonucleotide
uuguaaucauuucugugcu

SEQ ID NO: 486469 - RNA, 19 nt, Artificial Sequence
  Description of Artificial Sequence: Synthetic oligonucleotide
acaugugauccccagucac

SEQ ID NO: 486470 - RNA, 19 nt, Artificial Sequence
  Description of Artificial Sequence: Synthetic oligonucleotide
caaauacccaaucccauag

SEQ ID NO: 486471 - RNA, 19 nt, Artificial Sequence
  Description of Artificial Sequence: Synthetic oligonucleotide
uucugauaagugaagccca

SEQ ID NO: 486472 - RNA, 19 nt, Artificial Sequence
  Description of Artificial Sequence: Synthetic oligonucleotide
auagcguccauugggagcg

SEQ ID NO: 486473 - RNA, 19 nt, Artificial Sequence
  Description of Artificial Sequence: Synthetic oligonucleotide
ugcguuguagccaggagga

SEQ ID NO: 486474 - RNA, 19 nt, Artificial Sequence
  Description of Artificial Sequence: Synthetic oligonucleotide
cuagcuauuagcaauguua

SEQ ID NO: 486475 - RNA, 19 nt, Artificial Sequence
  Description of Artificial Sequence: Synthetic oligonucleotide
augcguuguagccaggagg

SEQ ID NO: 486476 - RNA, 19 nt, Artificial Sequence
  Description of Artificial Sequence: Synthetic oligonucleotide
uuagguuauuuucacccac

SEQ ID NO: 486477 - RNA, 19 nt, Artificial Sequence
  Description of Artificial Sequence: Synthetic oligonucleotide
aggauuuauauuugcauaa

SEQ ID NO: 486478 - RNA, 19 nt, Artificial Sequence
  Description of Artificial Sequence: Synthetic oligonucleotide
auauuaaguucagaaauca

SEQ ID NO: 486479 - RNA, 19 nt, Artificial Sequence
  Description of Artificial Sequence: Synthetic oligonucleotide
gugaacaugugucggaugc

SEQ ID NO: 486480 - RNA, 19 nt, Artificial Sequence
  Description of Artificial Sequence: Synthetic oligonucleotide
cauaagggaacaaagaacu

SEQ ID NO: 486481 - RNA, 19 nt, Artificial Sequence
  Description of Artificial Sequence: Synthetic oligonucleotide
cacgagaacagcaucgaag

SEQ ID NO: 486482 - RNA, 19 nt, Artificial Sequence
  Description of Artificial Sequence: Synthetic oligonucleotide
aaacuuaucuaugccauaa

SEQ ID NO: 486483 - RNA, 19 nt, Artificial Sequence
  Description of Artificial Sequence: Synthetic oligonucleotide
acgagaacagcaucgaagu

SEQ ID NO: 486484 - RNA, 19 nt, Artificial Sequence
  Description of Artificial Sequence: Synthetic oligonucleotide
cuuaaucccauauucacaa

SEQ ID NO: 486485 - RNA, 19 nt, Artificial Sequence
  Description of Artificial Sequence: Synthetic oligonucleotide
ugcgucaucuccuucuaag

SEQ ID NO: 486486 - RNA, 19 nt, Artificial Sequence
  Description of Artificial Sequence: Synthetic oligonucleotide
gacugccuuauacuguugg

SEQ ID NO: 486487 - RNA, 19 nt, Artificial Sequence
  Description of Artificial Sequence: Synthetic oligonucleotide
uggagcaacucacucuuag

SEQ ID NO: 486488 - RNA, 19 nt, Artificial Sequence
  Description of Artificial Sequence: Synthetic oligonucleotide
ucaagcuuaggggugaaca

SEQ ID NO: 486489 - RNA, 19 nt, Artificial Sequence
  Description of Artificial Sequence: Synthetic oligonucleotide
ugcacuuuucauuuaugac

SEQ ID NO: 486490 - RNA, 19 nt, Artificial Sequence
  Description of Artificial Sequence: Synthetic oligonucleotide
uaauucuagagagugugga

SEQ ID NO: 486491 - RNA, 19 nt, Artificial Sequence
  Description of Artificial Sequence: Synthetic oligonucleotide
uguagcuugaaaaggcaau

SEQ ID NO: 486492 - RNA, 19 nt, Artificial Sequence
  Description of Artificial Sequence: Synthetic oligonucleotide
uacaaaacguauucaugga

SEQ ID NO: 486493 - RNA, 19 nt, Artificial Sequence
  Description of Artificial Sequence: Synthetic oligonucleotide
caucuaugagguugcagcg

SEQ ID NO: 486494 - RNA, 19 nt, Artificial Sequence
  Description of Artificial Sequence: Synthetic oligonucleotide
auauacuauaagugaucuc

SEQ ID NO: 486495 - RNA, 19 nt, Artificial Sequence
  Description of Artificial Sequence: Synthetic oligonucleotide
aaguaauuuccagagcgcu

SEQ ID NO: 486496 - RNA, 19 nt, Artificial Sequence
  Description of Artificial Sequence: Synthetic oligonucleotide
ucacucuuagguuauuuuc

SEQ ID NO: 486497 - RNA, 19 nt, Artificial Sequence
  Description of Artificial Sequence: Synthetic oligonucleotide
uuauaaauuguaagauaua

SEQ ID NO: 486498 - RNA, 19 nt, Artificial Sequence
  Description of Artificial Sequence: Synthetic oligonucleotide
guuaaugugauggggauga

SEQ ID NO: 486499 - RNA, 19 nt, Artificial Sequence
  Description of Artificial Sequence: Synthetic oligonucleotide
aguacaaccuaucuacaaa

SEQ ID NO: 486500 - RNA, 19 nt, Artificial Sequence
  Description of Artificial Sequence: Synthetic oligonucleotide
aguauugcaagagccauca

SEQ ID NO: 486501 - RNA, 19 nt, Artificial Sequence
  Description of Artificial Sequence: Synthetic oligonucleotide
uaagggaacaaagaacuaa

SEQ ID NO: 486502 - RNA, 19 nt, Artificial Sequence
  Description of Artificial Sequence: Synthetic oligonucleotide
uagguuauuuucacccacc

SEQ ID NO: 486503 - RNA, 19 nt, Artificial Sequence
  Description of Artificial Sequence: Synthetic oligonucleotide
auagauaaucuuccgcagu

SEQ ID NO: 486504 - RNA, 19 nt, Artificial Sequence
  Description of Artificial Sequence: Synthetic oligonucleotide
aguaugaccucagucacug

SEQ ID NO: 486505 - RNA, 19 nt, Artificial Sequence
  Description of Artificial Sequence: Synthetic oligonucleotide
uaguaauaucugcuuggag

SEQ ID NO: 486506 - RNA, 19 nt, Artificial Sequence
  Description of Artificial Sequence: Synthetic oligonucleotide
acuaucuugcuucaaguuu

SEQ ID NO: 486507 - RNA, 19 nt, Artificial Sequence
  Description of Artificial Sequence: Synthetic oligonucleotide
uacccaaucccauagcguc

SEQ ID NO: 486508 - RNA, 19 nt, Artificial Sequence
  Description of Artificial Sequence: Synthetic oligonucleotide
ugccaauaauauuaaguuc

SEQ ID NO: 486509 - RNA, 19 nt, Artificial Sequence
  Description of Artificial Sequence: Synthetic oligonucleotide
uuguaagauauaccaggga

SEQ ID NO: 486510 - RNA, 19 nt, Artificial Sequence
  Description of Artificial Sequence: Synthetic oligonucleotide
uaagugaagcccaaugcuu

SEQ ID NO: 486511 - RNA, 19 nt, Artificial Sequence
  Description of Artificial Sequence: Synthetic oligonucleotide
auaagugaucucgaaccac

SEQ ID NO: 486512 - RNA, 19 nt, Artificial Sequence
  Description of Artificial Sequence: Synthetic oligonucleotide
uguggagcaacucacucuu

SEQ ID NO: 486513 - RNA, 19 nt, Artificial Sequence
  Description of Artificial Sequence: Synthetic oligonucleotide
aguuuacaggcucuuucag

SEQ ID NO: 486514 - RNA, 19 nt, Artificial Sequence
  Description of Artificial Sequence: Synthetic oligonucleotide
accaucacaugugaucccc

SEQ ID NO: 486515 - RNA, 19 nt, Artificial Sequence
  Description of Artificial Sequence: Synthetic oligonucleotide
ucuucaauuaagugccuau

SEQ ID NO: 486516 - RNA, 19 nt, Artificial Sequence
  Description of Artificial Sequence: Synthetic oligonucleotide
ugaguaccacauaagggaa

SEQ ID NO: 486517 - RNA, 19 nt, Artificial Sequence
  Description of Artificial Sequence: Synthetic oligonucleotide
augccauacuguuuuaaca

SEQ ID NO: 486518 - RNA, 19 nt, Artificial Sequence
  Description of Artificial Sequence: Synthetic oligonucleotide
gaaauugaugaaggacacg

SEQ ID NO: 486519 - RNA, 19 nt, Artificial Sequence
  Description of Artificial Sequence: Synthetic oligonucleotide
agucccaauaugcaucucu

SEQ ID NO: 486520 - RNA, 19 nt, Artificial Sequence
  Description of Artificial Sequence: Synthetic oligonucleotide
agcgacgaauaaugaaaac

SEQ ID NO: 486521 - RNA, 19 nt, Artificial Sequence
  Description of Artificial Sequence: Synthetic oligonucleotide
ugucggaugccaucaacug

SEQ ID NO: 486522 - RNA, 19 nt, Artificial Sequence
  Description of Artificial Sequence: Synthetic oligonucleotide
cauagcguccauugggagc

SEQ ID NO: 486523 - RNA, 19 nt, Artificial Sequence
  Description of Artificial Sequence: Synthetic oligonucleotide
agaguguggagcaacucac

SEQ ID NO: 486524 - RNA, 19 nt, Artificial Sequence
  Description of Artificial Sequence: Synthetic oligonucleotide
aucauuagaaacugaggua

SEQ ID NO: 486525 - RNA, 19 nt, Artificial Sequence
  Description of Artificial Sequence: Synthetic oligonucleotide
augucauacacuaaauaga

SEQ ID NO: 486526 - RNA, 19 nt, Artificial Sequence
  Description of Artificial Sequence: Synthetic oligonucleotide
aagaucaucuccgaauuuu

SEQ ID NO: 486527 - RNA, 19 nt, Artificial Sequence
  Description of Artificial Sequence: Synthetic oligonucleotide
aauugaugaaggacacgag

SEQ ID NO: 486528 - RNA, 19 nt, Artificial Sequence
  Description of Artificial Sequence: Synthetic oligonucleotide
cagaaaucauuagaaacug

SEQ ID NO: 486529 - RNA, 19 nt, Artificial Sequence
  Description of Artificial Sequence: Synthetic oligonucleotide
gccaauaauauuaaguuca

SEQ ID NO: 486530 - RNA, 19 nt, Artificial Sequence
  Description of Artificial Sequence: Synthetic oligonucleotide
auuuaugacauuggccuug

SEQ ID NO: 486531 - RNA, 19 nt, Artificial Sequence
  Description of Artificial Sequence: Synthetic oligonucleotide
auucauggaaacgugcuga

SEQ ID NO: 486532 - RNA, 19 nt, Artificial Sequence
  Description of Artificial Sequence: Synthetic oligonucleotide
aaccacuuuguuuucgaua

SEQ ID NO: 486533 - RNA, 19 nt, Artificial Sequence
  Description of Artificial Sequence: Synthetic oligonucleotide
ccaauaugcaucucuauac

SEQ ID NO: 486534 - RNA, 19 nt, Artificial Sequence
  Description of Artificial Sequence: Synthetic oligonucleotide
uucgcuugguaucuuucca

SEQ ID NO: 486535 - RNA, 19 nt, Artificial Sequence
  Description of Artificial Sequence: Synthetic oligonucleotide
uuaggucuuccauaaacuu

SEQ ID NO: 486536 - RNA, 19 nt, Artificial Sequence
  Description of Artificial Sequence: Synthetic oligonucleotide
agucauggacaccugagau

SEQ ID NO: 486537 - RNA, 19 nt, Artificial Sequence
  Description of Artificial Sequence: Synthetic oligonucleotide
ugaucauggccagacaaac

SEQ ID NO: 486538 - RNA, 19 nt, Artificial Sequence
  Description of Artificial Sequence: Synthetic oligonucleotide
uucucuauacagcuaucau

SEQ ID NO: 486539 - RNA, 19 nt, Artificial Sequence
  Description of Artificial Sequence: Synthetic oligonucleotide
ucccauauucacaaugcua

SEQ ID NO: 486540 - RNA, 19 nt, Artificial Sequence
  Description of Artificial Sequence: Synthetic oligonucleotide
auaguugaaauaugccaaa

SEQ ID NO: 486541 - RNA, 19 nt, Artificial Sequence
  Description of Artificial Sequence: Synthetic oligonucleotide
gagaucaccuucugauaag

SEQ ID NO: 486542 - RNA, 19 nt, Artificial Sequence
  Description of Artificial Sequence: Synthetic oligonucleotide
uugaucauggccagacaaa

SEQ ID NO: 486543 - RNA, 19 nt, Artificial Sequence
  Description of Artificial Sequence: Synthetic oligonucleotide
uuagcaauguuaguagcau

SEQ ID NO: 486544 - RNA, 19 nt, Artificial Sequence
  Description of Artificial Sequence: Synthetic oligonucleotide
aggacacgagaacagcauc

SEQ ID NO: 486545 - RNA, 19 nt, Artificial Sequence
  Description of Artificial Sequence: Synthetic oligonucleotide
auuagcaauguuaguagca

SEQ ID NO: 486546 - RNA, 19 nt, Artificial Sequence
  Description of Artificial Sequence: Synthetic oligonucleotide
cacauaagggaacaaagaa

SEQ ID NO: 486547 - RNA, 19 nt, Artificial Sequence
  Description of Artificial Sequence: Synthetic oligonucleotide
aagggaacaaagaacuaaa

SEQ ID NO: 486548 - RNA, 19 nt, Artificial Sequence
  Description of Artificial Sequence: Synthetic oligonucleotide
aaguauugcaagagccauc

SEQ ID NO: 486549 - RNA, 19 nt, Artificial Sequence
  Description of Artificial Sequence: Synthetic oligonucleotide
uaucuacaaaacguauuca

SEQ ID NO: 486550 - RNA, 19 nt, Artificial Sequence
  Description of Artificial Sequence: Synthetic oligonucleotide
gugaucucgaaccacaaua

SEQ ID NO: 486551 - RNA, 19 nt, Artificial Sequence
  Description of Artificial Sequence: Synthetic oligonucleotide
uuggacacuauuucucuau

SEQ ID NO: 486552 - RNA, 19 nt, Artificial Sequence
  Description of Artificial Sequence: Synthetic oligonucleotide
ugccuuauacuguugggau

SEQ ID NO: 486553 - RNA, 19 nt, Artificial Sequence
  Description of Artificial Sequence: Synthetic oligonucleotide
cauuagugccuucucacuc

SEQ ID NO: 486554 - RNA, 19 nt, Artificial Sequence
  Description of Artificial Sequence: Synthetic oligonucleotide
cuuauaggucacagaggcc

SEQ ID NO: 486555 - RNA, 19 nt, Artificial Sequence
  Description of Artificial Sequence: Synthetic oligonucleotide
agauauaccagggauuuua

SEQ ID NO: 486556 - RNA, 19 nt, Artificial Sequence
  Description of Artificial Sequence: Synthetic oligonucleotide
aaacgugcugacaggcacg

SEQ ID NO: 486557 - RNA, 19 nt, Artificial Sequence
  Description of Artificial Sequence: Synthetic oligonucleotide
uuucaagaucaucuccgaa

SEQ ID NO: 486558 - RNA, 19 nt, Artificial Sequence
  Description of Artificial Sequence: Synthetic oligonucleotide
cacacuuugggcuccagca

SEQ ID NO: 486559 - RNA, 19 nt, Artificial Sequence
  Description of Artificial Sequence: Synthetic oligonucleotide
cacauagagucccaauaug

SEQ ID NO: 486560 - RNA, 19 nt, Artificial Sequence
  Description of Artificial Sequence: Synthetic oligonucleotide
aacuuaucuaugccauaaa

SEQ ID NO: 486561 - RNA, 19 nt, Artificial Sequence
  Description of Artificial Sequence: Synthetic oligonucleotide
aaccaacguucauuaauaa

SEQ ID NO: 486562 - RNA, 19 nt, Artificial Sequence
  Description of Artificial Sequence: Synthetic oligonucleotide
agaugaccacaauuagcag

SEQ ID NO: 486563 - RNA, 19 nt, Artificial Sequence
  Description of Artificial Sequence: Synthetic oligonucleotide
agcuuacagcaauauucuc

SEQ ID NO: 486564 - RNA, 19 nt, Artificial Sequence
  Description of Artificial Sequence: Synthetic oligonucleotide
uuggacugccuuauacugu

SEQ ID NO: 486565 - RNA, 19 nt, Artificial Sequence
  Description of Artificial Sequence: Synthetic oligonucleotide
ugcagcgacgaauaaugaa

SEQ ID NO: 486566 - RNA, 19 nt, Artificial Sequence
  Description of Artificial Sequence: Synthetic oligonucleotide
guagcauuaaaggagaaau

SEQ ID NO: 486567 - RNA, 19 nt, Artificial Sequence
  Description of Artificial Sequence: Synthetic oligonucleotide
caucccaacuaauguuucc

SEQ ID NO: 486568 - RNA, 19 nt, Artificial Sequence
  Description of Artificial Sequence: Synthetic oligonucleotide
auaguaauaucugcuugga

SEQ ID NO: 486569 - RNA, 19 nt, Artificial Sequence
  Description of Artificial Sequence: Synthetic oligonucleotide
uuucacccaccuauuuuac

SEQ ID NO: 486570 - RNA, 19 nt, Artificial Sequence
  Description of Artificial Sequence: Synthetic oligonucleotide
ucuucgauccaugcguugu

SEQ ID NO: 486571 - RNA, 19 nt, Artificial Sequence
  Description of Artificial Sequence: Synthetic oligonucleotide
ucuccgaauuuugugaaau

SEQ ID NO: 486572 - RNA, 19 nt, Artificial Sequence
  Description of Artificial Sequence: Synthetic oligonucleotide
ugugucggaugccaucaac

SEQ ID NO: 486573 - RNA, 19 nt, Artificial Sequence
  Description of Artificial Sequence: Synthetic oligonucleotide
ugagucgcugccucucucc

SEQ ID NO: 486574 - RNA, 19 nt, Artificial Sequence
  Description of Artificial Sequence: Synthetic oligonucleotide
guaauacugggucuuaccu

SEQ ID NO: 486575 - RNA, 19 nt, Artificial Sequence
  Description of Artificial Sequence: Synthetic oligonucleotide
agagcgcugcacaaauacc

SEQ ID NO: 486576 - RNA, 19 nt, Artificial Sequence
  Description of Artificial Sequence: Synthetic oligonucleotide
uucauggaaacgugcugac

SEQ ID NO: 486577 - RNA, 19 nt, Artificial Sequence
  Description of Artificial Sequence: Synthetic oligonucleotide
uaagugccuauaaguacaa

SEQ ID NO: 486578 - RNA, 19 nt, Artificial Sequence
  Description of Artificial Sequence: Synthetic oligonucleotide
accaacguucauuaauaaa

SEQ ID NO: 486579 - RNA, 19 nt, Artificial Sequence
  Description of Artificial Sequence: Synthetic oligonucleotide
gaucugauuaggaagcaua

SEQ ID NO: 486580 - RNA, 19 nt, Artificial Sequence
  Description of Artificial Sequence: Synthetic oligonucleotide
ucccaacuaauguuuccca

SEQ ID NO: 486581 - RNA, 19 nt, Artificial Sequence
  Description of Artificial Sequence: Synthetic oligonucleotide
uuaccaaaauuuggagaug

SEQ ID NO: 486582 - RNA, 19 nt, Artificial Sequence
  Description of Artificial Sequence: Synthetic oligonucleotide
aaccuaucuacaaaacgua

SEQ ID NO: 486583 - RNA, 19 nt, Artificial Sequence
  Description of Artificial Sequence: Synthetic oligonucleotide
agguuaaugugauggggau

SEQ ID NO: 486584 - RNA, 19 nt, Artificial Sequence
  Description of Artificial Sequence: Synthetic oligonucleotide
uccgcagugaccgcugaag

SEQ ID NO: 486585 - RNA, 19 nt, Artificial Sequence
  Description of Artificial Sequence: Synthetic oligonucleotide
gugucggggaaccacuuug

SEQ ID NO: 486586 - RNA, 19 nt, Artificial Sequence
  Description of Artificial Sequence: Synthetic oligonucleotide
aagugccuauaaguacaac

SEQ ID NO: 486587 - RNA, 19 nt, Artificial Sequence
  Description of Artificial Sequence: Synthetic oligonucleotide
gaaccaacguucauuaaua

SEQ ID NO: 486588 - RNA, 19 nt, Artificial Sequence
  Description of Artificial Sequence: Synthetic oligonucleotide
aucccauauucacaaugcu

SEQ ID NO: 486589 - RNA, 19 nt, Artificial Sequence
  Description of Artificial Sequence: Synthetic oligonucleotide
gcaaaguaugaccucaguc

SEQ ID NO: 486590 - RNA, 19 nt, Artificial Sequence
  Description of Artificial Sequence: Synthetic oligonucleotide
gaucauggccagacaaacc

SEQ ID NO: 486591 - RNA, 19 nt, Artificial Sequence
  Description of Artificial Sequence: Synthetic oligonucleotide
gucacuguaagcuuuguuu

SEQ ID NO: 486592 - RNA, 19 nt, Artificial Sequence
  Description of Artificial Sequence: Synthetic oligonucleotide
aucccauagcguccauugg

SEQ ID NO: 486593 - RNA, 19 nt, Artificial Sequence
  Description of Artificial Sequence: Synthetic oligonucleotide
cuaauguaaacugaggaau

SEQ ID NO: 486594 - RNA, 19 nt, Artificial Sequence
  Description of Artificial Sequence: Synthetic oligonucleotide
uaccacauaagggaacaaa

SEQ ID NO: 486595 - RNA, 19 nt, Artificial Sequence
  Description of Artificial Sequence: Synthetic oligonucleotide
ggacacgagaacagcaucg

SEQ ID NO: 486596 - RNA, 19 nt, Artificial Sequence
  Description of Artificial Sequence: Synthetic oligonucleotide
uccagcauuagugccuucu

SEQ ID NO: 486597 - RNA, 19 nt, Artificial Sequence
  Description of Artificial Sequence: Synthetic oligonucleotide
auaucgggcaugucugcca

SEQ ID NO: 486598 - RNA, 19 nt, Artificial Sequence
  Description of Artificial Sequence: Synthetic oligonucleotide
ucgauccaugcguuguagc

SEQ ID NO: 486599 - RNA, 19 nt, Artificial Sequence
  Description of Artificial Sequence: Synthetic oligonucleotide
gaacgcacgcagcuucugc

SEQ ID NO: 486600 - RNA, 19 nt, Artificial Sequence
  Description of Artificial Sequence: Synthetic oligonucleotide
gguaucuuuccaugaauga

SEQ ID NO: 486601 - RNA, 19 nt, Artificial Sequence
  Description of Artificial Sequence: Synthetic oligonucleotide
uucacccaccuauuuuaca

SEQ ID NO: 486602 - RNA, 19 nt, Artificial Sequence
  Description of Artificial Sequence: Synthetic oligonucleotide
cuacaagccugacuccggc

SEQ ID NO: 486603 - RNA, 19 nt, Artificial Sequence
  Description of Artificial Sequence: Synthetic oligonucleotide
acagauagaaauaguugaa

SEQ ID NO: 486604 - RNA, 19 nt, Artificial Sequence
  Description of Artificial Sequence: Synthetic oligonucleotide
uggggaugacaucccaacu

SEQ ID NO: 486605 - RNA, 19 nt, Artificial Sequence
  Description of Artificial Sequence: Synthetic oligonucleotide
cgaauuuugugaaaugcac

SEQ ID NO: 486606 - RNA, 19 nt, Artificial Sequence
  Description of Artificial Sequence: Synthetic oligonucleotide
gcauaugaguaccacauaa

SEQ ID NO: 486607 - RNA, 19 nt, Artificial Sequence
  Description of Artificial Sequence: Synthetic oligonucleotide
ugccuuugaucauggccag

SEQ ID NO: 486608 - RNA, 19 nt, Artificial Sequence
  Description of Artificial Sequence: Synthetic oligonucleotide
ugaccgcugaagguuaaug

SEQ ID NO: 486609 - RNA, 19 nt, Artificial Sequence
  Description of Artificial Sequence: Synthetic oligonucleotide
cuagagaguguggagcaac

SEQ ID NO: 486610 - RNA, 19 nt, Artificial Sequence
  Description of Artificial Sequence: Synthetic oligonucleotide
ugucggggaaccacuuugu

SEQ ID NO: 486611 - RNA, 19 nt, Artificial Sequence
  Description of Artificial Sequence: Synthetic oligonucleotide
auaguagaaccaacguuca

SEQ ID NO: 486612 - RNA, 19 nt, Artificial Sequence
  Description of Artificial Sequence: Synthetic oligonucleotide
auauaccagggauuuuaaa

SEQ ID NO: 486613 - RNA, 19 nt, Artificial Sequence
  Description of Artificial Sequence: Synthetic oligonucleotide
aggggugaacaugugucgg

SEQ ID NO: 486614 - RNA, 19 nt, Artificial Sequence
  Description of Artificial Sequence: Synthetic oligonucleotide
aggcaaagaagaccugagu

SEQ ID NO: 486615 - RNA, 19 nt, Artificial Sequence
  Description of Artificial Sequence: Synthetic oligonucleotide
agaucaucuccgaauuuug

SEQ ID NO: 486616 - RNA, 19 nt, Artificial Sequence
  Description of Artificial Sequence: Synthetic oligonucleotide
caaagccuaacauaucugu

SEQ ID NO: 486617 - RNA, 19 nt, Artificial Sequence
  Description of Artificial Sequence: Synthetic oligonucleotide
ugaacaugugucggaugcc

SEQ ID NO: 486618 - RNA, 19 nt, Artificial Sequence
  Description of Artificial Sequence: Synthetic oligonucleotide
uaguugaaauaugccaaaa

SEQ ID NO: 486619 - RNA, 19 nt, Artificial Sequence
  Description of Artificial Sequence: Synthetic oligonucleotide
agcuauuagcaauguuagu

SEQ ID NO: 486620 - RNA, 19 nt, Artificial Sequence
  Description of Artificial Sequence: Synthetic oligonucleotide
gaacaugugucggaugcca

SEQ ID NO: 486621 - RNA, 19 nt, Artificial Sequence
  Description of Artificial Sequence: Synthetic oligonucleotide
auuuguagguuaaaaugua

SEQ ID NO: 486622 - RNA, 19 nt, Artificial Sequence
  Description of Artificial Sequence: Synthetic oligonucleotide
aacauaucuguuaggucuu

SEQ ID NO: 486623 - RNA, 19 nt, Artificial Sequence
  Description of Artificial Sequence: Synthetic oligonucleotide
caccuucugauaagugaag

SEQ ID NO: 486624 - RNA, 19 nt, Artificial Sequence
  Description of Artificial Sequence: Synthetic oligonucleotide
agaucaccuucugauaagu

SEQ ID NO: 486625 - RNA, 19 nt, Artificial Sequence
  Description of Artificial Sequence: Synthetic oligonucleotide
aucacaugugauccccagu

SEQ ID NO: 486626 - RNA, 19 nt, Artificial Sequence
  Description of Artificial Sequence: Synthetic oligonucleotide
uggacacuauuucucuaua

SEQ ID NO: 486627 - RNA, 19 nt, Artificial Sequence
  Description of Artificial Sequence: Synthetic oligonucleotide
ucuaaguuuacaggcucuu

SEQ ID NO: 486628 - RNA, 19 nt, Artificial Sequence
  Description of Artificial Sequence: Synthetic oligonucleotide
cauaucgggcaugucugcc

SEQ ID NO: 486629 - RNA, 19 nt, Artificial Sequence
  Description of Artificial Sequence: Synthetic oligonucleotide
acaucccaacuaauguuuc

SEQ ID NO: 486630 - RNA, 19 nt, Artificial Sequence
  Description of Artificial Sequence: Synthetic oligonucleotide
uugcaagagccaucagaga

SEQ ID NO: 486631 - RNA, 19 nt, Artificial Sequence
  Description of Artificial Sequence: Synthetic oligonucleotide
gcgacgaauaaugaaaaca

SEQ ID NO: 486632 - RNA, 19 nt, Artificial Sequence
  Description of Artificial Sequence: Synthetic oligonucleotide
uguaaucauuucugugcua

SEQ ID NO: 486633 - RNA, 19 nt, Artificial Sequence
  Description of Artificial Sequence: Synthetic oligonucleotide
aacgugcugacaggcacga

SEQ ID NO: 486634 - RNA, 19 nt, Artificial Sequence
  Description of Artificial Sequence: Synthetic oligonucleotide
acauugcaaguauauuaua

SEQ ID NO: 486635 - RNA, 19 nt, Artificial Sequence
  Description of Artificial Sequence: Synthetic oligonucleotide
agugaucucgaaccacaau

SEQ ID NO: 486636 - RNA, 19 nt, Artificial Sequence
  Description of Artificial Sequence: Synthetic oligonucleotide
caugcguuguagccaggag

SEQ ID NO: 486637 - RNA, 19 nt, Artificial Sequence
  Description of Artificial Sequence: Synthetic oligonucleotide
ucggggaaccacuuuguuu

SEQ ID NO: 486638 - RNA, 19 nt, Artificial Sequence
  Description of Artificial Sequence: Synthetic oligonucleotide
uaucgggcaugucugccau

SEQ ID NO: 486639 - RNA, 19 nt, Artificial Sequence
  Description of Artificial Sequence: Synthetic oligonucleotide
ccaagaugaccacaauuag

SEQ ID NO: 486640 - RNA, 19 nt, Artificial Sequence
  Description of Artificial Sequence: Synthetic oligonucleotide
auacuauaagugaucucga

SEQ ID NO: 486641 - RNA, 19 nt, Artificial Sequence
  Description of Artificial Sequence: Synthetic oligonucleotide
ccugacuccggcauaucgg

SEQ ID NO: 486642 - RNA, 19 nt, Artificial Sequence
  Description of Artificial Sequence: Synthetic oligonucleotide
ucgcuugguaucuuuccau

SEQ ID NO: 486643 - RNA, 19 nt, Artificial Sequence
  Description of Artificial Sequence: Synthetic oligonucleotide
ccuauaaguacaaccuauc

SEQ ID NO: 486644 - RNA, 19 nt, Artificial Sequence
  Description of Artificial Sequence: Synthetic oligonucleotide
uccagugucggggaaccac

SEQ ID NO: 486645 - RNA, 19 nt, Artificial Sequence
  Description of Artificial Sequence: Synthetic oligonucleotide
gguaaugccuguuucuuua

SEQ ID NO: 486646 - RNA, 19 nt, Artificial Sequence
  Description of Artificial Sequence: Synthetic oligonucleotide
uacaagccugacuccggca

SEQ ID NO: 486647 - RNA, 19 nt, Artificial Sequence
  Description of Artificial Sequence: Synthetic oligonucleotide
aaagaagaccugagucgcu

SEQ ID NO: 486648 - RNA, 19 nt, Artificial Sequence
  Description of Artificial Sequence: Synthetic oligonucleotide
gauauaccagggauuuuaa

SEQ ID NO: 486649 - RNA, 19 nt, Artificial Sequence
  Description of Artificial Sequence: Synthetic oligonucleotide
agcgguguccagugucggg

SEQ ID NO: 486650 - RNA, 19 nt, Artificial Sequence
  Description of Artificial Sequence: Synthetic oligonucleotide
gcuaucauauaagaaaaua

SEQ ID NO: 486651 - RNA, 19 nt, Artificial Sequence
  Description of Artificial Sequence: Synthetic oligonucleotide
auaucugcuuggagcaaag

SEQ ID NO: 486652 - RNA, 19 nt, Artificial Sequence
  Description of Artificial Sequence: Synthetic oligonucleotide
gaaguauugcaagagccau

SEQ ID NO: 486653 - RNA, 19 nt, Artificial Sequence
  Description of Artificial Sequence: Synthetic oligonucleotide
ccaaaucuaacaucucauc

SEQ ID NO: 486654 - RNA, 19 nt, Artificial Sequence
  Description of Artificial Sequence: Synthetic oligonucleotide
uguugggauuaaagaucac

SEQ ID NO: 486655 - RNA, 19 nt, Artificial Sequence
  Description of Artificial Sequence: Synthetic oligonucleotide
acauaucuguuaggucuuc

SEQ ID NO: 486656 - RNA, 19 nt, Artificial Sequence
  Description of Artificial Sequence: Synthetic oligonucleotide
gaccgcugaagguuaaugu

SEQ ID NO: 486657 - RNA, 19 nt, Artificial Sequence
  Description of Artificial Sequence: Synthetic oligonucleotide
gucggaugccaucaacuga

SEQ ID NO: 486658 - RNA, 19 nt, Artificial Sequence
  Description of Artificial Sequence: Synthetic oligonucleotide
gaguaccacauaagggaac

SEQ ID NO: 486659 - RNA, 19 nt, Artificial Sequence
  Description of Artificial Sequence: Synthetic oligonucleotide
acguauucauggaaacgug

SEQ ID NO: 486660 - RNA, 19 nt, Artificial Sequence
  Description of Artificial Sequence: Synthetic oligonucleotide
gacacgagaacagcaucga

SEQ ID NO: 486661 - RNA, 19 nt, Artificial Sequence
  Description of Artificial Sequence: Synthetic oligonucleotide
gcaacucacucuuagguua

SEQ ID NO: 486662 - RNA, 19 nt, Artificial Sequence
  Description of Artificial Sequence: Synthetic oligonucleotide
uuaccagaacuaucaucua

SEQ ID NO: 486663 - RNA, 19 nt, Artificial Sequence
  Description of Artificial Sequence: Synthetic oligonucleotide
aucuaugagguugcagcga

SEQ ID NO: 486664 - RNA, 19 nt, Artificial Sequence
  Description of Artificial Sequence: Synthetic oligonucleotide
uuauacuguugggauuaaa

SEQ ID NO: 486665 - RNA, 19 nt, Artificial Sequence
  Description of Artificial Sequence: Synthetic oligonucleotide
auacccaaucccauagcgu

SEQ ID NO: 486666 - RNA, 19 nt, Artificial Sequence
  Description of Artificial Sequence: Synthetic oligonucleotide
gccugacuccggcauaucg

SEQ ID NO: 486667 - RNA, 19 nt, Artificial Sequence
  Description of Artificial Sequence: Synthetic oligonucleotide
caucuccgaauuuugugaa

SEQ ID NO: 486668 - RNA, 19 nt, Artificial Sequence
  Description of Artificial Sequence: Synthetic oligonucleotide
gagcgcugcacaaauaccu

SEQ ID NO: 486669 - RNA, 19 nt, Artificial Sequence
  Description of Artificial Sequence: Synthetic oligonucleotide
gcaauguagcagaauaauc

SEQ ID NO: 486670 - RNA, 19 nt, Artificial Sequence
  Description of Artificial Sequence: Synthetic oligonucleotide
accuaucuacaaaacguau

SEQ ID NO: 486671 - RNA, 19 nt, Artificial Sequence
  Description of Artificial Sequence: Synthetic oligonucleotide
ccaaguuaccagaacuauc

SEQ ID NO: 486672 - RNA, 19 nt, Artificial Sequence
  Description of Artificial Sequence: Synthetic oligonucleotide
aagugaucucgaaccacaa

SEQ ID NO: 486673 - RNA, 19 nt, Artificial Sequence
  Description of Artificial Sequence: Synthetic oligonucleotide
ugcuagcuauuagcaaugu

SEQ ID NO: 486674 - RNA, 19 nt, Artificial Sequence
  Description of Artificial Sequence: Synthetic oligonucleotide
cagcgacgaauaaugaaaa

SEQ ID NO: 486675 - RNA, 19 nt, Artificial Sequence
  Description of Artificial Sequence: Synthetic oligonucleotide
ccaaugcuucucauaguag

SEQ ID NO: 486676 - RNA, 19 nt, Artificial Sequence
  Description of Artificial Sequence: Synthetic oligonucleotide
cugccuuauacuguuggga

SEQ ID NO: 486677 - RNA, 19 nt, Artificial Sequence
  Description of Artificial Sequence: Synthetic oligonucleotide
gagaucugauuaggaagca

SEQ ID NO: 486678 - RNA, 19 nt, Artificial Sequence
  Description of Artificial Sequence: Synthetic oligonucleotide
uguagccaggaggacuuaa

SEQ ID NO: 486679 - RNA, 19 nt, Artificial Sequence
  Description of Artificial Sequence: Synthetic oligonucleotide
guauugcaagagccaucag

SEQ ID NO: 486680 - RNA, 19 nt, Artificial Sequence
  Description of Artificial Sequence: Synthetic oligonucleotide
aucuccgaauuuugugaaa

SEQ ID NO: 486681 - RNA, 19 nt, Artificial Sequence
  Description of Artificial Sequence: Synthetic oligonucleotide
cgacgaauaaugaaaacaa

SEQ ID NO: 486682 - RNA, 19 nt, Artificial Sequence
  Description of Artificial Sequence: Synthetic oligonucleotide
ggaagcauaugaguaccac

SEQ ID NO: 486683 - RNA, 19 nt, Artificial Sequence
  Description of Artificial Sequence: Synthetic oligonucleotide
gguuaaugugauggggaug

SEQ ID NO: 486684 - RNA, 19 nt, Artificial Sequence
  Description of Artificial Sequence: Synthetic oligonucleotide
uccggcauaucgggcaugu

SEQ ID NO: 486685 - RNA, 19 nt, Artificial Sequence
  Description of Artificial Sequence: Synthetic oligonucleotide
gggaugacaucccaacuaa

SEQ ID NO: 486686 - RNA, 19 nt, Artificial Sequence
  Description of Artificial Sequence: Synthetic oligonucleotide
aacaugugucggaugccau

SEQ ID NO: 486687 - RNA, 19 nt, Artificial Sequence
  Description of Artificial Sequence: Synthetic oligonucleotide
uccaugcguuguagccagg

SEQ ID NO: 486688 - RNA, 19 nt, Artificial Sequence
  Description of Artificial Sequence: Synthetic oligonucleotide
acacgagaacagcaucgaa

SEQ ID NO: 486689 - RNA, 19 nt, Artificial Sequence
  Description of Artificial Sequence: Synthetic oligonucleotide
agcuaucauauaagaaaau

SEQ ID NO: 486690 - RNA, 19 nt, Artificial Sequence
  Description of Artificial Sequence: Synthetic oligonucleotide
ccacauaagggaacaaaga

SEQ ID NO: 486691 - RNA, 19 nt, Artificial Sequence
  Description of Artificial Sequence: Synthetic oligonucleotide
ggagcgguguccagugucg

SEQ ID NO: 486692 - RNA, 19 nt, Artificial Sequence
  Description of Artificial Sequence: Synthetic oligonucleotide
guaaugccuguuucuuuaa

SEQ ID NO: 486693 - RNA, 19 nt, Artificial Sequence
  Description of Artificial Sequence: Synthetic oligonucleotide
ggucggguagcucagaaau

SEQ ID NO: 486694 - RNA, 19 nt, Artificial Sequence
  Description of Artificial Sequence: Synthetic oligonucleotide
ugaacgcacgcagcuucug

SEQ ID NO: 486695 - RNA, 19 nt, Artificial Sequence
  Description of Artificial Sequence: Synthetic oligonucleotide
uuaaugugauggggaugac

SEQ ID NO: 486696 - RNA, 19 nt, Artificial Sequence
  Description of Artificial Sequence: Synthetic oligonucleotide
guaagauauaccagggauu

SEQ ID NO: 486697 - RNA, 19 nt, Artificial Sequence
  Description of Artificial Sequence: Synthetic oligonucleotide
cuucaauuaagugccuaua

SEQ ID NO: 486698 - RNA, 19 nt, Artificial Sequence
  Description of Artificial Sequence: Synthetic oligonucleotide
ggucuuaccuugaaggcaa

SEQ ID NO: 486699 - RNA, 19 nt, Artificial Sequence
  Description of Artificial Sequence: Synthetic oligonucleotide
gaggacuuaaucccauauu

SEQ ID NO: 486700 - RNA, 19 nt, Artificial Sequence
  Description of Artificial Sequence: Synthetic oligonucleotide
uugcgucaucuccuucuaa

SEQ ID NO: 486701 - RNA, 19 nt, Artificial Sequence
  Description of Artificial Sequence: Synthetic oligonucleotide
guguggagcaacucacucu

SEQ ID NO: 486702 - RNA, 19 nt, Artificial Sequence
  Description of Artificial Sequence: Synthetic oligonucleotide
ggggaugacaucccaacua

SEQ ID NO: 486703 - RNA, 19 nt, Artificial Sequence
  Description of Artificial Sequence: Synthetic oligonucleotide
gcgguguccagugucgggg

SEQ ID NO: 486704 - RNA, 19 nt, Artificial Sequence
  Description of Artificial Sequence: Synthetic oligonucleotide
agugucggggaaccacuuu

SEQ ID NO: 486705 - RNA, 19 nt, Artificial Sequence
  Description of Artificial Sequence: Synthetic oligonucleotide
gcuacaagccugacuccgg

SEQ ID NO: 486706 - RNA, 19 nt, Artificial Sequence
  Description of Artificial Sequence: Synthetic oligonucleotide
aucgggcaugucugccauc

SEQ ID NO: 486707 - RNA, 19 nt, Artificial Sequence
  Description of Artificial Sequence: Synthetic oligonucleotide
aggucggguagcucagaaa

SEQ ID NO: 486708 - RNA, 19 nt, Artificial Sequence
  Description of Artificial Sequence: Synthetic oligonucleotide
cauugggagcgguguccag

SEQ ID NO: 486709 - RNA, 19 nt, Artificial Sequence
  Description of Artificial Sequence: Synthetic oligonucleotide
acuccggcauaucgggcau

SEQ ID NO: 486710 - RNA, 19 nt, Artificial Sequence
  Description of Artificial Sequence: Synthetic oligonucleotide
gggucuuaccuugaaggca

SEQ ID NO: 486711 - RNA, 19 nt, Artificial Sequence
  Description of Artificial Sequence: Synthetic oligonucleotide
cacuguaagcuuuguuugu

SEQ ID NO: 486712 - RNA, 19 nt, Artificial Sequence
  Description of Artificial Sequence: Synthetic oligonucleotide
gugucggaugccaucaacu

SEQ ID NO: 486713 - RNA, 19 nt, Artificial Sequence
  Description of Artificial Sequence: Synthetic oligonucleotide
gcaagagccaucagagaga

SEQ ID NO: 486714 - RNA, 19 nt, Artificial Sequence
  Description of Artificial Sequence: Synthetic oligonucleotide
guaaugccauacuguuuua

SEQ ID NO: 486715 - RNA, 19 nt, Artificial Sequence
  Description of Artificial Sequence: Synthetic oligonucleotide
gucauacacuaaauagaua

SEQ ID NO: 486716 - RNA, 19 nt, Artificial Sequence
  Description of Artificial Sequence: Synthetic oligonucleotide
ggcacacggcauaagaaaa

SEQ ID NO: 486717 - RNA, 19 nt, Artificial Sequence
  Description of Artificial Sequence: Synthetic oligonucleotide
gucccaauaugcaucucua

SEQ ID NO: 486718 - RNA, 19 nt, Artificial Sequence
  Description of Artificial Sequence: Synthetic oligonucleotide
augaacgcacgcagcuucu

SEQ ID NO: 486719 - RNA, 19 nt, Artificial Sequence
  Description of Artificial Sequence: Synthetic oligonucleotide
ccuuauacuguugggauua

SEQ ID NO: 486720 - RNA, 19 nt, Artificial Sequence
  Description of Artificial Sequence: Synthetic oligonucleotide
cugcauaauucuagagagu

SEQ ID NO: 486721 - RNA, 19 nt, Artificial Sequence
  Description of Artificial Sequence: Synthetic oligonucleotide
ggggugaacaugugucgga

SEQ ID NO: 486722 - RNA, 19 nt, Artificial Sequence
  Description of Artificial Sequence: Synthetic oligonucleotide
gcacgaacucacacaacug

SEQ ID NO: 486723 - RNA, 19 nt, Artificial Sequence
  Description of Artificial Sequence: Synthetic oligonucleotide
caauuagcagaggcaaugu

SEQ ID NO: 486724 - RNA, 19 nt, Artificial Sequence
  Description of Artificial Sequence: Synthetic oligonucleotide
cuaacaucucauccagcau

SEQ ID NO: 486725 - RNA, 19 nt, Artificial Sequence
  Description of Artificial Sequence: Synthetic oligonucleotide
ggcaauguagcagaauaau

SEQ ID NO: 486726 - RNA, 19 nt, Artificial Sequence
  Description of Artificial Sequence: Synthetic oligonucleotide
acgcacgcagcuucugcuu

SEQ ID NO: 486727 - RNA, 19 nt, Artificial Sequence
  Description of Artificial Sequence: Synthetic oligonucleotide
augugucggaugccaucaa

SEQ ID NO: 486728 - RNA, 19 nt, Artificial Sequence
  Description of Artificial Sequence: Synthetic oligonucleotide
cauuuaugacauuggccuu

SEQ ID NO: 486729 - RNA, 19 nt, Artificial Sequence
  Description of Artificial Sequence: Synthetic oligonucleotide
cuucgauccaugcguugua

SEQ ID NO: 486730 - RNA, 19 nt, Artificial Sequence
  Description of Artificial Sequence: Synthetic oligonucleotide
ccaugaaugaggcuugcgu

SEQ ID NO: 486731 - RNA, 19 nt, Artificial Sequence
  Description of Artificial Sequence: Synthetic oligonucleotide
gcauuagugccuucucacu

SEQ ID NO: 486732 - RNA, 19 nt, Artificial Sequence
  Description of Artificial Sequence: Synthetic oligonucleotide
gaguguggagcaacucacu

SEQ ID NO: 486733 - RNA, 19 nt, Artificial Sequence
  Description of Artificial Sequence: Synthetic oligonucleotide
caggucggguagcucagaa

SEQ ID NO: 486734 - RNA, 19 nt, Artificial Sequence
  Description of Artificial Sequence: Synthetic oligonucleotide
agccugacuccggcauauc

SEQ ID NO: 486735 - RNA, 19 nt, Artificial Sequence
  Description of Artificial Sequence: Synthetic oligonucleotide
cauuucgcuugguaucuuu

SEQ ID NO: 486736 - RNA, 19 nt, Artificial Sequence
  Description of Artificial Sequence: Synthetic oligonucleotide
cagcaauauucuccaagau

SEQ ID NO: 486737 - RNA, 19 nt, Artificial Sequence
  Description of Artificial Sequence: Synthetic oligonucleotide
ggcaaaguaugaccucagu

SEQ ID NO: 486738 - RNA, 19 nt, Artificial Sequence
  Description of Artificial Sequence: Synthetic oligonucleotide
gccauacuguuuuaacaau

SEQ ID NO: 486739 - RNA, 19 nt, Artificial Sequence
  Description of Artificial Sequence: Synthetic oligonucleotide
gaacagcaucgaaguggca

SEQ ID NO: 486740 - RNA, 19 nt, Artificial Sequence
  Description of Artificial Sequence: Synthetic oligonucleotide
gcgucaucuccuucuaagu

SEQ ID NO: 486741 - RNA, 19 nt, Artificial Sequence
  Description of Artificial Sequence: Synthetic oligonucleotide
acauuucgcuugguaucuu

SEQ ID NO: 486742 - RNA, 19 nt, Artificial Sequence
  Description of Artificial Sequence: Synthetic oligonucleotide
cgagaacagcaucgaagug

SEQ ID NO: 486743 - RNA, 19 nt, Artificial Sequence
  Description of Artificial Sequence: Synthetic oligonucleotide
gagucccaauaugcaucuc

SEQ ID NO: 486744 - RNA, 19 nt, Artificial Sequence
  Description of Artificial Sequence: Synthetic oligonucleotide
uuguagccaggaggacuua

SEQ ID NO: 486745 - RNA, 19 nt, Artificial Sequence
  Description of Artificial Sequence: Synthetic oligonucleotide
gcuuaggggugaacaugug

SEQ ID NO: 486746 - RNA, 19 nt, Artificial Sequence
  Description of Artificial Sequence: Synthetic oligonucleotide
ccaacuaauguuucccauu

SEQ ID NO: 486747 - RNA, 19 nt, Artificial Sequence
  Description of Artificial Sequence: Synthetic oligonucleotide
cuccggcauaucgggcaug

SEQ ID NO: 486748 - RNA, 19 nt, Artificial Sequence
  Description of Artificial Sequence: Synthetic oligonucleotide
cugauaagugaagcccaau

SEQ ID NO: 486749 - RNA, 19 nt, Artificial Sequence
  Description of Artificial Sequence: Synthetic oligonucleotide
gcuagcuauuagcaauguu

SEQ ID NO: 486750 - RNA, 19 nt, Artificial Sequence
  Description of Artificial Sequence: Synthetic oligonucleotide
gcguccauugggagcggug

SEQ ID NO: 486751 - RNA, 19 nt, Artificial Sequence
  Description of Artificial Sequence: Synthetic oligonucleotide
caucgaaguggcaguuguu

SEQ ID NO: 486752 - RNA, 19 nt, Artificial Sequence
  Description of Artificial Sequence: Synthetic oligonucleotide
cccaaucccauagcgucca

SEQ ID NO: 486753 - RNA, 19 nt, Artificial Sequence
  Description of Artificial Sequence: Synthetic oligonucleotide
gucuuaccuugaaggcaaa

SEQ ID NO: 486754 - RNA, 19 nt, Artificial Sequence
  Description of Artificial Sequence: Synthetic oligonucleotide
ccaugcguuguagccagga

SEQ ID NO: 486755 - RNA, 19 nt, Artificial Sequence
  Description of Artificial Sequence: Synthetic oligonucleotide
cggcauaucgggcaugucu

SEQ ID NO: 486756 - RNA, 19 nt, Artificial Sequence
  Description of Artificial Sequence: Synthetic oligonucleotide
ccagugucggggaaccacu

SEQ ID NO: 486757 - RNA, 19 nt, Artificial Sequence
  Description of Artificial Sequence: Synthetic oligonucleotide
cccaacuaauguuucccau

SEQ ID NO: 486758 - RNA, 19 nt, Artificial Sequence
  Description of Artificial Sequence: Synthetic oligonucleotide
gucggguagcucagaaauu

SEQ ID NO: 486759 - RNA, 19 nt, Artificial Sequence
  Description of Artificial Sequence: Synthetic oligonucleotide
guggagcaacucacucuua

SEQ ID NO: 486760 - RNA, 19 nt, Artificial Sequence
  Description of Artificial Sequence: Synthetic oligonucleotide
ggaugacaucccaacuaau

SEQ ID NO: 486761 - RNA, 19 nt, Artificial Sequence
  Description of Artificial Sequence: Synthetic oligonucleotide
gcguuguagccaggaggac

SEQ ID NO: 486762 - RNA, 19 nt, Artificial Sequence
  Description of Artificial Sequence: Synthetic oligonucleotide
cugaggccuucucuucgau

SEQ ID NO: 486763 - RNA, 19 nt, Artificial Sequence
  Description of Artificial Sequence: Synthetic oligonucleotide
cagugucggggaaccacuu

SEQ ID NO: 486764 - RNA, 19 nt, Artificial Sequence
  Description of Artificial Sequence: Synthetic oligonucleotide
gugaccgcugaagguuaau

SEQ ID NO: 486765 - RNA, 19 nt, Artificial Sequence
  Description of Artificial Sequence: Synthetic oligonucleotide
cagcaucgaaguggcaguu

SEQ ID NO: 486766 - RNA, 19 nt, Artificial Sequence
  Description of Artificial Sequence: Synthetic oligonucleotide
cggguagcucagaaauucu

SEQ ID NO: 486767 - RNA, 19 nt, Artificial Sequence
  Description of Artificial Sequence: Synthetic oligonucleotide
cguccauugggagcggugu

SEQ ID NO: 486768 - RNA, 19 nt, Artificial Sequence
  Description of Artificial Sequence: Synthetic oligonucleotide
ccugagucgcugccucucu

SEQ ID NO: 486769 - RNA, 19 nt, Artificial Sequence
  Description of Artificial Sequence: Synthetic oligonucleotide
ccggcauaucgggcauguc

SEQ ID NO: 486770 - RNA, 19 nt, Artificial Sequence
  Description of Artificial Sequence: Synthetic oligonucleotide
aaauuagaaguuuaugacc

SEQ ID NO: 486771 - RNA, 19 nt, Artificial Sequence
  Description of Artificial Sequence: Synthetic oligonucleotide
auaacguuugucuugaugc

SEQ ID NO: 486772 - RNA, 19 nt, Artificial Sequence
  Description of Artificial Sequence: Synthetic oligonucleotide
aaaguacggauuuauuacc

SEQ ID NO: 486773 - RNA, 19 nt, Artificial Sequence
  Description of Artificial Sequence: Synthetic oligonucleotide
ucacaaauauuuaaugggg

SEQ ID NO: 486774 - RNA, 19 nt, Artificial Sequence
  Description of Artificial Sequence: Synthetic oligonucleotide
ugaccuaucauacaaagcu

SEQ ID NO: 486775 - RNA, 19 nt, Artificial Sequence
  Description of Artificial Sequence: Synthetic oligonucleotide
ugcacuauagcccauaugu

SEQ ID NO: 486776 - RNA, 19 nt, Artificial Sequence
  Description of Artificial Sequence: Synthetic oligonucleotide
uuugucuaauauaauacag

SEQ ID NO: 486777 - RNA, 19 nt, Artificial Sequence
  Description of Artificial Sequence: Synthetic oligonucleotide
uuugugugcacuauaaagc

SEQ ID NO: 486778 - RNA, 19 nt, Artificial Sequence
  Description of Artificial Sequence: Synthetic oligonucleotide
augacguucaucuagccac

SEQ ID NO: 486779 - RNA, 19 nt, Artificial Sequence
  Description of Artificial Sequence: Synthetic oligonucleotide
uguuaagucauacuuuaag

SEQ ID NO: 486780 - RNA, 19 nt, Artificial Sequence
  Description of Artificial Sequence: Synthetic oligonucleotide
uuauccaaggcuauuaaca

SEQ ID NO: 486781 - RNA, 19 nt, Artificial Sequence
  Description of Artificial Sequence: Synthetic oligonucleotide
aaagcuuacuauuuugucu

SEQ ID NO: 486782 - RNA, 19 nt, Artificial Sequence
  Description of Artificial Sequence: Synthetic oligonucleotide
uggaguauucgauugaucc

SEQ ID NO: 486783 - RNA, 19 nt, Artificial Sequence
  Description of Artificial Sequence: Synthetic oligonucleotide
uuuaugauaaggcuugaac

SEQ ID NO: 486784 - RNA, 19 nt, Artificial Sequence
  Description of Artificial Sequence: Synthetic oligonucleotide
uuaugauaaggcuugaacu

SEQ ID NO: 486785 - RNA, 19 nt, Artificial Sequence
  Description of Artificial Sequence: Synthetic oligonucleotide
uaugauaaggcuugaacug

SEQ ID NO: 486786 - RNA, 19 nt, Artificial Sequence
  Description of Artificial Sequence: Synthetic oligonucleotide
aacgauaugauccauccau

SEQ ID NO: 486787 - RNA, 19 nt, Artificial Sequence
  Description of Artificial Sequence: Synthetic oligonucleotide
cauacuauggauuugaaaa

SEQ ID NO: 486788 - RNA, 19 nt, Artificial Sequence
  Description of Artificial Sequence: Synthetic oligonucleotide
auucgauugauccagugag

SEQ ID NO: 486789 - RNA, 19 nt, Artificial Sequence
  Description of Artificial Sequence: Synthetic oligonucleotide
ugaauaucccuuauuaaga

SEQ ID NO: 486790 - RNA, 19 nt, Artificial Sequence
  Description of Artificial Sequence: Synthetic oligonucleotide
ucuaacaauaugcgagugg

SEQ ID NO: 486791 - RNA, 19 nt, Artificial Sequence
  Description of Artificial Sequence: Synthetic oligonucleotide
uucacuccuacauacacag

SEQ ID NO: 486792 - RNA, 19 nt, Artificial Sequence
  Description of Artificial Sequence: Synthetic oligonucleotide
aguguuaucaguuuagcau

SEQ ID NO: 486793 - RNA, 19 nt, Artificial Sequence
  Description of Artificial Sequence: Synthetic oligonucleotide
agugguauauuacacacca

SEQ ID NO: 486794 - RNA, 19 nt, Artificial Sequence
  Description of Artificial Sequence: Synthetic oligonucleotide
uguuguauuauugccaugc

SEQ ID NO: 486795 - RNA, 19 nt, Artificial Sequence
  Description of Artificial Sequence: Synthetic oligonucleotide
aagggcuaacauuuuacuc

SEQ ID NO: 486796 - RNA, 19 nt, Artificial Sequence
  Description of Artificial Sequence: Synthetic oligonucleotide
aagacuaagguuuucugaa

SEQ ID NO: 486797 - RNA, 19 nt, Artificial Sequence
  Description of Artificial Sequence: Synthetic oligonucleotide
caaaguacggauuuauuac

SEQ ID NO: 486798 - RNA, 19 nt, Artificial Sequence
  Description of Artificial Sequence: Synthetic oligonucleotide
cucacucauacuaagauuc

SEQ ID NO: 486799 - RNA, 19 nt, Artificial Sequence
  Description of Artificial Sequence: Synthetic oligonucleotide
ugaguaaagccuuaguuuc

SEQ ID NO: 486800 - RNA, 19 nt, Artificial Sequence
  Description of Artificial Sequence: Synthetic oligonucleotide
agugugauugugcaugacg

SEQ ID NO: 486801 - RNA, 19 nt, Artificial Sequence
  Description of Artificial Sequence: Synthetic oligonucleotide
ugugaaauauugcugaguu

SEQ ID NO: 486802 - RNA, 19 nt, Artificial Sequence
  Description of Artificial Sequence: Synthetic oligonucleotide
uuucuuacucucauaauuc

SEQ ID NO: 486803 - RNA, 19 nt, Artificial Sequence
  Description of Artificial Sequence: Synthetic oligonucleotide
ugguauauuacacaccaaa

SEQ ID NO: 486804 - RNA, 19 nt, Artificial Sequence
  Description of Artificial Sequence: Synthetic oligonucleotide
aaggcuauuaacauccuug

SEQ ID NO: 486805 - RNA, 19 nt, Artificial Sequence
  Description of Artificial Sequence: Synthetic oligonucleotide
uugcauuacaaaauguggu

SEQ ID NO: 486806 - RNA, 19 nt, Artificial Sequence
  Description of Artificial Sequence: Synthetic oligonucleotide
ugcauuacaaaauguggug

SEQ ID NO: 486807 - RNA, 19 nt, Artificial Sequence
  Description of Artificial Sequence: Synthetic oligonucleotide
cuaacaauaugcgaguggc

SEQ ID NO: 486808 - RNA, 19 nt, Artificial Sequence
  Description of Artificial Sequence: Synthetic oligonucleotide
gaauaagaauagcuagggg

SEQ ID NO: 486809 - RNA, 19 nt, Artificial Sequence
  Description of Artificial Sequence: Synthetic oligonucleotide
agggcuaacauuuuacucu

SEQ ID NO: 486810 - RNA, 19 nt, Artificial Sequence
  Description of Artificial Sequence: Synthetic oligonucleotide
aguguugcaaagugaguac

SEQ ID NO: 486811 - RNA, 19 nt, Artificial Sequence
  Description of Artificial Sequence: Synthetic oligonucleotide
ucaguaaauuguaucuggc

SEQ ID NO: 486812 - RNA, 19 nt, Artificial Sequence
  Description of Artificial Sequence: Synthetic oligonucleotide
uacuacaagagacuauaca

SEQ ID NO: 486813 - RNA, 19 nt, Artificial Sequence
  Description of Artificial Sequence: Synthetic oligonucleotide
ucuagugcacuauagccca

SEQ ID NO: 486814 - RNA, 19 nt, Artificial Sequence
  Description of Artificial Sequence: Synthetic oligonucleotide
acuauuuguaacagcagac

SEQ ID NO: 486815 - RNA, 19 nt, Artificial Sequence
  Description of Artificial Sequence: Synthetic oligonucleotide
uuguaaggguuuaugauaa

SEQ ID NO: 486816 - RNA, 19 nt, Artificial Sequence
  Description of Artificial Sequence: Synthetic oligonucleotide
uaacuuuaugauugcuugg

SEQ ID NO: 486817 - RNA, 19 nt, Artificial Sequence
  Description of Artificial Sequence: Synthetic oligonucleotide
uuuauaacguuugucuuga

SEQ ID NO: 486818 - RNA, 19 nt, Artificial Sequence
  Description of Artificial Sequence: Synthetic oligonucleotide
agacuauacaccuuguuaa

SEQ ID NO: 486819 - RNA, 19 nt, Artificial Sequence
  Description of Artificial Sequence: Synthetic oligonucleotide
ucuaaaggaaguccuacau

SEQ ID NO: 486820 - RNA, 19 nt, Artificial Sequence
  Description of Artificial Sequence: Synthetic oligonucleotide
ucuuacucucauaauuccc

SEQ ID NO: 486821 - RNA, 19 nt, Artificial Sequence
  Description of Artificial Sequence: Synthetic oligonucleotide
ugcauaaugaaugggugcc

SEQ ID NO: 486822 - RNA, 19 nt, Artificial Sequence
  Description of Artificial Sequence: Synthetic oligonucleotide
uuaucuacccgauuuguau

SEQ ID NO: 486823 - RNA, 19 nt, Artificial Sequence
  Description of Artificial Sequence: Synthetic oligonucleotide
ugaacugaagacuaagguu

SEQ ID NO: 486824 - RNA, 19 nt, Artificial Sequence
  Description of Artificial Sequence: Synthetic oligonucleotide
uccuacaucucuucuuagg

SEQ ID NO: 486825 - RNA, 19 nt, Artificial Sequence
  Description of Artificial Sequence: Synthetic oligonucleotide
guaaggguuuaugauaagg

SEQ ID NO: 486826 - RNA, 19 nt, Artificial Sequence
  Description of Artificial Sequence: Synthetic oligonucleotide
uaacguuugucuugaugcg

SEQ ID NO: 486827 - RNA, 19 nt, Artificial Sequence
  Description of Artificial Sequence: Synthetic oligonucleotide
aucuacccgauuuguauac

SEQ ID NO: 486828 - RNA, 19 nt, Artificial Sequence
  Description of Artificial Sequence: Synthetic oligonucleotide
uaugcgaguggccucaacu

SEQ ID NO: 486829 - RNA, 19 nt, Artificial Sequence
  Description of Artificial Sequence: Synthetic oligonucleotide
uguuguaaggguuuaugau

SEQ ID NO: 486830 - RNA, 19 nt, Artificial Sequence
  Description of Artificial Sequence: Synthetic oligonucleotide
uuguuguaaggguuuauga

SEQ ID NO: 486831 - RNA, 19 nt, Artificial Sequence
  Description of Artificial Sequence: Synthetic oligonucleotide
acaaauauuuaauggggau

SEQ ID NO: 486832 - RNA, 19 nt, Artificial Sequence
  Description of Artificial Sequence: Synthetic oligonucleotide
aaggguuguaaaugcaggu

SEQ ID NO: 486833 - RNA, 19 nt, Artificial Sequence
  Description of Artificial Sequence: Synthetic oligonucleotide
uguuggucuguuauaugcc

SEQ ID NO: 486834 - RNA, 19 nt, Artificial Sequence
  Description of Artificial Sequence: Synthetic oligonucleotide
ucauaauaucuuguaagca

SEQ ID NO: 486835 - RNA, 19 nt, Artificial Sequence
  Description of Artificial Sequence: Synthetic oligonucleotide
auaaggcuugaacugaaga

SEQ ID NO: 486836 - RNA, 19 nt, Artificial Sequence
  Description of Artificial Sequence: Synthetic oligonucleotide
uucgauugauccagugagg

SEQ ID NO: 486837 - RNA, 19 nt, Artificial Sequence
  Description of Artificial Sequence: Synthetic oligonucleotide
uucaguauauguugaagua

SEQ ID NO: 486838 - RNA, 19 nt, Artificial Sequence
  Description of Artificial Sequence: Synthetic oligonucleotide
cugggauaaagugugauug

SEQ ID NO: 486839 - RNA, 19 nt, Artificial Sequence
  Description of Artificial Sequence: Synthetic oligonucleotide
agcuaagugguauauuaca

SEQ ID NO: 486840 - RNA, 19 nt, Artificial Sequence
  Description of Artificial Sequence: Synthetic oligonucleotide
caaagugaguacuggauuc

SEQ ID NO: 486841 - RNA, 19 nt, Artificial Sequence
  Description of Artificial Sequence: Synthetic oligonucleotide
ggauuugaaaacaaguccc

SEQ ID NO: 486842 - RNA, 19 nt, Artificial Sequence
  Description of Artificial Sequence: Synthetic oligonucleotide
auacgccggguuuauaacg

SEQ ID NO: 486843 - RNA, 19 nt, Artificial Sequence
  Description of Artificial Sequence: Synthetic oligonucleotide
uaccacuuuaucuacccga

SEQ ID NO: 486844 - RNA, 19 nt, Artificial Sequence
  Description of Artificial Sequence: Synthetic oligonucleotide
accuuguuaagucauacuu

SEQ ID NO: 486845 - RNA, 19 nt, Artificial Sequence
  Description of Artificial Sequence: Synthetic oligonucleotide
uuauauucacuccuacaua

SEQ ID NO: 486846 - RNA, 19 nt, Artificial Sequence
  Description of Artificial Sequence: Synthetic oligonucleotide
uauccaaggcuauuaacau

SEQ ID NO: 486847 - RNA, 19 nt, Artificial Sequence
  Description of Artificial Sequence: Synthetic oligonucleotide
uucgaugcaaaggaaaguc

SEQ ID NO: 486848 - RNA, 19 nt, Artificial Sequence
  Description of Artificial Sequence: Synthetic oligonucleotide
uguacucauggaguauucg

SEQ ID NO: 486849 - RNA, 19 nt, Artificial Sequence
  Description of Artificial Sequence: Synthetic oligonucleotide
caguuuagugauagguacg

SEQ ID NO: 486850 - RNA, 19 nt, Artificial Sequence
  Description of Artificial Sequence: Synthetic oligonucleotide
uucuaaaggaaguccuaca

SEQ ID NO: 486851 - RNA, 19 nt, Artificial Sequence
  Description of Artificial Sequence: Synthetic oligonucleotide
caugcuuuaguucaacaga

SEQ ID NO: 486852 - RNA, 19 nt, Artificial Sequence
  Description of Artificial Sequence: Synthetic oligonucleotide
uaagacugaugaguaaagc

SEQ ID NO: 486853 - RNA, 19 nt, Artificial Sequence
  Description of Artificial Sequence: Synthetic oligonucleotide
auaauaucuuguaagcagu

SEQ ID NO: 486854 - RNA, 19 nt, Artificial Sequence
  Description of Artificial Sequence: Synthetic oligonucleotide
cuuauccaaggcuauuaac

SEQ ID NO: 486855 - RNA, 19 nt, Artificial Sequence
  Description of Artificial Sequence: Synthetic oligonucleotide
gaauaucccuuauuaagaa

SEQ ID NO: 486856 - RNA, 19 nt, Artificial Sequence
  Description of Artificial Sequence: Synthetic oligonucleotide
uguaucuggcuucaucaaa

SEQ ID NO: 486857 - RNA, 19 nt, Artificial Sequence
  Description of Artificial Sequence: Synthetic oligonucleotide
auaaaaccccuucaguaaa

SEQ ID NO: 486858 - RNA, 19 nt, Artificial Sequence
  Description of Artificial Sequence: Synthetic oligonucleotide
guuguaaggguuuaugaua

SEQ ID NO: 486859 - RNA, 19 nt, Artificial Sequence
  Description of Artificial Sequence: Synthetic oligonucleotide
uucugaacagauccaaauu

SEQ ID NO: 486860 - RNA, 19 nt, Artificial Sequence
  Description of Artificial Sequence: Synthetic oligonucleotide
uuuaucuacccgauuugua

SEQ ID NO: 486861 - RNA, 19 nt, Artificial Sequence
  Description of Artificial Sequence: Synthetic oligonucleotide
gaaggucggaauaaagcug

SEQ ID NO: 486862 - RNA, 19 nt, Artificial Sequence
  Description of Artificial Sequence: Synthetic oligonucleotide
uaacaauaugcgaguggcc

SEQ ID NO: 486863 - RNA, 19 nt, Artificial Sequence
  Description of Artificial Sequence: Synthetic oligonucleotide
uuccacacuaauucuuuac

SEQ ID NO: 486864 - RNA, 19 nt, Artificial Sequence
  Description of Artificial Sequence: Synthetic oligonucleotide
uguaaauaucugucccgug

SEQ ID NO: 486865 - RNA, 19 nt, Artificial Sequence
  Description of Artificial Sequence: Synthetic oligonucleotide
acuaagauucuuguacuca

SEQ ID NO: 486866 - RNA, 19 nt, Artificial Sequence
  Description of Artificial Sequence: Synthetic oligonucleotide
auaaugaaugggugcccag

SEQ ID NO: 486867 - RNA, 19 nt, Artificial Sequence
  Description of Artificial Sequence: Synthetic oligonucleotide
cacaaauauuuaaugggga

SEQ ID NO: 486868 - RNA, 19 nt, Artificial Sequence
  Description of Artificial Sequence: Synthetic oligonucleotide
ucgauugauccagugaggu

SEQ ID NO: 486869 - RNA, 19 nt, Artificial Sequence
  Description of Artificial Sequence: Synthetic oligonucleotide
aacucucauaauaucuugu

SEQ ID NO: 486870 - RNA, 19 nt, Artificial Sequence
  Description of Artificial Sequence: Synthetic oligonucleotide
aaguacggauuuauuacca

SEQ ID NO: 486871 - RNA, 19 nt, Artificial Sequence
  Description of Artificial Sequence: Synthetic oligonucleotide
aaauaucugucccgugaaa

SEQ ID NO: 486872 - RNA, 19 nt, Artificial Sequence
  Description of Artificial Sequence: Synthetic oligonucleotide
ugauagguacgauggauuu

SEQ ID NO: 486873 - RNA, 19 nt, Artificial Sequence
  Description of Artificial Sequence: Synthetic oligonucleotide
gauggcuuaguaauucuga

SEQ ID NO: 486874 - RNA, 19 nt, Artificial Sequence
  Description of Artificial Sequence: Synthetic oligonucleotide
uacccgauuuguauacuga

SEQ ID NO: 486875 - RNA, 19 nt, Artificial Sequence
  Description of Artificial Sequence: Synthetic oligonucleotide
uuguauuauugccaugcuu

SEQ ID NO: 486876 - RNA, 19 nt, Artificial Sequence
  Description of Artificial Sequence: Synthetic oligonucleotide
uaaguguugcaaagugagu

SEQ ID NO: 486877 - RNA, 19 nt, Artificial Sequence
  Description of Artificial Sequence: Synthetic oligonucleotide
uuacugacacccucacuca

SEQ ID NO: 486878 - RNA, 19 nt, Artificial Sequence
  Description of Artificial Sequence: Synthetic oligonucleotide
cacuauuuguaacagcaga

SEQ ID NO: 486879 - RNA, 19 nt, Artificial Sequence
  Description of Artificial Sequence: Synthetic oligonucleotide
uccuagaccaaaguacgga

SEQ ID NO: 486880 - RNA, 19 nt, Artificial Sequence
  Description of Artificial Sequence: Synthetic oligonucleotide
gcauuacaaaauguggugg

SEQ ID NO: 486881 - RNA, 19 nt, Artificial Sequence
  Description of Artificial Sequence: Synthetic oligonucleotide
uuaaaagguuuggauugca

SEQ ID NO: 486882 - RNA, 19 nt, Artificial Sequence
  Description of Artificial Sequence: Synthetic oligonucleotide
cuucuaaaggaaguccuac

SEQ ID NO: 486883 - RNA, 19 nt, Artificial Sequence
  Description of Artificial Sequence: Synthetic oligonucleotide
aaguccuacaucucuucuu

SEQ ID NO: 486884 - RNA, 19 nt, Artificial Sequence
  Description of Artificial Sequence: Synthetic oligonucleotide
ugggauaaagugugauugu

SEQ ID NO: 486885 - RNA, 19 nt, Artificial Sequence
  Description of Artificial Sequence: Synthetic oligonucleotide
uguaaggguuuaugauaag

SEQ ID NO: 486886 - RNA, 19 nt, Artificial Sequence
  Description of Artificial Sequence: Synthetic oligonucleotide
uacgccggguuuauaacgu

SEQ ID NO: 486887 - RNA, 19 nt, Artificial Sequence
  Description of Artificial Sequence: Synthetic oligonucleotide
ugugugcacuauaaagcuc

SEQ ID NO: 486888 - RNA, 19 nt, Artificial Sequence
  Description of Artificial Sequence: Synthetic oligonucleotide
aguccuacaucucuucuua

SEQ ID NO: 486889 - RNA, 19 nt, Artificial Sequence
  Description of Artificial Sequence: Synthetic oligonucleotide
uaucuacccgauuuguaua

SEQ ID NO: 486890 - RNA, 19 nt, Artificial Sequence
  Description of Artificial Sequence: Synthetic oligonucleotide
aacuuucccauaccagcau

SEQ ID NO: 486891 - RNA, 19 nt, Artificial Sequence
  Description of Artificial Sequence: Synthetic oligonucleotide
acuuucccauaccagcaug

SEQ ID NO: 486892 - RNA, 19 nt, Artificial Sequence
  Description of Artificial Sequence: Synthetic oligonucleotide
uggucauuaucuaguuggu

SEQ ID NO: 486893 - RNA, 19 nt, Artificial Sequence
  Description of Artificial Sequence: Synthetic oligonucleotide
cuacccgauuuguauacug

SEQ ID NO: 486894 - RNA, 19 nt, Artificial Sequence
  Description of Artificial Sequence: Synthetic oligonucleotide
agugauagguacgauggau

SEQ ID NO: 486895 - RNA, 19 nt, Artificial Sequence
  Description of Artificial Sequence: Synthetic oligonucleotide
cauguugaggagaugaagu

SEQ ID NO: 486896 - RNA, 19 nt, Artificial Sequence
  Description of Artificial Sequence: Synthetic oligonucleotide
guauucgauugauccagug

SEQ ID NO: 486897 - RNA, 19 nt, Artificial Sequence
  Description of Artificial Sequence: Synthetic oligonucleotide
uaaugaaugggugcccagu

SEQ ID NO: 486898 - RNA, 19 nt, Artificial Sequence
  Description of Artificial Sequence: Synthetic oligonucleotide
uuguuaagucauacuuuaa

SEQ ID NO: 486899 - RNA, 19 nt, Artificial Sequence
  Description of Artificial Sequence: Synthetic oligonucleotide
gugugcacuauaaagcuca

SEQ ID NO: 486900 - RNA, 19 nt, Artificial Sequence
  Description of Artificial Sequence: Synthetic oligonucleotide
uaaaaccccuucaguaaau

SEQ ID NO: 486901 - RNA, 19 nt, Artificial Sequence
  Description of Artificial Sequence: Synthetic oligonucleotide
gguacgauggauuucagau

SEQ ID NO: 486902 - RNA, 19 nt, Artificial Sequence
  Description of Artificial Sequence: Synthetic oligonucleotide
guuuaugaccuaucauaca

SEQ ID NO: 486903 - RNA, 19 nt, Artificial Sequence
  Description of Artificial Sequence: Synthetic oligonucleotide
ucagagggcauuaguuguc

SEQ ID NO: 486904 - RNA, 19 nt, Artificial Sequence
  Description of Artificial Sequence: Synthetic oligonucleotide
cauacgccggguuuauaac

SEQ ID NO: 486905 - RNA, 19 nt, Artificial Sequence
  Description of Artificial Sequence: Synthetic oligonucleotide
uggcuuaguaauucugaau

SEQ ID NO: 486906 - RNA, 19 nt, Artificial Sequence
  Description of Artificial Sequence: Synthetic oligonucleotide
ugcaaaggaaagucaucaa

SEQ ID NO: 486907 - RNA, 19 nt, Artificial Sequence
  Description of Artificial Sequence: Synthetic oligonucleotide
uagugauagguacgaugga

SEQ ID NO: 486908 - RNA, 19 nt, Artificial Sequence
  Description of Artificial Sequence: Synthetic oligonucleotide
uuacaaaaugugguggcuu

SEQ ID NO: 486909 - RNA, 19 nt, Artificial Sequence
  Description of Artificial Sequence: Synthetic oligonucleotide
acuuaagacugaugaguaa

SEQ ID NO: 486910 - RNA, 19 nt, Artificial Sequence
  Description of Artificial Sequence: Synthetic oligonucleotide
uccuuacugacacccucac

SEQ ID NO: 486911 - RNA, 19 nt, Artificial Sequence
  Description of Artificial Sequence: Synthetic oligonucleotide
ugacguucaucuagccacu

SEQ ID NO: 486912 - RNA, 19 nt, Artificial Sequence
  Description of Artificial Sequence: Synthetic oligonucleotide
acaaagcuaagugguauau

SEQ ID NO: 486913 - RNA, 19 nt, Artificial Sequence
  Description of Artificial Sequence: Synthetic oligonucleotide
uccguacgugggaauuucc

SEQ ID NO: 486914 - RNA, 19 nt, Artificial Sequence
  Description of Artificial Sequence: Synthetic oligonucleotide
acacuauuuguaacagcag

SEQ ID NO: 486915 - RNA, 19 nt, Artificial Sequence
  Description of Artificial Sequence: Synthetic oligonucleotide
aggugccuuacuuuucagu

SEQ ID NO: 486916 - RNA, 19 nt, Artificial Sequence
  Description of Artificial Sequence: Synthetic oligonucleotide
accuaucauacaaagcuaa

SEQ ID NO: 486917 - RNA, 19 nt, Artificial Sequence
  Description of Artificial Sequence: Synthetic oligonucleotide
agauggcuuaguaauucug

SEQ ID NO: 486918 - RNA, 19 nt, Artificial Sequence
  Description of Artificial Sequence: Synthetic oligonucleotide
uccauacuauggauuugaa

SEQ ID NO: 486919 - RNA, 19 nt, Artificial Sequence
  Description of Artificial Sequence: Synthetic oligonucleotide
cuacaaacucucauaauau

SEQ ID NO: 486920 - RNA, 19 nt, Artificial Sequence
  Description of Artificial Sequence: Synthetic oligonucleotide
uuagcaucaggagcuguau

SEQ ID NO: 486921 - RNA, 19 nt, Artificial Sequence
  Description of Artificial Sequence: Synthetic oligonucleotide
auuagaaguuuaugaccua

SEQ ID NO: 486922 - RNA, 19 nt, Artificial Sequence
  Description of Artificial Sequence: Synthetic oligonucleotide
agguacgauggauuucaga

SEQ ID NO: 486923 - RNA, 19 nt, Artificial Sequence
  Description of Artificial Sequence: Synthetic oligonucleotide
gaacgauaugauccaucca

SEQ ID NO: 486924 - RNA, 19 nt, Artificial Sequence
  Description of Artificial Sequence: Synthetic oligonucleotide
auaugcgaguggccucaac

SEQ ID NO: 486925 - RNA, 19 nt, Artificial Sequence
  Description of Artificial Sequence: Synthetic oligonucleotide
guuuggauugcacuuuccu

SEQ ID NO: 486926 - RNA, 19 nt, Artificial Sequence
  Description of Artificial Sequence: Synthetic oligonucleotide
caugacguucaucuagcca

SEQ ID NO: 486927 - RNA, 19 nt, Artificial Sequence
  Description of Artificial Sequence: Synthetic oligonucleotide
cucauacuaagauucuugu

SEQ ID NO: 486928 - RNA, 19 nt, Artificial Sequence
  Description of Artificial Sequence: Synthetic oligonucleotide
caguguauguaacagcaua

SEQ ID NO: 486929 - RNA, 19 nt, Artificial Sequence
  Description of Artificial Sequence: Synthetic oligonucleotide
aauauuuaauggggaucuu

SEQ ID NO: 486930 - RNA, 19 nt, Artificial Sequence
  Description of Artificial Sequence: Synthetic oligonucleotide
ggaguauucgauugaucca

SEQ ID NO: 486931 - RNA, 19 nt, Artificial Sequence
  Description of Artificial Sequence: Synthetic oligonucleotide
ccgauuuguauacugaaga

SEQ ID NO: 486932 - RNA, 19 nt, Artificial Sequence
  Description of Artificial Sequence: Synthetic oligonucleotide
agugcacuauagcccauau

SEQ ID NO: 486933 - RNA, 19 nt, Artificial Sequence
  Description of Artificial Sequence: Synthetic oligonucleotide
cacccucacucauacuaag

SEQ ID NO: 486934 - RNA, 19 nt, Artificial Sequence
  Description of Artificial Sequence: Synthetic oligonucleotide
cauaaugaaugggugccca

SEQ ID NO: 486935 - RNA, 19 nt, Artificial Sequence
  Description of Artificial Sequence: Synthetic oligonucleotide
agcugagcuggccauuuaa

SEQ ID NO: 486936 - RNA, 19 nt, Artificial Sequence
  Description of Artificial Sequence: Synthetic oligonucleotide
cauacaaagcuaaguggua

SEQ ID NO: 486937 - RNA, 19 nt, Artificial Sequence
  Description of Artificial Sequence: Synthetic oligonucleotide
guacggauuuauuaccacu

SEQ ID NO: 486938 - RNA, 19 nt, Artificial Sequence
  Description of Artificial Sequence: Synthetic oligonucleotide
cuuucagagggcauuaguu

SEQ ID NO: 486939 - RNA, 19 nt, Artificial Sequence
  Description of Artificial Sequence: Synthetic oligonucleotide
acggauuuauuaccacuuu

SEQ ID NO: 486940 - RNA, 19 nt, Artificial Sequence
  Description of Artificial Sequence: Synthetic oligonucleotide
augcgaguggccucaacuu

SEQ ID NO: 486941 - RNA, 19 nt, Artificial Sequence
  Description of Artificial Sequence: Synthetic oligonucleotide
agcagcauacgccggguuu

SEQ ID NO: 486942 - RNA, 19 nt, Artificial Sequence
  Description of Artificial Sequence: Synthetic oligonucleotide
uggcuuguuaauggcuucu

SEQ ID NO: 486943 - RNA, 19 nt, Artificial Sequence
  Description of Artificial Sequence: Synthetic oligonucleotide
guccuacaucucuucuuag

SEQ ID NO: 486944 - RNA, 19 nt, Artificial Sequence
  Description of Artificial Sequence: Synthetic oligonucleotide
gaaguccuacaucucuucu

SEQ ID NO: 486945 - RNA, 19 nt, Artificial Sequence
  Description of Artificial Sequence: Synthetic oligonucleotide
aacugaagacuaagguuuu

SEQ ID NO: 486946 - RNA, 19 nt, Artificial Sequence
  Description of Artificial Sequence: Synthetic oligonucleotide
gugugauugugcaugacgu

SEQ ID NO: 486947 - RNA, 19 nt, Artificial Sequence
  Description of Artificial Sequence: Synthetic oligonucleotide
cccgauuuguauacugaag

SEQ ID NO: 486948 - RNA, 19 nt, Artificial Sequence
  Description of Artificial Sequence: Synthetic oligonucleotide
acgagaccagccuguuuug

SEQ ID NO: 486949 - RNA, 19 nt, Artificial Sequence
  Description of Artificial Sequence: Synthetic oligonucleotide
gugcacuauagcccauaug

SEQ ID NO: 486950 - RNA, 19 nt, Artificial Sequence
  Description of Artificial Sequence: Synthetic oligonucleotide
caggugaugcauuuccuua

SEQ ID NO: 486951 - RNA, 19 nt, Artificial Sequence
  Description of Artificial Sequence: Synthetic oligonucleotide
agcuuacuauuuugucuaa

SEQ ID NO: 486952 - RNA, 19 nt, Artificial Sequence
  Description of Artificial Sequence: Synthetic oligonucleotide
guacuaugucugcgugucc

SEQ ID NO: 486953 - RNA, 19 nt, Artificial Sequence
  Description of Artificial Sequence: Synthetic oligonucleotide
gcauacgccggguuuauaa

SEQ ID NO: 486954 - RNA, 19 nt, Artificial Sequence
  Description of Artificial Sequence: Synthetic oligonucleotide
aguauucgauugauccagu

SEQ ID NO: 486955 - RNA, 19 nt, Artificial Sequence
  Description of Artificial Sequence: Synthetic oligonucleotide
cucucauaauucccauaca

SEQ ID NO: 486956 - RNA, 19 nt, Artificial Sequence
  Description of Artificial Sequence: Synthetic oligonucleotide
gucaauucagcaaguauuu

SEQ ID NO: 486957 - RNA, 19 nt, Artificial Sequence
  Description of Artificial Sequence: Synthetic oligonucleotide
aucuagccacuuauccaag

SEQ ID NO: 486958 - RNA, 19 nt, Artificial Sequence
  Description of Artificial Sequence: Synthetic oligonucleotide
uuauaacguuugucuugau

SEQ ID NO: 486959 - RNA, 19 nt, Artificial Sequence
  Description of Artificial Sequence: Synthetic oligonucleotide
ccguacgugggaauuuccc

SEQ ID NO: 486960 - RNA, 19 nt, Artificial Sequence
  Description of Artificial Sequence: Synthetic oligonucleotide
gugcccaguggucauuauc

SEQ ID NO: 486961 - RNA, 19 nt, Artificial Sequence
  Description of Artificial Sequence: Synthetic oligonucleotide
gguuguaaaugcagguauc

SEQ ID NO: 486962 - RNA, 19 nt, Artificial Sequence
  Description of Artificial Sequence: Synthetic oligonucleotide
ggugccuuacuuuucaguu

SEQ ID NO: 486963 - RNA, 19 nt, Artificial Sequence
  Description of Artificial Sequence: Synthetic oligonucleotide
cuuuaucuacccgauuugu

SEQ ID NO: 486964 - RNA, 19 nt, Artificial Sequence
  Description of Artificial Sequence: Synthetic oligonucleotide
cacgagaccagccuguuuu

SEQ ID NO: 486965 - RNA, 19 nt, Artificial Sequence
  Description of Artificial Sequence: Synthetic oligonucleotide
gguuuauaacguuugucuu

SEQ ID NO: 486966 - RNA, 19 nt, Artificial Sequence
  Description of Artificial Sequence: Synthetic oligonucleotide
acguucaucuagccacuua

SEQ ID NO: 486967 - RNA, 19 nt, Artificial Sequence
  Description of Artificial Sequence: Synthetic oligonucleotide
cacuuauccaaggcuauua

SEQ ID NO: 486968 - RNA, 19 nt, Artificial Sequence
  Description of Artificial Sequence: Synthetic oligonucleotide
cauuccacacuaauucuuu

SEQ ID NO: 486969 - RNA, 19 nt, Artificial Sequence
  Description of Artificial Sequence: Synthetic oligonucleotide
gcauaaugaaugggugccc

SEQ ID NO: 486970 - RNA, 19 nt, Artificial Sequence
  Description of Artificial Sequence: Synthetic oligonucleotide
acgauaugauccauccauu

SEQ ID NO: 486971 - RNA, 19 nt, Artificial Sequence
  Description of Artificial Sequence: Synthetic oligonucleotide
acguuugucuugaugcguu

SEQ ID NO: 486972 - RNA, 19 nt, Artificial Sequence
  Description of Artificial Sequence: Synthetic oligonucleotide
aggucggaauaaagcuggg

SEQ ID NO: 486973 - RNA, 19 nt, Artificial Sequence
  Description of Artificial Sequence: Synthetic oligonucleotide
cuccguacgugggaauuuc

SEQ ID NO: 486974 - RNA, 19 nt, Artificial Sequence
  Description of Artificial Sequence: Synthetic oligonucleotide
ugcuccguacgugggaauu

SEQ ID NO: 486975 - RNA, 19 nt, Artificial Sequence
  Description of Artificial Sequence: Synthetic oligonucleotide
aauaugcgaguggccucaa

SEQ ID NO: 486976 - RNA, 19 nt, Artificial Sequence
  Description of Artificial Sequence: Synthetic oligonucleotide
ggugaguuaggaggaucug

SEQ ID NO: 486977 - RNA, 19 nt, Artificial Sequence
  Description of Artificial Sequence: Synthetic oligonucleotide
guacgauggauuucagauu

SEQ ID NO: 486978 - RNA, 19 nt, Artificial Sequence
  Description of Artificial Sequence: Synthetic oligonucleotide
gccucaacuuucccauacc

SEQ ID NO: 486979 - RNA, 19 nt, Artificial Sequence
  Description of Artificial Sequence: Synthetic oligonucleotide
acacccucacucauacuaa

SEQ ID NO: 486980 - RNA, 19 nt, Artificial Sequence
  Description of Artificial Sequence: Synthetic oligonucleotide
cagggauaacuuuaugauu

SEQ ID NO: 486981 - RNA, 19 nt, Artificial Sequence
  Description of Artificial Sequence: Synthetic oligonucleotide
ccauacuauggauuugaaa

SEQ ID NO: 486982 - RNA, 19 nt, Artificial Sequence
  Description of Artificial Sequence: Synthetic oligonucleotide
gugaaauauugcugaguuu

SEQ ID NO: 486983 - RNA, 19 nt, Artificial Sequence
  Description of Artificial Sequence: Synthetic oligonucleotide
gugauagguacgauggauu

SEQ ID NO: 486984 - RNA, 19 nt, Artificial Sequence
  Description of Artificial Sequence: Synthetic oligonucleotide
cuccuacauacacagggau

SEQ ID NO: 486985 - RNA, 19 nt, Artificial Sequence
  Description of Artificial Sequence: Synthetic oligonucleotide
ccacacuaauucuuuacua

SEQ ID NO: 486986 - RNA, 19 nt, Artificial Sequence
  Description of Artificial Sequence: Synthetic oligonucleotide
aacaugcguugcaggugau

SEQ ID NO: 486987 - RNA, 19 nt, Artificial Sequence
  Description of Artificial Sequence: Synthetic oligonucleotide
cacuacaaacucucauaau

SEQ ID NO: 486988 - RNA, 19 nt, Artificial Sequence
  Description of Artificial Sequence: Synthetic oligonucleotide
cuguuauaugccugucaau

SEQ ID NO: 486989 - RNA, 19 nt, Artificial Sequence
  Description of Artificial Sequence: Synthetic oligonucleotide
acgccggguuuauaacguu

SEQ ID NO: 486990 - RNA, 19 nt, Artificial Sequence
  Description of Artificial Sequence: Synthetic oligonucleotide
cagucacgaacuuguugua

SEQ ID NO: 486991 - RNA, 19 nt, Artificial Sequence
  Description of Artificial Sequence: Synthetic oligonucleotide
ggauaacuuuaugauugcu

SEQ ID NO: 486992 - RNA, 19 nt, Artificial Sequence
  Description of Artificial Sequence: Synthetic oligonucleotide
gcacuauaaagcucauuuu

SEQ ID NO: 486993 - RNA, 19 nt, Artificial Sequence
  Description of Artificial Sequence: Synthetic oligonucleotide
gcacuauagcccauaugua

SEQ ID NO: 486994 - RNA, 19 nt, Artificial Sequence
  Description of Artificial Sequence: Synthetic oligonucleotide
gcagcauacgccggguuua

SEQ ID NO: 486995 - RNA, 19 nt, Artificial Sequence
  Description of Artificial Sequence: Synthetic oligonucleotide
cacaggcauuucgaugcaa

SEQ ID NO: 486996 - RNA, 19 nt, Artificial Sequence
  Description of Artificial Sequence: Synthetic oligonucleotide
caugcuucgcugccauuuu

SEQ ID NO: 486997 - RNA, 19 nt, Artificial Sequence
  Description of Artificial Sequence: Synthetic oligonucleotide
agcauacgccggguuuaua

SEQ ID NO: 486998 - RNA, 19 nt, Artificial Sequence
  Description of Artificial Sequence: Synthetic oligonucleotide
cuagugcacuauagcccau

SEQ ID NO: 486999 - RNA, 19 nt, Artificial Sequence
  Description of Artificial Sequence: Synthetic oligonucleotide
gcguucaaggggagaaggu

SEQ ID NO: 487000 - RNA, 19 nt, Artificial Sequence
  Description of Artificial Sequence: Synthetic oligonucleotide
gugcacuauaaagcucauu

SEQ ID NO: 487001 - RNA, 19 nt, Artificial Sequence
  Description of Artificial Sequence: Synthetic oligonucleotide
gggugcccaguggucauua

SEQ ID NO: 487002 - RNA, 19 nt, Artificial Sequence
  Description of Artificial Sequence: Synthetic oligonucleotide
ccggguuuauaacguuugu

SEQ ID NO: 487003 - RNA, 19 nt, Artificial Sequence
  Description of Artificial Sequence: Synthetic oligonucleotide
cugcuccguacgugggaau

SEQ ID NO: 487004 - RNA, 19 nt, Artificial Sequence
  Description of Artificial Sequence: Synthetic oligonucleotide
cagcauacgccggguuuau

SEQ ID NO: 487005 - RNA, 19 nt, Artificial Sequence
  Description of Artificial Sequence: Synthetic oligonucleotide
ccccuucaguaaauuguau

SEQ ID NO: 487006 - RNA, 19 nt, Artificial Sequence
  Description of Artificial Sequence: Synthetic oligonucleotide
gcuccguacgugggaauuu

SEQ ID NO: 487007 - RNA, 19 nt, Artificial Sequence
  Description of Artificial Sequence: Synthetic oligonucleotide
ccacuuauccaaggcuauu

SEQ ID NO: 487008 - RNA, 19 nt, Artificial Sequence
  Description of Artificial Sequence: Synthetic oligonucleotide
cgccggguuuauaacguuu

SEQ ID NO: 487009 - RNA, 19 nt, Artificial Sequence
  Description of Artificial Sequence: Synthetic oligonucleotide
ccacgagaccagccuguuu

SEQ ID NO: 487010 - RNA, 19 nt, Artificial Sequence
  Description of Artificial Sequence: Synthetic oligonucleotide
ucuucuauaaacuugaugc

SEQ ID NO: 487011 - RNA, 19 nt, Artificial Sequence
  Description of Artificial Sequence: Synthetic oligonucleotide
aauguauuggcagugauag

SEQ ID NO: 487012 - RNA, 19 nt, Artificial Sequence
  Description of Artificial Sequence: Synthetic oligonucleotide
agcaaaaucuucuaauacc

SEQ ID NO: 487013 - RNA, 19 nt, Artificial Sequence
  Description of Artificial Sequence: Synthetic oligonucleotide
ugaauacacaggaugaugg

SEQ ID NO: 487014 - RNA, 19 nt, Artificial Sequence
  Description of Artificial Sequence: Synthetic oligonucleotide
aacaggaccacaucauugc

SEQ ID NO: 487015 - RNA, 19 nt, Artificial Sequence
  Description of Artificial Sequence: Synthetic oligonucleotide
ucuaauaccucuuuaacgu

SEQ ID NO: 487016 - RNA, 19 nt, Artificial Sequence
  Description of Artificial Sequence: Synthetic oligonucleotide
uucucuaauagcuucaaug

SEQ ID NO: 487017 - RNA, 19 nt, Artificial Sequence
  Description of Artificial Sequence: Synthetic oligonucleotide
uuuauuagggagcugcuug

SEQ ID NO: 487018 - RNA, 19 nt, Artificial Sequence
  Description of Artificial Sequence: Synthetic oligonucleotide
ucucuaauagcuucaaugc

SEQ ID NO: 487019 - RNA, 19 nt, Artificial Sequence
  Description of Artificial Sequence: Synthetic oligonucleotide
aaccacaacaacccguggc

SEQ ID NO: 487020 - RNA, 19 nt, Artificial Sequence
  Description of Artificial Sequence: Synthetic oligonucleotide
auugugaacacucuguucu

SEQ ID NO: 487021 - RNA, 19 nt, Artificial Sequence
  Description of Artificial Sequence: Synthetic oligonucleotide
caagcuuggaucuacuucg

SEQ ID NO: 487022 - RNA, 19 nt, Artificial Sequence
  Description of Artificial Sequence: Synthetic oligonucleotide
agaacuucagaauacauau

SEQ ID NO: 487023 - RNA, 19 nt, Artificial Sequence
  Description of Artificial Sequence: Synthetic oligonucleotide
uucgacaaagguuacagug

SEQ ID NO: 487024 - RNA, 19 nt, Artificial Sequence
  Description of Artificial Sequence: Synthetic oligonucleotide
aagaucaaacucccgagag

SEQ ID NO: 487025 - RNA, 19 nt, Artificial Sequence
  Description of Artificial Sequence: Synthetic oligonucleotide
uguugcuuaucugauaugg

SEQ ID NO: 487026 - RNA, 19 nt, Artificial Sequence
  Description of Artificial Sequence: Synthetic oligonucleotide
caugaaacgggaaaauucc

SEQ ID NO: 487027 - RNA, 19 nt, Artificial Sequence
  Description of Artificial Sequence: Synthetic oligonucleotide
ugcuuugaagcuaucagcc

SEQ ID NO: 487028 - RNA, 19 nt, Artificial Sequence
  Description of Artificial Sequence: Synthetic oligonucleotide
uguaacaauacuucucuca

SEQ ID NO: 487029 - RNA, 19 nt, Artificial Sequence
  Description of Artificial Sequence: Synthetic oligonucleotide
aagucuguaacaauacuuc

SEQ ID NO: 487030 - RNA, 19 nt, Artificial Sequence
  Description of Artificial Sequence: Synthetic oligonucleotide
uccauaaaguaaauggcug

SEQ ID NO: 487031 - RNA, 19 nt, Artificial Sequence
  Description of Artificial Sequence: Synthetic oligonucleotide
uugagcuugucaaauaugu

SEQ ID NO: 487032 - RNA, 19 nt, Artificial Sequence
  Description of Artificial Sequence: Synthetic oligonucleotide
uuucuuaaguuuccuauga

SEQ ID NO: 487033 - RNA, 19 nt, Artificial Sequence
  Description of Artificial Sequence: Synthetic oligonucleotide
uauucgccaaaacaggacc

SEQ ID NO: 487034 - RNA, 19 nt, Artificial Sequence
  Description of Artificial Sequence: Synthetic oligonucleotide
ucgauuucaugucuuaaug

SEQ ID NO: 487035 - RNA, 19 nt, Artificial Sequence
  Description of Artificial Sequence: Synthetic oligonucleotide
ugcuuaucugauauggacc

SEQ ID NO: 487036 - RNA, 19 nt, Artificial Sequence
  Description of Artificial Sequence: Synthetic oligonucleotide
guauccuuaaucaagcuug

SEQ ID NO: 487037 - RNA, 19 nt, Artificial Sequence
  Description of Artificial Sequence: Synthetic oligonucleotide
ucacuugcaagauaagcug

SEQ ID NO: 487038 - RNA, 19 nt, Artificial Sequence
  Description of Artificial Sequence: Synthetic oligonucleotide
aacaaggccacaugaugag

SEQ ID NO: 487039 - RNA, 19 nt, Artificial Sequence
  Description of Artificial Sequence: Synthetic oligonucleotide
ucuauaaacuugaugccaa

SEQ ID NO: 487040 - RNA, 19 nt, Artificial Sequence
  Description of Artificial Sequence: Synthetic oligonucleotide
ucuucgacaaagguuacag

SEQ ID NO: 487041 - RNA, 19 nt, Artificial Sequence
  Description of Artificial Sequence: Synthetic oligonucleotide
ugaaugacccucaagcuau

SEQ ID NO: 487042 - RNA, 19 nt, Artificial Sequence
  Description of Artificial Sequence: Synthetic oligonucleotide
caagcuaucuucugcaaag

SEQ ID NO: 487043 - RNA, 19 nt, Artificial Sequence
  Description of Artificial Sequence: Synthetic oligonucleotide
uuccaauguaugcagaggu

SEQ ID NO: 487044 - RNA, 19 nt, Artificial Sequence
  Description of Artificial Sequence: Synthetic oligonucleotide
agaucaaacucccgagagc

SEQ ID NO: 487045 - RNA, 19 nt, Artificial Sequence
  Description of Artificial Sequence: Synthetic oligonucleotide
uguauucgccaaaacagga

SEQ ID NO: 487046 - RNA, 19 nt, Artificial Sequence
  Description of Artificial Sequence: Synthetic oligonucleotide
uuagggagcugcuugucgg

SEQ ID NO: 487047 - RNA, 19 nt, Artificial Sequence
  Description of Artificial Sequence: Synthetic oligonucleotide
cuuggaucuacuucgacuc

SEQ ID NO: 487048 - RNA, 19 nt, Artificial Sequence
  Description of Artificial Sequence: Synthetic oligonucleotide
aagcuugauauccacugug

SEQ ID NO: 487049 - RNA, 19 nt, Artificial Sequence
  Description of Artificial Sequence: Synthetic oligonucleotide
aacgugucaucaucucccc

SEQ ID NO: 487050 - RNA, 19 nt, Artificial Sequence
  Description of Artificial Sequence: Synthetic oligonucleotide
aucguaaucggagagaaca

SEQ ID NO: 487051 - RNA, 19 nt, Artificial Sequence
  Description of Artificial Sequence: Synthetic oligonucleotide
accucuacugcuuuauuag

SEQ ID NO: 487052 - RNA, 19 nt, Artificial Sequence
  Description of Artificial Sequence: Synthetic oligonucleotide
ugccaaguauccuuaauca

SEQ ID NO: 487053 - RNA, 19 nt, Artificial Sequence
  Description of Artificial Sequence: Synthetic oligonucleotide
ugucacaguauugaucacg

SEQ ID NO: 487054 - RNA, 19 nt, Artificial Sequence
  Description of Artificial Sequence: Synthetic oligonucleotide
guaagaucaaacucccgag

SEQ ID NO: 487055 - RNA, 19 nt, Artificial Sequence
  Description of Artificial Sequence: Synthetic oligonucleotide
uguguauuguaacuggcau

SEQ ID NO: 487056 - RNA, 19 nt, Artificial Sequence
  Description of Artificial Sequence: Synthetic oligonucleotide
uaguuauucuuccacucug

SEQ ID NO: 487057 - RNA, 19 nt, Artificial Sequence
  Description of Artificial Sequence: Synthetic oligonucleotide
uuuccuaugauggaugccu

SEQ ID NO: 487058 - RNA, 19 nt, Artificial Sequence
  Description of Artificial Sequence: Synthetic oligonucleotide
agagcuaucuuuaaacaag

SEQ ID NO: 487059 - RNA, 19 nt, Artificial Sequence
  Description of Artificial Sequence: Synthetic oligonucleotide
uagcauacuugucuuuagg

SEQ ID NO: 487060 - RNA, 19 nt, Artificial Sequence
  Description of Artificial Sequence: Synthetic oligonucleotide
uuuaagcuugauauccacu

SEQ ID NO: 487061 - RNA, 19 nt, Artificial Sequence
  Description of Artificial Sequence: Synthetic oligonucleotide
ucgacaaagguuacaguga

SEQ ID NO: 487062 - RNA, 19 nt, Artificial Sequence
  Description of Artificial Sequence: Synthetic oligonucleotide
auguacgcuuugcugauac

SEQ ID NO: 487063 - RNA, 19 nt, Artificial Sequence
  Description of Artificial Sequence: Synthetic oligonucleotide
cuguauucgccaaaacagg

SEQ ID NO: 487064 - RNA, 19 nt, Artificial Sequence
  Description of Artificial Sequence: Synthetic oligonucleotide
gcuuaucugauauggaccg

SEQ ID NO: 487065 - RNA, 19 nt, Artificial Sequence
  Description of Artificial Sequence: Synthetic oligonucleotide
gcuaucuuuaaacaaggcc

SEQ ID NO: 487066 - RNA, 19 nt, Artificial Sequence
  Description of Artificial Sequence: Synthetic oligonucleotide
agagcuuugccuuucaauu

SEQ ID NO: 487067 - RNA, 19 nt, Artificial Sequence
  Description of Artificial Sequence: Synthetic oligonucleotide
aaaccucuucgacaaaggu

SEQ ID NO: 487068 - RNA, 19 nt, Artificial Sequence
  Description of Artificial Sequence: Synthetic oligonucleotide
aacgggaaaauuccuccug

SEQ ID NO: 487069 - RNA, 19 nt, Artificial Sequence
  Description of Artificial Sequence: Synthetic oligonucleotide
ucucgaaccauuuuccaaa

SEQ ID NO: 487070 - RNA, 19 nt, Artificial Sequence
  Description of Artificial Sequence: Synthetic oligonucleotide
auuagggagcugcuugucg

SEQ ID NO: 487071 - RNA, 19 nt, Artificial Sequence
  Description of Artificial Sequence: Synthetic oligonucleotide
aaaaccucuucgacaaagg

SEQ ID NO: 487072 - RNA, 19 nt, Artificial Sequence
  Description of Artificial Sequence: Synthetic oligonucleotide
ucucuagucgccuaacuuc

SEQ ID NO: 487073 - RNA, 19 nt, Artificial Sequence
  Description of Artificial Sequence: Synthetic oligonucleotide
uguuuaagcuugauaucca

SEQ ID NO: 487074 - RNA, 19 nt, Artificial Sequence
  Description of Artificial Sequence: Synthetic oligonucleotide
aggcuuagauuucuugugg

SEQ ID NO: 487075 - RNA, 19 nt, Artificial Sequence
  Description of Artificial Sequence: Synthetic oligonucleotide
uuagagcugucuuuaagaa

SEQ ID NO: 487076 - RNA, 19 nt, Artificial Sequence
  Description of Artificial Sequence: Synthetic oligonucleotide
uccagguuaaaacguguug

SEQ ID NO: 487077 - RNA, 19 nt, Artificial Sequence
  Description of Artificial Sequence: Synthetic oligonucleotide
uggguguucuucauuacac

SEQ ID NO: 487078 - RNA, 19 nt, Artificial Sequence
  Description of Artificial Sequence: Synthetic oligonucleotide
aaggcguggguaguuauuc

SEQ ID NO: 487079 - RNA, 19 nt, Artificial Sequence
  Description of Artificial Sequence: Synthetic oligonucleotide
ugcagaggugauuaugagc

SEQ ID NO: 487080 - RNA, 19 nt, Artificial Sequence
  Description of Artificial Sequence: Synthetic oligonucleotide
ugacucucgaaccauuuuc

SEQ ID NO: 487081 - RNA, 19 nt, Artificial Sequence
  Description of Artificial Sequence: Synthetic oligonucleotide
gaauacacaggaugauggc

SEQ ID NO: 487082 - RNA, 19 nt, Artificial Sequence
  Description of Artificial Sequence: Synthetic oligonucleotide
uucaguguuugugagcugc

SEQ ID NO: 487083 - RNA, 19 nt, Artificial Sequence
  Description of Artificial Sequence: Synthetic oligonucleotide
uguagcgucucccaagcaa

SEQ ID NO: 487084 - RNA, 19 nt, Artificial Sequence
  Description of Artificial Sequence: Synthetic oligonucleotide
uucaauuaucuguuguauc

SEQ ID NO: 487085 - RNA, 19 nt, Artificial Sequence
  Description of Artificial Sequence: Synthetic oligonucleotide
aacccagagcuuucauugg

SEQ ID NO: 487086 - RNA, 19 nt, Artificial Sequence
  Description of Artificial Sequence: Synthetic oligonucleotide
uuaaucuucuucucaccgu

SEQ ID NO: 487087 - RNA, 19 nt, Artificial Sequence
  Description of Artificial Sequence: Synthetic oligonucleotide
ugagagucaccuucacggg

SEQ ID NO: 487088 - RNA, 19 nt, Artificial Sequence
  Description of Artificial Sequence: Synthetic oligonucleotide
aacccguggcaggugaucc

SEQ ID NO: 487089 - RNA, 19 nt, Artificial Sequence
  Description of Artificial Sequence: Synthetic oligonucleotide
uuaauguauuggcagugau

SEQ ID NO: 487090 - RNA, 19 nt, Artificial Sequence
  Description of Artificial Sequence: Synthetic oligonucleotide
agugauuuagagcugucuu

SEQ ID NO: 487091 - RNA, 19 nt, Artificial Sequence
  Description of Artificial Sequence: Synthetic oligonucleotide
uaacuggcaucguaaucgg

SEQ ID NO: 487092 - RNA, 19 nt, Artificial Sequence
  Description of Artificial Sequence: Synthetic oligonucleotide
agcagucggacacagcaag

SEQ ID NO: 487093 - RNA, 19 nt, Artificial Sequence
  Description of Artificial Sequence: Synthetic oligonucleotide
agcugaacccguuugccag

SEQ ID NO: 487094 - RNA, 19 nt, Artificial Sequence
  Description of Artificial Sequence: Synthetic oligonucleotide
gguucugucaugaaacggg

SEQ ID NO: 487095 - RNA, 19 nt, Artificial Sequence
  Description of Artificial Sequence: Synthetic oligonucleotide
uggucaaaacaaauauggu

SEQ ID NO: 487096 - RNA, 19 nt, Artificial Sequence
  Description of Artificial Sequence: Synthetic oligonucleotide
uuuccaaaagcagucggac

SEQ ID NO: 487097 - RNA, 19 nt, Artificial Sequence
  Description of Artificial Sequence: Synthetic oligonucleotide
uaacaauacuucucucagc

SEQ ID NO: 487098 - RNA, 19 nt, Artificial Sequence
  Description of Artificial Sequence: Synthetic oligonucleotide
ccaaguauccuuaaucaag

SEQ ID NO: 487099 - RNA, 19 nt, Artificial Sequence
  Description of Artificial Sequence: Synthetic oligonucleotide
caugucuuaaugccgcgag

SEQ ID NO: 487100 - RNA, 19 nt, Artificial Sequence
  Description of Artificial Sequence: Synthetic oligonucleotide
cuuuaaacaaggccacaug

SEQ ID NO: 487101 - RNA, 19 nt, Artificial Sequence
  Description of Artificial Sequence: Synthetic oligonucleotide
ugccguuugacacucuccu

SEQ ID NO: 487102 - RNA, 19 nt, Artificial Sequence
  Description of Artificial Sequence: Synthetic oligonucleotide
uacgcuuugcugauacuga

SEQ ID NO: 487103 - RNA, 19 nt, Artificial Sequence
  Description of Artificial Sequence: Synthetic oligonucleotide
uuguauccugcuuggacug

SEQ ID NO: 487104 - RNA, 19 nt, Artificial Sequence
  Description of Artificial Sequence: Synthetic oligonucleotide
aaguauccuuaaucaagcu

SEQ ID NO: 487105 - RNA, 19 nt, Artificial Sequence
  Description of Artificial Sequence: Synthetic oligonucleotide
gaacccguuugccaguaag

SEQ ID NO: 487106 - RNA, 19 nt, Artificial Sequence
  Description of Artificial Sequence: Synthetic oligonucleotide
uucgauuucaugucuuaau

SEQ ID NO: 487107 - RNA, 19 nt, Artificial Sequence
  Description of Artificial Sequence: Synthetic oligonucleotide
uuauuagggagcugcuugu

SEQ ID NO: 487108 - RNA, 19 nt, Artificial Sequence
  Description of Artificial Sequence: Synthetic oligonucleotide
uaauguauuggcagugaua

SEQ ID NO: 487109 - RNA, 19 nt, Artificial Sequence
  Description of Artificial Sequence: Synthetic oligonucleotide
uagucgccuaacuucagug

SEQ ID NO: 487110 - RNA, 19 nt, Artificial Sequence
  Description of Artificial Sequence: Synthetic oligonucleotide
uaauaccucuuuaacguuu

SEQ ID NO: 487111 - RNA, 19 nt, Artificial Sequence
  Description of Artificial Sequence: Synthetic oligonucleotide
agucuguaacaauacuucu

SEQ ID NO: 487112 - RNA, 19 nt, Artificial Sequence
  Description of Artificial Sequence: Synthetic oligonucleotide
uuaggagcuuugaauucug

SEQ ID NO: 487113 - RNA, 19 nt, Artificial Sequence
  Description of Artificial Sequence: Synthetic oligonucleotide
aagauaagcuggguguucu

SEQ ID NO: 487114 - RNA, 19 nt, Artificial Sequence
  Description of Artificial Sequence: Synthetic oligonucleotide
aguauccuuaaucaagcuu

SEQ ID NO: 487115 - RNA, 19 nt, Artificial Sequence
  Description of Artificial Sequence: Synthetic oligonucleotide
auggucucagggcuaacag

SEQ ID NO: 487116 - RNA, 19 nt, Artificial Sequence
  Description of Artificial Sequence: Synthetic oligonucleotide
uucaugucuuaaugccgcg

SEQ ID NO: 487117 - RNA, 19 nt, Artificial Sequence
  Description of Artificial Sequence: Synthetic oligonucleotide
uuaucugauauggaccggu

SEQ ID NO: 487118 - RNA, 19 nt, Artificial Sequence
  Description of Artificial Sequence: Synthetic oligonucleotide
guucgauucuuccaguaca

SEQ ID NO: 487119 - RNA, 19 nt, Artificial Sequence
  Description of Artificial Sequence: Synthetic oligonucleotide
aguguuuuggagugaccug

SEQ ID NO: 487120 - RNA, 19 nt, Artificial Sequence
  Description of Artificial Sequence: Synthetic oligonucleotide
uaggagcuuugaauucugg

SEQ ID NO: 487121 - RNA, 19 nt, Artificial Sequence
  Description of Artificial Sequence: Synthetic oligonucleotide
uuaugagcaggauuuucau

SEQ ID NO: 487122 - RNA, 19 nt, Artificial Sequence
  Description of Artificial Sequence: Synthetic oligonucleotide
ugauuuagagcugucuuua

SEQ ID NO: 487123 - RNA, 19 nt, Artificial Sequence
  Description of Artificial Sequence: Synthetic oligonucleotide
uggaccggucuucuaaagc

SEQ ID NO: 487124 - RNA, 19 nt, Artificial Sequence
  Description of Artificial Sequence: Synthetic oligonucleotide
uucgauucuuccaguacaa

SEQ ID NO: 487125 - RNA, 19 nt, Artificial Sequence
  Description of Artificial Sequence: Synthetic oligonucleotide
cuuaaucaagcuuggaucu

SEQ ID NO: 487126 - RNA, 19 nt, Artificial Sequence
  Description of Artificial Sequence: Synthetic oligonucleotide
auauggaccggucuucuaa

SEQ ID NO: 487127 - RNA, 19 nt, Artificial Sequence
  Description of Artificial Sequence: Synthetic oligonucleotide
gaucacgcccggcaggucc

SEQ ID NO: 487128 - RNA, 19 nt, Artificial Sequence
  Description of Artificial Sequence: Synthetic oligonucleotide
ugucgguccacuguuuaag

SEQ ID NO: 487129 - RNA, 19 nt, Artificial Sequence
  Description of Artificial Sequence: Synthetic oligonucleotide
gcugccuuaauguauuggc

SEQ ID NO: 487130 - RNA, 19 nt, Artificial Sequence
  Description of Artificial Sequence: Synthetic oligonucleotide
uguuuuggagugaccuggc

SEQ ID NO: 487131 - RNA, 19 nt, Artificial Sequence
  Description of Artificial Sequence: Synthetic oligonucleotide
augucuucuauaaacuuga

SEQ ID NO: 487132 - RNA, 19 nt, Artificial Sequence
  Description of Artificial Sequence: Synthetic oligonucleotide
ugguaagaucaaacucccg

SEQ ID NO: 487133 - RNA, 19 nt, Artificial Sequence
  Description of Artificial Sequence: Synthetic oligonucleotide
gacucucgaaccauuuucc

SEQ ID NO: 487134 - RNA, 19 nt, Artificial Sequence
  Description of Artificial Sequence: Synthetic oligonucleotide
uucuuccuaacugugguaa

SEQ ID NO: 487135 - RNA, 19 nt, Artificial Sequence
  Description of Artificial Sequence: Synthetic oligonucleotide
ugucuuaaugccgcgagau

SEQ ID NO: 487136 - RNA, 19 nt, Artificial Sequence
  Description of Artificial Sequence: Synthetic oligonucleotide
guaaucggagagaacauca

SEQ ID NO: 487137 - RNA, 19 nt, Artificial Sequence
  Description of Artificial Sequence: Synthetic oligonucleotide
aaguucucguucuuccaau

SEQ ID NO: 487138 - RNA, 19 nt, Artificial Sequence
  Description of Artificial Sequence: Synthetic oligonucleotide
gacugaccaagucuguaac

SEQ ID NO: 487139 - RNA, 19 nt, Artificial Sequence
  Description of Artificial Sequence: Synthetic oligonucleotide
aguauugaucacgcccggc

SEQ ID NO: 487140 - RNA, 19 nt, Artificial Sequence
  Description of Artificial Sequence: Synthetic oligonucleotide
uuucucuagucgccuaacu

SEQ ID NO: 487141 - RNA, 19 nt, Artificial Sequence
  Description of Artificial Sequence: Synthetic oligonucleotide
uccauuugacugaccaagu

SEQ ID NO: 487142 - RNA, 19 nt, Artificial Sequence
  Description of Artificial Sequence: Synthetic oligonucleotide
agggcuaacaguacaaccu

SEQ ID NO: 487143 - RNA, 19 nt, Artificial Sequence
  Description of Artificial Sequence: Synthetic oligonucleotide
uucucuagucgccuaacuu

SEQ ID NO: 487144 - RNA, 19 nt, Artificial Sequence
  Description of Artificial Sequence: Synthetic oligonucleotide
guauugaucacgcccggca

SEQ ID NO: 487145 - RNA, 19 nt, Artificial Sequence
  Description of Artificial Sequence: Synthetic oligonucleotide
uuccuaacugugguaaucu

SEQ ID NO: 487146 - RNA, 19 nt, Artificial Sequence
  Description of Artificial Sequence: Synthetic oligonucleotide
guacgcuuugcugauacug

SEQ ID NO: 487147 - RNA, 19 nt, Artificial Sequence
  Description of Artificial Sequence: Synthetic oligonucleotide
uaaucggagagaacaucaa

SEQ ID NO: 487148 - RNA, 19 nt, Artificial Sequence
  Description of Artificial Sequence: Synthetic oligonucleotide
ccauaaaguaaauggcugc

SEQ ID NO: 487149 - RNA, 19 nt, Artificial Sequence
  Description of Artificial Sequence: Synthetic oligonucleotide
uaaaaugccucugguagua

SEQ ID NO: 487150 - RNA, 19 nt, Artificial Sequence
  Description of Artificial Sequence: Synthetic oligonucleotide
cagucuacuucucuuggug

SEQ ID NO: 487151 - RNA, 19 nt, Artificial Sequence
  Description of Artificial Sequence: Synthetic oligonucleotide
ucuacuucucuuggugaag

SEQ ID NO: 487152 - RNA, 19 nt, Artificial Sequence
  Description of Artificial Sequence: Synthetic oligonucleotide
gcagaggugauuaugagca

SEQ ID NO: 487153 - RNA, 19 nt, Artificial Sequence
  Description of Artificial Sequence: Synthetic oligonucleotide
cugugguguuaaauguucc

SEQ ID NO: 487154 - RNA, 19 nt, Artificial Sequence
  Description of Artificial Sequence: Synthetic oligonucleotide
aaugccgcgagaucuucuu

SEQ ID NO: 487155 - RNA, 19 nt, Artificial Sequence
  Description of Artificial Sequence: Synthetic oligonucleotide
accucuucgacaaagguua

SEQ ID NO: 487156 - RNA, 19 nt, Artificial Sequence
  Description of Artificial Sequence: Synthetic oligonucleotide
uccugucgagcucucgaag

SEQ ID NO: 487157 - RNA, 19 nt, Artificial Sequence
  Description of Artificial Sequence: Synthetic oligonucleotide
ugagccgagcuugaagugc

SEQ ID NO: 487158 - RNA, 19 nt, Artificial Sequence
  Description of Artificial Sequence: Synthetic oligonucleotide
ggauccauuugacugacca

SEQ ID NO: 487159 - RNA, 19 nt, Artificial Sequence
  Description of Artificial Sequence: Synthetic oligonucleotide
ucgugcuccuuuccuuugg

SEQ ID NO: 487160 - RNA, 19 nt, Artificial Sequence
  Description of Artificial Sequence: Synthetic oligonucleotide
aauauccgugccugggcaa

SEQ ID NO: 487161 - RNA, 19 nt, Artificial Sequence
  Description of Artificial Sequence: Synthetic oligonucleotide
cucgugggaauauccgugc

SEQ ID NO: 487162 - RNA, 19 nt, Artificial Sequence
  Description of Artificial Sequence: Synthetic oligonucleotide
guugauacucuuucccaca

SEQ ID NO: 487163 - RNA, 19 nt, Artificial Sequence
  Description of Artificial Sequence: Synthetic oligonucleotide
gauccucgugggaauaucc

SEQ ID NO: 487164 - RNA, 19 nt, Artificial Sequence
  Description of Artificial Sequence: Synthetic oligonucleotide
aguucucguucuuccaaug

SEQ ID NO: 487165 - RNA, 19 nt, Artificial Sequence
  Description of Artificial Sequence: Synthetic oligonucleotide
cacagcaaggcuuagauuu

SEQ ID NO: 487166 - RNA, 19 nt, Artificial Sequence
  Description of Artificial Sequence: Synthetic oligonucleotide
auacacaggaugauggcgu

SEQ ID NO: 487167 - RNA, 19 nt, Artificial Sequence
  Description of Artificial Sequence: Synthetic oligonucleotide
ugucgagcucucgaaggcg

SEQ ID NO: 487168 - RNA, 19 nt, Artificial Sequence
  Description of Artificial Sequence: Synthetic oligonucleotide
agcuuggaucuacuucgac

SEQ ID NO: 487169 - RNA, 19 nt, Artificial Sequence
  Description of Artificial Sequence: Synthetic oligonucleotide
gguaguuauucuuccacuc

SEQ ID NO: 487170 - RNA, 19 nt, Artificial Sequence
  Description of Artificial Sequence: Synthetic oligonucleotide
cauaaaguaaauggcugca

SEQ ID NO: 487171 - RNA, 19 nt, Artificial Sequence
  Description of Artificial Sequence: Synthetic oligonucleotide
ugaugaggaccuucacuga

SEQ ID NO: 487172 - RNA, 19 nt, Artificial Sequence
  Description of Artificial Sequence: Synthetic oligonucleotide
caggugauccuguguauug

SEQ ID NO: 487173 - RNA, 19 nt, Artificial Sequence
  Description of Artificial Sequence: Synthetic oligonucleotide
gugagcugcugccuuaaug

SEQ ID NO: 487174 - RNA, 19 nt, Artificial Sequence
  Description of Artificial Sequence: Synthetic oligonucleotide
uauggaccggucuucuaaa

SEQ ID NO: 487175 - RNA, 19 nt, Artificial Sequence
  Description of Artificial Sequence: Synthetic oligonucleotide
ugucaucgugcuccuuucc

SEQ ID NO: 487176 - RNA, 19 nt, Artificial Sequence
  Description of Artificial Sequence: Synthetic oligonucleotide
agucgccuaacuucagugu

SEQ ID NO: 487177 - RNA, 19 nt, Artificial Sequence
  Description of Artificial Sequence: Synthetic oligonucleotide
uaucugauauggaccgguc

SEQ ID NO: 487178 - RNA, 19 nt, Artificial Sequence
  Description of Artificial Sequence: Synthetic oligonucleotide
guaugcagaggugauuaug

SEQ ID NO: 487179 - RNA, 19 nt, Artificial Sequence
  Description of Artificial Sequence: Synthetic oligonucleotide
aaagaccgaaguucucguu

SEQ ID NO: 487180 - RNA, 19 nt, Artificial Sequence
  Description of Artificial Sequence: Synthetic oligonucleotide
ugccgcgagaucuucuucu

SEQ ID NO: 487181 - RNA, 19 nt, Artificial Sequence
  Description of Artificial Sequence: Synthetic oligonucleotide
ucaaucacaugaguugaua

SEQ ID NO: 487182 - RNA, 19 nt, Artificial Sequence
  Description of Artificial Sequence: Synthetic oligonucleotide
ucguaaucggagagaacau

SEQ ID NO: 487183 - RNA, 19 nt, Artificial Sequence
  Description of Artificial Sequence: Synthetic oligonucleotide
aauaccucuuuaacguuuu

SEQ ID NO: 487184 - RNA, 19 nt, Artificial Sequence
  Description of Artificial Sequence: Synthetic oligonucleotide
aaacucccgagagcuaucu

SEQ ID NO: 487185 - RNA, 19 nt, Artificial Sequence
  Description of Artificial Sequence: Synthetic oligonucleotide
agcuggguguucuucauua

SEQ ID NO: 487186 - RNA, 19 nt, Artificial Sequence
  Description of Artificial Sequence: Synthetic oligonucleotide
uugagccgagcuugaagug

SEQ ID NO: 487187 - RNA, 19 nt, Artificial Sequence
  Description of Artificial Sequence: Synthetic oligonucleotide
cuguguauuguaacuggca

SEQ ID NO: 487188 - RNA, 19 nt, Artificial Sequence
  Description of Artificial Sequence: Synthetic oligonucleotide
ucgguccacuguuuaagcu

SEQ ID NO: 487189 - RNA, 19 nt, Artificial Sequence
  Description of Artificial Sequence: Synthetic oligonucleotide
cuugagccgagcuugaagu

SEQ ID NO: 487190 - RNA, 19 nt, Artificial Sequence
  Description of Artificial Sequence: Synthetic oligonucleotide
cugucgagcucucgaaggc

SEQ ID NO: 487191 - RNA, 19 nt, Artificial Sequence
  Description of Artificial Sequence: Synthetic oligonucleotide
auguuccugaauucauggu

SEQ ID NO: 487192 - RNA, 19 nt, Artificial Sequence
  Description of Artificial Sequence: Synthetic oligonucleotide
ccgagagcuaucuuuaaac

SEQ ID NO: 487193 - RNA, 19 nt, Artificial Sequence
  Description of Artificial Sequence: Synthetic oligonucleotide
ucggacacagcaaggcuua

SEQ ID NO: 487194 - RNA, 19 nt, Artificial Sequence
  Description of Artificial Sequence: Synthetic oligonucleotide
uguauccugcuuggacugg

SEQ ID NO: 487195 - RNA, 19 nt, Artificial Sequence
  Description of Artificial Sequence: Synthetic oligonucleotide
ucacaguauugaucacgcc

SEQ ID NO: 487196 - RNA, 19 nt, Artificial Sequence
  Description of Artificial Sequence: Synthetic oligonucleotide
gagaacgugucaucaucuc

SEQ ID NO: 487197 - RNA, 19 nt, Artificial Sequence
  Description of Artificial Sequence: Synthetic oligonucleotide
agucggacacagcaaggcu

SEQ ID NO: 487198 - RNA, 19 nt, Artificial Sequence
  Description of Artificial Sequence: Synthetic oligonucleotide
accuggcucaggcugauaa

SEQ ID NO: 487199 - RNA, 19 nt, Artificial Sequence
  Description of Artificial Sequence: Synthetic oligonucleotide
acagucuacuucucuuggu

SEQ ID NO: 487200 - RNA, 19 nt, Artificial Sequence
  Description of Artificial Sequence: Synthetic oligonucleotide
cauuugacugaccaagucu

SEQ ID NO: 487201 - RNA, 19 nt, Artificial Sequence
  Description of Artificial Sequence: Synthetic oligonucleotide
aaugacccucaagcuaucu

SEQ ID NO: 487202 - RNA, 19 nt, Artificial Sequence
  Description of Artificial Sequence: Synthetic oligonucleotide
guaaguaauuuaaucuucu

SEQ ID NO: 487203 - RNA, 19 nt, Artificial Sequence
  Description of Artificial Sequence: Synthetic oligonucleotide
agcuaucagccuguuguuc

SEQ ID NO: 487204 - RNA, 19 nt, Artificial Sequence
  Description of Artificial Sequence: Synthetic oligonucleotide
guauucgccaaaacaggac

SEQ ID NO: 487205 - RNA, 19 nt, Artificial Sequence
  Description of Artificial Sequence: Synthetic oligonucleotide
cuuaucugauauggaccgg

SEQ ID NO: 487206 - RNA, 19 nt, Artificial Sequence
  Description of Artificial Sequence: Synthetic oligonucleotide
auggaccggucuucuaaag

SEQ ID NO: 487207 - RNA, 19 nt, Artificial Sequence
  Description of Artificial Sequence: Synthetic oligonucleotide
ugugcugaaugacccucaa

SEQ ID NO: 487208 - RNA, 19 nt, Artificial Sequence
  Description of Artificial Sequence: Synthetic oligonucleotide
aguucgauuucaugucuua

SEQ ID NO: 487209 - RNA, 19 nt, Artificial Sequence
  Description of Artificial Sequence: Synthetic oligonucleotide
ugcuugucgguccacuguu

SEQ ID NO: 487210 - RNA, 19 nt, Artificial Sequence
  Description of Artificial Sequence: Synthetic oligonucleotide
uucugucaugaaacgggaa

SEQ ID NO: 487211 - RNA, 19 nt, Artificial Sequence
  Description of Artificial Sequence: Synthetic oligonucleotide
ucauucggaguucgauuuc

SEQ ID NO: 487212 - RNA, 19 nt, Artificial Sequence
  Description of Artificial Sequence: Synthetic oligonucleotide
ucaugucuuaaugccgcga

SEQ ID NO: 487213 - RNA, 19 nt, Artificial Sequence
  Description of Artificial Sequence: Synthetic oligonucleotide
ggaccggucuucuaaagca

SEQ ID NO: 487214 - RNA, 19 nt, Artificial Sequence
  Description of Artificial Sequence: Synthetic oligonucleotide
accgaaguucucguucuuc

SEQ ID NO: 487215 - RNA, 19 nt, Artificial Sequence
  Description of Artificial Sequence: Synthetic oligonucleotide
gcuuagauuucuuguggug

SEQ ID NO: 487216 - RNA, 19 nt, Artificial Sequence
  Description of Artificial Sequence: Synthetic oligonucleotide
cuucacgggagaacguguc

SEQ ID NO: 487217 - RNA, 19 nt, Artificial Sequence
  Description of Artificial Sequence: Synthetic oligonucleotide
uaaugccgcgagaucuucu

SEQ ID NO: 487218 - RNA, 19 nt, Artificial Sequence
  Description of Artificial Sequence: Synthetic oligonucleotide
aacccguuugccaguaagu

SEQ ID NO: 487219 - RNA, 19 nt, Artificial Sequence
  Description of Artificial Sequence: Synthetic oligonucleotide
ccaguaaguaauuuaaucu

SEQ ID NO: 487220 - RNA, 19 nt, Artificial Sequence
  Description of Artificial Sequence: Synthetic oligonucleotide
ugaccaagucuguaacaau

SEQ ID NO: 487221 - RNA, 19 nt, Artificial Sequence
  Description of Artificial Sequence: Synthetic oligonucleotide
cuuccuaacugugguaauc

SEQ ID NO: 487222 - RNA, 19 nt, Artificial Sequence
  Description of Artificial Sequence: Synthetic oligonucleotide
gauccauuugacugaccaa

SEQ ID NO: 487223 - RNA, 19 nt, Artificial Sequence
  Description of Artificial Sequence: Synthetic oligonucleotide
auauccacugugguguuaa

SEQ ID NO: 487224 - RNA, 19 nt, Artificial Sequence
  Description of Artificial Sequence: Synthetic oligonucleotide
uacuucgacuccucgggau

SEQ ID NO: 487225 - RNA, 19 nt, Artificial Sequence
  Description of Artificial Sequence: Synthetic oligonucleotide
cagcaugcgcuguauucgc

SEQ ID NO: 487226 - RNA, 19 nt, Artificial Sequence
  Description of Artificial Sequence: Synthetic oligonucleotide
cuaacugugguaaucucau

SEQ ID NO: 487227 - RNA, 19 nt, Artificial Sequence
  Description of Artificial Sequence: Synthetic oligonucleotide
cgugucaucaucuccccgg

SEQ ID NO: 487228 - RNA, 19 nt, Artificial Sequence
  Description of Artificial Sequence: Synthetic oligonucleotide
ccugucgagcucucgaagg

SEQ ID NO: 487229 - RNA, 19 nt, Artificial Sequence
  Description of Artificial Sequence: Synthetic oligonucleotide
agcuuucauugggaagagc

SEQ ID NO: 487230 - RNA, 19 nt, Artificial Sequence
  Description of Artificial Sequence: Synthetic oligonucleotide
uucgccaaaacaggaccac

SEQ ID NO: 487231 - RNA, 19 nt, Artificial Sequence
  Description of Artificial Sequence: Synthetic oligonucleotide
caguauugaucacgcccgg

SEQ ID NO: 487232 - RNA, 19 nt, Artificial Sequence
  Description of Artificial Sequence: Synthetic oligonucleotide
cuguaacaauacuucucuc

SEQ ID NO: 487233 - RNA, 19 nt, Artificial Sequence
  Description of Artificial Sequence: Synthetic oligonucleotide
caagucuguaacaauacuu

SEQ ID NO: 487234 - RNA, 19 nt, Artificial Sequence
  Description of Artificial Sequence: Synthetic oligonucleotide
uguaugcagaggugauuau

SEQ ID NO: 487235 - RNA, 19 nt, Artificial Sequence
  Description of Artificial Sequence: Synthetic oligonucleotide
acgugucaucaucuccccg

SEQ ID NO: 487236 - RNA, 19 nt, Artificial Sequence
  Description of Artificial Sequence: Synthetic oligonucleotide
augucuuaaugccgcgaga

SEQ ID NO: 487237 - RNA, 19 nt, Artificial Sequence
  Description of Artificial Sequence: Synthetic oligonucleotide
cuuaauguauuggcaguga

SEQ ID NO: 487238 - RNA, 19 nt, Artificial Sequence
  Description of Artificial Sequence: Synthetic oligonucleotide
gcaaggcuuagauuucuug

SEQ ID NO: 487239 - RNA, 19 nt, Artificial Sequence
  Description of Artificial Sequence: Synthetic oligonucleotide
cugaaugacccucaagcua

SEQ ID NO: 487240 - RNA, 19 nt, Artificial Sequence
  Description of Artificial Sequence: Synthetic oligonucleotide
gagccgagcuugaagugcc

SEQ ID NO: 487241 - RNA, 19 nt, Artificial Sequence
  Description of Artificial Sequence: Synthetic oligonucleotide
uccuaacugugguaaucuc

SEQ ID NO: 487242 - RNA, 19 nt, Artificial Sequence
  Description of Artificial Sequence: Synthetic oligonucleotide
gguucgauucuuccaguac

SEQ ID NO: 487243 - RNA, 19 nt, Artificial Sequence
  Description of Artificial Sequence: Synthetic oligonucleotide
uuaaucaagcuuggaucua

SEQ ID NO: 487244 - RNA, 19 nt, Artificial Sequence
  Description of Artificial Sequence: Synthetic oligonucleotide
aucaagcuuggaucuacuu

SEQ ID NO: 487245 - RNA, 19 nt, Artificial Sequence
  Description of Artificial Sequence: Synthetic oligonucleotide
gauauggucucagggcuaa

SEQ ID NO: 487246 - RNA, 19 nt, Artificial Sequence
  Description of Artificial Sequence: Synthetic oligonucleotide
cucuaacuuucuucagauc

SEQ ID NO: 487247 - RNA, 19 nt, Artificial Sequence
  Description of Artificial Sequence: Synthetic oligonucleotide
accuucacgggagaacgug

SEQ ID NO: 487248 - RNA, 19 nt, Artificial Sequence
  Description of Artificial Sequence: Synthetic oligonucleotide
cuugaugccaaguauccuu

SEQ ID NO: 487249 - RNA, 19 nt, Artificial Sequence
  Description of Artificial Sequence: Synthetic oligonucleotide
ugcgcuguauucgccaaaa

SEQ ID NO: 487250 - RNA, 19 nt, Artificial Sequence
  Description of Artificial Sequence: Synthetic oligonucleotide
agcaugcgcuguauucgcc

SEQ ID NO: 487251 - RNA, 19 nt, Artificial Sequence
  Description of Artificial Sequence: Synthetic oligonucleotide
gcgagaucuucuucuuugg

SEQ ID NO: 487252 - RNA, 19 nt, Artificial Sequence
  Description of Artificial Sequence: Synthetic oligonucleotide
cuucaaugcucucagcgcu

SEQ ID NO: 487253 - RNA, 19 nt, Artificial Sequence
  Description of Artificial Sequence: Synthetic oligonucleotide
uguacgcuuugcugauacu

SEQ ID NO: 487254 - RNA, 19 nt, Artificial Sequence
  Description of Artificial Sequence: Synthetic oligonucleotide
uugucgguccacuguuuaa

SEQ ID NO: 487255 - RNA, 19 nt, Artificial Sequence
  Description of Artificial Sequence: Synthetic oligonucleotide
guuuccuaugauggaugcc

SEQ ID NO: 487256 - RNA, 19 nt, Artificial Sequence
  Description of Artificial Sequence: Synthetic oligonucleotide
gagcuuucauugggaagag

SEQ ID NO: 487257 - RNA, 19 nt, Artificial Sequence
  Description of Artificial Sequence: Synthetic oligonucleotide
ucucaccgucuucagcaaa

SEQ ID NO: 487258 - RNA, 19 nt, Artificial Sequence
  Description of Artificial Sequence: Synthetic oligonucleotide
cuugugccguuugacacuc

SEQ ID NO: 487259 - RNA, 19 nt, Artificial Sequence
  Description of Artificial Sequence: Synthetic oligonucleotide
uuaaugccgcgagaucuuc

SEQ ID NO: 487260 - RNA, 19 nt, Artificial Sequence
  Description of Artificial Sequence: Synthetic oligonucleotide
aucgugcuccuuuccuuug

SEQ ID NO: 487261 - RNA, 19 nt, Artificial Sequence
  Description of Artificial Sequence: Synthetic oligonucleotide
ucgccuaacuucaguguuu

SEQ ID NO: 487262 - RNA, 19 nt, Artificial Sequence
  Description of Artificial Sequence: Synthetic oligonucleotide
augccgcgagaucuucuuc

SEQ ID NO: 487263 - RNA, 19 nt, Artificial Sequence
  Description of Artificial Sequence: Synthetic oligonucleotide
acgggagaacgugucauca

SEQ ID NO: 487264 - RNA, 19 nt, Artificial Sequence
  Description of Artificial Sequence: Synthetic oligonucleotide
ggguucugucaugaaacgg

SEQ ID NO: 487265 - RNA, 19 nt, Artificial Sequence
  Description of Artificial Sequence: Synthetic oligonucleotide
ucgagcucucgaaggcgug

SEQ ID NO: 487266 - RNA, 19 nt, Artificial Sequence
  Description of Artificial Sequence: Synthetic oligonucleotide
cucucgaaccauuuuccaa

SEQ ID NO: 487267 - RNA, 19 nt, Artificial Sequence
  Description of Artificial Sequence: Synthetic oligonucleotide
guugcuuaucugauaugga

SEQ ID NO: 487268 - RNA, 19 nt, Artificial Sequence
  Description of Artificial Sequence: Synthetic oligonucleotide
acgcuuugcugauacugaa

SEQ ID NO: 487269 - RNA, 19 nt, Artificial Sequence
  Description of Artificial Sequence: Synthetic oligonucleotide
ugggccuaucauguuuuca

SEQ ID NO: 487270 - RNA, 19 nt, Artificial Sequence
  Description of Artificial Sequence: Synthetic oligonucleotide
caucguaaucggagagaac

SEQ ID NO: 487271 - RNA, 19 nt, Artificial Sequence
  Description of Artificial Sequence: Synthetic oligonucleotide
acuugaugccaaguauccu

SEQ ID NO: 487272 - RNA, 19 nt, Artificial Sequence
  Description of Artificial Sequence: Synthetic oligonucleotide
acuucgacuccucgggauu

SEQ ID NO: 487273 - RNA, 19 nt, Artificial Sequence
  Description of Artificial Sequence: Synthetic oligonucleotide
ccuaacugugguaaucuca

SEQ ID NO: 487274 - RNA, 19 nt, Artificial Sequence
  Description of Artificial Sequence: Synthetic oligonucleotide
gucuuaaugccgcgagauc

SEQ ID NO: 487275 - RNA, 19 nt, Artificial Sequence
  Description of Artificial Sequence: Synthetic oligonucleotide
ucgccaaaacaggaccaca

SEQ ID NO: 487276 - RNA, 19 nt, Artificial Sequence
  Description of Artificial Sequence: Synthetic oligonucleotide
gggccuaucauguuuucaa

SEQ ID NO: 487277 - RNA, 19 nt, Artificial Sequence
  Description of Artificial Sequence: Synthetic oligonucleotide
acccucaagcuaucuucug

SEQ ID NO: 487278 - RNA, 19 nt, Artificial Sequence
  Description of Artificial Sequence: Synthetic oligonucleotide
uucucaccgucuucagcaa

SEQ ID NO: 487279 - RNA, 19 nt, Artificial Sequence
  Description of Artificial Sequence: Synthetic oligonucleotide
cauacagucuacuucucuu

SEQ ID NO: 487280 - RNA, 19 nt, Artificial Sequence
  Description of Artificial Sequence: Synthetic oligonucleotide
cauucggaguucgauuuca

SEQ ID NO: 487281 - RNA, 19 nt, Artificial Sequence
  Description of Artificial Sequence: Synthetic oligonucleotide
cugucaugaaacgggaaaa

SEQ ID NO: 487282 - RNA, 19 nt, Artificial Sequence
  Description of Artificial Sequence: Synthetic oligonucleotide
cccucaagcuaucuucugc

SEQ ID NO: 487283 - RNA, 19 nt, Artificial Sequence
  Description of Artificial Sequence: Synthetic oligonucleotide
aggugauccuguguauugu

SEQ ID NO: 487284 - RNA, 19 nt, Artificial Sequence
  Description of Artificial Sequence: Synthetic oligonucleotide
caaacucccgagagcuauc

SEQ ID NO: 487285 - RNA, 19 nt, Artificial Sequence
  Description of Artificial Sequence: Synthetic oligonucleotide
ccuuaauguauuggcagug

SEQ ID NO: 487286 - RNA, 19 nt, Artificial Sequence
  Description of Artificial Sequence: Synthetic oligonucleotide
ugguuucauugugaacacu

SEQ ID NO: 487287 - RNA, 19 nt, Artificial Sequence
  Description of Artificial Sequence: Synthetic oligonucleotide
gugauuuagagcugucuuu

SEQ ID NO: 487288 - RNA, 19 nt, Artificial Sequence
  Description of Artificial Sequence: Synthetic oligonucleotide
ccucgugggaauauccgug

SEQ ID NO: 487289 - RNA, 19 nt, Artificial Sequence
  Description of Artificial Sequence: Synthetic oligonucleotide
aggcguggguaguuauucu

SEQ ID NO: 487290 - RNA, 19 nt, Artificial Sequence
  Description of Artificial Sequence: Synthetic oligonucleotide
uucgacuccucgggauucc

SEQ ID NO: 487291 - RNA, 19 nt, Artificial Sequence
  Description of Artificial Sequence: Synthetic oligonucleotide
caguguuuuggagugaccu

SEQ ID NO: 487292 - RNA, 19 nt, Artificial Sequence
  Description of Artificial Sequence: Synthetic oligonucleotide
cauuccugucgagcucucg

SEQ ID NO: 487293 - RNA, 19 nt, Artificial Sequence
  Description of Artificial Sequence: Synthetic oligonucleotide
cuggugugccuuuagcaua

SEQ ID NO: 487294 - RNA, 19 nt, Artificial Sequence
  Description of Artificial Sequence: Synthetic oligonucleotide
gcuuggaucuacuucgacu

SEQ ID NO: 487295 - RNA, 19 nt, Artificial Sequence
  Description of Artificial Sequence: Synthetic oligonucleotide
ggugauuaugagcaggauu

SEQ ID NO: 487296 - RNA, 19 nt, Artificial Sequence
  Description of Artificial Sequence: Synthetic oligonucleotide
aacuggcaucguaaucgga

SEQ ID NO: 487297 - RNA, 19 nt, Artificial Sequence
  Description of Artificial Sequence: Synthetic oligonucleotide
cuucgacuccucgggauuc

SEQ ID NO: 487298 - RNA, 19 nt, Artificial Sequence
  Description of Artificial Sequence: Synthetic oligonucleotide
aacugacucucgaaccauu

SEQ ID NO: 487299 - RNA, 19 nt, Artificial Sequence
  Description of Artificial Sequence: Synthetic oligonucleotide
agccaugccugaugucaca

SEQ ID NO: 487300 - RNA, 19 nt, Artificial Sequence
  Description of Artificial Sequence: Synthetic oligonucleotide
agauaagcuggguguucuu

SEQ ID NO: 487301 - RNA, 19 nt, Artificial Sequence
  Description of Artificial Sequence: Synthetic oligonucleotide
cgcgagaucuucuucuuug

SEQ ID NO: 487302 - RNA, 19 nt, Artificial Sequence
  Description of Artificial Sequence: Synthetic oligonucleotide
agggccuuugacauuuaaa

SEQ ID NO: 487303 - RNA, 19 nt, Artificial Sequence
  Description of Artificial Sequence: Synthetic oligonucleotide
ccucaagcuaucuucugca

SEQ ID NO: 487304 - RNA, 19 nt, Artificial Sequence
  Description of Artificial Sequence: Synthetic oligonucleotide
aacucccgagagcuaucuu

SEQ ID NO: 487305 - RNA, 19 nt, Artificial Sequence
  Description of Artificial Sequence: Synthetic oligonucleotide
cucaagcuaucuucugcaa

SEQ ID NO: 487306 - RNA, 19 nt, Artificial Sequence
  Description of Artificial Sequence: Synthetic oligonucleotide
ccauuugacugaccaaguc

SEQ ID NO: 487307 - RNA, 19 nt, Artificial Sequence
  Description of Artificial Sequence: Synthetic oligonucleotide
gccaaguauccuuaaucaa

SEQ ID NO: 487308 - RNA, 19 nt, Artificial Sequence
  Description of Artificial Sequence: Synthetic oligonucleotide
gccagcugaacccguuugc

SEQ ID NO: 487309 - RNA, 19 nt, Artificial Sequence
  Description of Artificial Sequence: Synthetic oligonucleotide
cuugucgguccacuguuua

SEQ ID NO: 487310 - RNA, 19 nt, Artificial Sequence
  Description of Artificial Sequence: Synthetic oligonucleotide
ucauuccugucgagcucuc

SEQ ID NO: 487311 - RNA, 19 nt, Artificial Sequence
  Description of Artificial Sequence: Synthetic oligonucleotide
auauccgugccugggcaau

SEQ ID NO: 487312 - RNA, 19 nt, Artificial Sequence
  Description of Artificial Sequence: Synthetic oligonucleotide
ugaacccguuugccaguaa

SEQ ID NO: 487313 - RNA, 19 nt, Artificial Sequence
  Description of Artificial Sequence: Synthetic oligonucleotide
acugacucucgaaccauuu

SEQ ID NO: 487314 - RNA, 19 nt, Artificial Sequence
  Description of Artificial Sequence: Synthetic oligonucleotide
gagagaacaucaagaacuu

SEQ ID NO: 487315 - RNA, 19 nt, Artificial Sequence
  Description of Artificial Sequence: Synthetic oligonucleotide
guccacgagcaccauccuc

SEQ ID NO: 487316 - RNA, 19 nt, Artificial Sequence
  Description of Artificial Sequence: Synthetic oligonucleotide
gcaucguaaucggagagaa

SEQ ID NO: 487317 - RNA, 19 nt, Artificial Sequence
  Description of Artificial Sequence: Synthetic oligonucleotide
cuaugauggaugccuuugu

SEQ ID NO: 487318 - RNA, 19 nt, Artificial Sequence
  Description of Artificial Sequence: Synthetic oligonucleotide
gccuaucauguuuucaaua

SEQ ID NO: 487319 - RNA, 19 nt, Artificial Sequence
  Description of Artificial Sequence: Synthetic oligonucleotide
caucccacuguugcuuauc

SEQ ID NO: 487320 - RNA, 19 nt, Artificial Sequence
  Description of Artificial Sequence: Synthetic oligonucleotide
cugugguaaucucaucacu

SEQ ID NO: 487321 - RNA, 19 nt, Artificial Sequence
  Description of Artificial Sequence: Synthetic oligonucleotide
ggaguucgauuucaugucu

SEQ ID NO: 487322 - RNA, 19 nt, Artificial Sequence
  Description of Artificial Sequence: Synthetic oligonucleotide
gcagucggacacagcaagg

SEQ ID NO: 487323 - RNA, 19 nt, Artificial Sequence
  Description of Artificial Sequence: Synthetic oligonucleotide
ggucuacuuuggucaaaac

SEQ ID NO: 487324 - RNA, 19 nt, Artificial Sequence
  Description of Artificial Sequence: Synthetic oligonucleotide
cuaauaccucuuuaacguu

SEQ ID NO: 487325 - RNA, 19 nt, Artificial Sequence
  Description of Artificial Sequence: Synthetic oligonucleotide
caugcgcuguauucgccaa

SEQ ID NO: 487326 - RNA, 19 nt, Artificial Sequence
  Description of Artificial Sequence: Synthetic oligonucleotide
ucgaaggcguggguaguua

SEQ ID NO: 487327 - RNA, 19 nt, Artificial Sequence
  Description of Artificial Sequence: Synthetic oligonucleotide
cgagagcuaucuuuaaaca

SEQ ID NO: 487328 - RNA, 19 nt, Artificial Sequence
  Description of Artificial Sequence: Synthetic oligonucleotide
gacccucaagcuaucuucu

SEQ ID NO: 487329 - RNA, 19 nt, Artificial Sequence
  Description of Artificial Sequence: Synthetic oligonucleotide
cggaguucgauuucauguc

SEQ ID NO: 487330 - RNA, 19 nt, Artificial Sequence
  Description of Artificial Sequence: Synthetic oligonucleotide
gucgccuaacuucaguguu

SEQ ID NO: 487331 - RNA, 19 nt, Artificial Sequence
  Description of Artificial Sequence: Synthetic oligonucleotide
caagcaaccucuacugcuu

SEQ ID NO: 487332 - RNA, 19 nt, Artificial Sequence
  Description of Artificial Sequence: Synthetic oligonucleotide
gaaugacccucaagcuauc

SEQ ID NO: 487333 - RNA, 19 nt, Artificial Sequence
  Description of Artificial Sequence: Synthetic oligonucleotide
ucgacuccucgggauucca

SEQ ID NO: 487334 - RNA, 19 nt, Artificial Sequence
  Description of Artificial Sequence: Synthetic oligonucleotide
aggugauuaugagcaggau

SEQ ID NO: 487335 - RNA, 19 nt, Artificial Sequence
  Description of Artificial Sequence: Synthetic oligonucleotide
cuggcucaggcugauaacu

SEQ ID NO: 487336 - RNA, 19 nt, Artificial Sequence
  Description of Artificial Sequence: Synthetic oligonucleotide
agauauggucucagggcua

SEQ ID NO: 487337 - RNA, 19 nt, Artificial Sequence
  Description of Artificial Sequence: Synthetic oligonucleotide
uccccggauccucguggga

SEQ ID NO: 487338 - RNA, 19 nt, Artificial Sequence
  Description of Artificial Sequence: Synthetic oligonucleotide
cuucgacaaagguuacagu

SEQ ID NO: 487339 - RNA, 19 nt, Artificial Sequence
  Description of Artificial Sequence: Synthetic oligonucleotide
cccaagcaaccucuacugc

SEQ ID NO: 487340 - RNA, 19 nt, Artificial Sequence
  Description of Artificial Sequence: Synthetic oligonucleotide
cucuucgacaaagguuaca

SEQ ID NO: 487341 - RNA, 19 nt, Artificial Sequence
  Description of Artificial Sequence: Synthetic oligonucleotide
cuagucgccuaacuucagu

SEQ ID NO: 487342 - RNA, 19 nt, Artificial Sequence
  Description of Artificial Sequence: Synthetic oligonucleotide
cuuaaugccgcgagaucuu

SEQ ID NO: 487343 - RNA, 19 nt, Artificial Sequence
  Description of Artificial Sequence: Synthetic oligonucleotide
augccugaugucacaguau

SEQ ID NO: 487344 - RNA, 19 nt, Artificial Sequence
  Description of Artificial Sequence: Synthetic oligonucleotide
augcgcuguauucgccaaa

SEQ ID NO: 487345 - RNA, 19 nt, Artificial Sequence
  Description of Artificial Sequence: Synthetic oligonucleotide
ggcaucguaaucggagaga

SEQ ID NO: 487346 - RNA, 19 nt, Artificial Sequence
  Description of Artificial Sequence: Synthetic oligonucleotide
ggaccacaucauugcauuc

SEQ ID NO: 487347 - RNA, 19 nt, Artificial Sequence
  Description of Artificial Sequence: Synthetic oligonucleotide
agucugggccuaucauguu

SEQ ID NO: 487348 - RNA, 19 nt, Artificial Sequence
  Description of Artificial Sequence: Synthetic oligonucleotide
ccaagcaaccucuacugcu

SEQ ID NO: 487349 - RNA, 19 nt, Artificial Sequence
  Description of Artificial Sequence: Synthetic oligonucleotide
caacccguggcaggugauc

SEQ ID NO: 487350 - RNA, 19 nt, Artificial Sequence
  Description of Artificial Sequence: Synthetic oligonucleotide
cagugauuuagagcugucu

SEQ ID NO: 487351 - RNA, 19 nt, Artificial Sequence
  Description of Artificial Sequence: Synthetic oligonucleotide
cacaugaguugauacucuu

SEQ ID NO: 487352 - RNA, 19 nt, Artificial Sequence
  Description of Artificial Sequence: Synthetic oligonucleotide
uugugccguuugacacucu

SEQ ID NO: 487353 - RNA, 19 nt, Artificial Sequence
  Description of Artificial Sequence: Synthetic oligonucleotide
ccguuugccaguaaguaau

SEQ ID NO: 487354 - RNA, 19 nt, Artificial Sequence
  Description of Artificial Sequence: Synthetic oligonucleotide
caguauccuugagccgagc

SEQ ID NO: 487355 - RNA, 19 nt, Artificial Sequence
  Description of Artificial Sequence: Synthetic oligonucleotide
ucauuccacuugugccguu

SEQ ID NO: 487356 - RNA, 19 nt, Artificial Sequence
  Description of Artificial Sequence: Synthetic oligonucleotide
cguaaucggagagaacauc

SEQ ID NO: 487357 - RNA, 19 nt, Artificial Sequence
  Description of Artificial Sequence: Synthetic oligonucleotide
gucauuccacuugugccgu

SEQ ID NO: 487358 - RNA, 19 nt, Artificial Sequence
  Description of Artificial Sequence: Synthetic oligonucleotide
gucggacacagcaaggcuu

SEQ ID NO: 487359 - RNA, 19 nt, Artificial Sequence
  Description of Artificial Sequence: Synthetic oligonucleotide
aucacgcccggcaggucca

SEQ ID NO: 487360 - RNA, 19 nt, Artificial Sequence
  Description of Artificial Sequence: Synthetic oligonucleotide
gaguucgauuucaugucuu

SEQ ID NO: 487361 - RNA, 19 nt, Artificial Sequence
  Description of Artificial Sequence: Synthetic oligonucleotide
ggguucgauucuuccagua

SEQ ID NO: 487362 - RNA, 19 nt, Artificial Sequence
  Description of Artificial Sequence: Synthetic oligonucleotide
cugcuugucgguccacugu

SEQ ID NO: 487363 - RNA, 19 nt, Artificial Sequence
  Description of Artificial Sequence: Synthetic oligonucleotide
gucgagcucucgaaggcgu

SEQ ID NO: 487364 - RNA, 19 nt, Artificial Sequence
  Description of Artificial Sequence: Synthetic oligonucleotide
cccguuugccaguaaguaa

SEQ ID NO: 487365 - RNA, 19 nt, Artificial Sequence
  Description of Artificial Sequence: Synthetic oligonucleotide
ggauccucgugggaauauc

SEQ ID NO: 487366 - RNA, 19 nt, Artificial Sequence
  Description of Artificial Sequence: Synthetic oligonucleotide
gaccggucuucuaaagcau

SEQ ID NO: 487367 - RNA, 19 nt, Artificial Sequence
  Description of Artificial Sequence: Synthetic oligonucleotide
ccucuucgacaaagguuac

SEQ ID NO: 487368 - RNA, 19 nt, Artificial Sequence
  Description of Artificial Sequence: Synthetic oligonucleotide
cagggccuuugacauuuaa

SEQ ID NO: 487369 - RNA, 19 nt, Artificial Sequence
  Description of Artificial Sequence: Synthetic oligonucleotide
cuguuguauccugcuugga

SEQ ID NO: 487370 - RNA, 19 nt, Artificial Sequence
  Description of Artificial Sequence: Synthetic oligonucleotide
cagagccaucuugaauaca

SEQ ID NO: 487371 - RNA, 19 nt, Artificial Sequence
  Description of Artificial Sequence: Synthetic oligonucleotide
gaaggcguggguaguuauu

SEQ ID NO: 487372 - RNA, 19 nt, Artificial Sequence
  Description of Artificial Sequence: Synthetic oligonucleotide
ccaagucuguaacaauacu

SEQ ID NO: 487373 - RNA, 19 nt, Artificial Sequence
  Description of Artificial Sequence: Synthetic oligonucleotide
gggcuaacaguacaaccuu

SEQ ID NO: 487374 - RNA, 19 nt, Artificial Sequence
  Description of Artificial Sequence: Synthetic oligonucleotide
cugacucucgaaccauuuu

SEQ ID NO: 487375 - RNA, 19 nt, Artificial Sequence
  Description of Artificial Sequence: Synthetic oligonucleotide
gcguuaggauucugcaugu

SEQ ID NO: 487376 - RNA, 19 nt, Artificial Sequence
  Description of Artificial Sequence: Synthetic oligonucleotide
ggccuaucauguuuucaau

SEQ ID NO: 487377 - RNA, 19 nt, Artificial Sequence
  Description of Artificial Sequence: Synthetic oligonucleotide
gcauguacgcuuugcugau

SEQ ID NO: 487378 - RNA, 19 nt, Artificial Sequence
  Description of Artificial Sequence: Synthetic oligonucleotide
cgccuaacuucaguguuug

SEQ ID NO: 487379 - RNA, 19 nt, Artificial Sequence
  Description of Artificial Sequence: Synthetic oligonucleotide
gcgcuguauucgccaaaac

SEQ ID NO: 487380 - RNA, 19 nt, Artificial Sequence
  Description of Artificial Sequence: Synthetic oligonucleotide
ggcguggguaguuauucuu

SEQ ID NO: 487381 - RNA, 19 nt, Artificial Sequence
  Description of Artificial Sequence: Synthetic oligonucleotide
cccgagagcuaucuuuaaa

SEQ ID NO: 487382 - RNA, 19 nt, Artificial Sequence
  Description of Artificial Sequence: Synthetic oligonucleotide
cugaacccguuugccagua

SEQ ID NO: 487383 - RNA, 19 nt, Artificial Sequence
  Description of Artificial Sequence: Synthetic oligonucleotide
gcaaccucuacugcuuuau

SEQ ID NO: 487384 - RNA, 19 nt, Artificial Sequence
  Description of Artificial Sequence: Synthetic oligonucleotide
cccguggcaggugauccug

SEQ ID NO: 487385 - RNA, 19 nt, Artificial Sequence
  Description of Artificial Sequence: Synthetic oligonucleotide
gaccgaaguucucguucuu

SEQ ID NO: 487386 - RNA, 19 nt, Artificial Sequence
  Description of Artificial Sequence: Synthetic oligonucleotide
gugaccuggugugccuuua

SEQ ID NO: 487387 - RNA, 19 nt, Artificial Sequence
  Description of Artificial Sequence: Synthetic oligonucleotide
cauguacgcuuugcugaua

SEQ ID NO: 487388 - RNA, 19 nt, Artificial Sequence
  Description of Artificial Sequence: Synthetic oligonucleotide
caccuucacgggagaacgu

SEQ ID NO: 487389 - RNA, 19 nt, Artificial Sequence
  Description of Artificial Sequence: Synthetic oligonucleotide
ccucauucggaguucgauu

SEQ ID NO: 487390 - RNA, 19 nt, Artificial Sequence
  Description of Artificial Sequence: Synthetic oligonucleotide
gccgagcuugaagugccuc

SEQ ID NO: 487391 - RNA, 19 nt, Artificial Sequence
  Description of Artificial Sequence: Synthetic oligonucleotide
ccuucacgggagaacgugu

SEQ ID NO: 487392 - RNA, 19 nt, Artificial Sequence
  Description of Artificial Sequence: Synthetic oligonucleotide
cauuccacuugugccguuu

SEQ ID NO: 487393 - RNA, 19 nt, Artificial Sequence
  Description of Artificial Sequence: Synthetic oligonucleotide
cguguugcuuugaagcuau

SEQ ID NO: 487394 - RNA, 19 nt, Artificial Sequence
  Description of Artificial Sequence: Synthetic oligonucleotide
caaccucuacugcuuuauu

SEQ ID NO: 487395 - RNA, 19 nt, Artificial Sequence
  Description of Artificial Sequence: Synthetic oligonucleotide
caucuccccggauccucgu

SEQ ID NO: 487396 - RNA, 19 nt, Artificial Sequence
  Description of Artificial Sequence: Synthetic oligonucleotide
gguccacgagcaccauccu

SEQ ID NO: 487397 - RNA, 19 nt, Artificial Sequence
  Description of Artificial Sequence: Synthetic oligonucleotide
ccccggauccucgugggaa

SEQ ID NO: 487398 - RNA, 19 nt, Artificial Sequence
  Description of Artificial Sequence: Synthetic oligonucleotide
cgaaggcguggguaguuau

SEQ ID NO: 487399 - RNA, 19 nt, Artificial Sequence
  Description of Artificial Sequence: Synthetic oligonucleotide
cccggauccucgugggaau

SEQ ID NO: 487400 - RNA, 19 nt, Artificial Sequence
  Description of Artificial Sequence: Synthetic oligonucleotide
gcuugucgguccacuguuu

SEQ ID NO: 487401 - RNA, 19 nt, Artificial Sequence
  Description of Artificial Sequence: Synthetic oligonucleotide
cguuaggauucugcaugua

SEQ ID NO: 487402 - RNA, 19 nt, Artificial Sequence
  Description of Artificial Sequence: Synthetic oligonucleotide
cgggagaacgugucaucau

SEQ ID NO: 487403 - RNA, 19 nt, Artificial Sequence
  Description of Artificial Sequence: Synthetic oligonucleotide
ccaguacaaccaccucuuu

SEQ ID NO: 487404 - RNA, 19 nt, Artificial Sequence
  Description of Artificial Sequence: Synthetic oligonucleotide
ccggauccucgugggaaua

SEQ ID NO: 487405 - RNA, 19 nt, Artificial Sequence
  Description of Artificial Sequence: Synthetic oligonucleotide
cggauccucgugggaauau

SEQ ID NO: 487406 - RNA, 19 nt, Artificial Sequence
  Description of Artificial Sequence: Synthetic oligonucleotide
ugugauaagaccaagaauc

SEQ ID NO: 487407 - RNA, 19 nt, Artificial Sequence
  Description of Artificial Sequence: Synthetic oligonucleotide
aauugugugaucauucacc

SEQ ID NO: 487408 - RNA, 19 nt, Artificial Sequence
  Description of Artificial Sequence: Synthetic oligonucleotide
uuaacuggcaaacugaagu

SEQ ID NO: 487409 - RNA, 19 nt, Artificial Sequence
  Description of Artificial Sequence: Synthetic oligonucleotide
uguacacucaaacagguca

SEQ ID NO: 487410 - RNA, 19 nt, Artificial Sequence
  Description of Artificial Sequence: Synthetic oligonucleotide
uuuaauagcucuauuucca

SEQ ID NO: 487411 - RNA, 19 nt, Artificial Sequence
  Description of Artificial Sequence: Synthetic oligonucleotide
agcaaaacuacuuuacuag

SEQ ID NO: 487412 - RNA, 19 nt, Artificial Sequence
  Description of Artificial Sequence: Synthetic oligonucleotide
aauaguuguagcaagaaau

SEQ ID NO: 487413 - RNA, 19 nt, Artificial Sequence
  Description of Artificial Sequence: Synthetic oligonucleotide
aaaggauaaagcccuccac

SEQ ID NO: 487414 - RNA, 19 nt, Artificial Sequence
  Description of Artificial Sequence: Synthetic oligonucleotide
auauauuuugcaugagaac

SEQ ID NO: 487415 - RNA, 19 nt, Artificial Sequence
  Description of Artificial Sequence: Synthetic oligonucleotide
aaacuacuuuacuagcagg

SEQ ID NO: 487416 - RNA, 19 nt, Artificial Sequence
  Description of Artificial Sequence: Synthetic oligonucleotide
uacauacaguaucuaaugg

SEQ ID NO: 487417 - RNA, 19 nt, Artificial Sequence
  Description of Artificial Sequence: Synthetic oligonucleotide
aauauauuuugcaugagaa

SEQ ID NO: 487418 - RNA, 19 nt, Artificial Sequence
  Description of Artificial Sequence: Synthetic oligonucleotide
ucuaguuuaauccuccgaa

SEQ ID NO: 487419 - RNA, 19 nt, Artificial Sequence
  Description of Artificial Sequence: Synthetic oligonucleotide
guagccggcaccuugaccg

SEQ ID NO: 487420 - RNA, 19 nt, Artificial Sequence
  Description of Artificial Sequence: Synthetic oligonucleotide
uaguuuaauccuccgaaag

SEQ ID NO: 487421 - RNA, 19 nt, Artificial Sequence
  Description of Artificial Sequence: Synthetic oligonucleotide
uuaauccuccgaaagaacu

SEQ ID NO: 487422 - RNA, 19 nt, Artificial Sequence
  Description of Artificial Sequence: Synthetic oligonucleotide
ucuauuugcauuacauaca

SEQ ID NO: 487423 - RNA, 19 nt, Artificial Sequence
  Description of Artificial Sequence: Synthetic oligonucleotide
cuuaaguccucuuuuggcc

SEQ ID NO: 487424 - RNA, 19 nt, Artificial Sequence
  Description of Artificial Sequence: Synthetic oligonucleotide
uccuaaaagccucacuucc

SEQ ID NO: 487425 - RNA, 19 nt, Artificial Sequence
  Description of Artificial Sequence: Synthetic oligonucleotide
acaacgccgacuccgaagc

SEQ ID NO: 487426 - RNA, 19 nt, Artificial Sequence
  Description of Artificial Sequence: Synthetic oligonucleotide
ucuguaauacuuuccauaa

SEQ ID NO: 487427 - RNA, 19 nt, Artificial Sequence
  Description of Artificial Sequence: Synthetic oligonucleotide
uuucgggauguuuugacag

SEQ ID NO: 487428 - RNA, 19 nt, Artificial Sequence
  Description of Artificial Sequence: Synthetic oligonucleotide
aaaaggauaaagcccucca

SEQ ID NO: 487429 - RNA, 19 nt, Artificial Sequence
  Description of Artificial Sequence: Synthetic oligonucleotide
ucuuaaguccucuuuuggc

SEQ ID NO: 487430 - RNA, 19 nt, Artificial Sequence
  Description of Artificial Sequence: Synthetic oligonucleotide
cuaucucgcacaaaggcgc

SEQ ID NO: 487431 - RNA, 19 nt, Artificial Sequence
  Description of Artificial Sequence: Synthetic oligonucleotide
uguaguuaaccuuucccca

SEQ ID NO: 487432 - RNA, 19 nt, Artificial Sequence
  Description of Artificial Sequence: Synthetic oligonucleotide
aguuguagcaagaaaugac

SEQ ID NO: 487433 - RNA, 19 nt, Artificial Sequence
  Description of Artificial Sequence: Synthetic oligonucleotide
uuuacuagcaggagacuac

SEQ ID NO: 487434 - RNA, 19 nt, Artificial Sequence
  Description of Artificial Sequence: Synthetic oligonucleotide
ucuaauggccccaucacuc

SEQ ID NO: 487435 - RNA, 19 nt, Artificial Sequence
  Description of Artificial Sequence: Synthetic oligonucleotide
ucggccaugauauuucuug

SEQ ID NO: 487436 - RNA, 19 nt, Artificial Sequence
  Description of Artificial Sequence: Synthetic oligonucleotide
uccuccgaaagaacuaagg

SEQ ID NO: 487437 - RNA, 19 nt, Artificial Sequence
  Description of Artificial Sequence: Synthetic oligonucleotide
ucuggcucggccaugauau

SEQ ID NO: 487438 - RNA, 19 nt, Artificial Sequence
  Description of Artificial Sequence: Synthetic oligonucleotide
aguaacacccucuaguuua

SEQ ID NO: 487439 - RNA, 19 nt, Artificial Sequence
  Description of Artificial Sequence: Synthetic oligonucleotide
uuaaguccucuuuuggccc

SEQ ID NO: 487440 - RNA, 19 nt, Artificial Sequence
  Description of Artificial Sequence: Synthetic oligonucleotide
ucaagauucucagaguaga

SEQ ID NO: 487441 - RNA, 19 nt, Artificial Sequence
  Description of Artificial Sequence: Synthetic oligonucleotide
auuaaggcucccuuuauau

SEQ ID NO: 487442 - RNA, 19 nt, Artificial Sequence
  Description of Artificial Sequence: Synthetic oligonucleotide
aguagucaccauucuaauc

SEQ ID NO: 487443 - RNA, 19 nt, Artificial Sequence
  Description of Artificial Sequence: Synthetic oligonucleotide
aguuuaauccuccgaaaga

SEQ ID NO: 487444 - RNA, 19 nt, Artificial Sequence
  Description of Artificial Sequence: Synthetic oligonucleotide
uuggacuauacaguguuag

SEQ ID NO: 487445 - RNA, 19 nt, Artificial Sequence
  Description of Artificial Sequence: Synthetic oligonucleotide
ucuaugagacacagaagcu

SEQ ID NO: 487446 - RNA, 19 nt, Artificial Sequence
  Description of Artificial Sequence: Synthetic oligonucleotide
caggcuaucucgcacaaag

SEQ ID NO: 487447 - RNA, 19 nt, Artificial Sequence
  Description of Artificial Sequence: Synthetic oligonucleotide
caaucaguaugcauuggag

SEQ ID NO: 487448 - RNA, 19 nt, Artificial Sequence
  Description of Artificial Sequence: Synthetic oligonucleotide
agaacaaucaguaugcauu

SEQ ID NO: 487449 - RNA, 19 nt, Artificial Sequence
  Description of Artificial Sequence: Synthetic oligonucleotide
cucucuaugagacacagaa

SEQ ID NO: 487450 - RNA, 19 nt, Artificial Sequence
  Description of Artificial Sequence: Synthetic oligonucleotide
uuuacuucguaaucacacu

SEQ ID NO: 487451 - RNA, 19 nt, Artificial Sequence
  Description of Artificial Sequence: Synthetic oligonucleotide
uacuucguaaucacacuug

SEQ ID NO: 487452 - RNA, 19 nt, Artificial Sequence
  Description of Artificial Sequence: Synthetic oligonucleotide
guagucaccauucuaaucu

SEQ ID NO: 487453 - RNA, 19 nt, Artificial Sequence
  Description of Artificial Sequence: Synthetic oligonucleotide
uggacuauacaguguuagg

SEQ ID NO: 487454 - RNA, 19 nt, Artificial Sequence
  Description of Artificial Sequence: Synthetic oligonucleotide
uuuaauccuccgaaagaac

SEQ ID NO: 487455 - RNA, 19 nt, Artificial Sequence
  Description of Artificial Sequence: Synthetic oligonucleotide
cuagugugcuaaucaaggg

SEQ ID NO: 487456 - RNA, 19 nt, Artificial Sequence
  Description of Artificial Sequence: Synthetic oligonucleotide
cauaaggagcucucugugg

SEQ ID NO: 487457 - RNA, 19 nt, Artificial Sequence
  Description of Artificial Sequence: Synthetic oligonucleotide
aguacuacauccagcauug

SEQ ID NO: 487458 - RNA, 19 nt, Artificial Sequence
  Description of Artificial Sequence: Synthetic oligonucleotide
ucuauuuccaggucggauu

SEQ ID NO: 487459 - RNA, 19 nt, Artificial Sequence
  Description of Artificial Sequence: Synthetic oligonucleotide
gguugauuagcuucugggg

SEQ ID NO: 487460 - RNA, 19 nt, Artificial Sequence
  Description of Artificial Sequence: Synthetic oligonucleotide
uagauugccuuucaccuuc

SEQ ID NO: 487461 - RNA, 19 nt, Artificial Sequence
  Description of Artificial Sequence: Synthetic oligonucleotide
uguagaaauuacuggcuaa

SEQ ID NO: 487462 - RNA, 19 nt, Artificial Sequence
  Description of Artificial Sequence: Synthetic oligonucleotide
gagagggcgguuccgacgg

SEQ ID NO: 487463 - RNA, 19 nt, Artificial Sequence
  Description of Artificial Sequence: Synthetic oligonucleotide
uaaucaacucucacguuuc

SEQ ID NO: 487464 - RNA, 19 nt, Artificial Sequence
  Description of Artificial Sequence: Synthetic oligonucleotide
aagcuagugucuagugugc

SEQ ID NO: 487465 - RNA, 19 nt, Artificial Sequence
  Description of Artificial Sequence: Synthetic oligonucleotide
guaucuaauggccccauca

SEQ ID NO: 487466 - RNA, 19 nt, Artificial Sequence
  Description of Artificial Sequence: Synthetic oligonucleotide
uuacuucguaaucacacuu

SEQ ID NO: 487467 - RNA, 19 nt, Artificial Sequence
  Description of Artificial Sequence: Synthetic oligonucleotide
agcaagaaaugacaaacua

SEQ ID NO: 487468 - RNA, 19 nt, Artificial Sequence
  Description of Artificial Sequence: Synthetic oligonucleotide
cuucacaaauuccggggcg

SEQ ID NO: 487469 - RNA, 19 nt, Artificial Sequence
  Description of Artificial Sequence: Synthetic oligonucleotide
aguguuaggagcaaagaaa

SEQ ID NO: 487470 - RNA, 19 nt, Artificial Sequence
  Description of Artificial Sequence: Synthetic oligonucleotide
aagaacuaaggaauuacuu

SEQ ID NO: 487471 - RNA, 19 nt, Artificial Sequence
  Description of Artificial Sequence: Synthetic oligonucleotide
aacaagucugcaguguaga

SEQ ID NO: 487472 - RNA, 19 nt, Artificial Sequence
  Description of Artificial Sequence: Synthetic oligonucleotide
auagcgcuaaccaccaagg

SEQ ID NO: 487473 - RNA, 19 nt, Artificial Sequence
  Description of Artificial Sequence: Synthetic oligonucleotide
uuggcccgaccccauagcg

SEQ ID NO: 487474 - RNA, 19 nt, Artificial Sequence
  Description of Artificial Sequence: Synthetic oligonucleotide
uacaacgccgacuccgaag

SEQ ID NO: 487475 - RNA, 19 nt, Artificial Sequence
  Description of Artificial Sequence: Synthetic oligonucleotide
cuauacaguguuaggagca

SEQ ID NO: 487476 - RNA, 19 nt, Artificial Sequence
  Description of Artificial Sequence: Synthetic oligonucleotide
uaucucgcacaaaggcgcg

SEQ ID NO: 487477 - RNA, 19 nt, Artificial Sequence
  Description of Artificial Sequence: Synthetic oligonucleotide
uguagcagugaauuaucau

SEQ ID NO: 487478 - RNA, 19 nt, Artificial Sequence
  Description of Artificial Sequence: Synthetic oligonucleotide
ucgggauguuuugacaggg

SEQ ID NO: 487479 - RNA, 19 nt, Artificial Sequence
  Description of Artificial Sequence: Synthetic oligonucleotide
aggaauaucacaggucuga

SEQ ID NO: 487480 - RNA, 19 nt, Artificial Sequence
  Description of Artificial Sequence: Synthetic oligonucleotide
aucaaggguuccaaaguac

SEQ ID NO: 487481 - RNA, 19 nt, Artificial Sequence
  Description of Artificial Sequence: Synthetic oligonucleotide
aaauccauuaaggcucccu

SEQ ID NO: 487482 - RNA, 19 nt, Artificial Sequence
  Description of Artificial Sequence: Synthetic oligonucleotide
cuagcaggagacuacaaaa

SEQ ID NO: 487483 - RNA, 19 nt, Artificial Sequence
  Description of Artificial Sequence: Synthetic oligonucleotide
aagcccuccacuaaagccu

SEQ ID NO: 487484 - RNA, 19 nt, Artificial Sequence
  Description of Artificial Sequence: Synthetic oligonucleotide
ccaccaaggaauaucacag

SEQ ID NO: 487485 - RNA, 19 nt, Artificial Sequence
  Description of Artificial Sequence: Synthetic oligonucleotide
cuaaccaccaaggaauauc

SEQ ID NO: 487486 - RNA, 19 nt, Artificial Sequence
  Description of Artificial Sequence: Synthetic oligonucleotide
gaccaagaauccauuuccg

SEQ ID NO: 487487 - RNA, 19 nt, Artificial Sequence
  Description of Artificial Sequence: Synthetic oligonucleotide
aaucaacucucacguuucu

SEQ ID NO: 487488 - RNA, 19 nt, Artificial Sequence
  Description of Artificial Sequence: Synthetic oligonucleotide
gguuacaacgccgacuccg

SEQ ID NO: 487489 - RNA, 19 nt, Artificial Sequence
  Description of Artificial Sequence: Synthetic oligonucleotide
ggcuaucucgcacaaaggc

SEQ ID NO: 487490 - RNA, 19 nt, Artificial Sequence
  Description of Artificial Sequence: Synthetic oligonucleotide
cuccacuaaagccuccuag

SEQ ID NO: 487491 - RNA, 19 nt, Artificial Sequence
  Description of Artificial Sequence: Synthetic oligonucleotide
cuauacugcucucaggaga

SEQ ID NO: 487492 - RNA, 19 nt, Artificial Sequence
  Description of Artificial Sequence: Synthetic oligonucleotide
aguguagaaauuacuggcu

SEQ ID NO: 487493 - RNA, 19 nt, Artificial Sequence
  Description of Artificial Sequence: Synthetic oligonucleotide
agcgcuaaccaccaaggaa

SEQ ID NO: 487494 - RNA, 19 nt, Artificial Sequence
  Description of Artificial Sequence: Synthetic oligonucleotide
caucauuacuccauauaca

SEQ ID NO: 487495 - RNA, 19 nt, Artificial Sequence
  Description of Artificial Sequence: Synthetic oligonucleotide
agaccccucuuuuguauuc

SEQ ID NO: 487496 - RNA, 19 nt, Artificial Sequence
  Description of Artificial Sequence: Synthetic oligonucleotide
acucucacguuucucuaug

SEQ ID NO: 487497 - RNA, 19 nt, Artificial Sequence
  Description of Artificial Sequence: Synthetic oligonucleotide
uguuuguaguuaaccuuuc

SEQ ID NO: 487498 - RNA, 19 nt, Artificial Sequence
  Description of Artificial Sequence: Synthetic oligonucleotide
acuaacagccuggaccuag

SEQ ID NO: 487499 - RNA, 19 nt, Artificial Sequence
  Description of Artificial Sequence: Synthetic oligonucleotide
cuaagauacucaaaaugua

SEQ ID NO: 487500 - RNA, 19 nt, Artificial Sequence
  Description of Artificial Sequence: Synthetic oligonucleotide
ucucgcacaaaggcgcgcg

SEQ ID NO: 487501 - RNA, 19 nt, Artificial Sequence
  Description of Artificial Sequence: Synthetic oligonucleotide
uuacuagcaggagacuaca

SEQ ID NO: 487502 - RNA, 19 nt, Artificial Sequence
  Description of Artificial Sequence: Synthetic oligonucleotide
aacucucacguuucucuau

SEQ ID NO: 487503 - RNA, 19 nt, Artificial Sequence
  Description of Artificial Sequence: Synthetic oligonucleotide
uggaccuaggacuccuggc

SEQ ID NO: 487504 - RNA, 19 nt, Artificial Sequence
  Description of Artificial Sequence: Synthetic oligonucleotide
aauuccggggcguuuucuu

SEQ ID NO: 487505 - RNA, 19 nt, Artificial Sequence
  Description of Artificial Sequence: Synthetic oligonucleotide
cuacuuuacuagcaggaga

SEQ ID NO: 487506 - RNA, 19 nt, Artificial Sequence
  Description of Artificial Sequence: Synthetic oligonucleotide
augcuagcuagcaugagga

SEQ ID NO: 487507 - RNA, 19 nt, Artificial Sequence
  Description of Artificial Sequence: Synthetic oligonucleotide
uuaaggcucccuuuauaua

SEQ ID NO: 487508 - RNA, 19 nt, Artificial Sequence
  Description of Artificial Sequence: Synthetic oligonucleotide
uuuaucuacuuggucucgu

SEQ ID NO: 487509 - RNA, 19 nt, Artificial Sequence
  Description of Artificial Sequence: Synthetic oligonucleotide
aguuaaccuuuccccagug

SEQ ID NO: 487510 - RNA, 19 nt, Artificial Sequence
  Description of Artificial Sequence: Synthetic oligonucleotide
gcuaucucgcacaaaggcg

SEQ ID NO: 487511 - RNA, 19 nt, Artificial Sequence
  Description of Artificial Sequence: Synthetic oligonucleotide
uagucaagaccaucccuac

SEQ ID NO: 487512 - RNA, 19 nt, Artificial Sequence
  Description of Artificial Sequence: Synthetic oligonucleotide
auauuauuuguaacuuaga

SEQ ID NO: 487513 - RNA, 19 nt, Artificial Sequence
  Description of Artificial Sequence: Synthetic oligonucleotide
ucgggguuuggacuauaca

SEQ ID NO: 487514 - RNA, 19 nt, Artificial Sequence
  Description of Artificial Sequence: Synthetic oligonucleotide
gucuagugugcuaaucaag

SEQ ID NO: 487515 - RNA, 19 nt, Artificial Sequence
  Description of Artificial Sequence: Synthetic oligonucleotide
aggucugaaugcaaccagg

SEQ ID NO: 487516 - RNA, 19 nt, Artificial Sequence
  Description of Artificial Sequence: Synthetic oligonucleotide
cuaacaccugacaucauua

SEQ ID NO: 487517 - RNA, 19 nt, Artificial Sequence
  Description of Artificial Sequence: Synthetic oligonucleotide
acccucgauucuguaauac

SEQ ID NO: 487518 - RNA, 19 nt, Artificial Sequence
  Description of Artificial Sequence: Synthetic oligonucleotide
uuuggacuauacaguguua

SEQ ID NO: 487519 - RNA, 19 nt, Artificial Sequence
  Description of Artificial Sequence: Synthetic oligonucleotide
uaucauccauuuacuucgu

SEQ ID NO: 487520 - RNA, 19 nt, Artificial Sequence
  Description of Artificial Sequence: Synthetic oligonucleotide
agaugacacuuugugauaa

SEQ ID NO: 487521 - RNA, 19 nt, Artificial Sequence
  Description of Artificial Sequence: Synthetic oligonucleotide
acaguguuaggagcaaaga

SEQ ID NO: 487522 - RNA, 19 nt, Artificial Sequence
  Description of Artificial Sequence: Synthetic oligonucleotide
cuaguuuaauccuccgaaa

SEQ ID NO: 487523 - RNA, 19 nt, Artificial Sequence
  Description of Artificial Sequence: Synthetic oligonucleotide
uauacaguguuaggagcaa

SEQ ID NO: 487524 - RNA, 19 nt, Artificial Sequence
  Description of Artificial Sequence: Synthetic oligonucleotide
cgggguuuggacuauacag

SEQ ID NO: 487525 - RNA, 19 nt, Artificial Sequence
  Description of Artificial Sequence: Synthetic oligonucleotide
aagaccccucuuuuguauu

SEQ ID NO: 487526 - RNA, 19 nt, Artificial Sequence
  Description of Artificial Sequence: Synthetic oligonucleotide
auauuuugcaugagaacuu

SEQ ID NO: 487527 - RNA, 19 nt, Artificial Sequence
  Description of Artificial Sequence: Synthetic oligonucleotide
uuuccgcuguaaucaacuc

SEQ ID NO: 487528 - RNA, 19 nt, Artificial Sequence
  Description of Artificial Sequence: Synthetic oligonucleotide
aaauuccggggcguuuucu

SEQ ID NO: 487529 - RNA, 19 nt, Artificial Sequence
  Description of Artificial Sequence: Synthetic oligonucleotide
caguguuaggagcaaagaa

SEQ ID NO: 487530 - RNA, 19 nt, Artificial Sequence
  Description of Artificial Sequence: Synthetic oligonucleotide
guagucaagaccaucccua

SEQ ID NO: 487531 - RNA, 19 nt, Artificial Sequence
  Description of Artificial Sequence: Synthetic oligonucleotide
uccacccucgauucuguaa

SEQ ID NO: 487532 - RNA, 19 nt, Artificial Sequence
  Description of Artificial Sequence: Synthetic oligonucleotide
uccuagaaauggaucucua

SEQ ID NO: 487533 - RNA, 19 nt, Artificial Sequence
  Description of Artificial Sequence: Synthetic oligonucleotide
cugagcugaugugagcaag

SEQ ID NO: 487534 - RNA, 19 nt, Artificial Sequence
  Description of Artificial Sequence: Synthetic oligonucleotide
gacguagcagaagccauca

SEQ ID NO: 487535 - RNA, 19 nt, Artificial Sequence
  Description of Artificial Sequence: Synthetic oligonucleotide
ccccauagcgcuaaccacc

SEQ ID NO: 487536 - RNA, 19 nt, Artificial Sequence
  Description of Artificial Sequence: Synthetic oligonucleotide
gagaacaaucaguaugcau

SEQ ID NO: 487537 - RNA, 19 nt, Artificial Sequence
  Description of Artificial Sequence: Synthetic oligonucleotide
cuauggagaaguacuaaau

SEQ ID NO: 487538 - RNA, 19 nt, Artificial Sequence
  Description of Artificial Sequence: Synthetic oligonucleotide
gagcugaugugagcaagug

SEQ ID NO: 487539 - RNA, 19 nt, Artificial Sequence
  Description of Artificial Sequence: Synthetic oligonucleotide
uggcccgaccccauagcgc

SEQ ID NO: 487540 - RNA, 19 nt, Artificial Sequence
  Description of Artificial Sequence: Synthetic oligonucleotide
gcgguuacaacgccgacuc

SEQ ID NO: 487541 - RNA, 19 nt, Artificial Sequence
  Description of Artificial Sequence: Synthetic oligonucleotide
agccuccuagaaauggauc

SEQ ID NO: 487542 - RNA, 19 nt, Artificial Sequence
  Description of Artificial Sequence: Synthetic oligonucleotide
acaguaucuaauggcccca

SEQ ID NO: 487543 - RNA, 19 nt, Artificial Sequence
  Description of Artificial Sequence: Synthetic oligonucleotide
aucucgcacaaaggcgcgc

SEQ ID NO: 487544 - RNA, 19 nt, Artificial Sequence
  Description of Artificial Sequence: Synthetic oligonucleotide
gacaaguccucgggguuug

SEQ ID NO: 487545 - RNA, 19 nt, Artificial Sequence
  Description of Artificial Sequence: Synthetic oligonucleotide
cucgggguuuggacuauac

SEQ ID NO: 487546 - RNA, 19 nt, Artificial Sequence
  Description of Artificial Sequence: Synthetic oligonucleotide
gaagccaguccggcucugg

SEQ ID NO: 487547 - RNA, 19 nt, Artificial Sequence
  Description of Artificial Sequence: Synthetic oligonucleotide
aggcuaucucgcacaaagg

SEQ ID NO: 487548 - RNA, 19 nt, Artificial Sequence
  Description of Artificial Sequence: Synthetic oligonucleotide
uuacaacgccgacuccgaa

SEQ ID NO: 487549 - RNA, 19 nt, Artificial Sequence
  Description of Artificial Sequence: Synthetic oligonucleotide
aggggcaagaccccucuuu

SEQ ID NO: 487550 - RNA, 19 nt, Artificial Sequence
  Description of Artificial Sequence: Synthetic oligonucleotide
ugcccggcaccucagcuuu

SEQ ID NO: 487551 - RNA, 19 nt, Artificial Sequence
  Description of Artificial Sequence: Synthetic oligonucleotide
ucgcacaaaggcgcgcggc

SEQ ID NO: 487552 - RNA, 19 nt, Artificial Sequence
  Description of Artificial Sequence: Synthetic oligonucleotide
gguguaugaguucacccua

SEQ ID NO: 487553 - RNA, 19 nt, Artificial Sequence
  Description of Artificial Sequence: Synthetic oligonucleotide
guuacaacgccgacuccga

SEQ ID NO: 487554 - RNA, 19 nt, Artificial Sequence
  Description of Artificial Sequence: Synthetic oligonucleotide
cauuaaggcucccuuuaua

SEQ ID NO: 487555 - RNA, 19 nt, Artificial Sequence
  Description of Artificial Sequence: Synthetic oligonucleotide
uucgcggugguagccggca

SEQ ID NO: 487556 - RNA, 19 nt, Artificial Sequence
  Description of Artificial Sequence: Synthetic oligonucleotide
cucgcacaaaggcgcgcgg

SEQ ID NO: 487557 - RNA, 19 nt, Artificial Sequence
  Description of Artificial Sequence: Synthetic oligonucleotide
ccuccgaaagaacuaagga

SEQ ID NO: 487558 - RNA, 19 nt, Artificial Sequence
  Description of Artificial Sequence: Synthetic oligonucleotide
agcaggcuaucucgcacaa

SEQ ID NO: 487559 - RNA, 19 nt, Artificial Sequence
  Description of Artificial Sequence: Synthetic oligonucleotide
gacuccuaaaagccucacu

SEQ ID NO: 487560 - RNA, 19 nt, Artificial Sequence
  Description of Artificial Sequence: Synthetic oligonucleotide
agcuagugucuagugugcu

SEQ ID NO: 487561 - RNA, 19 nt, Artificial Sequence
  Description of Artificial Sequence: Synthetic oligonucleotide
gccuaauuaguucaggauu

SEQ ID NO: 487562 - RNA, 19 nt, Artificial Sequence
  Description of Artificial Sequence: Synthetic oligonucleotide
gccuccuagaaauggaucu

SEQ ID NO: 487563 - RNA, 19 nt, Artificial Sequence
  Description of Artificial Sequence: Synthetic oligonucleotide
uccggggcguuuucuugcu

SEQ ID NO: 487564 - RNA, 19 nt, Artificial Sequence
  Description of Artificial Sequence: Synthetic oligonucleotide
ccgacggcgguuacaacgc

SEQ ID NO: 487565 - RNA, 19 nt, Artificial Sequence
  Description of Artificial Sequence: Synthetic oligonucleotide
ccucuuuuggcccgacccc

SEQ ID NO: 487566 - RNA, 19 nt, Artificial Sequence
  Description of Artificial Sequence: Synthetic oligonucleotide
ggucugaaugcaaccagga

SEQ ID NO: 487567 - RNA, 19 nt, Artificial Sequence
  Description of Artificial Sequence: Synthetic oligonucleotide
uggcucggccaugauauuu

SEQ ID NO: 487568 - RNA, 19 nt, Artificial Sequence
  Description of Artificial Sequence: Synthetic oligonucleotide
gucucaagcuaugaaucua

SEQ ID NO: 487569 - RNA, 19 nt, Artificial Sequence
  Description of Artificial Sequence: Synthetic oligonucleotide
gguagccggcaccuugacc

SEQ ID NO: 487570 - RNA, 19 nt, Artificial Sequence
  Description of Artificial Sequence: Synthetic oligonucleotide
acggcgguuacaacgccga

SEQ ID NO: 487571 - RNA, 19 nt, Artificial Sequence
  Description of Artificial Sequence: Synthetic oligonucleotide
caccuugaccgccggggug

SEQ ID NO: 487572 - RNA, 19 nt, Artificial Sequence
  Description of Artificial Sequence: Synthetic oligonucleotide
ggaccuaggacuccuggcu

SEQ ID NO: 487573 - RNA, 19 nt, Artificial Sequence
  Description of Artificial Sequence: Synthetic oligonucleotide
auuagcuucuggggccuaa

SEQ ID NO: 487574 - RNA, 19 nt, Artificial Sequence
  Description of Artificial Sequence: Synthetic oligonucleotide
cuggcuaaaucaucucuau

SEQ ID NO: 487575 - RNA, 19 nt, Artificial Sequence
  Description of Artificial Sequence: Synthetic oligonucleotide
gggcaagaccccucuuuug

SEQ ID NO: 487576 - RNA, 19 nt, Artificial Sequence
  Description of Artificial Sequence: Synthetic oligonucleotide
caacgccgacuccgaagcc

SEQ ID NO: 487577 - RNA, 19 nt, Artificial Sequence
  Description of Artificial Sequence: Synthetic oligonucleotide
guaacacccucuaguuuaa

SEQ ID NO: 487578 - RNA, 19 nt, Artificial Sequence
  Description of Artificial Sequence: Synthetic oligonucleotide
acaaguccucgggguuugg

SEQ ID NO: 487579 - RNA, 19 nt, Artificial Sequence
  Description of Artificial Sequence: Synthetic oligonucleotide
ggccuaauuaguucaggau

SEQ ID NO: 487580 - RNA, 19 nt, Artificial Sequence
  Description of Artificial Sequence: Synthetic oligonucleotide
gugguagccggcaccuuga

SEQ ID NO: 487581 - RNA, 19 nt, Artificial Sequence
  Description of Artificial Sequence: Synthetic oligonucleotide
ccuaggacuccuggcuugg

SEQ ID NO: 487582 - RNA, 19 nt, Artificial Sequence
  Description of Artificial Sequence: Synthetic oligonucleotide
uuccgacggcgguuacaac

SEQ ID NO: 487583 - RNA, 19 nt, Artificial Sequence
  Description of Artificial Sequence: Synthetic oligonucleotide
cugccgcuuuaauagcucu

SEQ ID NO: 487584 - RNA, 19 nt, Artificial Sequence
  Description of Artificial Sequence: Synthetic oligonucleotide
cccauagcgcuaaccacca

SEQ ID NO: 487585 - RNA, 19 nt, Artificial Sequence
  Description of Artificial Sequence: Synthetic oligonucleotide
gauagaacaugggccuguu

SEQ ID NO: 487586 - RNA, 19 nt, Artificial Sequence
  Description of Artificial Sequence: Synthetic oligonucleotide
ggcccgaccccauagcgcu

SEQ ID NO: 487587 - RNA, 19 nt, Artificial Sequence
  Description of Artificial Sequence: Synthetic oligonucleotide
guucgcggugguagccggc

SEQ ID NO: 487588 - RNA, 19 nt, Artificial Sequence
  Description of Artificial Sequence: Synthetic oligonucleotide
cuugaccgccgggguggcg

SEQ ID NO: 487589 - RNA, 19 nt, Artificial Sequence
  Description of Artificial Sequence: Synthetic oligonucleotide
ccgccguucgcggugguag

SEQ ID NO: 487590 - RNA, 19 nt, Artificial Sequence
  Description of Artificial Sequence: Synthetic oligonucleotide
cguucgcggugguagccgg

SEQ ID NO: 487591 - RNA, 19 nt, Artificial Sequence
  Description of Artificial Sequence: Synthetic oligonucleotide
gcgcgcuccgccguucgcg

SEQ ID NO: 487592 - RNA, 19 nt, Artificial Sequence
  Description of Artificial Sequence: Synthetic oligonucleotide
ccuaacaccugacaucauu

SEQ ID NO: 487593 - RNA, 19 nt, Artificial Sequence
  Description of Artificial Sequence: Synthetic oligonucleotide
ggcgguuacaacgccgacu

SEQ ID NO: 487594 - RNA, 19 nt, Artificial Sequence
  Description of Artificial Sequence: Synthetic oligonucleotide
gcuccgccguucgcggugg

SEQ ID NO: 487595 - RNA, 19 nt, Artificial Sequence
  Description of Artificial Sequence: Synthetic oligonucleotide
uccgccguucgcgguggua

SEQ ID NO: 487596 - RNA, 19 nt, Artificial Sequence
  Description of Artificial Sequence: Synthetic oligonucleotide
cccucgauucuguaauacu

SEQ ID NO: 487597 - RNA, 19 nt, Artificial Sequence
  Description of Artificial Sequence: Synthetic oligonucleotide
ccgcuguaaucaacucuca

SEQ ID NO: 487598 - RNA, 19 nt, Artificial Sequence
  Description of Artificial Sequence: Synthetic oligonucleotide
ggcgcgcuccgccguucgc

SEQ ID NO: 487599 - RNA, 19 nt, Artificial Sequence
  Description of Artificial Sequence: Synthetic oligonucleotide
ccauuaaggcucccuuuau

SEQ ID NO: 487600 - RNA, 19 nt, Artificial Sequence
  Description of Artificial Sequence: Synthetic oligonucleotide
gcuaaccaccaaggaauau

SEQ ID NO: 487601 - RNA, 19 nt, Artificial Sequence
  Description of Artificial Sequence: Synthetic oligonucleotide
cgguuacaacgccgacucc

SEQ ID NO: 487602 - RNA, 19 nt, Artificial Sequence
  Description of Artificial Sequence: Synthetic oligonucleotide
cccggcaccucagcuuuuc

SEQ ID NO: 487603 - RNA, 19 nt, Artificial Sequence
  Description of Artificial Sequence: Synthetic oligonucleotide
cgcuccgccguucgcggug

SEQ ID NO: 487604 - RNA, 19 nt, Artificial Sequence
  Description of Artificial Sequence: Synthetic oligonucleotide
ccuugaccgccgggguggc

SEQ ID NO: 487605 - RNA, 19 nt, Artificial Sequence
  Description of Artificial Sequence: Synthetic oligonucleotide
gcaggcuaucucgcacaaa

SEQ ID NO: 487606 - RNA, 19 nt, Artificial Sequence
  Description of Artificial Sequence: Synthetic oligonucleotide
ccaucccuaccaacagcgu

SEQ ID NO: 487607 - RNA, 19 nt, Artificial Sequence
  Description of Artificial Sequence: Synthetic oligonucleotide
ccggggcguuuucuugcuc

SEQ ID NO: 487608 - RNA, 19 nt, Artificial Sequence
  Description of Artificial Sequence: Synthetic oligonucleotide
cuggcucggccaugauauu

SEQ ID NO: 487609 - RNA, 19 nt, Artificial Sequence
  Description of Artificial Sequence: Synthetic oligonucleotide
cccgaccccauagcgcuaa

SEQ ID NO: 487610 - RNA, 19 nt, Artificial Sequence
  Description of Artificial Sequence: Synthetic oligonucleotide
cggcgguuacaacgccgac

SEQ ID NO: 487611 - RNA, 19 nt, Artificial Sequence
  Description of Artificial Sequence: Synthetic oligonucleotide
cccaugccugcaguauaaa

SEQ ID NO: 487612 - RNA, 19 nt, Artificial Sequence
  Description of Artificial Sequence: Synthetic oligonucleotide
cggcgcgcuccgccguucg

SEQ ID NO: 487613 - RNA, 19 nt, Artificial Sequence
  Description of Artificial Sequence: Synthetic oligonucleotide
ccgcuuuaauagcucuauu

SEQ ID NO: 487614 - RNA, 19 nt, Artificial Sequence
  Description of Artificial Sequence: Synthetic oligonucleotide
ccuuuccccagugguguau

SEQ ID NO: 487615 - RNA, 19 nt, Artificial Sequence
  Description of Artificial Sequence: Synthetic oligonucleotide
cgguuccgacggcgguuac

SEQ ID NO: 487616 - RNA, 19 nt, Artificial Sequence
  Description of Artificial Sequence: Synthetic oligonucleotide
cccuaacaccugacaucau

SEQ ID NO: 487617 - RNA, 19 nt, Artificial Sequence
  Description of Artificial Sequence: Synthetic oligonucleotide
cggugguagccggcaccuu

SEQ ID NO: 487618 - RNA, 19 nt, Artificial Sequence
  Description of Artificial Sequence: Synthetic oligonucleotide
aaacggaccaaauauacag

SEQ ID NO: 487619 - RNA, 19 nt, Artificial Sequence
  Description of Artificial Sequence: Synthetic oligonucleotide
aacagauaaacagagugcc

SEQ ID NO: 487620 - RNA, 19 nt, Artificial Sequence
  Description of Artificial Sequence: Synthetic oligonucleotide
aucuaauauauguugaugg

SEQ ID NO: 487621 - RNA, 19 nt, Artificial Sequence
  Description of Artificial Sequence: Synthetic oligonucleotide
agauacaugacuguuaggc

SEQ ID NO: 487622 - RNA, 19 nt, Artificial Sequence
  Description of Artificial Sequence: Synthetic oligonucleotide
uugaaaguuacuuagguga

SEQ ID NO: 487623 - RNA, 19 nt, Artificial Sequence
  Description of Artificial Sequence: Synthetic oligonucleotide
aguuuugaagacuucaugg

SEQ ID NO: 487624 - RNA, 19 nt, Artificial Sequence
  Description of Artificial Sequence: Synthetic oligonucleotide
uguaguguacauuacauca

SEQ ID NO: 487625 - RNA, 19 nt, Artificial Sequence
  Description of Artificial Sequence: Synthetic oligonucleotide
uuugggacuuucaagaucc

SEQ ID NO: 487626 - RNA, 19 nt, Artificial Sequence
  Description of Artificial Sequence: Synthetic oligonucleotide
aagaccucuauuuucaaug

SEQ ID NO: 487627 - RNA, 19 nt, Artificial Sequence
  Description of Artificial Sequence: Synthetic oligonucleotide
aauugaaaguuacuuaggu

SEQ ID NO: 487628 - RNA, 19 nt, Artificial Sequence
  Description of Artificial Sequence: Synthetic oligonucleotide
uuaaguuggcgaaucauag

SEQ ID NO: 487629 - RNA, 19 nt, Artificial Sequence
  Description of Artificial Sequence: Synthetic oligonucleotide
aaucauagcuucuacaaau

SEQ ID NO: 487630 - RNA, 19 nt, Artificial Sequence
  Description of Artificial Sequence: Synthetic oligonucleotide
ucagauagaaaacggacca

SEQ ID NO: 487631 - RNA, 19 nt, Artificial Sequence
  Description of Artificial Sequence: Synthetic oligonucleotide
uagaaaacggaccaaauau

SEQ ID NO: 487632 - RNA, 19 nt, Artificial Sequence
  Description of Artificial Sequence: Synthetic oligonucleotide
auauaacucuuuuccaacc

SEQ ID NO: 487633 - RNA, 19 nt, Artificial Sequence
  Description of Artificial Sequence: Synthetic oligonucleotide
uccucuaugacaaaccucu

SEQ ID NO: 487634 - RNA, 19 nt, Artificial Sequence
  Description of Artificial Sequence: Synthetic oligonucleotide
uaguuauuugcuuuuagug

SEQ ID NO: 487635 - RNA, 19 nt, Artificial Sequence
  Description of Artificial Sequence: Synthetic oligonucleotide
uuagugauucuuuaaguug

SEQ ID NO: 487636 - RNA, 19 nt, Artificial Sequence
  Description of Artificial Sequence: Synthetic oligonucleotide
agauuucaucauuaguugc

SEQ ID NO: 487637 - RNA, 19 nt, Artificial Sequence
  Description of Artificial Sequence: Synthetic oligonucleotide
aaguuggcgaaucauagcu

SEQ ID NO: 487638 - RNA, 19 nt, Artificial Sequence
  Description of Artificial Sequence: Synthetic oligonucleotide
acacauguuguacucaucg

SEQ ID NO: 487639 - RNA, 19 nt, Artificial Sequence
  Description of Artificial Sequence: Synthetic oligonucleotide
ucuaugacaaaccucucca

SEQ ID NO: 487640 - RNA, 19 nt, Artificial Sequence
  Description of Artificial Sequence: Synthetic oligonucleotide
gauuuuaugaugcagugaa

SEQ ID NO: 487641 - RNA, 19 nt, Artificial Sequence
  Description of Artificial Sequence: Synthetic oligonucleotide
acauagcaaccauagaugg
